United States Patent Application Publication US 2018/0305689 A1 - sequence listing, part 165

SEQ ID NO: 2417726 - RNA, 19 nt, Artificial Sequence
  Description of Artificial Sequence: Synthetic oligonucleotide
  Sense strand starting at position 479 of SEQ ID NO: 1886562
ugggauuguguuuggaaac

SEQ ID NO: 2417727 - RNA, 19 nt, Artificial Sequence
  Description of Artificial Sequence: Synthetic oligonucleotide
  Antisense strand to SEQ ID NO: 2417726
guuuccaaacacaauccca

SEQ ID NO: 2417728 - RNA, 19 nt, Artificial Sequence
  Description of Artificial Sequence: Synthetic oligonucleotide
  Sense strand starting at position 519 of SEQ ID NO: 1886562
uuugcuggccuccagauaa

SEQ ID NO: 2417729 - RNA, 19 nt, Artificial Sequence
  Description of Artificial Sequence: Synthetic oligonucleotide
  Antisense strand to SEQ ID NO: 2417728
uuaucuggaggccagcaaa

SEQ ID NO: 2417730 - RNA, 19 nt, Artificial Sequence
  Description of Artificial Sequence: Synthetic oligonucleotide
  Sense strand starting at position 526 of SEQ ID NO: 1886562
gccuccagauaauuaguaa

SEQ ID NO: 2417731 - RNA, 19 nt, Artificial Sequence
  Description of Artificial Sequence: Synthetic oligonucleotide
  Antisense strand to SEQ ID NO: 2417730
uuacuaauuaucuggaggc

SEQ ID NO: 2417732 - RNA, 19 nt, Artificial Sequence
  Description of Artificial Sequence: Synthetic oligonucleotide
  Sense strand starting at position 589 of SEQ ID NO: 1886562
uucuguuaauaugugaaug

SEQ ID NO: 2417733 - RNA, 19 nt, Artificial Sequence
  Description of Artificial Sequence: Synthetic oligonucleotide
  Antisense strand to SEQ ID NO: 2417732
cauucacauauuaacagaa

SEQ ID NO: 2417734 - RNA, 19 nt, Artificial Sequence
  Description of Artificial Sequence: Synthetic oligonucleotide
  Sense strand starting at position 594 of SEQ ID NO: 1886562
uuaauaugugaauguccau

SEQ ID NO: 2417735 - RNA, 19 nt, Artificial Sequence
  Description of Artificial Sequence: Synthetic oligonucleotide
  Antisense strand to SEQ ID NO: 2417734
auggacauucacauauuaa

SEQ ID NO: 2417736 - RNA, 19 nt, Artificial Sequence
  Description of Artificial Sequence: Synthetic oligonucleotide
  Sense strand starting at position 597 of SEQ ID NO: 1886562
auaugugaauguccaugaa

SEQ ID NO: 2417737 - RNA, 19 nt, Artificial Sequence
  Description of Artificial Sequence: Synthetic oligonucleotide
  Antisense strand to SEQ ID NO: 2417736
uucauggacauucacauau

SEQ ID NO: 2417738 - RNA, 19 nt, Artificial Sequence
  Description of Artificial Sequence: Synthetic oligonucleotide
  Sense strand starting at position 601 of SEQ ID NO: 1886562
gugaauguccaugaagguu

SEQ ID NO: 2417739 - RNA, 19 nt, Artificial Sequence
  Description of Artificial Sequence: Synthetic oligonucleotide
  Antisense strand to SEQ ID NO: 2417738
aaccuucauggacauucac

SEQ ID NO: 2417740 - RNA, 19 nt, Artificial Sequence
  Description of Artificial Sequence: Synthetic oligonucleotide
  Sense strand starting at position 613 of SEQ ID NO: 1886562
gaagguugguugguauaua

SEQ ID NO: 2417741 - RNA, 19 nt, Artificial Sequence
  Description of Artificial Sequence: Synthetic oligonucleotide
  Antisense strand to SEQ ID NO: 2417740
uauauaccaaccaaccuuc

SEQ ID NO: 2417742 - RNA, 19 nt, Artificial Sequence
  Description of Artificial Sequence: Synthetic oligonucleotide
  Sense strand starting at position 679 of SEQ ID NO: 1886562
cugcuuuaaguagaaacau

SEQ ID NO: 2417743 - RNA, 19 nt, Artificial Sequence
  Description of Artificial Sequence: Synthetic oligonucleotide
  Antisense strand to SEQ ID NO: 2417742
auguuucuacuuaaagcag

SEQ ID NO: 2417744 - RNA, 19 nt, Artificial Sequence
  Description of Artificial Sequence: Synthetic oligonucleotide
  Sense strand starting at position 753 of SEQ ID NO: 1886562
agcacuguugccuggauuu

SEQ ID NO: 2417745 - RNA, 19 nt, Artificial Sequence
  Description of Artificial Sequence: Synthetic oligonucleotide
  Antisense strand to SEQ ID NO: 2417744
aaauccaggcaacagugcu

SEQ ID NO: 2417746 - RNA, 19 nt, Artificial Sequence
  Description of Artificial Sequence: Synthetic oligonucleotide
  Sense strand starting at position 805 of SEQ ID NO: 1886562
auugucaucguggaauuga

SEQ ID NO: 2417747 - RNA, 19 nt, Artificial Sequence
  Description of Artificial Sequence: Synthetic oligonucleotide
  Antisense strand to SEQ ID NO: 2417746
ucaauuccacgaugacaau

SEQ ID NO: 2417748 - RNA, 19 nt, Artificial Sequence
  Description of Artificial Sequence: Synthetic oligonucleotide
  Sense strand starting at position 848 of SEQ ID NO: 1886562
ggugauaaaucucuccuua

SEQ ID NO: 2417749 - RNA, 19 nt, Artificial Sequence
  Description of Artificial Sequence: Synthetic oligonucleotide
  Antisense strand to SEQ ID NO: 2417748
uaaggagagauuuaucacc

SEQ ID NO: 2417750 - RNA, 19 nt, Artificial Sequence
  Description of Artificial Sequence: Synthetic oligonucleotide
  Sense strand starting at position 944 of SEQ ID NO: 1886562
ucagguacaucagugagua

SEQ ID NO: 2417751 - RNA, 19 nt, Artificial Sequence
  Description of Artificial Sequence: Synthetic oligonucleotide
  Antisense strand to SEQ ID NO: 2417750
uacucacugauguaccuga

SEQ ID NO: 2417752 - RNA, 19 nt, Artificial Sequence
  Description of Artificial Sequence: Synthetic oligonucleotide
  Sense strand starting at position 945 of SEQ ID NO: 1886562
cagguacaucagugaguaa

SEQ ID NO: 2417753 - RNA, 19 nt, Artificial Sequence
  Description of Artificial Sequence: Synthetic oligonucleotide
  Antisense strand to SEQ ID NO: 2417752
uuacucacugauguaccug

SEQ ID NO: 2417754 - RNA, 19 nt, Artificial Sequence
  Description of Artificial Sequence: Synthetic oligonucleotide
  Sense strand starting at position 946 of SEQ ID NO: 1886562
agguacaucagugaguaau

SEQ ID NO: 2417755 - RNA, 19 nt, Artificial Sequence
  Description of Artificial Sequence: Synthetic oligonucleotide
  Antisense strand to SEQ ID NO: 2417754
auuacucacugauguaccu

SEQ ID NO: 2417756 - RNA, 19 nt, Artificial Sequence
  Description of Artificial Sequence: Synthetic oligonucleotide
  Sense strand starting at position 948 of SEQ ID NO: 1886562
guacaucagugaguaauag

SEQ ID NO: 2417757 - RNA, 19 nt, Artificial Sequence
  Description of Artificial Sequence: Synthetic oligonucleotide
  Antisense strand to SEQ ID NO: 2417756
cuauuacucacugauguac

SEQ ID NO: 2417758 - RNA, 19 nt, Artificial Sequence
  Description of Artificial Sequence: Synthetic oligonucleotide
  Sense strand starting at position 949 of SEQ ID NO: 1886562
uacaucagugaguaauagu

SEQ ID NO: 2417759 - RNA, 19 nt, Artificial Sequence
  Description of Artificial Sequence: Synthetic oligonucleotide
  Antisense strand to SEQ ID NO: 2417758
acuauuacucacugaugua

SEQ ID NO: 2417760 - RNA, 19 nt, Artificial Sequence
  Description of Artificial Sequence: Synthetic oligonucleotide
  Sense strand starting at position 1284 of SEQ ID NO: 1886562
guugccuuccuggagaaac

SEQ ID NO: 2417761 - RNA, 19 nt, Artificial Sequence
  Description of Artificial Sequence: Synthetic oligonucleotide
  Antisense strand to SEQ ID NO: 2417760
guuucuccaggaaggcaac

SEQ ID NO: 2417762 - RNA, 19 nt, Artificial Sequence
  Description of Artificial Sequence: Synthetic oligonucleotide
  Sense strand starting at position 1304 of SEQ ID NO: 1886562
gauuaaagaugauauagag

SEQ ID NO: 2417763 - RNA, 19 nt, Artificial Sequence
  Description of Artificial Sequence: Synthetic oligonucleotide
  Antisense strand to SEQ ID NO: 2417762
cucuauaucaucuuuaauc

SEQ ID NO: 2417764 - RNA, 19 nt, Artificial Sequence
  Description of Artificial Sequence: Synthetic oligonucleotide
  Sense strand starting at position 1453 of SEQ ID NO: 1886562
uguaccacauguuuaauua

SEQ ID NO: 2417765 - RNA, 19 nt, Artificial Sequence
  Description of Artificial Sequence: Synthetic oligonucleotide
  Antisense strand to SEQ ID NO: 2417764
uaauuaaacaugugguaca

SEQ ID NO: 2417766 - RNA, 19 nt, Artificial Sequence
  Description of Artificial Sequence: Synthetic oligonucleotide
  Sense strand starting at position 1454 of SEQ ID NO: 1886562
guaccacauguuuaauuaa

SEQ ID NO: 2417767 - RNA, 19 nt, Artificial Sequence
  Description of Artificial Sequence: Synthetic oligonucleotide
  Antisense strand to SEQ ID NO: 2417766
uuaauuaaacaugugguac

SEQ ID NO: 2417768 - RNA, 19 nt, Artificial Sequence
  Description of Artificial Sequence: Synthetic oligonucleotide
  Sense strand starting at position 2103 of SEQ ID NO: 1886562
uuguacugacauuguaaga

SEQ ID NO: 2417769 - RNA, 19 nt, Artificial Sequence
  Description of Artificial Sequence: Synthetic oligonucleotide
  Antisense strand to SEQ ID NO: 2417768
ucuuacaaugucaguacaa

SEQ ID NO: 2417770 - RNA, 19 nt, Artificial Sequence
  Description of Artificial Sequence: Synthetic oligonucleotide
  Sense strand starting at position 2427 of SEQ ID NO: 1886562
ugucauuuauaauaggauc

SEQ ID NO: 2417771 - RNA, 19 nt, Artificial Sequence
  Description of Artificial Sequence: Synthetic oligonucleotide
  Antisense strand to SEQ ID NO: 2417770
gauccuauuauaaaugaca

SEQ ID NO: 2417772 - RNA, 19 nt, Artificial Sequence
  Description of Artificial Sequence: Synthetic oligonucleotide
  Sense strand starting at position 2486 of SEQ ID NO: 1886562
augcaagaucuguacauug

SEQ ID NO: 2417773 - RNA, 19 nt, Artificial Sequence
  Description of Artificial Sequence: Synthetic oligonucleotide
  Antisense strand to SEQ ID NO: 2417772
caauguacagaucuugcau

SEQ ID NO: 2417774 - RNA, 19 nt, Artificial Sequence
  Description of Artificial Sequence: Synthetic oligonucleotide
  Sense strand starting at position 2662 of SEQ ID NO: 1886562
agaacuugaugagcuaauu

SEQ ID NO: 2417775 - RNA, 19 nt, Artificial Sequence
  Description of Artificial Sequence: Synthetic oligonucleotide
  Antisense strand to SEQ ID NO: 2417774
aauuagcucaucaaguucu

SEQ ID NO: 2417776 - RNA, 19 nt, Artificial Sequence
  Description of Artificial Sequence: Synthetic oligonucleotide
  Sense strand starting at position 2751 of SEQ ID NO: 1886562
agacuuaccuugucauacu

SEQ ID NO: 2417777 - RNA, 19 nt, Artificial Sequence
  Description of Artificial Sequence: Synthetic oligonucleotide
  Antisense strand to SEQ ID NO: 2417776
aguaugacaagguaagucu

SEQ ID NO: 2417778 - RNA, 19 nt, Artificial Sequence
  Description of Artificial Sequence: Synthetic oligonucleotide
  Sense strand starting at position 2770 of SEQ ID NO: 1886562
ucaagacuucuguaaagca

SEQ ID NO: 2417779 - RNA, 19 nt, Artificial Sequence
  Description of Artificial Sequence: Synthetic oligonucleotide
  Antisense strand to SEQ ID NO: 2417778
ugcuuuacagaagucuuga

SEQ ID NO: 2417780 - RNA, 19 nt, Artificial Sequence
  Description of Artificial Sequence: Synthetic oligonucleotide
  Sense strand starting at position 2791 of SEQ ID NO: 1886562
aaguaagauugugugagau

SEQ ID NO: 2417781 - RNA, 19 nt, Artificial Sequence
  Description of Artificial Sequence: Synthetic oligonucleotide
  Antisense strand to SEQ ID NO: 2417780
aucucacacaaucuuacuu

SEQ ID NO: 2417782 - RNA, 19 nt, Artificial Sequence
  Description of Artificial Sequence: Synthetic oligonucleotide
  Sense strand starting at position 2801 of SEQ ID NO: 1886562
gugugagauuaaccaaaua

SEQ ID NO: 2417783 - RNA, 19 nt, Artificial Sequence
  Description of Artificial Sequence: Synthetic oligonucleotide
  Antisense strand to SEQ ID NO: 2417782
uauuugguuaaucucacac

SEQ ID NO: 2417784 - RNA, 19 nt, Artificial Sequence
  Description of Artificial Sequence: Synthetic oligonucleotide
  Sense strand starting at position 2845 of SEQ ID NO: 1886562
augugaaguauauggacau

SEQ ID NO: 2417785 - RNA, 19 nt, Artificial Sequence
  Description of Artificial Sequence: Synthetic oligonucleotide
  Antisense strand to SEQ ID NO: 2417784
auguccauauacuucacau

SEQ ID NO: 2417786 - RNA, 19 nt, Artificial Sequence
  Description of Artificial Sequence: Synthetic oligonucleotide
  Sense strand starting at position 2872 of SEQ ID NO: 1886562
uuuacagaugccugaguaa

SEQ ID NO: 2417787 - RNA, 19 nt, Artificial Sequence
  Description of Artificial Sequence: Synthetic oligonucleotide
  Antisense strand to SEQ ID NO: 2417786
uuacucaggcaucuguaaa

SEQ ID NO: 2417788 - RNA, 19 nt, Artificial Sequence
  Description of Artificial Sequence: Synthetic oligonucleotide
  Sense strand starting at position 2875 of SEQ ID NO: 1886562
acagaugccugaguaauuc

SEQ ID NO: 2417789 - RNA, 19 nt, Artificial Sequence
  Description of Artificial Sequence: Synthetic oligonucleotide
  Antisense strand to SEQ ID NO: 2417788
gaauuacucaggcaucugu

SEQ ID NO: 2417790 - RNA, 19 nt, Artificial Sequence
  Description of Artificial Sequence: Synthetic oligonucleotide
  Sense strand starting at position 2884 of SEQ ID NO: 1886562
ugaguaauucgagggagaa

SEQ ID NO: 2417791 - RNA, 19 nt, Artificial Sequence
  Description of Artificial Sequence: Synthetic oligonucleotide
  Antisense strand to SEQ ID NO: 2417790
uucucccucgaauuacuca

SEQ ID NO: 2417792 - RNA, 19 nt, Artificial Sequence
  Description of Artificial Sequence: Synthetic oligonucleotide
  Sense strand starting at position 2915 of SEQ ID NO: 1886562
uuacaucaguggucuuaga

SEQ ID NO: 2417793 - RNA, 19 nt, Artificial Sequence
  Description of Artificial Sequence: Synthetic oligonucleotide
  Antisense strand to SEQ ID NO: 2417792
ucuaagaccacugauguaa

SEQ ID NO: 2417794 - RNA, 19 nt, Artificial Sequence
  Description of Artificial Sequence: Synthetic oligonucleotide
  Sense strand starting at position 46 of SEQ ID NO: 1886563
gcagguucaugggcucaga

SEQ ID NO: 2417795 - RNA, 19 nt, Artificial Sequence
  Description of Artificial Sequence: Synthetic oligonucleotide
  Antisense strand to SEQ ID NO: 2417794
ucugagcccaugaaccugc

SEQ ID NO: 2417796 - RNA, 19 nt, Artificial Sequence
  Description of Artificial Sequence: Synthetic oligonucleotide
  Sense strand starting at position 68 of SEQ ID NO: 1886563
ccgaaacccuuacaaagau

SEQ ID NO: 2417797 - RNA, 19 nt, Artificial Sequence
  Description of Artificial Sequence: Synthetic oligonucleotide
  Antisense strand to SEQ ID NO: 2417796
aucuuuguaaggguuucgg

SEQ ID NO: 2417798 - RNA, 19 nt, Artificial Sequence
  Description of Artificial Sequence: Synthetic oligonucleotide
  Sense strand starting at position 181 of SEQ ID NO: 1886563
cgccaaagccuggaaguaa

SEQ ID NO: 2417799 - RNA, 19 nt, Artificial Sequence
  Description of Artificial Sequence: Synthetic oligonucleotide
  Antisense strand to SEQ ID NO: 2417798
uuacuuccaggcuuuggcg

SEQ ID NO: 2417800 - RNA, 19 nt, Artificial Sequence
  Description of Artificial Sequence: Synthetic oligonucleotide
  Sense strand starting at position 322 of SEQ ID NO: 1886563
caggaugguuaccuucgaa

SEQ ID NO: 2417801 - RNA, 19 nt, Artificial Sequence
  Description of Artificial Sequence: Synthetic oligonucleotide
  Antisense strand to SEQ ID NO: 2417800
uucgaagguaaccauccug

SEQ ID NO: 2417802 - RNA, 19 nt, Artificial Sequence
  Description of Artificial Sequence: Synthetic oligonucleotide
  Sense strand starting at position 326 of SEQ ID NO: 1886563
augguuaccuucgaaggga

SEQ ID NO: 2417803 - RNA, 19 nt, Artificial Sequence
  Description of Artificial Sequence: Synthetic oligonucleotide
  Antisense strand to SEQ ID NO: 2417802
ucccuucgaagguaaccau

SEQ ID NO: 2417804 - RNA, 19 nt, Artificial Sequence
  Description of Artificial Sequence: Synthetic oligonucleotide
  Sense strand starting at position 1214 of SEQ ID NO: 1886563
guagaugacuuacugauug

SEQ ID NO: 2417805 - RNA, 19 nt, Artificial Sequence
  Description of Artificial Sequence: Synthetic oligonucleotide
  Antisense strand to SEQ ID NO: 2417804
caaucaguaagucaucuac

SEQ ID NO: 2417806 - RNA, 19 nt, Artificial Sequence
  Description of Artificial Sequence: Synthetic oligonucleotide
  Sense strand starting at position 1648 of SEQ ID NO: 1886563
gccuguuugcagcagcaga

SEQ ID NO: 2417807 - RNA, 19 nt, Artificial Sequence
  Description of Artificial Sequence: Synthetic oligonucleotide
  Antisense strand to SEQ ID NO: 2417806
ucugcugcugcaaacaggc

SEQ ID NO: 2417808 - RNA, 19 nt, Artificial Sequence
  Description of Artificial Sequence: Synthetic oligonucleotide
  Sense strand starting at position 1777 of SEQ ID NO: 1886563
gcggcguggcgucaucaua

SEQ ID NO: 2417809 - RNA, 19 nt, Artificial Sequence
  Description of Artificial Sequence: Synthetic oligonucleotide
  Antisense strand to SEQ ID NO: 2417808
uaugaugacgccacgccgc

SEQ ID NO: 2417810 - RNA, 19 nt, Artificial Sequence
  Description of Artificial Sequence: Synthetic oligonucleotide
  Sense strand starting at position 2577 of SEQ ID NO: 1886563
augggagguucucuugaac

SEQ ID NO: 2417811 - RNA, 19 nt, Artificial Sequence
  Description of Artificial Sequence: Synthetic oligonucleotide
  Antisense strand to SEQ ID NO: 2417810
guucaagagaaccucccau

SEQ ID NO: 2417812 - RNA, 19 nt, Artificial Sequence
  Description of Artificial Sequence: Synthetic oligonucleotide
  Sense strand starting at position 2913 of SEQ ID NO: 1886563
ggaagauggcuuggcaguu

SEQ ID NO: 2417813 - RNA, 19 nt, Artificial Sequence
  Description of Artificial Sequence: Synthetic oligonucleotide
  Antisense strand to SEQ ID NO: 2417812
aacugccaagccaucuucc

SEQ ID NO: 2417814 - RNA, 19 nt, Artificial Sequence
  Description of Artificial Sequence: Synthetic oligonucleotide
  Sense strand starting at position 2934 of SEQ ID NO: 1886563
ucaagacauuaugaaaguu

SEQ ID NO: 2417815 - RNA, 19 nt, Artificial Sequence
  Description of Artificial Sequence: Synthetic oligonucleotide
  Antisense strand to SEQ ID NO: 2417814
aacuuucauaaugucuuga

SEQ ID NO: 2417816 - RNA, 19 nt, Artificial Sequence
  Description of Artificial Sequence: Synthetic oligonucleotide
  Sense strand starting at position 3070 of SEQ ID NO: 1886563
aguccuagcguccaugaau

SEQ ID NO: 2417817 - RNA, 19 nt, Artificial Sequence
  Description of Artificial Sequence: Synthetic oligonucleotide
  Antisense strand to SEQ ID NO: 2417816
auucauggacgcuaggacu

SEQ ID NO: 2417818 - RNA, 19 nt, Artificial Sequence
  Description of Artificial Sequence: Synthetic oligonucleotide
  Sense strand starting at position 3073 of SEQ ID NO: 1886563
ccuagcguccaugaauaga

SEQ ID NO: 2417819 - RNA, 19 nt, Artificial Sequence
  Description of Artificial Sequence: Synthetic oligonucleotide
  Antisense strand to SEQ ID NO: 2417818
ucuauucauggacgcuagg

SEQ ID NO: 2417820 - RNA, 19 nt, Artificial Sequence
  Description of Artificial Sequence: Synthetic oligonucleotide
  Sense strand starting at position 3099 of SEQ ID NO: 1886563
cgguucaucccgcaaagga

SEQ ID NO: 2417821 - RNA, 19 nt, Artificial Sequence
  Description of Artificial Sequence: Synthetic oligonucleotide
  Antisense strand to SEQ ID NO: 2417820
uccuuugcgggaugaaccg

SEQ ID NO: 2417822 - RNA, 19 nt, Artificial Sequence
  Description of Artificial Sequence: Synthetic oligonucleotide
  Sense strand starting at position 3647 of SEQ ID NO: 1886563
acaggugagucugguaagu

SEQ ID NO: 2417823 - RNA, 19 nt, Artificial Sequence
  Description of Artificial Sequence: Synthetic oligonucleotide
  Antisense strand to SEQ ID NO: 2417822
acuuaccagacucaccugu

SEQ ID NO: 2417824 - RNA, 19 nt, Artificial Sequence
  Description of Artificial Sequence: Synthetic oligonucleotide
  Sense strand starting at position 3649 of SEQ ID NO: 1886563
aggugagucugguaaguuc

SEQ ID NO: 2417825 - RNA, 19 nt, Artificial Sequence
  Description of Artificial Sequence: Synthetic oligonucleotide
  Antisense strand to SEQ ID NO: 2417824
gaacuuaccagacucaccu

SEQ ID NO: 2417826 - RNA, 19 nt, Artificial Sequence
  Description of Artificial Sequence: Synthetic oligonucleotide
  Sense strand starting at position 3656 of SEQ ID NO: 1886563
ucugguaaguucuaccuca

SEQ ID NO: 2417827 - RNA, 19 nt, Artificial Sequence
  Description of Artificial Sequence: Synthetic oligonucleotide
  Antisense strand to SEQ ID NO: 2417826
ugagguagaacuuaccaga

SEQ ID NO: 2417828 - RNA, 19 nt, Artificial Sequence
  Description of Artificial Sequence: Synthetic oligonucleotide
  Sense strand starting at position 1111 of SEQ ID NO: 1886564
cauggacggucauauggau

SEQ ID NO: 2417829 - RNA, 19 nt, Artificial Sequence
  Description of Artificial Sequence: Synthetic oligonucleotide
  Antisense strand to SEQ ID NO: 2417828
auccauaugaccguccaug

SEQ ID NO: 2417830 - RNA, 19 nt, Artificial Sequence
  Description of Artificial Sequence: Synthetic oligonucleotide
  Sense strand starting at position 1714 of SEQ ID NO: 1886564
gucacaugcucacacggau

SEQ ID NO: 2417831 - RNA, 19 nt, Artificial Sequence
  Description of Artificial Sequence: Synthetic oligonucleotide
  Antisense strand to SEQ ID NO: 2417830
auccgugugagcaugugac

SEQ ID NO: 2417832 - RNA, 19 nt, Artificial Sequence
  Description of Artificial Sequence: Synthetic oligonucleotide
  Sense strand starting at position 1771 of SEQ ID NO: 1886564
ccaggauguggugauguga

SEQ ID NO: 2417833 - RNA, 19 nt, Artificial Sequence
  Description of Artificial Sequence: Synthetic oligonucleotide
  Antisense strand to SEQ ID NO: 2417832
ucacaucaccacauccugg

SEQ ID NO: 2417834 - RNA, 19 nt, Artificial Sequence
  Description of Artificial Sequence: Synthetic oligonucleotide
  Sense strand starting at position 1773 of SEQ ID NO: 1886564
aggauguggugaugugaga

SEQ ID NO: 2417835 - RNA, 19 nt, Artificial Sequence
  Description of Artificial Sequence: Synthetic oligonucleotide
  Antisense strand to SEQ ID NO: 2417834
ucucacaucaccacauccu

SEQ ID NO: 2417836 - RNA, 19 nt, Artificial Sequence
  Description of Artificial Sequence: Synthetic oligonucleotide
  Sense strand starting at position 1870 of SEQ ID NO: 1886564
ccucuuggcuuugacaaga

SEQ ID NO: 2417837 - RNA, 19 nt, Artificial Sequence
  Description of Artificial Sequence: Synthetic oligonucleotide
  Antisense strand to SEQ ID NO: 2417836
ucuugucaaagccaagagg

SEQ ID NO: 2417838 - RNA, 19 nt, Artificial Sequence
  Description of Artificial Sequence: Synthetic oligonucleotide
  Sense strand starting at position 2184 of SEQ ID NO: 1886564
gcgcccucauggugaauca

SEQ ID NO: 2417839 - RNA, 19 nt, Artificial Sequence
  Description of Artificial Sequence: Synthetic oligonucleotide
  Antisense strand to SEQ ID NO: 2417838
ugauucaccaugagggcgc

SEQ ID NO: 2417840 - RNA, 19 nt, Artificial Sequence
  Description of Artificial Sequence: Synthetic oligonucleotide
  Sense strand starting at position 2185 of SEQ ID NO: 1886564
cgcccucauggugaaucaa

SEQ ID NO: 2417841 - RNA, 19 nt, Artificial Sequence
  Description of Artificial Sequence: Synthetic oligonucleotide
  Antisense strand to SEQ ID NO: 2417840
uugauucaccaugagggcg

SEQ ID NO: 2417842 - RNA, 19 nt, Artificial Sequence
  Description of Artificial Sequence: Synthetic oligonucleotide
  Sense strand starting at position 2883 of SEQ ID NO: 1886564
gcuggauccagucauggca

SEQ ID NO: 2417843 - RNA, 19 nt, Artificial Sequence
  Description of Artificial Sequence: Synthetic oligonucleotide
  Antisense strand to SEQ ID NO: 2417842
ugccaugacuggauccagc

SEQ ID NO: 2417844 - RNA, 19 nt, Artificial Sequence
  Description of Artificial Sequence: Synthetic oligonucleotide
  Sense strand starting at position 3174 of SEQ ID NO: 1886564
gggcuucuuccagagggca

SEQ ID NO: 2417845 - RNA, 19 nt, Artificial Sequence
  Description of Artificial Sequence: Synthetic oligonucleotide
  Antisense strand to SEQ ID NO: 2417844
ugcccucuggaagaagccc

SEQ ID NO: 2417846 - RNA, 19 nt, Artificial Sequence
  Description of Artificial Sequence: Synthetic oligonucleotide
  Sense strand starting at position 3922 of SEQ ID NO: 1886564
ccaguuagcuuggaauccu

SEQ ID NO: 2417847 - RNA, 19 nt, Artificial Sequence
  Description of Artificial Sequence: Synthetic oligonucleotide
  Antisense strand to SEQ ID NO: 2417846
aggauuccaagcuaacugg

SEQ ID NO: 2417848 - RNA, 19 nt, Artificial Sequence
  Description of Artificial Sequence: Synthetic oligonucleotide
  Sense strand starting at position 34 of SEQ ID NO: 1886565
guuugcuuucugcuccuga

SEQ ID NO: 2417849 - RNA, 19 nt, Artificial Sequence
  Description of Artificial Sequence: Synthetic oligonucleotide
  Antisense strand to SEQ ID NO: 2417848
ucaggagcagaaagcaaac

SEQ ID NO: 2417850 - RNA, 19 nt, Artificial Sequence
  Description of Artificial Sequence: Synthetic oligonucleotide
  Sense strand starting at position 36 of SEQ ID NO: 1886565
uugcuuucugcuccugagu

SEQ ID NO: 2417851 - RNA, 19 nt, Artificial Sequence
  Description of Artificial Sequence: Synthetic oligonucleotide
  Antisense strand to SEQ ID NO: 2417850
acucaggagcagaaagcaa

SEQ ID NO: 2417852 - RNA, 19 nt, Artificial Sequence
  Description of Artificial Sequence: Synthetic oligonucleotide
  Sense strand starting at position 37 of SEQ ID NO: 1886565
ugcuuucugcuccugaguu

SEQ ID NO: 2417853 - RNA, 19 nt, Artificial Sequence
  Description of Artificial Sequence: Synthetic oligonucleotide
  Antisense strand to SEQ ID NO: 2417852
aacucaggagcagaaagca

SEQ ID NO: 2417854 - RNA, 19 nt, Artificial Sequence
  Description of Artificial Sequence: Synthetic oligonucleotide
  Sense strand starting at position 38 of SEQ ID NO: 1886565
gcuuucugcuccugaguug

SEQ ID NO: 2417855 - RNA, 19 nt, Artificial Sequence
  Description of Artificial Sequence: Synthetic oligonucleotide
  Antisense strand to SEQ ID NO: 2417854
caacucaggagcagaaagc

SEQ ID NO: 2417856 - RNA, 19 nt, Artificial Sequence
  Description of Artificial Sequence: Synthetic oligonucleotide
  Sense strand starting at position 994 of SEQ ID NO: 1886565
guucucagccgauguguua

SEQ ID NO: 2417857 - RNA, 19 nt, Artificial Sequence
  Description of Artificial Sequence: Synthetic oligonucleotide
  Antisense strand to SEQ ID NO: 2417856
uaacacaucggcugagaac

SEQ ID NO: 2417858 - RNA, 19 nt, Artificial Sequence
  Description of Artificial Sequence: Synthetic oligonucleotide
  Sense strand starting at position 1000 of SEQ ID NO: 1886565
agccgauguguuagagguu

SEQ ID NO: 2417859 - RNA, 19 nt, Artificial Sequence
  Description of Artificial Sequence: Synthetic oligonucleotide
  Antisense strand to SEQ ID NO: 2417858
aaccucuaacacaucggcu

SEQ ID NO: 2417860 - RNA, 19 nt, Artificial Sequence
  Description of Artificial Sequence: Synthetic oligonucleotide
  Sense strand starting at position 1003 of SEQ ID NO: 1886565
cgauguguuagagguugag

SEQ ID NO: 2417861 - RNA, 19 nt, Artificial Sequence
  Description of Artificial Sequence: Synthetic oligonucleotide
  Antisense strand to SEQ ID NO: 2417860
cucaaccucuaacacaucg

SEQ ID NO: 2417862 - RNA, 19 nt, Artificial Sequence
  Description of Artificial Sequence: Synthetic oligonucleotide
  Sense strand starting at position 1006 of SEQ ID NO: 1886565
uguguuagagguugagcau

SEQ ID NO: 2417863 - RNA, 19 nt, Artificial Sequence
  Description of Artificial Sequence: Synthetic oligonucleotide
  Antisense strand to SEQ ID NO: 2417862
augcucaaccucuaacaca

SEQ ID NO: 2417864 - RNA, 19 nt, Artificial Sequence
  Description of Artificial Sequence: Synthetic oligonucleotide
  Sense strand starting at position 1041 of SEQ ID NO: 1886565
gcuggcugucagugcuuga

SEQ ID NO: 2417865 - RNA, 19 nt, Artificial Sequence
  Description of Artificial Sequence: Synthetic oligonucleotide
  Antisense strand to SEQ ID NO: 2417864
ucaagcacugacagccagc

SEQ ID NO: 2417866 - RNA, 19 nt, Artificial Sequence
  Description of Artificial Sequence: Synthetic oligonucleotide
  Sense strand starting at position 1044 of SEQ ID NO: 1886565
ggcugucagugcuugaugu

SEQ ID NO: 2417867 - RNA, 19 nt, Artificial Sequence
  Description of Artificial Sequence: Synthetic oligonucleotide
  Antisense strand to SEQ ID NO: 2417866
acaucaagcacugacagcc

SEQ ID NO: 2417868 - RNA, 19 nt, Artificial Sequence
  Description of Artificial Sequence: Synthetic oligonucleotide
  Sense strand starting at position 1227 of SEQ ID NO: 1886565
cagagaugguugguccaca

SEQ ID NO: 2417869 - RNA, 19 nt, Artificial Sequence
  Description of Artificial Sequence: Synthetic oligonucleotide
  Antisense strand to SEQ ID NO: 2417868
uguggaccaaccaucucug

SEQ ID NO: 2417870 - RNA, 19 nt, Artificial Sequence
  Description of Artificial Sequence: Synthetic oligonucleotide
  Sense strand starting at position 1414 of SEQ ID NO: 1886565
cugagcaguucugugacau

SEQ ID NO: 2417871 - RNA, 19 nt, Artificial Sequence
  Description of Artificial Sequence: Synthetic oligonucleotide
  Antisense strand to SEQ ID NO: 2417870
augucacagaacugcucag

SEQ ID NO: 2417872 - RNA, 19 nt, Artificial Sequence
  Description of Artificial Sequence: Synthetic oligonucleotide
  Sense strand starting at position 1415 of SEQ ID NO: 1886565
ugagcaguucugugacaug

SEQ ID NO: 2417873 - RNA, 19 nt, Artificial Sequence
  Description of Artificial Sequence: Synthetic oligonucleotide
  Antisense strand to SEQ ID NO: 2417872
caugucacagaacugcuca

SEQ ID NO: 2417874 - RNA, 19 nt, Artificial Sequence
  Description of Artificial Sequence: Synthetic oligonucleotide
  Sense strand starting at position 1418 of SEQ ID NO: 1886565
gcaguucugugacaugaag

SEQ ID NO: 2417875 - RNA, 19 nt, Artificial Sequence
  Description of Artificial Sequence: Synthetic oligonucleotide
  Antisense strand to SEQ ID NO: 2417874
cuucaugucacagaacugc

SEQ ID NO: 2417876 - RNA, 19 nt, Artificial Sequence
  Description of Artificial Sequence: Synthetic oligonucleotide
  Sense strand starting at position 1420 of SEQ ID NO: 1886565
aguucugugacaugaagug

SEQ ID NO: 2417877 - RNA, 19 nt, Artificial Sequence
  Description of Artificial Sequence: Synthetic oligonucleotide
  Antisense strand to SEQ ID NO: 2417876
cacuucaugucacagaacu

SEQ ID NO: 2417878 - RNA, 19 nt, Artificial Sequence
  Description of Artificial Sequence: Synthetic oligonucleotide
  Sense strand starting at position 1628 of SEQ ID NO: 1886565
ccaggugucugccugaguu

SEQ ID NO: 2417879 - RNA, 19 nt, Artificial Sequence
  Description of Artificial Sequence: Synthetic oligonucleotide
  Antisense strand to SEQ ID NO: 2417878
aacucaggcagacaccugg

SEQ ID NO: 2417880 - RNA, 19 nt, Artificial Sequence
  Description of Artificial Sequence: Synthetic oligonucleotide
  Sense strand starting at position 1686 of SEQ ID NO: 1886565
ggaggugcaugcucucaga

SEQ ID NO: 2417881 - RNA, 19 nt, Artificial Sequence
  Description of Artificial Sequence: Synthetic oligonucleotide
  Antisense strand to SEQ ID NO: 2417880
ucugagagcaugcaccucc

SEQ ID NO: 2417882 - RNA, 19 nt, Artificial Sequence
  Description of Artificial Sequence: Synthetic oligonucleotide
  Sense strand starting at position 1689 of SEQ ID NO: 1886565
ggugcaugcucucagagcu

SEQ ID NO: 2417883 - RNA, 19 nt, Artificial Sequence
  Description of Artificial Sequence: Synthetic oligonucleotide
  Antisense strand to SEQ ID NO: 2417882
agcucugagagcaugcacc

SEQ ID NO: 2417884 - RNA, 19 nt, Artificial Sequence
  Description of Artificial Sequence: Synthetic oligonucleotide
  Sense strand starting at position 1721 of SEQ ID NO: 1886565
cguuucgucccguguguga

SEQ ID NO: 2417885 - RNA, 19 nt, Artificial Sequence
  Description of Artificial Sequence: Synthetic oligonucleotide
  Antisense strand to SEQ ID NO: 2417884
ucacacacgggacgaaacg

SEQ ID NO: 2417886 - RNA, 19 nt, Artificial Sequence
  Description of Artificial Sequence: Synthetic oligonucleotide
  Sense strand starting at position 1722 of SEQ ID NO: 1886565
guuucgucccgugugugaa

SEQ ID NO: 2417887 - RNA, 19 nt, Artificial Sequence
  Description of Artificial Sequence: Synthetic oligonucleotide
  Antisense strand to SEQ ID NO: 2417886
uucacacacgggacgaaac

SEQ ID NO: 2417888 - RNA, 19 nt, Artificial Sequence
  Description of Artificial Sequence: Synthetic oligonucleotide
  Sense strand starting at position 1730 of SEQ ID NO: 1886565
ccgugugugaacuggagau

SEQ ID NO: 2417889 - RNA, 19 nt, Artificial Sequence
  Description of Artificial Sequence: Synthetic oligonucleotide
  Antisense strand to SEQ ID NO: 2417888
aucuccaguucacacacgg

SEQ ID NO: 2417890 - RNA, 19 nt, Artificial Sequence
  Description of Artificial Sequence: Synthetic oligonucleotide
  Sense strand starting at position 1835 of SEQ ID NO: 1886565
cgguuuaagacccagaucu

SEQ ID NO: 2417891 - RNA, 19 nt, Artificial Sequence
  Description of Artificial Sequence: Synthetic oligonucleotide
  Antisense strand to SEQ ID NO: 2417890
agaucugggucuuaaaccg

SEQ ID NO: 2417892 - RNA, 19 nt, Artificial Sequence
  Description of Artificial Sequence: Synthetic oligonucleotide
  Sense strand starting at position 2093 of SEQ ID NO: 1886565
gggcuucugucgggccaau

SEQ ID NO: 2417893 - RNA, 19 nt, Artificial Sequence
  Description of Artificial Sequence: Synthetic oligonucleotide
  Antisense strand to SEQ ID NO: 2417892
auuggcccgacagaagccc

SEQ ID NO: 2417894 - RNA, 19 nt, Artificial Sequence
  Description of Artificial Sequence: Synthetic oligonucleotide
  Sense strand starting at position 2161 of SEQ ID NO: 1886565
gcgucaccuucucuaguua

SEQ ID NO: 2417895 - RNA, 19 nt, Artificial Sequence
  Description of Artificial Sequence: Synthetic oligonucleotide
  Antisense strand to SEQ ID NO: 2417894
uaacuagagaaggugacgc

SEQ ID NO: 2417896 - RNA, 19 nt, Artificial Sequence
  Description of Artificial Sequence: Synthetic oligonucleotide
  Sense strand starting at position 2162 of SEQ ID NO: 1886565
cgucaccuucucuaguuaa

SEQ ID NO: 2417897 - RNA, 19 nt, Artificial Sequence
  Description of Artificial Sequence: Synthetic oligonucleotide
  Antisense strand to SEQ ID NO: 2417896
uuaacuagagaaggugacg

SEQ ID NO: 2417898 - RNA, 19 nt, Artificial Sequence
  Description of Artificial Sequence: Synthetic oligonucleotide
  Sense strand starting at position 2502 of SEQ ID NO: 1886565
uaguuuguuucgucccagu

SEQ ID NO: 2417899 - RNA, 19 nt, Artificial Sequence
  Description of Artificial Sequence: Synthetic oligonucleotide
  Antisense strand to SEQ ID NO: 2417898
acugggacgaaacaaacua

SEQ ID NO: 2417900 - RNA, 19 nt, Artificial Sequence
  Description of Artificial Sequence: Synthetic oligonucleotide
  Sense strand starting at position 2565 of SEQ ID NO: 1886565
ucgccucucccuucuguua

SEQ ID NO: 2417901 - RNA, 19 nt, Artificial Sequence
  Description of Artificial Sequence: Synthetic oligonucleotide
  Antisense strand to SEQ ID NO: 2417900
uaacagaagggagaggcga

SEQ ID NO: 2417902 - RNA, 19 nt, Artificial Sequence
  Description of Artificial Sequence: Synthetic oligonucleotide
  Sense strand starting at position 2576 of SEQ ID NO: 1886565
uucuguuacguaucacgca

SEQ ID NO: 2417903 - RNA, 19 nt, Artificial Sequence
  Description of Artificial Sequence: Synthetic oligonucleotide
  Antisense strand to SEQ ID NO: 2417902
ugcgugauacguaacagaa

SEQ ID NO: 2417904 - RNA, 19 nt, Artificial Sequence
  Description of Artificial Sequence: Synthetic oligonucleotide
  Sense strand starting at position 2662 of SEQ ID NO: 1886565
cccucacugucuugggaaa

SEQ ID NO: 2417905 - RNA, 19 nt, Artificial Sequence
  Description of Artificial Sequence: Synthetic oligonucleotide
  Antisense strand to SEQ ID NO: 2417904
uuucccaagacagugaggg

SEQ ID NO: 2417906 - RNA, 19 nt, Artificial Sequence
  Description of Artificial Sequence: Synthetic oligonucleotide
  Sense strand starting at position 2663 of SEQ ID NO: 1886565
ccucacugucuugggaaau

SEQ ID NO: 2417907 - RNA, 19 nt, Artificial Sequence
  Description of Artificial Sequence: Synthetic oligonucleotide
  Antisense strand to SEQ ID NO: 2417906
auuucccaagacagugagg

SEQ ID NO: 2417908 - RNA, 19 nt, Artificial Sequence
  Description of Artificial Sequence: Synthetic oligonucleotide
  Sense strand starting at position 2664 of SEQ ID NO: 1886565
cucacugucuugggaaaug

SEQ ID NO: 2417909 - RNA, 19 nt, Artificial Sequence
  Description of Artificial Sequence: Synthetic oligonucleotide
  Antisense strand to SEQ ID NO: 2417908
cauuucccaagacagugag

SEQ ID NO: 2417910 - RNA, 19 nt, Artificial Sequence
  Description of Artificial Sequence: Synthetic oligonucleotide
  Sense strand starting at position 2913 of SEQ ID NO: 1886565
acauuuaugucacacacgu

SEQ ID NO: 2417911 - RNA, 19 nt, Artificial Sequence
  Description of Artificial Sequence: Synthetic oligonucleotide
  Antisense strand to SEQ ID NO: 2417910
acgugugugacauaaaugu

SEQ ID NO: 2417912 - RNA, 19 nt, Artificial Sequence
  Description of Artificial Sequence: Synthetic oligonucleotide
  Sense strand starting at position 2955 of SEQ ID NO: 1886565
uugcuauuacuuugcaguu

SEQ ID NO: 2417913 - RNA, 19 nt, Artificial Sequence
  Description of Artificial Sequence: Synthetic oligonucleotide
  Antisense strand to SEQ ID NO: 2417912
aacugcaaaguaauagcaa

SEQ ID NO: 2417914 - RNA, 19 nt, Artificial Sequence
  Description of Artificial Sequence: Synthetic oligonucleotide
  Sense strand starting at position 3707 of SEQ ID NO: 1886565
ccuccaguuccuggcuaau

SEQ ID NO: 2417915 - RNA, 19 nt, Artificial Sequence
  Description of Artificial Sequence: Synthetic oligonucleotide
  Antisense strand to SEQ ID NO: 2417914
auuagccaggaacuggagg

SEQ ID NO: 2417916 - RNA, 19 nt, Artificial Sequence
  Description of Artificial Sequence: Synthetic oligonucleotide
  Sense strand starting at position 3709 of SEQ ID NO: 1886565
uccaguuccuggcuaauuu

SEQ ID NO: 2417917 - RNA, 19 nt, Artificial Sequence
  Description of Artificial Sequence: Synthetic oligonucleotide
  Antisense strand to SEQ ID NO: 2417916
aaauuagccaggaacugga

SEQ ID NO: 2417918 - RNA, 19 nt, Artificial Sequence
  Description of Artificial Sequence: Synthetic oligonucleotide
  Sense strand starting at position 1466 of SEQ ID NO: 1886566
auuacucauuccgugaaug

SEQ ID NO: 2417919 - RNA, 19 nt, Artificial Sequence
  Description of Artificial Sequence: Synthetic oligonucleotide
  Antisense strand to SEQ ID NO: 2417918
cauucacggaaugaguaau

SEQ ID NO: 2417920 - RNA, 19 nt, Artificial Sequence
  Description of Artificial Sequence: Synthetic oligonucleotide
  Sense strand starting at position 1468 of SEQ ID NO: 1886566
uacucauuccgugaaugca

SEQ ID NO: 2417921 - RNA, 19 nt, Artificial Sequence
  Description of Artificial Sequence: Synthetic oligonucleotide
  Antisense strand to SEQ ID NO: 2417920
ugcauucacggaaugagua

SEQ ID NO: 2417922 - RNA, 19 nt, Artificial Sequence
  Description of Artificial Sequence: Synthetic oligonucleotide
  Sense strand starting at position 1466 of SEQ ID NO: 1886570
auuacucauuccgugaaug

SEQ ID NO: 2417923 - RNA, 19 nt, Artificial Sequence
  Description of Artificial Sequence: Synthetic oligonucleotide
  Antisense strand to SEQ ID NO: 2417922
cauucacggaaugaguaau

SEQ ID NO: 2417924 - RNA, 19 nt, Artificial Sequence
  Description of Artificial Sequence: Synthetic oligonucleotide
  Sense strand starting at position 1468 of SEQ ID NO: 1886570
uacucauuccgugaaugca

SEQ ID NO: 2417925 - RNA, 19 nt, Artificial Sequence
  Description of Artificial Sequence: Synthetic oligonucleotide
  Antisense strand to SEQ ID NO: 2417924
ugcauucacggaaugagua

SEQ ID NO: 2417926 - RNA, 19 nt, Artificial Sequence
  Description of Artificial Sequence: Synthetic oligonucleotide
  Sense strand starting at position 1466 of SEQ ID NO: 1886574
auuacucauuccgugaaug

SEQ ID NO: 2417927 - RNA, 19 nt, Artificial Sequence
  Description of Artificial Sequence: Synthetic oligonucleotide
  Antisense strand to SEQ ID NO: 2417926
cauucacggaaugaguaau

SEQ ID NO: 2417928 - RNA, 19 nt, Artificial Sequence
  Description of Artificial Sequence: Synthetic oligonucleotide
  Sense strand starting at position 1468 of SEQ ID NO: 1886574
uacucauuccgugaaugca

SEQ ID NO: 2417929 - RNA, 19 nt, Artificial Sequence
  Description of Artificial Sequence: Synthetic oligonucleotide
  Antisense strand to SEQ ID NO: 2417928
ugcauucacggaaugagua

SEQ ID NO: 2417930 - RNA, 19 nt, Artificial Sequence
  Description of Artificial Sequence: Synthetic oligonucleotide
  Sense strand starting at position 1466 of SEQ ID NO: 1886578
auuacucauuccgugaaug

SEQ ID NO: 2417931 - RNA, 19 nt, Artificial Sequence
  Description of Artificial Sequence: Synthetic oligonucleotide
  Antisense strand to SEQ ID NO: 2417930
cauucacggaaugaguaau

SEQ ID NO: 2417932 - RNA, 19 nt, Artificial Sequence
  Description of Artificial Sequence: Synthetic oligonucleotide
  Sense strand starting at position 1468 of SEQ ID NO: 1886578
uacucauuccgugaaugca

SEQ ID NO: 2417933 - RNA, 19 nt, Artificial Sequence
  Description of Artificial Sequence: Synthetic oligonucleotide
  Antisense strand to SEQ ID NO: 2417932
ugcauucacggaaugagua

SEQ ID NO: 2417934 - RNA, 19 nt, Artificial Sequence
  Description of Artificial Sequence: Synthetic oligonucleotide
  Sense strand starting at position 401 of SEQ ID NO: 1886583
guuccaaaucccugcuaug

SEQ ID NO: 2417935 - RNA, 19 nt, Artificial Sequence
  Description of Artificial Sequence: Synthetic oligonucleotide
  Antisense strand to SEQ ID NO: 2417934
cauagcagggauuuggaac

SEQ ID NO: 2417936 - RNA, 19 nt, Artificial Sequence
  Description of Artificial Sequence: Synthetic oligonucleotide
  Sense strand starting at position 826 of SEQ ID NO: 1886583
gccucauggucuuugcuca

SEQ ID NO: 2417937 - RNA, 19 nt, Artificial Sequence
  Description of Artificial Sequence: Synthetic oligonucleotide
  Antisense strand to SEQ ID NO: 2417936
ugagcaaagaccaugaggc

SEQ ID NO: 2417938 - RNA, 19 nt, Artificial Sequence
  Description of Artificial Sequence: Synthetic oligonucleotide
  Sense strand starting at position 3649 of SEQ ID NO: 1886583
uguccugggcucugagaga

SEQ ID NO: 2417939 - RNA, 19 nt, Artificial Sequence
  Description of Artificial Sequence: Synthetic oligonucleotide
  Antisense strand to SEQ ID NO: 2417938
ucucucagagcccaggaca

SEQ ID NO: 2417940 - RNA, 19 nt, Artificial Sequence
  Description of Artificial Sequence: Synthetic oligonucleotide
  Sense strand starting at position 3344 of SEQ ID NO: 1886585
ucgaguugggucuauuugu

SEQ ID NO: 2417941 - RNA, 19 nt, Artificial Sequence
  Description of Artificial Sequence: Synthetic oligonucleotide
  Antisense strand to SEQ ID NO: 2417940
acaaauagacccaacucga

SEQ ID NO: 2417942 - RNA, 19 nt, Artificial Sequence
  Description of Artificial Sequence: Synthetic oligonucleotide
  Sense strand starting at position 405 of SEQ ID NO: 1886587
guuccaaaucccugcuaug

SEQ ID NO: 2417943 - RNA, 19 nt, Artificial Sequence
  Description of Artificial Sequence: Synthetic oligonucleotide
  Antisense strand to SEQ ID NO: 2417942
cauagcagggauuuggaac

SEQ ID NO: 2417944 - RNA, 19 nt, Artificial Sequence
  Description of Artificial Sequence: Synthetic oligonucleotide
  Sense strand starting at position 830 of SEQ ID NO: 1886587
gccucauggucuuugcuca

SEQ ID NO: 2417945 - RNA, 19 nt, Artificial Sequence
  Description of Artificial Sequence: Synthetic oligonucleotide
  Antisense strand to SEQ ID NO: 2417944
ugagcaaagaccaugaggc

SEQ ID NO: 2417946 - RNA, 19 nt, Artificial Sequence
  Description of Artificial Sequence: Synthetic oligonucleotide
  Sense strand starting at position 3653 of SEQ ID NO: 1886587
uguccugggcucugagaga

SEQ ID NO: 2417947 - RNA, 19 nt, Artificial Sequence
  Description of Artificial Sequence: Synthetic oligonucleotide
  Antisense strand to SEQ ID NO: 2417946
ucucucagagcccaggaca

SEQ ID NO: 2417948 - RNA, 19 nt, Artificial Sequence
  Description of Artificial Sequence: Synthetic oligonucleotide
  Sense strand starting at position 3348 of SEQ ID NO: 1886589
ucgaguugggucuauuugu

SEQ ID NO: 2417949 - RNA, 19 nt, Artificial Sequence
  Description of Artificial Sequence: Synthetic oligonucleotide
  Antisense strand to SEQ ID NO: 2417948
acaaauagacccaacucga

SEQ ID NO: 2417950 - RNA, 19 nt, Artificial Sequence
  Description of Artificial Sequence: Synthetic oligonucleotide
  Sense strand starting at position 401 of SEQ ID NO: 1886591
guuccaaaucccugcuaug

SEQ ID NO: 2417951 - RNA, 19 nt, Artificial Sequence
  Description of Artificial Sequence: Synthetic oligonucleotide
  Antisense strand to SEQ ID NO: 2417950
cauagcagggauuuggaac

SEQ ID NO: 2417952 - RNA, 19 nt, Artificial Sequence
  Description of Artificial Sequence: Synthetic oligonucleotide
  Sense strand starting at position 826 of SEQ ID NO: 1886591
gccucauggucuuugcuca

SEQ ID NO: 2417953 - RNA, 19 nt, Artificial Sequence
  Description of Artificial Sequence: Synthetic oligonucleotide
  Antisense strand to SEQ ID NO: 2417952
ugagcaaagaccaugaggc

SEQ ID NO: 2417954 - RNA, 19 nt, Artificial Sequence
  Description of Artificial Sequence: Synthetic oligonucleotide
  Sense strand starting at position 3649 of SEQ ID NO: 1886591
uguccugggcucugagaga

SEQ ID NO: 2417955 - RNA, 19 nt, Artificial Sequence
  Description of Artificial Sequence: Synthetic oligonucleotide
  Antisense strand to SEQ ID NO: 2417954
ucucucagagcccaggaca

SEQ ID NO: 2417956 - RNA, 19 nt, Artificial Sequence
  Description of Artificial Sequence: Synthetic oligonucleotide
  Sense strand starting at position 3344 of SEQ ID NO: 1886593
ucgaguugggucuauuugu

SEQ ID NO: 2417957 - RNA, 19 nt, Artificial Sequence
  Description of Artificial Sequence: Synthetic oligonucleotide
  Antisense strand to SEQ ID NO: 2417956
acaaauagacccaacucga

SEQ ID NO: 2417958 - RNA, 19 nt, Artificial Sequence
  Description of Artificial Sequence: Synthetic oligonucleotide
  Sense strand starting at position 427 of SEQ ID NO: 1886594
guuccaaaucccugcuaug

SEQ ID NO: 2417959 - RNA, 19 nt, Artificial Sequence
  Description of Artificial Sequence: Synthetic oligonucleotide
  Antisense strand to SEQ ID NO: 2417958
cauagcagggauuuggaac

SEQ ID NO: 2417960 - RNA, 19 nt, Artificial Sequence
  Description of Artificial Sequence: Synthetic oligonucleotide
  Sense strand starting at position 852 of SEQ ID NO: 1886594
gccucauggucuuugcuca

SEQ ID NO: 2417961 - RNA, 19 nt, Artificial Sequence
  Description of Artificial Sequence: Synthetic oligonucleotide
  Antisense strand to SEQ ID NO: 2417960
ugagcaaagaccaugaggc

SEQ ID NO: 2417962 - RNA, 19 nt, Artificial Sequence
  Description of Artificial Sequence: Synthetic oligonucleotide
  Sense strand starting at position 3675 of SEQ ID NO: 1886594
uguccugggcucugagaga

SEQ ID NO: 2417963 - RNA, 19 nt, Artificial Sequence
  Description of Artificial Sequence: Synthetic oligonucleotide
  Antisense strand to SEQ ID NO: 2417962
ucucucagagcccaggaca

SEQ ID NO: 2417964 - RNA, 19 nt, Artificial Sequence
  Description of Artificial Sequence: Synthetic oligonucleotide
  Sense strand starting at position 2299 of SEQ ID NO: 1886595
cagguuuccuggcugagag

SEQ ID NO: 2417965 - RNA, 19 nt, Artificial Sequence
  Description of Artificial Sequence: Synthetic oligonucleotide
  Antisense strand to SEQ ID NO: 2417964
cucucagccaggaaaccug

SEQ ID NO: 2417966 - RNA, 19 nt, Artificial Sequence
  Description of Artificial Sequence: Synthetic oligonucleotide
  Sense strand starting at position 2300 of SEQ ID NO: 1886595
agguuuccuggcugagaga

SEQ ID NO: 2417967 - RNA, 19 nt, Artificial Sequence
  Description of Artificial Sequence: Synthetic oligonucleotide
  Antisense strand to SEQ ID NO: 2417966
ucucucagccaggaaaccu

SEQ ID NO: 2417968 - RNA, 19 nt, Artificial Sequence
  Description of Artificial Sequence: Synthetic oligonucleotide
  Sense strand starting at position 2595 of SEQ ID NO: 1886595
gaagguggaucccuugagu

SEQ ID NO: 2417969 - RNA, 19 nt, Artificial Sequence
  Description of Artificial Sequence: Synthetic oligonucleotide
  Antisense strand to SEQ ID NO: 2417968
acucaagggauccaccuuc

SEQ ID NO: 2417970 - RNA, 19 nt, Artificial Sequence
  Description of Artificial Sequence: Synthetic oligonucleotide
  Sense strand starting at position 3165 of SEQ ID NO: 1886595
ugguaaggcugcgauugua

SEQ ID NO: 2417971 - RNA, 19 nt, Artificial Sequence
  Description of Artificial Sequence: Synthetic oligonucleotide
  Antisense strand to SEQ ID NO: 2417970
uacaaucgcagccuuacca

SEQ ID NO: 2417972 - RNA, 19 nt, Artificial Sequence
  Description of Artificial Sequence: Synthetic oligonucleotide
  Sense strand starting at position 3173 of SEQ ID NO: 1886595
cugcgauuguauuccaaac

SEQ ID NO: 2417973 - RNA, 19 nt, Artificial Sequence
  Description of Artificial Sequence: Synthetic oligonucleotide
  Antisense strand to SEQ ID NO: 2417972
guuuggaauacaaucgcag

SEQ ID NO: 2417974 - RNA, 19 nt, Artificial Sequence
  Description of Artificial Sequence: Synthetic oligonucleotide
  Sense strand starting at position 3260 of SEQ ID NO: 1886595
acaagaaacugcugccaaa

SEQ ID NO: 2417975 - RNA, 19 nt, Artificial Sequence
  Description of Artificial Sequence: Synthetic oligonucleotide
  Antisense strand to SEQ ID NO: 2417974
uuuggcagcaguuucuugu

SEQ ID NO: 2417976 - RNA, 19 nt, Artificial Sequence
  Description of Artificial Sequence: Synthetic oligonucleotide
  Sense strand starting at position 3263 of SEQ ID NO: 1886595
agaaacugcugccaaauga

SEQ ID NO: 2417977 - RNA, 19 nt, Artificial Sequence
  Description of Artificial Sequence: Synthetic oligonucleotide
  Antisense strand to SEQ ID NO: 2417976
ucauuuggcagcaguuucu

SEQ ID NO: 2417978 - RNA, 19 nt, Artificial Sequence
  Description of Artificial Sequence: Synthetic oligonucleotide
  Sense strand starting at position 3299 of SEQ ID NO: 1886595
agucucaaugauuguuuga

SEQ ID NO: 2417979 - RNA, 19 nt, Artificial Sequence
  Description of Artificial Sequence: Synthetic oligonucleotide
  Antisense strand to SEQ ID NO: 2417978
ucaaacaaucauugagacu

SEQ ID NO: 2417980 - RNA, 19 nt, Artificial Sequence
  Description of Artificial Sequence: Synthetic oligonucleotide
  Sense strand starting at position 3301 of SEQ ID NO: 1886595
ucucaaugauuguuugaag

SEQ ID NO: 2417981 - RNA, 19 nt, Artificial Sequence
  Description of Artificial Sequence: Synthetic oligonucleotide
  Antisense strand to SEQ ID NO: 2417980
cuucaaacaaucauugaga

SEQ ID NO: 2417982 - RNA, 19 nt, Artificial Sequence
  Description of Artificial Sequence: Synthetic oligonucleotide
  Sense strand starting at position 3337 of SEQ ID NO: 1886595
ugcaauuguuuagaaagga

SEQ ID NO: 2417983 - RNA, 19 nt, Artificial Sequence
  Description of Artificial Sequence: Synthetic oligonucleotide
  Antisense strand to SEQ ID NO: 2417982
uccuuucuaaacaauugca

SEQ ID NO: 2417984 - RNA, 19 nt, Artificial Sequence
  Description of Artificial Sequence: Synthetic oligonucleotide
  Sense strand starting at position 3389 of SEQ ID NO: 1886595
gcaaauuaguuaccuggaa

SEQ ID NO: 2417985 - RNA, 19 nt, Artificial Sequence
  Description of Artificial Sequence: Synthetic oligonucleotide
  Antisense strand to SEQ ID NO: 2417984
uuccagguaacuaauuugc

SEQ ID NO: 2417986 - RNA, 19 nt, Artificial Sequence
  Description of Artificial Sequence: Synthetic oligonucleotide
  Sense strand starting at position 3745 of SEQ ID NO: 1886595
aaauccauguggugagaca

SEQ ID NO: 2417987 - RNA, 19 nt, Artificial Sequence
  Description of Artificial Sequence: Synthetic oligonucleotide
  Antisense strand to SEQ ID NO: 2417986
ugucucaccacauggauuu

SEQ ID NO: 2417988 - RNA, 19 nt, Artificial Sequence
  Description of Artificial Sequence: Synthetic oligonucleotide
  Sense strand starting at position 3781 of SEQ ID NO: 1886595
cagagaucuuguuugguuc

SEQ ID NO: 2417989 - RNA, 19 nt, Artificial Sequence
  Description of Artificial Sequence: Synthetic oligonucleotide
  Antisense strand to SEQ ID NO: 2417988
gaaccaaacaagaucucug

SEQ ID NO: 2417990 - RNA, 19 nt, Artificial Sequence
  Description of Artificial Sequence: Synthetic oligonucleotide
  Sense strand starting at position 3787 of SEQ ID NO: 1886595
ucuuguuugguucagggaa

SEQ ID NO: 2417991 - RNA, 19 nt, Artificial Sequence
  Description of Artificial Sequence: Synthetic oligonucleotide
  Antisense strand to SEQ ID NO: 2417990
uucccugaaccaaacaaga

SEQ ID NO: 2417992 - RNA, 19 nt, Artificial Sequence
  Description of Artificial Sequence: Synthetic oligonucleotide
  Sense strand starting at position 3789 of SEQ ID NO: 1886595
uuguuugguucagggaaga

SEQ ID NO: 2417993 - RNA, 19 nt, Artificial Sequence
  Description of Artificial Sequence: Synthetic oligonucleotide
  Antisense strand to SEQ ID NO: 2417992
ucuucccugaaccaaacaa

SEQ ID NO: 2417994 - RNA, 19 nt, Artificial Sequence
  Description of Artificial Sequence: Synthetic oligonucleotide
  Sense strand starting at position 3815 of SEQ ID NO: 1886595
agggaaauguuucuugaua

SEQ ID NO: 2417995 - RNA, 19 nt, Artificial Sequence
  Description of Artificial Sequence: Synthetic oligonucleotide
  Antisense strand to SEQ ID NO: 2417994
uaucaagaaacauuucccu

SEQ ID NO: 2417996 - RNA, 19 nt, Artificial Sequence
  Description of Artificial Sequence: Synthetic oligonucleotide
  Sense strand starting at position 3816 of SEQ ID NO: 1886595
gggaaauguuucuugauaa

SEQ ID NO: 2417997 - RNA, 19 nt, Artificial Sequence
  Description of Artificial Sequence: Synthetic oligonucleotide
  Antisense strand to SEQ ID NO: 2417996
uuaucaagaaacauuuccc

SEQ ID NO: 2417998 - RNA, 19 nt, Artificial Sequence
  Description of Artificial Sequence: Synthetic oligonucleotide
  Sense strand starting at position 3817 of SEQ ID NO: 1886595
ggaaauguuucuugauaaa

SEQ ID NO: 2417999 - RNA, 19 nt, Artificial Sequence
  Description of Artificial Sequence: Synthetic oligonucleotide
  Antisense strand to SEQ ID NO: 2417998
uuuaucaagaaacauuucc

SEQ ID NO: 2418000 - RNA, 19 nt, Artificial Sequence
  Description of Artificial Sequence: Synthetic oligonucleotide
  Sense strand starting at position 3862 of SEQ ID NO: 1886595
agugaauaauuguuagccu

SEQ ID NO: 2418001 - RNA, 19 nt, Artificial Sequence
  Description of Artificial Sequence: Synthetic oligonucleotide
  Antisense strand to SEQ ID NO: 2418000
aggcuaacaauuauucacu

SEQ ID NO: 2418002 - RNA, 19 nt, Artificial Sequence
  Description of Artificial Sequence: Synthetic oligonucleotide
  Sense strand starting at position 3863 of SEQ ID NO: 1886595
gugaauaauuguuagccua

SEQ ID NO: 2418003 - RNA, 19 nt, Artificial Sequence
  Description of Artificial Sequence: Synthetic oligonucleotide
  Antisense strand to SEQ ID NO: 2418002
uaggcuaacaauuauucac

SEQ ID NO: 2418004 - RNA, 19 nt, Artificial Sequence
  Description of Artificial Sequence: Synthetic oligonucleotide
  Sense strand starting at position 69 of SEQ ID NO: 1886596
cuccaucucggagagcaaa

SEQ ID NO: 2418005 - RNA, 19 nt, Artificial Sequence
  Description of Artificial Sequence: Synthetic oligonucleotide
  Antisense strand to SEQ ID NO: 2418004
uuugcucuccgagauggag

SEQ ID NO: 2418006 - RNA, 19 nt, Artificial Sequence
  Description of Artificial Sequence: Synthetic oligonucleotide
  Sense strand starting at position 332 of SEQ ID NO: 1886596
ccauuaaagcagggcuaau

SEQ ID NO: 2418007 - RNA, 19 nt, Artificial Sequence
  Description of Artificial Sequence: Synthetic oligonucleotide
  Antisense strand to SEQ ID NO: 2418006
auuagcccugcuuuaaugg

SEQ ID NO: 2418008 - RNA, 19 nt, Artificial Sequence
  Description of Artificial Sequence: Synthetic oligonucleotide
  Sense strand starting at position 472 of SEQ ID NO: 1886596
uaauuuacuccucgugugu

SEQ ID NO: 2418009 - RNA, 19 nt, Artificial Sequence
  Description of Artificial Sequence: Synthetic oligonucleotide
  Antisense strand to SEQ ID NO: 2418008
acacacgaggaguaaauua

SEQ ID NO: 2418010 - RNA, 19 nt, Artificial Sequence
  Description of Artificial Sequence: Synthetic oligonucleotide
  Sense strand starting at position 560 of SEQ ID NO: 1886596
agcccaaugcuugacucau

SEQ ID NO: 2418011 - RNA, 19 nt, Artificial Sequence
  Description of Artificial Sequence: Synthetic oligonucleotide
  Antisense strand to SEQ ID NO: 2418010
augagucaagcauugggcu

SEQ ID NO: 2418012 - RNA, 19 nt, Artificial Sequence
  Description of Artificial Sequence: Synthetic oligonucleotide
  Sense strand starting at position 867 of SEQ ID NO: 1886596
gugguaucuaugcuugcuu

SEQ ID NO: 2418013 - RNA, 19 nt, Artificial Sequence
  Description of Artificial Sequence: Synthetic oligonucleotide
  Antisense strand to SEQ ID NO: 2418012
aagcaagcauagauaccac

SEQ ID NO: 2418014 - RNA, 19 nt, Artificial Sequence
  Description of Artificial Sequence: Synthetic oligonucleotide
  Sense strand starting at position 962 of SEQ ID NO: 1886596
uggcccuuuacagagagua

SEQ ID NO: 2418015 - RNA, 19 nt, Artificial Sequence
  Description of Artificial Sequence: Synthetic oligonucleotide
  Antisense strand to SEQ ID NO: 2418014
uacucucuguaaagggcca

SEQ ID NO: 2418016 - RNA, 19 nt, Artificial Sequence
  Description of Artificial Sequence: Synthetic oligonucleotide
  Sense strand starting at position 1077 of SEQ ID NO: 1886596
uggcauguuccacauauca

SEQ ID NO: 2418017 - RNA, 19 nt, Artificial Sequence
  Description of Artificial Sequence: Synthetic oligonucleotide
  Antisense strand to SEQ ID NO: 2418016
ugauauguggaacaugcca

SEQ ID NO: 2418018 - RNA, 19 nt, Artificial Sequence
  Description of Artificial Sequence: Synthetic oligonucleotide
  Sense strand starting at position 1247 of SEQ ID NO: 1886596
gguugaguagagggauuau

SEQ ID NO: 2418019 - RNA, 19 nt, Artificial Sequence
  Description of Artificial Sequence: Synthetic oligonucleotide
  Antisense strand to SEQ ID NO: 2418018
auaaucccucuacucaacc

SEQ ID NO: 2418020 - RNA, 19 nt, Artificial Sequence
  Description of Artificial Sequence: Synthetic oligonucleotide
  Sense strand starting at position 1411 of SEQ ID NO: 1886596
acccauuagcagcaugaga

SEQ ID NO: 2418021 - RNA, 19 nt, Artificial Sequence
  Description of Artificial Sequence: Synthetic oligonucleotide
  Antisense strand to SEQ ID NO: 2418020
ucucaugcugcuaaugggu

SEQ ID NO: 2418022 - RNA, 19 nt, Artificial Sequence
  Description of Artificial Sequence: Synthetic oligonucleotide
  Sense strand starting at position 1437 of SEQ ID NO: 1886596
aacagaucagcugggucau

SEQ ID NO: 2418023 - RNA, 19 nt, Artificial Sequence
  Description of Artificial Sequence: Synthetic oligonucleotide
  Antisense strand to SEQ ID NO: 2418022
augacccagcugaucuguu

SEQ ID NO: 2418024 - RNA, 19 nt, Artificial Sequence
  Description of Artificial Sequence: Synthetic oligonucleotide
  Sense strand starting at position 1438 of SEQ ID NO: 1886596
acagaucagcugggucauu

SEQ ID NO: 2418025 - RNA, 19 nt, Artificial Sequence
  Description of Artificial Sequence: Synthetic oligonucleotide
  Antisense strand to SEQ ID NO: 2418024
aaugacccagcugaucugu

SEQ ID NO: 2418026 - RNA, 19 nt, Artificial Sequence
  Description of Artificial Sequence: Synthetic oligonucleotide
  Sense strand starting at position 1439 of SEQ ID NO: 1886596
cagaucagcugggucauua

SEQ ID NO: 2418027 - RNA, 19 nt, Artificial Sequence
  Description of Artificial Sequence: Synthetic oligonucleotide
  Antisense strand to SEQ ID NO: 2418026
uaaugacccagcugaucug

SEQ ID NO: 2418028 - RNA, 19 nt, Artificial Sequence
  Description of Artificial Sequence: Synthetic oligonucleotide
  Sense strand starting at position 1545 of SEQ ID NO: 1886596
cugccuauuugagugcaaa

SEQ ID NO: 2418029 - RNA, 19 nt, Artificial Sequence
  Description of Artificial Sequence: Synthetic oligonucleotide
  Antisense strand to SEQ ID NO: 2418028
uuugcacucaaauaggcag

SEQ ID NO: 2418030 - RNA, 19 nt, Artificial Sequence
  Description of Artificial Sequence: Synthetic oligonucleotide
  Sense strand starting at position 1546 of SEQ ID NO: 1886596
ugccuauuugagugcaaau

SEQ ID NO: 2418031 - RNA, 19 nt, Artificial Sequence
  Description of Artificial Sequence: Synthetic oligonucleotide
  Antisense strand to SEQ ID NO: 2418030
auuugcacucaaauaggca

SEQ ID NO: 2418032 - RNA, 19 nt, Artificial Sequence
  Description of Artificial Sequence: Synthetic oligonucleotide
  Sense strand starting at position 1658 of SEQ ID NO: 1886596
ggcagauuaucucugugga

SEQ ID NO: 2418033 - RNA, 19 nt, Artificial Sequence
  Description of Artificial Sequence: Synthetic oligonucleotide
  Antisense strand to SEQ ID NO: 2418032
uccacagagauaaucugcc

SEQ ID NO: 2418034 - RNA, 19 nt, Artificial Sequence
  Description of Artificial Sequence: Synthetic oligonucleotide
  Sense strand starting at position 1660 of SEQ ID NO: 1886596
cagauuaucucuguggaca

SEQ ID NO: 2418035 - RNA, 19 nt, Artificial Sequence
  Description of Artificial Sequence: Synthetic oligonucleotide
  Antisense strand to SEQ ID NO: 2418034
uguccacagagauaaucug

SEQ ID NO: 2418036 - RNA, 19 nt, Artificial Sequence
  Description of Artificial Sequence: Synthetic oligonucleotide
  Sense strand starting at position 1661 of SEQ ID NO: 1886596
agauuaucucuguggacaa

SEQ ID NO: 2418037 - RNA, 19 nt, Artificial Sequence
  Description of Artificial Sequence: Synthetic oligonucleotide
  Antisense strand to SEQ ID NO: 2418036
uuguccacagagauaaucu

SEQ ID NO: 2418038 - RNA, 19 nt, Artificial Sequence
  Description of Artificial Sequence: Synthetic oligonucleotide
  Sense strand starting at position 1738 of SEQ ID NO: 1886596
guccuauuccaagggucaa

SEQ ID NO: 2418039 - RNA, 19 nt, Artificial Sequence
  Description of Artificial Sequence: Synthetic oligonucleotide
  Antisense strand to SEQ ID NO: 2418038
uugacccuuggaauaggac

SEQ ID NO: 2418040 - RNA, 19 nt, Artificial Sequence
  Description of Artificial Sequence: Synthetic oligonucleotide
  Sense strand starting at position 1812 of SEQ ID NO: 1886596
ggcaguaagacugagcaca

SEQ ID NO: 2418041 - RNA, 19 nt, Artificial Sequence
  Description of Artificial Sequence: Synthetic oligonucleotide
  Antisense strand to SEQ ID NO: 2418040
ugugcucagucuuacugcc

SEQ ID NO: 2418042 - RNA, 19 nt, Artificial Sequence
  Description of Artificial Sequence: Synthetic oligonucleotide
  Sense strand starting at position 1880 of SEQ ID NO: 1886596
guugaaagccuguauggga

SEQ ID NO: 2418043 - RNA, 19 nt, Artificial Sequence
  Description of Artificial Sequence: Synthetic oligonucleotide
  Antisense strand to SEQ ID NO: 2418042
ucccauacaggcuuucaac

SEQ ID NO: 2418044 - RNA, 19 nt, Artificial Sequence
  Description of Artificial Sequence: Synthetic oligonucleotide
  Sense strand starting at position 2676 of SEQ ID NO: 1886596
gugccauuagaugagauca

SEQ ID NO: 2418045 - RNA, 19 nt, Artificial Sequence
  Description of Artificial Sequence: Synthetic oligonucleotide
  Antisense strand to SEQ ID NO: 2418044
ugaucucaucuaauggcac

SEQ ID NO: 2418046 - RNA, 19 nt, Artificial Sequence
  Description of Artificial Sequence: Synthetic oligonucleotide
  Sense strand starting at position 2721 of SEQ ID NO: 1886596
gaaggcuagcauuagauau

SEQ ID NO: 2418047 - RNA, 19 nt, Artificial Sequence
  Description of Artificial Sequence: Synthetic oligonucleotide
  Antisense strand to SEQ ID NO: 2418046
auaucuaaugcuagccuuc

SEQ ID NO: 2418048 - RNA, 19 nt, Artificial Sequence
  Description of Artificial Sequence: Synthetic oligonucleotide
  Sense strand starting at position 2764 of SEQ ID NO: 1886596
uccagucaccuuuggaaac

SEQ ID NO: 2418049 - RNA, 19 nt, Artificial Sequence
  Description of Artificial Sequence: Synthetic oligonucleotide
  Antisense strand to SEQ ID NO: 2418048
guuuccaaaggugacugga

SEQ ID NO: 2418050 - RNA, 19 nt, Artificial Sequence
  Description of Artificial Sequence: Synthetic oligonucleotide
  Sense strand starting at position 2851 of SEQ ID NO: 1886596
gacaaagacuguguaccau

SEQ ID NO: 2418051 - RNA, 19 nt, Artificial Sequence
  Description of Artificial Sequence: Synthetic oligonucleotide
  Antisense strand to SEQ ID NO: 2418050
augguacacagucuuuguc

SEQ ID NO: 2418052 - RNA, 19 nt, Artificial Sequence
  Description of Artificial Sequence: Synthetic oligonucleotide
  Sense strand starting at position 2911 of SEQ ID NO: 1886596
agccaaauaugcuuugaaa

SEQ ID NO: 2418053 - RNA, 19 nt, Artificial Sequence
  Description of Artificial Sequence: Synthetic oligonucleotide
  Antisense strand to SEQ ID NO: 2418052
uuucaaagcauauuuggcu

SEQ ID NO: 2418054 - RNA, 19 nt, Artificial Sequence
  Description of Artificial Sequence: Synthetic oligonucleotide
  Sense strand starting at position 3130 of SEQ ID NO: 1886596
gcauuaauagaaugcuaaa

SEQ ID NO: 2418055 - RNA, 19 nt, Artificial Sequence
  Description of Artificial Sequence: Synthetic oligonucleotide
  Antisense strand to SEQ ID NO: 2418054
uuuagcauucuauuaaugc

SEQ ID NO: 2418056 - RNA, 19 nt, Artificial Sequence
  Description of Artificial Sequence: Synthetic oligonucleotide
  Sense strand starting at position 3144 of SEQ ID NO: 1886596
cuaaacaaucugugugaga

SEQ ID NO: 2418057 - RNA, 19 nt, Artificial Sequence
  Description of Artificial Sequence: Synthetic oligonucleotide
  Antisense strand to SEQ ID NO: 2418056
ucucacacagauuguuuag

SEQ ID NO: 2418058 - RNA, 19 nt, Artificial Sequence
  Description of Artificial Sequence: Synthetic oligonucleotide
  Sense strand starting at position 3145 of SEQ ID NO: 1886596
uaaacaaucugugugagaa

SEQ ID NO: 2418059 - RNA, 19 nt, Artificial Sequence
  Description of Artificial Sequence: Synthetic oligonucleotide
  Antisense strand to SEQ ID NO: 2418058
uucucacacagauuguuua

SEQ ID NO: 2418060 - RNA, 19 nt, Artificial Sequence
  Description of Artificial Sequence: Synthetic oligonucleotide
  Sense strand starting at position 3146 of SEQ ID NO: 1886596
aaacaaucugugugagaaa

SEQ ID NO: 2418061 - RNA, 19 nt, Artificial Sequence
  Description of Artificial Sequence: Synthetic oligonucleotide
  Antisense strand to SEQ ID NO: 2418060
uuucucacacagauuguuu

SEQ ID NO: 2418062 - RNA, 19 nt, Artificial Sequence
  Description of Artificial Sequence: Synthetic oligonucleotide
  Sense strand starting at position 3276 of SEQ ID NO: 1886596
ggugaaacagacuaugugu

SEQ ID NO: 2418063 - RNA, 19 nt, Artificial Sequence
  Description of Artificial Sequence: Synthetic oligonucleotide
  Antisense strand to SEQ ID NO: 2418062
acacauagucuguuucacc

SEQ ID NO: 2418064 - RNA, 19 nt, Artificial Sequence
  Description of Artificial Sequence: Synthetic oligonucleotide
  Sense strand starting at position 3278 of SEQ ID NO: 1886596
ugaaacagacuauguguau

SEQ ID NO: 2418065 - RNA, 19 nt, Artificial Sequence
  Description of Artificial Sequence: Synthetic oligonucleotide
  Antisense strand to SEQ ID NO: 2418064
auacacauagucuguuuca

SEQ ID NO: 2418066 - RNA, 19 nt, Artificial Sequence
  Description of Artificial Sequence: Synthetic oligonucleotide
  Sense strand starting at position 3279 of SEQ ID NO: 1886596
gaaacagacuauguguauu

SEQ ID NO: 2418067 - RNA, 19 nt, Artificial Sequence
  Description of Artificial Sequence: Synthetic oligonucleotide
  Antisense strand to SEQ ID NO: 2418066
aauacacauagucuguuuc

SEQ ID NO: 2418068 - RNA, 19 nt, Artificial Sequence
  Description of Artificial Sequence: Synthetic oligonucleotide
  Sense strand starting at position 3282 of SEQ ID NO: 1886596
acagacuauguguauuagu

SEQ ID NO: 2418069 - RNA, 19 nt, Artificial Sequence
  Description of Artificial Sequence: Synthetic oligonucleotide
  Antisense strand to SEQ ID NO: 2418068
acuaauacacauagucugu

SEQ ID NO: 2418070 - RNA, 19 nt, Artificial Sequence
  Description of Artificial Sequence: Synthetic oligonucleotide
  Sense strand starting at position 3597 of SEQ ID NO: 1886596
uuggcuuugccuguagcaa

SEQ ID NO: 2418071 - RNA, 19 nt, Artificial Sequence
  Description of Artificial Sequence: Synthetic oligonucleotide
  Antisense strand to SEQ ID NO: 2418070
uugcuacaggcaaagccaa

SEQ ID NO: 2418072 - RNA, 19 nt, Artificial Sequence
  Description of Artificial Sequence: Synthetic oligonucleotide
  Sense strand starting at position 3668 of SEQ ID NO: 1886596
uguccuauuuggcuacaca

SEQ ID NO: 2418073 - RNA, 19 nt, Artificial Sequence
  Description of Artificial Sequence: Synthetic oligonucleotide
  Antisense strand to SEQ ID NO: 2418072
uguguagccaaauaggaca

SEQ ID NO: 2418074 - RNA, 19 nt, Artificial Sequence
  Description of Artificial Sequence: Synthetic oligonucleotide
  Sense strand starting at position 3730 of SEQ ID NO: 1886596
gguaccaugaggugagaau

SEQ ID NO: 2418075 - RNA, 19 nt, Artificial Sequence
  Description of Artificial Sequence: Synthetic oligonucleotide
  Antisense strand to SEQ ID NO: 2418074
auucucaccucaugguacc

SEQ ID NO: 2418076 - RNA, 19 nt, Artificial Sequence
  Description of Artificial Sequence: Synthetic oligonucleotide
  Sense strand starting at position 3793 of SEQ ID NO: 1886596
ucagaagugcauuaucuuu

SEQ ID NO: 2418077 - RNA, 19 nt, Artificial Sequence
  Description of Artificial Sequence: Synthetic oligonucleotide
  Antisense strand to SEQ ID NO: 2418076
aaagauaaugcacuucuga

SEQ ID NO: 2418078 - RNA, 19 nt, Artificial Sequence
  Description of Artificial Sequence: Synthetic oligonucleotide
  Sense strand starting at position 3795 of SEQ ID NO: 1886596
agaagugcauuaucuuuga

SEQ ID NO: 2418079 - RNA, 19 nt, Artificial Sequence
  Description of Artificial Sequence: Synthetic oligonucleotide
  Antisense strand to SEQ ID NO: 2418078
ucaaagauaaugcacuucu

SEQ ID NO: 2418080 - RNA, 19 nt, Artificial Sequence
  Description of Artificial Sequence: Synthetic oligonucleotide
  Sense strand starting at position 3858 of SEQ ID NO: 1886596
aacguagugguacaauaua

SEQ ID NO: 2418081 - RNA, 19 nt, Artificial Sequence
  Description of Artificial Sequence: Synthetic oligonucleotide
  Antisense strand to SEQ ID NO: 2418080
uauauuguaccacuacguu

SEQ ID NO: 2418082 - RNA, 19 nt, Artificial Sequence
  Description of Artificial Sequence: Synthetic oligonucleotide
  Sense strand starting at position 3880 of SEQ ID NO: 1886596
ccagaaagcaugggucaga

SEQ ID NO: 2418083 - RNA, 19 nt, Artificial Sequence
  Description of Artificial Sequence: Synthetic oligonucleotide
  Antisense strand to SEQ ID NO: 2418082
ucugacccaugcuuucugg

SEQ ID NO: 2418084 - RNA, 19 nt, Artificial Sequence
  Description of Artificial Sequence: Synthetic oligonucleotide
  Sense strand starting at position 459 of SEQ ID NO: 1886597
gccugaauguuccacugag

SEQ ID NO: 2418085 - RNA, 19 nt, Artificial Sequence
  Description of Artificial Sequence: Synthetic oligonucleotide
  Antisense strand to SEQ ID NO: 2418084
cucaguggaacauucaggc

SEQ ID NO: 2418086 - RNA, 19 nt, Artificial Sequence
  Description of Artificial Sequence: Synthetic oligonucleotide
  Sense strand starting at position 478 of SEQ ID NO: 1886597
cccucuucuugccauagga

SEQ ID NO: 2418087 - RNA, 19 nt, Artificial Sequence
  Description of Artificial Sequence: Synthetic oligonucleotide
  Antisense strand to SEQ ID NO: 2418086
uccuauggcaagaagaggg

SEQ ID NO: 2418088 - RNA, 19 nt, Artificial Sequence
  Description of Artificial Sequence: Synthetic oligonucleotide
  Sense strand starting at position 986 of SEQ ID NO: 1886597
ucagcacaugcuugacuau

SEQ ID NO: 2418089 - RNA, 19 nt, Artificial Sequence
  Description of Artificial Sequence: Synthetic oligonucleotide
  Antisense strand to SEQ ID NO: 2418088
auagucaagcaugugcuga

SEQ ID NO: 2418090 - RNA, 19 nt, Artificial Sequence
  Description of Artificial Sequence: Synthetic oligonucleotide
  Sense strand starting at position 1084 of SEQ ID NO: 1886597
ccgugagcccucgcuuaca

SEQ ID NO: 2418091 - RNA, 19 nt, Artificial Sequence
  Description of Artificial Sequence: Synthetic oligonucleotide
  Antisense strand to SEQ ID NO: 2418090
uguaagcgagggcucacgg

SEQ ID NO: 2418092 - RNA, 19 nt, Artificial Sequence
  Description of Artificial Sequence: Synthetic oligonucleotide
  Sense strand starting at position 1110 of SEQ ID NO: 1886597
cuggcuguccugcagaaca

SEQ ID NO: 2418093 - RNA, 19 nt, Artificial Sequence
  Description of Artificial Sequence: Synthetic oligonucleotide
  Antisense strand to SEQ ID NO: 2418092
uguucugcaggacagccag

SEQ ID NO: 2418094 - RNA, 19 nt, Artificial Sequence
  Description of Artificial Sequence: Synthetic oligonucleotide
  Sense strand starting at position 1283 of SEQ ID NO: 1886597
cuuagagcuuggccuugaa

SEQ ID NO: 2418095 - RNA, 19 nt, Artificial Sequence
  Description of Artificial Sequence: Synthetic oligonucleotide
  Antisense strand to SEQ ID NO: 2418094
uucaaggccaagcucuaag

SEQ ID NO: 2418096 - RNA, 19 nt, Artificial Sequence
  Description of Artificial Sequence: Synthetic oligonucleotide
  Sense strand starting at position 1286 of SEQ ID NO: 1886597
agagcuuggccuugaaucu

SEQ ID NO: 2418097 - RNA, 19 nt, Artificial Sequence
  Description of Artificial Sequence: Synthetic oligonucleotide
  Antisense strand to SEQ ID NO: 2418096
agauucaaggccaagcucu

SEQ ID NO: 2418098 - RNA, 19 nt, Artificial Sequence
  Description of Artificial Sequence: Synthetic oligonucleotide
  Sense strand starting at position 1287 of SEQ ID NO: 1886597
gagcuuggccuugaaucua

SEQ ID NO: 2418099 - RNA, 19 nt, Artificial Sequence
  Description of Artificial Sequence: Synthetic oligonucleotide
  Antisense strand to SEQ ID NO: 2418098
uagauucaaggccaagcuc

SEQ ID NO: 2418100 - RNA, 19 nt, Artificial Sequence
  Description of Artificial Sequence: Synthetic oligonucleotide
  Sense strand starting at position 2465 of SEQ ID NO: 1886597
gucagaugugcucagugac

SEQ ID NO: 2418101 - RNA, 19 nt, Artificial Sequence
  Description of Artificial Sequence: Synthetic oligonucleotide
  Antisense strand to SEQ ID NO: 2418100
gucacugagcacaucugac

SEQ ID NO: 2418102 - RNA, 19 nt, Artificial Sequence
  Description of Artificial Sequence: Synthetic oligonucleotide
  Sense strand starting at position 2707 of SEQ ID NO: 1886597
ucccuuucuccacgcagau

SEQ ID NO: 2418103 - RNA, 19 nt, Artificial Sequence
  Description of Artificial Sequence: Synthetic oligonucleotide
  Antisense strand to SEQ ID NO: 2418102
aucugcguggagaaaggga

SEQ ID NO: 2418104 - RNA, 19 nt, Artificial Sequence
  Description of Artificial Sequence: Synthetic oligonucleotide
  Sense strand starting at position 2720 of SEQ ID NO: 1886597
gcagauaagcugugguucu

SEQ ID NO: 2418105 - RNA, 19 nt, Artificial Sequence
  Description of Artificial Sequence: Synthetic oligonucleotide
  Antisense strand to SEQ ID NO: 2418104
agaaccacagcuuaucugc

SEQ ID NO: 2418106 - RNA, 19 nt, Artificial Sequence
  Description of Artificial Sequence: Synthetic oligonucleotide
  Sense strand starting at position 3678 of SEQ ID NO: 1886597
aaacuuagcugguggauaa

SEQ ID NO: 2418107 - RNA, 19 nt, Artificial Sequence
  Description of Artificial Sequence: Synthetic oligonucleotide
  Antisense strand to SEQ ID NO: 2418106
uuauccaccagcuaaguuu

SEQ ID NO: 2418108 - RNA, 19 nt, Artificial Sequence
  Description of Artificial Sequence: Synthetic oligonucleotide
  Sense strand starting at position 3785 of SEQ ID NO: 1886597
gccuuucuccaaggugagu

SEQ ID NO: 2418109 - RNA, 19 nt, Artificial Sequence
  Description of Artificial Sequence: Synthetic oligonucleotide
  Antisense strand to SEQ ID NO: 2418108
acucaccuuggagaaaggc

SEQ ID NO: 2418110 - RNA, 19 nt, Artificial Sequence
  Description of Artificial Sequence: Synthetic oligonucleotide
  Sense strand starting at position 3961 of SEQ ID NO: 1886597
ggcguagucugggagccau

SEQ ID NO: 2418111 - RNA, 19 nt, Artificial Sequence
  Description of Artificial Sequence: Synthetic oligonucleotide
  Antisense strand to SEQ ID NO: 2418110
auggcucccagacuacgcc

SEQ ID NO: 2418112 - RNA, 19 nt, Artificial Sequence
  Description of Artificial Sequence: Synthetic oligonucleotide
  Sense strand starting at position 3973 of SEQ ID NO: 1886597
gagccaucuccagaaggcu

SEQ ID NO: 2418113 - RNA, 19 nt, Artificial Sequence
  Description of Artificial Sequence: Synthetic oligonucleotide
  Antisense strand to SEQ ID NO: 2418112
agccuucuggagauggcuc

SEQ ID NO: 2418114 - RNA, 19 nt, Artificial Sequence
  Description of Artificial Sequence: Synthetic oligonucleotide
  Sense strand starting at position 3982 of SEQ ID NO: 1886597
ccagaaggcuccugacaau

SEQ ID NO: 2418115 - RNA, 19 nt, Artificial Sequence
  Description of Artificial Sequence: Synthetic oligonucleotide
  Antisense strand to SEQ ID NO: 2418114
auugucaggagccuucugg

SEQ ID NO: 2418116 - RNA, 19 nt, Artificial Sequence
  Description of Artificial Sequence: Synthetic oligonucleotide
  Sense strand starting at position 571 of SEQ ID NO: 1886598
cugagucaucgugacccua

SEQ ID NO: 2418117 - RNA, 19 nt, Artificial Sequence
  Description of Artificial Sequence: Synthetic oligonucleotide
  Antisense strand to SEQ ID NO: 2418116
uagggucacgaugacucag

SEQ ID NO: 2418118 - RNA, 19 nt, Artificial Sequence
  Description of Artificial Sequence: Synthetic oligonucleotide
  Sense strand starting at position 573 of SEQ ID NO: 1886598
gagucaucgugacccuaaa

SEQ ID NO: 2418119 - RNA, 19 nt, Artificial Sequence
  Description of Artificial Sequence: Synthetic oligonucleotide
  Antisense strand to SEQ ID NO: 2418118
uuuagggucacgaugacuc

SEQ ID NO: 2418120 - RNA, 19 nt, Artificial Sequence
  Description of Artificial Sequence: Synthetic oligonucleotide
  Sense strand starting at position 606 of SEQ ID NO: 1886598
ugagcuauggaucaaugca

SEQ ID NO: 2418121 - RNA, 19 nt, Artificial Sequence
  Description of Artificial Sequence: Synthetic oligonucleotide
  Antisense strand to SEQ ID NO: 2418120
ugcauugauccauagcuca

SEQ ID NO: 2418122 - RNA, 19 nt, Artificial Sequence
  Description of Artificial Sequence: Synthetic oligonucleotide
  Sense strand starting at position 722 of SEQ ID NO: 1886598
gcuggagcccucuacagau

SEQ ID NO: 2418123 - RNA, 19 nt, Artificial Sequence
  Description of Artificial Sequence: Synthetic oligonucleotide
  Antisense strand to SEQ ID NO: 2418122
aucuguagagggcuccagc

SEQ ID NO: 2418124 - RNA, 19 nt, Artificial Sequence
  Description of Artificial Sequence: Synthetic oligonucleotide
  Sense strand starting at position 854 of SEQ ID NO: 1886598
acacgacuuucugauuucu

SEQ ID NO: 2418125 - RNA, 19 nt, Artificial Sequence
  Description of Artificial Sequence: Synthetic oligonucleotide
  Antisense strand to SEQ ID NO: 2418124
agaaaucagaaagucgugu

SEQ ID NO: 2418126 - RNA, 19 nt, Artificial Sequence
  Description of Artificial Sequence: Synthetic oligonucleotide
  Sense strand starting at position 856 of SEQ ID NO: 1886598
acgacuuucugauuucugu

SEQ ID NO: 2418127 - RNA, 19 nt, Artificial Sequence
  Description of Artificial Sequence: Synthetic oligonucleotide
  Antisense strand to SEQ ID NO: 2418126
acagaaaucagaaagucgu

SEQ ID NO: 2418128 - RNA, 19 nt, Artificial Sequence
  Description of Artificial Sequence: Synthetic oligonucleotide
  Sense strand starting at position 887 of SEQ ID NO: 1886598
gcagcuguaguugcuuaau

SEQ ID NO: 2418129 - RNA, 19 nt, Artificial Sequence
  Description of Artificial Sequence: Synthetic oligonucleotide
  Antisense strand to SEQ ID NO: 2418128
auuaagcaacuacagcugc

SEQ ID NO: 2418130 - RNA, 19 nt, Artificial Sequence
  Description of Artificial Sequence: Synthetic oligonucleotide
  Sense strand starting at position 890 of SEQ ID NO: 1886598
gcuguaguugcuuaauauu

SEQ ID NO: 2418131 - RNA, 19 nt, Artificial Sequence
  Description of Artificial Sequence: Synthetic oligonucleotide
  Antisense strand to SEQ ID NO: 2418130
aauauuaagcaacuacagc

SEQ ID NO: 2418132 - RNA, 19 nt, Artificial Sequence
  Description of Artificial Sequence: Synthetic oligonucleotide
  Sense strand starting at position 1093 of SEQ ID NO: 1886598
gcaaaucagacuugggagu

SEQ ID NO: 2418133 - RNA, 19 nt, Artificial Sequence
  Description of Artificial Sequence: Synthetic oligonucleotide
  Antisense strand to SEQ ID NO: 2418132
acucccaagucugauuugc

SEQ ID NO: 2418134 - RNA, 19 nt, Artificial Sequence
  Description of Artificial Sequence: Synthetic oligonucleotide
  Sense strand starting at position 1106 of SEQ ID NO: 1886598
gggagucugaguuacaggu

SEQ ID NO: 2418135 - RNA, 19 nt, Artificial Sequence
  Description of Artificial Sequence: Synthetic oligonucleotide
  Antisense strand to SEQ ID NO: 2418134
accuguaacucagacuccc

SEQ ID NO: 2418136 - RNA, 19 nt, Artificial Sequence
  Description of Artificial Sequence: Synthetic oligonucleotide
  Sense strand starting at position 1162 of SEQ ID NO: 1886598
ucacuugucccgggugaca

SEQ ID NO: 2418137 - RNA, 19 nt, Artificial Sequence
  Description of Artificial Sequence: Synthetic oligonucleotide
  Antisense strand to SEQ ID NO: 2418136
ugucacccgggacaaguga

SEQ ID NO: 2418138 - RNA, 19 nt, Artificial Sequence
  Description of Artificial Sequence: Synthetic oligonucleotide
  Sense strand starting at position 1270 of SEQ ID NO: 1886598
caugaauuccucugugugu

SEQ ID NO: 2418139 - RNA, 19 nt, Artificial Sequence
  Description of Artificial Sequence: Synthetic oligonucleotide
  Antisense strand to SEQ ID NO: 2418138
acacacagaggaauucaug

SEQ ID NO: 2418140 - RNA, 19 nt, Artificial Sequence
  Description of Artificial Sequence: Synthetic oligonucleotide
  Sense strand starting at position 1271 of SEQ ID NO: 1886598
augaauuccucugugugua

SEQ ID NO: 2418141 - RNA, 19 nt, Artificial Sequence
  Description of Artificial Sequence: Synthetic oligonucleotide
  Antisense strand to SEQ ID NO: 2418140
uacacacagaggaauucau

SEQ ID NO: 2418142 - RNA, 19 nt, Artificial Sequence
  Description of Artificial Sequence: Synthetic oligonucleotide
  Sense strand starting at position 1273 of SEQ ID NO: 1886598
gaauuccucuguguguauu

SEQ ID NO: 2418143 - RNA, 19 nt, Artificial Sequence
  Description of Artificial Sequence: Synthetic oligonucleotide
  Antisense strand to SEQ ID NO: 2418142
aauacacacagaggaauuc

SEQ ID NO: 2418144 - RNA, 19 nt, Artificial Sequence
  Description of Artificial Sequence: Synthetic oligonucleotide
  Sense strand starting at position 1349 of SEQ ID NO: 1886598
gagcuuauacaacguuaga

SEQ ID NO: 2418145 - RNA, 19 nt, Artificial Sequence
  Description of Artificial Sequence: Synthetic oligonucleotide
  Antisense strand to SEQ ID NO: 2418144
ucuaacguuguauaagcuc

SEQ ID NO: 2418146 - RNA, 19 nt, Artificial Sequence
  Description of Artificial Sequence: Synthetic oligonucleotide
  Sense strand starting at position 1581 of SEQ ID NO: 1886598
agguaacacuuguuucuuu

SEQ ID NO: 2418147 - RNA, 19 nt, Artificial Sequence
  Description of Artificial Sequence: Synthetic oligonucleotide
  Antisense strand to SEQ ID NO: 2418146
aaagaaacaaguguuaccu

SEQ ID NO: 2418148 - RNA, 19 nt, Artificial Sequence
  Description of Artificial Sequence: Synthetic oligonucleotide
  Sense strand starting at position 1735 of SEQ ID NO: 1886598
ugcgcauggcgucuuucaa

SEQ ID NO: 2418149 - RNA, 19 nt, Artificial Sequence
  Description of Artificial Sequence: Synthetic oligonucleotide
  Antisense strand to SEQ ID NO: 2418148
uugaaagacgccaugcgca

SEQ ID NO: 2418150 - RNA, 19 nt, Artificial Sequence
  Description of Artificial Sequence: Synthetic oligonucleotide
  Sense strand starting at position 1736 of SEQ ID NO: 1886598
gcgcauggcgucuuucaau

SEQ ID NO: 2418151 - RNA, 19 nt, Artificial Sequence
  Description of Artificial Sequence: Synthetic oligonucleotide
  Antisense strand to SEQ ID NO: 2418150
auugaaagacgccaugcgc

SEQ ID NO: 2418152 - RNA, 19 nt, Artificial Sequence
  Description of Artificial Sequence: Synthetic oligonucleotide
  Sense strand starting at position 1812 of SEQ ID NO: 1886598
gcgcuacagcggaagaguu

SEQ ID NO: 2418153 - RNA, 19 nt, Artificial Sequence
  Description of Artificial Sequence: Synthetic oligonucleotide
  Antisense strand to SEQ ID NO: 2418152
aacucuuccgcuguagcgc

SEQ ID NO: 2418154 - RNA, 19 nt, Artificial Sequence
  Description of Artificial Sequence: Synthetic oligonucleotide
  Sense strand starting at position 1848 of SEQ ID NO: 1886598
ucuucuuugaguugcugga

SEQ ID NO: 2418155 - RNA, 19 nt, Artificial Sequence
  Description of Artificial Sequence: Synthetic oligonucleotide
  Antisense strand to SEQ ID NO: 2418154
uccagcaacucaaagaaga

SEQ ID NO: 2418156 - RNA, 19 nt, Artificial Sequence
  Description of Artificial Sequence: Synthetic oligonucleotide
  Sense strand starting at position 1852 of SEQ ID NO: 1886598
cuuugaguugcuggaggaa

SEQ ID NO: 2418157 - RNA, 19 nt, Artificial Sequence
  Description of Artificial Sequence: Synthetic oligonucleotide
  Antisense strand to SEQ ID NO: 2418156
uuccuccagcaacucaaag

SEQ ID NO: 2418158 - RNA, 19 nt, Artificial Sequence
  Description of Artificial Sequence: Synthetic oligonucleotide
  Sense strand starting at position 2143 of SEQ ID NO: 1886598
gggaccucaucuucucaau

SEQ ID NO: 2418159 - RNA, 19 nt, Artificial Sequence
  Description of Artificial Sequence: Synthetic oligonucleotide
  Antisense strand to SEQ ID NO: 2418158
auugagaagaugagguccc

SEQ ID NO: 2418160 - RNA, 19 nt, Artificial Sequence
  Description of Artificial Sequence: Synthetic oligonucleotide
  Sense strand starting at position 2259 of SEQ ID NO: 1886598
aggauuauucccuaaagcc

SEQ ID NO: 2418161 - RNA, 19 nt, Artificial Sequence
  Description of Artificial Sequence: Synthetic oligonucleotide
  Antisense strand to SEQ ID NO: 2418160
ggcuuuagggaauaauccu

SEQ ID NO: 2418162 - RNA, 19 nt, Artificial Sequence
  Description of Artificial Sequence: Synthetic oligonucleotide
  Sense strand starting at position 2315 of SEQ ID NO: 1886598
ucagaugacuguuccagac

SEQ ID NO: 2418163 - RNA, 19 nt, Artificial Sequence
  Description of Artificial Sequence: Synthetic oligonucleotide
  Antisense strand to SEQ ID NO: 2418162
gucuggaacagucaucuga

SEQ ID NO: 2418164 - RNA, 19 nt, Artificial Sequence
  Description of Artificial Sequence: Synthetic oligonucleotide
  Sense strand starting at position 2827 of SEQ ID NO: 1886598
ccacuaagaucugaggacu

SEQ ID NO: 2418165 - RNA, 19 nt, Artificial Sequence
  Description of Artificial Sequence: Synthetic oligonucleotide
  Antisense strand to SEQ ID NO: 2418164
aguccucagaucuuagugg

SEQ ID NO: 2418166 - RNA, 19 nt, Artificial Sequence
  Description of Artificial Sequence: Synthetic oligonucleotide
  Sense strand starting at position 3020 of SEQ ID NO: 1886598
aggagaggccucugugagu

SEQ ID NO: 2418167 - RNA, 19 nt, Artificial Sequence
  Description of Artificial Sequence: Synthetic oligonucleotide
  Antisense strand to SEQ ID NO: 2418166
acucacagaggccucuccu

SEQ ID NO: 2418168 - RNA, 19 nt, Artificial Sequence
  Description of Artificial Sequence: Synthetic oligonucleotide
  Sense strand starting at position 3031 of SEQ ID NO: 1886598
cugugaguucugugaaugg

SEQ ID NO: 2418169 - RNA, 19 nt, Artificial Sequence
  Description of Artificial Sequence: Synthetic oligonucleotide
  Antisense strand to SEQ ID NO: 2418168
ccauucacagaacucacag

SEQ ID NO: 2418170 - RNA, 19 nt, Artificial Sequence
  Description of Artificial Sequence: Synthetic oligonucleotide
  Sense strand starting at position 3035 of SEQ ID NO: 1886598
gaguucugugaauggaagu

SEQ ID NO: 2418171 - RNA, 19 nt, Artificial Sequence
  Description of Artificial Sequence: Synthetic oligonucleotide
  Antisense strand to SEQ ID NO: 2418170
acuuccauucacagaacuc

SEQ ID NO: 2418172 - RNA, 19 nt, Artificial Sequence
  Description of Artificial Sequence: Synthetic oligonucleotide
  Sense strand starting at position 3217 of SEQ ID NO: 1886598
cugugagggagcgauucua

SEQ ID NO: 2418173 - RNA, 19 nt, Artificial Sequence
  Description of Artificial Sequence: Synthetic oligonucleotide
  Antisense strand to SEQ ID NO: 2418172
uagaaucgcucccucacag

SEQ ID NO: 2418174 - RNA, 19 nt, Artificial Sequence
  Description of Artificial Sequence: Synthetic oligonucleotide
  Sense strand starting at position 3233 of SEQ ID NO: 1886598
cuacccuugccaugugaca

SEQ ID NO: 2418175 - RNA, 19 nt, Artificial Sequence
  Description of Artificial Sequence: Synthetic oligonucleotide
  Antisense strand to SEQ ID NO: 2418174
ugucacauggcaaggguag

SEQ ID NO: 2418176 - RNA, 19 nt, Artificial Sequence
  Description of Artificial Sequence: Synthetic oligonucleotide
  Sense strand starting at position 3295 of SEQ ID NO: 1886598
aaauauucuccgggugaac

SEQ ID NO: 2418177 - RNA, 19 nt, Artificial Sequence
  Description of Artificial Sequence: Synthetic oligonucleotide
  Antisense strand to SEQ ID NO: 2418176
guucacccggagaauauuu

SEQ ID NO: 2418178 - RNA, 19 nt, Artificial Sequence
  Description of Artificial Sequence: Synthetic oligonucleotide
  Sense strand starting at position 3371 of SEQ ID NO: 1886598
cuaagauacgaucgagaac

SEQ ID NO: 2418179 - RNA, 19 nt, Artificial Sequence
  Description of Artificial Sequence: Synthetic oligonucleotide
  Antisense strand to SEQ ID NO: 2418178
guucucgaucguaucuuag

SEQ ID NO: 2418180 - RNA, 19 nt, Artificial Sequence
  Description of Artificial Sequence: Synthetic oligonucleotide
  Sense strand starting at position 3533 of SEQ ID NO: 1886598
uguguuugaacccagaaug

SEQ ID NO: 2418181 - RNA, 19 nt, Artificial Sequence
  Description of Artificial Sequence: Synthetic oligonucleotide
  Antisense strand to SEQ ID NO: 2418180
cauucuggguucaaacaca

SEQ ID NO: 2418182 - RNA, 19 nt, Artificial Sequence
  Description of Artificial Sequence: Synthetic oligonucleotide
  Sense strand starting at position 3760 of SEQ ID NO: 1886598
cgguaacucagauguguua

SEQ ID NO: 2418183 - RNA, 19 nt, Artificial Sequence
  Description of Artificial Sequence: Synthetic oligonucleotide
  Antisense strand to SEQ ID NO: 2418182
uaacacaucugaguuaccg

SEQ ID NO: 2418184 - RNA, 19 nt, Artificial Sequence
  Description of Artificial Sequence: Synthetic oligonucleotide
  Sense strand starting at position 3762 of SEQ ID NO: 1886598
guaacucagauguguuaug

SEQ ID NO: 2418185 - RNA, 19 nt, Artificial Sequence
  Description of Artificial Sequence: Synthetic oligonucleotide
  Antisense strand to SEQ ID NO: 2418184
cauaacacaucugaguuac

SEQ ID NO: 2418186 - RNA, 19 nt, Artificial Sequence
  Description of Artificial Sequence: Synthetic oligonucleotide
  Sense strand starting at position 3771 of SEQ ID NO: 1886598
auguguuauguguugucuu

SEQ ID NO: 2418187 - RNA, 19 nt, Artificial Sequence
  Description of Artificial Sequence: Synthetic oligonucleotide
  Antisense strand to SEQ ID NO: 2418186
aagacaacacauaacacau

SEQ ID NO: 2418188 - RNA, 19 nt, Artificial Sequence
  Description of Artificial Sequence: Synthetic oligonucleotide
  Sense strand starting at position 3893 of SEQ ID NO: 1886598
gccucugaaucuucuagaa

SEQ ID NO: 2418189 - RNA, 19 nt, Artificial Sequence
  Description of Artificial Sequence: Synthetic oligonucleotide
  Antisense strand to SEQ ID NO: 2418188
uucuagaagauucagaggc

SEQ ID NO: 2418190 - RNA, 19 nt, Artificial Sequence
  Description of Artificial Sequence: Synthetic oligonucleotide
  Sense strand starting at position 3933 of SEQ ID NO: 1886598
acagauuugcucugagccu

SEQ ID NO: 2418191 - RNA, 19 nt, Artificial Sequence
  Description of Artificial Sequence: Synthetic oligonucleotide
  Antisense strand to SEQ ID NO: 2418190
aggcucagagcaaaucugu

SEQ ID NO: 2418192 - RNA, 19 nt, Artificial Sequence
  Description of Artificial Sequence: Synthetic oligonucleotide
  Sense strand starting at position 3952 of SEQ ID NO: 1886598
gugggauagccucaucugu

SEQ ID NO: 2418193 - RNA, 19 nt, Artificial Sequence
  Description of Artificial Sequence: Synthetic oligonucleotide
  Antisense strand to SEQ ID NO: 2418192
acagaugaggcuaucccac

SEQ ID NO: 2418194 - RNA, 19 nt, Artificial Sequence
  Description of Artificial Sequence: Synthetic oligonucleotide
  Sense strand starting at position 3954 of SEQ ID NO: 1886598
gggauagccucaucuguuc

SEQ ID NO: 2418195 - RNA, 19 nt, Artificial Sequence
  Description of Artificial Sequence: Synthetic oligonucleotide
  Antisense strand to SEQ ID NO: 2418194
gaacagaugaggcuauccc

SEQ ID NO: 2418196 - RNA, 19 nt, Artificial Sequence
  Description of Artificial Sequence: Synthetic oligonucleotide
  Sense strand starting at position 156 of SEQ ID NO: 1886600
uguccugggcucugagaga

SEQ ID NO: 2418197 - RNA, 19 nt, Artificial Sequence
  Description of Artificial Sequence: Synthetic oligonucleotide
  Antisense strand to SEQ ID NO: 2418196
ucucucagagcccaggaca

SEQ ID NO: 2418198 - RNA, 19 nt, Artificial Sequence
  Description of Artificial Sequence: Synthetic oligonucleotide
  Sense strand starting at position 1319 of SEQ ID NO: 1886600
guguacauuccuugcaaag

SEQ ID NO: 2418199 - RNA, 19 nt, Artificial Sequence
  Description of Artificial Sequence: Synthetic oligonucleotide
  Antisense strand to SEQ ID NO: 2418198
cuuugcaaggaauguacac

SEQ ID NO: 2418200 - RNA, 19 nt, Artificial Sequence
  Description of Artificial Sequence: Synthetic oligonucleotide
  Sense strand starting at position 1321 of SEQ ID NO: 1886600
guacauuccuugcaaaguc

SEQ ID NO: 2418201 - RNA, 19 nt, Artificial Sequence
  Description of Artificial Sequence: Synthetic oligonucleotide
  Antisense strand to SEQ ID NO: 2418200
gacuuugcaaggaauguac

SEQ ID NO: 2418202 - RNA, 19 nt, Artificial Sequence
  Description of Artificial Sequence: Synthetic oligonucleotide
  Sense strand starting at position 1425 of SEQ ID NO: 1886600
uugcaucugucaggagaua

SEQ ID NO: 2418203 - RNA, 19 nt, Artificial Sequence
  Description of Artificial Sequence: Synthetic oligonucleotide
  Antisense strand to SEQ ID NO: 2418202
uaucuccugacagaugcaa

SEQ ID NO: 2418204 - RNA, 19 nt, Artificial Sequence
  Description of Artificial Sequence: Synthetic oligonucleotide
  Sense strand starting at position 1426 of SEQ ID NO: 1886600
ugcaucugucaggagauaa

SEQ ID NO: 2418205 - RNA, 19 nt, Artificial Sequence
  Description of Artificial Sequence: Synthetic oligonucleotide
  Antisense strand to SEQ ID NO: 2418204
uuaucuccugacagaugca

SEQ ID NO: 2418206 - RNA, 19 nt, Artificial Sequence
  Description of Artificial Sequence: Synthetic oligonucleotide
  Sense strand starting at position 3296 of SEQ ID NO: 1886600
agccauagaugaugauaaa

SEQ ID NO: 2418207 - RNA, 19 nt, Artificial Sequence
  Description of Artificial Sequence: Synthetic oligonucleotide
  Antisense strand to SEQ ID NO: 2418206
uuuaucaucaucuauggcu

SEQ ID NO: 2418208 - RNA, 19 nt, Artificial Sequence
  Description of Artificial Sequence: Synthetic oligonucleotide
  Sense strand starting at position 3309 of SEQ ID NO: 1886600
gauaaaugaauggguguga

SEQ ID NO: 2418209 - RNA, 19 nt, Artificial Sequence
  Description of Artificial Sequence: Synthetic oligonucleotide
  Antisense strand to SEQ ID NO: 2418208
ucacacccauucauuuauc

SEQ ID NO: 2418210 - RNA, 19 nt, Artificial Sequence
  Description of Artificial Sequence: Synthetic oligonucleotide
  Sense strand starting at position 2639 of SEQ ID NO: 1886603
acgugagagcccuguuaca

SEQ ID NO: 2418211 - RNA, 19 nt, Artificial Sequence
  Description of Artificial Sequence: Synthetic oligonucleotide
  Antisense strand to SEQ ID NO: 2418210
uguaacagggcucucacgu

SEQ ID NO: 2418212 - RNA, 19 nt, Artificial Sequence
  Description of Artificial Sequence: Synthetic oligonucleotide
  Sense strand starting at position 156 of SEQ ID NO: 1886605
uguccugggcucugagaga

SEQ ID NO: 2418213 - RNA, 19 nt, Artificial Sequence
  Description of Artificial Sequence: Synthetic oligonucleotide
  Antisense strand to SEQ ID NO: 2418212
ucucucagagcccaggaca

SEQ ID NO: 2418214 - RNA, 19 nt, Artificial Sequence
  Description of Artificial Sequence: Synthetic oligonucleotide
  Sense strand starting at position 1319 of SEQ ID NO: 1886605
guguacauuccuugcaaag

SEQ ID NO: 2418215 - RNA, 19 nt, Artificial Sequence
  Description of Artificial Sequence: Synthetic oligonucleotide
  Antisense strand to SEQ ID NO: 2418214
cuuugcaaggaauguacac

SEQ ID NO: 2418216 - RNA, 19 nt, Artificial Sequence
  Description of Artificial Sequence: Synthetic oligonucleotide
  Sense strand starting at position 1321 of SEQ ID NO: 1886605
guacauuccuugcaaaguc

SEQ ID NO: 2418217 - RNA, 19 nt, Artificial Sequence
  Description of Artificial Sequence: Synthetic oligonucleotide
  Antisense strand to SEQ ID NO: 2418216
gacuuugcaaggaauguac

SEQ ID NO: 2418218 - RNA, 19 nt, Artificial Sequence
  Description of Artificial Sequence: Synthetic oligonucleotide
  Sense strand starting at position 1425 of SEQ ID NO: 1886605
uugcaucugucaggagaua

SEQ ID NO: 2418219 - RNA, 19 nt, Artificial Sequence
  Description of Artificial Sequence: Synthetic oligonucleotide
  Antisense strand to SEQ ID NO: 2418218
uaucuccugacagaugcaa

SEQ ID NO: 2418220 - RNA, 19 nt, Artificial Sequence
  Description of Artificial Sequence: Synthetic oligonucleotide
  Sense strand starting at position 1426 of SEQ ID NO: 1886605
ugcaucugucaggagauaa

SEQ ID NO: 2418221 - RNA, 19 nt, Artificial Sequence
  Description of Artificial Sequence: Synthetic oligonucleotide
  Antisense strand to SEQ ID NO: 2418220
uuaucuccugacagaugca

SEQ ID NO: 2418222 - RNA, 19 nt, Artificial Sequence
  Description of Artificial Sequence: Synthetic oligonucleotide
  Sense strand starting at position 3296 of SEQ ID NO: 1886605
agccauagaugaugauaaa

SEQ ID NO: 2418223 - RNA, 19 nt, Artificial Sequence
  Description of Artificial Sequence: Synthetic oligonucleotide
  Antisense strand to SEQ ID NO: 2418222
uuuaucaucaucuauggcu

SEQ ID NO: 2418224 - RNA, 19 nt, Artificial Sequence
  Description of Artificial Sequence: Synthetic oligonucleotide
  Sense strand starting at position 3309 of SEQ ID NO: 1886605
gauaaaugaauggguguga

SEQ ID NO: 2418225 - RNA, 19 nt, Artificial Sequence
  Description of Artificial Sequence: Synthetic oligonucleotide
  Antisense strand to SEQ ID NO: 2418224
ucacacccauucauuuauc

SEQ ID NO: 2418226 - RNA, 19 nt, Artificial Sequence
  Description of Artificial Sequence: Synthetic oligonucleotide
  Sense strand starting at position 2639 of SEQ ID NO: 1886608
acgugagagcccuguuaca

SEQ ID NO: 2418227 - RNA, 19 nt, Artificial Sequence
  Description of Artificial Sequence: Synthetic oligonucleotide
  Antisense strand to SEQ ID NO: 2418226
uguaacagggcucucacgu

SEQ ID NO: 2418228 - RNA, 19 nt, Artificial Sequence
  Description of Artificial Sequence: Synthetic oligonucleotide
  Sense strand starting at position 156 of SEQ ID NO: 1886610
uguccugggcucugagaga

SEQ ID NO: 2418229 - RNA, 19 nt, Artificial Sequence
  Description of Artificial Sequence: Synthetic oligonucleotide
  Antisense strand to SEQ ID NO: 2418228
ucucucagagcccaggaca

SEQ ID NO: 2418230 - RNA, 19 nt, Artificial Sequence
  Description of Artificial Sequence: Synthetic oligonucleotide
  Sense strand starting at position 1319 of SEQ ID NO: 1886610
guguacauuccuugcaaag

SEQ ID NO: 2418231 - RNA, 19 nt, Artificial Sequence
  Description of Artificial Sequence: Synthetic oligonucleotide
  Antisense strand to SEQ ID NO: 2418230
cuuugcaaggaauguacac

SEQ ID NO: 2418232 - RNA, 19 nt, Artificial Sequence
  Description of Artificial Sequence: Synthetic oligonucleotide
  Sense strand starting at position 1321 of SEQ ID NO: 1886610
guacauuccuugcaaaguc

SEQ ID NO: 2418233 - RNA, 19 nt, Artificial Sequence
  Description of Artificial Sequence: Synthetic oligonucleotide
  Antisense strand to SEQ ID NO: 2418232
gacuuugcaaggaauguac

SEQ ID NO: 2418234 - RNA, 19 nt, Artificial Sequence
  Description of Artificial Sequence: Synthetic oligonucleotide
  Sense strand starting at position 1425 of SEQ ID NO: 1886610
uugcaucugucaggagaua

SEQ ID NO: 2418235 - RNA, 19 nt, Artificial Sequence
  Description of Artificial Sequence: Synthetic oligonucleotide
  Antisense strand to SEQ ID NO: 2418234
uaucuccugacagaugcaa

SEQ ID NO: 2418236 - RNA, 19 nt, Artificial Sequence
  Description of Artificial Sequence: Synthetic oligonucleotide
  Sense strand starting at position 1426 of SEQ ID NO: 1886610
ugcaucugucaggagauaa

SEQ ID NO: 2418237 - RNA, 19 nt, Artificial Sequence
  Description of Artificial Sequence: Synthetic oligonucleotide
  Antisense strand to SEQ ID NO: 2418236
uuaucuccugacagaugca

SEQ ID NO: 2418238 - RNA, 19 nt, Artificial Sequence
  Description of Artificial Sequence: Synthetic oligonucleotide
  Sense strand starting at position 3296 of SEQ ID NO: 1886610
agccauagaugaugauaaa

SEQ ID NO: 2418239 - RNA, 19 nt, Artificial Sequence
  Description of Artificial Sequence: Synthetic oligonucleotide
  Antisense strand to SEQ ID NO: 2418238
uuuaucaucaucuauggcu

SEQ ID NO: 2418240 - RNA, 19 nt, Artificial Sequence
  Description of Artificial Sequence: Synthetic oligonucleotide
  Sense strand starting at position 3309 of SEQ ID NO: 1886610
gauaaaugaauggguguga

SEQ ID NO: 2418241 - RNA, 19 nt, Artificial Sequence
  Description of Artificial Sequence: Synthetic oligonucleotide
  Antisense strand to SEQ ID NO: 2418240
ucacacccauucauuuauc

SEQ ID NO: 2418242 - RNA, 19 nt, Artificial Sequence
  Description of Artificial Sequence: Synthetic oligonucleotide
  Sense strand starting at position 2639 of SEQ ID NO: 1886613
acgugagagcccuguuaca

SEQ ID NO: 2418243 - RNA, 19 nt, Artificial Sequence
  Description of Artificial Sequence: Synthetic oligonucleotide
  Antisense strand to SEQ ID NO: 2418242
uguaacagggcucucacgu

SEQ ID NO: 2418244 - RNA, 19 nt, Artificial Sequence
  Description of Artificial Sequence: Synthetic oligonucleotide
  Sense strand starting at position 156 of SEQ ID NO: 1886615
uguccugggcucugagaga

SEQ ID NO: 2418245 - RNA, 19 nt, Artificial Sequence
  Description of Artificial Sequence: Synthetic oligonucleotide
  Antisense strand to SEQ ID NO: 2418244
ucucucagagcccaggaca

SEQ ID NO: 2418246 - RNA, 19 nt, Artificial Sequence
  Description of Artificial Sequence: Synthetic oligonucleotide
  Sense strand starting at position 1319 of SEQ ID NO: 1886615
guguacauuccuugcaaag

SEQ ID NO: 2418247 - RNA, 19 nt, Artificial Sequence
  Description of Artificial Sequence: Synthetic oligonucleotide
  Antisense strand to SEQ ID NO: 2418246
cuuugcaaggaauguacac

SEQ ID NO: 2418248 - RNA, 19 nt, Artificial Sequence
  Description of Artificial Sequence: Synthetic oligonucleotide
  Sense strand starting at position 1321 of SEQ ID NO: 1886615
guacauuccuugcaaaguc

SEQ ID NO: 2418249 - RNA, 19 nt, Artificial Sequence
  Description of Artificial Sequence: Synthetic oligonucleotide
  Antisense strand to SEQ ID NO: 2418248
gacuuugcaaggaauguac

SEQ ID NO: 2418250 - RNA, 19 nt, Artificial Sequence
  Description of Artificial Sequence: Synthetic oligonucleotide
  Sense strand starting at position 1425 of SEQ ID NO: 1886615
uugcaucugucaggagaua

SEQ ID NO: 2418251 - RNA, 19 nt, Artificial Sequence
  Description of Artificial Sequence: Synthetic oligonucleotide
  Antisense strand to SEQ ID NO: 2418250
uaucuccugacagaugcaa

SEQ ID NO: 2418252 - RNA, 19 nt, Artificial Sequence
  Description of Artificial Sequence: Synthetic oligonucleotide
  Sense strand starting at position 1426 of SEQ ID NO: 1886615
ugcaucugucaggagauaa

SEQ ID NO: 2418253 - RNA, 19 nt, Artificial Sequence
  Description of Artificial Sequence: Synthetic oligonucleotide
  Antisense strand to SEQ ID NO: 2418252
uuaucuccugacagaugca

SEQ ID NO: 2418254 - RNA, 19 nt, Artificial Sequence
  Description of Artificial Sequence: Synthetic oligonucleotide
  Sense strand starting at position 3296 of SEQ ID NO: 1886615
agccauagaugaugauaaa

SEQ ID NO: 2418255 - RNA, 19 nt, Artificial Sequence
  Description of Artificial Sequence: Synthetic oligonucleotide
  Antisense strand to SEQ ID NO: 2418254
uuuaucaucaucuauggcu

SEQ ID NO: 2418256 - RNA, 19 nt, Artificial Sequence
  Description of Artificial Sequence: Synthetic oligonucleotide
  Sense strand starting at position 3309 of SEQ ID NO: 1886615
gauaaaugaauggguguga

SEQ ID NO: 2418257 - RNA, 19 nt, Artificial Sequence
  Description of Artificial Sequence: Synthetic oligonucleotide
  Antisense strand to SEQ ID NO: 2418256
ucacacccauucauuuauc

SEQ ID NO: 2418258 - RNA, 19 nt, Artificial Sequence
  Description of Artificial Sequence: Synthetic oligonucleotide
  Sense strand starting at position 2639 of SEQ ID NO: 1886618
acgugagagcccuguuaca

SEQ ID NO: 2418259 - RNA, 19 nt, Artificial Sequence
  Description of Artificial Sequence: Synthetic oligonucleotide
  Antisense strand to SEQ ID NO: 2418258
uguaacagggcucucacgu

SEQ ID NO: 2418260 - RNA, 19 nt, Artificial Sequence
  Description of Artificial Sequence: Synthetic oligonucleotide
  Sense strand starting at position 1 of SEQ ID NO: 1886619
uaauguguccagcagggaa

SEQ ID NO: 2418261 - RNA, 19 nt, Artificial Sequence
  Description of Artificial Sequence: Synthetic oligonucleotide
  Antisense strand to SEQ ID NO: 2418260
uucccugcuggacacauua

SEQ ID NO: 2418262 - RNA, 19 nt, Artificial Sequence
  Description of Artificial Sequence: Synthetic oligonucleotide
  Sense strand starting at position 134 of SEQ ID NO: 1886619
ggguuuccugagugaggug

SEQ ID NO: 2418263 - RNA, 19 nt, Artificial Sequence
  Description of Artificial Sequence: Synthetic oligonucleotide
  Antisense strand to SEQ ID NO: 2418262
caccucacucaggaaaccc

SEQ ID NO: 2418264 - RNA, 19 nt, Artificial Sequence
  Description of Artificial Sequence: Synthetic oligonucleotide
  Sense strand starting at position 440 of SEQ ID NO: 1886619
gcaccaugcucauggcaua

SEQ ID NO: 2418265 - RNA, 19 nt, Artificial Sequence
  Description of Artificial Sequence: Synthetic oligonucleotide
  Antisense strand to SEQ ID NO: 2418264
uaugccaugagcauggugc

SEQ ID NO: 2418266 - RNA, 19 nt, Artificial Sequence
  Description of Artificial Sequence: Synthetic oligonucleotide
  Sense strand starting at position 978 of SEQ ID NO: 1886619
guuggaugcuucggcuuga

SEQ ID NO: 2418267 - RNA, 19 nt, Artificial Sequence
  Description of Artificial Sequence: Synthetic oligonucleotide
  Antisense strand to SEQ ID NO: 2418266
ucaagccgaagcauccaac

SEQ ID NO: 2418268 - RNA, 19 nt, Artificial Sequence
  Description of Artificial Sequence: Synthetic oligonucleotide
  Sense strand starting at position 979 of SEQ ID NO: 1886619
uuggaugcuucggcuugaa

SEQ ID NO: 2418269 - RNA, 19 nt, Artificial Sequence
  Description of Artificial Sequence: Synthetic oligonucleotide
  Antisense strand to SEQ ID NO: 2418268
uucaagccgaagcauccaa

SEQ ID NO: 2418270 - RNA, 19 nt, Artificial Sequence
  Description of Artificial Sequence: Synthetic oligonucleotide
  Sense strand starting at position 982 of SEQ ID NO: 1886619
gaugcuucggcuugaagga

SEQ ID NO: 2418271 - RNA, 19 nt, Artificial Sequence
  Description of Artificial Sequence: Synthetic oligonucleotide
  Antisense strand to SEQ ID NO: 2418270
uccuucaagccgaagcauc

SEQ ID NO: 2418272 - RNA, 19 nt, Artificial Sequence
  Description of Artificial Sequence: Synthetic oligonucleotide
  Sense strand starting at position 1194 of SEQ ID NO: 1886619
aauggagugcuuugagcuu

SEQ ID NO: 2418273 - RNA, 19 nt, Artificial Sequence
  Description of Artificial Sequence: Synthetic oligonucleotide
  Antisense strand to SEQ ID NO: 2418272
aagcucaaagcacuccauu

SEQ ID NO: 2418274 - RNA, 19 nt, Artificial Sequence
  Description of Artificial Sequence: Synthetic oligonucleotide
  Sense strand starting at position 1200 of SEQ ID NO: 1886619
gugcuuugagcuugugaug

SEQ ID NO: 2418275 - RNA, 19 nt, Artificial Sequence
  Description of Artificial Sequence: Synthetic oligonucleotide
  Antisense strand to SEQ ID NO: 2418274
caucacaagcucaaagcac

SEQ ID NO: 2418276 - RNA, 19 nt, Artificial Sequence
  Description of Artificial Sequence: Synthetic oligonucleotide
  Sense strand starting at position 1596 of SEQ ID NO: 1886619
cuugcugugcuuuaccaga

SEQ ID NO: 2418277 - RNA, 19 nt, Artificial Sequence
  Description of Artificial Sequence: Synthetic oligonucleotide
  Antisense strand to SEQ ID NO: 2418276
ucugguaaagcacagcaag

SEQ ID NO: 2418278 - RNA, 19 nt, Artificial Sequence
  Description of Artificial Sequence: Synthetic oligonucleotide
  Sense strand starting at position 1598 of SEQ ID NO: 1886619
ugcugugcuuuaccagaga

SEQ ID NO: 2418279 - RNA, 19 nt, Artificial Sequence
  Description of Artificial Sequence: Synthetic oligonucleotide
  Antisense strand to SEQ ID NO: 2418278
ucucugguaaagcacagca

SEQ ID NO: 2418280 - RNA, 19 nt, Artificial Sequence
  Description of Artificial Sequence: Synthetic oligonucleotide
  Sense strand starting at position 1601 of SEQ ID NO: 1886619
ugugcuuuaccagagaaug

SEQ ID NO: 2418281 - RNA, 19 nt, Artificial Sequence
  Description of Artificial Sequence: Synthetic oligonucleotide
  Antisense strand to SEQ ID NO: 2418280
cauucucugguaaagcaca

SEQ ID NO: 2418282 - RNA, 19 nt, Artificial Sequence
  Description of Artificial Sequence: Synthetic oligonucleotide
  Sense strand starting at position 2179 of SEQ ID NO: 1886619
cagacaugcuucugcugau

SEQ ID NO: 2418283 - RNA, 19 nt, Artificial Sequence
  Description of Artificial Sequence: Synthetic oligonucleotide
  Antisense strand to SEQ ID NO: 2418282
aucagcagaagcaugucug

SEQ ID NO: 2418284 - RNA, 19 nt, Artificial Sequence
  Description of Artificial Sequence: Synthetic oligonucleotide
  Sense strand starting at position 2249 of SEQ ID NO: 1886619
uggcacauuugauaacaaa

SEQ ID NO: 2418285 - RNA, 19 nt, Artificial Sequence
  Description of Artificial Sequence: Synthetic oligonucleotide
  Antisense strand to SEQ ID NO: 2418284
uuuguuaucaaaugugcca

SEQ ID NO: 2418286 - RNA, 19 nt, Artificial Sequence
  Description of Artificial Sequence: Synthetic oligonucleotide
  Sense strand starting at position 2300 of SEQ ID NO: 1886619
auucguaagugccugaaua

SEQ ID NO: 2418287 - RNA, 19 nt, Artificial Sequence
  Description of Artificial Sequence: Synthetic oligonucleotide
  Antisense strand to SEQ ID NO: 2418286
uauucaggcacuuacgaau

SEQ ID NO: 2418288 - RNA, 19 nt, Artificial Sequence
  Description of Artificial Sequence: Synthetic oligonucleotide
  Sense strand starting at position 2301 of SEQ ID NO: 1886619
uucguaagugccugaauaa

SEQ ID NO: 2418289 - RNA, 19 nt, Artificial Sequence
  Description of Artificial Sequence: Synthetic oligonucleotide
  Antisense strand to SEQ ID NO: 2418288
uuauucaggcacuuacgaa

SEQ ID NO: 2418290 - RNA, 19 nt, Artificial Sequence
  Description of Artificial Sequence: Synthetic oligonucleotide
  Sense strand starting at position 2302 of SEQ ID NO: 1886619
ucguaagugccugaauaaa

SEQ ID NO: 2418291 - RNA, 19 nt, Artificial Sequence
  Description of Artificial Sequence: Synthetic oligonucleotide
  Antisense strand to SEQ ID NO: 2418290
uuuauucaggcacuuacga

SEQ ID NO: 2418292 - RNA, 19 nt, Artificial Sequence
  Description of Artificial Sequence: Synthetic oligonucleotide
  Sense strand starting at position 2354 of SEQ ID NO: 1886619
agcuuauucgcaggccaaa

SEQ ID NO: 2418293 - RNA, 19 nt, Artificial Sequence
  Description of Artificial Sequence: Synthetic oligonucleotide
  Antisense strand to SEQ ID NO: 2418292
uuuggccugcgaauaagcu

SEQ ID NO: 2418294 - RNA, 19 nt, Artificial Sequence
  Description of Artificial Sequence: Synthetic oligonucleotide
  Sense strand starting at position 2367 of SEQ ID NO: 1886619
gccaaaugacauuacugca

SEQ ID NO: 2418295 - RNA, 19 nt, Artificial Sequence
  Description of Artificial Sequence: Synthetic oligonucleotide
  Antisense strand to SEQ ID NO: 2418294
ugcaguaaugucauuuggc

SEQ ID NO: 2418296 - RNA, 19 nt, Artificial Sequence
  Description of Artificial Sequence: Synthetic oligonucleotide
  Sense strand starting at position 2374 of SEQ ID NO: 1886619
gacauuacugcagagcauu

SEQ ID NO: 2418297 - RNA, 19 nt, Artificial Sequence
  Description of Artificial Sequence: Synthetic oligonucleotide
  Antisense strand to SEQ ID NO: 2418296
aaugcucugcaguaauguc

SEQ ID NO: 2418298 - RNA, 19 nt, Artificial Sequence
  Description of Artificial Sequence: Synthetic oligonucleotide
  Sense strand starting at position 2377 of SEQ ID NO: 1886619
auuacugcagagcauuaaa

SEQ ID NO: 2418299 - RNA, 19 nt, Artificial Sequence
  Description of Artificial Sequence: Synthetic oligonucleotide
  Antisense strand to SEQ ID NO: 2418298
uuuaaugcucugcaguaau

SEQ ID NO: 2418300 - RNA, 19 nt, Artificial Sequence
  Description of Artificial Sequence: Synthetic oligonucleotide
  Sense strand starting at position 2562 of SEQ ID NO: 1886619
cucagagaauuccgccuau

SEQ ID NO: 2418301 - RNA, 19 nt, Artificial Sequence
  Description of Artificial Sequence: Synthetic oligonucleotide
  Antisense strand to SEQ ID NO: 2418300
auaggcggaauucucugag

SEQ ID NO: 2418302 - RNA, 19 nt, Artificial Sequence
  Description of Artificial Sequence: Synthetic oligonucleotide
  Sense strand starting at position 2566 of SEQ ID NO: 1886619
gagaauuccgccuaugccu

SEQ ID NO: 2418303 - RNA, 19 nt, Artificial Sequence
  Description of Artificial Sequence: Synthetic oligonucleotide
  Antisense strand to SEQ ID NO: 2418302
aggcauaggcggaauucuc

SEQ ID NO: 2418304 - RNA, 19 nt, Artificial Sequence
  Description of Artificial Sequence: Synthetic oligonucleotide
  Sense strand starting at position 2795 of SEQ ID NO: 1886619
ggaacacacuggugacuua

SEQ ID NO: 2418305 - RNA, 19 nt, Artificial Sequence
  Description of Artificial Sequence: Synthetic oligonucleotide
  Antisense strand to SEQ ID NO: 2418304
uaagucaccaguguguucc

SEQ ID NO: 2418306 - RNA, 19 nt, Artificial Sequence
  Description of Artificial Sequence: Synthetic oligonucleotide
  Sense strand starting at position 2805 of SEQ ID NO: 1886619
ggugacuuacugcagcaga

SEQ ID NO: 2418307 - RNA, 19 nt, Artificial Sequence
  Description of Artificial Sequence: Synthetic oligonucleotide
  Antisense strand to SEQ ID NO: 2418306
ucugcugcaguaagucacc

SEQ ID NO: 2418308 - RNA, 19 nt, Artificial Sequence
  Description of Artificial Sequence: Synthetic oligonucleotide
  Sense strand starting at position 3069 of SEQ ID NO: 1886619
uguccuuugcucugacauc

SEQ ID NO: 2418309 - RNA, 19 nt, Artificial Sequence
  Description of Artificial Sequence: Synthetic oligonucleotide
  Antisense strand to SEQ ID NO: 2418308
gaugucagagcaaaggaca

SEQ ID NO: 2418310 - RNA, 19 nt, Artificial Sequence
  Description of Artificial Sequence: Synthetic oligonucleotide
  Sense strand starting at position 3070 of SEQ ID NO: 1886619
guccuuugcucugacaucu

SEQ ID NO: 2418311 - RNA, 19 nt, Artificial Sequence
  Description of Artificial Sequence: Synthetic oligonucleotide
  Antisense strand to SEQ ID NO: 2418310
agaugucagagcaaaggac

SEQ ID NO: 2418312 - RNA, 19 nt, Artificial Sequence
  Description of Artificial Sequence: Synthetic oligonucleotide
  Sense strand starting at position 3085 of SEQ ID NO: 1886619
aucuaaagucuccaaguca

SEQ ID NO: 2418313 - RNA, 19 nt, Artificial Sequence
  Description of Artificial Sequence: Synthetic oligonucleotide
  Antisense strand to SEQ ID NO: 2418312
ugacuuggagacuuuagau

SEQ ID NO: 2418314 - RNA, 19 nt, Artificial Sequence
  Description of Artificial Sequence: Synthetic oligonucleotide
  Sense strand starting at position 3121 of SEQ ID NO: 1886619
caaagaucggcuuggaucu

SEQ ID NO: 2418315 - RNA, 19 nt, Artificial Sequence
  Description of Artificial Sequence: Synthetic oligonucleotide
  Antisense strand to SEQ ID NO: 2418314
agauccaagccgaucuuug

SEQ ID NO: 2418316 - RNA, 19 nt, Artificial Sequence
  Description of Artificial Sequence: Synthetic oligonucleotide
  Sense strand starting at position 3375 of SEQ ID NO: 1886619
ucaggaguucucgaccagu

SEQ ID NO: 2418317 - RNA, 19 nt, Artificial Sequence
  Description of Artificial Sequence: Synthetic oligonucleotide
  Antisense strand to SEQ ID NO: 2418316
acuggucgagaacuccuga

SEQ ID NO: 2418318 - RNA, 19 nt, Artificial Sequence
  Description of Artificial Sequence: Synthetic oligonucleotide
  Sense strand starting at position 1362 of SEQ ID NO: 1886620
ugccaaugauagugugaua

SEQ ID NO: 2418319 - RNA, 19 nt, Artificial Sequence
  Description of Artificial Sequence: Synthetic oligonucleotide
  Antisense strand to SEQ ID NO: 2418318
uaucacacuaucauuggca

SEQ ID NO: 2418320 - RNA, 19 nt, Artificial Sequence
  Description of Artificial Sequence: Synthetic oligonucleotide
  Sense strand starting at position 1365 of SEQ ID NO: 1886620
caaugauagugugauacuu

SEQ ID NO: 2418321 - RNA, 19 nt, Artificial Sequence
  Description of Artificial Sequence: Synthetic oligonucleotide
  Antisense strand to SEQ ID NO: 2418320
aaguaucacacuaucauug

SEQ ID NO: 2418322 - RNA, 19 nt, Artificial Sequence
  Description of Artificial Sequence: Synthetic oligonucleotide
  Sense strand starting at position 1373 of SEQ ID NO: 1886620
gugugauacuuucuguguc

SEQ ID NO: 2418323 - RNA, 19 nt, Artificial Sequence
  Description of Artificial Sequence: Synthetic oligonucleotide
  Antisense strand to SEQ ID NO: 2418322
gacacagaaaguaucacac

SEQ ID NO: 2418324 - RNA, 19 nt, Artificial Sequence
  Description of Artificial Sequence: Synthetic oligonucleotide
  Sense strand starting at position 2352 of SEQ ID NO: 1886620
cuguccaacccuuaguaua

SEQ ID NO: 2418325 - RNA, 19 nt, Artificial Sequence
  Description of Artificial Sequence: Synthetic oligonucleotide
  Antisense strand to SEQ ID NO: 2418324
uauacuaaggguuggacag

SEQ ID NO: 2418326 - RNA, 19 nt, Artificial Sequence
  Description of Artificial Sequence: Synthetic oligonucleotide
  Sense strand starting at position 2354 of SEQ ID NO: 1886620
guccaacccuuaguauauc

SEQ ID NO: 2418327 - RNA, 19 nt, Artificial Sequence
  Description of Artificial Sequence: Synthetic oligonucleotide
  Antisense strand to SEQ ID NO: 2418326
gauauacuaaggguuggac

SEQ ID NO: 2418328 - RNA, 19 nt, Artificial Sequence
  Description of Artificial Sequence: Synthetic oligonucleotide
  Sense strand starting at position 2366 of SEQ ID NO: 1886620
guauaucagcuuugcaaga

SEQ ID NO: 2418329 - RNA, 19 nt, Artificial Sequence
  Description of Artificial Sequence: Synthetic oligonucleotide
  Antisense strand to SEQ ID NO: 2418328
ucuugcaaagcugauauac

SEQ ID NO: 2418330 - RNA, 19 nt, Artificial Sequence
  Description of Artificial Sequence: Synthetic oligonucleotide
  Sense strand starting at position 2765 of SEQ ID NO: 1886620
ucaagcgauuggucuguca

SEQ ID NO: 2418331 - RNA, 19 nt, Artificial Sequence
  Description of Artificial Sequence: Synthetic oligonucleotide
  Antisense strand to SEQ ID NO: 2418330
ugacagaccaaucgcuuga

SEQ ID NO: 2418332 - RNA, 19 nt, Artificial Sequence
  Description of Artificial Sequence: Synthetic oligonucleotide
  Sense strand starting at position 2767 of SEQ ID NO: 1886620
aagcgauuggucugucauu

SEQ ID NO: 2418333 - RNA, 19 nt, Artificial Sequence
  Description of Artificial Sequence: Synthetic oligonucleotide
  Antisense strand to SEQ ID NO: 2418332
aaugacagaccaaucgcuu

SEQ ID NO: 2418334 - RNA, 19 nt, Artificial Sequence
  Description of Artificial Sequence: Synthetic oligonucleotide
  Sense strand starting at position 2768 of SEQ ID NO: 1886620
agcgauuggucugucauuu

SEQ ID NO: 2418335 - RNA, 19 nt, Artificial Sequence
  Description of Artificial Sequence: Synthetic oligonucleotide
  Antisense strand to SEQ ID NO: 2418334
aaaugacagaccaaucgcu

SEQ ID NO: 2418336 - RNA, 19 nt, Artificial Sequence
  Description of Artificial Sequence: Synthetic oligonucleotide
  Sense strand starting at position 3280 of SEQ ID NO: 1886620
ucggaauccacucgguaca

SEQ ID NO: 2418337 - RNA, 19 nt, Artificial Sequence
  Description of Artificial Sequence: Synthetic oligonucleotide
  Antisense strand to SEQ ID NO: 2418336
uguaccgaguggauuccga

SEQ ID NO: 2418338 - RNA, 19 nt, Artificial Sequence
  Description of Artificial Sequence: Synthetic oligonucleotide
  Sense strand starting at position 741 of SEQ ID NO: 1886621
auuauuucuugagaaggag

SEQ ID NO: 2418339 - RNA, 19 nt, Artificial Sequence
  Description of Artificial Sequence: Synthetic oligonucleotide
  Antisense strand to SEQ ID NO: 2418338
cuccuucucaagaaauaau

SEQ ID NO: 2418340 - RNA, 19 nt, Artificial Sequence
  Description of Artificial Sequence: Synthetic oligonucleotide
  Sense strand starting at position 1428 of SEQ ID NO: 1886621
guuaauuauuucuauggga

SEQ ID NO: 2418341 - RNA, 19 nt, Artificial Sequence
  Description of Artificial Sequence: Synthetic oligonucleotide
  Antisense strand to SEQ ID NO: 2418340
ucccauagaaauaauuaac

SEQ ID NO: 2418342 - RNA, 19 nt, Artificial Sequence
  Description of Artificial Sequence: Synthetic oligonucleotide
  Sense strand starting at position 1433 of SEQ ID NO: 1886621
uuauuucuaugggagaagu

SEQ ID NO: 2418343 - RNA, 19 nt, Artificial Sequence
  Description of Artificial Sequence: Synthetic oligonucleotide
  Antisense strand to SEQ ID NO: 2418342
acuucucccauagaaauaa

SEQ ID NO: 2418344 - RNA, 19 nt, Artificial Sequence
  Description of Artificial Sequence: Synthetic oligonucleotide
  Sense strand starting at position 2348 of SEQ ID NO: 1886621
cuguccaacccuuaggaua

SEQ ID NO: 2418345 - RNA, 19 nt, Artificial Sequence
  Description of Artificial Sequence: Synthetic oligonucleotide
  Antisense strand to SEQ ID NO: 2418344
uauccuaaggguuggacag

SEQ ID NO: 2418346 - RNA, 19 nt, Artificial Sequence
  Description of Artificial Sequence: Synthetic oligonucleotide
  Sense strand starting at position 2379 of SEQ ID NO: 1886621
gagcaaaggucacgucuau

SEQ ID NO: 2418347 - RNA, 19 nt, Artificial Sequence
  Description of Artificial Sequence: Synthetic oligonucleotide
  Antisense strand to SEQ ID NO: 2418346
auagacgugaccuuugcuc

SEQ ID NO: 2418348 - RNA, 19 nt, Artificial Sequence
  Description of Artificial Sequence: Synthetic oligonucleotide
  Sense strand starting at position 2773 of SEQ ID NO: 1886621
ucaagcaauuggucuguca

SEQ ID NO: 2418349 - RNA, 19 nt, Artificial Sequence
  Description of Artificial Sequence: Synthetic oligonucleotide
  Antisense strand to SEQ ID NO: 2418348
ugacagaccaauugcuuga

SEQ ID NO: 2418350 - RNA, 19 nt, Artificial Sequence
  Description of Artificial Sequence: Synthetic oligonucleotide
  Sense strand starting at position 2775 of SEQ ID NO: 1886621
aagcaauuggucugucauu

SEQ ID NO: 2418351 - RNA, 19 nt, Artificial Sequence
  Description of Artificial Sequence: Synthetic oligonucleotide
  Antisense strand to SEQ ID NO: 2418350
aaugacagaccaauugcuu

SEQ ID NO: 2418352 - RNA, 19 nt, Artificial Sequence
  Description of Artificial Sequence: Synthetic oligonucleotide
  Sense strand starting at position 2776 of SEQ ID NO: 1886621
agcaauuggucugucauuu

SEQ ID NO: 2418353 - RNA, 19 nt, Artificial Sequence
  Description of Artificial Sequence: Synthetic oligonucleotide
  Antisense strand to SEQ ID NO: 2418352
aaaugacagaccaauugcu

SEQ ID NO: 2418354 - RNA, 19 nt, Artificial Sequence
  Description of Artificial Sequence: Synthetic oligonucleotide
  Sense strand starting at position 2870 of SEQ ID NO: 1886621
gugcguucugcgcacaguu

SEQ ID NO: 2418355 - RNA, 19 nt, Artificial Sequence
  Description of Artificial Sequence: Synthetic oligonucleotide
  Antisense strand to SEQ ID NO: 2418354
aacugugcgcagaacgcac

SEQ ID NO: 2418356 - RNA, 19 nt, Artificial Sequence
  Description of Artificial Sequence: Synthetic oligonucleotide
  Sense strand starting at position 1362 of SEQ ID NO: 1886622
ugccaaugauagugugaua

SEQ ID NO: 2418357 - RNA, 19 nt, Artificial Sequence
  Description of Artificial Sequence: Synthetic oligonucleotide
  Antisense strand to SEQ ID NO: 2418356
uaucacacuaucauuggca

SEQ ID NO: 2418358 - RNA, 19 nt, Artificial Sequence
  Description of Artificial Sequence: Synthetic oligonucleotide
  Sense strand starting at position 1365 of SEQ ID NO: 1886622
caaugauagugugauacuu

SEQ ID NO: 2418359 - RNA, 19 nt, Artificial Sequence
  Description of Artificial Sequence: Synthetic oligonucleotide
  Antisense strand to SEQ ID NO: 2418358
aaguaucacacuaucauug

SEQ ID NO: 2418360 - RNA, 19 nt, Artificial Sequence
  Description of Artificial Sequence: Synthetic oligonucleotide
  Sense strand starting at position 1373 of SEQ ID NO: 1886622
gugugauacuuucuguguc

SEQ ID NO: 2418361 - RNA, 19 nt, Artificial Sequence
  Description of Artificial Sequence: Synthetic oligonucleotide
  Antisense strand to SEQ ID NO: 2418360
gacacagaaaguaucacac

SEQ ID NO: 2418362 - RNA, 19 nt, Artificial Sequence
  Description of Artificial Sequence: Synthetic oligonucleotide
  Sense strand starting at position 2352 of SEQ ID NO: 1886622
cuguccaacccuuaguaua

SEQ ID NO: 2418363 - RNA, 19 nt, Artificial Sequence
  Description of Artificial Sequence: Synthetic oligonucleotide
  Antisense strand to SEQ ID NO: 2418362
uauacuaaggguuggacag

SEQ ID NO: 2418364 - RNA, 19 nt, Artificial Sequence
  Description of Artificial Sequence: Synthetic oligonucleotide
  Sense strand starting at position 2354 of SEQ ID NO: 1886622
guccaacccuuaguauauc

SEQ ID NO: 2418365 - RNA, 19 nt, Artificial Sequence
  Description of Artificial Sequence: Synthetic oligonucleotide
  Antisense strand to SEQ ID NO: 2418364
gauauacuaaggguuggac

SEQ ID NO: 2418366 - RNA, 19 nt, Artificial Sequence
  Description of Artificial Sequence: Synthetic oligonucleotide
  Sense strand starting at position 2366 of SEQ ID NO: 1886622
guauaucagcuuugcaaga

SEQ ID NO: 2418367 - RNA, 19 nt, Artificial Sequence
  Description of Artificial Sequence: Synthetic oligonucleotide
  Antisense strand to SEQ ID NO: 2418366
ucuugcaaagcugauauac

SEQ ID NO: 2418368 - RNA, 19 nt, Artificial Sequence
  Description of Artificial Sequence: Synthetic oligonucleotide
  Sense strand starting at position 2765 of SEQ ID NO: 1886622
ucaagcgauuggucuguca

SEQ ID NO: 2418369 - RNA, 19 nt, Artificial Sequence
  Description of Artificial Sequence: Synthetic oligonucleotide
  Antisense strand to SEQ ID NO: 2418368
ugacagaccaaucgcuuga

SEQ ID NO: 2418370 - RNA, 19 nt, Artificial Sequence
  Description of Artificial Sequence: Synthetic oligonucleotide
  Sense strand starting at position 2767 of SEQ ID NO: 1886622
aagcgauuggucugucauu

SEQ ID NO: 2418371 - RNA, 19 nt, Artificial Sequence
  Description of Artificial Sequence: Synthetic oligonucleotide
  Antisense strand to SEQ ID NO: 2418370
aaugacagaccaaucgcuu

SEQ ID NO: 2418372 - RNA, 19 nt, Artificial Sequence
  Description of Artificial Sequence: Synthetic oligonucleotide
  Sense strand starting at position 2768 of SEQ ID NO: 1886622
agcgauuggucugucauuu

SEQ ID NO: 2418373 - RNA, 19 nt, Artificial Sequence
  Description of Artificial Sequence: Synthetic oligonucleotide
  Antisense strand to SEQ ID NO: 2418372
aaaugacagaccaaucgcu

SEQ ID NO: 2418374 - RNA, 19 nt, Artificial Sequence
  Description of Artificial Sequence: Synthetic oligonucleotide
  Sense strand starting at position 3280 of SEQ ID NO: 1886622
ucggaauccacucgguaca

SEQ ID NO: 2418375 - RNA, 19 nt, Artificial Sequence
  Description of Artificial Sequence: Synthetic oligonucleotide
  Antisense strand to SEQ ID NO: 2418374
uguaccgaguggauuccga

SEQ ID NO: 2418376 - RNA, 19 nt, Artificial Sequence
  Description of Artificial Sequence: Synthetic oligonucleotide
  Sense strand starting at position 741 of SEQ ID NO: 1886623
auuauuucuugagaaggag

SEQ ID NO: 2418377 - RNA, 19 nt, Artificial Sequence
  Description of Artificial Sequence: Synthetic oligonucleotide
  Antisense strand to SEQ ID NO: 2418376
cuccuucucaagaaauaau

SEQ ID NO: 2418378 - RNA, 19 nt, Artificial Sequence
  Description of Artificial Sequence: Synthetic oligonucleotide
  Sense strand starting at position 1428 of SEQ ID NO: 1886623
guuaauuauuucuauggga

SEQ ID NO: 2418379 - RNA, 19 nt, Artificial Sequence
  Description of Artificial Sequence: Synthetic oligonucleotide
  Antisense strand to SEQ ID NO: 2418378
ucccauagaaauaauuaac

SEQ ID NO: 2418380 - RNA, 19 nt, Artificial Sequence
  Description of Artificial Sequence: Synthetic oligonucleotide
  Sense strand starting at position 1433 of SEQ ID NO: 1886623
uuauuucuaugggagaagu

SEQ ID NO: 2418381 - RNA, 19 nt, Artificial Sequence
  Description of Artificial Sequence: Synthetic oligonucleotide
  Antisense strand to SEQ ID NO: 2418380
acuucucccauagaaauaa

SEQ ID NO: 2418382 - RNA, 19 nt, Artificial Sequence
  Description of Artificial Sequence: Synthetic oligonucleotide
  Sense strand starting at position 2348 of SEQ ID NO: 1886623
cuguccaacccuuaggaua

SEQ ID NO: 2418383 - RNA, 19 nt, Artificial Sequence
  Description of Artificial Sequence: Synthetic oligonucleotide
  Antisense strand to SEQ ID NO: 2418382
uauccuaaggguuggacag

SEQ ID NO: 2418384 - RNA, 19 nt, Artificial Sequence
  Description of Artificial Sequence: Synthetic oligonucleotide
  Sense strand starting at position 2379 of SEQ ID NO: 1886623
gagcaaaggucacgucuau

SEQ ID NO: 2418385 - RNA, 19 nt, Artificial Sequence
  Description of Artificial Sequence: Synthetic oligonucleotide
  Antisense strand to SEQ ID NO: 2418384
auagacgugaccuuugcuc

SEQ ID NO: 2418386 - RNA, 19 nt, Artificial Sequence
  Description of Artificial Sequence: Synthetic oligonucleotide
  Sense strand starting at position 2773 of SEQ ID NO: 1886623
ucaagcaauuggucuguca

SEQ ID NO: 2418387 - RNA, 19 nt, Artificial Sequence
  Description of Artificial Sequence: Synthetic oligonucleotide
  Antisense strand to SEQ ID NO: 2418386
ugacagaccaauugcuuga

SEQ ID NO: 2418388 - RNA, 19 nt, Artificial Sequence
  Description of Artificial Sequence: Synthetic oligonucleotide
  Sense strand starting at position 2775 of SEQ ID NO: 1886623
aagcaauuggucugucauu

SEQ ID NO: 2418389 - RNA, 19 nt, Artificial Sequence
  Description of Artificial Sequence: Synthetic oligonucleotide
  Antisense strand to SEQ ID NO: 2418388
aaugacagaccaauugcuu

SEQ ID NO: 2418390 - RNA, 19 nt, Artificial Sequence
  Description of Artificial Sequence: Synthetic oligonucleotide
  Sense strand starting at position 2776 of SEQ ID NO: 1886623
agcaauuggucugucauuu

SEQ ID NO: 2418391 - RNA, 19 nt, Artificial Sequence
  Description of Artificial Sequence: Synthetic oligonucleotide
  Antisense strand to SEQ ID NO: 2418390
aaaugacagaccaauugcu

SEQ ID NO: 2418392 - RNA, 19 nt, Artificial Sequence
  Description of Artificial Sequence: Synthetic oligonucleotide
  Sense strand starting at position 2870 of SEQ ID NO: 1886623
gugcguucugcgcacaguu

SEQ ID NO: 2418393 - RNA, 19 nt, Artificial Sequence
  Description of Artificial Sequence: Synthetic oligonucleotide
  Antisense strand to SEQ ID NO: 2418392
aacugugcgcagaacgcac

SEQ ID NO: 2418394 - RNA, 19 nt, Artificial Sequence
  Description of Artificial Sequence: Synthetic oligonucleotide
  Sense strand starting at position 151 of SEQ ID NO: 1886624
uggguacagcuuugggaaa

SEQ ID NO: 2418395 - RNA, 19 nt, Artificial Sequence
  Description of Artificial Sequence: Synthetic oligonucleotide
  Antisense strand to SEQ ID NO: 2418394
uuucccaaagcuguaccca

SEQ ID NO: 2418396 - RNA, 19 nt, Artificial Sequence
  Description of Artificial Sequence: Synthetic oligonucleotide
  Sense strand starting at position 500 of SEQ ID NO: 1886624
ggcagagggccacauagau

SEQ ID NO: 2418397 - RNA, 19 nt, Artificial Sequence
  Description of Artificial Sequence: Synthetic oligonucleotide
  Antisense strand to SEQ ID NO: 2418396
aucuauguggcccucugcc

SEQ ID NO: 2418398 - RNA, 19 nt, Artificial Sequence
  Description of Artificial Sequence: Synthetic oligonucleotide
  Sense strand starting at position 594 of SEQ ID NO: 1886624
uguacaaggcauuacauaa

SEQ ID NO: 2418399 - RNA, 19 nt, Artificial Sequence
  Description of Artificial Sequence: Synthetic oligonucleotide
  Antisense strand to SEQ ID NO: 2418398
uuauguaaugccuuguaca

SEQ ID NO: 2418400 - RNA, 19 nt, Artificial Sequence
  Description of Artificial Sequence: Synthetic oligonucleotide
  Sense strand starting at position 616 of SEQ ID NO: 1886624
agagcccuacuugauuaau

SEQ ID NO: 2418401 - RNA, 19 nt, Artificial Sequence
  Description of Artificial Sequence: Synthetic oligonucleotide
  Antisense strand to SEQ ID NO: 2418400
auuaaucaaguagggcucu

SEQ ID NO: 2418402 - RNA, 19 nt, Artificial Sequence
  Description of Artificial Sequence: Synthetic oligonucleotide
  Sense strand starting at position 785 of SEQ ID NO: 1886624
uagcaaugaucacuggagu

SEQ ID NO: 2418403 - RNA, 19 nt, Artificial Sequence
  Description of Artificial Sequence: Synthetic oligonucleotide
  Antisense strand to SEQ ID NO: 2418402
acuccagugaucauugcua

SEQ ID NO: 2418404 - RNA, 19 nt, Artificial Sequence
  Description of Artificial Sequence: Synthetic oligonucleotide
  Sense strand starting at position 1103 of SEQ ID NO: 1886624
ggacucugauguuccagau

SEQ ID NO: 2418405 - RNA, 19 nt, Artificial Sequence
  Description of Artificial Sequence: Synthetic oligonucleotide
  Antisense strand to SEQ ID NO: 2418404
aucuggaacaucagagucc

SEQ ID NO: 2418406 - RNA, 19 nt, Artificial Sequence
  Description of Artificial Sequence: Synthetic oligonucleotide
  Sense strand starting at position 1121 of SEQ ID NO: 1886624
uugugaccugggcauguua

SEQ ID NO: 2418407 - RNA, 19 nt, Artificial Sequence
  Description of Artificial Sequence: Synthetic oligonucleotide
  Antisense strand to SEQ ID NO: 2418406
uaacaugcccaggucacaa

SEQ ID NO: 2418408 - RNA, 19 nt, Artificial Sequence
  Description of Artificial Sequence: Synthetic oligonucleotide
  Sense strand starting at position 1128 of SEQ ID NO: 1886624
cugggcauguuaccaagaa

SEQ ID NO: 2418409 - RNA, 19 nt, Artificial Sequence
  Description of Artificial Sequence: Synthetic oligonucleotide
  Antisense strand to SEQ ID NO: 2418408
uucuugguaacaugcccag

SEQ ID NO: 2418410 - RNA, 19 nt, Artificial Sequence
  Description of Artificial Sequence: Synthetic oligonucleotide
  Sense strand starting at position 1340 of SEQ ID NO: 1886624
uguggagucagccacugau

SEQ ID NO: 2418411 - RNA, 19 nt, Artificial Sequence
  Description of Artificial Sequence: Synthetic oligonucleotide
  Antisense strand to SEQ ID NO: 2418410
aucaguggcugacuccaca

SEQ ID NO: 2418412 - RNA, 19 nt, Artificial Sequence
  Description of Artificial Sequence: Synthetic oligonucleotide
  Sense strand starting at position 1512 of SEQ ID NO: 1886624
gaagcagggcaguaauuau

SEQ ID NO: 2418413 - RNA, 19 nt, Artificial Sequence
  Description of Artificial Sequence: Synthetic oligonucleotide
  Antisense strand to SEQ ID NO: 2418412
auaauuacugcccugcuuc

SEQ ID NO: 2418414 - RNA, 19 nt, Artificial Sequence
  Description of Artificial Sequence: Synthetic oligonucleotide
  Sense strand starting at position 1837 of SEQ ID NO: 1886624
ggcuucuuguacccaagaa

SEQ ID NO: 2418415 - RNA, 19 nt, Artificial Sequence
  Description of Artificial Sequence: Synthetic oligonucleotide
  Antisense strand to SEQ ID NO: 2418414
uucuuggguacaagaagcc

SEQ ID NO: 2418416 - RNA, 19 nt, Artificial Sequence
  Description of Artificial Sequence: Synthetic oligonucleotide
  Sense strand starting at position 2048 of SEQ ID NO: 1886624
cuguuuguggguuaaugaa

SEQ ID NO: 2418417 - RNA, 19 nt, Artificial Sequence
  Description of Artificial Sequence: Synthetic oligonucleotide
  Antisense strand to SEQ ID NO: 2418416
uucauuaacccacaaacag

SEQ ID NO: 2418418 - RNA, 19 nt, Artificial Sequence
  Description of Artificial Sequence: Synthetic oligonucleotide
  Sense strand starting at position 2055 of SEQ ID NO: 1886624
uggguuaaugaaugaguca

SEQ ID NO: 2418419 - RNA, 19 nt, Artificial Sequence
  Description of Artificial Sequence: Synthetic oligonucleotide
  Antisense strand to SEQ ID NO: 2418418
ugacucauucauuaaccca

SEQ ID NO: 2418420 - RNA, 19 nt, Artificial Sequence
  Description of Artificial Sequence: Synthetic oligonucleotide
  Sense strand starting at position 2064 of SEQ ID NO: 1886624
gaaugagucaguggacaag

SEQ ID NO: 2418421 - RNA, 19 nt, Artificial Sequence
  Description of Artificial Sequence: Synthetic oligonucleotide
  Antisense strand to SEQ ID NO: 2418420
cuuguccacugacucauuc

SEQ ID NO: 2418422 - RNA, 19 nt, Artificial Sequence
  Description of Artificial Sequence: Synthetic oligonucleotide
  Sense strand starting at position 2261 of SEQ ID NO: 1886624
ccagauuucuaagaaugga

SEQ ID NO: 2418423 - RNA, 19 nt, Artificial Sequence
  Description of Artificial Sequence: Synthetic oligonucleotide
  Antisense strand to SEQ ID NO: 2418422
uccauucuuagaaaucugg

SEQ ID NO: 2418424 - RNA, 19 nt, Artificial Sequence
  Description of Artificial Sequence: Synthetic oligonucleotide
  Sense strand starting at position 2276 of SEQ ID NO: 1886624
uggauaaauugcccugauc

SEQ ID NO: 2418425 - RNA, 19 nt, Artificial Sequence
  Description of Artificial Sequence: Synthetic oligonucleotide
  Antisense strand to SEQ ID NO: 2418424
gaucagggcaauuuaucca

SEQ ID NO: 2418426 - RNA, 19 nt, Artificial Sequence
  Description of Artificial Sequence: Synthetic oligonucleotide
  Sense strand starting at position 2324 of SEQ ID NO: 1886624
gccacaucucccuggaaca

SEQ ID NO: 2418427 - RNA, 19 nt, Artificial Sequence
  Description of Artificial Sequence: Synthetic oligonucleotide
  Antisense strand to SEQ ID NO: 2418426
uguuccagggagauguggc

SEQ ID NO: 2418428 - RNA, 19 nt, Artificial Sequence
  Description of Artificial Sequence: Synthetic oligonucleotide
  Sense strand starting at position 2395 of SEQ ID NO: 1886624
aaauaaauguugucuagug

SEQ ID NO: 2418429 - RNA, 19 nt, Artificial Sequence
  Description of Artificial Sequence: Synthetic oligonucleotide
  Antisense strand to SEQ ID NO: 2418428
cacuagacaacauuuauuu

SEQ ID NO: 2418430 - RNA, 19 nt, Artificial Sequence
  Description of Artificial Sequence: Synthetic oligonucleotide
  Sense strand starting at position 2432 of SEQ ID NO: 1886624
auccuaagacucuagugua

SEQ ID NO: 2418431 - RNA, 19 nt, Artificial Sequence
  Description of Artificial Sequence: Synthetic oligonucleotide
  Antisense strand to SEQ ID NO: 2418430
uacacuagagucuuaggau

SEQ ID NO: 2418432 - RNA, 19 nt, Artificial Sequence
  Description of Artificial Sequence: Synthetic oligonucleotide
  Sense strand starting at position 2445 of SEQ ID NO: 1886624
aguguaggcugauucuaaa

SEQ ID NO: 2418433 - RNA, 19 nt, Artificial Sequence
  Description of Artificial Sequence: Synthetic oligonucleotide
  Antisense strand to SEQ ID NO: 2418432
uuuagaaucagccuacacu

SEQ ID NO: 2418434 - RNA, 19 nt, Artificial Sequence
  Description of Artificial Sequence: Synthetic oligonucleotide
  Sense strand starting at position 2452 of SEQ ID NO: 1886624
gcugauucuaaaggcauga

SEQ ID NO: 2418435 - RNA, 19 nt, Artificial Sequence
  Description of Artificial Sequence: Synthetic oligonucleotide
  Antisense strand to SEQ ID NO: 2418434
ucaugccuuuagaaucagc

SEQ ID NO: 2418436 - RNA, 19 nt, Artificial Sequence
  Description of Artificial Sequence: Synthetic oligonucleotide
  Sense strand starting at position 2623 of SEQ ID NO: 1886624
aggugcuauucagugggaa

SEQ ID NO: 2418437 - RNA, 19 nt, Artificial Sequence
  Description of Artificial Sequence: Synthetic oligonucleotide
  Antisense strand to SEQ ID NO: 2418436
uucccacugaauagcaccu

SEQ ID NO: 2418438 - RNA, 19 nt, Artificial Sequence
  Description of Artificial Sequence: Synthetic oligonucleotide
  Sense strand starting at position 2624 of SEQ ID NO: 1886624
ggugcuauucagugggaaa

SEQ ID NO: 2418439 - RNA, 19 nt, Artificial Sequence
  Description of Artificial Sequence: Synthetic oligonucleotide
  Antisense strand to SEQ ID NO: 2418438
uuucccacugaauagcacc

SEQ ID NO: 2418440 - RNA, 19 nt, Artificial Sequence
  Description of Artificial Sequence: Synthetic oligonucleotide
  Sense strand starting at position 3044 of SEQ ID NO: 1886624
ggagguaaccaggguuacu

SEQ ID NO: 2418441 - RNA, 19 nt, Artificial Sequence
  Description of Artificial Sequence: Synthetic oligonucleotide
  Antisense strand to SEQ ID NO: 2418440
aguaacccugguuaccucc

SEQ ID NO: 2418442 - RNA, 19 nt, Artificial Sequence
  Description of Artificial Sequence: Synthetic oligonucleotide
  Sense strand starting at position 3224 of SEQ ID NO: 1886624
agccuaagacuugguuuaa

SEQ ID NO: 2418443 - RNA, 19 nt, Artificial Sequence
  Description of Artificial Sequence: Synthetic oligonucleotide
  Antisense strand to SEQ ID NO: 2418442
uuaaaccaagucuuaggcu

SEQ ID NO: 2418444 - RNA, 19 nt, Artificial Sequence
  Description of Artificial Sequence: Synthetic oligonucleotide
  Sense strand starting at position 3225 of SEQ ID NO: 1886624
gccuaagacuugguuuaaa

SEQ ID NO: 2418445 - RNA, 19 nt, Artificial Sequence
  Description of Artificial Sequence: Synthetic oligonucleotide
  Antisense strand to SEQ ID NO: 2418444
uuuaaaccaagucuuaggc

SEQ ID NO: 2418446 - RNA, 19 nt, Artificial Sequence
  Description of Artificial Sequence: Synthetic oligonucleotide
  Sense strand starting at position 3263 of SEQ ID NO: 1886624
caggaauucugugccuuaa

SEQ ID NO: 2418447 - RNA, 19 nt, Artificial Sequence
  Description of Artificial Sequence: Synthetic oligonucleotide
  Antisense strand to SEQ ID NO: 2418446
uuaaggcacagaauuccug

SEQ ID NO: 2418448 - RNA, 19 nt, Artificial Sequence
  Description of Artificial Sequence: Synthetic oligonucleotide
  Sense strand starting at position 3284 of SEQ ID NO: 1886624
gaagucucagagcgaauua

SEQ ID NO: 2418449 - RNA, 19 nt, Artificial Sequence
  Description of Artificial Sequence: Synthetic oligonucleotide
  Antisense strand to SEQ ID NO: 2418448
uaauucgcucugagacuuc

SEQ ID NO: 2418450 - RNA, 19 nt, Artificial Sequence
  Description of Artificial Sequence: Synthetic oligonucleotide
  Sense strand starting at position 3297 of SEQ ID NO: 1886624
gaauuaguagguggucauc

SEQ ID NO: 2418451 - RNA, 19 nt, Artificial Sequence
  Description of Artificial Sequence: Synthetic oligonucleotide
  Antisense strand to SEQ ID NO: 2418450
gaugaccaccuacuaauuc

SEQ ID NO: 2418452 - RNA, 19 nt, Artificial Sequence
  Description of Artificial Sequence: Synthetic oligonucleotide
  Sense strand starting at position 3306 of SEQ ID NO: 1886624
gguggucauccugacaguu

SEQ ID NO: 2418453 - RNA, 19 nt, Artificial Sequence
  Description of Artificial Sequence: Synthetic oligonucleotide
  Antisense strand to SEQ ID NO: 2418452
aacugucaggaugaccacc

SEQ ID NO: 2418454 - RNA, 19 nt, Artificial Sequence
  Description of Artificial Sequence: Synthetic oligonucleotide
  Sense strand starting at position 3392 of SEQ ID NO: 1886624
uuugcuuugccuguaguau

SEQ ID NO: 2418455 - RNA, 19 nt, Artificial Sequence
  Description of Artificial Sequence: Synthetic oligonucleotide
  Antisense strand to SEQ ID NO: 2418454
auacuacaggcaaagcaaa

SEQ ID NO: 2418456 - RNA, 19 nt, Artificial Sequence
  Description of Artificial Sequence: Synthetic oligonucleotide
  Sense strand starting at position 3438 of SEQ ID NO: 1886624
cugggaucacacugugauu

SEQ ID NO: 2418457 - RNA, 19 nt, Artificial Sequence
  Description of Artificial Sequence: Synthetic oligonucleotide
  Antisense strand to SEQ ID NO: 2418456
aaucacagugugaucccag

SEQ ID NO: 2418458 - RNA, 19 nt, Artificial Sequence
  Description of Artificial Sequence: Synthetic oligonucleotide
  Sense strand starting at position 3440 of SEQ ID NO: 1886624
gggaucacacugugauucu

SEQ ID NO: 2418459 - RNA, 19 nt, Artificial Sequence
  Description of Artificial Sequence: Synthetic oligonucleotide
  Antisense strand to SEQ ID NO: 2418458
agaaucacagugugauccc

SEQ ID NO: 2418460 - RNA, 19 nt, Artificial Sequence
  Description of Artificial Sequence: Synthetic oligonucleotide
  Sense strand starting at position 3632 of SEQ ID NO: 1886624
ccgcaaaugaguuaaugca

SEQ ID NO: 2418461 - RNA, 19 nt, Artificial Sequence
  Description of Artificial Sequence: Synthetic oligonucleotide
  Antisense strand to SEQ ID NO: 2418460
ugcauuaacucauuugcgg

SEQ ID NO: 2418462 - RNA, 19 nt, Artificial Sequence
  Description of Artificial Sequence: Synthetic oligonucleotide
  Sense strand starting at position 3673 of SEQ ID NO: 1886624
ccuggagcucaauaaaugu

SEQ ID NO: 2418463 - RNA, 19 nt, Artificial Sequence
  Description of Artificial Sequence: Synthetic oligonucleotide
  Antisense strand to SEQ ID NO: 2418462
acauuuauugagcuccagg

SEQ ID NO: 2418464 - RNA, 19 nt, Artificial Sequence
  Description of Artificial Sequence: Synthetic oligonucleotide
  Sense strand starting at position 3768 of SEQ ID NO: 1886624
gguacagucacagauaugu

SEQ ID NO: 2418465 - RNA, 19 nt, Artificial Sequence
  Description of Artificial Sequence: Synthetic oligonucleotide
  Antisense strand to SEQ ID NO: 2418464
acauaucugugacuguacc

SEQ ID NO: 2418466 - RNA, 19 nt, Artificial Sequence
  Description of Artificial Sequence: Synthetic oligonucleotide
  Sense strand starting at position 3785 of SEQ ID NO: 1886624
guacaaccaucacuauagu

SEQ ID NO: 2418467 - RNA, 19 nt, Artificial Sequence
  Description of Artificial Sequence: Synthetic oligonucleotide
  Antisense strand to SEQ ID NO: 2418466
acuauagugaugguuguac

SEQ ID NO: 2418468 - RNA, 19 nt, Artificial Sequence
  Description of Artificial Sequence: Synthetic oligonucleotide
  Sense strand starting at position 3810 of SEQ ID NO: 1886624
uggaacauauaucugcuaa

SEQ ID NO: 2418469 - RNA, 19 nt, Artificial Sequence
  Description of Artificial Sequence: Synthetic oligonucleotide
  Antisense strand to SEQ ID NO: 2418468
uuagcagauauauguucca

SEQ ID NO: 2418470 - RNA, 19 nt, Artificial Sequence
  Description of Artificial Sequence: Synthetic oligonucleotide
  Sense strand starting at position 3891 of SEQ ID NO: 1886624
cuuggcaaccaguaaucua

SEQ ID NO: 2418471 - RNA, 19 nt, Artificial Sequence
  Description of Artificial Sequence: Synthetic oligonucleotide
  Antisense strand to SEQ ID NO: 2418470
uagauuacugguugccaag

SEQ ID NO: 2418472 - RNA, 19 nt, Artificial Sequence
  Description of Artificial Sequence: Synthetic oligonucleotide
  Sense strand starting at position 3937 of SEQ ID NO: 1886624
ggccaauaacgucaagcau

SEQ ID NO: 2418473 - RNA, 19 nt, Artificial Sequence
  Description of Artificial Sequence: Synthetic oligonucleotide
  Antisense strand to SEQ ID NO: 2418472
augcuugacguuauuggcc

SEQ ID NO: 2418474 - RNA, 19 nt, Artificial Sequence
  Description of Artificial Sequence: Synthetic oligonucleotide
  Sense strand starting at position 43 of SEQ ID NO: 1886625
ggaggauuauauguuaugu

SEQ ID NO: 2418475 - RNA, 19 nt, Artificial Sequence
  Description of Artificial Sequence: Synthetic oligonucleotide
  Antisense strand to SEQ ID NO: 2418474
acauaacauauaauccucc

SEQ ID NO: 2418476 - RNA, 19 nt, Artificial Sequence
  Description of Artificial Sequence: Synthetic oligonucleotide
  Sense strand starting at position 51 of SEQ ID NO: 1886625
auauguuauguccaaugca

SEQ ID NO: 2418477 - RNA, 19 nt, Artificial Sequence
  Description of Artificial Sequence: Synthetic oligonucleotide
  Antisense strand to SEQ ID NO: 2418476
ugcauuggacauaacauau

SEQ ID NO: 2418478 - RNA, 19 nt, Artificial Sequence
  Description of Artificial Sequence: Synthetic oligonucleotide
  Sense strand starting at position 59 of SEQ ID NO: 1886625
uguccaaugcaguagagaa

SEQ ID NO: 2418479 - RNA, 19 nt, Artificial Sequence
  Description of Artificial Sequence: Synthetic oligonucleotide
  Antisense strand to SEQ ID NO: 2418478
uucucuacugcauuggaca

SEQ ID NO: 2418480 - RNA, 19 nt, Artificial Sequence
  Description of Artificial Sequence: Synthetic oligonucleotide
  Sense strand starting at position 111 of SEQ ID NO: 1886625
ggguuagguuauccuagaa

SEQ ID NO: 2418481 - RNA, 19 nt, Artificial Sequence
  Description of Artificial Sequence: Synthetic oligonucleotide
  Antisense strand to SEQ ID NO: 2418480
uucuaggauaaccuaaccc

SEQ ID NO: 2418482 - RNA, 19 nt, Artificial Sequence
  Description of Artificial Sequence: Synthetic oligonucleotide
  Sense strand starting at position 227 of SEQ ID NO: 1886625
auccauaaaggguggcaua

SEQ ID NO: 2418483 - RNA, 19 nt, Artificial Sequence
  Description of Artificial Sequence: Synthetic oligonucleotide
  Antisense strand to SEQ ID NO: 2418482
uaugccacccuuuauggau

SEQ ID NO: 2418484 - RNA, 19 nt, Artificial Sequence
  Description of Artificial Sequence: Synthetic oligonucleotide
  Sense strand starting at position 779 of SEQ ID NO: 1886625
ucuggaagccauugaguga

SEQ ID NO: 2418485 - RNA, 19 nt, Artificial Sequence
  Description of Artificial Sequence: Synthetic oligonucleotide
  Antisense strand to SEQ ID NO: 2418484
ucacucaauggcuuccaga

SEQ ID NO: 2418486 - RNA, 19 nt, Artificial Sequence
  Description of Artificial Sequence: Synthetic oligonucleotide
  Sense strand starting at position 790 of SEQ ID NO: 1886625
uugagugagcauugaguga

SEQ ID NO: 2418487 - RNA, 19 nt, Artificial Sequence
  Description of Artificial Sequence: Synthetic oligonucleotide
  Antisense strand to SEQ ID NO: 2418486
ucacucaaugcucacucaa

SEQ ID NO: 2418488 - RNA, 19 nt, Artificial Sequence
  Description of Artificial Sequence: Synthetic oligonucleotide
  Sense strand starting at position 803 of SEQ ID NO: 1886625
gagugauggucucugagga

SEQ ID NO: 2418489 - RNA, 19 nt, Artificial Sequence
  Description of Artificial Sequence: Synthetic oligonucleotide
  Antisense strand to SEQ ID NO: 2418488
uccucagagaccaucacuc

SEQ ID NO: 2418490 - RNA, 19 nt, Artificial Sequence
  Description of Artificial Sequence: Synthetic oligonucleotide
  Sense strand starting at position 886 of SEQ ID NO: 1886625
auugaauugugaucaauuc

SEQ ID NO: 2418491 - RNA, 19 nt, Artificial Sequence
  Description of Artificial Sequence: Synthetic oligonucleotide
  Antisense strand to SEQ ID NO: 2418490
gaauugaucacaauucaau

SEQ ID NO: 2418492 - RNA, 19 nt, Artificial Sequence
  Description of Artificial Sequence: Synthetic oligonucleotide
  Sense strand starting at position 926 of SEQ ID NO: 1886625
aagggagugcuguaaguuc

SEQ ID NO: 2418493 - RNA, 19 nt, Artificial Sequence
  Description of Artificial Sequence: Synthetic oligonucleotide
  Antisense strand to SEQ ID NO: 2418492
gaacuuacagcacucccuu

SEQ ID NO: 2418494 - RNA, 19 nt, Artificial Sequence
  Description of Artificial Sequence: Synthetic oligonucleotide
  Sense strand starting at position 935 of SEQ ID NO: 1886625
cuguaaguucuugagaagu

SEQ ID NO: 2418495 - RNA, 19 nt, Artificial Sequence
  Description of Artificial Sequence: Synthetic oligonucleotide
  Antisense strand to SEQ ID NO: 2418494
acuucucaagaacuuacag

SEQ ID NO: 2418496 - RNA, 19 nt, Artificial Sequence
  Description of Artificial Sequence: Synthetic oligonucleotide
  Sense strand starting at position 941 of SEQ ID NO: 1886625
guucuugagaaguaucuug

SEQ ID NO: 2418497 - RNA, 19 nt, Artificial Sequence
  Description of Artificial Sequence: Synthetic oligonucleotide
  Antisense strand to SEQ ID NO: 2418496
caagauacuucucaagaac

SEQ ID NO: 2418498 - RNA, 19 nt, Artificial Sequence
  Description of Artificial Sequence: Synthetic oligonucleotide
  Sense strand starting at position 1050 of SEQ ID NO: 1886625
gucuuuauugccuacagaa

SEQ ID NO: 2418499 - RNA, 19 nt, Artificial Sequence
  Description of Artificial Sequence: Synthetic oligonucleotide
  Antisense strand to SEQ ID NO: 2418498
uucuguaggcaauaaagac

SEQ ID NO: 2418500 - RNA, 19 nt, Artificial Sequence
  Description of Artificial Sequence: Synthetic oligonucleotide
  Sense strand starting at position 1173 of SEQ ID NO: 1886625
ggaacacauucuguuuaau

SEQ ID NO: 2418501 - RNA, 19 nt, Artificial Sequence
  Description of Artificial Sequence: Synthetic oligonucleotide
  Antisense strand to SEQ ID NO: 2418500
auuaaacagaauguguucc

SEQ ID NO: 2418502 - RNA, 19 nt, Artificial Sequence
  Description of Artificial Sequence: Synthetic oligonucleotide
  Sense strand starting at position 1964 of SEQ ID NO: 1886625
ugaauauuguagucagaca

SEQ ID NO: 2418503 - RNA, 19 nt, Artificial Sequence
  Description of Artificial Sequence: Synthetic oligonucleotide
  Antisense strand to SEQ ID NO: 2418502
ugucugacuacaauauuca

SEQ ID NO: 2418504 - RNA, 19 nt, Artificial Sequence
  Description of Artificial Sequence: Synthetic oligonucleotide
  Sense strand starting at position 1969 of SEQ ID NO: 1886625
auuguagucagacaaagua

SEQ ID NO: 2418505 - RNA, 19 nt, Artificial Sequence
  Description of Artificial Sequence: Synthetic oligonucleotide
  Antisense strand to SEQ ID NO: 2418504
uacuuugucugacuacaau

SEQ ID NO: 2418506 - RNA, 19 nt, Artificial Sequence
  Description of Artificial Sequence: Synthetic oligonucleotide
  Sense strand starting at position 2015 of SEQ ID NO: 1886625
aagaucagucucugcugau

SEQ ID NO: 2418507 - RNA, 19 nt, Artificial Sequence
  Description of Artificial Sequence: Synthetic oligonucleotide
  Antisense strand to SEQ ID NO: 2418506
aucagcagagacugaucuu

SEQ ID NO: 2418508 - RNA, 19 nt, Artificial Sequence
  Description of Artificial Sequence: Synthetic oligonucleotide
  Sense strand starting at position 2213 of SEQ ID NO: 1886625
uggucaaacugccuaaauu

SEQ ID NO: 2418509 - RNA, 19 nt, Artificial Sequence
  Description of Artificial Sequence: Synthetic oligonucleotide
  Antisense strand to SEQ ID NO: 2418508
aauuuaggcaguuugacca

SEQ ID NO: 2418510 - RNA, 19 nt, Artificial Sequence
  Description of Artificial Sequence: Synthetic oligonucleotide
  Sense strand starting at position 2214 of SEQ ID NO: 1886625
ggucaaacugccuaaauua

SEQ ID NO: 2418511 - RNA, 19 nt, Artificial Sequence
  Description of Artificial Sequence: Synthetic oligonucleotide
  Antisense strand to SEQ ID NO: 2418510
uaauuuaggcaguuugacc

SEQ ID NO: 2418512 - RNA, 19 nt, Artificial Sequence
  Description of Artificial Sequence: Synthetic oligonucleotide
  Sense strand starting at position 2251 of SEQ ID NO: 1886625
ggaaucaauuuagauucuu

SEQ ID NO: 2418513 - RNA, 19 nt, Artificial Sequence
  Description of Artificial Sequence: Synthetic oligonucleotide
  Antisense strand to SEQ ID NO: 2418512
aagaaucuaaauugauucc

SEQ ID NO: 2418514 - RNA, 19 nt, Artificial Sequence
  Description of Artificial Sequence: Synthetic oligonucleotide
  Sense strand starting at position 2299 of SEQ ID NO: 1886625
aaaguauuacaugggcauu

SEQ ID NO: 2418515 - RNA, 19 nt, Artificial Sequence
  Description of Artificial Sequence: Synthetic oligonucleotide
  Antisense strand to SEQ ID NO: 2418514
aaugcccauguaauacuuu

SEQ ID NO: 2418516 - RNA, 19 nt, Artificial Sequence
  Description of Artificial Sequence: Synthetic oligonucleotide
  Sense strand starting at position 2301 of SEQ ID NO: 1886625
aguauuacaugggcauuaa

SEQ ID NO: 2418517 - RNA, 19 nt, Artificial Sequence
  Description of Artificial Sequence: Synthetic oligonucleotide
  Antisense strand to SEQ ID NO: 2418516
uuaaugcccauguaauacu

SEQ ID NO: 2418518 - RNA, 19 nt, Artificial Sequence
  Description of Artificial Sequence: Synthetic oligonucleotide
  Sense strand starting at position 2302 of SEQ ID NO: 1886625
guauuacaugggcauuaaa

SEQ ID NO: 2418519 - RNA, 19 nt, Artificial Sequence
  Description of Artificial Sequence: Synthetic oligonucleotide
  Antisense strand to SEQ ID NO: 2418518
uuuaaugcccauguaauac

SEQ ID NO: 2418520 - RNA, 19 nt, Artificial Sequence
  Description of Artificial Sequence: Synthetic oligonucleotide
  Sense strand starting at position 2342 of SEQ ID NO: 1886625
cuuaacacacgcugagaau

SEQ ID NO: 2418521 - RNA, 19 nt, Artificial Sequence
  Description of Artificial Sequence: Synthetic oligonucleotide
  Antisense strand to SEQ ID NO: 2418520
auucucagcguguguuaag

SEQ ID NO: 2418522 - RNA, 19 nt, Artificial Sequence
  Description of Artificial Sequence: Synthetic oligonucleotide
  Sense strand starting at position 2365 of SEQ ID NO: 1886625
uuaauaguagcucauauga

SEQ ID NO: 2418523 - RNA, 19 nt, Artificial Sequence
  Description of Artificial Sequence: Synthetic oligonucleotide
  Antisense strand to SEQ ID NO: 2418522
ucauaugagcuacuauuaa

SEQ ID NO: 2418524 - RNA, 19 nt, Artificial Sequence
  Description of Artificial Sequence: Synthetic oligonucleotide
  Sense strand starting at position 2524 of SEQ ID NO: 1886625
gucucuugucuuguaugca

SEQ ID NO: 2418525 - RNA, 19 nt, Artificial Sequence
  Description of Artificial Sequence: Synthetic oligonucleotide
  Antisense strand to SEQ ID NO: 2418524
ugcauacaagacaagagac

SEQ ID NO: 2418526 - RNA, 19 nt, Artificial Sequence
  Description of Artificial Sequence: Synthetic oligonucleotide
  Sense strand starting at position 2559 of SEQ ID NO: 1886625
cccagauuacguuaaagac

SEQ ID NO: 2418527 - RNA, 19 nt, Artificial Sequence
  Description of Artificial Sequence: Synthetic oligonucleotide
  Antisense strand to SEQ ID NO: 2418526
gucuuuaacguaaucuggg

SEQ ID NO: 2418528 - RNA, 19 nt, Artificial Sequence
  Description of Artificial Sequence: Synthetic oligonucleotide
  Sense strand starting at position 3014 of SEQ ID NO: 1886625
auauccagucucuguauaa

SEQ ID NO: 2418529 - RNA, 19 nt, Artificial Sequence
  Description of Artificial Sequence: Synthetic oligonucleotide
  Antisense strand to SEQ ID NO: 2418528
uuauacagagacuggauau

SEQ ID NO: 2418530 - RNA, 19 nt, Artificial Sequence
  Description of Artificial Sequence: Synthetic oligonucleotide
  Sense strand starting at position 3285 of SEQ ID NO: 1886625
uguuuacaaugauuaucga

SEQ ID NO: 2418531 - RNA, 19 nt, Artificial Sequence
  Description of Artificial Sequence: Synthetic oligonucleotide
  Antisense strand to SEQ ID NO: 2418530
ucgauaaucauuguaaaca

SEQ ID NO: 2418532 - RNA, 19 nt, Artificial Sequence
  Description of Artificial Sequence: Synthetic oligonucleotide
  Sense strand starting at position 3286 of SEQ ID NO: 1886625
guuuacaaugauuaucgaa

SEQ ID NO: 2418533 - RNA, 19 nt, Artificial Sequence
  Description of Artificial Sequence: Synthetic oligonucleotide
  Antisense strand to SEQ ID NO: 2418532
uucgauaaucauuguaaac

SEQ ID NO: 2418534 - RNA, 19 nt, Artificial Sequence
  Description of Artificial Sequence: Synthetic oligonucleotide
  Sense strand starting at position 3335 of SEQ ID NO: 1886625
gguguguaugcgucaaugu

SEQ ID NO: 2418535 - RNA, 19 nt, Artificial Sequence
  Description of Artificial Sequence: Synthetic oligonucleotide
  Antisense strand to SEQ ID NO: 2418534
acauugacgcauacacacc

SEQ ID NO: 2418536 - RNA, 19 nt, Artificial Sequence
  Description of Artificial Sequence: Synthetic oligonucleotide
  Sense strand starting at position 3337 of SEQ ID NO: 1886625
uguguaugcgucaauguga

SEQ ID NO: 2418537 - RNA, 19 nt, Artificial Sequence
  Description of Artificial Sequence: Synthetic oligonucleotide
  Antisense strand to SEQ ID NO: 2418536
ucacauugacgcauacaca

SEQ ID NO: 2418538 - RNA, 19 nt, Artificial Sequence
  Description of Artificial Sequence: Synthetic oligonucleotide
  Sense strand starting at position 3338 of SEQ ID NO: 1886625
guguaugcgucaaugugac

SEQ ID NO: 2418539 - RNA, 19 nt, Artificial Sequence
  Description of Artificial Sequence: Synthetic oligonucleotide
  Antisense strand to SEQ ID NO: 2418538
gucacauugacgcauacac

SEQ ID NO: 2418540 - RNA, 19 nt, Artificial Sequence
  Description of Artificial Sequence: Synthetic oligonucleotide
  Sense strand starting at position 3346 of SEQ ID NO: 1886625
gucaaugugacagaguuua

SEQ ID NO: 2418541 - RNA, 19 nt, Artificial Sequence
  Description of Artificial Sequence: Synthetic oligonucleotide
  Antisense strand to SEQ ID NO: 2418540
uaaacucugucacauugac

SEQ ID NO: 2418542 - RNA, 19 nt, Artificial Sequence
  Description of Artificial Sequence: Synthetic oligonucleotide
  Sense strand starting at position 3351 of SEQ ID NO: 1886625
ugugacagaguuuauguau

SEQ ID NO: 2418543 - RNA, 19 nt, Artificial Sequence
  Description of Artificial Sequence: Synthetic oligonucleotide
  Antisense strand to SEQ ID NO: 2418542
auacauaaacucugucaca

SEQ ID NO: 2418544 - RNA, 19 nt, Artificial Sequence
  Description of Artificial Sequence: Synthetic oligonucleotide
  Sense strand starting at position 3430 of SEQ ID NO: 1886625
uuuacuucgcuauauuaag

SEQ ID NO: 2418545 - RNA, 19 nt, Artificial Sequence
  Description of Artificial Sequence: Synthetic oligonucleotide
  Antisense strand to SEQ ID NO: 2418544
cuuaauauagcgaaguaaa

SEQ ID NO: 2418546 - RNA, 19 nt, Artificial Sequence
  Description of Artificial Sequence: Synthetic oligonucleotide
  Sense strand starting at position 3463 of SEQ ID NO: 1886625
gaaugauaaugguuauguu

SEQ ID NO: 2418547 - RNA, 19 nt, Artificial Sequence
  Description of Artificial Sequence: Synthetic oligonucleotide
  Antisense strand to SEQ ID NO: 2418546
aacauaaccauuaucauuc

SEQ ID NO: 2418548 - RNA, 19 nt, Artificial Sequence
  Description of Artificial Sequence: Synthetic oligonucleotide
  Sense strand starting at position 3467 of SEQ ID NO: 1886625
gauaaugguuauguuacaa

SEQ ID NO: 2418549 - RNA, 19 nt, Artificial Sequence
  Description of Artificial Sequence: Synthetic oligonucleotide
  Antisense strand to SEQ ID NO: 2418548
uuguaacauaaccauuauc

SEQ ID NO: 2418550 - RNA, 19 nt, Artificial Sequence
  Description of Artificial Sequence: Synthetic oligonucleotide
  Sense strand starting at position 3581 of SEQ ID NO: 1886625
cugguaagcaucuggacua

SEQ ID NO: 2418551 - RNA, 19 nt, Artificial Sequence
  Description of Artificial Sequence: Synthetic oligonucleotide
  Antisense strand to SEQ ID NO: 2418550
uaguccagaugcuuaccag

SEQ ID NO: 2418552 - RNA, 19 nt, Artificial Sequence
  Description of Artificial Sequence: Synthetic oligonucleotide
  Sense strand starting at position 3666 of SEQ ID NO: 1886625
aggagacuuagcuagcaca

SEQ ID NO: 2418553 - RNA, 19 nt, Artificial Sequence
  Description of Artificial Sequence: Synthetic oligonucleotide
  Antisense strand to SEQ ID NO: 2418552
ugugcuagcuaagucuccu

SEQ ID NO: 2418554 - RNA, 19 nt, Artificial Sequence
  Description of Artificial Sequence: Synthetic oligonucleotide
  Sense strand starting at position 1147 of SEQ ID NO: 1886626
aggagcuguccgggagaga

SEQ ID NO: 2418555 - RNA, 19 nt, Artificial Sequence
  Description of Artificial Sequence: Synthetic oligonucleotide
  Antisense strand to SEQ ID NO: 2418554
ucucucccggacagcuccu

SEQ ID NO: 2418556 - RNA, 19 nt, Artificial Sequence
  Description of Artificial Sequence: Synthetic oligonucleotide
  Sense strand starting at position 3156 of SEQ ID NO: 1886626
auauaugugugucuuuaag

SEQ ID NO: 2418557 - RNA, 19 nt, Artificial Sequence
  Description of Artificial Sequence: Synthetic oligonucleotide
  Antisense strand to SEQ ID NO: 2418556
cuuaaagacacacauauau

SEQ ID NO: 2418558 - RNA, 19 nt, Artificial Sequence
  Description of Artificial Sequence: Synthetic oligonucleotide
  Sense strand starting at position 3558 of SEQ ID NO: 1886626
acaggugugagugauguau

SEQ ID NO: 2418559 - RNA, 19 nt, Artificial Sequence
  Description of Artificial Sequence: Synthetic oligonucleotide
  Antisense strand to SEQ ID NO: 2418558
auacaucacucacaccugu

SEQ ID NO: 2418560 - RNA, 19 nt, Artificial Sequence
  Description of Artificial Sequence: Synthetic oligonucleotide
  Sense strand starting at position 3560 of SEQ ID NO: 1886626
aggugugagugauguauuu

SEQ ID NO: 2418561 - RNA, 19 nt, Artificial Sequence
  Description of Artificial Sequence: Synthetic oligonucleotide
  Antisense strand to SEQ ID NO: 2418560
aaauacaucacucacaccu

SEQ ID NO: 2418562 - RNA, 19 nt, Artificial Sequence
  Description of Artificial Sequence: Synthetic oligonucleotide
  Sense strand starting at position 115 of SEQ ID NO: 1886627
uugggacuucuugaguuga

SEQ ID NO: 2418563 - RNA, 19 nt, Artificial Sequence
  Description of Artificial Sequence: Synthetic oligonucleotide
  Antisense strand to SEQ ID NO: 2418562
ucaacucaagaagucccaa

SEQ ID NO: 2418564 - RNA, 19 nt, Artificial Sequence
  Description of Artificial Sequence: Synthetic oligonucleotide
  Sense strand starting at position 117 of SEQ ID NO: 1886627
gggacuucuugaguugauu

SEQ ID NO: 2418565 - RNA, 19 nt, Artificial Sequence
  Description of Artificial Sequence: Synthetic oligonucleotide
  Antisense strand to SEQ ID NO: 2418564
aaucaacucaagaaguccc

SEQ ID NO: 2418566 - RNA, 19 nt, Artificial Sequence
  Description of Artificial Sequence: Synthetic oligonucleotide
  Sense strand starting at position 120 of SEQ ID NO: 1886627
acuucuugaguugauuaua

SEQ ID NO: 2418567 - RNA, 19 nt, Artificial Sequence
  Description of Artificial Sequence: Synthetic oligonucleotide
  Antisense strand to SEQ ID NO: 2418566
uauaaucaacucaagaagu

SEQ ID NO: 2418568 - RNA, 19 nt, Artificial Sequence
  Description of Artificial Sequence: Synthetic oligonucleotide
  Sense strand starting at position 154 of SEQ ID NO: 1886627
gggcuuaagaguugaugcu

SEQ ID NO: 2418569 - RNA, 19 nt, Artificial Sequence
  Description of Artificial Sequence: Synthetic oligonucleotide
  Antisense strand to SEQ ID NO: 2418568
agcaucaacucuuaagccc

SEQ ID NO: 2418570 - RNA, 19 nt, Artificial Sequence
  Description of Artificial Sequence: Synthetic oligonucleotide
  Sense strand starting at position 181 of SEQ ID NO: 1886627
uuaagacuuguagggauau

SEQ ID NO: 2418571 - RNA, 19 nt, Artificial Sequence
  Description of Artificial Sequence: Synthetic oligonucleotide
  Antisense strand to SEQ ID NO: 2418570
auaucccuacaagucuuaa

SEQ ID NO: 2418572 - RNA, 19 nt, Artificial Sequence
  Description of Artificial Sequence: Synthetic oligonucleotide
  Sense strand starting at position 252 of SEQ ID NO: 1886627
gcuagagaacaguguguua

SEQ ID NO: 2418573 - RNA, 19 nt, Artificial Sequence
  Description of Artificial Sequence: Synthetic oligonucleotide
  Antisense strand to SEQ ID NO: 2418572
uaacacacuguucucuagc

SEQ ID NO: 2418574 - RNA, 19 nt, Artificial Sequence
  Description of Artificial Sequence: Synthetic oligonucleotide
  Sense strand starting at position 254 of SEQ ID NO: 1886627
uagagaacaguguguuaag

SEQ ID NO: 2418575 - RNA, 19 nt, Artificial Sequence
  Description of Artificial Sequence: Synthetic oligonucleotide
  Antisense strand to SEQ ID NO: 2418574
cuuaacacacuguucucua

SEQ ID NO: 2418576 - RNA, 19 nt, Artificial Sequence
  Description of Artificial Sequence: Synthetic oligonucleotide
  Sense strand starting at position 261 of SEQ ID NO: 1886627
caguguguuaaggguugaa

SEQ ID NO: 2418577 - RNA, 19 nt, Artificial Sequence
  Description of Artificial Sequence: Synthetic oligonucleotide
  Antisense strand to SEQ ID NO: 2418576
uucaacccuuaacacacug

SEQ ID NO: 2418578 - RNA, 19 nt, Artificial Sequence
  Description of Artificial Sequence: Synthetic oligonucleotide
  Sense strand starting at position 374 of SEQ ID NO: 1886627
uugagaugagguugugcuu

SEQ ID NO: 2418579 - RNA, 19 nt, Artificial Sequence
  Description of Artificial Sequence: Synthetic oligonucleotide
  Antisense strand to SEQ ID NO: 2418578
aagcacaaccucaucucaa

SEQ ID NO: 2418580 - RNA, 19 nt, Artificial Sequence
  Description of Artificial Sequence: Synthetic oligonucleotide
  Sense strand starting at position 417 of SEQ ID NO: 1886627
ugaccuaugucuuuccaag

SEQ ID NO: 2418581 - RNA, 19 nt, Artificial Sequence
  Description of Artificial Sequence: Synthetic oligonucleotide
  Antisense strand to SEQ ID NO: 2418580
cuuggaaagacauagguca

SEQ ID NO: 2418582 - RNA, 19 nt, Artificial Sequence
  Description of Artificial Sequence: Synthetic oligonucleotide
  Sense strand starting at position 464 of SEQ ID NO: 1886627
uggagaacaccgugugauc

SEQ ID NO: 2418583 - RNA, 19 nt, Artificial Sequence
  Description of Artificial Sequence: Synthetic oligonucleotide
  Antisense strand to SEQ ID NO: 2418582
gaucacacgguguucucca

SEQ ID NO: 2418584 - RNA, 19 nt, Artificial Sequence
  Description of Artificial Sequence: Synthetic oligonucleotide
  Sense strand starting at position 555 of SEQ ID NO: 1886627
uaaggaagguuuccacuca

SEQ ID NO: 2418585 - RNA, 19 nt, Artificial Sequence
  Description of Artificial Sequence: Synthetic oligonucleotide
  Antisense strand to SEQ ID NO: 2418584
ugaguggaaaccuuccuua

SEQ ID NO: 2418586 - RNA, 19 nt, Artificial Sequence
  Description of Artificial Sequence: Synthetic oligonucleotide
  Sense strand starting at position 640 of SEQ ID NO: 1886627
aggaauagguuucuauugu

SEQ ID NO: 2418587 - RNA, 19 nt, Artificial Sequence
  Description of Artificial Sequence: Synthetic oligonucleotide
  Antisense strand to SEQ ID NO: 2418586
acaauagaaaccuauuccu

SEQ ID NO: 2418588 - RNA, 19 nt, Artificial Sequence
  Description of Artificial Sequence: Synthetic oligonucleotide
  Sense strand starting at position 665 of SEQ ID NO: 1886627
ccacccaauuuguguauuu

SEQ ID NO: 2418589 - RNA, 19 nt, Artificial Sequence
  Description of Artificial Sequence: Synthetic oligonucleotide
  Antisense strand to SEQ ID NO: 2418588
aaauacacaaauugggugg

SEQ ID NO: 2418590 - RNA, 19 nt, Artificial Sequence
  Description of Artificial Sequence: Synthetic oligonucleotide
  Sense strand starting at position 674 of SEQ ID NO: 1886627
uuguguauuucguuaacag

SEQ ID NO: 2418591 - RNA, 19 nt, Artificial Sequence
  Description of Artificial Sequence: Synthetic oligonucleotide
  Antisense strand to SEQ ID NO: 2418590
cuguuaacgaaauacacaa

SEQ ID NO: 2418592 - RNA, 19 nt, Artificial Sequence
  Description of Artificial Sequence: Synthetic oligonucleotide
  Sense strand starting at position 675 of SEQ ID NO: 1886627
uguguauuucguuaacagu

SEQ ID NO: 2418593 - RNA, 19 nt, Artificial Sequence
  Description of Artificial Sequence: Synthetic oligonucleotide
  Antisense strand to SEQ ID NO: 2418592
acuguuaacgaaauacaca

SEQ ID NO: 2418594 - RNA, 19 nt, Artificial Sequence
  Description of Artificial Sequence: Synthetic oligonucleotide
  Sense strand starting at position 681 of SEQ ID NO: 1886627
uuucguuaacaguagacuu

SEQ ID NO: 2418595 - RNA, 19 nt, Artificial Sequence
  Description of Artificial Sequence: Synthetic oligonucleotide
  Antisense strand to SEQ ID NO: 2418594
aagucuacuguuaacgaaa

SEQ ID NO: 2418596 - RNA, 19 nt, Artificial Sequence
  Description of Artificial Sequence: Synthetic oligonucleotide
  Sense strand starting at position 683 of SEQ ID NO: 1886627
ucguuaacaguagacuuaa

SEQ ID NO: 2418597 - RNA, 19 nt, Artificial Sequence
  Description of Artificial Sequence: Synthetic oligonucleotide
  Antisense strand to SEQ ID NO: 2418596
uuaagucuacuguuaacga

SEQ ID NO: 2418598 - RNA, 19 nt, Artificial Sequence
  Description of Artificial Sequence: Synthetic oligonucleotide
  Sense strand starting at position 1097 of SEQ ID NO: 1886627
cacaucagauuguugugaa

SEQ ID NO: 2418599 - RNA, 19 nt, Artificial Sequence
  Description of Artificial Sequence: Synthetic oligonucleotide
  Antisense strand to SEQ ID NO: 2418598
uucacaacaaucugaugug

SEQ ID NO: 2418600 - RNA, 19 nt, Artificial Sequence
  Description of Artificial Sequence: Synthetic oligonucleotide
  Sense strand starting at position 1125 of SEQ ID NO: 1886627
gauccugaaugugaggaaa

SEQ ID NO: 2418601 - RNA, 19 nt, Artificial Sequence
  Description of Artificial Sequence: Synthetic oligonucleotide
  Antisense strand to SEQ ID NO: 2418600
uuuccucacauucaggauc

SEQ ID NO: 2418602 - RNA, 19 nt, Artificial Sequence
  Description of Artificial Sequence: Synthetic oligonucleotide
  Sense strand starting at position 1138 of SEQ ID NO: 1886627
aggaaauuauccucagcac

SEQ ID NO: 2418603 - RNA, 19 nt, Artificial Sequence
  Description of Artificial Sequence: Synthetic oligonucleotide
  Antisense strand to SEQ ID NO: 2418602
gugcugaggauaauuuccu

SEQ ID NO: 2418604 - RNA, 19 nt, Artificial Sequence
  Description of Artificial Sequence: Synthetic oligonucleotide
  Sense strand starting at position 1208 of SEQ ID NO: 1886627
uugauuaccgucuaagggu

SEQ ID NO: 2418605 - RNA, 19 nt, Artificial Sequence
  Description of Artificial Sequence: Synthetic oligonucleotide
  Antisense strand to SEQ ID NO: 2418604
acccuuagacgguaaucaa

SEQ ID NO: 2418606 - RNA, 19 nt, Artificial Sequence
  Description of Artificial Sequence: Synthetic oligonucleotide
  Sense strand starting at position 1309 of SEQ ID NO: 1886627
gaaguugaacgauggguuu

SEQ ID NO: 2418607 - RNA, 19 nt, Artificial Sequence
  Description of Artificial Sequence: Synthetic oligonucleotide
  Antisense strand to SEQ ID NO: 2418606
aaacccaucguucaacuuc

SEQ ID NO: 2418608 - RNA, 19 nt, Artificial Sequence
  Description of Artificial Sequence: Synthetic oligonucleotide
  Sense strand starting at position 1370 of SEQ ID NO: 1886627
cagugucuccugcaaguca

SEQ ID NO: 2418609 - RNA, 19 nt, Artificial Sequence
  Description of Artificial Sequence: Synthetic oligonucleotide
  Antisense strand to SEQ ID NO: 2418608
ugacuugcaggagacacug

SEQ ID NO: 2418610 - RNA, 19 nt, Artificial Sequence
  Description of Artificial Sequence: Synthetic oligonucleotide
  Sense strand starting at position 1396 of SEQ ID NO: 1886627
gggaauccauccuccauua

SEQ ID NO: 2418611 - RNA, 19 nt, Artificial Sequence
  Description of Artificial Sequence: Synthetic oligonucleotide
  Antisense strand to SEQ ID NO: 2418610
uaauggaggauggauuccc

SEQ ID NO: 2418612 - RNA, 19 nt, Artificial Sequence
  Description of Artificial Sequence: Synthetic oligonucleotide
  Sense strand starting at position 1408 of SEQ ID NO: 1886627
uccauuaacugacaagaga

SEQ ID NO: 2418613 - RNA, 19 nt, Artificial Sequence
  Description of Artificial Sequence: Synthetic oligonucleotide
  Antisense strand to SEQ ID NO: 2418612
ucucuugucaguuaaugga

SEQ ID NO: 2418614 - RNA, 19 nt, Artificial Sequence
  Description of Artificial Sequence: Synthetic oligonucleotide
  Sense strand starting at position 1894 of SEQ ID NO: 1886627
aggucuuccugccuugaaa

SEQ ID NO: 2418615 - RNA, 19 nt, Artificial Sequence
  Description of Artificial Sequence: Synthetic oligonucleotide
  Antisense strand to SEQ ID NO: 2418614
uuucaaggcaggaagaccu

SEQ ID NO: 2418616 - RNA, 19 nt, Artificial Sequence
  Description of Artificial Sequence: Synthetic oligonucleotide
  Sense strand starting at position 1992 of SEQ ID NO: 1886627
auauuuaccuggcaaggua

SEQ ID NO: 2418617 - RNA, 19 nt, Artificial Sequence
  Description of Artificial Sequence: Synthetic oligonucleotide
  Antisense strand to SEQ ID NO: 2418616
uaccuugccagguaaauau

SEQ ID NO: 2418618 - RNA, 19 nt, Artificial Sequence
  Description of Artificial Sequence: Synthetic oligonucleotide
  Sense strand starting at position 2064 of SEQ ID NO: 1886627
gcagccauggguuagaaca

SEQ ID NO: 2418619 - RNA, 19 nt, Artificial Sequence
  Description of Artificial Sequence: Synthetic oligonucleotide
  Antisense strand to SEQ ID NO: 2418618
uguucuaacccauggcugc

SEQ ID NO: 2418620 - RNA, 19 nt, Artificial Sequence
  Description of Artificial Sequence: Synthetic oligonucleotide
  Sense strand starting at position 2243 of SEQ ID NO: 1886627
ucuuguuaaccaggaugga

SEQ ID NO: 2418621 - RNA, 19 nt, Artificial Sequence
  Description of Artificial Sequence: Synthetic oligonucleotide
  Antisense strand to SEQ ID NO: 2418620
uccauccugguuaacaaga

SEQ ID NO: 2418622 - RNA, 19 nt, Artificial Sequence
  Description of Artificial Sequence: Synthetic oligonucleotide
  Sense strand starting at position 2342 of SEQ ID NO: 1886627
cuugaauucgggugaucca

SEQ ID NO: 2418623 - RNA, 19 nt, Artificial Sequence
  Description of Artificial Sequence: Synthetic oligonucleotide
  Antisense strand to SEQ ID NO: 2418622
uggaucacccgaauucaag

SEQ ID NO: 2418624 - RNA, 19 nt, Artificial Sequence
  Description of Artificial Sequence: Synthetic oligonucleotide
  Sense strand starting at position 2441 of SEQ ID NO: 1886627
gccagaaaucuggaccuuu

SEQ ID NO: 2418625 - RNA, 19 nt, Artificial Sequence
  Description of Artificial Sequence: Synthetic oligonucleotide
  Antisense strand to SEQ ID NO: 2418624
aaagguccagauuucuggc

SEQ ID NO: 2418626 - RNA, 19 nt, Artificial Sequence
  Description of Artificial Sequence: Synthetic oligonucleotide
  Sense strand starting at position 2523 of SEQ ID NO: 1886627
ccugaucucaggugagauc

SEQ ID NO: 2418627 - RNA, 19 nt, Artificial Sequence
  Description of Artificial Sequence: Synthetic oligonucleotide
  Antisense strand to SEQ ID NO: 2418626
gaucucaccugagaucagg

SEQ ID NO: 2418628 - RNA, 19 nt, Artificial Sequence
  Description of Artificial Sequence: Synthetic oligonucleotide
  Sense strand starting at position 2742 of SEQ ID NO: 1886627
uggaccuuuguaugaaauc

SEQ ID NO: 2418629 - RNA, 19 nt, Artificial Sequence
  Description of Artificial Sequence: Synthetic oligonucleotide
  Antisense strand to SEQ ID NO: 2418628
gauuucauacaaaggucca

SEQ ID NO: 2418630 - RNA, 19 nt, Artificial Sequence
  Description of Artificial Sequence: Synthetic oligonucleotide
  Sense strand starting at position 3020 of SEQ ID NO: 1886627
cucagaagauccucuugca

SEQ ID NO: 2418631 - RNA, 19 nt, Artificial Sequence
  Description of Artificial Sequence: Synthetic oligonucleotide
  Antisense strand to SEQ ID NO: 2418630
ugcaagaggaucuucugag

SEQ ID NO: 2418632 - RNA, 19 nt, Artificial Sequence
  Description of Artificial Sequence: Synthetic oligonucleotide
  Sense strand starting at position 3655 of SEQ ID NO: 1886627
ugcacugugcaucaguaau

SEQ ID NO: 2418633 - RNA, 19 nt, Artificial Sequence
  Description of Artificial Sequence: Synthetic oligonucleotide
  Antisense strand to SEQ ID NO: 2418632
auuacugaugcacagugca

SEQ ID NO: 2418634 - RNA, 19 nt, Artificial Sequence
  Description of Artificial Sequence: Synthetic oligonucleotide
  Sense strand starting at position 3671 of SEQ ID NO: 1886627
aaugguaaugucuguuauc

SEQ ID NO: 2418635 - RNA, 19 nt, Artificial Sequence
  Description of Artificial Sequence: Synthetic oligonucleotide
  Antisense strand to SEQ ID NO: 2418634
gauaacagacauuaccauu

SEQ ID NO: 2418636 - RNA, 19 nt, Artificial Sequence
  Description of Artificial Sequence: Synthetic oligonucleotide
  Sense strand starting at position 3672 of SEQ ID NO: 1886627
augguaaugucuguuauca

SEQ ID NO: 2418637 - RNA, 19 nt, Artificial Sequence
  Description of Artificial Sequence: Synthetic oligonucleotide
  Antisense strand to SEQ ID NO: 2418636
ugauaacagacauuaccau

SEQ ID NO: 2418638 - RNA, 19 nt, Artificial Sequence
  Description of Artificial Sequence: Synthetic oligonucleotide
  Sense strand starting at position 3748 of SEQ ID NO: 1886627
gguggaguucagggugacu

SEQ ID NO: 2418639 - RNA, 19 nt, Artificial Sequence
  Description of Artificial Sequence: Synthetic oligonucleotide
  Antisense strand to SEQ ID NO: 2418638
agucacccugaacuccacc

SEQ ID NO: 2418640 - RNA, 19 nt, Artificial Sequence
  Description of Artificial Sequence: Synthetic oligonucleotide
  Sense strand starting at position 3750 of SEQ ID NO: 1886627
uggaguucagggugacuga

SEQ ID NO: 2418641 - RNA, 19 nt, Artificial Sequence
  Description of Artificial Sequence: Synthetic oligonucleotide
  Antisense strand to SEQ ID NO: 2418640
ucagucacccugaacucca

SEQ ID NO: 2418642 - RNA, 19 nt, Artificial Sequence
  Description of Artificial Sequence: Synthetic oligonucleotide
  Sense strand starting at position 225 of SEQ ID NO: 1886628
ucccauagcuggucuugaa

SEQ ID NO: 2418643 - RNA, 19 nt, Artificial Sequence
  Description of Artificial Sequence: Synthetic oligonucleotide
  Antisense strand to SEQ ID NO: 2418642
uucaagaccagcuauggga

SEQ ID NO: 2418644 - RNA, 19 nt, Artificial Sequence
  Description of Artificial Sequence: Synthetic oligonucleotide
  Sense strand starting at position 363 of SEQ ID NO: 1886628
ggaaguggugucugcaaau

SEQ ID NO: 2418645 - RNA, 19 nt, Artificial Sequence
  Description of Artificial Sequence: Synthetic oligonucleotide
  Antisense strand to SEQ ID NO: 2418644
auuugcagacaccacuucc

SEQ ID NO: 2418646 - RNA, 19 nt, Artificial Sequence
  Description of Artificial Sequence: Synthetic oligonucleotide
  Sense strand starting at position 369 of SEQ ID NO: 1886628
ggugucugcaaaugacaua

SEQ ID NO: 2418647 - RNA, 19 nt, Artificial Sequence
  Description of Artificial Sequence: Synthetic oligonucleotide
  Antisense strand to SEQ ID NO: 2418646
uaugucauuugcagacacc

SEQ ID NO: 2418648 - RNA, 19 nt, Artificial Sequence
  Description of Artificial Sequence: Synthetic oligonucleotide
  Sense strand starting at position 1560 of SEQ ID NO: 1886628
ggauuauaggagugugcug

SEQ ID NO: 2418649 - RNA, 19 nt, Artificial Sequence
  Description of Artificial Sequence: Synthetic oligonucleotide
  Antisense strand to SEQ ID NO: 2418648
cagcacacuccuauaaucc

SEQ ID NO: 2418650 - RNA, 19 nt, Artificial Sequence
  Description of Artificial Sequence: Synthetic oligonucleotide
  Sense strand starting at position 1590 of SEQ ID NO: 1886628
gcggcucuucuugccaaau

SEQ ID NO: 2418651 - RNA, 19 nt, Artificial Sequence
  Description of Artificial Sequence: Synthetic oligonucleotide
  Antisense strand to SEQ ID NO: 2418650
auuuggcaagaagagccgc

SEQ ID NO: 2418652 - RNA, 19 nt, Artificial Sequence
  Description of Artificial Sequence: Synthetic oligonucleotide
  Sense strand starting at position 1591 of SEQ ID NO: 1886628
cggcucuucuugccaaaug

SEQ ID NO: 2418653 - RNA, 19 nt, Artificial Sequence
  Description of Artificial Sequence: Synthetic oligonucleotide
  Antisense strand to SEQ ID NO: 2418652
cauuuggcaagaagagccg

SEQ ID NO: 2418654 - RNA, 19 nt, Artificial Sequence
  Description of Artificial Sequence: Synthetic oligonucleotide
  Sense strand starting at position 1607 of SEQ ID NO: 1886628
auggauuucucugauaaac

SEQ ID NO: 2418655 - RNA, 19 nt, Artificial Sequence
  Description of Artificial Sequence: Synthetic oligonucleotide
  Antisense strand to SEQ ID NO: 2418654
guuuaucagagaaauccau

SEQ ID NO: 2418656 - RNA, 19 nt, Artificial Sequence
  Description of Artificial Sequence: Synthetic oligonucleotide
  Sense strand starting at position 1609 of SEQ ID NO: 1886628
ggauuucucugauaaacuc

SEQ ID NO: 2418657 - RNA, 19 nt, Artificial Sequence
  Description of Artificial Sequence: Synthetic oligonucleotide
  Antisense strand to SEQ ID NO: 2418656
gaguuuaucagagaaaucc

SEQ ID NO: 2418658 - RNA, 19 nt, Artificial Sequence
  Description of Artificial Sequence: Synthetic oligonucleotide
  Sense strand starting at position 1738 of SEQ ID NO: 1886628
acacauaccugagggugau

SEQ ID NO: 2418659 - RNA, 19 nt, Artificial Sequence
  Description of Artificial Sequence: Synthetic oligonucleotide
  Antisense strand to SEQ ID NO: 2418658
aucacccucagguaugugu

SEQ ID NO: 2418660 - RNA, 19 nt, Artificial Sequence
  Description of Artificial Sequence: Synthetic oligonucleotide
  Sense strand starting at position 1739 of SEQ ID NO: 1886628
cacauaccugagggugaua

SEQ ID NO: 2418661 - RNA, 19 nt, Artificial Sequence
  Description of Artificial Sequence: Synthetic oligonucleotide
  Antisense strand to SEQ ID NO: 2418660
uaucacccucagguaugug

SEQ ID NO: 2418662 - RNA, 19 nt, Artificial Sequence
  Description of Artificial Sequence: Synthetic oligonucleotide
  Sense strand starting at position 1744 of SEQ ID NO: 1886628
accugagggugauaagaau

SEQ ID NO: 2418663 - RNA, 19 nt, Artificial Sequence
  Description of Artificial Sequence: Synthetic oligonucleotide
  Antisense strand to SEQ ID NO: 2418662
auucuuaucacccucaggu

SEQ ID NO: 2418664 - RNA, 19 nt, Artificial Sequence
  Description of Artificial Sequence: Synthetic oligonucleotide
  Sense strand starting at position 1765 of SEQ ID NO: 1886628
agccuaugucaugaaucua

SEQ ID NO: 2418665 - RNA, 19 nt, Artificial Sequence
  Description of Artificial Sequence: Synthetic oligonucleotide
  Antisense strand to SEQ ID NO: 2418664
uagauucaugacauaggcu

SEQ ID NO: 2418666 - RNA, 19 nt, Artificial Sequence
  Description of Artificial Sequence: Synthetic oligonucleotide
  Sense strand starting at position 1792 of SEQ ID NO: 1886628
cgcacuuccgauuagaugu

SEQ ID NO: 2418667 - RNA, 19 nt, Artificial Sequence
  Description of Artificial Sequence: Synthetic oligonucleotide
  Antisense strand to SEQ ID NO: 2418666
acaucuaaucggaagugcg

SEQ ID NO: 2418668 - RNA, 19 nt, Artificial Sequence
  Description of Artificial Sequence: Synthetic oligonucleotide
  Sense strand starting at position 1803 of SEQ ID NO: 1886628
uuagauguauaccuuguca

SEQ ID NO: 2418669 - RNA, 19 nt, Artificial Sequence
  Description of Artificial Sequence: Synthetic oligonucleotide
  Antisense strand to SEQ ID NO: 2418668
ugacaagguauacaucuaa

SEQ ID NO: 2418670 - RNA, 19 nt, Artificial Sequence
  Description of Artificial Sequence: Synthetic oligonucleotide
  Sense strand starting at position 1807 of SEQ ID NO: 1886628
auguauaccuugucagcau

SEQ ID NO: 2418671 - RNA, 19 nt, Artificial Sequence
  Description of Artificial Sequence: Synthetic oligonucleotide
  Antisense strand to SEQ ID NO: 2418670
augcugacaagguauacau

SEQ ID NO: 2418672 - RNA, 19 nt, Artificial Sequence
  Description of Artificial Sequence: Synthetic oligonucleotide
  Sense strand starting at position 1836 of SEQ ID NO: 1886628
augaaauucugguaguucu

SEQ ID NO: 2418673 - RNA, 19 nt, Artificial Sequence
  Description of Artificial Sequence: Synthetic oligonucleotide
  Antisense strand to SEQ ID NO: 2418672
agaacuaccagaauuucau

SEQ ID NO: 2418674 - RNA, 19 nt, Artificial Sequence
  Description of Artificial Sequence: Synthetic oligonucleotide
  Sense strand starting at position 1843 of SEQ ID NO: 1886628
ucugguaguucuuugucua

SEQ ID NO: 2418675 - RNA, 19 nt, Artificial Sequence
  Description of Artificial Sequence: Synthetic oligonucleotide
  Antisense strand to SEQ ID NO: 2418674
uagacaaagaacuaccaga

SEQ ID NO: 2418676 - RNA, 19 nt, Artificial Sequence
  Description of Artificial Sequence: Synthetic oligonucleotide
  Sense strand starting at position 1844 of SEQ ID NO: 1886628
cugguaguucuuugucuaa

SEQ ID NO: 2418677 - RNA, 19 nt, Artificial Sequence
  Description of Artificial Sequence: Synthetic oligonucleotide
  Antisense strand to SEQ ID NO: 2418676
uuagacaaagaacuaccag

SEQ ID NO: 2418678 - RNA, 19 nt, Artificial Sequence
  Description of Artificial Sequence: Synthetic oligonucleotide
  Sense strand starting at position 1846 of SEQ ID NO: 1886628
gguaguucuuugucuaaga

SEQ ID NO: 2418679 - RNA, 19 nt, Artificial Sequence
  Description of Artificial Sequence: Synthetic oligonucleotide
  Antisense strand to SEQ ID NO: 2418678
ucuuagacaaagaacuacc

SEQ ID NO: 2418680 - RNA, 19 nt, Artificial Sequence
  Description of Artificial Sequence: Synthetic oligonucleotide
  Sense strand starting at position 1847 of SEQ ID NO: 1886628
guaguucuuugucuaagac

SEQ ID NO: 2418681 - RNA, 19 nt, Artificial Sequence
  Description of Artificial Sequence: Synthetic oligonucleotide
  Antisense strand to SEQ ID NO: 2418680
gucuuagacaaagaacuac

SEQ ID NO: 2418682 - RNA, 19 nt, Artificial Sequence
  Description of Artificial Sequence: Synthetic oligonucleotide
  Sense strand starting at position 2034 of SEQ ID NO: 1886628
cuaggcagccauuaucaaa

SEQ ID NO: 2418683 - RNA, 19 nt, Artificial Sequence
  Description of Artificial Sequence: Synthetic oligonucleotide
  Antisense strand to SEQ ID NO: 2418682
uuugauaauggcugccuag

SEQ ID NO: 2418684 - RNA, 19 nt, Artificial Sequence
  Description of Artificial Sequence: Synthetic oligonucleotide
  Sense strand starting at position 2045 of SEQ ID NO: 1886628
uuaucaaaguuugcuuaag

SEQ ID NO: 2418685 - RNA, 19 nt, Artificial Sequence
  Description of Artificial Sequence: Synthetic oligonucleotide
  Antisense strand to SEQ ID NO: 2418684
cuuaagcaaacuuugauaa

SEQ ID NO: 2418686 - RNA, 19 nt, Artificial Sequence
  Description of Artificial Sequence: Synthetic oligonucleotide
  Sense strand starting at position 2047 of SEQ ID NO: 1886628
aucaaaguuugcuuaagaa

SEQ ID NO: 2418687 - RNA, 19 nt, Artificial Sequence
  Description of Artificial Sequence: Synthetic oligonucleotide
  Antisense strand to SEQ ID NO: 2418686
uucuuaagcaaacuuugau

SEQ ID NO: 2418688 - RNA, 19 nt, Artificial Sequence
  Description of Artificial Sequence: Synthetic oligonucleotide
  Sense strand starting at position 2081 of SEQ ID NO: 1886628
agaauauccuaguucuaga

SEQ ID NO: 2418689 - RNA, 19 nt, Artificial Sequence
  Description of Artificial Sequence: Synthetic oligonucleotide
  Antisense strand to SEQ ID NO: 2418688
ucuagaacuaggauauucu

SEQ ID NO: 2418690 - RNA, 19 nt, Artificial Sequence
  Description of Artificial Sequence: Synthetic oligonucleotide
  Sense strand starting at position 2113 of SEQ ID NO: 1886628
agaauagggcugggucuua

SEQ ID NO: 2418691 - RNA, 19 nt, Artificial Sequence
  Description of Artificial Sequence: Synthetic oligonucleotide
  Antisense strand to SEQ ID NO: 2418690
uaagacccagcccuauucu

SEQ ID NO: 2418692 - RNA, 19 nt, Artificial Sequence
  Description of Artificial Sequence: Synthetic oligonucleotide
  Sense strand starting at position 2124 of SEQ ID NO: 1886628
gggucuuagucauuugcua

SEQ ID NO: 2418693 - RNA, 19 nt, Artificial Sequence
  Description of Artificial Sequence: Synthetic oligonucleotide
  Antisense strand to SEQ ID NO: 2418692
uagcaaaugacuaagaccc

SEQ ID NO: 2418694 - RNA, 19 nt, Artificial Sequence
  Description of Artificial Sequence: Synthetic oligonucleotide
  Sense strand starting at position 2138 of SEQ ID NO: 1886628
ugcuauuaccaaugccuga

SEQ ID NO: 2418695 - RNA, 19 nt, Artificial Sequence
  Description of Artificial Sequence: Synthetic oligonucleotide
  Antisense strand to SEQ ID NO: 2418694
ucaggcauugguaauagca

SEQ ID NO: 2418696 - RNA, 19 nt, Artificial Sequence
  Description of Artificial Sequence: Synthetic oligonucleotide
  Sense strand starting at position 2499 of SEQ ID NO: 1886628
uggcacaguuguccuaaga

SEQ ID NO: 2418697 - RNA, 19 nt, Artificial Sequence
  Description of Artificial Sequence: Synthetic oligonucleotide
  Antisense strand to SEQ ID NO: 2418696
ucuuaggacaacugugcca

SEQ ID NO: 2418698 - RNA, 19 nt, Artificial Sequence
  Description of Artificial Sequence: Synthetic oligonucleotide
  Sense strand starting at position 2604 of SEQ ID NO: 1886628
cuggcaaauuuauguuuaa

SEQ ID NO: 2418699 - RNA, 19 nt, Artificial Sequence
  Description of Artificial Sequence: Synthetic oligonucleotide
  Antisense strand to SEQ ID NO: 2418698
uuaaacauaaauuugccag

SEQ ID NO: 2418700 - RNA, 19 nt, Artificial Sequence
  Description of Artificial Sequence: Synthetic oligonucleotide
  Sense strand starting at position 2626 of SEQ ID NO: 1886628
gucuaaaucuuauaagagg

SEQ ID NO: 2418701 - RNA, 19 nt, Artificial Sequence
  Description of Artificial Sequence: Synthetic oligonucleotide
  Antisense strand to SEQ ID NO: 2418700
ccucuuauaagauuuagac

SEQ ID NO: 2418702 - RNA, 19 nt, Artificial Sequence
  Description of Artificial Sequence: Synthetic oligonucleotide
  Sense strand starting at position 2671 of SEQ ID NO: 1886628
ugaguagagguuugaauga

SEQ ID NO: 2418703 - RNA, 19 nt, Artificial Sequence
  Description of Artificial Sequence: Synthetic oligonucleotide
  Antisense strand to SEQ ID NO: 2418702
ucauucaaaccucuacuca

SEQ ID NO: 2418704 - RNA, 19 nt, Artificial Sequence
  Description of Artificial Sequence: Synthetic oligonucleotide
  Sense strand starting at position 2698 of SEQ ID NO: 1886628
gugagucgauaauuguuga

SEQ ID NO: 2418705 - RNA, 19 nt, Artificial Sequence
  Description of Artificial Sequence: Synthetic oligonucleotide
  Antisense strand to SEQ ID NO: 2418704
ucaacaauuaucgacucac

SEQ ID NO: 2418706 - RNA, 19 nt, Artificial Sequence
  Description of Artificial Sequence: Synthetic oligonucleotide
  Sense strand starting at position 2701 of SEQ ID NO: 1886628
agucgauaauuguugaaac

SEQ ID NO: 2418707 - RNA, 19 nt, Artificial Sequence
  Description of Artificial Sequence: Synthetic oligonucleotide
  Antisense strand to SEQ ID NO: 2418706
guuucaacaauuaucgacu

SEQ ID NO: 2418708 - RNA, 19 nt, Artificial Sequence
  Description of Artificial Sequence: Synthetic oligonucleotide
  Sense strand starting at position 2703 of SEQ ID NO: 1886628
ucgauaauuguugaaacug

SEQ ID NO: 2418709 - RNA, 19 nt, Artificial Sequence
  Description of Artificial Sequence: Synthetic oligonucleotide
  Antisense strand to SEQ ID NO: 2418708
caguuucaacaauuaucga

SEQ ID NO: 2418710 - RNA, 19 nt, Artificial Sequence
  Description of Artificial Sequence: Synthetic oligonucleotide
  Sense strand starting at position 2982 of SEQ ID NO: 1886628
guaggauguggugggagaa

SEQ ID NO: 2418711 - RNA, 19 nt, Artificial Sequence
  Description of Artificial Sequence: Synthetic oligonucleotide
  Antisense strand to SEQ ID NO: 2418710
uucucccaccacauccuac

SEQ ID NO: 2418712 - RNA, 19 nt, Artificial Sequence
  Description of Artificial Sequence: Synthetic oligonucleotide
  Sense strand starting at position 2983 of SEQ ID NO: 1886628
uaggauguggugggagaau

SEQ ID NO: 2418713 - RNA, 19 nt, Artificial Sequence
  Description of Artificial Sequence: Synthetic oligonucleotide
  Antisense strand to SEQ ID NO: 2418712
auucucccaccacauccua

SEQ ID NO: 2418714 - RNA, 19 nt, Artificial Sequence
  Description of Artificial Sequence: Synthetic oligonucleotide
  Sense strand starting at position 2984 of SEQ ID NO: 1886628
aggauguggugggagaauu

SEQ ID NO: 2418715 - RNA, 19 nt, Artificial Sequence
  Description of Artificial Sequence: Synthetic oligonucleotide
  Antisense strand to SEQ ID NO: 2418714
aauucucccaccacauccu

SEQ ID NO: 2418716 - RNA, 19 nt, Artificial Sequence
  Description of Artificial Sequence: Synthetic oligonucleotide
  Sense strand starting at position 3033 of SEQ ID NO: 1886628
gggcccagaucauaacaau

SEQ ID NO: 2418717 - RNA, 19 nt, Artificial Sequence
  Description of Artificial Sequence: Synthetic oligonucleotide
  Antisense strand to SEQ ID NO: 2418716
auuguuaugaucugggccc

SEQ ID NO: 2418718 - RNA, 19 nt, Artificial Sequence
  Description of Artificial Sequence: Synthetic oligonucleotide
  Sense strand starting at position 3137 of SEQ ID NO: 1886628
ccuauacugucuuauauga

SEQ ID NO: 2418719 - RNA, 19 nt, Artificial Sequence
  Description of Artificial Sequence: Synthetic oligonucleotide
  Antisense strand to SEQ ID NO: 2418718
ucauauaagacaguauagg

SEQ ID NO: 2418720 - RNA, 19 nt, Artificial Sequence
  Description of Artificial Sequence: Synthetic oligonucleotide
  Sense strand starting at position 3800 of SEQ ID NO: 1886628
cggccauauuaaucccauu

SEQ ID NO: 2418721 - RNA, 19 nt, Artificial Sequence
  Description of Artificial Sequence: Synthetic oligonucleotide
  Antisense strand to SEQ ID NO: 2418720
aaugggauuaauauggccg

SEQ ID NO: 2418722 - RNA, 19 nt, Artificial Sequence
  Description of Artificial Sequence: Synthetic oligonucleotide
  Sense strand starting at position 11 of SEQ ID NO: 1886629
aaaguagauuugcaguagu

SEQ ID NO: 2418723 - RNA, 19 nt, Artificial Sequence
  Description of Artificial Sequence: Synthetic oligonucleotide
  Antisense strand to SEQ ID NO: 2418722
acuacugcaaaucuacuuu

SEQ ID NO: 2418724 - RNA, 19 nt, Artificial Sequence
  Description of Artificial Sequence: Synthetic oligonucleotide
  Sense strand starting at position 45 of SEQ ID NO: 1886629
gaggaaggcuugggaguua

SEQ ID NO: 2418725 - RNA, 19 nt, Artificial Sequence
  Description of Artificial Sequence: Synthetic oligonucleotide
  Antisense strand to SEQ ID NO: 2418724
uaacucccaagccuuccuc

SEQ ID NO: 2418726 - RNA, 19 nt, Artificial Sequence
  Description of Artificial Sequence: Synthetic oligonucleotide
  Sense strand starting at position 110 of SEQ ID NO: 1886629
aauugacuguggugauauu

SEQ ID NO: 2418727 - RNA, 19 nt, Artificial Sequence
  Description of Artificial Sequence: Synthetic oligonucleotide
  Antisense strand to SEQ ID NO: 2418726
aauaucaccacagucaauu

SEQ ID NO: 2418728 - RNA, 19 nt, Artificial Sequence
  Description of Artificial Sequence: Synthetic oligonucleotide
  Sense strand starting at position 136 of SEQ ID NO: 1886629
cugugaagauacuaagaau

SEQ ID NO: 2418729 - RNA, 19 nt, Artificial Sequence
  Description of Artificial Sequence: Synthetic oligonucleotide
  Antisense strand to SEQ ID NO: 2418728
auucuuaguaucuucacag

SEQ ID NO: 2418730 - RNA, 19 nt, Artificial Sequence
  Description of Artificial Sequence: Synthetic oligonucleotide
  Sense strand starting at position 182 of SEQ ID NO: 1886629
aguuguauggugugugagu

SEQ ID NO: 2418731 - RNA, 19 nt, Artificial Sequence
  Description of Artificial Sequence: Synthetic oligonucleotide
  Antisense strand to SEQ ID NO: 2418730
acucacacaccauacaacu

SEQ ID NO: 2418732 - RNA, 19 nt, Artificial Sequence
  Description of Artificial Sequence: Synthetic oligonucleotide
  Sense strand starting at position 184 of SEQ ID NO: 1886629
uuguauggugugugaguca

SEQ ID NO: 2418733 - RNA, 19 nt, Artificial Sequence
  Description of Artificial Sequence: Synthetic oligonucleotide
  Antisense strand to SEQ ID NO: 2418732
ugacucacacaccauacaa

SEQ ID NO: 2418734 - RNA, 19 nt, Artificial Sequence
  Description of Artificial Sequence: Synthetic oligonucleotide
  Sense strand starting at position 191 of SEQ ID NO: 1886629
gugugugagucaucucucu

SEQ ID NO: 2418735 - RNA, 19 nt, Artificial Sequence
  Description of Artificial Sequence: Synthetic oligonucleotide
  Antisense strand to SEQ ID NO: 2418734
agagagaugacucacacac

SEQ ID NO: 2418736 - RNA, 19 nt, Artificial Sequence
  Description of Artificial Sequence: Synthetic oligonucleotide
  Sense strand starting at position 205 of SEQ ID NO: 1886629
ucucucaguaaagguguua

SEQ ID NO: 2418737 - RNA, 19 nt, Artificial Sequence
  Description of Artificial Sequence: Synthetic oligonucleotide
  Antisense strand to SEQ ID NO: 2418736
uaacaccuuuacugagaga

SEQ ID NO: 2418738 - RNA, 19 nt, Artificial Sequence
  Description of Artificial Sequence: Synthetic oligonucleotide
  Sense strand starting at position 658 of SEQ ID NO: 1886629
agguauaggugucaaaccu

SEQ ID NO: 2418739 - RNA, 19 nt, Artificial Sequence
  Description of Artificial Sequence: Synthetic oligonucleotide
  Antisense strand to SEQ ID NO: 2418738
agguuugacaccuauaccu

SEQ ID NO: 2418740 - RNA, 19 nt, Artificial Sequence
  Description of Artificial Sequence: Synthetic oligonucleotide
  Sense strand starting at position 1378 of SEQ ID NO: 1886629
cucugaaccauucggagga

SEQ ID NO: 2418741 - RNA, 19 nt, Artificial Sequence
  Description of Artificial Sequence: Synthetic oligonucleotide
  Antisense strand to SEQ ID NO: 2418740
uccuccgaaugguucagag

SEQ ID NO: 2418742 - RNA, 19 nt, Artificial Sequence
  Description of Artificial Sequence: Synthetic oligonucleotide
  Sense strand starting at position 1382 of SEQ ID NO: 1886629
gaaccauucggaggaagcu

SEQ ID NO: 2418743 - RNA, 19 nt, Artificial Sequence
  Description of Artificial Sequence: Synthetic oligonucleotide
  Antisense strand to SEQ ID NO: 2418742
agcuuccuccgaaugguuc

SEQ ID NO: 2418744 - RNA, 19 nt, Artificial Sequence
  Description of Artificial Sequence: Synthetic oligonucleotide
  Sense strand starting at position 1391 of SEQ ID NO: 1886629
ggaggaagcuuggguuucu

SEQ ID NO: 2418745 - RNA, 19 nt, Artificial Sequence
  Description of Artificial Sequence: Synthetic oligonucleotide
  Antisense strand to SEQ ID NO: 2418744
agaaacccaagcuuccucc

SEQ ID NO: 2418746 - RNA, 19 nt, Artificial Sequence
  Description of Artificial Sequence: Synthetic oligonucleotide
  Sense strand starting at position 1392 of SEQ ID NO: 1886629
gaggaagcuuggguuucua

SEQ ID NO: 2418747 - RNA, 19 nt, Artificial Sequence
  Description of Artificial Sequence: Synthetic oligonucleotide
  Antisense strand to SEQ ID NO: 2418746
uagaaacccaagcuuccuc

SEQ ID NO: 2418748 - RNA, 19 nt, Artificial Sequence
  Description of Artificial Sequence: Synthetic oligonucleotide
  Sense strand starting at position 1406 of SEQ ID NO: 1886629
uucuauccuucccgacuga

SEQ ID NO: 2418749 - RNA, 19 nt, Artificial Sequence
  Description of Artificial Sequence: Synthetic oligonucleotide
  Antisense strand to SEQ ID NO: 2418748
ucagucgggaaggauagaa

SEQ ID NO: 2418750 - RNA, 19 nt, Artificial Sequence
  Description of Artificial Sequence: Synthetic oligonucleotide
  Sense strand starting at position 1436 of SEQ ID NO: 1886629
gagucuugacuccggauaa

SEQ ID NO: 2418751 - RNA, 19 nt, Artificial Sequence
  Description of Artificial Sequence: Synthetic oligonucleotide
  Antisense strand to SEQ ID NO: 2418750
uuauccggagucaagacuc

SEQ ID NO: 2418752 - RNA, 19 nt, Artificial Sequence
  Description of Artificial Sequence: Synthetic oligonucleotide
  Sense strand starting at position 1437 of SEQ ID NO: 1886629
agucuugacuccggauaaa

SEQ ID NO: 2418753 - RNA, 19 nt, Artificial Sequence
  Description of Artificial Sequence: Synthetic oligonucleotide
  Antisense strand to SEQ ID NO: 2418752
uuuauccggagucaagacu

SEQ ID NO: 2418754 - RNA, 19 nt, Artificial Sequence
  Description of Artificial Sequence: Synthetic oligonucleotide
  Sense strand starting at position 1897 of SEQ ID NO: 1886629
gcgaguuucccgccgcaga

SEQ ID NO: 2418755 - RNA, 19 nt, Artificial Sequence
  Description of Artificial Sequence: Synthetic oligonucleotide
  Antisense strand to SEQ ID NO: 2418754
ucugcggcgggaaacucgc

SEQ ID NO: 2418756 - RNA, 19 nt, Artificial Sequence
  Description of Artificial Sequence: Synthetic oligonucleotide
  Sense strand starting at position 2792 of SEQ ID NO: 1886629
gaaaguaaguucuugggcu

SEQ ID NO: 2418757 - RNA, 19 nt, Artificial Sequence
  Description of Artificial Sequence: Synthetic oligonucleotide
  Antisense strand to SEQ ID NO: 2418756
agcccaagaacuuacuuuc

SEQ ID NO: 2418758 - RNA, 19 nt, Artificial Sequence
  Description of Artificial Sequence: Synthetic oligonucleotide
  Sense strand starting at position 3009 of SEQ ID NO: 1886629
gugaaauggaccugagcua

SEQ ID NO: 2418759 - RNA, 19 nt, Artificial Sequence
  Description of Artificial Sequence: Synthetic oligonucleotide
  Antisense strand to SEQ ID NO: 2418758
uagcucagguccauuucac

SEQ ID NO: 2418760 - RNA, 19 nt, Artificial Sequence
  Description of Artificial Sequence: Synthetic oligonucleotide
  Sense strand starting at position 3138 of SEQ ID NO: 1886629
gggagaugugcuugcuuuc

SEQ ID NO: 2418761 - RNA, 19 nt, Artificial Sequence
  Description of Artificial Sequence: Synthetic oligonucleotide
  Antisense strand to SEQ ID NO: 2418760
gaaagcaagcacaucuccc

SEQ ID NO: 2418762 - RNA, 19 nt, Artificial Sequence
  Description of Artificial Sequence: Synthetic oligonucleotide
  Sense strand starting at position 3218 of SEQ ID NO: 1886629
cagagauuaugagacagau

SEQ ID NO: 2418763 - RNA, 19 nt, Artificial Sequence
  Description of Artificial Sequence: Synthetic oligonucleotide
  Antisense strand to SEQ ID NO: 2418762
aucugucucauaaucucug

SEQ ID NO: 2418764 - RNA, 19 nt, Artificial Sequence
  Description of Artificial Sequence: Synthetic oligonucleotide
  Sense strand starting at position 3282 of SEQ ID NO: 1886629
gaggaaguauagugacuaa

SEQ ID NO: 2418765 - RNA, 19 nt, Artificial Sequence
  Description of Artificial Sequence: Synthetic oligonucleotide
  Antisense strand to SEQ ID NO: 2418764
uuagucacuauacuuccuc

SEQ ID NO: 2418766 - RNA, 19 nt, Artificial Sequence
  Description of Artificial Sequence: Synthetic oligonucleotide
  Sense strand starting at position 3285 of SEQ ID NO: 1886629
gaaguauagugacuaacca

SEQ ID NO: 2418767 - RNA, 19 nt, Artificial Sequence
  Description of Artificial Sequence: Synthetic oligonucleotide
  Antisense strand to SEQ ID NO: 2418766
ugguuagucacuauacuuc

SEQ ID NO: 2418768 - RNA, 19 nt, Artificial Sequence
  Description of Artificial Sequence: Synthetic oligonucleotide
  Sense strand starting at position 3356 of SEQ ID NO: 1886629
cccaaagccugagauaaga

SEQ ID NO: 2418769 - RNA, 19 nt, Artificial Sequence
  Description of Artificial Sequence: Synthetic oligonucleotide
  Antisense strand to SEQ ID NO: 2418768
ucuuaucucaggcuuuggg

SEQ ID NO: 2418770 - RNA, 19 nt, Artificial Sequence
  Description of Artificial Sequence: Synthetic oligonucleotide
  Sense strand starting at position 3445 of SEQ ID NO: 1886629
ccagcuuccuugugguaga

SEQ ID NO: 2418771 - RNA, 19 nt, Artificial Sequence
  Description of Artificial Sequence: Synthetic oligonucleotide
  Antisense strand to SEQ ID NO: 2418770
ucuaccacaaggaagcugg

SEQ ID NO: 2418772 - RNA, 19 nt, Artificial Sequence
  Description of Artificial Sequence: Synthetic oligonucleotide
  Sense strand starting at position 3446 of SEQ ID NO: 1886629
cagcuuccuugugguagaa

SEQ ID NO: 2418773 - RNA, 19 nt, Artificial Sequence
  Description of Artificial Sequence: Synthetic oligonucleotide
  Antisense strand to SEQ ID NO: 2418772
uucuaccacaaggaagcug

SEQ ID NO: 2418774 - RNA, 19 nt, Artificial Sequence
  Description of Artificial Sequence: Synthetic oligonucleotide
  Sense strand starting at position 3448 of SEQ ID NO: 1886629
gcuuccuugugguagaagu

SEQ ID NO: 2418775 - RNA, 19 nt, Artificial Sequence
  Description of Artificial Sequence: Synthetic oligonucleotide
  Antisense strand to SEQ ID NO: 2418774
acuucuaccacaaggaagc

SEQ ID NO: 2418776 - RNA, 19 nt, Artificial Sequence
  Description of Artificial Sequence: Synthetic oligonucleotide
  Sense strand starting at position 3459 of SEQ ID NO: 1886629
guagaaguucuaugcauga

SEQ ID NO: 2418777 - RNA, 19 nt, Artificial Sequence
  Description of Artificial Sequence: Synthetic oligonucleotide
  Antisense strand to SEQ ID NO: 2418776
ucaugcauagaacuucuac

SEQ ID NO: 2418778 - RNA, 19 nt, Artificial Sequence
  Description of Artificial Sequence: Synthetic oligonucleotide
  Sense strand starting at position 3461 of SEQ ID NO: 1886629
agaaguucuaugcaugagu

SEQ ID NO: 2418779 - RNA, 19 nt, Artificial Sequence
  Description of Artificial Sequence: Synthetic oligonucleotide
  Antisense strand to SEQ ID NO: 2418778
acucaugcauagaacuucu

SEQ ID NO: 2418780 - RNA, 19 nt, Artificial Sequence
  Description of Artificial Sequence: Synthetic oligonucleotide
  Sense strand starting at position 3466 of SEQ ID NO: 1886629
uucuaugcaugaguuggaa

SEQ ID NO: 2418781 - RNA, 19 nt, Artificial Sequence
  Description of Artificial Sequence: Synthetic oligonucleotide
  Antisense strand to SEQ ID NO: 2418780
uuccaacucaugcauagaa

SEQ ID NO: 2418782 - RNA, 19 nt, Artificial Sequence
  Description of Artificial Sequence: Synthetic oligonucleotide
  Sense strand starting at position 3468 of SEQ ID NO: 1886629
cuaugcaugaguuggaaga

SEQ ID NO: 2418783 - RNA, 19 nt, Artificial Sequence
  Description of Artificial Sequence: Synthetic oligonucleotide
  Antisense strand to SEQ ID NO: 2418782
ucuuccaacucaugcauag

SEQ ID NO: 2418784 - RNA, 19 nt, Artificial Sequence
  Description of Artificial Sequence: Synthetic oligonucleotide
  Sense strand starting at position 3469 of SEQ ID NO: 1886629
uaugcaugaguuggaagaa

SEQ ID NO: 2418785 - RNA, 19 nt, Artificial Sequence
  Description of Artificial Sequence: Synthetic oligonucleotide
  Antisense strand to SEQ ID NO: 2418784
uucuuccaacucaugcaua

SEQ ID NO: 2418786 - RNA, 19 nt, Artificial Sequence
  Description of Artificial Sequence: Synthetic oligonucleotide
  Sense strand starting at position 3553 of SEQ ID NO: 1886629
ggaacuuggugggagaacu

SEQ ID NO: 2418787 - RNA, 19 nt, Artificial Sequence
  Description of Artificial Sequence: Synthetic oligonucleotide
  Antisense strand to SEQ ID NO: 2418786
aguucucccaccaaguucc

SEQ ID NO: 2418788 - RNA, 19 nt, Artificial Sequence
  Description of Artificial Sequence: Synthetic oligonucleotide
  Sense strand starting at position 3563 of SEQ ID NO: 1886629
gggagaacuccaugggcaa

SEQ ID NO: 2418789 - RNA, 19 nt, Artificial Sequence
  Description of Artificial Sequence: Synthetic oligonucleotide
  Antisense strand to SEQ ID NO: 2418788
uugcccauggaguucuccc

SEQ ID NO: 2418790 - RNA, 19 nt, Artificial Sequence
  Description of Artificial Sequence: Synthetic oligonucleotide
  Sense strand starting at position 3702 of SEQ ID NO: 1886629
ugaaaugccuggccgcaaa

SEQ ID NO: 2418791 - RNA, 19 nt, Artificial Sequence
  Description of Artificial Sequence: Synthetic oligonucleotide
  Antisense strand to SEQ ID NO: 2418790
uuugcggccaggcauuuca

SEQ ID NO: 2418792 - RNA, 19 nt, Artificial Sequence
  Description of Artificial Sequence: Synthetic oligonucleotide
  Sense strand starting at position 3895 of SEQ ID NO: 1886629
aggcaaacucaguaucuca

SEQ ID NO: 2418793 - RNA, 19 nt, Artificial Sequence
  Description of Artificial Sequence: Synthetic oligonucleotide
  Antisense strand to SEQ ID NO: 2418792
ugagauacugaguuugccu

SEQ ID NO: 2418794 - RNA, 19 nt, Artificial Sequence
  Description of Artificial Sequence: Synthetic oligonucleotide
  Sense strand starting at position 82 of SEQ ID NO: 1886630
gcaguaugcacagaaugga

SEQ ID NO: 2418795 - RNA, 19 nt, Artificial Sequence
  Description of Artificial Sequence: Synthetic oligonucleotide
  Antisense strand to SEQ ID NO: 2418794
uccauucugugcauacugc

SEQ ID NO: 2418796 - RNA, 19 nt, Artificial Sequence
  Description of Artificial Sequence: Synthetic oligonucleotide
  Sense strand starting at position 139 of SEQ ID NO: 1886630
gcaucuccaugucugcaua

SEQ ID NO: 2418797 - RNA, 19 nt, Artificial Sequence
  Description of Artificial Sequence: Synthetic oligonucleotide
  Antisense strand to SEQ ID NO: 2418796
uaugcagacauggagaugc

SEQ ID NO: 2418798 - RNA, 19 nt, Artificial Sequence
  Description of Artificial Sequence: Synthetic oligonucleotide
  Sense strand starting at position 149 of SEQ ID NO: 1886630
gucugcauacucuggaguu

SEQ ID NO: 2418799 - RNA, 19 nt, Artificial Sequence
  Description of Artificial Sequence: Synthetic oligonucleotide
  Antisense strand to SEQ ID NO: 2418798
aacuccagaguaugcagac

SEQ ID NO: 2418800 - RNA, 19 nt, Artificial Sequence
  Description of Artificial Sequence: Synthetic oligonucleotide
  Sense strand starting at position 300 of SEQ ID NO: 1886630
cccagugacuuguccaagu

SEQ ID NO: 2418801 - RNA, 19 nt, Artificial Sequence
  Description of Artificial Sequence: Synthetic oligonucleotide
  Antisense strand to SEQ ID NO: 2418800
acuuggacaagucacuggg

SEQ ID NO: 2418802 - RNA, 19 nt, Artificial Sequence
  Description of Artificial Sequence: Synthetic oligonucleotide
  Sense strand starting at position 408 of SEQ ID NO: 1886630
caugcagaucacugucagu

SEQ ID NO: 2418803 - RNA, 19 nt, Artificial Sequence
  Description of Artificial Sequence: Synthetic oligonucleotide
  Antisense strand to SEQ ID NO: 2418802
acugacagugaucugcaug

SEQ ID NO: 2418804 - RNA, 19 nt, Artificial Sequence
  Description of Artificial Sequence: Synthetic oligonucleotide
  Sense strand starting at position 432 of SEQ ID NO: 1886630
gaagcugcugacugugauu

SEQ ID NO: 2418805 - RNA, 19 nt, Artificial Sequence
  Description of Artificial Sequence: Synthetic oligonucleotide
  Antisense strand to SEQ ID NO: 2418804
aaucacagucagcagcuuc

SEQ ID NO: 2418806 - RNA, 19 nt, Artificial Sequence
  Description of Artificial Sequence: Synthetic oligonucleotide
  Sense strand starting at position 677 of SEQ ID NO: 1886630
ggcugucucaaggacacau

SEQ ID NO: 2418807 - RNA, 19 nt, Artificial Sequence
  Description of Artificial Sequence: Synthetic oligonucleotide
  Antisense strand to SEQ ID NO: 2418806
auguguccuugagacagcc

SEQ ID NO: 2418808 - RNA, 19 nt, Artificial Sequence
  Description of Artificial Sequence: Synthetic oligonucleotide
  Sense strand starting at position 695 of SEQ ID NO: 1886630
uugaauacguugugaccau

SEQ ID NO: 2418809 - RNA, 19 nt, Artificial Sequence
  Description of Artificial Sequence: Synthetic oligonucleotide
  Antisense strand to SEQ ID NO: 2418808
auggucacaacguauucaa

SEQ ID NO: 2418810 - RNA, 19 nt, Artificial Sequence
  Description of Artificial Sequence: Synthetic oligonucleotide
  Sense strand starting at position 944 of SEQ ID NO: 1886630
gugacaggcucuuagucua

SEQ ID NO: 2418811 - RNA, 19 nt, Artificial Sequence
  Description of Artificial Sequence: Synthetic oligonucleotide
  Antisense strand to SEQ ID NO: 2418810
uagacuaagagccugucac

SEQ ID NO: 2418812 - RNA, 19 nt, Artificial Sequence
  Description of Artificial Sequence: Synthetic oligonucleotide
  Sense strand starting at position 1679 of SEQ ID NO: 1886630
cggcgaaugcacuauuauu

SEQ ID NO: 2418813 - RNA, 19 nt, Artificial Sequence
  Description of Artificial Sequence: Synthetic oligonucleotide
  Antisense strand to SEQ ID NO: 2418812
aauaauagugcauucgccg

SEQ ID NO: 2418814 - RNA, 19 nt, Artificial Sequence
  Description of Artificial Sequence: Synthetic oligonucleotide
  Sense strand starting at position 1786 of SEQ ID NO: 1886630
uuggcucauuugggacaau

SEQ ID NO: 2418815 - RNA, 19 nt, Artificial Sequence
  Description of Artificial Sequence: Synthetic oligonucleotide
  Antisense strand to SEQ ID NO: 2418814
auugucccaaaugagccaa

SEQ ID NO: 2418816 - RNA, 19 nt, Artificial Sequence
  Description of Artificial Sequence: Synthetic oligonucleotide
  Sense strand starting at position 1787 of SEQ ID NO: 1886630
uggcucauuugggacaauu

SEQ ID NO: 2418817 - RNA, 19 nt, Artificial Sequence
  Description of Artificial Sequence: Synthetic oligonucleotide
  Antisense strand to SEQ ID NO: 2418816
aauugucccaaaugagcca

SEQ ID NO: 2418818 - RNA, 19 nt, Artificial Sequence
  Description of Artificial Sequence: Synthetic oligonucleotide
  Sense strand starting at position 1820 of SEQ ID NO: 1886630
uuaucagucucuggaaauu

SEQ ID NO: 2418819 - RNA, 19 nt, Artificial Sequence
  Description of Artificial Sequence: Synthetic oligonucleotide
  Antisense strand to SEQ ID NO: 2418818
aauuuccagagacugauaa

SEQ ID NO: 2418820 - RNA, 19 nt, Artificial Sequence
  Description of Artificial Sequence: Synthetic oligonucleotide
  Sense strand starting at position 1846 of SEQ ID NO: 1886630
gcugcaaaucgucuccagu

SEQ ID NO: 2418821 - RNA, 19 nt, Artificial Sequence
  Description of Artificial Sequence: Synthetic oligonucleotide
  Antisense strand to SEQ ID NO: 2418820
acuggagacgauuugcagc

SEQ ID NO: 2418822 - RNA, 19 nt, Artificial Sequence
  Description of Artificial Sequence: Synthetic oligonucleotide
  Sense strand starting at position 1891 of SEQ ID NO: 1886630
gccaucuaguuccauguua

SEQ ID NO: 2418823 - RNA, 19 nt, Artificial Sequence
  Description of Artificial Sequence: Synthetic oligonucleotide
  Antisense strand to SEQ ID NO: 2418822
uaacauggaacuagauggc

SEQ ID NO: 2418824 - RNA, 19 nt, Artificial Sequence
  Description of Artificial Sequence: Synthetic oligonucleotide
  Sense strand starting at position 1921 of SEQ ID NO: 1886630
acguguuugggcaguguuu

SEQ ID NO: 2418825 - RNA, 19 nt, Artificial Sequence
  Description of Artificial Sequence: Synthetic oligonucleotide
  Antisense strand to SEQ ID NO: 2418824
aaacacugcccaaacacgu

SEQ ID NO: 2418826 - RNA, 19 nt, Artificial Sequence
  Description of Artificial Sequence: Synthetic oligonucleotide
  Sense strand starting at position 1922 of SEQ ID NO: 1886630
cguguuugggcaguguuua

SEQ ID NO: 2418827 - RNA, 19 nt, Artificial Sequence
  Description of Artificial Sequence: Synthetic oligonucleotide
  Antisense strand to SEQ ID NO: 2418826
uaaacacugcccaaacacg

SEQ ID NO: 2418828 - RNA, 19 nt, Artificial Sequence
  Description of Artificial Sequence: Synthetic oligonucleotide
  Sense strand starting at position 2172 of SEQ ID NO: 1886630
aagcccauguguuagagau

SEQ ID NO: 2418829 - RNA, 19 nt, Artificial Sequence
  Description of Artificial Sequence: Synthetic oligonucleotide
  Antisense strand to SEQ ID NO: 2418828
aucucuaacacaugggcuu

SEQ ID NO: 2418830 - RNA, 19 nt, Artificial Sequence
  Description of Artificial Sequence: Synthetic oligonucleotide
  Sense strand starting at position 2174 of SEQ ID NO: 1886630
gcccauguguuagagauuu

SEQ ID NO: 2418831 - RNA, 19 nt, Artificial Sequence
  Description of Artificial Sequence: Synthetic oligonucleotide
  Antisense strand to SEQ ID NO: 2418830
aaaucucuaacacaugggc

SEQ ID NO: 2418832 - RNA, 19 nt, Artificial Sequence
  Description of Artificial Sequence: Synthetic oligonucleotide
  Sense strand starting at position 2182 of SEQ ID NO: 1886630
guuagagauuuaggaaugu

SEQ ID NO: 2418833 - RNA, 19 nt, Artificial Sequence
  Description of Artificial Sequence: Synthetic oligonucleotide
  Antisense strand to SEQ ID NO: 2418832
acauuccuaaaucucuaac

SEQ ID NO: 2418834 - RNA, 19 nt, Artificial Sequence
  Description of Artificial Sequence: Synthetic oligonucleotide
  Sense strand starting at position 2537 of SEQ ID NO: 1886630
ucuggcaucccagggaaau

SEQ ID NO: 2418835 - RNA, 19 nt, Artificial Sequence
  Description of Artificial Sequence: Synthetic oligonucleotide
  Antisense strand to SEQ ID NO: 2418834
auuucccugggaugccaga

SEQ ID NO: 2418836 - RNA, 19 nt, Artificial Sequence
  Description of Artificial Sequence: Synthetic oligonucleotide
  Sense strand starting at position 2538 of SEQ ID NO: 1886630
cuggcaucccagggaaauc

SEQ ID NO: 2418837 - RNA, 19 nt, Artificial Sequence
  Description of Artificial Sequence: Synthetic oligonucleotide
  Antisense strand to SEQ ID NO: 2418836
gauuucccugggaugccag

SEQ ID NO: 2418838 - RNA, 19 nt, Artificial Sequence
  Description of Artificial Sequence: Synthetic oligonucleotide
  Sense strand starting at position 2717 of SEQ ID NO: 1886630
auaggagugaccggccuau

SEQ ID NO: 2418839 - RNA, 19 nt, Artificial Sequence
  Description of Artificial Sequence: Synthetic oligonucleotide
  Antisense strand to SEQ ID NO: 2418838
auaggccggucacuccuau

SEQ ID NO: 2418840 - RNA, 19 nt, Artificial Sequence
  Description of Artificial Sequence: Synthetic oligonucleotide
  Sense strand starting at position 3164 of SEQ ID NO: 1886630
gcuugcugaggguaucaga

SEQ ID NO: 2418841 - RNA, 19 nt, Artificial Sequence
  Description of Artificial Sequence: Synthetic oligonucleotide
  Antisense strand to SEQ ID NO: 2418840
ucugauacccucagcaagc

SEQ ID NO: 2418842 - RNA, 19 nt, Artificial Sequence
  Description of Artificial Sequence: Synthetic oligonucleotide
  Sense strand starting at position 3190 of SEQ ID NO: 1886630
aggucacagugguuugaaa

SEQ ID NO: 2418843 - RNA, 19 nt, Artificial Sequence
  Description of Artificial Sequence: Synthetic oligonucleotide
  Antisense strand to SEQ ID NO: 2418842
uuucaaaccacugugaccu

SEQ ID NO: 2418844 - RNA, 19 nt, Artificial Sequence
  Description of Artificial Sequence: Synthetic oligonucleotide
  Sense strand starting at position 3214 of SEQ ID NO: 1886630
guuuauuucucagccaugu

SEQ ID NO: 2418845 - RNA, 19 nt, Artificial Sequence
  Description of Artificial Sequence: Synthetic oligonucleotide
  Antisense strand to SEQ ID NO: 2418844
acauggcugagaaauaaac

SEQ ID NO: 2418846 - RNA, 19 nt, Artificial Sequence
  Description of Artificial Sequence: Synthetic oligonucleotide
  Sense strand starting at position 3337 of SEQ ID NO: 1886630
cucuguguucaaggaagug

SEQ ID NO: 2418847 - RNA, 19 nt, Artificial Sequence
  Description of Artificial Sequence: Synthetic oligonucleotide
  Antisense strand to SEQ ID NO: 2418846
cacuuccuugaacacagag

SEQ ID NO: 2418848 - RNA, 19 nt, Artificial Sequence
  Description of Artificial Sequence: Synthetic oligonucleotide
  Sense strand starting at position 3413 of SEQ ID NO: 1886630
ggcggaucaugaagucgaa

SEQ ID NO: 2418849 - RNA, 19 nt, Artificial Sequence
  Description of Artificial Sequence: Synthetic oligonucleotide
  Antisense strand to SEQ ID NO: 2418848
uucgacuucaugauccgcc

SEQ ID NO: 2418850 - RNA, 19 nt, Artificial Sequence
  Description of Artificial Sequence: Synthetic oligonucleotide
  Sense strand starting at position 3651 of SEQ ID NO: 1886630
aaaggaagugcucaaguuc

SEQ ID NO: 2418851 - RNA, 19 nt, Artificial Sequence
  Description of Artificial Sequence: Synthetic oligonucleotide
  Antisense strand to SEQ ID NO: 2418850
gaacuugagcacuuccuuu

SEQ ID NO: 2418852 - RNA, 19 nt, Artificial Sequence
  Description of Artificial Sequence: Synthetic oligonucleotide
  Sense strand starting at position 3780 of SEQ ID NO: 1886630
guuucccaucucugucuua

SEQ ID NO: 2418853 - RNA, 19 nt, Artificial Sequence
  Description of Artificial Sequence: Synthetic oligonucleotide
  Antisense strand to SEQ ID NO: 2418852
uaagacagagaugggaaac

SEQ ID NO: 2418854 - RNA, 19 nt, Artificial Sequence
  Description of Artificial Sequence: Synthetic oligonucleotide
  Sense strand starting at position 3887 of SEQ ID NO: 1886630
aaauguguccagcagggaa

SEQ ID NO: 2418855 - RNA, 19 nt, Artificial Sequence
  Description of Artificial Sequence: Synthetic oligonucleotide
  Antisense strand to SEQ ID NO: 2418854
uucccugcuggacacauuu

SEQ ID NO: 2418856 - RNA, 19 nt, Artificial Sequence
  Description of Artificial Sequence: Synthetic oligonucleotide
  Sense strand starting at position 3908 of SEQ ID NO: 1886630
uaauguguccagcagggaa

SEQ ID NO: 2418857 - RNA, 19 nt, Artificial Sequence
  Description of Artificial Sequence: Synthetic oligonucleotide
  Antisense strand to SEQ ID NO: 2418856
uucccugcuggacacauua

SEQ ID NO: 2418858 - RNA, 19 nt, Artificial Sequence
  Description of Artificial Sequence: Synthetic oligonucleotide
  Sense strand starting at position 11 of SEQ ID NO: 1886631
accugagggcgauauugau

SEQ ID NO: 2418859 - RNA, 19 nt, Artificial Sequence
  Description of Artificial Sequence: Synthetic oligonucleotide
  Antisense strand to SEQ ID NO: 2418858
aucaauaucgcccucaggu

SEQ ID NO: 2418860 - RNA, 19 nt, Artificial Sequence
  Description of Artificial Sequence: Synthetic oligonucleotide
  Sense strand starting at position 50 of SEQ ID NO: 1886631
ugcuuauauugagcuggga

SEQ ID NO: 2418861 - RNA, 19 nt, Artificial Sequence
  Description of Artificial Sequence: Synthetic oligonucleotide
  Antisense strand to SEQ ID NO: 2418860
ucccagcucaauauaagca

SEQ ID NO: 2418862 - RNA, 19 nt, Artificial Sequence
  Description of Artificial Sequence: Synthetic oligonucleotide
  Sense strand starting at position 52 of SEQ ID NO: 1886631
cuuauauugagcugggaag

SEQ ID NO: 2418863 - RNA, 19 nt, Artificial Sequence
  Description of Artificial Sequence: Synthetic oligonucleotide
  Antisense strand to SEQ ID NO: 2418862
cuucccagcucaauauaag

SEQ ID NO: 2418864 - RNA, 19 nt, Artificial Sequence
  Description of Artificial Sequence: Synthetic oligonucleotide
  Sense strand starting at position 53 of SEQ ID NO: 1886631
uuauauugagcugggaagu

SEQ ID NO: 2418865 - RNA, 19 nt, Artificial Sequence
  Description of Artificial Sequence: Synthetic oligonucleotide
  Antisense strand to SEQ ID NO: 2418864
acuucccagcucaauauaa

SEQ ID NO: 2418866 - RNA, 19 nt, Artificial Sequence
  Description of Artificial Sequence: Synthetic oligonucleotide
  Sense strand starting at position 241 of SEQ ID NO: 1886631
agggauuagcgaggucuua

SEQ ID NO: 2418867 - RNA, 19 nt, Artificial Sequence
  Description of Artificial Sequence: Synthetic oligonucleotide
  Antisense strand to SEQ ID NO: 2418866
uaagaccucgcuaaucccu

SEQ ID NO: 2418868 - RNA, 19 nt, Artificial Sequence
  Description of Artificial Sequence: Synthetic oligonucleotide
  Sense strand starting at position 289 of SEQ ID NO: 1886631
gucuguuugccucagagaa

SEQ ID NO: 2418869 - RNA, 19 nt, Artificial Sequence
  Description of Artificial Sequence: Synthetic oligonucleotide
  Antisense strand to SEQ ID NO: 2418868
uucucugaggcaaacagac

SEQ ID NO: 2418870 - RNA, 19 nt, Artificial Sequence
  Description of Artificial Sequence: Synthetic oligonucleotide
  Sense strand starting at position 302 of SEQ ID NO: 1886631
agagaacauugguuugcuu

SEQ ID NO: 2418871 - RNA, 19 nt, Artificial Sequence
  Description of Artificial Sequence: Synthetic oligonucleotide
  Antisense strand to SEQ ID NO: 2418870
aagcaaaccaauguucucu

SEQ ID NO: 2418872 - RNA, 19 nt, Artificial Sequence
  Description of Artificial Sequence: Synthetic oligonucleotide
  Sense strand starting at position 440 of SEQ ID NO: 1886631
gaaggucucagaggugguu

SEQ ID NO: 2418873 - RNA, 19 nt, Artificial Sequence
  Description of Artificial Sequence: Synthetic oligonucleotide
  Antisense strand to SEQ ID NO: 2418872
aaccaccucugagaccuuc

SEQ ID NO: 2418874 - RNA, 19 nt, Artificial Sequence
  Description of Artificial Sequence: Synthetic oligonucleotide
  Sense strand starting at position 517 of SEQ ID NO: 1886631
auggucugguuguuauuua

SEQ ID NO: 2418875 - RNA, 19 nt, Artificial Sequence
  Description of Artificial Sequence: Synthetic oligonucleotide
  Antisense strand to SEQ ID NO: 2418874
uaaauaacaaccagaccau

SEQ ID NO: 2418876 - RNA, 19 nt, Artificial Sequence
  Description of Artificial Sequence: Synthetic oligonucleotide
  Sense strand starting at position 977 of SEQ ID NO: 1886631
ggguuauauuccuugguac

SEQ ID NO: 2418877 - RNA, 19 nt, Artificial Sequence
  Description of Artificial Sequence: Synthetic oligonucleotide
  Antisense strand to SEQ ID NO: 2418876
guaccaaggaauauaaccc

SEQ ID NO: 2418878 - RNA, 19 nt, Artificial Sequence
  Description of Artificial Sequence: Synthetic oligonucleotide
  Sense strand starting at position 980 of SEQ ID NO: 1886631
uuauauuccuugguacuuu

SEQ ID NO: 2418879 - RNA, 19 nt, Artificial Sequence
  Description of Artificial Sequence: Synthetic oligonucleotide
  Antisense strand to SEQ ID NO: 2418878
aaaguaccaaggaauauaa

SEQ ID NO: 2418880 - RNA, 19 nt, Artificial Sequence
  Description of Artificial Sequence: Synthetic oligonucleotide
  Sense strand starting at position 1044 of SEQ ID NO: 1886631
guguaucaucuugaugucu

SEQ ID NO: 2418881 - RNA, 19 nt, Artificial Sequence
  Description of Artificial Sequence: Synthetic oligonucleotide
  Antisense strand to SEQ ID NO: 2418880
agacaucaagaugauacac

SEQ ID NO: 2418882 - RNA, 19 nt, Artificial Sequence
  Description of Artificial Sequence: Synthetic oligonucleotide
  Sense strand starting at position 1103 of SEQ ID NO: 1886631
cugucuuucugauugagau

SEQ ID NO: 2418883 - RNA, 19 nt, Artificial Sequence
  Description of Artificial Sequence: Synthetic oligonucleotide
  Antisense strand to SEQ ID NO: 2418882
aucucaaucagaaagacag

SEQ ID NO: 2418884 - RNA, 19 nt, Artificial Sequence
  Description of Artificial Sequence: Synthetic oligonucleotide
  Sense strand starting at position 1104 of SEQ ID NO: 1886631
ugucuuucugauugagaug

SEQ ID NO: 2418885 - RNA, 19 nt, Artificial Sequence
  Description of Artificial Sequence: Synthetic oligonucleotide
  Antisense strand to SEQ ID NO: 2418884
caucucaaucagaaagaca

SEQ ID NO: 2418886 - RNA, 19 nt, Artificial Sequence
  Description of Artificial Sequence: Synthetic oligonucleotide
  Sense strand starting at position 1109 of SEQ ID NO: 1886631
uucugauugagauggacuu

SEQ ID NO: 2418887 - RNA, 19 nt, Artificial Sequence
  Description of Artificial Sequence: Synthetic oligonucleotide
  Antisense strand to SEQ ID NO: 2418886
aaguccaucucaaucagaa

SEQ ID NO: 2418888 - RNA, 19 nt, Artificial Sequence
  Description of Artificial Sequence: Synthetic oligonucleotide
  Sense strand starting at position 1110 of SEQ ID NO: 1886631
ucugauugagauggacuuu

SEQ ID NO: 2418889 - RNA, 19 nt, Artificial Sequence
  Description of Artificial Sequence: Synthetic oligonucleotide
  Antisense strand to SEQ ID NO: 2418888
aaaguccaucucaaucaga

SEQ ID NO: 2418890 - RNA, 19 nt, Artificial Sequence
  Description of Artificial Sequence: Synthetic oligonucleotide
  Sense strand starting at position 1203 of SEQ ID NO: 1886631
acaccuauguucuuggaaa

SEQ ID NO: 2418891 - RNA, 19 nt, Artificial Sequence
  Description of Artificial Sequence: Synthetic oligonucleotide
  Antisense strand to SEQ ID NO: 2418890
uuuccaagaacauaggugu

SEQ ID NO: 2418892 - RNA, 19 nt, Artificial Sequence
  Description of Artificial Sequence: Synthetic oligonucleotide
  Sense strand starting at position 1205 of SEQ ID NO: 1886631
accuauguucuuggaaaug

SEQ ID NO: 2418893 - RNA, 19 nt, Artificial Sequence
  Description of Artificial Sequence: Synthetic oligonucleotide
  Antisense strand to SEQ ID NO: 2418892
cauuuccaagaacauaggu

SEQ ID NO: 2418894 - RNA, 19 nt, Artificial Sequence
  Description of Artificial Sequence: Synthetic oligonucleotide
  Sense strand starting at position 1236 of SEQ ID NO: 1886631
cuggguucccaguaaacga

SEQ ID NO: 2418895 - RNA, 19 nt, Artificial Sequence
  Description of Artificial Sequence: Synthetic oligonucleotide
  Antisense strand to SEQ ID NO: 2418894
ucguuuacugggaacccag

SEQ ID NO: 2418896 - RNA, 19 nt, Artificial Sequence
  Description of Artificial Sequence: Synthetic oligonucleotide
  Sense strand starting at position 1292 of SEQ ID NO: 1886631
uggccaagagcucauccua

SEQ ID NO: 2418897 - RNA, 19 nt, Artificial Sequence
  Description of Artificial Sequence: Synthetic oligonucleotide
  Antisense strand to SEQ ID NO: 2418896
uaggaugagcucuuggcca

SEQ ID NO: 2418898 - RNA, 19 nt, Artificial Sequence
  Description of Artificial Sequence: Synthetic oligonucleotide
  Sense strand starting at position 1439 of SEQ ID NO: 1886631
augaauugggcaugggauu

SEQ ID NO: 2418899 - RNA, 19 nt, Artificial Sequence
  Description of Artificial Sequence: Synthetic oligonucleotide
  Antisense strand to SEQ ID NO: 2418898
aaucccaugcccaauucau

SEQ ID NO: 2418900 - RNA, 19 nt, Artificial Sequence
  Description of Artificial Sequence: Synthetic oligonucleotide
  Sense strand starting at position 1489 of SEQ ID NO: 1886631
uguguugagcuguaaacua

SEQ ID NO: 2418901 - RNA, 19 nt, Artificial Sequence
  Description of Artificial Sequence: Synthetic oligonucleotide
  Antisense strand to SEQ ID NO: 2418900
uaguuuacagcucaacaca

SEQ ID NO: 2418902 - RNA, 19 nt, Artificial Sequence
  Description of Artificial Sequence: Synthetic oligonucleotide
  Sense strand starting at position 1505 of SEQ ID NO: 1886631
cuaagcuuugcacagaauu

SEQ ID NO: 2418903 - RNA, 19 nt, Artificial Sequence
  Description of Artificial Sequence: Synthetic oligonucleotide
  Antisense strand to SEQ ID NO: 2418902
aauucugugcaaagcuuag

SEQ ID NO: 2418904 - RNA, 19 nt, Artificial Sequence
  Description of Artificial Sequence: Synthetic oligonucleotide
  Sense strand starting at position 1911 of SEQ ID NO: 1886631
uuuggugugcgggauuuga

SEQ ID NO: 2418905 - RNA, 19 nt, Artificial Sequence
  Description of Artificial Sequence: Synthetic oligonucleotide
  Antisense strand to SEQ ID NO: 2418904
ucaaaucccgcacaccaaa

SEQ ID NO: 2418906 - RNA, 19 nt, Artificial Sequence
  Description of Artificial Sequence: Synthetic oligonucleotide
  Sense strand starting at position 2053 of SEQ ID NO: 1886631
uucuuucuccaaggcugaa

SEQ ID NO: 2418907 - RNA, 19 nt, Artificial Sequence
  Description of Artificial Sequence: Synthetic oligonucleotide
  Antisense strand to SEQ ID NO: 2418906
uucagccuuggagaaagaa

SEQ ID NO: 2418908 - RNA, 19 nt, Artificial Sequence
  Description of Artificial Sequence: Synthetic oligonucleotide
  Sense strand starting at position 2083 of SEQ ID NO: 1886631
cccacacugcucugauuga

SEQ ID NO: 2418909 - RNA, 19 nt, Artificial Sequence
  Description of Artificial Sequence: Synthetic oligonucleotide
  Antisense strand to SEQ ID NO: 2418908
ucaaucagagcaguguggg

SEQ ID NO: 2418910 - RNA, 19 nt, Artificial Sequence
  Description of Artificial Sequence: Synthetic oligonucleotide
  Sense strand starting at position 2217 of SEQ ID NO: 1886631
uaggccuguccagaacuau

SEQ ID NO: 2418911 - RNA, 19 nt, Artificial Sequence
  Description of Artificial Sequence: Synthetic oligonucleotide
  Antisense strand to SEQ ID NO: 2418910
auaguucuggacaggccua

SEQ ID NO: 2418912 - RNA, 19 nt, Artificial Sequence
  Description of Artificial Sequence: Synthetic oligonucleotide
  Sense strand starting at position 2262 of SEQ ID NO: 1886631
uuaauaauggccugauaaa

SEQ ID NO: 2418913 - RNA, 19 nt, Artificial Sequence
  Description of Artificial Sequence: Synthetic oligonucleotide
  Antisense strand to SEQ ID NO: 2418912
uuuaucaggccauuauuaa

SEQ ID NO: 2418914 - RNA, 19 nt, Artificial Sequence
  Description of Artificial Sequence: Synthetic oligonucleotide
  Sense strand starting at position 2343 of SEQ ID NO: 1886631
acguacacguauuuauaua

SEQ ID NO: 2418915 - RNA, 19 nt, Artificial Sequence
  Description of Artificial Sequence: Synthetic oligonucleotide
  Antisense strand to SEQ ID NO: 2418914
uauauaaauacguguacgu

SEQ ID NO: 2418916 - RNA, 19 nt, Artificial Sequence
  Description of Artificial Sequence: Synthetic oligonucleotide
  Sense strand starting at position 2350 of SEQ ID NO: 1886631
cguauuuauauagguguuu

SEQ ID NO: 2418917 - RNA, 19 nt, Artificial Sequence
  Description of Artificial Sequence: Synthetic oligonucleotide
  Antisense strand to SEQ ID NO: 2418916
aaacaccuauauaaauacg

SEQ ID NO: 2418918 - RNA, 19 nt, Artificial Sequence
  Description of Artificial Sequence: Synthetic oligonucleotide
  Sense strand starting at position 2667 of SEQ ID NO: 1886631
gccuaaagguguuuaauuu

SEQ ID NO: 2418919 - RNA, 19 nt, Artificial Sequence
  Description of Artificial Sequence: Synthetic oligonucleotide
  Antisense strand to SEQ ID NO: 2418918
aaauuaaacaccuuuaggc

SEQ ID NO: 2418920 - RNA, 19 nt, Artificial Sequence
  Description of Artificial Sequence: Synthetic oligonucleotide
  Sense strand starting at position 2690 of SEQ ID NO: 1886631
ggucauuugugcguaugga

SEQ ID NO: 2418921 - RNA, 19 nt, Artificial Sequence
  Description of Artificial Sequence: Synthetic oligonucleotide
  Antisense strand to SEQ ID NO: 2418920
uccauacgcacaaaugacc

SEQ ID NO: 2418922 - RNA, 19 nt, Artificial Sequence
  Description of Artificial Sequence: Synthetic oligonucleotide
  Sense strand starting at position 2691 of SEQ ID NO: 1886631
gucauuugugcguauggag

SEQ ID NO: 2418923 - RNA, 19 nt, Artificial Sequence
  Description of Artificial Sequence: Synthetic oligonucleotide
  Antisense strand to SEQ ID NO: 2418922
cuccauacgcacaaaugac

SEQ ID NO: 2418924 - RNA, 19 nt, Artificial Sequence
  Description of Artificial Sequence: Synthetic oligonucleotide
  Sense strand starting at position 2801 of SEQ ID NO: 1886631
uuggguaucuuuccaagag

SEQ ID NO: 2418925 - RNA, 19 nt, Artificial Sequence
  Description of Artificial Sequence: Synthetic oligonucleotide
  Antisense strand to SEQ ID NO: 2418924
cucuuggaaagauacccaa

SEQ ID NO: 2418926 - RNA, 19 nt, Artificial Sequence
  Description of Artificial Sequence: Synthetic oligonucleotide
  Sense strand starting at position 2865 of SEQ ID NO: 1886631
gugcuagguggacauaauu

SEQ ID NO: 2418927 - RNA, 19 nt, Artificial Sequence
  Description of Artificial Sequence: Synthetic oligonucleotide
  Antisense strand to SEQ ID NO: 2418926
aauuauguccaccuagcac

SEQ ID NO: 2418928 - RNA, 19 nt, Artificial Sequence
  Description of Artificial Sequence: Synthetic oligonucleotide
  Sense strand starting at position 3173 of SEQ ID NO: 1886631
aguccauacuguucuuaug

SEQ ID NO: 2418929 - RNA, 19 nt, Artificial Sequence
  Description of Artificial Sequence: Synthetic oligonucleotide
  Antisense strand to SEQ ID NO: 2418928
cauaagaacaguauggacu

SEQ ID NO: 2418930 - RNA, 19 nt, Artificial Sequence
  Description of Artificial Sequence: Synthetic oligonucleotide
  Sense strand starting at position 3334 of SEQ ID NO: 1886631
aaacuauuagcccgugaaa

SEQ ID NO: 2418931 - RNA, 19 nt, Artificial Sequence
  Description of Artificial Sequence: Synthetic oligonucleotide
  Antisense strand to SEQ ID NO: 2418930
uuucacgggcuaauaguuu

SEQ ID NO: 2418932 - RNA, 19 nt, Artificial Sequence
  Description of Artificial Sequence: Synthetic oligonucleotide
  Sense strand starting at position 3337 of SEQ ID NO: 1886631
cuauuagcccgugaaacuu

SEQ ID NO: 2418933 - RNA, 19 nt, Artificial Sequence
  Description of Artificial Sequence: Synthetic oligonucleotide
  Antisense strand to SEQ ID NO: 2418932
aaguuucacgggcuaauag

SEQ ID NO: 2418934 - RNA, 19 nt, Artificial Sequence
  Description of Artificial Sequence: Synthetic oligonucleotide
  Sense strand starting at position 3476 of SEQ ID NO: 1886631
cuauuauuggugcaugcca

SEQ ID NO: 2418935 - RNA, 19 nt, Artificial Sequence
  Description of Artificial Sequence: Synthetic oligonucleotide
  Antisense strand to SEQ ID NO: 2418934
uggcaugcaccaauaauag

SEQ ID NO: 2418936 - RNA, 19 nt, Artificial Sequence
  Description of Artificial Sequence: Synthetic oligonucleotide
  Sense strand starting at position 3697 of SEQ ID NO: 1886631
auaagagaaucccuguauc

SEQ ID NO: 2418937 - RNA, 19 nt, Artificial Sequence
  Description of Artificial Sequence: Synthetic oligonucleotide
  Antisense strand to SEQ ID NO: 2418936
gauacagggauucucuuau

SEQ ID NO: 2418938 - RNA, 19 nt, Artificial Sequence
  Description of Artificial Sequence: Synthetic oligonucleotide
  Sense strand starting at position 15 of SEQ ID NO: 1886632
augauaucccugggcauua

SEQ ID NO: 2418939 - RNA, 19 nt, Artificial Sequence
  Description of Artificial Sequence: Synthetic oligonucleotide
  Antisense strand to SEQ ID NO: 2418938
uaaugcccagggauaucau

SEQ ID NO: 2418940 - RNA, 19 nt, Artificial Sequence
  Description of Artificial Sequence: Synthetic oligonucleotide
  Sense strand starting at position 16 of SEQ ID NO: 1886632
ugauaucccugggcauuau

SEQ ID NO: 2418941 - RNA, 19 nt, Artificial Sequence
  Description of Artificial Sequence: Synthetic oligonucleotide
  Antisense strand to SEQ ID NO: 2418940
auaaugcccagggauauca

SEQ ID NO: 2418942 - RNA, 19 nt, Artificial Sequence
  Description of Artificial Sequence: Synthetic oligonucleotide
  Sense strand starting at position 17 of SEQ ID NO: 1886632
gauaucccugggcauuauu

SEQ ID NO: 2418943 - RNA, 19 nt, Artificial Sequence
  Description of Artificial Sequence: Synthetic oligonucleotide
  Antisense strand to SEQ ID NO: 2418942
aauaaugcccagggauauc

SEQ ID NO: 2418944 - RNA, 19 nt, Artificial Sequence
  Description of Artificial Sequence: Synthetic oligonucleotide
  Sense strand starting at position 74 of SEQ ID NO: 1886632
cgacucaguguugaaagua

SEQ ID NO: 2418945 - RNA, 19 nt, Artificial Sequence
  Description of Artificial Sequence: Synthetic oligonucleotide
  Antisense strand to SEQ ID NO: 2418944
uacuuucaacacugagucg

SEQ ID NO: 2418946 - RNA, 19 nt, Artificial Sequence
  Description of Artificial Sequence: Synthetic oligonucleotide
  Sense strand starting at position 278 of SEQ ID NO: 1886632
ggagacugaugaguccuua

SEQ ID NO: 2418947 - RNA, 19 nt, Artificial Sequence
  Description of Artificial Sequence: Synthetic oligonucleotide
  Antisense strand to SEQ ID NO: 2418946
uaaggacucaucagucucc

SEQ ID NO: 2418948 - RNA, 19 nt, Artificial Sequence
  Description of Artificial Sequence: Synthetic oligonucleotide
  Sense strand starting at position 282 of SEQ ID NO: 1886632
acugaugaguccuuaauca

SEQ ID NO: 2418949 - RNA, 19 nt, Artificial Sequence
  Description of Artificial Sequence: Synthetic oligonucleotide
  Antisense strand to SEQ ID NO: 2418948
ugauuaaggacucaucagu

SEQ ID NO: 2418950 - RNA, 19 nt, Artificial Sequence
  Description of Artificial Sequence: Synthetic oligonucleotide
  Sense strand starting at position 870 of SEQ ID NO: 1886632
gaaauagauugggcaguua

SEQ ID NO: 2418951 - RNA, 19 nt, Artificial Sequence
  Description of Artificial Sequence: Synthetic oligonucleotide
  Antisense strand to SEQ ID NO: 2418950
uaacugcccaaucuauuuc

SEQ ID NO: 2418952 - RNA, 19 nt, Artificial Sequence
  Description of Artificial Sequence: Synthetic oligonucleotide
  Sense strand starting at position 909 of SEQ ID NO: 1886632
ggucuuggcaaucagucaa

SEQ ID NO: 2418953 - RNA, 19 nt, Artificial Sequence
  Description of Artificial Sequence: Synthetic oligonucleotide
  Antisense strand to SEQ ID NO: 2418952
uugacugauugccaagacc

SEQ ID NO: 2418954 - RNA, 19 nt, Artificial Sequence
  Description of Artificial Sequence: Synthetic oligonucleotide
  Sense strand starting at position 1068 of SEQ ID NO: 1886632
guugaauggagauguugau

SEQ ID NO: 2418955 - RNA, 19 nt, Artificial Sequence
  Description of Artificial Sequence: Synthetic oligonucleotide
  Antisense strand to SEQ ID NO: 2418954
aucaacaucuccauucaac

SEQ ID NO: 2418956 - RNA, 19 nt, Artificial Sequence
  Description of Artificial Sequence: Synthetic oligonucleotide
  Sense strand starting at position 1176 of SEQ ID NO: 1886632
guuccuaucccagacauca

SEQ ID NO: 2418957 - RNA, 19 nt, Artificial Sequence
  Description of Artificial Sequence: Synthetic oligonucleotide
  Antisense strand to SEQ ID NO: 2418956
ugaugucugggauaggaac

SEQ ID NO: 2418958 - RNA, 19 nt, Artificial Sequence
  Description of Artificial Sequence: Synthetic oligonucleotide
  Sense strand starting at position 1189 of SEQ ID NO: 1886632
acaucaguauugucaucaa

SEQ ID NO: 2418959 - RNA, 19 nt, Artificial Sequence
  Description of Artificial Sequence: Synthetic oligonucleotide
  Antisense strand to SEQ ID NO: 2418958
uugaugacaauacugaugu

SEQ ID NO: 2418960 - RNA, 19 nt, Artificial Sequence
  Description of Artificial Sequence: Synthetic oligonucleotide
  Sense strand starting at position 1192 of SEQ ID NO: 1886632
ucaguauugucaucaauaa

SEQ ID NO: 2418961 - RNA, 19 nt, Artificial Sequence
  Description of Artificial Sequence: Synthetic oligonucleotide
  Antisense strand to SEQ ID NO: 2418960
uuauugaugacaauacuga

SEQ ID NO: 2418962 - RNA, 19 nt, Artificial Sequence
  Description of Artificial Sequence: Synthetic oligonucleotide
  Sense strand starting at position 1219 of SEQ ID NO: 1886632
gguauuaauuuacucguca

SEQ ID NO: 2418963 - RNA, 19 nt, Artificial Sequence
  Description of Artificial Sequence: Synthetic oligonucleotide
  Antisense strand to SEQ ID NO: 2418962
ugacgaguaaauuaauacc

SEQ ID NO: 2418964 - RNA, 19 nt, Artificial Sequence
  Description of Artificial Sequence: Synthetic oligonucleotide
  Sense strand starting at position 1223 of SEQ ID NO: 1886632
uuaauuuacucgucaaggu

SEQ ID NO: 2418965 - RNA, 19 nt, Artificial Sequence
  Description of Artificial Sequence: Synthetic oligonucleotide
  Antisense strand to SEQ ID NO: 2418964
accuugacgaguaaauuaa

SEQ ID NO: 2418966 - RNA, 19 nt, Artificial Sequence
  Description of Artificial Sequence: Synthetic oligonucleotide
  Sense strand starting at position 1256 of SEQ ID NO: 1886632
gacuaagacugguuucuug

SEQ ID NO: 2418967 - RNA, 19 nt, Artificial Sequence
  Description of Artificial Sequence: Synthetic oligonucleotide
  Antisense strand to SEQ ID NO: 2418966
caagaaaccagucuuaguc

SEQ ID NO: 2418968 - RNA, 19 nt, Artificial Sequence
  Description of Artificial Sequence: Synthetic oligonucleotide
  Sense strand starting at position 1260 of SEQ ID NO: 1886632
aagacugguuucuugacuu

SEQ ID NO: 2418969 - RNA, 19 nt, Artificial Sequence
  Description of Artificial Sequence: Synthetic oligonucleotide
  Antisense strand to SEQ ID NO: 2418968
aagucaagaaaccagucuu

SEQ ID NO: 2418970 - RNA, 19 nt, Artificial Sequence
  Description of Artificial Sequence: Synthetic oligonucleotide
  Sense strand starting at position 1337 of SEQ ID NO: 1886632
agguauaugcauuaaacuc

SEQ ID NO: 2418971 - RNA, 19 nt, Artificial Sequence
  Description of Artificial Sequence: Synthetic oligonucleotide
  Antisense strand to SEQ ID NO: 2418970
gaguuuaaugcauauaccu

SEQ ID NO: 2418972 - RNA, 19 nt, Artificial Sequence
  Description of Artificial Sequence: Synthetic oligonucleotide
  Sense strand starting at position 1383 of SEQ ID NO: 1886632
uugagauugccauauaucu

SEQ ID NO: 2418973 - RNA, 19 nt, Artificial Sequence
  Description of Artificial Sequence: Synthetic oligonucleotide
  Antisense strand to SEQ ID NO: 2418972
agauauauggcaaucucaa

SEQ ID NO: 2418974 - RNA, 19 nt, Artificial Sequence
  Description of Artificial Sequence: Synthetic oligonucleotide
  Sense strand starting at position 1391 of SEQ ID NO: 1886632
gccauauaucuacauaguu

SEQ ID NO: 2418975 - RNA, 19 nt, Artificial Sequence
  Description of Artificial Sequence: Synthetic oligonucleotide
  Antisense strand to SEQ ID NO: 2418974
aacuauguagauauauggc

SEQ ID NO: 2418976 - RNA, 19 nt, Artificial Sequence
  Description of Artificial Sequence: Synthetic oligonucleotide
  Sense strand starting at position 1591 of SEQ ID NO: 1886632
auguuuguugaagaauguu

SEQ ID NO: 2418977 - RNA, 19 nt, Artificial Sequence
  Description of Artificial Sequence: Synthetic oligonucleotide
  Antisense strand to SEQ ID NO: 2418976
aacauucuucaacaaacau

SEQ ID NO: 2418978 - RNA, 19 nt, Artificial Sequence
  Description of Artificial Sequence: Synthetic oligonucleotide
  Sense strand starting at position 1597 of SEQ ID NO: 1886632
guugaagaauguuccugag

SEQ ID NO: 2418979 - RNA, 19 nt, Artificial Sequence
  Description of Artificial Sequence: Synthetic oligonucleotide
  Antisense strand to SEQ ID NO: 2418978
cucaggaacauucuucaac

SEQ ID NO: 2418980 - RNA, 19 nt, Artificial Sequence
  Description of Artificial Sequence: Synthetic oligonucleotide
  Sense strand starting at position 1630 of SEQ ID NO: 1886632
gugagugagaagugggauu

SEQ ID NO: 2418981 - RNA, 19 nt, Artificial Sequence
  Description of Artificial Sequence: Synthetic oligonucleotide
  Antisense strand to SEQ ID NO: 2418980
aaucccacuucucacucac

SEQ ID NO: 2418982 - RNA, 19 nt, Artificial Sequence
  Description of Artificial Sequence: Synthetic oligonucleotide
  Sense strand starting at position 1683 of SEQ ID NO: 1886632
uguaauccacuuggaaaga

SEQ ID NO: 2418983 - RNA, 19 nt, Artificial Sequence
  Description of Artificial Sequence: Synthetic oligonucleotide
  Antisense strand to SEQ ID NO: 2418982
ucuuuccaaguggauuaca

SEQ ID NO: 2418984 - RNA, 19 nt, Artificial Sequence
  Description of Artificial Sequence: Synthetic oligonucleotide
  Sense strand starting at position 2029 of SEQ ID NO: 1886632
uccacugaugugugaaaga

SEQ ID NO: 2418985 - RNA, 19 nt, Artificial Sequence
  Description of Artificial Sequence: Synthetic oligonucleotide
  Antisense strand to SEQ ID NO: 2418984
ucuuucacacaucagugga

SEQ ID NO: 2418986 - RNA, 19 nt, Artificial Sequence
  Description of Artificial Sequence: Synthetic oligonucleotide
  Sense strand starting at position 2100 of SEQ ID NO: 1886632
gcaucuguaccagauauua

SEQ ID NO: 2418987 - RNA, 19 nt, Artificial Sequence
  Description of Artificial Sequence: Synthetic oligonucleotide
  Antisense strand to SEQ ID NO: 2418986
uaauaucugguacagaugc

SEQ ID NO: 2418988 - RNA, 19 nt, Artificial Sequence
  Description of Artificial Sequence: Synthetic oligonucleotide
  Sense strand starting at position 2114 of SEQ ID NO: 1886632
uauuauugcccagaggacu

SEQ ID NO: 2418989 - RNA, 19 nt, Artificial Sequence
  Description of Artificial Sequence: Synthetic oligonucleotide
  Antisense strand to SEQ ID NO: 2418988
aguccucugggcaauaaua

SEQ ID NO: 2418990 - RNA, 19 nt, Artificial Sequence
  Description of Artificial Sequence: Synthetic oligonucleotide
  Sense strand starting at position 2215 of SEQ ID NO: 1886632
aguaaucauguccaucaga

SEQ ID NO: 2418991 - RNA, 19 nt, Artificial Sequence
  Description of Artificial Sequence: Synthetic oligonucleotide
  Antisense strand to SEQ ID NO: 2418990
ucugauggacaugauuacu

SEQ ID NO: 2418992 - RNA, 19 nt, Artificial Sequence
  Description of Artificial Sequence: Synthetic oligonucleotide
  Sense strand starting at position 2626 of SEQ ID NO: 1886632
cacauaggauauguguuau

SEQ ID NO: 2418993 - RNA, 19 nt, Artificial Sequence
  Description of Artificial Sequence: Synthetic oligonucleotide
  Antisense strand to SEQ ID NO: 2418992
auaacacauauccuaugug

SEQ ID NO: 2418994 - RNA, 19 nt, Artificial Sequence
  Description of Artificial Sequence: Synthetic oligonucleotide
  Sense strand starting at position 2675 of SEQ ID NO: 1886632
aucucuuugggaugacaac

SEQ ID NO: 2418995 - RNA, 19 nt, Artificial Sequence
  Description of Artificial Sequence: Synthetic oligonucleotide
  Antisense strand to SEQ ID NO: 2418994
guugucaucccaaagagau

SEQ ID NO: 2418996 - RNA, 19 nt, Artificial Sequence
  Description of Artificial Sequence: Synthetic oligonucleotide
  Sense strand starting at position 2782 of SEQ ID NO: 1886632
ggagaacuugccuacugca

SEQ ID NO: 2418997 - RNA, 19 nt, Artificial Sequence
  Description of Artificial Sequence: Synthetic oligonucleotide
  Antisense strand to SEQ ID NO: 2418996
ugcaguaggcaaguucucc

SEQ ID NO: 2418998 - RNA, 19 nt, Artificial Sequence
  Description of Artificial Sequence: Synthetic oligonucleotide
  Sense strand starting at position 2847 of SEQ ID NO: 1886632
ucucucaugucagugagaa

SEQ ID NO: 2418999 - RNA, 19 nt, Artificial Sequence
  Description of Artificial Sequence: Synthetic oligonucleotide
  Antisense strand to SEQ ID NO: 2418998
uucucacugacaugagaga

SEQ ID NO: 2419000 - RNA, 19 nt, Artificial Sequence
  Description of Artificial Sequence: Synthetic oligonucleotide
  Sense strand starting at position 2926 of SEQ ID NO: 1886632
uucugcuguccagaauuau

SEQ ID NO: 2419001 - RNA, 19 nt, Artificial Sequence
  Description of Artificial Sequence: Synthetic oligonucleotide
  Antisense strand to SEQ ID NO: 2419000
auaauucuggacagcagaa

SEQ ID NO: 2419002 - RNA, 19 nt, Artificial Sequence
  Description of Artificial Sequence: Synthetic oligonucleotide
  Sense strand starting at position 3394 of SEQ ID NO: 1886632
uugacuugaguauauuacu

SEQ ID NO: 2419003 - RNA, 19 nt, Artificial Sequence
  Description of Artificial Sequence: Synthetic oligonucleotide
  Antisense strand to SEQ ID NO: 2419002
aguaauauacucaagucaa

SEQ ID NO: 2419004 - RNA, 19 nt, Artificial Sequence
  Description of Artificial Sequence: Synthetic oligonucleotide
  Sense strand starting at position 3511 of SEQ ID NO: 1886632
ucuccauauuuguugccua

SEQ ID NO: 2419005 - RNA, 19 nt, Artificial Sequence
  Description of Artificial Sequence: Synthetic oligonucleotide
  Antisense strand to SEQ ID NO: 2419004
uaggcaacaaauauggaga

SEQ ID NO: 2419006 - RNA, 19 nt, Artificial Sequence
  Description of Artificial Sequence: Synthetic oligonucleotide
  Sense strand starting at position 3594 of SEQ ID NO: 1886632
aagugaugagcauggcaga

SEQ ID NO: 2419007 - RNA, 19 nt, Artificial Sequence
  Description of Artificial Sequence: Synthetic oligonucleotide
  Antisense strand to SEQ ID NO: 2419006
ucugccaugcucaucacuu

SEQ ID NO: 2419008 - RNA, 19 nt, Artificial Sequence
  Description of Artificial Sequence: Synthetic oligonucleotide
  Sense strand starting at position 3753 of SEQ ID NO: 1886632
uugucuuguuugccaauuu

SEQ ID NO: 2419009 - RNA, 19 nt, Artificial Sequence
  Description of Artificial Sequence: Synthetic oligonucleotide
  Antisense strand to SEQ ID NO: 2419008
aaauuggcaaacaagacaa

SEQ ID NO: 2419010 - RNA, 19 nt, Artificial Sequence
  Description of Artificial Sequence: Synthetic oligonucleotide
  Sense strand starting at position 3808 of SEQ ID NO: 1886632
acaacauuaugcuuugaug

SEQ ID NO: 2419011 - RNA, 19 nt, Artificial Sequence
  Description of Artificial Sequence: Synthetic oligonucleotide
  Antisense strand to SEQ ID NO: 2419010
caucaaagcauaauguugu

SEQ ID NO: 2419012 - RNA, 19 nt, Artificial Sequence
  Description of Artificial Sequence: Synthetic oligonucleotide
  Sense strand starting at position 3840 of SEQ ID NO: 1886632
ugauuuaugugggaauacu

SEQ ID NO: 2419013 - RNA, 19 nt, Artificial Sequence
  Description of Artificial Sequence: Synthetic oligonucleotide
  Antisense strand to SEQ ID NO: 2419012
aguauucccacauaaauca

SEQ ID NO: 2419014 - RNA, 19 nt, Artificial Sequence
  Description of Artificial Sequence: Synthetic oligonucleotide
  Sense strand starting at position 3860 of SEQ ID NO: 1886632
uucugauugucucuaagac

SEQ ID NO: 2419015 - RNA, 19 nt, Artificial Sequence
  Description of Artificial Sequence: Synthetic oligonucleotide
  Antisense strand to SEQ ID NO: 2419014
gucuuagagacaaucagaa

SEQ ID NO: 2419016 - RNA, 19 nt, Artificial Sequence
  Description of Artificial Sequence: Synthetic oligonucleotide
  Sense strand starting at position 3861 of SEQ ID NO: 1886632
ucugauugucucuaagacu

SEQ ID NO: 2419017 - RNA, 19 nt, Artificial Sequence
  Description of Artificial Sequence: Synthetic oligonucleotide
  Antisense strand to SEQ ID NO: 2419016
agucuuagagacaaucaga

SEQ ID NO: 2419018 - RNA, 19 nt, Artificial Sequence
  Description of Artificial Sequence: Synthetic oligonucleotide
  Sense strand starting at position 420 of SEQ ID NO: 1886633
acaagcugagcacauuaua

SEQ ID NO: 2419019 - RNA, 19 nt, Artificial Sequence
  Description of Artificial Sequence: Synthetic oligonucleotide
  Antisense strand to SEQ ID NO: 2419018
uauaaugugcucagcuugu

SEQ ID NO: 2419020 - RNA, 19 nt, Artificial Sequence
  Description of Artificial Sequence: Synthetic oligonucleotide
  Sense strand starting at position 519 of SEQ ID NO: 1886633
uuguaccacuuuguuaaau

SEQ ID NO: 2419021 - RNA, 19 nt, Artificial Sequence
  Description of Artificial Sequence: Synthetic oligonucleotide
  Antisense strand to SEQ ID NO: 2419020
auuuaacaaagugguacaa

SEQ ID NO: 2419022 - RNA, 19 nt, Artificial Sequence
  Description of Artificial Sequence: Synthetic oligonucleotide
  Sense strand starting at position 717 of SEQ ID NO: 1886633
cguuucuuugaccaauaca

SEQ ID NO: 2419023 - RNA, 19 nt, Artificial Sequence
  Description of Artificial Sequence: Synthetic oligonucleotide
  Antisense strand to SEQ ID NO: 2419022
uguauuggucaaagaaacg

SEQ ID NO: 2419024 - RNA, 19 nt, Artificial Sequence
  Description of Artificial Sequence: Synthetic oligonucleotide
  Sense strand starting at position 827 of SEQ ID NO: 1886633
uucuaaacagaggguuauu

SEQ ID NO: 2419025 - RNA, 19 nt, Artificial Sequence
  Description of Artificial Sequence: Synthetic oligonucleotide
  Antisense strand to SEQ ID NO: 2419024
aauaacccucuguuuagaa

SEQ ID NO: 2419026 - RNA, 19 nt, Artificial Sequence
  Description of Artificial Sequence: Synthetic oligonucleotide
  Sense strand starting at position 836 of SEQ ID NO: 1886633
gaggguuauuuauaacaaa

SEQ ID NO: 2419027 - RNA, 19 nt, Artificial Sequence
  Description of Artificial Sequence: Synthetic oligonucleotide
  Antisense strand to SEQ ID NO: 2419026
uuuguuauaaauaacccuc

SEQ ID NO: 2419028 - RNA, 19 nt, Artificial Sequence
  Description of Artificial Sequence: Synthetic oligonucleotide
  Sense strand starting at position 1298 of SEQ ID NO: 1886633
gcagcagacgugagaaugu

SEQ ID NO: 2419029 - RNA, 19 nt, Artificial Sequence
  Description of Artificial Sequence: Synthetic oligonucleotide
  Antisense strand to SEQ ID NO: 2419028
acauucucacgucugcugc

SEQ ID NO: 2419030 - RNA, 19 nt, Artificial Sequence
  Description of Artificial Sequence: Synthetic oligonucleotide
  Sense strand starting at position 1321 of SEQ ID NO: 1886633
agcuauaaggccugggaca

SEQ ID NO: 2419031 - RNA, 19 nt, Artificial Sequence
  Description of Artificial Sequence: Synthetic oligonucleotide
  Antisense strand to SEQ ID NO: 2419030
ugucccaggccuuauagcu

SEQ ID NO: 2419032 - RNA, 19 nt, Artificial Sequence
  Description of Artificial Sequence: Synthetic oligonucleotide
  Sense strand starting at position 1387 of SEQ ID NO: 1886633
cauguugagaggugacaua

SEQ ID NO: 2419033 - RNA, 19 nt, Artificial Sequence
  Description of Artificial Sequence: Synthetic oligonucleotide
  Antisense strand to SEQ ID NO: 2419032
uaugucaccucucaacaug

SEQ ID NO: 2419034 - RNA, 19 nt, Artificial Sequence
  Description of Artificial Sequence: Synthetic oligonucleotide
  Sense strand starting at position 1399 of SEQ ID NO: 1886633
ugacauaaucaugguggca

SEQ ID NO: 2419035 - RNA, 19 nt, Artificial Sequence
  Description of Artificial Sequence: Synthetic oligonucleotide
  Antisense strand to SEQ ID NO: 2419034
ugccaccaugauuauguca

SEQ ID NO: 2419036 - RNA, 19 nt, Artificial Sequence
  Description of Artificial Sequence: Synthetic oligonucleotide
  Sense strand starting at position 1561 of SEQ ID NO: 1886633
ucccaagucacagaguagu

SEQ ID NO: 2419037 - RNA, 19 nt, Artificial Sequence
  Description of Artificial Sequence: Synthetic oligonucleotide
  Antisense strand to SEQ ID NO: 2419036
acuacucugugacuuggga

SEQ ID NO: 2419038 - RNA, 19 nt, Artificial Sequence
  Description of Artificial Sequence: Synthetic oligonucleotide
  Sense strand starting at position 1642 of SEQ ID NO: 1886633
uggguuuguaaggaaagua

SEQ ID NO: 2419039 - RNA, 19 nt, Artificial Sequence
  Description of Artificial Sequence: Synthetic oligonucleotide
  Antisense strand to SEQ ID NO: 2419038
uacuuuccuuacaaaccca

SEQ ID NO: 2419040 - RNA, 19 nt, Artificial Sequence
  Description of Artificial Sequence: Synthetic oligonucleotide
  Sense strand starting at position 1782 of SEQ ID NO: 1886633
gucucauguccugagcuaa

SEQ ID NO: 2419041 - RNA, 19 nt, Artificial Sequence
  Description of Artificial Sequence: Synthetic oligonucleotide
  Antisense strand to SEQ ID NO: 2419040
uuagcucaggacaugagac

SEQ ID NO: 2419042 - RNA, 19 nt, Artificial Sequence
  Description of Artificial Sequence: Synthetic oligonucleotide
  Sense strand starting at position 1817 of SEQ ID NO: 1886633
cagauugucauuggaggag

SEQ ID NO: 2419043 - RNA, 19 nt, Artificial Sequence
  Description of Artificial Sequence: Synthetic oligonucleotide
  Antisense strand to SEQ ID NO: 2419042
cuccuccaaugacaaucug

SEQ ID NO: 2419044 - RNA, 19 nt, Artificial Sequence
  Description of Artificial Sequence: Synthetic oligonucleotide
  Sense strand starting at position 1831 of SEQ ID NO: 1886633
aggagaagcuuugucauuc

SEQ ID NO: 2419045 - RNA, 19 nt, Artificial Sequence
  Description of Artificial Sequence: Synthetic oligonucleotide
  Antisense strand to SEQ ID NO: 2419044
gaaugacaaagcuucuccu

SEQ ID NO: 2419046 - RNA, 19 nt, Artificial Sequence
  Description of Artificial Sequence: Synthetic oligonucleotide
  Sense strand starting at position 1832 of SEQ ID NO: 1886633
ggagaagcuuugucauucu

SEQ ID NO: 2419047 - RNA, 19 nt, Artificial Sequence
  Description of Artificial Sequence: Synthetic oligonucleotide
  Antisense strand to SEQ ID NO: 2419046
agaaugacaaagcuucucc

SEQ ID NO: 2419048 - RNA, 19 nt, Artificial Sequence
  Description of Artificial Sequence: Synthetic oligonucleotide
  Sense strand starting at position 1920 of SEQ ID NO: 1886633
acaguuaaacuuggcuaua

SEQ ID NO: 2419049 - RNA, 19 nt, Artificial Sequence
  Description of Artificial Sequence: Synthetic oligonucleotide
  Antisense strand to SEQ ID NO: 2419048
uauagccaaguuuaacugu

SEQ ID NO: 2419050 - RNA, 19 nt, Artificial Sequence
  Description of Artificial Sequence: Synthetic oligonucleotide
  Sense strand starting at position 1922 of SEQ ID NO: 1886633
aguuaaacuuggcuauacu

SEQ ID NO: 2419051 - RNA, 19 nt, Artificial Sequence
  Description of Artificial Sequence: Synthetic oligonucleotide
  Antisense strand to SEQ ID NO: 2419050
aguauagccaaguuuaacu

SEQ ID NO: 2419052 - RNA, 19 nt, Artificial Sequence
  Description of Artificial Sequence: Synthetic oligonucleotide
  Sense strand starting at position 1923 of SEQ ID NO: 1886633
guuaaacuuggcuauacuu

SEQ ID NO: 2419053 - RNA, 19 nt, Artificial Sequence
  Description of Artificial Sequence: Synthetic oligonucleotide
  Antisense strand to SEQ ID NO: 2419052
aaguauagccaaguuuaac

SEQ ID NO: 2419054 - RNA, 19 nt, Artificial Sequence
  Description of Artificial Sequence: Synthetic oligonucleotide
  Sense strand starting at position 2056 of SEQ ID NO: 1886633
guagaauguguacaacugu

SEQ ID NO: 2419055 - RNA, 19 nt, Artificial Sequence
  Description of Artificial Sequence: Synthetic oligonucleotide
  Antisense strand to SEQ ID NO: 2419054
acaguuguacacauucuac

SEQ ID NO: 2419056 - RNA, 19 nt, Artificial Sequence
  Description of Artificial Sequence: Synthetic oligonucleotide
  Sense strand starting at position 2067 of SEQ ID NO: 1886633
acaacugugcccugaaacu

SEQ ID NO: 2419057 - RNA, 19 nt, Artificial Sequence
  Description of Artificial Sequence: Synthetic oligonucleotide
  Antisense strand to SEQ ID NO: 2419056
aguuucagggcacaguugu

SEQ ID NO: 2419058 - RNA, 19 nt, Artificial Sequence
  Description of Artificial Sequence: Synthetic oligonucleotide
  Sense strand starting at position 2078 of SEQ ID NO: 1886633
cugaaacugggccauuauu

SEQ ID NO: 2419059 - RNA, 19 nt, Artificial Sequence
  Description of Artificial Sequence: Synthetic oligonucleotide
  Antisense strand to SEQ ID NO: 2419058
aauaauggcccaguuucag

SEQ ID NO: 2419060 - RNA, 19 nt, Artificial Sequence
  Description of Artificial Sequence: Synthetic oligonucleotide
  Sense strand starting at position 2094 of SEQ ID NO: 1886633
auuacaagaucucccgaga

SEQ ID NO: 2419061 - RNA, 19 nt, Artificial Sequence
  Description of Artificial Sequence: Synthetic oligonucleotide
  Antisense strand to SEQ ID NO: 2419060
ucucgggagaucuuguaau

SEQ ID NO: 2419062 - RNA, 19 nt, Artificial Sequence
  Description of Artificial Sequence: Synthetic oligonucleotide
  Sense strand starting at position 2113 of SEQ ID NO: 1886633
ggaagagucuugccuacaa

SEQ ID NO: 2419063 - RNA, 19 nt, Artificial Sequence
  Description of Artificial Sequence: Synthetic oligonucleotide
  Antisense strand to SEQ ID NO: 2419062
uuguaggcaagacucuucc

SEQ ID NO: 2419064 - RNA, 19 nt, Artificial Sequence
  Description of Artificial Sequence: Synthetic oligonucleotide
  Sense strand starting at position 2331 of SEQ ID NO: 1886633
ucaacucugcacugaggaa

SEQ ID NO: 2419065 - RNA, 19 nt, Artificial Sequence
  Description of Artificial Sequence: Synthetic oligonucleotide
  Antisense strand to SEQ ID NO: 2419064
uuccucagugcagaguuga

SEQ ID NO: 2419066 - RNA, 19 nt, Artificial Sequence
  Description of Artificial Sequence: Synthetic oligonucleotide
  Sense strand starting at position 2397 of SEQ ID NO: 1886633
auuaaagauuucugggaaa

SEQ ID NO: 2419067 - RNA, 19 nt, Artificial Sequence
  Description of Artificial Sequence: Synthetic oligonucleotide
  Antisense strand to SEQ ID NO: 2419066
uuucccagaaaucuuuaau

SEQ ID NO: 2419068 - RNA, 19 nt, Artificial Sequence
  Description of Artificial Sequence: Synthetic oligonucleotide
  Sense strand starting at position 2466 of SEQ ID NO: 1886633
ucccaaauacugggucaga

SEQ ID NO: 2419069 - RNA, 19 nt, Artificial Sequence
  Description of Artificial Sequence: Synthetic oligonucleotide
  Antisense strand to SEQ ID NO: 2419068
ucugacccaguauuuggga

SEQ ID NO: 2419070 - RNA, 19 nt, Artificial Sequence
  Description of Artificial Sequence: Synthetic oligonucleotide
  Sense strand starting at position 2467 of SEQ ID NO: 1886633
cccaaauacugggucagau

SEQ ID NO: 2419071 - RNA, 19 nt, Artificial Sequence
  Description of Artificial Sequence: Synthetic oligonucleotide
  Antisense strand to SEQ ID NO: 2419070
aucugacccaguauuuggg

SEQ ID NO: 2419072 - RNA, 19 nt, Artificial Sequence
  Description of Artificial Sequence: Synthetic oligonucleotide
  Sense strand starting at position 2557 of SEQ ID NO: 1886633
ggcguuuaaauagacuacu

SEQ ID NO: 2419073 - RNA, 19 nt, Artificial Sequence
  Description of Artificial Sequence: Synthetic oligonucleotide
  Antisense strand to SEQ ID NO: 2419072
aguagucuauuuaaacgcc

SEQ ID NO: 2419074 - RNA, 19 nt, Artificial Sequence
  Description of Artificial Sequence: Synthetic oligonucleotide
  Sense strand starting at position 2645 of SEQ ID NO: 1886633
gcagcaacucuaggagaau

SEQ ID NO: 2419075 - RNA, 19 nt, Artificial Sequence
  Description of Artificial Sequence: Synthetic oligonucleotide
  Antisense strand to SEQ ID NO: 2419074
auucuccuagaguugcugc

SEQ ID NO: 2419076 - RNA, 19 nt, Artificial Sequence
  Description of Artificial Sequence: Synthetic oligonucleotide
  Sense strand starting at position 2745 of SEQ ID NO: 1886633
agagaauuguauuccucaa

SEQ ID NO: 2419077 - RNA, 19 nt, Artificial Sequence
  Description of Artificial Sequence: Synthetic oligonucleotide
  Antisense strand to SEQ ID NO: 2419076
uugaggaauacaauucucu

SEQ ID NO: 2419078 - RNA, 19 nt, Artificial Sequence
  Description of Artificial Sequence: Synthetic oligonucleotide
  Sense strand starting at position 2798 of SEQ ID NO: 1886633
agaacagaauguguugaau

SEQ ID NO: 2419079 - RNA, 19 nt, Artificial Sequence
  Description of Artificial Sequence: Synthetic oligonucleotide
  Antisense strand to SEQ ID NO: 2419078
auucaacacauucuguucu

SEQ ID NO: 2419080 - RNA, 19 nt, Artificial Sequence
  Description of Artificial Sequence: Synthetic oligonucleotide
  Sense strand starting at position 2801 of SEQ ID NO: 1886633
acagaauguguugaauucu

SEQ ID NO: 2419081 - RNA, 19 nt, Artificial Sequence
  Description of Artificial Sequence: Synthetic oligonucleotide
  Antisense strand to SEQ ID NO: 2419080
agaauucaacacauucugu

SEQ ID NO: 2419082 - RNA, 19 nt, Artificial Sequence
  Description of Artificial Sequence: Synthetic oligonucleotide
  Sense strand starting at position 2810 of SEQ ID NO: 1886633
guugaauucuucucaauug

SEQ ID NO: 2419083 - RNA, 19 nt, Artificial Sequence
  Description of Artificial Sequence: Synthetic oligonucleotide
  Antisense strand to SEQ ID NO: 2419082
caauugagaagaauucaac

SEQ ID NO: 2419084 - RNA, 19 nt, Artificial Sequence
  Description of Artificial Sequence: Synthetic oligonucleotide
  Sense strand starting at position 2901 of SEQ ID NO: 1886633
acugaauaagugcauguaa

SEQ ID NO: 2419085 - RNA, 19 nt, Artificial Sequence
  Description of Artificial Sequence: Synthetic oligonucleotide
  Antisense strand to SEQ ID NO: 2419084
uuacaugcacuuauucagu

SEQ ID NO: 2419086 - RNA, 19 nt, Artificial Sequence
  Description of Artificial Sequence: Synthetic oligonucleotide
  Sense strand starting at position 2903 of SEQ ID NO: 1886633
ugaauaagugcauguaauu

SEQ ID NO: 2419087 - RNA, 19 nt, Artificial Sequence
  Description of Artificial Sequence: Synthetic oligonucleotide
  Antisense strand to SEQ ID NO: 2419086
aauuacaugcacuuauuca

SEQ ID NO: 2419088 - RNA, 19 nt, Artificial Sequence
  Description of Artificial Sequence: Synthetic oligonucleotide
  Sense strand starting at position 2975 of SEQ ID NO: 1886633
aaccaaguugacugguaua

SEQ ID NO: 2419089 - RNA, 19 nt, Artificial Sequence
  Description of Artificial Sequence: Synthetic oligonucleotide
  Antisense strand to SEQ ID NO: 2419088
uauaccagucaacuugguu

SEQ ID NO: 2419090 - RNA, 19 nt, Artificial Sequence
  Description of Artificial Sequence: Synthetic oligonucleotide
  Sense strand starting at position 3152 of SEQ ID NO: 1886633
ccguuugggaugugaauga

SEQ ID NO: 2419091 - RNA, 19 nt, Artificial Sequence
  Description of Artificial Sequence: Synthetic oligonucleotide
  Antisense strand to SEQ ID NO: 2419090
ucauucacaucccaaacgg

SEQ ID NO: 2419092 - RNA, 19 nt, Artificial Sequence
  Description of Artificial Sequence: Synthetic oligonucleotide
  Sense strand starting at position 3293 of SEQ ID NO: 1886633
ucauaucacgacuguacaa

SEQ ID NO: 2419093 - RNA, 19 nt, Artificial Sequence
  Description of Artificial Sequence: Synthetic oligonucleotide
  Antisense strand to SEQ ID NO: 2419092
uuguacagucgugauauga

SEQ ID NO: 2419094 - RNA, 19 nt, Artificial Sequence
  Description of Artificial Sequence: Synthetic oligonucleotide
  Sense strand starting at position 3295 of SEQ ID NO: 1886633
auaucacgacuguacaauu

SEQ ID NO: 2419095 - RNA, 19 nt, Artificial Sequence
  Description of Artificial Sequence: Synthetic oligonucleotide
  Antisense strand to SEQ ID NO: 2419094
aauuguacagucgugauau

SEQ ID NO: 2419096 - RNA, 19 nt, Artificial Sequence
  Description of Artificial Sequence: Synthetic oligonucleotide
  Sense strand starting at position 3357 of SEQ ID NO: 1886633
uuuguugagccaggaagaa

SEQ ID NO: 2419097 - RNA, 19 nt, Artificial Sequence
  Description of Artificial Sequence: Synthetic oligonucleotide
  Antisense strand to SEQ ID NO: 2419096
uucuuccuggcucaacaaa

SEQ ID NO: 2419098 - RNA, 19 nt, Artificial Sequence
  Description of Artificial Sequence: Synthetic oligonucleotide
  Sense strand starting at position 17 of SEQ ID NO: 1886634
ucaaguuauaugugaggag

SEQ ID NO: 2419099 - RNA, 19 nt, Artificial Sequence
  Description of Artificial Sequence: Synthetic oligonucleotide
  Antisense strand to SEQ ID NO: 2419098
cuccucacauauaacuuga

SEQ ID NO: 2419100 - RNA, 19 nt, Artificial Sequence
  Description of Artificial Sequence: Synthetic oligonucleotide
  Sense strand starting at position 210 of SEQ ID NO: 1886634
auugccaaugcugauuaua

SEQ ID NO: 2419101 - RNA, 19 nt, Artificial Sequence
  Description of Artificial Sequence: Synthetic oligonucleotide
  Antisense strand to SEQ ID NO: 2419100
uauaaucagcauuggcaau

SEQ ID NO: 2419102 - RNA, 19 nt, Artificial Sequence
  Description of Artificial Sequence: Synthetic oligonucleotide
  Sense strand starting at position 212 of SEQ ID NO: 1886634
ugccaaugcugauuauauu

SEQ ID NO: 2419103 - RNA, 19 nt, Artificial Sequence
  Description of Artificial Sequence: Synthetic oligonucleotide
  Antisense strand to SEQ ID NO: 2419102
aauauaaucagcauuggca

SEQ ID NO: 2419104 - RNA, 19 nt, Artificial Sequence
  Description of Artificial Sequence: Synthetic oligonucleotide
  Sense strand starting at position 231 of SEQ ID NO: 1886634
ucaagucaucauggaguca

SEQ ID NO: 2419105 - RNA, 19 nt, Artificial Sequence
  Description of Artificial Sequence: Synthetic oligonucleotide
  Antisense strand to SEQ ID NO: 2419104
ugacuccaugaugacuuga

SEQ ID NO: 2419106 - RNA, 19 nt, Artificial Sequence
  Description of Artificial Sequence: Synthetic oligonucleotide
  Sense strand starting at position 242 of SEQ ID NO: 1886634
uggagucauuggcuaugau

SEQ ID NO: 2419107 - RNA, 19 nt, Artificial Sequence
  Description of Artificial Sequence: Synthetic oligonucleotide
  Antisense strand to SEQ ID NO: 2419106
aucauagccaaugacucca

SEQ ID NO: 2419108 - RNA, 19 nt, Artificial Sequence
  Description of Artificial Sequence: Synthetic oligonucleotide
  Sense strand starting at position 243 of SEQ ID NO: 1886634
ggagucauuggcuaugaua

SEQ ID NO: 2419109 - RNA, 19 nt, Artificial Sequence
  Description of Artificial Sequence: Synthetic oligonucleotide
  Antisense strand to SEQ ID NO: 2419108
uaucauagccaaugacucc

SEQ ID NO: 2419110 - RNA, 19 nt, Artificial Sequence
  Description of Artificial Sequence: Synthetic oligonucleotide
  Sense strand starting at position 245 of SEQ ID NO: 1886634
agucauuggcuaugauacu

SEQ ID NO: 2419111 - RNA, 19 nt, Artificial Sequence
  Description of Artificial Sequence: Synthetic oligonucleotide
  Antisense strand to SEQ ID NO: 2419110
aguaucauagccaaugacu

SEQ ID NO: 2419112 - RNA, 19 nt, Artificial Sequence
  Description of Artificial Sequence: Synthetic oligonucleotide
  Sense strand starting at position 424 of SEQ ID NO: 1886634
ugugguagucuggaagcaa

SEQ ID NO: 2419113 - RNA, 19 nt, Artificial Sequence
  Description of Artificial Sequence: Synthetic oligonucleotide
  Antisense strand to SEQ ID NO: 2419112
uugcuuccagacuaccaca

SEQ ID NO: 2419114 - RNA, 19 nt, Artificial Sequence
  Description of Artificial Sequence: Synthetic oligonucleotide
  Sense strand starting at position 478 of SEQ ID NO: 1886634
guucccacagaaugugaau

SEQ ID NO: 2419115 - RNA, 19 nt, Artificial Sequence
  Description of Artificial Sequence: Synthetic oligonucleotide
  Antisense strand to SEQ ID NO: 2419114
auucacauucugugggaac

SEQ ID NO: 2419116 - RNA, 19 nt, Artificial Sequence
  Description of Artificial Sequence: Synthetic oligonucleotide
  Sense strand starting at position 514 of SEQ ID NO: 1886634
uuaguauuccgaggaaaca

SEQ ID NO: 2419117 - RNA, 19 nt, Artificial Sequence
  Description of Artificial Sequence: Synthetic oligonucleotide
  Antisense strand to SEQ ID NO: 2419116
uguuuccucggaauacuaa

SEQ ID NO: 2419118 - RNA, 19 nt, Artificial Sequence
  Description of Artificial Sequence: Synthetic oligonucleotide
  Sense strand starting at position 567 of SEQ ID NO: 1886634
gcuccagagcgauagaaca

SEQ ID NO: 2419119 - RNA, 19 nt, Artificial Sequence
  Description of Artificial Sequence: Synthetic oligonucleotide
  Antisense strand to SEQ ID NO: 2419118
uguucuaucgcucuggagc

SEQ ID NO: 2419120 - RNA, 19 nt, Artificial Sequence
  Description of Artificial Sequence: Synthetic oligonucleotide
  Sense strand starting at position 569 of SEQ ID NO: 1886634
uccagagcgauagaacauu

SEQ ID NO: 2419121 - RNA, 19 nt, Artificial Sequence
  Description of Artificial Sequence: Synthetic oligonucleotide
  Antisense strand to SEQ ID NO: 2419120
aauguucuaucgcucugga

SEQ ID NO: 2419122 - RNA, 19 nt, Artificial Sequence
  Description of Artificial Sequence: Synthetic oligonucleotide
  Sense strand starting at position 610 of SEQ ID NO: 1886634
gcugaauaacggcauccua

SEQ ID NO: 2419123 - RNA, 19 nt, Artificial Sequence
  Description of Artificial Sequence: Synthetic oligonucleotide
  Antisense strand to SEQ ID NO: 2419122
uaggaugccguuauucagc

SEQ ID NO: 2419124 - RNA, 19 nt, Artificial Sequence
  Description of Artificial Sequence: Synthetic oligonucleotide
  Sense strand starting at position 627 of SEQ ID NO: 1886634
uacugugucuaggcaauca

SEQ ID NO: 2419125 - RNA, 19 nt, Artificial Sequence
  Description of Artificial Sequence: Synthetic oligonucleotide
  Antisense strand to SEQ ID NO: 2419124
ugauugccuagacacagua

SEQ ID NO: 2419126 - RNA, 19 nt, Artificial Sequence
  Description of Artificial Sequence: Synthetic oligonucleotide
  Sense strand starting at position 1031 of SEQ ID NO: 1886634
gccaauaguccgguugcca

SEQ ID NO: 2419127 - RNA, 19 nt, Artificial Sequence
  Description of Artificial Sequence: Synthetic oligonucleotide
  Antisense strand to SEQ ID NO: 2419126
uggcaaccggacuauuggc

SEQ ID NO: 2419128 - RNA, 19 nt, Artificial Sequence
  Description of Artificial Sequence: Synthetic oligonucleotide
  Sense strand starting at position 1066 of SEQ ID NO: 1886634
gcuggccuuucucuaagau

SEQ ID NO: 2419129 - RNA, 19 nt, Artificial Sequence
  Description of Artificial Sequence: Synthetic oligonucleotide
  Antisense strand to SEQ ID NO: 2419128
aucuuagagaaaggccagc

SEQ ID NO: 2419130 - RNA, 19 nt, Artificial Sequence
  Description of Artificial Sequence: Synthetic oligonucleotide
  Sense strand starting at position 1338 of SEQ ID NO: 1886634
agugaugaguguuccuaag

SEQ ID NO: 2419131 - RNA, 19 nt, Artificial Sequence
  Description of Artificial Sequence: Synthetic oligonucleotide
  Antisense strand to SEQ ID NO: 2419130
cuuaggaacacucaucacu

SEQ ID NO: 2419132 - RNA, 19 nt, Artificial Sequence
  Description of Artificial Sequence: Synthetic oligonucleotide
  Sense strand starting at position 1340 of SEQ ID NO: 1886634
ugaugaguguuccuaaggu

SEQ ID NO: 2419133 - RNA, 19 nt, Artificial Sequence
  Description of Artificial Sequence: Synthetic oligonucleotide
  Antisense strand to SEQ ID NO: 2419132
accuuaggaacacucauca

SEQ ID NO: 2419134 - RNA, 19 nt, Artificial Sequence
  Description of Artificial Sequence: Synthetic oligonucleotide
  Sense strand starting at position 1353 of SEQ ID NO: 1886634
uaagguauguucuugagaa

SEQ ID NO: 2419135 - RNA, 19 nt, Artificial Sequence
  Description of Artificial Sequence: Synthetic oligonucleotide
  Antisense strand to SEQ ID NO: 2419134
uucucaagaacauaccuua

SEQ ID NO: 2419136 - RNA, 19 nt, Artificial Sequence
  Description of Artificial Sequence: Synthetic oligonucleotide
  Sense strand starting at position 1399 of SEQ ID NO: 1886634
gcagguuucuuggucacag

SEQ ID NO: 2419137 - RNA, 19 nt, Artificial Sequence
  Description of Artificial Sequence: Synthetic oligonucleotide
  Antisense strand to SEQ ID NO: 2419136
cugugaccaagaaaccugc

SEQ ID NO: 2419138 - RNA, 19 nt, Artificial Sequence
  Description of Artificial Sequence: Synthetic oligonucleotide
  Sense strand starting at position 1400 of SEQ ID NO: 1886634
cagguuucuuggucacaga

SEQ ID NO: 2419139 - RNA, 19 nt, Artificial Sequence
  Description of Artificial Sequence: Synthetic oligonucleotide
  Antisense strand to SEQ ID NO: 2419138
ucugugaccaagaaaccug

SEQ ID NO: 2419140 - RNA, 19 nt, Artificial Sequence
  Description of Artificial Sequence: Synthetic oligonucleotide
  Sense strand starting at position 1401 of SEQ ID NO: 1886634
agguuucuuggucacagaa

SEQ ID NO: 2419141 - RNA, 19 nt, Artificial Sequence
  Description of Artificial Sequence: Synthetic oligonucleotide
  Antisense strand to SEQ ID NO: 2419140
uucugugaccaagaaaccu

SEQ ID NO: 2419142 - RNA, 19 nt, Artificial Sequence
  Description of Artificial Sequence: Synthetic oligonucleotide
  Sense strand starting at position 1473 of SEQ ID NO: 1886634
ggaaaucuuucugugggua

SEQ ID NO: 2419143 - RNA, 19 nt, Artificial Sequence
  Description of Artificial Sequence: Synthetic oligonucleotide
  Antisense strand to SEQ ID NO: 2419142
uacccacagaaagauuucc

SEQ ID NO: 2419144 - RNA, 19 nt, Artificial Sequence
  Description of Artificial Sequence: Synthetic oligonucleotide
  Sense strand starting at position 1474 of SEQ ID NO: 1886634
gaaaucuuucuguggguac

SEQ ID NO: 2419145 - RNA, 19 nt, Artificial Sequence
  Description of Artificial Sequence: Synthetic oligonucleotide
  Antisense strand to SEQ ID NO: 2419144
guacccacagaaagauuuc

SEQ ID NO: 2419146 - RNA, 19 nt, Artificial Sequence
  Description of Artificial Sequence: Synthetic oligonucleotide
  Sense strand starting at position 1476 of SEQ ID NO: 1886634
aaucuuucuguggguacau

SEQ ID NO: 2419147 - RNA, 19 nt, Artificial Sequence
  Description of Artificial Sequence: Synthetic oligonucleotide
  Antisense strand to SEQ ID NO: 2419146
auguacccacagaaagauu

SEQ ID NO: 2419148 - RNA, 19 nt, Artificial Sequence
  Description of Artificial Sequence: Synthetic oligonucleotide
  Sense strand starting at position 1635 of SEQ ID NO: 1886634
ucggguugucacaguguau

SEQ ID NO: 2419149 - RNA, 19 nt, Artificial Sequence
  Description of Artificial Sequence: Synthetic oligonucleotide
  Antisense strand to SEQ ID NO: 2419148
auacacugugacaacccga

SEQ ID NO: 2419150 - RNA, 19 nt, Artificial Sequence
  Description of Artificial Sequence: Synthetic oligonucleotide
  Sense strand starting at position 1644 of SEQ ID NO: 1886634
cacaguguaucuuuggaac

SEQ ID NO: 2419151 - RNA, 19 nt, Artificial Sequence
  Description of Artificial Sequence: Synthetic oligonucleotide
  Antisense strand to SEQ ID NO: 2419150
guuccaaagauacacugug

SEQ ID NO: 2419152 - RNA, 19 nt, Artificial Sequence
  Description of Artificial Sequence: Synthetic oligonucleotide
  Sense strand starting at position 1657 of SEQ ID NO: 1886634
uggaacuaugagugaagca

SEQ ID NO: 2419153 - RNA, 19 nt, Artificial Sequence
  Description of Artificial Sequence: Synthetic oligonucleotide
  Antisense strand to SEQ ID NO: 2419152
ugcuucacucauaguucca

SEQ ID NO: 2419154 - RNA, 19 nt, Artificial Sequence
  Description of Artificial Sequence: Synthetic oligonucleotide
  Sense strand starting at position 1662 of SEQ ID NO: 1886634
cuaugagugaagcaaaggu

SEQ ID NO: 2419155 - RNA, 19 nt, Artificial Sequence
  Description of Artificial Sequence: Synthetic oligonucleotide
  Antisense strand to SEQ ID NO: 2419154
accuuugcuucacucauag

SEQ ID NO: 2419156 - RNA, 19 nt, Artificial Sequence
  Description of Artificial Sequence: Synthetic oligonucleotide
  Sense strand starting at position 2236 of SEQ ID NO: 1886634
gcggauguucuugcuaugu

SEQ ID NO: 2419157 - RNA, 19 nt, Artificial Sequence
  Description of Artificial Sequence: Synthetic oligonucleotide
  Antisense strand to SEQ ID NO: 2419156
acauagcaagaacauccgc

SEQ ID NO: 2419158 - RNA, 19 nt, Artificial Sequence
  Description of Artificial Sequence: Synthetic oligonucleotide
  Sense strand starting at position 2360 of SEQ ID NO: 1886634
ccgagcuaggcuucugcua

SEQ ID NO: 2419159 - RNA, 19 nt, Artificial Sequence
  Description of Artificial Sequence: Synthetic oligonucleotide
  Antisense strand to SEQ ID NO: 2419158
uagcagaagccuagcucgg

SEQ ID NO: 2419160 - RNA, 19 nt, Artificial Sequence
  Description of Artificial Sequence: Synthetic oligonucleotide
  Sense strand starting at position 2558 of SEQ ID NO: 1886634
gugccaggacucugaaauc

SEQ ID NO: 2419161 - RNA, 19 nt, Artificial Sequence
  Description of Artificial Sequence: Synthetic oligonucleotide
  Antisense strand to SEQ ID NO: 2419160
gauuucagaguccuggcac

SEQ ID NO: 2419162 - RNA, 19 nt, Artificial Sequence
  Description of Artificial Sequence: Synthetic oligonucleotide
  Sense strand starting at position 2944 of SEQ ID NO: 1886634
cugucuggccaguaauaag

SEQ ID NO: 2419163 - RNA, 19 nt, Artificial Sequence
  Description of Artificial Sequence: Synthetic oligonucleotide
  Antisense strand to SEQ ID NO: 2419162
cuuauuacuggccagacag

SEQ ID NO: 2419164 - RNA, 19 nt, Artificial Sequence
  Description of Artificial Sequence: Synthetic oligonucleotide
  Sense strand starting at position 3372 of SEQ ID NO: 1886634
ccacaugagccgcauugau

SEQ ID NO: 2419165 - RNA, 19 nt, Artificial Sequence
  Description of Artificial Sequence: Synthetic oligonucleotide
  Antisense strand to SEQ ID NO: 2419164
aucaaugcggcucaugugg

SEQ ID NO: 2419166 - RNA, 19 nt, Artificial Sequence
  Description of Artificial Sequence: Synthetic oligonucleotide
  Sense strand starting at position 3433 of SEQ ID NO: 1886634
cucguacuucuugaacuua

SEQ ID NO: 2419167 - RNA, 19 nt, Artificial Sequence
  Description of Artificial Sequence: Synthetic oligonucleotide
  Antisense strand to SEQ ID NO: 2419166
uaaguucaagaaguacgag

SEQ ID NO: 2419168 - RNA, 19 nt, Artificial Sequence
  Description of Artificial Sequence: Synthetic oligonucleotide
  Sense strand starting at position 3597 of SEQ ID NO: 1886634
gagagaacugugggucaga

SEQ ID NO: 2419169 - RNA, 19 nt, Artificial Sequence
  Description of Artificial Sequence: Synthetic oligonucleotide
  Antisense strand to SEQ ID NO: 2419168
ucugacccacaguucucuc

SEQ ID NO: 2419170 - RNA, 19 nt, Artificial Sequence
  Description of Artificial Sequence: Synthetic oligonucleotide
  Sense strand starting at position 3647 of SEQ ID NO: 1886634
cugugacuucuuuagggua

SEQ ID NO: 2419171 - RNA, 19 nt, Artificial Sequence
  Description of Artificial Sequence: Synthetic oligonucleotide
  Antisense strand to SEQ ID NO: 2419170
uacccuaaagaagucacag

SEQ ID NO: 2419172 - RNA, 19 nt, Artificial Sequence
  Description of Artificial Sequence: Synthetic oligonucleotide
  Sense strand starting at position 3723 of SEQ ID NO: 1886634
ucacaaaguucuuccuguu

SEQ ID NO: 2419173 - RNA, 19 nt, Artificial Sequence
  Description of Artificial Sequence: Synthetic oligonucleotide
  Antisense strand to SEQ ID NO: 2419172
aacaggaagaacuuuguga

SEQ ID NO: 2419174 - RNA, 19 nt, Artificial Sequence
  Description of Artificial Sequence: Synthetic oligonucleotide
  Sense strand starting at position 3855 of SEQ ID NO: 1886634
caggucccaucaguagaua

SEQ ID NO: 2419175 - RNA, 19 nt, Artificial Sequence
  Description of Artificial Sequence: Synthetic oligonucleotide
  Antisense strand to SEQ ID NO: 2419174
uaucuacugaugggaccug

SEQ ID NO: 2419176 - RNA, 19 nt, Artificial Sequence
  Description of Artificial Sequence: Synthetic oligonucleotide
  Sense strand starting at position 3896 of SEQ ID NO: 1886634
cccacucacucuucgugau

SEQ ID NO: 2419177 - RNA, 19 nt, Artificial Sequence
  Description of Artificial Sequence: Synthetic oligonucleotide
  Antisense strand to SEQ ID NO: 2419176
aucacgaagagugaguggg

SEQ ID NO: 2419178 - RNA, 19 nt, Artificial Sequence
  Description of Artificial Sequence: Synthetic oligonucleotide
  Sense strand starting at position 143 of SEQ ID NO: 1886635
gccgcuggucuguguuuca

SEQ ID NO: 2419179 - RNA, 19 nt, Artificial Sequence
  Description of Artificial Sequence: Synthetic oligonucleotide
  Antisense strand to SEQ ID NO: 2419178
ugaaacacagaccagcggc

SEQ ID NO: 2419180 - RNA, 19 nt, Artificial Sequence
  Description of Artificial Sequence: Synthetic oligonucleotide
  Sense strand starting at position 1318 of SEQ ID NO: 1886635
ggaagaugagcuuggcgua

SEQ ID NO: 2419181 - RNA, 19 nt, Artificial Sequence
  Description of Artificial Sequence: Synthetic oligonucleotide
  Antisense strand to SEQ ID NO: 2419180
uacgccaagcucaucuucc

SEQ ID NO: 2419182 - RNA, 19 nt, Artificial Sequence
  Description of Artificial Sequence: Synthetic oligonucleotide
  Sense strand starting at position 1321 of SEQ ID NO: 1886635
agaugagcuuggcguacaa

SEQ ID NO: 2419183 - RNA, 19 nt, Artificial Sequence
  Description of Artificial Sequence: Synthetic oligonucleotide
  Antisense strand to SEQ ID NO: 2419182
uuguacgccaagcucaucu

SEQ ID NO: 2419184 - RNA, 19 nt, Artificial Sequence
  Description of Artificial Sequence: Synthetic oligonucleotide
  Sense strand starting at position 1444 of SEQ ID NO: 1886635
gcgagaucucgcugaagaa

SEQ ID NO: 2419185 - RNA, 19 nt, Artificial Sequence
  Description of Artificial Sequence: Synthetic oligonucleotide
  Antisense strand to SEQ ID NO: 2419184
uucuucagcgagaucucgc

SEQ ID NO: 2419186 - RNA, 19 nt, Artificial Sequence
  Description of Artificial Sequence: Synthetic oligonucleotide
  Sense strand starting at position 1457 of SEQ ID NO: 1886635
gaagaauccgcgcacgaac

SEQ ID NO: 2419187 - RNA, 19 nt, Artificial Sequence
  Description of Artificial Sequence: Synthetic oligonucleotide
  Antisense strand to SEQ ID NO: 2419186
guucgugcgcggauucuuc

SEQ ID NO: 2419188 - RNA, 19 nt, Artificial Sequence
  Description of Artificial Sequence: Synthetic oligonucleotide
  Sense strand starting at position 1627 of SEQ ID NO: 1886635
ggcugaccuugucacugaa

SEQ ID NO: 2419189 - RNA, 19 nt, Artificial Sequence
  Description of Artificial Sequence: Synthetic oligonucleotide
  Antisense strand to SEQ ID NO: 2419188
uucagugacaaggucagcc

SEQ ID NO: 2419190 - RNA, 19 nt, Artificial Sequence
  Description of Artificial Sequence: Synthetic oligonucleotide
  Sense strand starting at position 2100 of SEQ ID NO: 1886635
ugugcuucucguuggcaua

SEQ ID NO: 2419191 - RNA, 19 nt, Artificial Sequence
  Description of Artificial Sequence: Synthetic oligonucleotide
  Antisense strand to SEQ ID NO: 2419190
uaugccaacgagaagcaca

SEQ ID NO: 2419192 - RNA, 19 nt, Artificial Sequence
  Description of Artificial Sequence: Synthetic oligonucleotide
  Sense strand starting at position 2214 of SEQ ID NO: 1886635
ggacgaaccucuggaaguu

SEQ ID NO: 2419193 - RNA, 19 nt, Artificial Sequence
  Description of Artificial Sequence: Synthetic oligonucleotide
  Antisense strand to SEQ ID NO: 2419192
aacuuccagagguucgucc

SEQ ID NO: 2419194 - RNA, 19 nt, Artificial Sequence
  Description of Artificial Sequence: Synthetic oligonucleotide
  Sense strand starting at position 2224 of SEQ ID NO: 1886635
cuggaaguuccaggugaag

SEQ ID NO: 2419195 - RNA, 19 nt, Artificial Sequence
  Description of Artificial Sequence: Synthetic oligonucleotide
  Antisense strand to SEQ ID NO: 2419194
cuucaccuggaacuuccag

SEQ ID NO: 2419196 - RNA, 19 nt, Artificial Sequence
  Description of Artificial Sequence: Synthetic oligonucleotide
  Sense strand starting at position 2364 of SEQ ID NO: 1886635
ggcuguacuggcugaugaa

SEQ ID NO: 2419197 - RNA, 19 nt, Artificial Sequence
  Description of Artificial Sequence: Synthetic oligonucleotide
  Antisense strand to SEQ ID NO: 2419196
uucaucagccaguacagcc

SEQ ID NO: 2419198 - RNA, 19 nt, Artificial Sequence
  Description of Artificial Sequence: Synthetic oligonucleotide
  Sense strand starting at position 2881 of SEQ ID NO: 1886635
gggaacgacacaggucaua

SEQ ID NO: 2419199 - RNA, 19 nt, Artificial Sequence
  Description of Artificial Sequence: Synthetic oligonucleotide
  Antisense strand to SEQ ID NO: 2419198
uaugaccugugucguuccc

SEQ ID NO: 2419200 - RNA, 19 nt, Artificial Sequence
  Description of Artificial Sequence: Synthetic oligonucleotide
  Sense strand starting at position 2986 of SEQ ID NO: 1886635
auggcacagcgguaguaau

SEQ ID NO: 2419201 - RNA, 19 nt, Artificial Sequence
  Description of Artificial Sequence: Synthetic oligonucleotide
  Antisense strand to SEQ ID NO: 2419200
auuacuaccgcugugccau

SEQ ID NO: 2419202 - RNA, 19 nt, Artificial Sequence
  Description of Artificial Sequence: Synthetic oligonucleotide
  Sense strand starting at position 2996 of SEQ ID NO: 1886635
gguaguaauggugggcaga

SEQ ID NO: 2419203 - RNA, 19 nt, Artificial Sequence
  Description of Artificial Sequence: Synthetic oligonucleotide
  Antisense strand to SEQ ID NO: 2419202
ucugcccaccauuacuacc

SEQ ID NO: 2419204 - RNA, 19 nt, Artificial Sequence
  Description of Artificial Sequence: Synthetic oligonucleotide
  Sense strand starting at position 2998 of SEQ ID NO: 1886635
uaguaauggugggcagaca

SEQ ID NO: 2419205 - RNA, 19 nt, Artificial Sequence
  Description of Artificial Sequence: Synthetic oligonucleotide
  Antisense strand to SEQ ID NO: 2419204
ugucugcccaccauuacua

SEQ ID NO: 2419206 - RNA, 19 nt, Artificial Sequence
  Description of Artificial Sequence: Synthetic oligonucleotide
  Sense strand starting at position 3067 of SEQ ID NO: 1886635
ggucguugaucuuagacaa

SEQ ID NO: 2419207 - RNA, 19 nt, Artificial Sequence
  Description of Artificial Sequence: Synthetic oligonucleotide
  Antisense strand to SEQ ID NO: 2419206
uugucuaagaucaacgacc

SEQ ID NO: 2419208 - RNA, 19 nt, Artificial Sequence
  Description of Artificial Sequence: Synthetic oligonucleotide
  Sense strand starting at position 3369 of SEQ ID NO: 1886635
uccauagaauuggagaaau

SEQ ID NO: 2419209 - RNA, 19 nt, Artificial Sequence
  Description of Artificial Sequence: Synthetic oligonucleotide
  Antisense strand to SEQ ID NO: 2419208
auuucuccaauucuaugga

SEQ ID NO: 2419210 - RNA, 19 nt, Artificial Sequence
  Description of Artificial Sequence: Synthetic oligonucleotide
  Sense strand starting at position 3404 of SEQ ID NO: 1886635
uugauaagguucuagcaac

SEQ ID NO: 2419211 - RNA, 19 nt, Artificial Sequence
  Description of Artificial Sequence: Synthetic oligonucleotide
  Antisense strand to SEQ ID NO: 2419210
guugcuagaaccuuaucaa

SEQ ID NO: 2419212 - RNA, 19 nt, Artificial Sequence
  Description of Artificial Sequence: Synthetic oligonucleotide
  Sense strand starting at position 3451 of SEQ ID NO: 1886635
agucauuucuagccaaugu

SEQ ID NO: 2419213 - RNA, 19 nt, Artificial Sequence
  Description of Artificial Sequence: Synthetic oligonucleotide
  Antisense strand to SEQ ID NO: 2419212
acauuggcuagaaaugacu

SEQ ID NO: 2419214 - RNA, 19 nt, Artificial Sequence
  Description of Artificial Sequence: Synthetic oligonucleotide
  Sense strand starting at position 3690 of SEQ ID NO: 1886635
gagugaaggucaugccacu

SEQ ID NO: 2419215 - RNA, 19 nt, Artificial Sequence
  Description of Artificial Sequence: Synthetic oligonucleotide
  Antisense strand to SEQ ID NO: 2419214
aguggcaugaccuucacuc

SEQ ID NO: 2419216 - RNA, 19 nt, Artificial Sequence
  Description of Artificial Sequence: Synthetic oligonucleotide
  Sense strand starting at position 3874 of SEQ ID NO: 1886635
gcagcauggccagaacaaa

SEQ ID NO: 2419217 - RNA, 19 nt, Artificial Sequence
  Description of Artificial Sequence: Synthetic oligonucleotide
  Antisense strand to SEQ ID NO: 2419216
uuuguucuggccaugcugc

SEQ ID NO: 2419218 - RNA, 19 nt, Artificial Sequence
  Description of Artificial Sequence: Synthetic oligonucleotide
  Sense strand starting at position 3902 of SEQ ID NO: 1886635
guaacagguuguugaggau

SEQ ID NO: 2419219 - RNA, 19 nt, Artificial Sequence
  Description of Artificial Sequence: Synthetic oligonucleotide
  Antisense strand to SEQ ID NO: 2419218
auccucaacaaccuguuac

SEQ ID NO: 2419220 - RNA, 19 nt, Artificial Sequence
  Description of Artificial Sequence: Synthetic oligonucleotide
  Sense strand starting at position 382 of SEQ ID NO: 1886636
aaggaaaugugucugcauu

SEQ ID NO: 2419221 - RNA, 19 nt, Artificial Sequence
  Description of Artificial Sequence: Synthetic oligonucleotide
  Antisense strand to SEQ ID NO: 2419220
aaugcagacacauuuccuu

SEQ ID NO: 2419222 - RNA, 19 nt, Artificial Sequence
  Description of Artificial Sequence: Synthetic oligonucleotide
  Sense strand starting at position 383 of SEQ ID NO: 1886636
aggaaaugugucugcauuc

SEQ ID NO: 2419223 - RNA, 19 nt, Artificial Sequence
  Description of Artificial Sequence: Synthetic oligonucleotide
  Antisense strand to SEQ ID NO: 2419222
gaaugcagacacauuuccu

SEQ ID NO: 2419224 - RNA, 19 nt, Artificial Sequence
  Description of Artificial Sequence: Synthetic oligonucleotide
  Sense strand starting at position 488 of SEQ ID NO: 1886636
auggcuuguguugaaacau

SEQ ID NO: 2419225 - RNA, 19 nt, Artificial Sequence
  Description of Artificial Sequence: Synthetic oligonucleotide
  Antisense strand to SEQ ID NO: 2419224
auguuucaacacaagccau

SEQ ID NO: 2419226 - RNA, 19 nt, Artificial Sequence
  Description of Artificial Sequence: Synthetic oligonucleotide
  Sense strand starting at position 541 of SEQ ID NO: 1886636
ugaagaguagcguauuugu

SEQ ID NO: 2419227 - RNA, 19 nt, Artificial Sequence
  Description of Artificial Sequence: Synthetic oligonucleotide
  Antisense strand to SEQ ID NO: 2419226
acaaauacgcuacucuuca

SEQ ID NO: 2419228 - RNA, 19 nt, Artificial Sequence
  Description of Artificial Sequence: Synthetic oligonucleotide
  Sense strand starting at position 549 of SEQ ID NO: 1886636
agcguauuuguuugguacu

SEQ ID NO: 2419229 - RNA, 19 nt, Artificial Sequence
  Description of Artificial Sequence: Synthetic oligonucleotide
  Antisense strand to SEQ ID NO: 2419228
aguaccaaacaaauacgcu

SEQ ID NO: 2419230 - RNA, 19 nt, Artificial Sequence
  Description of Artificial Sequence: Synthetic oligonucleotide
  Sense strand starting at position 551 of SEQ ID NO: 1886636
cguauuuguuugguacuuu

SEQ ID NO: 2419231 - RNA, 19 nt, Artificial Sequence
  Description of Artificial Sequence: Synthetic oligonucleotide
  Antisense strand to SEQ ID NO: 2419230
aaaguaccaaacaaauacg

SEQ ID NO: 2419232 - RNA, 19 nt, Artificial Sequence
  Description of Artificial Sequence: Synthetic oligonucleotide
  Sense strand starting at position 555 of SEQ ID NO: 1886636
uuuguuugguacuuugaaa

SEQ ID NO: 2419233 - RNA, 19 nt, Artificial Sequence
  Description of Artificial Sequence: Synthetic oligonucleotide
  Antisense strand to SEQ ID NO: 2419232
uuucaaaguaccaaacaaa

SEQ ID NO: 2419234 - RNA, 19 nt, Artificial Sequence
  Description of Artificial Sequence: Synthetic oligonucleotide
  Sense strand starting at position 734 of SEQ ID NO: 1886636
aagagauccucccuccgua

SEQ ID NO: 2419235 - RNA, 19 nt, Artificial Sequence
  Description of Artificial Sequence: Synthetic oligonucleotide
  Antisense strand to SEQ ID NO: 2419234
uacggagggaggaucucuu

SEQ ID NO: 2419236 - RNA, 19 nt, Artificial Sequence
  Description of Artificial Sequence: Synthetic oligonucleotide
  Sense strand starting at position 811 of SEQ ID NO: 1886636
uuuagucagcaguaauaaa

SEQ ID NO: 2419237 - RNA, 19 nt, Artificial Sequence
  Description of Artificial Sequence: Synthetic oligonucleotide
  Antisense strand to SEQ ID NO: 2419236
uuuauuacugcugacuaaa

SEQ ID NO: 2419238 - RNA, 19 nt, Artificial Sequence
  Description of Artificial Sequence: Synthetic oligonucleotide
  Sense strand starting at position 946 of SEQ ID NO: 1886636
ggauguuuacagggaugug

SEQ ID NO: 2419239 - RNA, 19 nt, Artificial Sequence
  Description of Artificial Sequence: Synthetic oligonucleotide
  Antisense strand to SEQ ID NO: 2419238
cacaucccuguaaacaucc

SEQ ID NO: 2419240 - RNA, 19 nt, Artificial Sequence
  Description of Artificial Sequence: Synthetic oligonucleotide
  Sense strand starting at position 947 of SEQ ID NO: 1886636
gauguuuacagggaugugu

SEQ ID NO: 2419241 - RNA, 19 nt, Artificial Sequence
  Description of Artificial Sequence: Synthetic oligonucleotide
  Antisense strand to SEQ ID NO: 2419240
acacaucccuguaaacauc

SEQ ID NO: 2419242 - RNA, 19 nt, Artificial Sequence
  Description of Artificial Sequence: Synthetic oligonucleotide
  Sense strand starting at position 949 of SEQ ID NO: 1886636
uguuuacagggauguguua

SEQ ID NO: 2419243 - RNA, 19 nt, Artificial Sequence
  Description of Artificial Sequence: Synthetic oligonucleotide
  Antisense strand to SEQ ID NO: 2419242
uaacacaucccuguaaaca

SEQ ID NO: 2419244 - RNA, 19 nt, Artificial Sequence
  Description of Artificial Sequence: Synthetic oligonucleotide
  Sense strand starting at position 951 of SEQ ID NO: 1886636
uuuacagggauguguuaau

SEQ ID NO: 2419245 - RNA, 19 nt, Artificial Sequence
  Description of Artificial Sequence: Synthetic oligonucleotide
  Antisense strand to SEQ ID NO: 2419244
auuaacacaucccuguaaa

SEQ ID NO: 2419246 - RNA, 19 nt, Artificial Sequence
  Description of Artificial Sequence: Synthetic oligonucleotide
  Sense strand starting at position 1077 of SEQ ID NO: 1886636
acuuguuucugggcaaacu

SEQ ID NO: 2419247 - RNA, 19 nt, Artificial Sequence
  Description of Artificial Sequence: Synthetic oligonucleotide
  Antisense strand to SEQ ID NO: 2419246
aguuugcccagaaacaagu

SEQ ID NO: 2419248 - RNA, 19 nt, Artificial Sequence
  Description of Artificial Sequence: Synthetic oligonucleotide
  Sense strand starting at position 1078 of SEQ ID NO: 1886636
cuuguuucugggcaaacuu

SEQ ID NO: 2419249 - RNA, 19 nt, Artificial Sequence
  Description of Artificial Sequence: Synthetic oligonucleotide
  Antisense strand to SEQ ID NO: 2419248
aaguuugcccagaaacaag

SEQ ID NO: 2419250 - RNA, 19 nt, Artificial Sequence
  Description of Artificial Sequence: Synthetic oligonucleotide
  Sense strand starting at position 1273 of SEQ ID NO: 1886636
agggaaacgugaagauugu

SEQ ID NO: 2419251 - RNA, 19 nt, Artificial Sequence
  Description of Artificial Sequence: Synthetic oligonucleotide
  Antisense strand to SEQ ID NO: 2419250
acaaucuucacguuucccu

SEQ ID NO: 2419252 - RNA, 19 nt, Artificial Sequence
  Description of Artificial Sequence: Synthetic oligonucleotide
  Sense strand starting at position 1326 of SEQ ID NO: 1886636
agcauaucuggccaccuaa

SEQ ID NO: 2419253 - RNA, 19 nt, Artificial Sequence
  Description of Artificial Sequence: Synthetic oligonucleotide
  Antisense strand to SEQ ID NO: 2419252
uuagguggccagauaugcu

SEQ ID NO: 2419254 - RNA, 19 nt, Artificial Sequence
  Description of Artificial Sequence: Synthetic oligonucleotide
  Sense strand starting at position 1346 of SEQ ID NO: 1886636
acacaaaguguuugaaacu

SEQ ID NO: 2419255 - RNA, 19 nt, Artificial Sequence
  Description of Artificial Sequence: Synthetic oligonucleotide
  Antisense strand to SEQ ID NO: 2419254
aguuucaaacacuuugugu

SEQ ID NO: 2419256 - RNA, 19 nt, Artificial Sequence
  Description of Artificial Sequence: Synthetic oligonucleotide
  Sense strand starting at position 2274 of SEQ ID NO: 1886636
agaggugaguuugcagaca

SEQ ID NO: 2419257 - RNA, 19 nt, Artificial Sequence
  Description of Artificial Sequence: Synthetic oligonucleotide
  Antisense strand to SEQ ID NO: 2419256
ugucugcaaacucaccucu

SEQ ID NO: 2419258 - RNA, 19 nt, Artificial Sequence
  Description of Artificial Sequence: Synthetic oligonucleotide
  Sense strand starting at position 2683 of SEQ ID NO: 1886636
uagucucaggguugacaau

SEQ ID NO: 2419259 - RNA, 19 nt, Artificial Sequence
  Description of Artificial Sequence: Synthetic oligonucleotide
  Antisense strand to SEQ ID NO: 2419258
auugucaacccugagacua

SEQ ID NO: 2419260 - RNA, 19 nt, Artificial Sequence
  Description of Artificial Sequence: Synthetic oligonucleotide
  Sense strand starting at position 2782 of SEQ ID NO: 1886636
cgguauuaccaagagcugu

SEQ ID NO: 2419261 - RNA, 19 nt, Artificial Sequence
  Description of Artificial Sequence: Synthetic oligonucleotide
  Antisense strand to SEQ ID NO: 2419260
acagcucuugguaauaccg

SEQ ID NO: 2419262 - RNA, 19 nt, Artificial Sequence
  Description of Artificial Sequence: Synthetic oligonucleotide
  Sense strand starting at position 2823 of SEQ ID NO: 1886636
gacuucucugagcgguaaa

SEQ ID NO: 2419263 - RNA, 19 nt, Artificial Sequence
  Description of Artificial Sequence: Synthetic oligonucleotide
  Antisense strand to SEQ ID NO: 2419262
uuuaccgcucagagaaguc

SEQ ID NO: 2419264 - RNA, 19 nt, Artificial Sequence
  Description of Artificial Sequence: Synthetic oligonucleotide
  Sense strand starting at position 2826 of SEQ ID NO: 1886636
uucucugagcgguaaauau

SEQ ID NO: 2419265 - RNA, 19 nt, Artificial Sequence
  Description of Artificial Sequence: Synthetic oligonucleotide
  Antisense strand to SEQ ID NO: 2419264
auauuuaccgcucagagaa

SEQ ID NO: 2419266 - RNA, 19 nt, Artificial Sequence
  Description of Artificial Sequence: Synthetic oligonucleotide
  Sense strand starting at position 2855 of SEQ ID NO: 1886636
ugcauaucgguguauugaa

SEQ ID NO: 2419267 - RNA, 19 nt, Artificial Sequence
  Description of Artificial Sequence: Synthetic oligonucleotide
  Antisense strand to SEQ ID NO: 2419266
uucaauacaccgauaugca

SEQ ID NO: 2419268 - RNA, 19 nt, Artificial Sequence
  Description of Artificial Sequence: Synthetic oligonucleotide
  Sense strand starting at position 3112 of SEQ ID NO: 1886636
agacuagauugggugcuaa

SEQ ID NO: 2419269 - RNA, 19 nt, Artificial Sequence
  Description of Artificial Sequence: Synthetic oligonucleotide
  Antisense strand to SEQ ID NO: 2419268
uuagcacccaaucuagucu

SEQ ID NO: 2419270 - RNA, 19 nt, Artificial Sequence
  Description of Artificial Sequence: Synthetic oligonucleotide
  Sense strand starting at position 3157 of SEQ ID NO: 1886636
cguggauuaccucauguaa

SEQ ID NO: 2419271 - RNA, 19 nt, Artificial Sequence
  Description of Artificial Sequence: Synthetic oligonucleotide
  Antisense strand to SEQ ID NO: 2419270
uuacaugagguaauccacg

SEQ ID NO: 2419272 - RNA, 19 nt, Artificial Sequence
  Description of Artificial Sequence: Synthetic oligonucleotide
  Sense strand starting at position 3269 of SEQ ID NO: 1886636
gcugcaccgcagucaaauu

SEQ ID NO: 2419273 - RNA, 19 nt, Artificial Sequence
  Description of Artificial Sequence: Synthetic oligonucleotide
  Antisense strand to SEQ ID NO: 2419272
aauuugacugcggugcagc

SEQ ID NO: 2419274 - RNA, 19 nt, Artificial Sequence
  Description of Artificial Sequence: Synthetic oligonucleotide
  Sense strand starting at position 3370 of SEQ ID NO: 1886636
gagacugucgcucaaguca

SEQ ID NO: 2419275 - RNA, 19 nt, Artificial Sequence
  Description of Artificial Sequence: Synthetic oligonucleotide
  Antisense strand to SEQ ID NO: 2419274
ugacuugagcgacagucuc

SEQ ID NO: 2419276 - RNA, 19 nt, Artificial Sequence
  Description of Artificial Sequence: Synthetic oligonucleotide
  Sense strand starting at position 3415 of SEQ ID NO: 1886636
guugcuucguggaugguau

SEQ ID NO: 2419277 - RNA, 19 nt, Artificial Sequence
  Description of Artificial Sequence: Synthetic oligonucleotide
  Antisense strand to SEQ ID NO: 2419276
auaccauccacgaagcaac

SEQ ID NO: 2419278 - RNA, 19 nt, Artificial Sequence
  Description of Artificial Sequence: Synthetic oligonucleotide
  Sense strand starting at position 3426 of SEQ ID NO: 1886636
gaugguauuugggaaguuu

SEQ ID NO: 2419279 - RNA, 19 nt, Artificial Sequence
  Description of Artificial Sequence: Synthetic oligonucleotide
  Antisense strand to SEQ ID NO: 2419278
aaacuucccaaauaccauc

SEQ ID NO: 2419280 - RNA, 19 nt, Artificial Sequence
  Description of Artificial Sequence: Synthetic oligonucleotide
  Sense strand starting at position 3485 of SEQ ID NO: 1886636
uguauugagcaguauugaa

SEQ ID NO: 2419281 - RNA, 19 nt, Artificial Sequence
  Description of Artificial Sequence: Synthetic oligonucleotide
  Antisense strand to SEQ ID NO: 2419280
uucaauacugcucaauaca

SEQ ID NO: 2419282 - RNA, 19 nt, Artificial Sequence
  Description of Artificial Sequence: Synthetic oligonucleotide
  Sense strand starting at position 3527 of SEQ ID NO: 1886636
ggugaacaagccuaaucuu

SEQ ID NO: 2419283 - RNA, 19 nt, Artificial Sequence
  Description of Artificial Sequence: Synthetic oligonucleotide
  Antisense strand to SEQ ID NO: 2419282
aagauuaggcuuguucacc

SEQ ID NO: 2419284 - RNA, 19 nt, Artificial Sequence
  Description of Artificial Sequence: Synthetic oligonucleotide
  Sense strand starting at position 3788 of SEQ ID NO: 1886636
uagauuauacugugaaugu

SEQ ID NO: 2419285 - RNA, 19 nt, Artificial Sequence
  Description of Artificial Sequence: Synthetic oligonucleotide
  Antisense strand to SEQ ID NO: 2419284
acauucacaguauaaucua

SEQ ID NO: 2419286 - RNA, 19 nt, Artificial Sequence
  Description of Artificial Sequence: Synthetic oligonucleotide
  Sense strand starting at position 3820 of SEQ ID NO: 1886636
ggauuuggcuuugaagaag

SEQ ID NO: 2419287 - RNA, 19 nt, Artificial Sequence
  Description of Artificial Sequence: Synthetic oligonucleotide
  Antisense strand to SEQ ID NO: 2419286
cuucuucaaagccaaaucc

SEQ ID NO: 2419288 - RNA, 19 nt, Artificial Sequence
  Description of Artificial Sequence: Synthetic oligonucleotide
  Sense strand starting at position 3832 of SEQ ID NO: 1886636
gaagaaguuugagagaaug

SEQ ID NO: 2419289 - RNA, 19 nt, Artificial Sequence
  Description of Artificial Sequence: Synthetic oligonucleotide
  Antisense strand to SEQ ID NO: 2419288
cauucucucaaacuucuuc

SEQ ID NO: 2419290 - RNA, 19 nt, Artificial Sequence
  Description of Artificial Sequence: Synthetic oligonucleotide
  Sense strand starting at position 3840 of SEQ ID NO: 1886636
uugagagaauguuuaaguu

SEQ ID NO: 2419291 - RNA, 19 nt, Artificial Sequence
  Description of Artificial Sequence: Synthetic oligonucleotide
  Antisense strand to SEQ ID NO: 2419290
aacuuaaacauucucucaa

SEQ ID NO: 2419292 - RNA, 19 nt, Artificial Sequence
  Description of Artificial Sequence: Synthetic oligonucleotide
  Sense strand starting at position 3844 of SEQ ID NO: 1886636
gagaauguuuaaguuauga

SEQ ID NO: 2419293 - RNA, 19 nt, Artificial Sequence
  Description of Artificial Sequence: Synthetic oligonucleotide
  Antisense strand to SEQ ID NO: 2419292
ucauaacuuaaacauucuc

SEQ ID NO: 2419294 - RNA, 19 nt, Artificial Sequence
  Description of Artificial Sequence: Synthetic oligonucleotide
  Sense strand starting at position 3855 of SEQ ID NO: 1886636
aguuaugaacacugugaau

SEQ ID NO: 2419295 - RNA, 19 nt, Artificial Sequence
  Description of Artificial Sequence: Synthetic oligonucleotide
  Antisense strand to SEQ ID NO: 2419294
auucacaguguucauaacu

SEQ ID NO: 2419296 - RNA, 19 nt, Artificial Sequence
  Description of Artificial Sequence: Synthetic oligonucleotide
  Sense strand starting at position 3857 of SEQ ID NO: 1886636
uuaugaacacugugaauau

SEQ ID NO: 2419297 - RNA, 19 nt, Artificial Sequence
  Description of Artificial Sequence: Synthetic oligonucleotide
  Antisense strand to SEQ ID NO: 2419296
auauucacaguguucauaa

SEQ ID NO: 2419298 - RNA, 19 nt, Artificial Sequence
  Description of Artificial Sequence: Synthetic oligonucleotide
  Sense strand starting at position 3939 of SEQ ID NO: 1886636
agacaagaaucguaauuua

SEQ ID NO: 2419299 - RNA, 19 nt, Artificial Sequence
  Description of Artificial Sequence: Synthetic oligonucleotide
  Antisense strand to SEQ ID NO: 2419298
uaaauuacgauucuugucu

SEQ ID NO: 2419300 - RNA, 19 nt, Artificial Sequence
  Description of Artificial Sequence: Synthetic oligonucleotide
  Sense strand starting at position 319 of SEQ ID NO: 1886637
ccuggugucagcugagaac

SEQ ID NO: 2419301 - RNA, 19 nt, Artificial Sequence
  Description of Artificial Sequence: Synthetic oligonucleotide
  Antisense strand to SEQ ID NO: 2419300
guucucagcugacaccagg

SEQ ID NO: 2419302 - RNA, 19 nt, Artificial Sequence
  Description of Artificial Sequence: Synthetic oligonucleotide
  Sense strand starting at position 368 of SEQ ID NO: 1886637
ugauguuccugccugaaca

SEQ ID NO: 2419303 - RNA, 19 nt, Artificial Sequence
  Description of Artificial Sequence: Synthetic oligonucleotide
  Antisense strand to SEQ ID NO: 2419302
uguucaggcaggaacauca

SEQ ID NO: 2419304 - RNA, 19 nt, Artificial Sequence
  Description of Artificial Sequence: Synthetic oligonucleotide
  Sense strand starting at position 369 of SEQ ID NO: 1886637
gauguuccugccugaacau

SEQ ID NO: 2419305 - RNA, 19 nt, Artificial Sequence
  Description of Artificial Sequence: Synthetic oligonucleotide
  Antisense strand to SEQ ID NO: 2419304
auguucaggcaggaacauc

SEQ ID NO: 2419306 - RNA, 19 nt, Artificial Sequence
  Description of Artificial Sequence: Synthetic oligonucleotide
  Sense strand starting at position 370 of SEQ ID NO: 1886637
auguuccugccugaacaua

SEQ ID NO: 2419307 - RNA, 19 nt, Artificial Sequence
  Description of Artificial Sequence: Synthetic oligonucleotide
  Antisense strand to SEQ ID NO: 2419306
uauguucaggcaggaacau

SEQ ID NO: 2419308 - RNA, 19 nt, Artificial Sequence
  Description of Artificial Sequence: Synthetic oligonucleotide
  Sense strand starting at position 708 of SEQ ID NO: 1886637
agcucaacuccuuaugaga

SEQ ID NO: 2419309 - RNA, 19 nt, Artificial Sequence
  Description of Artificial Sequence: Synthetic oligonucleotide
  Antisense strand to SEQ ID NO: 2419308
ucucauaaggaguugagcu

SEQ ID NO: 2419310 - RNA, 19 nt, Artificial Sequence
  Description of Artificial Sequence: Synthetic oligonucleotide
  Sense strand starting at position 846 of SEQ ID NO: 1886637
agggucuacacgugagaau

SEQ ID NO: 2419311 - RNA, 19 nt, Artificial Sequence
  Description of Artificial Sequence: Synthetic oligonucleotide
  Antisense strand to SEQ ID NO: 2419310
auucucacguguagacccu

SEQ ID NO: 2419312 - RNA, 19 nt, Artificial Sequence
  Description of Artificial Sequence: Synthetic oligonucleotide
  Sense strand starting at position 847 of SEQ ID NO: 1886637
gggucuacacgugagaauc

SEQ ID NO: 2419313 - RNA, 19 nt, Artificial Sequence
  Description of Artificial Sequence: Synthetic oligonucleotide
  Antisense strand to SEQ ID NO: 2419312
gauucucacguguagaccc

SEQ ID NO: 2419314 - RNA, 19 nt, Artificial Sequence
  Description of Artificial Sequence: Synthetic oligonucleotide
  Sense strand starting at position 919 of SEQ ID NO: 1886637
aagcuagaaucucugacga

SEQ ID NO: 2419315 - RNA, 19 nt, Artificial Sequence
  Description of Artificial Sequence: Synthetic oligonucleotide
  Antisense strand to SEQ ID NO: 2419314
ucgucagagauucuagcuu

SEQ ID NO: 2419316 - RNA, 19 nt, Artificial Sequence
  Description of Artificial Sequence: Synthetic oligonucleotide
  Sense strand starting at position 1277 of SEQ ID NO: 1886637
ucccgaguagcuggguaau

SEQ ID NO: 2419317 - RNA, 19 nt, Artificial Sequence
  Description of Artificial Sequence: Synthetic oligonucleotide
  Antisense strand to SEQ ID NO: 2419316
auuacccagcuacucggga

SEQ ID NO: 2419318 - RNA, 19 nt, Artificial Sequence
  Description of Artificial Sequence: Synthetic oligonucleotide
  Sense strand starting at position 1279 of SEQ ID NO: 1886637
ccgaguagcuggguaauua

SEQ ID NO: 2419319 - RNA, 19 nt, Artificial Sequence
  Description of Artificial Sequence: Synthetic oligonucleotide
  Antisense strand to SEQ ID NO: 2419318
uaauuacccagcuacucgg

SEQ ID NO: 2419320 - RNA, 19 nt, Artificial Sequence
  Description of Artificial Sequence: Synthetic oligonucleotide
  Sense strand starting at position 1280 of SEQ ID NO: 1886637
cgaguagcuggguaauuac

SEQ ID NO: 2419321 - RNA, 19 nt, Artificial Sequence
  Description of Artificial Sequence: Synthetic oligonucleotide
  Antisense strand to SEQ ID NO: 2419320
guaauuacccagcuacucg

SEQ ID NO: 2419322 - RNA, 19 nt, Artificial Sequence
  Description of Artificial Sequence: Synthetic oligonucleotide
  Sense strand starting at position 1613 of SEQ ID NO: 1886637
aaauuagccggaugguagu

SEQ ID NO: 2419323 - RNA, 19 nt, Artificial Sequence
  Description of Artificial Sequence: Synthetic oligonucleotide
  Antisense strand to SEQ ID NO: 2419322
acuaccauccggcuaauuu

SEQ ID NO: 2419324 - RNA, 19 nt, Artificial Sequence
  Description of Artificial Sequence: Synthetic oligonucleotide
  Sense strand starting at position 1824 of SEQ ID NO: 1886637
aggaacuccugcucuagaa

SEQ ID NO: 2419325 - RNA, 19 nt, Artificial Sequence
  Description of Artificial Sequence: Synthetic oligonucleotide
  Antisense strand to SEQ ID NO: 2419324
uucuagagcaggaguuccu

SEQ ID NO: 2419326 - RNA, 19 nt, Artificial Sequence
  Description of Artificial Sequence: Synthetic oligonucleotide
  Sense strand starting at position 1864 of SEQ ID NO: 1886637
auguauuggucuccaguuu

SEQ ID NO: 2419327 - RNA, 19 nt, Artificial Sequence
  Description of Artificial Sequence: Synthetic oligonucleotide
  Antisense strand to SEQ ID NO: 2419326
aaacuggagaccaauacau

SEQ ID NO: 2419328 - RNA, 19 nt, Artificial Sequence
  Description of Artificial Sequence: Synthetic oligonucleotide
  Sense strand starting at position 2092 of SEQ ID NO: 1886637
guugcuucuguugugaguu

SEQ ID NO: 2419329 - RNA, 19 nt, Artificial Sequence
  Description of Artificial Sequence: Synthetic oligonucleotide
  Antisense strand to SEQ ID NO: 2419328
aacucacaacagaagcaac

SEQ ID NO: 2419330 - RNA, 19 nt, Artificial Sequence
  Description of Artificial Sequence: Synthetic oligonucleotide
  Sense strand starting at position 2104 of SEQ ID NO: 1886637
gugaguugugcugagagua

SEQ ID NO: 2419331 - RNA, 19 nt, Artificial Sequence
  Description of Artificial Sequence: Synthetic oligonucleotide
  Antisense strand to SEQ ID NO: 2419330
uacucucagcacaacucac

SEQ ID NO: 2419332 - RNA, 19 nt, Artificial Sequence
  Description of Artificial Sequence: Synthetic oligonucleotide
  Sense strand starting at position 2107 of SEQ ID NO: 1886637
aguugugcugagaguaagu

SEQ ID NO: 2419333 - RNA, 19 nt, Artificial Sequence
  Description of Artificial Sequence: Synthetic oligonucleotide
  Antisense strand to SEQ ID NO: 2419332
acuuacucucagcacaacu

SEQ ID NO: 2419334 - RNA, 19 nt, Artificial Sequence
  Description of Artificial Sequence: Synthetic oligonucleotide
  Sense strand starting at position 2169 of SEQ ID NO: 1886637
guaggaguugcaggagaaa

SEQ ID NO: 2419335 - RNA, 19 nt, Artificial Sequence
  Description of Artificial Sequence: Synthetic oligonucleotide
  Antisense strand to SEQ ID NO: 2419334
uuucuccugcaacuccuac

SEQ ID NO: 2419336 - RNA, 19 nt, Artificial Sequence
  Description of Artificial Sequence: Synthetic oligonucleotide
  Sense strand starting at position 2181 of SEQ ID NO: 1886637
ggagaaaggcuuugaguca

SEQ ID NO: 2419337 - RNA, 19 nt, Artificial Sequence
  Description of Artificial Sequence: Synthetic oligonucleotide
  Antisense strand to SEQ ID NO: 2419336
ugacucaaagccuuucucc

SEQ ID NO: 2419338 - RNA, 19 nt, Artificial Sequence
  Description of Artificial Sequence: Synthetic oligonucleotide
  Sense strand starting at position 2205 of SEQ ID NO: 1886637
ggaaauaacuuucuagccu

SEQ ID NO: 2419339 - RNA, 19 nt, Artificial Sequence
  Description of Artificial Sequence: Synthetic oligonucleotide
  Antisense strand to SEQ ID NO: 2419338
aggcuagaaaguuauuucc

SEQ ID NO: 2419340 - RNA, 19 nt, Artificial Sequence
  Description of Artificial Sequence: Synthetic oligonucleotide
  Sense strand starting at position 2613 of SEQ ID NO: 1886637
caagcucugcugugacaca

SEQ ID NO: 2419341 - RNA, 19 nt, Artificial Sequence
  Description of Artificial Sequence: Synthetic oligonucleotide
  Antisense strand to SEQ ID NO: 2419340
ugugucacagcagagcuug

SEQ ID NO: 2419342 - RNA, 19 nt, Artificial Sequence
  Description of Artificial Sequence: Synthetic oligonucleotide
  Sense strand starting at position 2865 of SEQ ID NO: 1886637
cugaccugagguugucaaa

SEQ ID NO: 2419343 - RNA, 19 nt, Artificial Sequence
  Description of Artificial Sequence: Synthetic oligonucleotide
  Antisense strand to SEQ ID NO: 2419342
uuugacaaccucaggucag

SEQ ID NO: 2419344 - RNA, 19 nt, Artificial Sequence
  Description of Artificial Sequence: Synthetic oligonucleotide
  Sense strand starting at position 2872 of SEQ ID NO: 1886637
gagguugucaaaugguuug

SEQ ID NO: 2419345 - RNA, 19 nt, Artificial Sequence
  Description of Artificial Sequence: Synthetic oligonucleotide
  Antisense strand to SEQ ID NO: 2419344
caaaccauuugacaaccuc

SEQ ID NO: 2419346 - RNA, 19 nt, Artificial Sequence
  Description of Artificial Sequence: Synthetic oligonucleotide
  Sense strand starting at position 2970 of SEQ ID NO: 1886637
cuauguucucucugguuua

SEQ ID NO: 2419347 - RNA, 19 nt, Artificial Sequence
  Description of Artificial Sequence: Synthetic oligonucleotide
  Antisense strand to SEQ ID NO: 2419346
uaaaccagagagaacauag

SEQ ID NO: 2419348 - RNA, 19 nt, Artificial Sequence
  Description of Artificial Sequence: Synthetic oligonucleotide
  Sense strand starting at position 3080 of SEQ ID NO: 1886637
ucaguaauuuguuagaaga

SEQ ID NO: 2419349 - RNA, 19 nt, Artificial Sequence
  Description of Artificial Sequence: Synthetic oligonucleotide
  Antisense strand to SEQ ID NO: 2419348
ucuucuaacaaauuacuga

SEQ ID NO: 2419350 - RNA, 19 nt, Artificial Sequence
  Description of Artificial Sequence: Synthetic oligonucleotide
  Sense strand starting at position 3082 of SEQ ID NO: 1886637
aguaauuuguuagaagaac

SEQ ID NO: 2419351 - RNA, 19 nt, Artificial Sequence
  Description of Artificial Sequence: Synthetic oligonucleotide
  Antisense strand to SEQ ID NO: 2419350
guucuucuaacaaauuacu

SEQ ID NO: 2419352 - RNA, 19 nt, Artificial Sequence
  Description of Artificial Sequence: Synthetic oligonucleotide
  Sense strand starting at position 3139 of SEQ ID NO: 1886637
guuuauuacagaugcaggu

SEQ ID NO: 2419353 - RNA, 19 nt, Artificial Sequence
  Description of Artificial Sequence: Synthetic oligonucleotide
  Antisense strand to SEQ ID NO: 2419352
accugcaucuguaauaaac

SEQ ID NO: 2419354 - RNA, 19 nt, Artificial Sequence
  Description of Artificial Sequence: Synthetic oligonucleotide
  Sense strand starting at position 3143 of SEQ ID NO: 1886637
auuacagaugcagguuuaa

SEQ ID NO: 2419355 - RNA, 19 nt, Artificial Sequence
  Description of Artificial Sequence: Synthetic oligonucleotide
  Antisense strand to SEQ ID NO: 2419354
uuaaaccugcaucuguaau

SEQ ID NO: 2419356 - RNA, 19 nt, Artificial Sequence
  Description of Artificial Sequence: Synthetic oligonucleotide
  Sense strand starting at position 3152 of SEQ ID NO: 1886637
gcagguuuaagucagccaa

SEQ ID NO: 2419357 - RNA, 19 nt, Artificial Sequence
  Description of Artificial Sequence: Synthetic oligonucleotide
  Antisense strand to SEQ ID NO: 2419356
uuggcugacuuaaaccugc

SEQ ID NO: 2419358 - RNA, 19 nt, Artificial Sequence
  Description of Artificial Sequence: Synthetic oligonucleotide
  Sense strand starting at position 3250 of SEQ ID NO: 1886637
aguguuaacuccucaugac

SEQ ID NO: 2419359 - RNA, 19 nt, Artificial Sequence
  Description of Artificial Sequence: Synthetic oligonucleotide
  Antisense strand to SEQ ID NO: 2419358
gucaugaggaguuaacacu

SEQ ID NO: 2419360 - RNA, 19 nt, Artificial Sequence
  Description of Artificial Sequence: Synthetic oligonucleotide
  Sense strand starting at position 3251 of SEQ ID NO: 1886637
guguuaacuccucaugaca

SEQ ID NO: 2419361 - RNA, 19 nt, Artificial Sequence
  Description of Artificial Sequence: Synthetic oligonucleotide
  Antisense strand to SEQ ID NO: 2419360
ugucaugaggaguuaacac

SEQ ID NO: 2419362 - RNA, 19 nt, Artificial Sequence
  Description of Artificial Sequence: Synthetic oligonucleotide
  Sense strand starting at position 3473 of SEQ ID NO: 1886637
uggcuaagcccucagguaa

SEQ ID NO: 2419363 - RNA, 19 nt, Artificial Sequence
  Description of Artificial Sequence: Synthetic oligonucleotide
  Antisense strand to SEQ ID NO: 2419362
uuaccugagggcuuagcca

SEQ ID NO: 2419364 - RNA, 19 nt, Artificial Sequence
  Description of Artificial Sequence: Synthetic oligonucleotide
  Sense strand starting at position 3562 of SEQ ID NO: 1886637
gucagacuuucugugaguu

SEQ ID NO: 2419365 - RNA, 19 nt, Artificial Sequence
  Description of Artificial Sequence: Synthetic oligonucleotide
  Antisense strand to SEQ ID NO: 2419364
aacucacagaaagucugac

SEQ ID NO: 2419366 - RNA, 19 nt, Artificial Sequence
  Description of Artificial Sequence: Synthetic oligonucleotide
  Sense strand starting at position 3563 of SEQ ID NO: 1886637
ucagacuuucugugaguuc

SEQ ID NO: 2419367 - RNA, 19 nt, Artificial Sequence
  Description of Artificial Sequence: Synthetic oligonucleotide
  Antisense strand to SEQ ID NO: 2419366
gaacucacagaaagucuga

SEQ ID NO: 2419368 - RNA, 19 nt, Artificial Sequence
  Description of Artificial Sequence: Synthetic oligonucleotide
  Sense strand starting at position 3626 of SEQ ID NO: 1886637
uggauucagcugugaagcu

SEQ ID NO: 2419369 - RNA, 19 nt, Artificial Sequence
  Description of Artificial Sequence: Synthetic oligonucleotide
  Antisense strand to SEQ ID NO: 2419368
agcuucacagcugaaucca

SEQ ID NO: 2419370 - RNA, 19 nt, Artificial Sequence
  Description of Artificial Sequence: Synthetic oligonucleotide
  Sense strand starting at position 3787 of SEQ ID NO: 1886637
gaagacuccgaguaagugu

SEQ ID NO: 2419371 - RNA, 19 nt, Artificial Sequence
  Description of Artificial Sequence: Synthetic oligonucleotide
  Antisense strand to SEQ ID NO: 2419370
acacuuacucggagucuuc

SEQ ID NO: 2419372 - RNA, 19 nt, Artificial Sequence
  Description of Artificial Sequence: Synthetic oligonucleotide
  Sense strand starting at position 3795 of SEQ ID NO: 1886637
cgaguaagugucugcauuu

SEQ ID NO: 2419373 - RNA, 19 nt, Artificial Sequence
  Description of Artificial Sequence: Synthetic oligonucleotide
  Antisense strand to SEQ ID NO: 2419372
aaaugcagacacuuacucg

SEQ ID NO: 2419374 - RNA, 19 nt, Artificial Sequence
  Description of Artificial Sequence: Synthetic oligonucleotide
  Sense strand starting at position 3796 of SEQ ID NO: 1886637
gaguaagugucugcauuuc

SEQ ID NO: 2419375 - RNA, 19 nt, Artificial Sequence
  Description of Artificial Sequence: Synthetic oligonucleotide
  Antisense strand to SEQ ID NO: 2419374
gaaaugcagacacuuacuc

SEQ ID NO: 2419376 - RNA, 19 nt, Artificial Sequence
  Description of Artificial Sequence: Synthetic oligonucleotide
  Sense strand starting at position 3808 of SEQ ID NO: 1886637
gcauuucgguuuccuugua

SEQ ID NO: 2419377 - RNA, 19 nt, Artificial Sequence
  Description of Artificial Sequence: Synthetic oligonucleotide
  Antisense strand to SEQ ID NO: 2419376
uacaaggaaaccgaaaugc

SEQ ID NO: 2419378 - RNA, 19 nt, Artificial Sequence
  Description of Artificial Sequence: Synthetic oligonucleotide
  Sense strand starting at position 3844 of SEQ ID NO: 1886637
agcugcucuucucuuugaa

SEQ ID NO: 2419379 - RNA, 19 nt, Artificial Sequence
  Description of Artificial Sequence: Synthetic oligonucleotide
  Antisense strand to SEQ ID NO: 2419378
uucaaagagaagagcagcu

SEQ ID NO: 2419380 - RNA, 19 nt, Artificial Sequence
  Description of Artificial Sequence: Synthetic oligonucleotide
  Sense strand starting at position 24 of SEQ ID NO: 1886638
gaggauguguuucccuaug

SEQ ID NO: 2419381 - RNA, 19 nt, Artificial Sequence
  Description of Artificial Sequence: Synthetic oligonucleotide
  Antisense strand to SEQ ID NO: 2419380
cauagggaaacacauccuc

SEQ ID NO: 2419382 - RNA, 19 nt, Artificial Sequence
  Description of Artificial Sequence: Synthetic oligonucleotide
  Sense strand starting at position 29 of SEQ ID NO: 1886638
uguguuucccuaugccaca

SEQ ID NO: 2419383 - RNA, 19 nt, Artificial Sequence
  Description of Artificial Sequence: Synthetic oligonucleotide
  Antisense strand to SEQ ID NO: 2419382
uguggcauagggaaacaca

SEQ ID NO: 2419384 - RNA, 19 nt, Artificial Sequence
  Description of Artificial Sequence: Synthetic oligonucleotide
  Sense strand starting at position 770 of SEQ ID NO: 1886638
ggccuuugcccaggacaau

SEQ ID NO: 2419385 - RNA, 19 nt, Artificial Sequence
  Description of Artificial Sequence: Synthetic oligonucleotide
  Antisense strand to SEQ ID NO: 2419384
auuguccugggcaaaggcc

SEQ ID NO: 2419386 - RNA, 19 nt, Artificial Sequence
  Description of Artificial Sequence: Synthetic oligonucleotide
  Sense strand starting at position 1086 of SEQ ID NO: 1886638
ggugaugucugguucuggu

SEQ ID NO: 2419387 - RNA, 19 nt, Artificial Sequence
  Description of Artificial Sequence: Synthetic oligonucleotide
  Antisense strand to SEQ ID NO: 2419386
accagaaccagacaucacc

SEQ ID NO: 2419388 - RNA, 19 nt, Artificial Sequence
  Description of Artificial Sequence: Synthetic oligonucleotide
  Sense strand starting at position 1379 of SEQ ID NO: 1886638
ggucuccuggcacaugaau

SEQ ID NO: 2419389 - RNA, 19 nt, Artificial Sequence
  Description of Artificial Sequence: Synthetic oligonucleotide
  Antisense strand to SEQ ID NO: 2419388
auucaugugccaggagacc

SEQ ID NO: 2419390 - RNA, 19 nt, Artificial Sequence
  Description of Artificial Sequence: Synthetic oligonucleotide
  Sense strand starting at position 1390 of SEQ ID NO: 1886638
acaugaauuucugacaaug

SEQ ID NO: 2419391 - RNA, 19 nt, Artificial Sequence
  Description of Artificial Sequence: Synthetic oligonucleotide
  Antisense strand to SEQ ID NO: 2419390
cauugucagaaauucaugu

SEQ ID NO: 2419392 - RNA, 19 nt, Artificial Sequence
  Description of Artificial Sequence: Synthetic oligonucleotide
  Sense strand starting at position 1692 of SEQ ID NO: 1886638
gaaugagguuccggaugga

SEQ ID NO: 2419393 - RNA, 19 nt, Artificial Sequence
  Description of Artificial Sequence: Synthetic oligonucleotide
  Antisense strand to SEQ ID NO: 2419392
uccauccggaaccucauuc

SEQ ID NO: 2419394 - RNA, 19 nt, Artificial Sequence
  Description of Artificial Sequence: Synthetic oligonucleotide
  Sense strand starting at position 1695 of SEQ ID NO: 1886638
ugagguuccggauggaagu

SEQ ID NO: 2419395 - RNA, 19 nt, Artificial Sequence
  Description of Artificial Sequence: Synthetic oligonucleotide
  Antisense strand to SEQ ID NO: 2419394
acuuccauccggaaccuca

SEQ ID NO: 2419396 - RNA, 19 nt, Artificial Sequence
  Description of Artificial Sequence: Synthetic oligonucleotide
  Sense strand starting at position 1820 of SEQ ID NO: 1886638
gguugugaaacucgcuguu

SEQ ID NO: 2419397 - RNA, 19 nt, Artificial Sequence
  Description of Artificial Sequence: Synthetic oligonucleotide
  Antisense strand to SEQ ID NO: 2419396
aacagcgaguuucacaacc

SEQ ID NO: 2419398 - RNA, 19 nt, Artificial Sequence
  Description of Artificial Sequence: Synthetic oligonucleotide
  Sense strand starting at position 2247 of SEQ ID NO: 1886638
gguaucagauucuggguga

SEQ ID NO: 2419399 - RNA, 19 nt, Artificial Sequence
  Description of Artificial Sequence: Synthetic oligonucleotide
  Antisense strand to SEQ ID NO: 2419398
ucacccagaaucugauacc

SEQ ID NO: 2419400 - RNA, 19 nt, Artificial Sequence
  Description of Artificial Sequence: Synthetic oligonucleotide
  Sense strand starting at position 2349 of SEQ ID NO: 1886638
cucgaaggcucccugacau

SEQ ID NO: 2419401 - RNA, 19 nt, Artificial Sequence
  Description of Artificial Sequence: Synthetic oligonucleotide
  Antisense strand to SEQ ID NO: 2419400
augucagggagccuucgag

SEQ ID NO: 2419402 - RNA, 19 nt, Artificial Sequence
  Description of Artificial Sequence: Synthetic oligonucleotide
  Sense strand starting at position 2380 of SEQ ID NO: 1886638
gacucugagugggaaagau

SEQ ID NO: 2419403 - RNA, 19 nt, Artificial Sequence
  Description of Artificial Sequence: Synthetic oligonucleotide
  Antisense strand to SEQ ID NO: 2419402
aucuuucccacucagaguc

SEQ ID NO: 2419404 - RNA, 19 nt, Artificial Sequence
  Description of Artificial Sequence: Synthetic oligonucleotide
  Sense strand starting at position 2930 of SEQ ID NO: 1886638
gguugagaguguguucuca

SEQ ID NO: 2419405 - RNA, 19 nt, Artificial Sequence
  Description of Artificial Sequence: Synthetic oligonucleotide
  Antisense strand to SEQ ID NO: 2419404
ugagaacacacucucaacc

SEQ ID NO: 2419406 - RNA, 19 nt, Artificial Sequence
  Description of Artificial Sequence: Synthetic oligonucleotide
  Sense strand starting at position 2932 of SEQ ID NO: 1886638
uugagaguguguucucacu

SEQ ID NO: 2419407 - RNA, 19 nt, Artificial Sequence
  Description of Artificial Sequence: Synthetic oligonucleotide
  Antisense strand to SEQ ID NO: 2419406
agugagaacacacucucaa

SEQ ID NO: 2419408 - RNA, 19 nt, Artificial Sequence
  Description of Artificial Sequence: Synthetic oligonucleotide
  Sense strand starting at position 2934 of SEQ ID NO: 1886638
gagaguguguucucacuuu

SEQ ID NO: 2419409 - RNA, 19 nt, Artificial Sequence
  Description of Artificial Sequence: Synthetic oligonucleotide
  Antisense strand to SEQ ID NO: 2419408
aaagugagaacacacucuc

SEQ ID NO: 2419410 - RNA, 19 nt, Artificial Sequence
  Description of Artificial Sequence: Synthetic oligonucleotide
  Sense strand starting at position 3005 of SEQ ID NO: 1886638
cgagcaagcagauagauaa

SEQ ID NO: 2419411 - RNA, 19 nt, Artificial Sequence
  Description of Artificial Sequence: Synthetic oligonucleotide
  Antisense strand to SEQ ID NO: 2419410
uuaucuaucugcuugcucg

SEQ ID NO: 2419412 - RNA, 19 nt, Artificial Sequence
  Description of Artificial Sequence: Synthetic oligonucleotide
  Sense strand starting at position 3013 of SEQ ID NO: 1886638
cagauagauaacggcgaua

SEQ ID NO: 2419413 - RNA, 19 nt, Artificial Sequence
  Description of Artificial Sequence: Synthetic oligonucleotide
  Antisense strand to SEQ ID NO: 2419412
uaucgccguuaucuaucug

SEQ ID NO: 2419414 - RNA, 19 nt, Artificial Sequence
  Description of Artificial Sequence: Synthetic oligonucleotide
  Sense strand starting at position 3436 of SEQ ID NO: 1886638
agagaagugaagugucacu

SEQ ID NO: 2419415 - RNA, 19 nt, Artificial Sequence
  Description of Artificial Sequence: Synthetic oligonucleotide
  Antisense strand to SEQ ID NO: 2419414
agugacacuucacuucucu

SEQ ID NO: 2419416 - RNA, 19 nt, Artificial Sequence
  Description of Artificial Sequence: Synthetic oligonucleotide
  Sense strand starting at position 3466 of SEQ ID NO: 1886638
ugagcuccuuccucgagaa

SEQ ID NO: 2419417 - RNA, 19 nt, Artificial Sequence
  Description of Artificial Sequence: Synthetic oligonucleotide
  Antisense strand to SEQ ID NO: 2419416
uucucgaggaaggagcuca

SEQ ID NO: 2419418 - RNA, 19 nt, Artificial Sequence
  Description of Artificial Sequence: Synthetic oligonucleotide
  Sense strand starting at position 3559 of SEQ ID NO: 1886638
cggugucggcccuauuuga

SEQ ID NO: 2419419 - RNA, 19 nt, Artificial Sequence
  Description of Artificial Sequence: Synthetic oligonucleotide
  Antisense strand to SEQ ID NO: 2419418
ucaaauagggccgacaccg

SEQ ID NO: 2419420 - RNA, 19 nt, Artificial Sequence
  Description of Artificial Sequence: Synthetic oligonucleotide
  Sense strand starting at position 3680 of SEQ ID NO: 1886638
gggugacuguggcaacuau

SEQ ID NO: 2419421 - RNA, 19 nt, Artificial Sequence
  Description of Artificial Sequence: Synthetic oligonucleotide
  Antisense strand to SEQ ID NO: 2419420
auaguugccacagucaccc

SEQ ID NO: 2419422 - RNA, 19 nt, Artificial Sequence
  Description of Artificial Sequence: Synthetic oligonucleotide
  Sense strand starting at position 3714 of SEQ ID NO: 1886638
gguagacucuuggaucaca

SEQ ID NO: 2419423 - RNA, 19 nt, Artificial Sequence
  Description of Artificial Sequence: Synthetic oligonucleotide
  Antisense strand to SEQ ID NO: 2419422
ugugauccaagagucuacc

SEQ ID NO: 2419424 - RNA, 19 nt, Artificial Sequence
  Description of Artificial Sequence: Synthetic oligonucleotide
  Sense strand starting at position 3735 of SEQ ID NO: 1886638
gacaaauguucuggagcca

SEQ ID NO: 2419425 - RNA, 19 nt, Artificial Sequence
  Description of Artificial Sequence: Synthetic oligonucleotide
  Antisense strand to SEQ ID NO: 2419424
uggcuccagaacauuuguc

SEQ ID NO: 2419426 - RNA, 19 nt, Artificial Sequence
  Description of Artificial Sequence: Synthetic oligonucleotide
  Sense strand starting at position 3786 of SEQ ID NO: 1886638
ggugacaucacugagguca

SEQ ID NO: 2419427 - RNA, 19 nt, Artificial Sequence
  Description of Artificial Sequence: Synthetic oligonucleotide
  Antisense strand to SEQ ID NO: 2419426
ugaccucagugaugucacc

SEQ ID NO: 2419428 - RNA, 19 nt, Artificial Sequence
  Description of Artificial Sequence: Synthetic oligonucleotide
  Sense strand starting at position 267 of SEQ ID NO: 1886639
cuggcuaucccaugggauu

SEQ ID NO: 2419429 - RNA, 19 nt, Artificial Sequence
  Description of Artificial Sequence: Synthetic oligonucleotide
  Antisense strand to SEQ ID NO: 2419428
aaucccaugggauagccag

SEQ ID NO: 2419430 - RNA, 19 nt, Artificial Sequence
  Description of Artificial Sequence: Synthetic oligonucleotide
  Sense strand starting at position 744 of SEQ ID NO: 1886639
ugcggauuuguaugaagca

SEQ ID NO: 2419431 - RNA, 19 nt, Artificial Sequence
  Description of Artificial Sequence: Synthetic oligonucleotide
  Antisense strand to SEQ ID NO: 2419430
ugcuucauacaaauccgca

SEQ ID NO: 2419432 - RNA, 19 nt, Artificial Sequence
  Description of Artificial Sequence: Synthetic oligonucleotide
  Sense strand starting at position 760 of SEQ ID NO: 1886639
gcaauugaccugugacuaa

SEQ ID NO: 2419433 - RNA, 19 nt, Artificial Sequence
  Description of Artificial Sequence: Synthetic oligonucleotide
  Antisense strand to SEQ ID NO: 2419432
uuagucacaggucaauugc

SEQ ID NO: 2419434 - RNA, 19 nt, Artificial Sequence
  Description of Artificial Sequence: Synthetic oligonucleotide
  Sense strand starting at position 957 of SEQ ID NO: 1886639
gguuauaauuagcccaaca

SEQ ID NO: 2419435 - RNA, 19 nt, Artificial Sequence
  Description of Artificial Sequence: Synthetic oligonucleotide
  Antisense strand to SEQ ID NO: 2419434
uguugggcuaauuauaacc

SEQ ID NO: 2419436 - RNA, 19 nt, Artificial Sequence
  Description of Artificial Sequence: Synthetic oligonucleotide
  Sense strand starting at position 992 of SEQ ID NO: 1886639
cuccuagaugccuaguaca

SEQ ID NO: 2419437 - RNA, 19 nt, Artificial Sequence
  Description of Artificial Sequence: Synthetic oligonucleotide
  Antisense strand to SEQ ID NO: 2419436
uguacuaggcaucuaggag

SEQ ID NO: 2419438 - RNA, 19 nt, Artificial Sequence
  Description of Artificial Sequence: Synthetic oligonucleotide
  Sense strand starting at position 1096 of SEQ ID NO: 1886639
agaggaaacugacagagau

SEQ ID NO: 2419439 - RNA, 19 nt, Artificial Sequence
  Description of Artificial Sequence: Synthetic oligonucleotide
  Antisense strand to SEQ ID NO: 2419438
aucucugucaguuuccucu

SEQ ID NO: 2419440 - RNA, 19 nt, Artificial Sequence
  Description of Artificial Sequence: Synthetic oligonucleotide
  Sense strand starting at position 1168 of SEQ ID NO: 1886639
gaacucggauuaucugaau

SEQ ID NO: 2419441 - RNA, 19 nt, Artificial Sequence
  Description of Artificial Sequence: Synthetic oligonucleotide
  Antisense strand to SEQ ID NO: 2419440
auucagauaauccgaguuc

SEQ ID NO: 2419442 - RNA, 19 nt, Artificial Sequence
  Description of Artificial Sequence: Synthetic oligonucleotide
  Sense strand starting at position 1381 of SEQ ID NO: 1886639
uugauuggacugugcagaa

SEQ ID NO: 2419443 - RNA, 19 nt, Artificial Sequence
  Description of Artificial Sequence: Synthetic oligonucleotide
  Antisense strand to SEQ ID NO: 2419442
uucugcacaguccaaucaa

SEQ ID NO: 2419444 - RNA, 19 nt, Artificial Sequence
  Description of Artificial Sequence: Synthetic oligonucleotide
  Sense strand starting at position 1465 of SEQ ID NO: 1886639
caguguuugggccaaauag

SEQ ID NO: 2419445 - RNA, 19 nt, Artificial Sequence
  Description of Artificial Sequence: Synthetic oligonucleotide
  Antisense strand to SEQ ID NO: 2419444
cuauuuggcccaaacacug

SEQ ID NO: 2419446 - RNA, 19 nt, Artificial Sequence
  Description of Artificial Sequence: Synthetic oligonucleotide
  Sense strand starting at position 1646 of SEQ ID NO: 1886639
cuuacuccugcugagaacu

SEQ ID NO: 2419447 - RNA, 19 nt, Artificial Sequence
  Description of Artificial Sequence: Synthetic oligonucleotide
  Antisense strand to SEQ ID NO: 2419446
aguucucagcaggaguaag

SEQ ID NO: 2419448 - RNA, 19 nt, Artificial Sequence
  Description of Artificial Sequence: Synthetic oligonucleotide
  Sense strand starting at position 1837 of SEQ ID NO: 1886639
uuagccagaucauugggaa

SEQ ID NO: 2419449 - RNA, 19 nt, Artificial Sequence
  Description of Artificial Sequence: Synthetic oligonucleotide
  Antisense strand to SEQ ID NO: 2419448
uucccaaugaucuggcuaa

SEQ ID NO: 2419450 - RNA, 19 nt, Artificial Sequence
  Description of Artificial Sequence: Synthetic oligonucleotide
  Sense strand starting at position 1838 of SEQ ID NO: 1886639
uagccagaucauugggaau

SEQ ID NO: 2419451 - RNA, 19 nt, Artificial Sequence
  Description of Artificial Sequence: Synthetic oligonucleotide
  Antisense strand to SEQ ID NO: 2419450
auucccaaugaucuggcua

SEQ ID NO: 2419452 - RNA, 19 nt, Artificial Sequence
  Description of Artificial Sequence: Synthetic oligonucleotide
  Sense strand starting at position 1935 of SEQ ID NO: 1886639
ccaagagauuauccuguuc

SEQ ID NO: 2419453 - RNA, 19 nt, Artificial Sequence
  Description of Artificial Sequence: Synthetic oligonucleotide
  Antisense strand to SEQ ID NO: 2419452
gaacaggauaaucucuugg

SEQ ID NO: 2419454 - RNA, 19 nt, Artificial Sequence
  Description of Artificial Sequence: Synthetic oligonucleotide
  Sense strand starting at position 1940 of SEQ ID NO: 1886639
agauuauccuguucuagaa

SEQ ID NO: 2419455 - RNA, 19 nt, Artificial Sequence
  Description of Artificial Sequence: Synthetic oligonucleotide
  Antisense strand to SEQ ID NO: 2419454
uucuagaacaggauaaucu

SEQ ID NO: 2419456 - RNA, 19 nt, Artificial Sequence
  Description of Artificial Sequence: Synthetic oligonucleotide
  Sense strand starting at position 2039 of SEQ ID NO: 1886639
aaugucacgugauuauuga

SEQ ID NO: 2419457 - RNA, 19 nt, Artificial Sequence
  Description of Artificial Sequence: Synthetic oligonucleotide
  Antisense strand to SEQ ID NO: 2419456
ucaauaaucacgugacauu

SEQ ID NO: 2419458 - RNA, 19 nt, Artificial Sequence
  Description of Artificial Sequence: Synthetic oligonucleotide
  Sense strand starting at position 2196 of SEQ ID NO: 1886639
gucccuaaacuagaaugua

SEQ ID NO: 2419459 - RNA, 19 nt, Artificial Sequence
  Description of Artificial Sequence: Synthetic oligonucleotide
  Antisense strand to SEQ ID NO: 2419458
uacauucuaguuuagggac

SEQ ID NO: 2419460 - RNA, 19 nt, Artificial Sequence
  Description of Artificial Sequence: Synthetic oligonucleotide
  Sense strand starting at position 2204 of SEQ ID NO: 1886639
acuagaauguaaucugcuu

SEQ ID NO: 2419461 - RNA, 19 nt, Artificial Sequence
  Description of Artificial Sequence: Synthetic oligonucleotide
  Antisense strand to SEQ ID NO: 2419460
aagcagauuacauucuagu

SEQ ID NO: 2419462 - RNA, 19 nt, Artificial Sequence
  Description of Artificial Sequence: Synthetic oligonucleotide
  Sense strand starting at position 2282 of SEQ ID NO: 1886639
gguucagcugcuuggauuu

SEQ ID NO: 2419463 - RNA, 19 nt, Artificial Sequence
  Description of Artificial Sequence: Synthetic oligonucleotide
  Antisense strand to SEQ ID NO: 2419462
aaauccaagcagcugaacc

SEQ ID NO: 2419464 - RNA, 19 nt, Artificial Sequence
  Description of Artificial Sequence: Synthetic oligonucleotide
  Sense strand starting at position 2325 of SEQ ID NO: 1886639
gcugaaugaccuuggaagu

SEQ ID NO: 2419465 - RNA, 19 nt, Artificial Sequence
  Description of Artificial Sequence: Synthetic oligonucleotide
  Antisense strand to SEQ ID NO: 2419464
acuuccaaggucauucagc

SEQ ID NO: 2419466 - RNA, 19 nt, Artificial Sequence
  Description of Artificial Sequence: Synthetic oligonucleotide
  Sense strand starting at position 2431 of SEQ ID NO: 1886639
gugggaaucaggugaaauc

SEQ ID NO: 2419467 - RNA, 19 nt, Artificial Sequence
  Description of Artificial Sequence: Synthetic oligonucleotide
  Antisense strand to SEQ ID NO: 2419466
gauuucaccugauucccac

SEQ ID NO: 2419468 - RNA, 19 nt, Artificial Sequence
  Description of Artificial Sequence: Synthetic oligonucleotide
  Sense strand starting at position 2560 of SEQ ID NO: 1886639
ugagauagcaaauguaaag

SEQ ID NO: 2419469 - RNA, 19 nt, Artificial Sequence
  Description of Artificial Sequence: Synthetic oligonucleotide
  Antisense strand to SEQ ID NO: 2419468
cuuuacauuugcuaucuca

SEQ ID NO: 2419470 - RNA, 19 nt, Artificial Sequence
  Description of Artificial Sequence: Synthetic oligonucleotide
  Sense strand starting at position 2592 of SEQ ID NO: 1886639
gugcacccucuauaaagau

SEQ ID NO: 2419471 - RNA, 19 nt, Artificial Sequence
  Description of Artificial Sequence: Synthetic oligonucleotide
  Antisense strand to SEQ ID NO: 2419470
aucuuuauagagggugcac

SEQ ID NO: 2419472 - RNA, 19 nt, Artificial Sequence
  Description of Artificial Sequence: Synthetic oligonucleotide
  Sense strand starting at position 2708 of SEQ ID NO: 1886639
ucccauaagcccuggaauu

SEQ ID NO: 2419473 - RNA, 19 nt, Artificial Sequence
  Description of Artificial Sequence: Synthetic oligonucleotide
  Antisense strand to SEQ ID NO: 2419472
aauuccagggcuuauggga

SEQ ID NO: 2419474 - RNA, 19 nt, Artificial Sequence
  Description of Artificial Sequence: Synthetic oligonucleotide
  Sense strand starting at position 2709 of SEQ ID NO: 1886639
cccauaagcccuggaauua

SEQ ID NO: 2419475 - RNA, 19 nt, Artificial Sequence
  Description of Artificial Sequence: Synthetic oligonucleotide
  Antisense strand to SEQ ID NO: 2419474
uaauuccagggcuuauggg

SEQ ID NO: 2419476 - RNA, 19 nt, Artificial Sequence
  Description of Artificial Sequence: Synthetic oligonucleotide
  Sense strand starting at position 2719 of SEQ ID NO: 1886639
cuggaauuagcauggaucu

SEQ ID NO: 2419477 - RNA, 19 nt, Artificial Sequence
  Description of Artificial Sequence: Synthetic oligonucleotide
  Antisense strand to SEQ ID NO: 2419476
agauccaugcuaauuccag

SEQ ID NO: 2419478 - RNA, 19 nt, Artificial Sequence
  Description of Artificial Sequence: Synthetic oligonucleotide
  Sense strand starting at position 2720 of SEQ ID NO: 1886639
uggaauuagcauggaucua

SEQ ID NO: 2419479 - RNA, 19 nt, Artificial Sequence
  Description of Artificial Sequence: Synthetic oligonucleotide
  Antisense strand to SEQ ID NO: 2419478
uagauccaugcuaauucca

SEQ ID NO: 2419480 - RNA, 19 nt, Artificial Sequence
  Description of Artificial Sequence: Synthetic oligonucleotide
  Sense strand starting at position 2746 of SEQ ID NO: 1886639
ccuagaagucaaugguuga

SEQ ID NO: 2419481 - RNA, 19 nt, Artificial Sequence
  Description of Artificial Sequence: Synthetic oligonucleotide
  Antisense strand to SEQ ID NO: 2419480
ucaaccauugacuucuagg

SEQ ID NO: 2419482 - RNA, 19 nt, Artificial Sequence
  Description of Artificial Sequence: Synthetic oligonucleotide
  Sense strand starting at position 2747 of SEQ ID NO: 1886639
cuagaagucaaugguugaa

SEQ ID NO: 2419483 - RNA, 19 nt, Artificial Sequence
  Description of Artificial Sequence: Synthetic oligonucleotide
  Antisense strand to SEQ ID NO: 2419482
uucaaccauugacuucuag

SEQ ID NO: 2419484 - RNA, 19 nt, Artificial Sequence
  Description of Artificial Sequence: Synthetic oligonucleotide
  Sense strand starting at position 2750 of SEQ ID NO: 1886639
gaagucaaugguugaagga

SEQ ID NO: 2419485 - RNA, 19 nt, Artificial Sequence
  Description of Artificial Sequence: Synthetic oligonucleotide
  Antisense strand to SEQ ID NO: 2419484
uccuucaaccauugacuuc

SEQ ID NO: 2419486 - RNA, 19 nt, Artificial Sequence
  Description of Artificial Sequence: Synthetic oligonucleotide
  Sense strand starting at position 2766 of SEQ ID NO: 1886639
ggaggacagcuccagcuua

SEQ ID NO: 2419487 - RNA, 19 nt, Artificial Sequence
  Description of Artificial Sequence: Synthetic oligonucleotide
  Antisense strand to SEQ ID NO: 2419486
uaagcuggagcuguccucc

SEQ ID NO: 2419488 - RNA, 19 nt, Artificial Sequence
  Description of Artificial Sequence: Synthetic oligonucleotide
  Sense strand starting at position 3025 of SEQ ID NO: 1886639
uuagguacacaguaauuau

SEQ ID NO: 2419489 - RNA, 19 nt, Artificial Sequence
  Description of Artificial Sequence: Synthetic oligonucleotide
  Antisense strand to SEQ ID NO: 2419488
auaauuacuguguaccuaa

SEQ ID NO: 2419490 - RNA, 19 nt, Artificial Sequence
  Description of Artificial Sequence: Synthetic oligonucleotide
  Sense strand starting at position 3028 of SEQ ID NO: 1886639
gguacacaguaauuauaau

SEQ ID NO: 2419491 - RNA, 19 nt, Artificial Sequence
  Description of Artificial Sequence: Synthetic oligonucleotide
  Antisense strand to SEQ ID NO: 2419490
auuauaauuacuguguacc

SEQ ID NO: 2419492 - RNA, 19 nt, Artificial Sequence
  Description of Artificial Sequence: Synthetic oligonucleotide
  Sense strand starting at position 3067 of SEQ ID NO: 1886639
cgaccauccucaguaacaa

SEQ ID NO: 2419493 - RNA, 19 nt, Artificial Sequence
  Description of Artificial Sequence: Synthetic oligonucleotide
  Antisense strand to SEQ ID NO: 2419492
uuguuacugaggauggucg

SEQ ID NO: 2419494 - RNA, 19 nt, Artificial Sequence
  Description of Artificial Sequence: Synthetic oligonucleotide
  Sense strand starting at position 3223 of SEQ ID NO: 1886639
cuugauuaaucugcagaac

SEQ ID NO: 2419495 - RNA, 19 nt, Artificial Sequence
  Description of Artificial Sequence: Synthetic oligonucleotide
  Antisense strand to SEQ ID NO: 2419494
guucugcagauuaaucaag

SEQ ID NO: 2419496 - RNA, 19 nt, Artificial Sequence
  Description of Artificial Sequence: Synthetic oligonucleotide
  Sense strand starting at position 3285 of SEQ ID NO: 1886639
gcgggauuaagagggaaca

SEQ ID NO: 2419497 - RNA, 19 nt, Artificial Sequence
  Description of Artificial Sequence: Synthetic oligonucleotide
  Antisense strand to SEQ ID NO: 2419496
uguucccucuuaaucccgc

SEQ ID NO: 2419498 - RNA, 19 nt, Artificial Sequence
  Description of Artificial Sequence: Synthetic oligonucleotide
  Sense strand starting at position 3666 of SEQ ID NO: 1886639
cuggguuuccugggagaca

SEQ ID NO: 2419499 - RNA, 19 nt, Artificial Sequence
  Description of Artificial Sequence: Synthetic oligonucleotide
  Antisense strand to SEQ ID NO: 2419498
ugucucccaggaaacccag

SEQ ID NO: 2419500 - RNA, 19 nt, Artificial Sequence
  Description of Artificial Sequence: Synthetic oligonucleotide
  Sense strand starting at position 3745 of SEQ ID NO: 1886639
uuggaaucaccugggcaga

SEQ ID NO: 2419501 - RNA, 19 nt, Artificial Sequence
  Description of Artificial Sequence: Synthetic oligonucleotide
  Antisense strand to SEQ ID NO: 2419500
ucugcccaggugauuccaa

SEQ ID NO: 2419502 - RNA, 19 nt, Artificial Sequence
  Description of Artificial Sequence: Synthetic oligonucleotide
  Sense strand starting at position 3746 of SEQ ID NO: 1886639
uggaaucaccugggcagau

SEQ ID NO: 2419503 - RNA, 19 nt, Artificial Sequence
  Description of Artificial Sequence: Synthetic oligonucleotide
  Antisense strand to SEQ ID NO: 2419502
aucugcccaggugauucca

SEQ ID NO: 2419504 - RNA, 19 nt, Artificial Sequence
  Description of Artificial Sequence: Synthetic oligonucleotide
  Sense strand starting at position 3747 of SEQ ID NO: 1886639
ggaaucaccugggcagauu

SEQ ID NO: 2419505 - RNA, 19 nt, Artificial Sequence
  Description of Artificial Sequence: Synthetic oligonucleotide
  Antisense strand to SEQ ID NO: 2419504
aaucugcccaggugauucc

SEQ ID NO: 2419506 - RNA, 19 nt, Artificial Sequence
  Description of Artificial Sequence: Synthetic oligonucleotide
  Sense strand starting at position 3818 of SEQ ID NO: 1886639
ugcugugaccuggauauca

SEQ ID NO: 2419507 - RNA, 19 nt, Artificial Sequence
  Description of Artificial Sequence: Synthetic oligonucleotide
  Antisense strand to SEQ ID NO: 2419506
ugauauccaggucacagca

SEQ ID NO: 2419508 - RNA, 19 nt, Artificial Sequence
  Description of Artificial Sequence: Synthetic oligonucleotide
  Sense strand starting at position 313 of SEQ ID NO: 1886640
aguguucaaugugugaauu

SEQ ID NO: 2419509 - RNA, 19 nt, Artificial Sequence
  Description of Artificial Sequence: Synthetic oligonucleotide
  Antisense strand to SEQ ID NO: 2419508
aauucacacauugaacacu

SEQ ID NO: 2419510 - RNA, 19 nt, Artificial Sequence
  Description of Artificial Sequence: Synthetic oligonucleotide
  Sense strand starting at position 314 of SEQ ID NO: 1886640
guguucaaugugugaauua

SEQ ID NO: 2419511 - RNA, 19 nt, Artificial Sequence
  Description of Artificial Sequence: Synthetic oligonucleotide
  Antisense strand to SEQ ID NO: 2419510
uaauucacacauugaacac

SEQ ID NO: 2419512 - RNA, 19 nt, Artificial Sequence
  Description of Artificial Sequence: Synthetic oligonucleotide
  Sense strand starting at position 376 of SEQ ID NO: 1886640
auggguagauuucauggua

SEQ ID NO: 2419513 - RNA, 19 nt, Artificial Sequence
  Description of Artificial Sequence: Synthetic oligonucleotide
  Antisense strand to SEQ ID NO: 2419512
uaccaugaaaucuacccau

SEQ ID NO: 2419514 - RNA, 19 nt, Artificial Sequence
  Description of Artificial Sequence: Synthetic oligonucleotide
  Sense strand starting at position 419 of SEQ ID NO: 1886640
aaauauggucccuguggaa

SEQ ID NO: 2419515 - RNA, 19 nt, Artificial Sequence
  Description of Artificial Sequence: Synthetic oligonucleotide
  Antisense strand to SEQ ID NO: 2419514
uuccacagggaccauauuu

SEQ ID NO: 2419516 - RNA, 19 nt, Artificial Sequence
  Description of Artificial Sequence: Synthetic oligonucleotide
  Sense strand starting at position 484 of SEQ ID NO: 1886640
acagaaccuucgcuuuacu

SEQ ID NO: 2419517 - RNA, 19 nt, Artificial Sequence
  Description of Artificial Sequence: Synthetic oligonucleotide
  Antisense strand to SEQ ID NO: 2419516
aguaaagcgaagguucugu

SEQ ID NO: 2419518 - RNA, 19 nt, Artificial Sequence
  Description of Artificial Sequence: Synthetic oligonucleotide
  Sense strand starting at position 494 of SEQ ID NO: 1886640
cgcuuuacuuaaguaauac

SEQ ID NO: 2419519 - RNA, 19 nt, Artificial Sequence
  Description of Artificial Sequence: Synthetic oligonucleotide
  Antisense strand to SEQ ID NO: 2419518
guauuacuuaaguaaagcg

SEQ ID NO: 2419520 - RNA, 19 nt, Artificial Sequence
  Description of Artificial Sequence: Synthetic oligonucleotide
  Sense strand starting at position 619 of SEQ ID NO: 1886640
gagggaaagucuccgucau

SEQ ID NO: 2419521 - RNA, 19 nt, Artificial Sequence
  Description of Artificial Sequence: Synthetic oligonucleotide
  Antisense strand to SEQ ID NO: 2419520
augacggagacuuucccuc

SEQ ID NO: 2419522 - RNA, 19 nt, Artificial Sequence
  Description of Artificial Sequence: Synthetic oligonucleotide
  Sense strand starting at position 620 of SEQ ID NO: 1886640
agggaaagucuccgucaug

SEQ ID NO: 2419523 - RNA, 19 nt, Artificial Sequence
  Description of Artificial Sequence: Synthetic oligonucleotide
  Antisense strand to SEQ ID NO: 2419522
caugacggagacuuucccu

SEQ ID NO: 2419524 - RNA, 19 nt, Artificial Sequence
  Description of Artificial Sequence: Synthetic oligonucleotide
  Sense strand starting at position 623 of SEQ ID NO: 1886640
gaaagucuccgucaugguc

SEQ ID NO: 2419525 - RNA, 19 nt, Artificial Sequence
  Description of Artificial Sequence: Synthetic oligonucleotide
  Antisense strand to SEQ ID NO: 2419524
gaccaugacggagacuuuc

SEQ ID NO: 2419526 - RNA, 19 nt, Artificial Sequence
  Description of Artificial Sequence: Synthetic oligonucleotide
  Sense strand starting at position 739 of SEQ ID NO: 1886640
gcugaaauguugccuguaa

SEQ ID NO: 2419527 - RNA, 19 nt, Artificial Sequence
  Description of Artificial Sequence: Synthetic oligonucleotide
  Antisense strand to SEQ ID NO: 2419526
uuacaggcaacauuucagc

SEQ ID NO: 2419528 - RNA, 19 nt, Artificial Sequence
  Description of Artificial Sequence: Synthetic oligonucleotide
  Sense strand starting at position 740 of SEQ ID NO: 1886640
cugaaauguugccuguaau

SEQ ID NO: 2419529 - RNA, 19 nt, Artificial Sequence
  Description of Artificial Sequence: Synthetic oligonucleotide
  Antisense strand to SEQ ID NO: 2419528
auuacaggcaacauuucag

SEQ ID NO: 2419530 - RNA, 19 nt, Artificial Sequence
  Description of Artificial Sequence: Synthetic oligonucleotide
  Sense strand starting at position 741 of SEQ ID NO: 1886640
ugaaauguugccuguaaua

SEQ ID NO: 2419531 - RNA, 19 nt, Artificial Sequence
  Description of Artificial Sequence: Synthetic oligonucleotide
  Antisense strand to SEQ ID NO: 2419530
uauuacaggcaacauuuca

SEQ ID NO: 2419532 - RNA, 19 nt, Artificial Sequence
  Description of Artificial Sequence: Synthetic oligonucleotide
  Sense strand starting at position 753 of SEQ ID NO: 1886640
uguaauaucuacccuggaa

SEQ ID NO: 2419533 - RNA, 19 nt, Artificial Sequence
  Description of Artificial Sequence: Synthetic oligonucleotide
  Antisense strand to SEQ ID NO: 2419532
uuccaggguagauauuaca

SEQ ID NO: 2419534 - RNA, 19 nt, Artificial Sequence
  Description of Artificial Sequence: Synthetic oligonucleotide
  Sense strand starting at position 829 of SEQ ID NO: 1886640
gagguuucuacagaucgug

SEQ ID NO: 2419535 - RNA, 19 nt, Artificial Sequence
  Description of Artificial Sequence: Synthetic oligonucleotide
  Antisense strand to SEQ ID NO: 2419534
cacgaucuguagaaaccuc

SEQ ID NO: 2419536 - RNA, 19 nt, Artificial Sequence
  Description of Artificial Sequence: Synthetic oligonucleotide
  Sense strand starting at position 866 of SEQ ID NO: 1886640
cuuggaucagugugucuca

SEQ ID NO: 2419537 - RNA, 19 nt, Artificial Sequence
  Description of Artificial Sequence: Synthetic oligonucleotide
  Antisense strand to SEQ ID NO: 2419536
ugagacacacugauccaag

SEQ ID NO: 2419538 - RNA, 19 nt, Artificial Sequence
  Description of Artificial Sequence: Synthetic oligonucleotide
  Sense strand starting at position 1240 of SEQ ID NO: 1886640
cgaggcaugcgauggaaua

SEQ ID NO: 2419539 - RNA, 19 nt, Artificial Sequence
  Description of Artificial Sequence: Synthetic oligonucleotide
  Antisense strand to SEQ ID NO: 2419538
uauuccaucgcaugccucg

SEQ ID NO: 2419540 - RNA, 19 nt, Artificial Sequence
  Description of Artificial Sequence: Synthetic oligonucleotide
  Sense strand starting at position 1241 of SEQ ID NO: 1886640
gaggcaugcgauggaauau

SEQ ID NO: 2419541 - RNA, 19 nt, Artificial Sequence
  Description of Artificial Sequence: Synthetic oligonucleotide
  Antisense strand to SEQ ID NO: 2419540
auauuccaucgcaugccuc

SEQ ID NO: 2419542 - RNA, 19 nt, Artificial Sequence
  Description of Artificial Sequence: Synthetic oligonucleotide
  Sense strand starting at position 1242 of SEQ ID NO: 1886640
aggcaugcgauggaauauu

SEQ ID NO: 2419543 - RNA, 19 nt, Artificial Sequence
  Description of Artificial Sequence: Synthetic oligonucleotide
  Antisense strand to SEQ ID NO: 2419542
aauauuccaucgcaugccu

SEQ ID NO: 2419544 - RNA, 19 nt, Artificial Sequence
  Description of Artificial Sequence: Synthetic oligonucleotide
  Sense strand starting at position 1281 of SEQ ID NO: 1886640
gaaugagguucugagaacu

SEQ ID NO: 2419545 - RNA, 19 nt, Artificial Sequence
  Description of Artificial Sequence: Synthetic oligonucleotide
  Antisense strand to SEQ ID NO: 2419544
aguucucagaaccucauuc

SEQ ID NO: 2419546 - RNA, 19 nt, Artificial Sequence
  Description of Artificial Sequence: Synthetic oligonucleotide
  Sense strand starting at position 1397 of SEQ ID NO: 1886640
ugguuccaucuaugggaaa

SEQ ID NO: 2419547 - RNA, 19 nt, Artificial Sequence
  Description of Artificial Sequence: Synthetic oligonucleotide
  Antisense strand to SEQ ID NO: 2419546
uuucccauagauggaacca

SEQ ID NO: 2419548 - RNA, 19 nt, Artificial Sequence
  Description of Artificial Sequence: Synthetic oligonucleotide
  Sense strand starting at position 1399 of SEQ ID NO: 1886640
guuccaucuaugggaaaug

SEQ ID NO: 2419549 - RNA, 19 nt, Artificial Sequence
  Description of Artificial Sequence: Synthetic oligonucleotide
  Antisense strand to SEQ ID NO: 2419548
cauuucccauagauggaac

SEQ ID NO: 2419550 - RNA, 19 nt, Artificial Sequence
  Description of Artificial Sequence: Synthetic oligonucleotide
  Sense strand starting at position 1400 of SEQ ID NO: 1886640
uuccaucuaugggaaaugu

SEQ ID NO: 2419551 - RNA, 19 nt, Artificial Sequence
  Description of Artificial Sequence: Synthetic oligonucleotide
  Antisense strand to SEQ ID NO: 2419550
acauuucccauagauggaa

SEQ ID NO: 2419552 - RNA, 19 nt, Artificial Sequence
  Description of Artificial Sequence: Synthetic oligonucleotide
  Sense strand starting at position 1427 of SEQ ID NO: 1886640
ggcaaauucguggagacaa

SEQ ID NO: 2419553 - RNA, 19 nt, Artificial Sequence
  Description of Artificial Sequence: Synthetic oligonucleotide
  Antisense strand to SEQ ID NO: 2419552
uugucuccacgaauuugcc

SEQ ID NO: 2419554 - RNA, 19 nt, Artificial Sequence
  Description of Artificial Sequence: Synthetic oligonucleotide
  Sense strand starting at position 1606 of SEQ ID NO: 1886640
ggcaaaugcugucuuuacu

SEQ ID NO: 2419555 - RNA, 19 nt, Artificial Sequence
  Description of Artificial Sequence: Synthetic oligonucleotide
  Antisense strand to SEQ ID NO: 2419554
aguaaagacagcauuugcc

SEQ ID NO: 2419556 - RNA, 19 nt, Artificial Sequence
  Description of Artificial Sequence: Synthetic oligonucleotide
  Sense strand starting at position 1897 of SEQ ID NO: 1886640
augaacaugaugugguuua

SEQ ID NO: 2419557 - RNA, 19 nt, Artificial Sequence
  Description of Artificial Sequence: Synthetic oligonucleotide
  Antisense strand to SEQ ID NO: 2419556
uaaaccacaucauguucau

SEQ ID NO: 2419558 - RNA, 19 nt, Artificial Sequence
  Description of Artificial Sequence: Synthetic oligonucleotide
  Sense strand starting at position 1902 of SEQ ID NO: 1886640
caugaugugguuuauauua

SEQ ID NO: 2419559 - RNA, 19 nt, Artificial Sequence
  Description of Artificial Sequence: Synthetic oligonucleotide
  Antisense strand to SEQ ID NO: 2419558
uaauauaaaccacaucaug

SEQ ID NO: 2419560 - RNA, 19 nt, Artificial Sequence
  Description of Artificial Sequence: Synthetic oligonucleotide
  Sense strand starting at position 2032 of SEQ ID NO: 1886640
cggcaaugcauaugaugaa

SEQ ID NO: 2419561 - RNA, 19 nt, Artificial Sequence
  Description of Artificial Sequence: Synthetic oligonucleotide
  Antisense strand to SEQ ID NO: 2419560
uucaucauaugcauugccg

SEQ ID NO: 2419562 - RNA, 19 nt, Artificial Sequence
  Description of Artificial Sequence: Synthetic oligonucleotide
  Sense strand starting at position 2033 of SEQ ID NO: 1886640
ggcaaugcauaugaugaaa

SEQ ID NO: 2419563 - RNA, 19 nt, Artificial Sequence
  Description of Artificial Sequence: Synthetic oligonucleotide
  Antisense strand to SEQ ID NO: 2419562
uuucaucauaugcauugcc

SEQ ID NO: 2419564 - RNA, 19 nt, Artificial Sequence
  Description of Artificial Sequence: Synthetic oligonucleotide
  Sense strand starting at position 2178 of SEQ ID NO: 1886640
accuuucgccauuaaagau

SEQ ID NO: 2419565 - RNA, 19 nt, Artificial Sequence
  Description of Artificial Sequence: Synthetic oligonucleotide
  Antisense strand to SEQ ID NO: 2419564
aucuuuaauggcgaaaggu

SEQ ID NO: 2419566 - RNA, 19 nt, Artificial Sequence
  Description of Artificial Sequence: Synthetic oligonucleotide
  Sense strand starting at position 2217 of SEQ ID NO: 1886640
cggucugugaaccaauaaa

SEQ ID NO: 2419567 - RNA, 19 nt, Artificial Sequence
  Description of Artificial Sequence: Synthetic oligonucleotide
  Antisense strand to SEQ ID NO: 2419566
uuuauugguucacagaccg

SEQ ID NO: 2419568 - RNA, 19 nt, Artificial Sequence
  Description of Artificial Sequence: Synthetic oligonucleotide
  Sense strand starting at position 2679 of SEQ ID NO: 1886640
agcccagauugacuaagau

SEQ ID NO: 2419569 - RNA, 19 nt, Artificial Sequence
  Description of Artificial Sequence: Synthetic oligonucleotide
  Antisense strand to SEQ ID NO: 2419568
aucuuagucaaucugggcu

SEQ ID NO: 2419570 - RNA, 19 nt, Artificial Sequence
  Description of Artificial Sequence: Synthetic oligonucleotide
  Sense strand starting at position 2908 of SEQ ID NO: 1886640
ggaaaugggaguugcuuaa

SEQ ID NO: 2419571 - RNA, 19 nt, Artificial Sequence
  Description of Artificial Sequence: Synthetic oligonucleotide
  Antisense strand to SEQ ID NO: 2419570
uuaagcaacucccauuucc

SEQ ID NO: 2419572 - RNA, 19 nt, Artificial Sequence
  Description of Artificial Sequence: Synthetic oligonucleotide
  Sense strand starting at position 2919 of SEQ ID NO: 1886640
uugcuuaacagguggaaag

SEQ ID NO: 2419573 - RNA, 19 nt, Artificial Sequence
  Description of Artificial Sequence: Synthetic oligonucleotide
  Antisense strand to SEQ ID NO: 2419572
cuuuccaccuguuaagcaa

SEQ ID NO: 2419574 - RNA, 19 nt, Artificial Sequence
  Description of Artificial Sequence: Synthetic oligonucleotide
  Sense strand starting at position 3038 of SEQ ID NO: 1886640
aaugguucaggugguaagu

SEQ ID NO: 2419575 - RNA, 19 nt, Artificial Sequence
  Description of Artificial Sequence: Synthetic oligonucleotide
  Antisense strand to SEQ ID NO: 2419574
acuuaccaccugaaccauu

SEQ ID NO: 2419576 - RNA, 19 nt, Artificial Sequence
  Description of Artificial Sequence: Synthetic oligonucleotide
  Sense strand starting at position 3049 of SEQ ID NO: 1886640
ugguaagucauauguguau

SEQ ID NO: 2419577 - RNA, 19 nt, Artificial Sequence
  Description of Artificial Sequence: Synthetic oligonucleotide
  Antisense strand to SEQ ID NO: 2419576
auacacauaugacuuacca

SEQ ID NO: 2419578 - RNA, 19 nt, Artificial Sequence
  Description of Artificial Sequence: Synthetic oligonucleotide
  Sense strand starting at position 3051 of SEQ ID NO: 1886640
guaagucauauguguauuu

SEQ ID NO: 2419579 - RNA, 19 nt, Artificial Sequence
  Description of Artificial Sequence: Synthetic oligonucleotide
  Antisense strand to SEQ ID NO: 2419578
aaauacacauaugacuuac

SEQ ID NO: 2419580 - RNA, 19 nt, Artificial Sequence
  Description of Artificial Sequence: Synthetic oligonucleotide
  Sense strand starting at position 3113 of SEQ ID NO: 1886640
gccuguaaucuuguugcau

SEQ ID NO: 2419581 - RNA, 19 nt, Artificial Sequence
  Description of Artificial Sequence: Synthetic oligonucleotide
  Antisense strand to SEQ ID NO: 2419580
augcaacaagauuacaggc

SEQ ID NO: 2419582 - RNA, 19 nt, Artificial Sequence
  Description of Artificial Sequence: Synthetic oligonucleotide
  Sense strand starting at position 3685 of SEQ ID NO: 1886640
guucuugucuugcuuccaa

SEQ ID NO: 2419583 - RNA, 19 nt, Artificial Sequence
  Description of Artificial Sequence: Synthetic oligonucleotide
  Antisense strand to SEQ ID NO: 2419582
uuggaagcaagacaagaac

SEQ ID NO: 2419584 - RNA, 19 nt, Artificial Sequence
  Description of Artificial Sequence: Synthetic oligonucleotide
  Sense strand starting at position 3692 of SEQ ID NO: 1886640
ucuugcuuccaagaagaau

SEQ ID NO: 2419585 - RNA, 19 nt, Artificial Sequence
  Description of Artificial Sequence: Synthetic oligonucleotide
  Antisense strand to SEQ ID NO: 2419584
auucuucuuggaagcaaga

SEQ ID NO: 2419586 - RNA, 19 nt, Artificial Sequence
  Description of Artificial Sequence: Synthetic oligonucleotide
  Sense strand starting at position 3874 of SEQ ID NO: 1886640
agaggaaaugcaugccaaa

SEQ ID NO: 2419587 - RNA, 19 nt, Artificial Sequence
  Description of Artificial Sequence: Synthetic oligonucleotide
  Antisense strand to SEQ ID NO: 2419586
uuuggcaugcauuuccucu

SEQ ID NO: 2419588 - RNA, 19 nt, Artificial Sequence
  Description of Artificial Sequence: Synthetic oligonucleotide
  Sense strand starting at position 9 of SEQ ID NO: 1886641
auggaacuaucuguaguuu

SEQ ID NO: 2419589 - RNA, 19 nt, Artificial Sequence
  Description of Artificial Sequence: Synthetic oligonucleotide
  Antisense strand to SEQ ID NO: 2419588
aaacuacagauaguuccau

SEQ ID NO: 2419590 - RNA, 19 nt, Artificial Sequence
  Description of Artificial Sequence: Synthetic oligonucleotide
  Sense strand starting at position 166 of SEQ ID NO: 1886641
uugggacuucggcaguaga

SEQ ID NO: 2419591 - RNA, 19 nt, Artificial Sequence
  Description of Artificial Sequence: Synthetic oligonucleotide
  Antisense strand to SEQ ID NO: 2419590
ucuacugccgaagucccaa

SEQ ID NO: 2419592 - RNA, 19 nt, Artificial Sequence
  Description of Artificial Sequence: Synthetic oligonucleotide
  Sense strand starting at position 169 of SEQ ID NO: 1886641
ggacuucggcaguagauau

SEQ ID NO: 2419593 - RNA, 19 nt, Artificial Sequence
  Description of Artificial Sequence: Synthetic oligonucleotide
  Antisense strand to SEQ ID NO: 2419592
auaucuacugccgaagucc

SEQ ID NO: 2419594 - RNA, 19 nt, Artificial Sequence
  Description of Artificial Sequence: Synthetic oligonucleotide
  Sense strand starting at position 179 of SEQ ID NO: 1886641
aguagauauuuauaagcag

SEQ ID NO: 2419595 - RNA, 19 nt, Artificial Sequence
  Description of Artificial Sequence: Synthetic oligonucleotide
  Antisense strand to SEQ ID NO: 2419594
cugcuuauaaauaucuacu

SEQ ID NO: 2419596 - RNA, 19 nt, Artificial Sequence
  Description of Artificial Sequence: Synthetic oligonucleotide
  Sense strand starting at position 255 of SEQ ID NO: 1886641
ggucuaucaugaguccuau

SEQ ID NO: 2419597 - RNA, 19 nt, Artificial Sequence
  Description of Artificial Sequence: Synthetic oligonucleotide
  Antisense strand to SEQ ID NO: 2419596
auaggacucaugauagacc

SEQ ID NO: 2419598 - RNA, 19 nt, Artificial Sequence
  Description of Artificial Sequence: Synthetic oligonucleotide
  Sense strand starting at position 261 of SEQ ID NO: 1886641
ucaugaguccuaugggauu

SEQ ID NO: 2419599 - RNA, 19 nt, Artificial Sequence
  Description of Artificial Sequence: Synthetic oligonucleotide
  Antisense strand to SEQ ID NO: 2419598
aaucccauaggacucauga

SEQ ID NO: 2419600 - RNA, 19 nt, Artificial Sequence
  Description of Artificial Sequence: Synthetic oligonucleotide
  Sense strand starting at position 284 of SEQ ID NO: 1886641
aaaugcuuagccuacggau

SEQ ID NO: 2419601 - RNA, 19 nt, Artificial Sequence
  Description of Artificial Sequence: Synthetic oligonucleotide
  Antisense strand to SEQ ID NO: 2419600
auccguaggcuaagcauuu

SEQ ID NO: 2419602 - RNA, 19 nt, Artificial Sequence
  Description of Artificial Sequence: Synthetic oligonucleotide
  Sense strand starting at position 336 of SEQ ID NO: 1886641
uuaaaugucccaugaggac

SEQ ID NO: 2419603 - RNA, 19 nt, Artificial Sequence
  Description of Artificial Sequence: Synthetic oligonucleotide
  Antisense strand to SEQ ID NO: 2419602
guccucaugggacauuuaa

SEQ ID NO: 2419604 - RNA, 19 nt, Artificial Sequence
  Description of Artificial Sequence: Synthetic oligonucleotide
  Sense strand starting at position 520 of SEQ ID NO: 1886641
cuggacguguaaucaaauu

SEQ ID NO: 2419605 - RNA, 19 nt, Artificial Sequence
  Description of Artificial Sequence: Synthetic oligonucleotide
  Antisense strand to SEQ ID NO: 2419604
aauuugauuacacguccag

SEQ ID NO: 2419606 - RNA, 19 nt, Artificial Sequence
  Description of Artificial Sequence: Synthetic oligonucleotide
  Sense strand starting at position 579 of SEQ ID NO: 1886641
ugggaaagguuuccuuucu

SEQ ID NO: 2419607 - RNA, 19 nt, Artificial Sequence
  Description of Artificial Sequence: Synthetic oligonucleotide
  Antisense strand to SEQ ID NO: 2419606
agaaaggaaaccuuuccca

SEQ ID NO: 2419608 - RNA, 19 nt, Artificial Sequence
  Description of Artificial Sequence: Synthetic oligonucleotide
  Sense strand starting at position 585 of SEQ ID NO: 1886641
agguuuccuuucucagaca

SEQ ID NO: 2419609 - RNA, 19 nt, Artificial Sequence
  Description of Artificial Sequence: Synthetic oligonucleotide
  Antisense strand to SEQ ID NO: 2419608
ugucugagaaaggaaaccu

SEQ ID NO: 2419610 - RNA, 19 nt, Artificial Sequence
  Description of Artificial Sequence: Synthetic oligonucleotide
  Sense strand starting at position 649 of SEQ ID NO: 1886641
uguucuucuggagagaguu

SEQ ID NO: 2419611 - RNA, 19 nt, Artificial Sequence
  Description of Artificial Sequence: Synthetic oligonucleotide
  Antisense strand to SEQ ID NO: 2419610
aacucucuccagaagaaca

SEQ ID NO: 2419612 - RNA, 19 nt, Artificial Sequence
  Description of Artificial Sequence: Synthetic oligonucleotide
  Sense strand starting at position 665 of SEQ ID NO: 1886641
guugauucuggaggugaug

SEQ ID NO: 2419613 - RNA, 19 nt, Artificial Sequence
  Description of Artificial Sequence: Synthetic oligonucleotide
  Antisense strand to SEQ ID NO: 2419612
caucaccuccagaaucaac

SEQ ID NO: 2419614 - RNA, 19 nt, Artificial Sequence
  Description of Artificial Sequence: Synthetic oligonucleotide
  Sense strand starting at position 674 of SEQ ID NO: 1886641
ggaggugaugccuaauauu

SEQ ID NO: 2419615 - RNA, 19 nt, Artificial Sequence
  Description of Artificial Sequence: Synthetic oligonucleotide
  Antisense strand to SEQ ID NO: 2419614
aauauuaggcaucaccucc

SEQ ID NO: 2419616 - RNA, 19 nt, Artificial Sequence
  Description of Artificial Sequence: Synthetic oligonucleotide
  Sense strand starting at position 685 of SEQ ID NO: 1886641
cuaauauugcuguaucugu

SEQ ID NO: 2419617 - RNA, 19 nt, Artificial Sequence
  Description of Artificial Sequence: Synthetic oligonucleotide
  Antisense strand to SEQ ID NO: 2419616
acagauacagcaauauuag

SEQ ID NO: 2419618 - RNA, 19 nt, Artificial Sequence
  Description of Artificial Sequence: Synthetic oligonucleotide
  Sense strand starting at position 779 of SEQ ID NO: 1886641
accagaucauuggugacau

SEQ ID NO: 2419619 - RNA, 19 nt, Artificial Sequence
  Description of Artificial Sequence: Synthetic oligonucleotide
  Antisense strand to SEQ ID NO: 2419618
augucaccaaugaucuggu

SEQ ID NO: 2419620 - RNA, 19 nt, Artificial Sequence
  Description of Artificial Sequence: Synthetic oligonucleotide
  Sense strand starting at position 789 of SEQ ID NO: 1886641
uggugacaucauugagcua

SEQ ID NO: 2419621 - RNA, 19 nt, Artificial Sequence
  Description of Artificial Sequence: Synthetic oligonucleotide
  Antisense strand to SEQ ID NO: 2419620
uagcucaaugaugucacca

SEQ ID NO: 2419622 - RNA, 19 nt, Artificial Sequence
  Description of Artificial Sequence: Synthetic oligonucleotide
  Sense strand starting at position 930 of SEQ ID NO: 1886641
cugacuaagcccuaguaua

SEQ ID NO: 2419623 - RNA, 19 nt, Artificial Sequence
  Description of Artificial Sequence: Synthetic oligonucleotide
  Antisense strand to SEQ ID NO: 2419622
uauacuagggcuuagucag

SEQ ID NO: 2419624 - RNA, 19 nt, Artificial Sequence
  Description of Artificial Sequence: Synthetic oligonucleotide
  Sense strand starting at position 1359 of SEQ ID NO: 1886641
uguuuaaauccgggaggca

SEQ ID NO: 2419625 - RNA, 19 nt, Artificial Sequence
  Description of Artificial Sequence: Synthetic oligonucleotide
  Antisense strand to SEQ ID NO: 2419624
ugccucccggauuuaaaca

SEQ ID NO: 2419626 - RNA, 19 nt, Artificial Sequence
  Description of Artificial Sequence: Synthetic oligonucleotide
  Sense strand starting at position 1498 of SEQ ID NO: 1886641
uccagaaguuccuugguaa

SEQ ID NO: 2419627 - RNA, 19 nt, Artificial Sequence
  Description of Artificial Sequence: Synthetic oligonucleotide
  Antisense strand to SEQ ID NO: 2419626
uuaccaaggaacuucugga

SEQ ID NO: 2419628 - RNA, 19 nt, Artificial Sequence
  Description of Artificial Sequence: Synthetic oligonucleotide
  Sense strand starting at position 1499 of SEQ ID NO: 1886641
ccagaaguuccuugguaaa

SEQ ID NO: 2419629 - RNA, 19 nt, Artificial Sequence
  Description of Artificial Sequence: Synthetic oligonucleotide
  Antisense strand to SEQ ID NO: 2419628
uuuaccaaggaacuucugg

SEQ ID NO: 2419630 - RNA, 19 nt, Artificial Sequence
  Description of Artificial Sequence: Synthetic oligonucleotide
  Sense strand starting at position 1501 of SEQ ID NO: 1886641
agaaguuccuugguaaacu

SEQ ID NO: 2419631 - RNA, 19 nt, Artificial Sequence
  Description of Artificial Sequence: Synthetic oligonucleotide
  Antisense strand to SEQ ID NO: 2419630
aguuuaccaaggaacuucu

SEQ ID NO: 2419632 - RNA, 19 nt, Artificial Sequence
  Description of Artificial Sequence: Synthetic oligonucleotide
  Sense strand starting at position 1537 of SEQ ID NO: 1886641
cuacgaucccaugauguga

SEQ ID NO: 2419633 - RNA, 19 nt, Artificial Sequence
  Description of Artificial Sequence: Synthetic oligonucleotide
  Antisense strand to SEQ ID NO: 2419632
ucacaucaugggaucguag

SEQ ID NO: 2419634 - RNA, 19 nt, Artificial Sequence
  Description of Artificial Sequence: Synthetic oligonucleotide
  Sense strand starting at position 1561 of SEQ ID NO: 1886641
aucaauguugcagaggcau

SEQ ID NO: 2419635 - RNA, 19 nt, Artificial Sequence
  Description of Artificial Sequence: Synthetic oligonucleotide
  Antisense strand to SEQ ID NO: 2419634
augccucugcaacauugau

SEQ ID NO: 2419636 - RNA, 19 nt, Artificial Sequence
  Description of Artificial Sequence: Synthetic oligonucleotide
  Sense strand starting at position 1823 of SEQ ID NO: 1886641
gaguguucugaggagcaug

SEQ ID NO: 2419637 - RNA, 19 nt, Artificial Sequence
  Description of Artificial Sequence: Synthetic oligonucleotide
  Antisense strand to SEQ ID NO: 2419636
caugcuccucagaacacuc

SEQ ID NO: 2419638 - RNA, 19 nt, Artificial Sequence
  Description of Artificial Sequence: Synthetic oligonucleotide
  Sense strand starting at position 1851 of SEQ ID NO: 1886641
agaugugagacccagcgua

SEQ ID NO: 2419639 - RNA, 19 nt, Artificial Sequence
  Description of Artificial Sequence: Synthetic oligonucleotide
  Antisense strand to SEQ ID NO: 2419638
uacgcugggucucacaucu

SEQ ID NO: 2419640 - RNA, 19 nt, Artificial Sequence
  Description of Artificial Sequence: Synthetic oligonucleotide
  Sense strand starting at position 1867 of SEQ ID NO: 1886641
guacgaaugaaacgguaau

SEQ ID NO: 2419641 - RNA, 19 nt, Artificial Sequence
  Description of Artificial Sequence: Synthetic oligonucleotide
  Antisense strand to SEQ ID NO: 2419640
auuaccguuucauucguac

SEQ ID NO: 2419642 - RNA, 19 nt, Artificial Sequence
  Description of Artificial Sequence: Synthetic oligonucleotide
  Sense strand starting at position 2017 of SEQ ID NO: 1886641
uuaacaucaggugauguua

SEQ ID NO: 2419643 - RNA, 19 nt, Artificial Sequence
  Description of Artificial Sequence: Synthetic oligonucleotide
  Antisense strand to SEQ ID NO: 2419642
uaacaucaccugauguuaa

SEQ ID NO: 2419644 - RNA, 19 nt, Artificial Sequence
  Description of Artificial Sequence: Synthetic oligonucleotide
  Sense strand starting at position 2103 of SEQ ID NO: 1886641
guaucuuaggaauguaauu

SEQ ID NO: 2419645 - RNA, 19 nt, Artificial Sequence
  Description of Artificial Sequence: Synthetic oligonucleotide
  Antisense strand to SEQ ID NO: 2419644
aauuacauuccuaagauac

SEQ ID NO: 2419646 - RNA, 19 nt, Artificial Sequence
  Description of Artificial Sequence: Synthetic oligonucleotide
  Sense strand starting at position 2319 of SEQ ID NO: 1886641
guuagcaggucacuuagau

SEQ ID NO: 2419647 - RNA, 19 nt, Artificial Sequence
  Description of Artificial Sequence: Synthetic oligonucleotide
  Antisense strand to SEQ ID NO: 2419646
aucuaagugaccugcuaac

SEQ ID NO: 2419648 - RNA, 19 nt, Artificial Sequence
  Description of Artificial Sequence: Synthetic oligonucleotide
  Sense strand starting at position 2348 of SEQ ID NO: 1886641
uugguuuacucaccuagca

SEQ ID NO: 2419649 - RNA, 19 nt, Artificial Sequence
  Description of Artificial Sequence: Synthetic oligonucleotide
  Antisense strand to SEQ ID NO: 2419648
ugcuaggugaguaaaccaa

SEQ ID NO: 2419650 - RNA, 19 nt, Artificial Sequence
  Description of Artificial Sequence: Synthetic oligonucleotide
  Sense strand starting at position 2389 of SEQ ID NO: 1886641
cagccugugcuagauuaca

SEQ ID NO: 2419651 - RNA, 19 nt, Artificial Sequence
  Description of Artificial Sequence: Synthetic oligonucleotide
  Antisense strand to SEQ ID NO: 2419650
uguaaucuagcacaggcug

SEQ ID NO: 2419652 - RNA, 19 nt, Artificial Sequence
  Description of Artificial Sequence: Synthetic oligonucleotide
  Sense strand starting at position 2418 of SEQ ID NO: 1886641
uuggcuaaggcuggaauua

SEQ ID NO: 2419653 - RNA, 19 nt, Artificial Sequence
  Description of Artificial Sequence: Synthetic oligonucleotide
  Antisense strand to SEQ ID NO: 2419652
uaauuccagccuuagccaa

SEQ ID NO: 2419654 - RNA, 19 nt, Artificial Sequence
  Description of Artificial Sequence: Synthetic oligonucleotide
  Sense strand starting at position 2480 of SEQ ID NO: 1886641
gcacuacguaaaugagacu

SEQ ID NO: 2419655 - RNA, 19 nt, Artificial Sequence
  Description of Artificial Sequence: Synthetic oligonucleotide
  Antisense strand to SEQ ID NO: 2419654
agucucauuuacguagugc

SEQ ID NO: 2419656 - RNA, 19 nt, Artificial Sequence
  Description of Artificial Sequence: Synthetic oligonucleotide
  Sense strand starting at position 2969 of SEQ ID NO: 1886641
agcuaagugcuuuacagac

SEQ ID NO: 2419657 - RNA, 19 nt, Artificial Sequence
  Description of Artificial Sequence: Synthetic oligonucleotide
  Antisense strand to SEQ ID NO: 2419656
gucuguaaagcacuuagcu

SEQ ID NO: 2419658 - RNA, 19 nt, Artificial Sequence
  Description of Artificial Sequence: Synthetic oligonucleotide
  Sense strand starting at position 3364 of SEQ ID NO: 1886641
ucucaauaauucuugaggu

SEQ ID NO: 2419659 - RNA, 19 nt, Artificial Sequence
  Description of Artificial Sequence: Synthetic oligonucleotide
  Antisense strand to SEQ ID NO: 2419658
accucaagaauuauugaga

SEQ ID NO: 2419660 - RNA, 19 nt, Artificial Sequence
  Description of Artificial Sequence: Synthetic oligonucleotide
  Sense strand starting at position 3423 of SEQ ID NO: 1886641
ucugucuugcagcaaacau

SEQ ID NO: 2419661 - RNA, 19 nt, Artificial Sequence
  Description of Artificial Sequence: Synthetic oligonucleotide
  Antisense strand to SEQ ID NO: 2419660
auguuugcugcaagacaga

SEQ ID NO: 2419662 - RNA, 19 nt, Artificial Sequence
  Description of Artificial Sequence: Synthetic oligonucleotide
  Sense strand starting at position 3525 of SEQ ID NO: 1886641
aauuauuggccagguggga

SEQ ID NO: 2419663 - RNA, 19 nt, Artificial Sequence
  Description of Artificial Sequence: Synthetic oligonucleotide
  Antisense strand to SEQ ID NO: 2419662
ucccaccuggccaauaauu

SEQ ID NO: 2419664 - RNA, 19 nt, Artificial Sequence
  Description of Artificial Sequence: Synthetic oligonucleotide
  Sense strand starting at position 3542 of SEQ ID NO: 1886641
gauggcucaugucuauaaa

SEQ ID NO: 2419665 - RNA, 19 nt, Artificial Sequence
  Description of Artificial Sequence: Synthetic oligonucleotide
  Antisense strand to SEQ ID NO: 2419664
uuuauagacaugagccauc

SEQ ID NO: 2419666 - RNA, 19 nt, Artificial Sequence
  Description of Artificial Sequence: Synthetic oligonucleotide
  Sense strand starting at position 3543 of SEQ ID NO: 1886641
auggcucaugucuauaaau

SEQ ID NO: 2419667 - RNA, 19 nt, Artificial Sequence
  Description of Artificial Sequence: Synthetic oligonucleotide
  Antisense strand to SEQ ID NO: 2419666
auuuauagacaugagccau

SEQ ID NO: 2419668 - RNA, 19 nt, Artificial Sequence
  Description of Artificial Sequence: Synthetic oligonucleotide
  Sense strand starting at position 113 of SEQ ID NO: 1886642
ggaggccuguccuaggaga

SEQ ID NO: 2419669 - RNA, 19 nt, Artificial Sequence
  Description of Artificial Sequence: Synthetic oligonucleotide
  Antisense strand to SEQ ID NO: 2419668
ucuccuaggacaggccucc

SEQ ID NO: 2419670 - RNA, 19 nt, Artificial Sequence
  Description of Artificial Sequence: Synthetic oligonucleotide
  Sense strand starting at position 155 of SEQ ID NO: 1886642
cgugggugcucggaagaga

SEQ ID NO: 2419671 - RNA, 19 nt, Artificial Sequence
  Description of Artificial Sequence: Synthetic oligonucleotide
  Antisense strand to SEQ ID NO: 2419670
ucucuuccgagcacccacg

SEQ ID NO: 2419672 - RNA, 19 nt, Artificial Sequence
  Description of Artificial Sequence: Synthetic oligonucleotide
  Sense strand starting at position 195 of SEQ ID NO: 1886642
agcaaacgucccugucaca

SEQ ID NO: 2419673 - RNA, 19 nt, Artificial Sequence
  Description of Artificial Sequence: Synthetic oligonucleotide
  Antisense strand to SEQ ID NO: 2419672
ugugacagggacguuugcu

SEQ ID NO: 2419674 - RNA, 19 nt, Artificial Sequence
  Description of Artificial Sequence: Synthetic oligonucleotide
  Sense strand starting at position 279 of SEQ ID NO: 1886642
cagagaugguaucgcugaa

SEQ ID NO: 2419675 - RNA, 19 nt, Artificial Sequence
  Description of Artificial Sequence: Synthetic oligonucleotide
  Antisense strand to SEQ ID NO: 2419674
uucagcgauaccaucucug

SEQ ID NO: 2419676 - RNA, 19 nt, Artificial Sequence
  Description of Artificial Sequence: Synthetic oligonucleotide
  Sense strand starting at position 460 of SEQ ID NO: 1886642
caccgaugcucuucccgaa

SEQ ID NO: 2419677 - RNA, 19 nt, Artificial Sequence
  Description of Artificial Sequence: Synthetic oligonucleotide
  Antisense strand to SEQ ID NO: 2419676
uucgggaagagcaucggug

SEQ ID NO: 2419678 - RNA, 19 nt, Artificial Sequence
  Description of Artificial Sequence: Synthetic oligonucleotide
  Sense strand starting at position 463 of SEQ ID NO: 1886642
cgaugcucuucccgaaauc

SEQ ID NO: 2419679 - RNA, 19 nt, Artificial Sequence
  Description of Artificial Sequence: Synthetic oligonucleotide
  Antisense strand to SEQ ID NO: 2419678
gauuucgggaagagcaucg

SEQ ID NO: 2419680 - RNA, 19 nt, Artificial Sequence
  Description of Artificial Sequence: Synthetic oligonucleotide
  Sense strand starting at position 527 of SEQ ID NO: 1886642
cuguguuccguccacucau

SEQ ID NO: 2419681 - RNA, 19 nt, Artificial Sequence
  Description of Artificial Sequence: Synthetic oligonucleotide
  Antisense strand to SEQ ID NO: 2419680
augaguggacggaacacag

SEQ ID NO: 2419682 - RNA, 19 nt, Artificial Sequence
  Description of Artificial Sequence: Synthetic oligonucleotide
  Sense strand starting at position 550 of SEQ ID NO: 1886642
gacagaugcuaguacagga

SEQ ID NO: 2419683 - RNA, 19 nt, Artificial Sequence
  Description of Artificial Sequence: Synthetic oligonucleotide
  Antisense strand to SEQ ID NO: 2419682
uccuguacuagcaucuguc

SEQ ID NO: 2419684 - RNA, 19 nt, Artificial Sequence
  Description of Artificial Sequence: Synthetic oligonucleotide
  Sense strand starting at position 673 of SEQ ID NO: 1886642
agacuagccugcgcaagau

SEQ ID NO: 2419685 - RNA, 19 nt, Artificial Sequence
  Description of Artificial Sequence: Synthetic oligonucleotide
  Antisense strand to SEQ ID NO: 2419684
aucuugcgcaggcuagucu

SEQ ID NO: 2419686 - RNA, 19 nt, Artificial Sequence
  Description of Artificial Sequence: Synthetic oligonucleotide
  Sense strand starting at position 1277 of SEQ ID NO: 1886642
cuggcucccugucugaaua

SEQ ID NO: 2419687 - RNA, 19 nt, Artificial Sequence
  Description of Artificial Sequence: Synthetic oligonucleotide
  Antisense strand to SEQ ID NO: 2419686
uauucagacagggagccag

SEQ ID NO: 2419688 - RNA, 19 nt, Artificial Sequence
  Description of Artificial Sequence: Synthetic oligonucleotide
  Sense strand starting at position 1278 of SEQ ID NO: 1886642
uggcucccugucugaauaa

SEQ ID NO: 2419689 - RNA, 19 nt, Artificial Sequence
  Description of Artificial Sequence: Synthetic oligonucleotide
  Antisense strand to SEQ ID NO: 2419688
uuauucagacagggagcca

SEQ ID NO: 2419690 - RNA, 19 nt, Artificial Sequence
  Description of Artificial Sequence: Synthetic oligonucleotide
  Sense strand starting at position 1524 of SEQ ID NO: 1886642
guuucaggugcucgcgaau

SEQ ID NO: 2419691 - RNA, 19 nt, Artificial Sequence
  Description of Artificial Sequence: Synthetic oligonucleotide
  Antisense strand to SEQ ID NO: 2419690
auucgcgagcaccugaaac

SEQ ID NO: 2419692 - RNA, 19 nt, Artificial Sequence
  Description of Artificial Sequence: Synthetic oligonucleotide
  Sense strand starting at position 1594 of SEQ ID NO: 1886642
aagaguggccgugacucau

SEQ ID NO: 2419693 - RNA, 19 nt, Artificial Sequence
  Description of Artificial Sequence: Synthetic oligonucleotide
  Antisense strand to SEQ ID NO: 2419692
augagucacggccacucuu

SEQ ID NO: 2419694 - RNA, 19 nt, Artificial Sequence
  Description of Artificial Sequence: Synthetic oligonucleotide
  Sense strand starting at position 1604 of SEQ ID NO: 1886642
gugacucaugacugccaca

SEQ ID NO: 2419695 - RNA, 19 nt, Artificial Sequence
  Description of Artificial Sequence: Synthetic oligonucleotide
  Antisense strand to SEQ ID NO: 2419694
uguggcagucaugagucac

SEQ ID NO: 2419696 - RNA, 19 nt, Artificial Sequence
  Description of Artificial Sequence: Synthetic oligonucleotide
  Sense strand starting at position 2304 of SEQ ID NO: 1886642
cucacugucucgcuaacua

SEQ ID NO: 2419697 - RNA, 19 nt, Artificial Sequence
  Description of Artificial Sequence: Synthetic oligonucleotide
  Antisense strand to SEQ ID NO: 2419696
uaguuagcgagacagugag

SEQ ID NO: 2419698 - RNA, 19 nt, Artificial Sequence
  Description of Artificial Sequence: Synthetic oligonucleotide
  Sense strand starting at position 2312 of SEQ ID NO: 1886642
cucgcuaacuaaucaugua

SEQ ID NO: 2419699 - RNA, 19 nt, Artificial Sequence
  Description of Artificial Sequence: Synthetic oligonucleotide
  Antisense strand to SEQ ID NO: 2419698
uacaugauuaguuagcgag

SEQ ID NO: 2419700 - RNA, 19 nt, Artificial Sequence
  Description of Artificial Sequence: Synthetic oligonucleotide
  Sense strand starting at position 2408 of SEQ ID NO: 1886642
gcccuacaucuccgucaau

SEQ ID NO: 2419701 - RNA, 19 nt, Artificial Sequence
  Description of Artificial Sequence: Synthetic oligonucleotide
  Antisense strand to SEQ ID NO: 2419700
auugacggagauguagggc

SEQ ID NO: 2419702 - RNA, 19 nt, Artificial Sequence
  Description of Artificial Sequence: Synthetic oligonucleotide
  Sense strand starting at position 2806 of SEQ ID NO: 1886642
ucccaucgucccuacaaga

SEQ ID NO: 2419703 - RNA, 19 nt, Artificial Sequence
  Description of Artificial Sequence: Synthetic oligonucleotide
  Antisense strand to SEQ ID NO: 2419702
ucuuguagggacgauggga

SEQ ID NO: 2419704 - RNA, 19 nt, Artificial Sequence
  Description of Artificial Sequence: Synthetic oligonucleotide
  Sense strand starting at position 2893 of SEQ ID NO: 1886642
aggacagcauucuccagaa

SEQ ID NO: 2419705 - RNA, 19 nt, Artificial Sequence
  Description of Artificial Sequence: Synthetic oligonucleotide
  Antisense strand to SEQ ID NO: 2419704
uucuggagaaugcuguccu

SEQ ID NO: 2419706 - RNA, 19 nt, Artificial Sequence
  Description of Artificial Sequence: Synthetic oligonucleotide
  Sense strand starting at position 3360 of SEQ ID NO: 1886642
cugggcugcugccuagaaa

SEQ ID NO: 2419707 - RNA, 19 nt, Artificial Sequence
  Description of Artificial Sequence: Synthetic oligonucleotide
  Antisense strand to SEQ ID NO: 2419706
uuucuaggcagcagcccag

SEQ ID NO: 2419708 - RNA, 19 nt, Artificial Sequence
  Description of Artificial Sequence: Synthetic oligonucleotide
  Sense strand starting at position 3467 of SEQ ID NO: 1886642
gccagagucccgggaaauc

SEQ ID NO: 2419709 - RNA, 19 nt, Artificial Sequence
  Description of Artificial Sequence: Synthetic oligonucleotide
  Antisense strand to SEQ ID NO: 2419708
gauuucccgggacucuggc

SEQ ID NO: 2419710 - RNA, 19 nt, Artificial Sequence
  Description of Artificial Sequence: Synthetic oligonucleotide
  Sense strand starting at position 3507 of SEQ ID NO: 1886642
uuagaagcuguccgagcuu

SEQ ID NO: 2419711 - RNA, 19 nt, Artificial Sequence
  Description of Artificial Sequence: Synthetic oligonucleotide
  Antisense strand to SEQ ID NO: 2419710
aagcucggacagcuucuaa

SEQ ID NO: 2419712 - RNA, 19 nt, Artificial Sequence
  Description of Artificial Sequence: Synthetic oligonucleotide
  Sense strand starting at position 3925 of SEQ ID NO: 1886642
ggcggcuuugcuucucuaa

SEQ ID NO: 2419713 - RNA, 19 nt, Artificial Sequence
  Description of Artificial Sequence: Synthetic oligonucleotide
  Antisense strand to SEQ ID NO: 2419712
uuagagaagcaaagccgcc

SEQ ID NO: 2419714 - RNA, 19 nt, Artificial Sequence
  Description of Artificial Sequence: Synthetic oligonucleotide
  Sense strand starting at position 3928 of SEQ ID NO: 1886642
ggcuuugcuucucuaaggu

SEQ ID NO: 2419715 - RNA, 19 nt, Artificial Sequence
  Description of Artificial Sequence: Synthetic oligonucleotide
  Antisense strand to SEQ ID NO: 2419714
accuuagagaagcaaagcc

SEQ ID NO: 2419716 - RNA, 19 nt, Artificial Sequence
  Description of Artificial Sequence: Synthetic oligonucleotide
  Sense strand starting at position 158 of SEQ ID NO: 1886643
guggcuuccuguccauaag

SEQ ID NO: 2419717 - RNA, 19 nt, Artificial Sequence
  Description of Artificial Sequence: Synthetic oligonucleotide
  Antisense strand to SEQ ID NO: 2419716
cuuauggacaggaagccac

SEQ ID NO: 2419718 - RNA, 19 nt, Artificial Sequence
  Description of Artificial Sequence: Synthetic oligonucleotide
  Sense strand starting at position 264 of SEQ ID NO: 1886643
cugaucguguuguggguaa

SEQ ID NO: 2419719 - RNA, 19 nt, Artificial Sequence
  Description of Artificial Sequence: Synthetic oligonucleotide
  Antisense strand to SEQ ID NO: 2419718
uuacccacaacacgaucag

SEQ ID NO: 2419720 - RNA, 19 nt, Artificial Sequence
  Description of Artificial Sequence: Synthetic oligonucleotide
  Sense strand starting at position 266 of SEQ ID NO: 1886643
gaucguguuguggguaaac

SEQ ID NO: 2419721 - RNA, 19 nt, Artificial Sequence
  Description of Artificial Sequence: Synthetic oligonucleotide
  Antisense strand to SEQ ID NO: 2419720
guuuacccacaacacgauc

SEQ ID NO: 2419722 - RNA, 19 nt, Artificial Sequence
  Description of Artificial Sequence: Synthetic oligonucleotide
  Sense strand starting at position 268 of SEQ ID NO: 1886643
ucguguuguggguaaaccu

SEQ ID NO: 2419723 - RNA, 19 nt, Artificial Sequence
  Description of Artificial Sequence: Synthetic oligonucleotide
  Antisense strand to SEQ ID NO: 2419722
agguuuacccacaacacga

SEQ ID NO: 2419724 - RNA, 19 nt, Artificial Sequence
  Description of Artificial Sequence: Synthetic oligonucleotide
  Sense strand starting at position 277 of SEQ ID NO: 1886643
ggguaaaccugacacacau

SEQ ID NO: 2419725 - RNA, 19 nt, Artificial Sequence
  Description of Artificial Sequence: Synthetic oligonucleotide
  Antisense strand to SEQ ID NO: 2419724
augugugucagguuuaccc

SEQ ID NO: 2419726 - RNA, 19 nt, Artificial Sequence
  Description of Artificial Sequence: Synthetic oligonucleotide
  Sense strand starting at position 287 of SEQ ID NO: 1886643
gacacacauuuggguaaau

SEQ ID NO: 2419727 - RNA, 19 nt, Artificial Sequence
  Description of Artificial Sequence: Synthetic oligonucleotide
  Antisense strand to SEQ ID NO: 2419726
auuuacccaaauguguguc

SEQ ID NO: 2419728 - RNA, 19 nt, Artificial Sequence
  Description of Artificial Sequence: Synthetic oligonucleotide
  Sense strand starting at position 299 of SEQ ID NO: 1886643
gguaaaucgaguugcacau

SEQ ID NO: 2419729 - RNA, 19 nt, Artificial Sequence
  Description of Artificial Sequence: Synthetic oligonucleotide
  Antisense strand to SEQ ID NO: 2419728
augugcaacucgauuuacc

SEQ ID NO: 2419730 - RNA, 19 nt, Artificial Sequence
  Description of Artificial Sequence: Synthetic oligonucleotide
  Sense strand starting at position 301 of SEQ ID NO: 1886643
uaaaucgaguugcacauau

SEQ ID NO: 2419731 - RNA, 19 nt, Artificial Sequence
  Description of Artificial Sequence: Synthetic oligonucleotide
  Antisense strand to SEQ ID NO: 2419730
auaugugcaacucgauuua

SEQ ID NO: 2419732 - RNA, 19 nt, Artificial Sequence
  Description of Artificial Sequence: Synthetic oligonucleotide
  Sense strand starting at position 303 of SEQ ID NO: 1886643
aaucgaguugcacauauua

SEQ ID NO: 2419733 - RNA, 19 nt, Artificial Sequence
  Description of Artificial Sequence: Synthetic oligonucleotide
  Antisense strand to SEQ ID NO: 2419732
uaauaugugcaacucgauu

SEQ ID NO: 2419734 - RNA, 19 nt, Artificial Sequence
  Description of Artificial Sequence: Synthetic oligonucleotide
  Sense strand starting at position 570 of SEQ ID NO: 1886643
uuccuuauaggaugcauga

SEQ ID NO: 2419735 - RNA, 19 nt, Artificial Sequence
  Description of Artificial Sequence: Synthetic oligonucleotide
  Antisense strand to SEQ ID NO: 2419734
ucaugcauccuauaaggaa

SEQ ID NO: 2419736 - RNA, 19 nt, Artificial Sequence
  Description of Artificial Sequence: Synthetic oligonucleotide
  Sense strand starting at position 668 of SEQ ID NO: 1886643
uuauaauagucagaaugug

SEQ ID NO: 2419737 - RNA, 19 nt, Artificial Sequence
  Description of Artificial Sequence: Synthetic oligonucleotide
  Antisense strand to SEQ ID NO: 2419736
cacauucugacuauuauaa

SEQ ID NO: 2419738 - RNA, 19 nt, Artificial Sequence
  Description of Artificial Sequence: Synthetic oligonucleotide
  Sense strand starting at position 728 of SEQ ID NO: 1886643
ucaugagucuaggauuuau

SEQ ID NO: 2419739 - RNA, 19 nt, Artificial Sequence
  Description of Artificial Sequence: Synthetic oligonucleotide
  Antisense strand to SEQ ID NO: 2419738
auaaauccuagacucauga

SEQ ID NO: 2419740 - RNA, 19 nt, Artificial Sequence
  Description of Artificial Sequence: Synthetic oligonucleotide
  Sense strand starting at position 799 of SEQ ID NO: 1886643
ggccgucuagcuuauguga

SEQ ID NO: 2419741 - RNA, 19 nt, Artificial Sequence
  Description of Artificial Sequence: Synthetic oligonucleotide
  Antisense strand to SEQ ID NO: 2419740
ucacauaagcuagacggcc

SEQ ID NO: 2419742 - RNA, 19 nt, Artificial Sequence
  Description of Artificial Sequence: Synthetic oligonucleotide
  Sense strand starting at position 801 of SEQ ID NO: 1886643
ccgucuagcuuaugugaag

SEQ ID NO: 2419743 - RNA, 19 nt, Artificial Sequence
  Description of Artificial Sequence: Synthetic oligonucleotide
  Antisense strand to SEQ ID NO: 2419742
cuucacauaagcuagacgg

SEQ ID NO: 2419744 - RNA, 19 nt, Artificial Sequence
  Description of Artificial Sequence: Synthetic oligonucleotide
  Sense strand starting at position 889 of SEQ ID NO: 1886643
ugccacaaagguugagaau

SEQ ID NO: 2419745 - RNA, 19 nt, Artificial Sequence
  Description of Artificial Sequence: Synthetic oligonucleotide
  Antisense strand to SEQ ID NO: 2419744
auucucaaccuuuguggca

SEQ ID NO: 2419746 - RNA, 19 nt, Artificial Sequence
  Description of Artificial Sequence: Synthetic oligonucleotide
  Sense strand starting at position 892 of SEQ ID NO: 1886643
cacaaagguugagaaucua

SEQ ID NO: 2419747 - RNA, 19 nt, Artificial Sequence
  Description of Artificial Sequence: Synthetic oligonucleotide
  Antisense strand to SEQ ID NO: 2419746
uagauucucaaccuuugug

SEQ ID NO: 2419748 - RNA, 19 nt, Artificial Sequence
  Description of Artificial Sequence: Synthetic oligonucleotide
  Sense strand starting at position 898 of SEQ ID NO: 1886643
gguugagaaucuagggaga

SEQ ID NO: 2419749 - RNA, 19 nt, Artificial Sequence
  Description of Artificial Sequence: Synthetic oligonucleotide
  Antisense strand to SEQ ID NO: 2419748
ucucccuagauucucaacc

SEQ ID NO: 2419750 - RNA, 19 nt, Artificial Sequence
  Description of Artificial Sequence: Synthetic oligonucleotide
  Sense strand starting at position 900 of SEQ ID NO: 1886643
uugagaaucuagggagaac

SEQ ID NO: 2419751 - RNA, 19 nt, Artificial Sequence
  Description of Artificial Sequence: Synthetic oligonucleotide
  Antisense strand to SEQ ID NO: 2419750
guucucccuagauucucaa

SEQ ID NO: 2419752 - RNA, 19 nt, Artificial Sequence
  Description of Artificial Sequence: Synthetic oligonucleotide
  Sense strand starting at position 1202 of SEQ ID NO: 1886643
gucggaaucuuccuuaaca

SEQ ID NO: 2419753 - RNA, 19 nt, Artificial Sequence
  Description of Artificial Sequence: Synthetic oligonucleotide
  Antisense strand to SEQ ID NO: 2419752
uguuaaggaagauuccgac

SEQ ID NO: 2419754 - RNA, 19 nt, Artificial Sequence
  Description of Artificial Sequence: Synthetic oligonucleotide
  Sense strand starting at position 1203 of SEQ ID NO: 1886643
ucggaaucuuccuuaacag

SEQ ID NO: 2419755 - RNA, 19 nt, Artificial Sequence
  Description of Artificial Sequence: Synthetic oligonucleotide
  Antisense strand to SEQ ID NO: 2419754
cuguuaaggaagauuccga

SEQ ID NO: 2419756 - RNA, 19 nt, Artificial Sequence
  Description of Artificial Sequence: Synthetic oligonucleotide
  Sense strand starting at position 1734 of SEQ ID NO: 1886643
cccagagguuuggugacuu

SEQ ID NO: 2419757 - RNA, 19 nt, Artificial Sequence
  Description of Artificial Sequence: Synthetic oligonucleotide
  Antisense strand to SEQ ID NO: 2419756
aagucaccaaaccucuggg

SEQ ID NO: 2419758 - RNA, 19 nt, Artificial Sequence
  Description of Artificial Sequence: Synthetic oligonucleotide
  Sense strand starting at position 1745 of SEQ ID NO: 1886643
ggugacuugugccaagcua

SEQ ID NO: 2419759 - RNA, 19 nt, Artificial Sequence
  Description of Artificial Sequence: Synthetic oligonucleotide
  Antisense strand to SEQ ID NO: 2419758
uagcuuggcacaagucacc

SEQ ID NO: 2419760 - RNA, 19 nt, Artificial Sequence
  Description of Artificial Sequence: Synthetic oligonucleotide
  Sense strand starting at position 1799 of SEQ ID NO: 1886643
cgacuuuggauccaucagu

SEQ ID NO: 2419761 - RNA, 19 nt, Artificial Sequence
  Description of Artificial Sequence: Synthetic oligonucleotide
  Antisense strand to SEQ ID NO: 2419760
acugauggauccaaagucg

SEQ ID NO: 2419762 - RNA, 19 nt, Artificial Sequence
  Description of Artificial Sequence: Synthetic oligonucleotide
  Sense strand starting at position 1808 of SEQ ID NO: 1886643
auccaucagugccuuuauu

SEQ ID NO: 2419763 - RNA, 19 nt, Artificial Sequence
  Description of Artificial Sequence: Synthetic oligonucleotide
  Antisense strand to SEQ ID NO: 2419762
aauaaaggcacugauggau

SEQ ID NO: 2419764 - RNA, 19 nt, Artificial Sequence
  Description of Artificial Sequence: Synthetic oligonucleotide
  Sense strand starting at position 3544 of SEQ ID NO: 1886643
ugaaguuggccucgagcua

SEQ ID NO: 2419765 - RNA, 19 nt, Artificial Sequence
  Description of Artificial Sequence: Synthetic oligonucleotide
  Antisense strand to SEQ ID NO: 2419764
uagcucgaggccaacuuca

SEQ ID NO: 2419766 - RNA, 19 nt, Artificial Sequence
  Description of Artificial Sequence: Synthetic oligonucleotide
  Sense strand starting at position 3558 of SEQ ID NO: 1886643
agcuacuugucacuggcaa

SEQ ID NO: 2419767 - RNA, 19 nt, Artificial Sequence
  Description of Artificial Sequence: Synthetic oligonucleotide
  Antisense strand to SEQ ID NO: 2419766
uugccagugacaaguagcu

SEQ ID NO: 2419768 - RNA, 19 nt, Artificial Sequence
  Description of Artificial Sequence: Synthetic oligonucleotide
  Sense strand starting at position 3559 of SEQ ID NO: 1886643
gcuacuugucacuggcaag

SEQ ID NO: 2419769 - RNA, 19 nt, Artificial Sequence
  Description of Artificial Sequence: Synthetic oligonucleotide
  Antisense strand to SEQ ID NO: 2419768
cuugccagugacaaguagc

SEQ ID NO: 2419770 - RNA, 19 nt, Artificial Sequence
  Description of Artificial Sequence: Synthetic oligonucleotide
  Sense strand starting at position 3582 of SEQ ID NO: 1886643
aaggauggcuuccagauaa

SEQ ID NO: 2419771 - RNA, 19 nt, Artificial Sequence
  Description of Artificial Sequence: Synthetic oligonucleotide
  Antisense strand to SEQ ID NO: 2419770
uuaucuggaagccauccuu

SEQ ID NO: 2419772 - RNA, 19 nt, Artificial Sequence
  Description of Artificial Sequence: Synthetic oligonucleotide
  Sense strand starting at position 3618 of SEQ ID NO: 1886643
ugugauuaacccugucaga

SEQ ID NO: 2419773 - RNA, 19 nt, Artificial Sequence
  Description of Artificial Sequence: Synthetic oligonucleotide
  Antisense strand to SEQ ID NO: 2419772
ucugacaggguuaaucaca

SEQ ID NO: 2419774 - RNA, 19 nt, Artificial Sequence
  Description of Artificial Sequence: Synthetic oligonucleotide
  Sense strand starting at position 3621 of SEQ ID NO: 1886643
gauuaacccugucagagaa

SEQ ID NO: 2419775 - RNA, 19 nt, Artificial Sequence
  Description of Artificial Sequence: Synthetic oligonucleotide
  Antisense strand to SEQ ID NO: 2419774
uucucugacaggguuaauc

SEQ ID NO: 2419776 - RNA, 19 nt, Artificial Sequence
  Description of Artificial Sequence: Synthetic oligonucleotide
  Sense strand starting at position 3939 of SEQ ID NO: 1886643
ggaagagguucuagaguug

SEQ ID NO: 2419777 - RNA, 19 nt, Artificial Sequence
  Description of Artificial Sequence: Synthetic oligonucleotide
  Antisense strand to SEQ ID NO: 2419776
caacucuagaaccucuucc

SEQ ID NO: 2419778 - RNA, 19 nt, Artificial Sequence
  Description of Artificial Sequence: Synthetic oligonucleotide
  Sense strand starting at position 49 of SEQ ID NO: 1886644
uugggacauccgugagcau

SEQ ID NO: 2419779 - RNA, 19 nt, Artificial Sequence
  Description of Artificial Sequence: Synthetic oligonucleotide
  Antisense strand to SEQ ID NO: 2419778
augcucacggaugucccaa

SEQ ID NO: 2419780 - RNA, 19 nt, Artificial Sequence
  Description of Artificial Sequence: Synthetic oligonucleotide
  Sense strand starting at position 50 of SEQ ID NO: 1886644
ugggacauccgugagcauu

SEQ ID NO: 2419781 - RNA, 19 nt, Artificial Sequence
  Description of Artificial Sequence: Synthetic oligonucleotide
  Antisense strand to SEQ ID NO: 2419780
aaugcucacggauguccca

SEQ ID NO: 2419782 - RNA, 19 nt, Artificial Sequence
  Description of Artificial Sequence: Synthetic oligonucleotide
  Sense strand starting at position 52 of SEQ ID NO: 1886644
ggacauccgugagcauuau

SEQ ID NO: 2419783 - RNA, 19 nt, Artificial Sequence
  Description of Artificial Sequence: Synthetic oligonucleotide
  Antisense strand to SEQ ID NO: 2419782
auaaugcucacggaugucc

SEQ ID NO: 2419784 - RNA, 19 nt, Artificial Sequence
  Description of Artificial Sequence: Synthetic oligonucleotide
  Sense strand starting at position 53 of SEQ ID NO: 1886644
gacauccgugagcauuauu

SEQ ID NO: 2419785 - RNA, 19 nt, Artificial Sequence
  Description of Artificial Sequence: Synthetic oligonucleotide
  Antisense strand to SEQ ID NO: 2419784
aauaaugcucacggauguc

SEQ ID NO: 2419786 - RNA, 19 nt, Artificial Sequence
  Description of Artificial Sequence: Synthetic oligonucleotide
  Sense strand starting at position 63 of SEQ ID NO: 1886644
agcauuauuucuccauggu

SEQ ID NO: 2419787 - RNA, 19 nt, Artificial Sequence
  Description of Artificial Sequence: Synthetic oligonucleotide
  Antisense strand to SEQ ID NO: 2419786
accauggagaaauaaugcu

SEQ ID NO: 2419788 - RNA, 19 nt, Artificial Sequence
  Description of Artificial Sequence: Synthetic oligonucleotide
  Sense strand starting at position 521 of SEQ ID NO: 1886644
gagggucacucagaggaga

SEQ ID NO: 2419789 - RNA, 19 nt, Artificial Sequence
  Description of Artificial Sequence: Synthetic oligonucleotide
  Antisense strand to SEQ ID NO: 2419788
ucuccucugagugacccuc

SEQ ID NO: 2419790 - RNA, 19 nt, Artificial Sequence
  Description of Artificial Sequence: Synthetic oligonucleotide
  Sense strand starting at position 626 of SEQ ID NO: 1886644
gguguuaaaucuuuggaau

SEQ ID NO: 2419791 - RNA, 19 nt, Artificial Sequence
  Description of Artificial Sequence: Synthetic oligonucleotide
  Antisense strand to SEQ ID NO: 2419790
auuccaaagauuuaacacc

SEQ ID NO: 2419792 - RNA, 19 nt, Artificial Sequence
  Description of Artificial Sequence: Synthetic oligonucleotide
  Sense strand starting at position 627 of SEQ ID NO: 1886644
guguuaaaucuuuggaaug

SEQ ID NO: 2419793 - RNA, 19 nt, Artificial Sequence
  Description of Artificial Sequence: Synthetic oligonucleotide
  Antisense strand to SEQ ID NO: 2419792
cauuccaaagauuuaacac

SEQ ID NO: 2419794 - RNA, 19 nt, Artificial Sequence
  Description of Artificial Sequence: Synthetic oligonucleotide
  Sense strand starting at position 699 of SEQ ID NO: 1886644
ccaaguucuuucucauugu

SEQ ID NO: 2419795 - RNA, 19 nt, Artificial Sequence
  Description of Artificial Sequence: Synthetic oligonucleotide
  Antisense strand to SEQ ID NO: 2419794
acaaugagaaagaacuugg

SEQ ID NO: 2419796 - RNA, 19 nt, Artificial Sequence
  Description of Artificial Sequence: Synthetic oligonucleotide
  Sense strand starting at position 717 of SEQ ID NO: 1886644
uugcauugucuugagaggu

SEQ ID NO: 2419797 - RNA, 19 nt, Artificial Sequence
  Description of Artificial Sequence: Synthetic oligonucleotide
  Antisense strand to SEQ ID NO: 2419796
accucucaagacaaugcaa

SEQ ID NO: 2419798 - RNA, 19 nt, Artificial Sequence
  Description of Artificial Sequence: Synthetic oligonucleotide
  Sense strand starting at position 721 of SEQ ID NO: 1886644
auugucuugagaggugaga

SEQ ID NO: 2419799 - RNA, 19 nt, Artificial Sequence
  Description of Artificial Sequence: Synthetic oligonucleotide
  Antisense strand to SEQ ID NO: 2419798
ucucaccucucaagacaau

SEQ ID NO: 2419800 - RNA, 19 nt, Artificial Sequence
  Description of Artificial Sequence: Synthetic oligonucleotide
  Sense strand starting at position 723 of SEQ ID NO: 1886644
ugucuugagaggugagaaa

SEQ ID NO: 2419801 - RNA, 19 nt, Artificial Sequence
  Description of Artificial Sequence: Synthetic oligonucleotide
  Antisense strand to SEQ ID NO: 2419800
uuucucaccucucaagaca

SEQ ID NO: 2419802 - RNA, 19 nt, Artificial Sequence
  Description of Artificial Sequence: Synthetic oligonucleotide
  Sense strand starting at position 819 of SEQ ID NO: 1886644
ccuuucuuacuggaagcua

SEQ ID NO: 2419803 - RNA, 19 nt, Artificial Sequence
  Description of Artificial Sequence: Synthetic oligonucleotide
  Antisense strand to SEQ ID NO: 2419802
uagcuuccaguaagaaagg

SEQ ID NO: 2419804 - RNA, 19 nt, Artificial Sequence
  Description of Artificial Sequence: Synthetic oligonucleotide
  Sense strand starting at position 885 of SEQ ID NO: 1886644
gcuaccuuccaguaagaaa

SEQ ID NO: 2419805 - RNA, 19 nt, Artificial Sequence
  Description of Artificial Sequence: Synthetic oligonucleotide
  Antisense strand to SEQ ID NO: 2419804
uuucuuacuggaagguagc

SEQ ID NO: 2419806 - RNA, 19 nt, Artificial Sequence
  Description of Artificial Sequence: Synthetic oligonucleotide
  Sense strand starting at position 1054 of SEQ ID NO: 1886644
gcucuuaucuugccugaag

SEQ ID NO: 2419807 - RNA, 19 nt, Artificial Sequence
  Description of Artificial Sequence: Synthetic oligonucleotide
  Antisense strand to SEQ ID NO: 2419806
cuucaggcaagauaagagc

SEQ ID NO: 2419808 - RNA, 19 nt, Artificial Sequence
  Description of Artificial Sequence: Synthetic oligonucleotide
  Sense strand starting at position 1227 of SEQ ID NO: 1886644
ucaugacacugucuaugua

SEQ ID NO: 2419809 - RNA, 19 nt, Artificial Sequence
  Description of Artificial Sequence: Synthetic oligonucleotide
  Antisense strand to SEQ ID NO: 2419808
uacauagacagugucauga

SEQ ID NO: 2419810 - RNA, 19 nt, Artificial Sequence
  Description of Artificial Sequence: Synthetic oligonucleotide
  Sense strand starting at position 1331 of SEQ ID NO: 1886644
gagggauucuaauaacaug

SEQ ID NO: 2419811 - RNA, 19 nt, Artificial Sequence
  Description of Artificial Sequence: Synthetic oligonucleotide
  Antisense strand to SEQ ID NO: 2419810
cauguuauuagaaucccuc

SEQ ID NO: 2419812 - RNA, 19 nt, Artificial Sequence
  Description of Artificial Sequence: Synthetic oligonucleotide
  Sense strand starting at position 1505 of SEQ ID NO: 1886644
ucugccuuccuugaaggau

SEQ ID NO: 2419813 - RNA, 19 nt, Artificial Sequence
  Description of Artificial Sequence: Synthetic oligonucleotide
  Antisense strand to SEQ ID NO: 2419812
auccuucaaggaaggcaga

SEQ ID NO: 2419814 - RNA, 19 nt, Artificial Sequence
  Description of Artificial Sequence: Synthetic oligonucleotide
  Sense strand starting at position 1541 of SEQ ID NO: 1886644
gucugcaagaggcauugau

SEQ ID NO: 2419815 - RNA, 19 nt, Artificial Sequence
  Description of Artificial Sequence: Synthetic oligonucleotide
  Antisense strand to SEQ ID NO: 2419814
aucaaugccucuugcagac

SEQ ID NO: 2419816 - RNA, 19 nt, Artificial Sequence
  Description of Artificial Sequence: Synthetic oligonucleotide
  Sense strand starting at position 2109 of SEQ ID NO: 1886644
agaacuucgugugucaaug

SEQ ID NO: 2419817 - RNA, 19 nt, Artificial Sequence
  Description of Artificial Sequence: Synthetic oligonucleotide
  Antisense strand to SEQ ID NO: 2419816
cauugacacacgaaguucu

SEQ ID NO: 2419818 - RNA, 19 nt, Artificial Sequence
  Description of Artificial Sequence: Synthetic oligonucleotide
  Sense strand starting at position 2115 of SEQ ID NO: 1886644
ucgugugucaauggaaaug

SEQ ID NO: 2419819 - RNA, 19 nt, Artificial Sequence
  Description of Artificial Sequence: Synthetic oligonucleotide
  Antisense strand to SEQ ID NO: 2419818
cauuuccauugacacacga

SEQ ID NO: 2419820 - RNA, 19 nt, Artificial Sequence
  Description of Artificial Sequence: Synthetic oligonucleotide
  Sense strand starting at position 2125 of SEQ ID NO: 1886644
auggaaauguucuuuaugu

SEQ ID NO: 2419821 - RNA, 19 nt, Artificial Sequence
  Description of Artificial Sequence: Synthetic oligonucleotide
  Antisense strand to SEQ ID NO: 2419820
acauaaagaacauuuccau

SEQ ID NO: 2419822 - RNA, 19 nt, Artificial Sequence
  Description of Artificial Sequence: Synthetic oligonucleotide
  Sense strand starting at position 2126 of SEQ ID NO: 1886644
uggaaauguucuuuaugug

SEQ ID NO: 2419823 - RNA, 19 nt, Artificial Sequence
  Description of Artificial Sequence: Synthetic oligonucleotide
  Antisense strand to SEQ ID NO: 2419822
cacauaaagaacauuucca

SEQ ID NO: 2419824 - RNA, 19 nt, Artificial Sequence
  Description of Artificial Sequence: Synthetic oligonucleotide
  Sense strand starting at position 2127 of SEQ ID NO: 1886644
ggaaauguucuuuaugugc

SEQ ID NO: 2419825 - RNA, 19 nt, Artificial Sequence
  Description of Artificial Sequence: Synthetic oligonucleotide
  Antisense strand to SEQ ID NO: 2419824
gcacauaaagaacauuucc

SEQ ID NO: 2419826 - RNA, 19 nt, Artificial Sequence
  Description of Artificial Sequence: Synthetic oligonucleotide
  Sense strand starting at position 2138 of SEQ ID NO: 1886644
uuaugugcgcuguccaaca

SEQ ID NO: 2419827 - RNA, 19 nt, Artificial Sequence
  Description of Artificial Sequence: Synthetic oligonucleotide
  Antisense strand to SEQ ID NO: 2419826
uguuggacagcgcacauaa

SEQ ID NO: 2419828 - RNA, 19 nt, Artificial Sequence
  Description of Artificial Sequence: Synthetic oligonucleotide
  Sense strand starting at position 2467 of SEQ ID NO: 1886644
caguauguuguaugugaau

SEQ ID NO: 2419829 - RNA, 19 nt, Artificial Sequence
  Description of Artificial Sequence: Synthetic oligonucleotide
  Antisense strand to SEQ ID NO: 2419828
auucacauacaacauacug

SEQ ID NO: 2419830 - RNA, 19 nt, Artificial Sequence
  Description of Artificial Sequence: Synthetic oligonucleotide
  Sense strand starting at position 2469 of SEQ ID NO: 1886644
guauguuguaugugaauca

SEQ ID NO: 2419831 - RNA, 19 nt, Artificial Sequence
  Description of Artificial Sequence: Synthetic oligonucleotide
  Antisense strand to SEQ ID NO: 2419830
ugauucacauacaacauac

SEQ ID NO: 2419832 - RNA, 19 nt, Artificial Sequence
  Description of Artificial Sequence: Synthetic oligonucleotide
  Sense strand starting at position 2560 of SEQ ID NO: 1886644
ugaagaaagcccugaguac

SEQ ID NO: 2419833 - RNA, 19 nt, Artificial Sequence
  Description of Artificial Sequence: Synthetic oligonucleotide
  Antisense strand to SEQ ID NO: 2419832
guacucagggcuuucuuca

SEQ ID NO: 2419834 - RNA, 19 nt, Artificial Sequence
  Description of Artificial Sequence: Synthetic oligonucleotide
  Sense strand starting at position 2630 of SEQ ID NO: 1886644
cucgcuagcccuguuuaua

SEQ ID NO: 2419835 - RNA, 19 nt, Artificial Sequence
  Description of Artificial Sequence: Synthetic oligonucleotide
  Antisense strand to SEQ ID NO: 2419834
uauaaacagggcuagcgag

SEQ ID NO: 2419836 - RNA, 19 nt, Artificial Sequence
  Description of Artificial Sequence: Synthetic oligonucleotide
  Sense strand starting at position 2631 of SEQ ID NO: 1886644
ucgcuagcccuguuuauag

SEQ ID NO: 2419837 - RNA, 19 nt, Artificial Sequence
  Description of Artificial Sequence: Synthetic oligonucleotide
  Antisense strand to SEQ ID NO: 2419836
cuauaaacagggcuagcga

SEQ ID NO: 2419838 - RNA, 19 nt, Artificial Sequence
  Description of Artificial Sequence: Synthetic oligonucleotide
  Sense strand starting at position 2633 of SEQ ID NO: 1886644
gcuagcccuguuuauagaa

SEQ ID NO: 2419839 - RNA, 19 nt, Artificial Sequence
  Description of Artificial Sequence: Synthetic oligonucleotide
  Antisense strand to SEQ ID NO: 2419838
uucuauaaacagggcuagc

SEQ ID NO: 2419840 - RNA, 19 nt, Artificial Sequence
  Description of Artificial Sequence: Synthetic oligonucleotide
  Sense strand starting at position 2640 of SEQ ID NO: 1886644
cuguuuauagaaugagcca

SEQ ID NO: 2419841 - RNA, 19 nt, Artificial Sequence
  Description of Artificial Sequence: Synthetic oligonucleotide
  Antisense strand to SEQ ID NO: 2419840
uggcucauucuauaaacag

SEQ ID NO: 2419842 - RNA, 19 nt, Artificial Sequence
  Description of Artificial Sequence: Synthetic oligonucleotide
  Sense strand starting at position 3044 of SEQ ID NO: 1886644
gcggcagcucuguccugaa

SEQ ID NO: 2419843 - RNA, 19 nt, Artificial Sequence
  Description of Artificial Sequence: Synthetic oligonucleotide
  Antisense strand to SEQ ID NO: 2419842
uucaggacagagcugccgc

SEQ ID NO: 2419844 - RNA, 19 nt, Artificial Sequence
  Description of Artificial Sequence: Synthetic oligonucleotide
  Sense strand starting at position 3423 of SEQ ID NO: 1886644
gccuauugccuuuggaaga

SEQ ID NO: 2419845 - RNA, 19 nt, Artificial Sequence
  Description of Artificial Sequence: Synthetic oligonucleotide
  Antisense strand to SEQ ID NO: 2419844
ucuuccaaaggcaauaggc

SEQ ID NO: 2419846 - RNA, 19 nt, Artificial Sequence
  Description of Artificial Sequence: Synthetic oligonucleotide
  Sense strand starting at position 3766 of SEQ ID NO: 1886644
gccauuauuuccguaauca

SEQ ID NO: 2419847 - RNA, 19 nt, Artificial Sequence
  Description of Artificial Sequence: Synthetic oligonucleotide
  Antisense strand to SEQ ID NO: 2419846
ugauuacggaaauaauggc

SEQ ID NO: 2419848 - RNA, 19 nt, Artificial Sequence
  Description of Artificial Sequence: Synthetic oligonucleotide
  Sense strand starting at position 3776 of SEQ ID NO: 1886644
ccguaaucauuuguuuaug

SEQ ID NO: 2419849 - RNA, 19 nt, Artificial Sequence
  Description of Artificial Sequence: Synthetic oligonucleotide
  Antisense strand to SEQ ID NO: 2419848
cauaaacaaaugauuacgg

SEQ ID NO: 2419850 - RNA, 19 nt, Artificial Sequence
  Description of Artificial Sequence: Synthetic oligonucleotide
  Sense strand starting at position 3863 of SEQ ID NO: 1886644
ccucaaagcucugugacua

SEQ ID NO: 2419851 - RNA, 19 nt, Artificial Sequence
  Description of Artificial Sequence: Synthetic oligonucleotide
  Antisense strand to SEQ ID NO: 2419850
uagucacagagcuuugagg

SEQ ID NO: 2419852 - RNA, 19 nt, Artificial Sequence
  Description of Artificial Sequence: Synthetic oligonucleotide
  Sense strand starting at position 3864 of SEQ ID NO: 1886644
cucaaagcucugugacuac

SEQ ID NO: 2419853 - RNA, 19 nt, Artificial Sequence
  Description of Artificial Sequence: Synthetic oligonucleotide
  Antisense strand to SEQ ID NO: 2419852
guagucacagagcuuugag

SEQ ID NO: 2419854 - RNA, 19 nt, Artificial Sequence
  Description of Artificial Sequence: Synthetic oligonucleotide
  Sense strand starting at position 3898 of SEQ ID NO: 1886644
guaggacaaucucuggcua

SEQ ID NO: 2419855 - RNA, 19 nt, Artificial Sequence
  Description of Artificial Sequence: Synthetic oligonucleotide
  Antisense strand to SEQ ID NO: 2419854
uagccagagauuguccuac

SEQ ID NO: 2419856 - RNA, 19 nt, Artificial Sequence
  Description of Artificial Sequence: Synthetic oligonucleotide
  Sense strand starting at position 3933 of SEQ ID NO: 1886644
gccacugaacccugugauu

SEQ ID NO: 2419857 - RNA, 19 nt, Artificial Sequence
  Description of Artificial Sequence: Synthetic oligonucleotide
  Antisense strand to SEQ ID NO: 2419856
aaucacaggguucaguggc

SEQ ID NO: 2419858 - RNA, 19 nt, Artificial Sequence
  Description of Artificial Sequence: Synthetic oligonucleotide
  Sense strand starting at position 284 of SEQ ID NO: 1886645
uggcuucucugacuggaau

SEQ ID NO: 2419859 - RNA, 19 nt, Artificial Sequence
  Description of Artificial Sequence: Synthetic oligonucleotide
  Antisense strand to SEQ ID NO: 2419858
auuccagucagagaagcca

SEQ ID NO: 2419860 - RNA, 19 nt, Artificial Sequence
  Description of Artificial Sequence: Synthetic oligonucleotide
  Sense strand starting at position 285 of SEQ ID NO: 1886645
ggcuucucugacuggaaua

SEQ ID NO: 2419861 - RNA, 19 nt, Artificial Sequence
  Description of Artificial Sequence: Synthetic oligonucleotide
  Antisense strand to SEQ ID NO: 2419860
uauuccagucagagaagcc

SEQ ID NO: 2419862 - RNA, 19 nt, Artificial Sequence
  Description of Artificial Sequence: Synthetic oligonucleotide
  Sense strand starting at position 286 of SEQ ID NO: 1886645
gcuucucugacuggaauag

SEQ ID NO: 2419863 - RNA, 19 nt, Artificial Sequence
  Description of Artificial Sequence: Synthetic oligonucleotide
  Antisense strand to SEQ ID NO: 2419862
cuauuccagucagagaagc

SEQ ID NO: 2419864 - RNA, 19 nt, Artificial Sequence
  Description of Artificial Sequence: Synthetic oligonucleotide
  Sense strand starting at position 349 of SEQ ID NO: 1886645
acaggucuggaacgugaaa

SEQ ID NO: 2419865 - RNA, 19 nt, Artificial Sequence
  Description of Artificial Sequence: Synthetic oligonucleotide
  Antisense strand to SEQ ID NO: 2419864
uuucacguuccagaccugu

SEQ ID NO: 2419866 - RNA, 19 nt, Artificial Sequence
  Description of Artificial Sequence: Synthetic oligonucleotide
  Sense strand starting at position 502 of SEQ ID NO: 1886645
ggccaaaguggugauggua

SEQ ID NO: 2419867 - RNA, 19 nt, Artificial Sequence
  Description of Artificial Sequence: Synthetic oligonucleotide
  Antisense strand to SEQ ID NO: 2419866
uaccaucaccacuuuggcc

SEQ ID NO: 2419868 - RNA, 19 nt, Artificial Sequence
  Description of Artificial Sequence: Synthetic oligonucleotide
  Sense strand starting at position 505 of SEQ ID NO: 1886645
caaaguggugaugguaaga

SEQ ID NO: 2419869 - RNA, 19 nt, Artificial Sequence
  Description of Artificial Sequence: Synthetic oligonucleotide
  Antisense strand to SEQ ID NO: 2419868
ucuuaccaucaccacuuug

SEQ ID NO: 2419870 - RNA, 19 nt, Artificial Sequence
  Description of Artificial Sequence: Synthetic oligonucleotide
  Sense strand starting at position 577 of SEQ ID NO: 1886645
caacgacauccuuggagaa

SEQ ID NO: 2419871 - RNA, 19 nt, Artificial Sequence
  Description of Artificial Sequence: Synthetic oligonucleotide
  Antisense strand to SEQ ID NO: 2419870
uucuccaaggaugucguug

SEQ ID NO: 2419872 - RNA, 19 nt, Artificial Sequence
  Description of Artificial Sequence: Synthetic oligonucleotide
  Sense strand starting at position 804 of SEQ ID NO: 1886645
aaacauguuccagggcaga

SEQ ID NO: 2419873 - RNA, 19 nt, Artificial Sequence
  Description of Artificial Sequence: Synthetic oligonucleotide
  Antisense strand to SEQ ID NO: 2419872
ucugcccuggaacauguuu

SEQ ID NO: 2419874 - RNA, 19 nt, Artificial Sequence
  Description of Artificial Sequence: Synthetic oligonucleotide
  Sense strand starting at position 892 of SEQ ID NO: 1886645
gucaucuuauaagcuagaa

SEQ ID NO: 2419875 - RNA, 19 nt, Artificial Sequence
  Description of Artificial Sequence: Synthetic oligonucleotide
  Antisense strand to SEQ ID NO: 2419874
uucuagcuuauaagaugac

SEQ ID NO: 2419876 - RNA, 19 nt, Artificial Sequence
  Description of Artificial Sequence: Synthetic oligonucleotide
  Sense strand starting at position 970 of SEQ ID NO: 1886645
uuaagcaaguacucuagaa

SEQ ID NO: 2419877 - RNA, 19 nt, Artificial Sequence
  Description of Artificial Sequence: Synthetic oligonucleotide
  Antisense strand to SEQ ID NO: 2419876
uucuagaguacuugcuuaa

SEQ ID NO: 2419878 - RNA, 19 nt, Artificial Sequence
  Description of Artificial Sequence: Synthetic oligonucleotide
  Sense strand starting at position 974 of SEQ ID NO: 1886645
gcaaguacucuagaaauua

SEQ ID NO: 2419879 - RNA, 19 nt, Artificial Sequence
  Description of Artificial Sequence: Synthetic oligonucleotide
  Antisense strand to SEQ ID NO: 2419878
uaauuucuagaguacuugc

SEQ ID NO: 2419880 - RNA, 19 nt, Artificial Sequence
  Description of Artificial Sequence: Synthetic oligonucleotide
  Sense strand starting at position 1114 of SEQ ID NO: 1886645
gggaaagcuuaagcugaga

SEQ ID NO: 2419881 - RNA, 19 nt, Artificial Sequence
  Description of Artificial Sequence: Synthetic oligonucleotide
  Antisense strand to SEQ ID NO: 2419880
ucucagcuuaagcuuuccc

SEQ ID NO: 2419882 - RNA, 19 nt, Artificial Sequence
  Description of Artificial Sequence: Synthetic oligonucleotide
  Sense strand starting at position 1127 of SEQ ID NO: 1886645
cugagauuguuucuauuaa

SEQ ID NO: 2419883 - RNA, 19 nt, Artificial Sequence
  Description of Artificial Sequence: Synthetic oligonucleotide
  Antisense strand to SEQ ID NO: 2419882
uuaauagaaacaaucucag

SEQ ID NO: 2419884 - RNA, 19 nt, Artificial Sequence
  Description of Artificial Sequence: Synthetic oligonucleotide
  Sense strand starting at position 1155 of SEQ ID NO: 1886645
gagaaugggcccuggaauu

SEQ ID NO: 2419885 - RNA, 19 nt, Artificial Sequence
  Description of Artificial Sequence: Synthetic oligonucleotide
  Antisense strand to SEQ ID NO: 2419884
aauuccagggcccauucuc

SEQ ID NO: 2419886 - RNA, 19 nt, Artificial Sequence
  Description of Artificial Sequence: Synthetic oligonucleotide
  Sense strand starting at position 1369 of SEQ ID NO: 1886645
cccaguauccaugaguuuc

SEQ ID NO: 2419887 - RNA, 19 nt, Artificial Sequence
  Description of Artificial Sequence: Synthetic oligonucleotide
  Antisense strand to SEQ ID NO: 2419886
gaaacucauggauacuggg

SEQ ID NO: 2419888 - RNA, 19 nt, Artificial Sequence
  Description of Artificial Sequence: Synthetic oligonucleotide
  Sense strand starting at position 1503 of SEQ ID NO: 1886645
aagugugcacaguaaauaa

SEQ ID NO: 2419889 - RNA, 19 nt, Artificial Sequence
  Description of Artificial Sequence: Synthetic oligonucleotide
  Antisense strand to SEQ ID NO: 2419888
uuauuuacugugcacacuu

SEQ ID NO: 2419890 - RNA, 19 nt, Artificial Sequence
  Description of Artificial Sequence: Synthetic oligonucleotide
  Sense strand starting at position 1517 of SEQ ID NO: 1886645
aauaaaguagcucagaguu

SEQ ID NO: 2419891 - RNA, 19 nt, Artificial Sequence
  Description of Artificial Sequence: Synthetic oligonucleotide
  Antisense strand to SEQ ID NO: 2419890
aacucugagcuacuuuauu

SEQ ID NO: 2419892 - RNA, 19 nt, Artificial Sequence
  Description of Artificial Sequence: Synthetic oligonucleotide
  Sense strand starting at position 1572 of SEQ ID NO: 1886645
uucucaacuggaugacuaa

SEQ ID NO: 2419893 - RNA, 19 nt, Artificial Sequence
  Description of Artificial Sequence: Synthetic oligonucleotide
  Antisense strand to SEQ ID NO: 2419892
uuagucauccaguugagaa

SEQ ID NO: 2419894 - RNA, 19 nt, Artificial Sequence
  Description of Artificial Sequence: Synthetic oligonucleotide
  Sense strand starting at position 1628 of SEQ ID NO: 1886645
gagcaaagugcugaugaug

SEQ ID NO: 2419895 - RNA, 19 nt, Artificial Sequence
  Description of Artificial Sequence: Synthetic oligonucleotide
  Antisense strand to SEQ ID NO: 2419894
caucaucagcacuuugcuc

SEQ ID NO: 2419896 - RNA, 19 nt, Artificial Sequence
  Description of Artificial Sequence: Synthetic oligonucleotide
  Sense strand starting at position 1859 of SEQ ID NO: 1886645
agcaaauguuaagucacau

SEQ ID NO: 2419897 - RNA, 19 nt, Artificial Sequence
  Description of Artificial Sequence: Synthetic oligonucleotide
  Antisense strand to SEQ ID NO: 2419896
augugacuuaacauuugcu

SEQ ID NO: 2419898 - RNA, 19 nt, Artificial Sequence
  Description of Artificial Sequence: Synthetic oligonucleotide
  Sense strand starting at position 1907 of SEQ ID NO: 1886645
cauuaucuuguugggacaa

SEQ ID NO: 2419899 - RNA, 19 nt, Artificial Sequence
  Description of Artificial Sequence: Synthetic oligonucleotide
  Antisense strand to SEQ ID NO: 2419898
uugucccaacaagauaaug

SEQ ID NO: 2419900 - RNA, 19 nt, Artificial Sequence
  Description of Artificial Sequence: Synthetic oligonucleotide
  Sense strand starting at position 2049 of SEQ ID NO: 1886645
uaguaucaucgguagaaga

SEQ ID NO: 2419901 - RNA, 19 nt, Artificial Sequence
  Description of Artificial Sequence: Synthetic oligonucleotide
  Antisense strand to SEQ ID NO: 2419900
ucuucuaccgaugauacua

SEQ ID NO: 2419902 - RNA, 19 nt, Artificial Sequence
  Description of Artificial Sequence: Synthetic oligonucleotide
  Sense strand starting at position 2051 of SEQ ID NO: 1886645
guaucaucgguagaagaac

SEQ ID NO: 2419903 - RNA, 19 nt, Artificial Sequence
  Description of Artificial Sequence: Synthetic oligonucleotide
  Antisense strand to SEQ ID NO: 2419902
guucuucuaccgaugauac

SEQ ID NO: 2419904 - RNA, 19 nt, Artificial Sequence
  Description of Artificial Sequence: Synthetic oligonucleotide
  Sense strand starting at position 2488 of SEQ ID NO: 1886645
ucaacucaccagugauaag

SEQ ID NO: 2419905 - RNA, 19 nt, Artificial Sequence
  Description of Artificial Sequence: Synthetic oligonucleotide
  Antisense strand to SEQ ID NO: 2419904
cuuaucacuggugaguuga

SEQ ID NO: 2419906 - RNA, 19 nt, Artificial Sequence
  Description of Artificial Sequence: Synthetic oligonucleotide
  Sense strand starting at position 2497 of SEQ ID NO: 1886645
cagugauaagccugugaga

SEQ ID NO: 2419907 - RNA, 19 nt, Artificial Sequence
  Description of Artificial Sequence: Synthetic oligonucleotide
  Antisense strand to SEQ ID NO: 2419906
ucucacaggcuuaucacug

SEQ ID NO: 2419908 - RNA, 19 nt, Artificial Sequence
  Description of Artificial Sequence: Synthetic oligonucleotide
  Sense strand starting at position 2508 of SEQ ID NO: 1886645
cugugagaauucucucaca

SEQ ID NO: 2419909 - RNA, 19 nt, Artificial Sequence
  Description of Artificial Sequence: Synthetic oligonucleotide
  Antisense strand to SEQ ID NO: 2419908
ugugagagaauucucacag

SEQ ID NO: 2419910 - RNA, 19 nt, Artificial Sequence
  Description of Artificial Sequence: Synthetic oligonucleotide
  Sense strand starting at position 2563 of SEQ ID NO: 1886645
aguaaauccugaguaaagc

SEQ ID NO: 2419911 - RNA, 19 nt, Artificial Sequence
  Description of Artificial Sequence: Synthetic oligonucleotide
  Antisense strand to SEQ ID NO: 2419910
gcuuuacucaggauuuacu

SEQ ID NO: 2419912 - RNA, 19 nt, Artificial Sequence
  Description of Artificial Sequence: Synthetic oligonucleotide
  Sense strand starting at position 2729 of SEQ ID NO: 1886645
gagcaugacucccuuuaug

SEQ ID NO: 2419913 - RNA, 19 nt, Artificial Sequence
  Description of Artificial Sequence: Synthetic oligonucleotide
  Antisense strand to SEQ ID NO: 2419912
cauaaagggagucaugcuc

SEQ ID NO: 2419914 - RNA, 19 nt, Artificial Sequence
  Description of Artificial Sequence: Synthetic oligonucleotide
  Sense strand starting at position 2746 of SEQ ID NO: 1886645
uguagaaugugugcaauuu

SEQ ID NO: 2419915 - RNA, 19 nt, Artificial Sequence
  Description of Artificial Sequence: Synthetic oligonucleotide
  Antisense strand to SEQ ID NO: 2419914
aaauugcacacauucuaca

SEQ ID NO: 2419916 - RNA, 19 nt, Artificial Sequence
  Description of Artificial Sequence: Synthetic oligonucleotide
  Sense strand starting at position 2863 of SEQ ID NO: 1886645
caaacagucguugaguaua

SEQ ID NO: 2419917 - RNA, 19 nt, Artificial Sequence
  Description of Artificial Sequence: Synthetic oligonucleotide
  Antisense strand to SEQ ID NO: 2419916
uauacucaacgacuguuug

SEQ ID NO: 2419918 - RNA, 19 nt, Artificial Sequence
  Description of Artificial Sequence: Synthetic oligonucleotide
  Sense strand starting at position 2940 of SEQ ID NO: 1886645
auugguuguccagacaaau

SEQ ID NO: 2419919 - RNA, 19 nt, Artificial Sequence
  Description of Artificial Sequence: Synthetic oligonucleotide
  Antisense strand to SEQ ID NO: 2419918
auuugucuggacaaccaau

SEQ ID NO: 2419920 - RNA, 19 nt, Artificial Sequence
  Description of Artificial Sequence: Synthetic oligonucleotide
  Sense strand starting at position 3005 of SEQ ID NO: 1886645
auaacacugugaguuaacu

SEQ ID NO: 2419921 - RNA, 19 nt, Artificial Sequence
  Description of Artificial Sequence: Synthetic oligonucleotide
  Antisense strand to SEQ ID NO: 2419920
aguuaacucacaguguuau

SEQ ID NO: 2419922 - RNA, 19 nt, Artificial Sequence
  Description of Artificial Sequence: Synthetic oligonucleotide
  Sense strand starting at position 3011 of SEQ ID NO: 1886645
cugugaguuaacugguaaa

SEQ ID NO: 2419923 - RNA, 19 nt, Artificial Sequence
  Description of Artificial Sequence: Synthetic oligonucleotide
  Antisense strand to SEQ ID NO: 2419922
uuuaccaguuaacucacag

SEQ ID NO: 2419924 - RNA, 19 nt, Artificial Sequence
  Description of Artificial Sequence: Synthetic oligonucleotide
  Sense strand starting at position 3064 of SEQ ID NO: 1886645
aguaacuugucuccaacua

SEQ ID NO: 2419925 - RNA, 19 nt, Artificial Sequence
  Description of Artificial Sequence: Synthetic oligonucleotide
  Antisense strand to SEQ ID NO: 2419924
uaguuggagacaaguuacu

SEQ ID NO: 2419926 - RNA, 19 nt, Artificial Sequence
  Description of Artificial Sequence: Synthetic oligonucleotide
  Sense strand starting at position 3065 of SEQ ID NO: 1886645
guaacuugucuccaacuag

SEQ ID NO: 2419927 - RNA, 19 nt, Artificial Sequence
  Description of Artificial Sequence: Synthetic oligonucleotide
  Antisense strand to SEQ ID NO: 2419926
cuaguuggagacaaguuac

SEQ ID NO: 2419928 - RNA, 19 nt, Artificial Sequence
  Description of Artificial Sequence: Synthetic oligonucleotide
  Sense strand starting at position 3072 of SEQ ID NO: 1886645
gucuccaacuaguuaaauu

SEQ ID NO: 2419929 - RNA, 19 nt, Artificial Sequence
  Description of Artificial Sequence: Synthetic oligonucleotide
  Antisense strand to SEQ ID NO: 2419928
aauuuaacuaguuggagac

SEQ ID NO: 2419930 - RNA, 19 nt, Artificial Sequence
  Description of Artificial Sequence: Synthetic oligonucleotide
  Sense strand starting at position 3317 of SEQ ID NO: 1886645
auuccugcccucugaagaa

SEQ ID NO: 2419931 - RNA, 19 nt, Artificial Sequence
  Description of Artificial Sequence: Synthetic oligonucleotide
  Antisense strand to SEQ ID NO: 2419930
uucuucagagggcaggaau

SEQ ID NO: 2419932 - RNA, 19 nt, Artificial Sequence
  Description of Artificial Sequence: Synthetic oligonucleotide
  Sense strand starting at position 3348 of SEQ ID NO: 1886645
auguucugcccagaacuga

SEQ ID NO: 2419933 - RNA, 19 nt, Artificial Sequence
  Description of Artificial Sequence: Synthetic oligonucleotide
  Antisense strand to SEQ ID NO: 2419932
ucaguucugggcagaacau

SEQ ID NO: 2419934 - RNA, 19 nt, Artificial Sequence
  Description of Artificial Sequence: Synthetic oligonucleotide
  Sense strand starting at position 3491 of SEQ ID NO: 1886645
acucaaucagcuuggagua

SEQ ID NO: 2419935 - RNA, 19 nt, Artificial Sequence
  Description of Artificial Sequence: Synthetic oligonucleotide
  Antisense strand to SEQ ID NO: 2419934
uacuccaagcugauugagu

SEQ ID NO: 2419936 - RNA, 19 nt, Artificial Sequence
  Description of Artificial Sequence: Synthetic oligonucleotide
  Sense strand starting at position 3929 of SEQ ID NO: 1886645
cagagucuacuauaguguu

SEQ ID NO: 2419937 - RNA, 19 nt, Artificial Sequence
  Description of Artificial Sequence: Synthetic oligonucleotide
  Antisense strand to SEQ ID NO: 2419936
aacacuauaguagacucug

SEQ ID NO: 2419938 - RNA, 19 nt, Artificial Sequence
  Description of Artificial Sequence: Synthetic oligonucleotide
  Sense strand starting at position 2413 of SEQ ID NO: 1886647
gggugugcguucuggugua

SEQ ID NO: 2419939 - RNA, 19 nt, Artificial Sequence
  Description of Artificial Sequence: Synthetic oligonucleotide
  Antisense strand to SEQ ID NO: 2419938
uacaccagaacgcacaccc

SEQ ID NO: 2419940 - RNA, 19 nt, Artificial Sequence
  Description of Artificial Sequence: Synthetic oligonucleotide
  Sense strand starting at position 2506 of SEQ ID NO: 1886647
gacguauguguggguguga

SEQ ID NO: 2419941 - RNA, 19 nt, Artificial Sequence
  Description of Artificial Sequence: Synthetic oligonucleotide
  Antisense strand to SEQ ID NO: 2419940
ucacacccacacauacguc

SEQ ID NO: 2419942 - RNA, 19 nt, Artificial Sequence
  Description of Artificial Sequence: Synthetic oligonucleotide
  Sense strand starting at position 3441 of SEQ ID NO: 1886648
ggguguucucugggcucau

SEQ ID NO: 2419943 - RNA, 19 nt, Artificial Sequence
  Description of Artificial Sequence: Synthetic oligonucleotide
  Antisense strand to SEQ ID NO: 2419942
augagcccagagaacaccc

SEQ ID NO: 2419944 - RNA, 19 nt, Artificial Sequence
  Description of Artificial Sequence: Synthetic oligonucleotide
  Sense strand starting at position 3500 of SEQ ID NO: 1886648
cgcacugaccugugucgaa

SEQ ID NO: 2419945 - RNA, 19 nt, Artificial Sequence
  Description of Artificial Sequence: Synthetic oligonucleotide
  Antisense strand to SEQ ID NO: 2419944
uucgacacaggucagugcg

SEQ ID NO: 2419946 - RNA, 19 nt, Artificial Sequence
  Description of Artificial Sequence: Synthetic oligonucleotide
  Sense strand starting at position 3308 of SEQ ID NO: 1886649
cguaggugugggugacauu

SEQ ID NO: 2419947 - RNA, 19 nt, Artificial Sequence
  Description of Artificial Sequence: Synthetic oligonucleotide
  Antisense strand to SEQ ID NO: 2419946
aaugucacccacaccuacg

SEQ ID NO: 2419948 - RNA, 19 nt, Artificial Sequence
  Description of Artificial Sequence: Synthetic oligonucleotide
  Sense strand starting at position 2413 of SEQ ID NO: 1886651
gggugugcguucuggugua

SEQ ID NO: 2419949 - RNA, 19 nt, Artificial Sequence
  Description of Artificial Sequence: Synthetic oligonucleotide
  Antisense strand to SEQ ID NO: 2419948
uacaccagaacgcacaccc

SEQ ID NO: 2419950 - RNA, 19 nt, Artificial Sequence
  Description of Artificial Sequence: Synthetic oligonucleotide
  Sense strand starting at position 2506 of SEQ ID NO: 1886651
gacguauguguggguguga

SEQ ID NO: 2419951 - RNA, 19 nt, Artificial Sequence
  Description of Artificial Sequence: Synthetic oligonucleotide
  Antisense strand to SEQ ID NO: 2419950
ucacacccacacauacguc

SEQ ID NO: 2419952 - RNA, 19 nt, Artificial Sequence
  Description of Artificial Sequence: Synthetic oligonucleotide
  Sense strand starting at position 3441 of SEQ ID NO: 1886652
ggguguucucugggcucau

SEQ ID NO: 2419953 - RNA, 19 nt, Artificial Sequence
  Description of Artificial Sequence: Synthetic oligonucleotide
  Antisense strand to SEQ ID NO: 2419952
augagcccagagaacaccc

SEQ ID NO: 2419954 - RNA, 19 nt, Artificial Sequence
  Description of Artificial Sequence: Synthetic oligonucleotide
  Sense strand starting at position 3500 of SEQ ID NO: 1886652
cgcacugaccugugucgaa

SEQ ID NO: 2419955 - RNA, 19 nt, Artificial Sequence
  Description of Artificial Sequence: Synthetic oligonucleotide
  Antisense strand to SEQ ID NO: 2419954
uucgacacaggucagugcg

SEQ ID NO: 2419956 - RNA, 19 nt, Artificial Sequence
  Description of Artificial Sequence: Synthetic oligonucleotide
  Sense strand starting at position 3308 of SEQ ID NO: 1886653
cguaggugugggugacauu

SEQ ID NO: 2419957 - RNA, 19 nt, Artificial Sequence
  Description of Artificial Sequence: Synthetic oligonucleotide
  Antisense strand to SEQ ID NO: 2419956
aaugucacccacaccuacg

SEQ ID NO: 2419958 - RNA, 19 nt, Artificial Sequence
  Description of Artificial Sequence: Synthetic oligonucleotide
  Sense strand starting at position 2413 of SEQ ID NO: 1886655
gggugugcguucuggugua

SEQ ID NO: 2419959 - RNA, 19 nt, Artificial Sequence
  Description of Artificial Sequence: Synthetic oligonucleotide
  Antisense strand to SEQ ID NO: 2419958
uacaccagaacgcacaccc

SEQ ID NO: 2419960 - RNA, 19 nt, Artificial Sequence
  Description of Artificial Sequence: Synthetic oligonucleotide
  Sense strand starting at position 2506 of SEQ ID NO: 1886655
gacguauguguggguguga

SEQ ID NO: 2419961 - RNA, 19 nt, Artificial Sequence
  Description of Artificial Sequence: Synthetic oligonucleotide
  Antisense strand to SEQ ID NO: 2419960
ucacacccacacauacguc

SEQ ID NO: 2419962 - RNA, 19 nt, Artificial Sequence
  Description of Artificial Sequence: Synthetic oligonucleotide
  Sense strand starting at position 3441 of SEQ ID NO: 1886656
ggguguucucugggcucau

SEQ ID NO: 2419963 - RNA, 19 nt, Artificial Sequence
  Description of Artificial Sequence: Synthetic oligonucleotide
  Antisense strand to SEQ ID NO: 2419962
augagcccagagaacaccc

SEQ ID NO: 2419964 - RNA, 19 nt, Artificial Sequence
  Description of Artificial Sequence: Synthetic oligonucleotide
  Sense strand starting at position 3500 of SEQ ID NO: 1886656
cgcacugaccugugucgaa

SEQ ID NO: 2419965 - RNA, 19 nt, Artificial Sequence
  Description of Artificial Sequence: Synthetic oligonucleotide
  Antisense strand to SEQ ID NO: 2419964
uucgacacaggucagugcg

SEQ ID NO: 2419966 - RNA, 19 nt, Artificial Sequence
  Description of Artificial Sequence: Synthetic oligonucleotide
  Sense strand starting at position 3308 of SEQ ID NO: 1886657
cguaggugugggugacauu

SEQ ID NO: 2419967 - RNA, 19 nt, Artificial Sequence
  Description of Artificial Sequence: Synthetic oligonucleotide
  Antisense strand to SEQ ID NO: 2419966
aaugucacccacaccuacg

SEQ ID NO: 2419968 - RNA, 19 nt, Artificial Sequence
  Description of Artificial Sequence: Synthetic oligonucleotide
  Sense strand starting at position 2413 of SEQ ID NO: 1886659
gggugugcguucuggugua

SEQ ID NO: 2419969 - RNA, 19 nt, Artificial Sequence
  Description of Artificial Sequence: Synthetic oligonucleotide
  Antisense strand to SEQ ID NO: 2419968
uacaccagaacgcacaccc

SEQ ID NO: 2419970 - RNA, 19 nt, Artificial Sequence
  Description of Artificial Sequence: Synthetic oligonucleotide
  Sense strand starting at position 2506 of SEQ ID NO: 1886659
gacguauguguggguguga

SEQ ID NO: 2419971 - RNA, 19 nt, Artificial Sequence
  Description of Artificial Sequence: Synthetic oligonucleotide
  Antisense strand to SEQ ID NO: 2419970
ucacacccacacauacguc

SEQ ID NO: 2419972 - RNA, 19 nt, Artificial Sequence
  Description of Artificial Sequence: Synthetic oligonucleotide
  Sense strand starting at position 3441 of SEQ ID NO: 1886660
ggguguucucugggcucau

SEQ ID NO: 2419973 - RNA, 19 nt, Artificial Sequence
  Description of Artificial Sequence: Synthetic oligonucleotide
  Antisense strand to SEQ ID NO: 2419972
augagcccagagaacaccc

SEQ ID NO: 2419974 - RNA, 19 nt, Artificial Sequence
  Description of Artificial Sequence: Synthetic oligonucleotide
  Sense strand starting at position 3500 of SEQ ID NO: 1886660
cgcacugaccugugucgaa

SEQ ID NO: 2419975 - RNA, 19 nt, Artificial Sequence
  Description of Artificial Sequence: Synthetic oligonucleotide
  Antisense strand to SEQ ID NO: 2419974
uucgacacaggucagugcg

SEQ ID NO: 2419976 - RNA, 19 nt, Artificial Sequence
  Description of Artificial Sequence: Synthetic oligonucleotide
  Sense strand starting at position 3308 of SEQ ID NO: 1886661
cguaggugugggugacauu

SEQ ID NO: 2419977 - RNA, 19 nt, Artificial Sequence
  Description of Artificial Sequence: Synthetic oligonucleotide
  Antisense strand to SEQ ID NO: 2419976
aaugucacccacaccuacg

SEQ ID NO: 2419978 - RNA, 19 nt, Artificial Sequence
  Description of Artificial Sequence: Synthetic oligonucleotide
  Sense strand starting at position 2984 of SEQ ID NO: 1886662
caggcugucguguuacgua

SEQ ID NO: 2419979 - RNA, 19 nt, Artificial Sequence
  Description of Artificial Sequence: Synthetic oligonucleotide
  Antisense strand to SEQ ID NO: 2419978
uacguaacacgacagccug

SEQ ID NO: 2419980 - RNA, 19 nt, Artificial Sequence
  Description of Artificial Sequence: Synthetic oligonucleotide
  Sense strand starting at position 2987 of SEQ ID NO: 1886662
gcugucguguuacguagaa

SEQ ID NO: 2419981 - RNA, 19 nt, Artificial Sequence
  Description of Artificial Sequence: Synthetic oligonucleotide
  Antisense strand to SEQ ID NO: 2419980
uucuacguaacacgacagc

SEQ ID NO: 2419982 - RNA, 19 nt, Artificial Sequence
  Description of Artificial Sequence: Synthetic oligonucleotide
  Sense strand starting at position 2989 of SEQ ID NO: 1886662
ugucguguuacguagaauu

SEQ ID NO: 2419983 - RNA, 19 nt, Artificial Sequence
  Description of Artificial Sequence: Synthetic oligonucleotide
  Antisense strand to SEQ ID NO: 2419982
aauucuacguaacacgaca

SEQ ID NO: 2419984 - RNA, 19 nt, Artificial Sequence
  Description of Artificial Sequence: Synthetic oligonucleotide
  Sense strand starting at position 2991 of SEQ ID NO: 1886662
ucguguuacguagaauuug

SEQ ID NO: 2419985 - RNA, 19 nt, Artificial Sequence
  Description of Artificial Sequence: Synthetic oligonucleotide
  Antisense strand to SEQ ID NO: 2419984
caaauucuacguaacacga

SEQ ID NO: 2419986 - RNA, 19 nt, Artificial Sequence
  Description of Artificial Sequence: Synthetic oligonucleotide
  Sense strand starting at position 3080 of SEQ ID NO: 1886662
gggagguugggcuguccaa

SEQ ID NO: 2419987 - RNA, 19 nt, Artificial Sequence
  Description of Artificial Sequence: Synthetic oligonucleotide
  Antisense strand to SEQ ID NO: 2419986
uuggacagcccaaccuccc

SEQ ID NO: 2419988 - RNA, 19 nt, Artificial Sequence
  Description of Artificial Sequence: Synthetic oligonucleotide
  Sense strand starting at position 1017 of SEQ ID NO: 1886663
ggaugagcccucugcaaag

SEQ ID NO: 2419989 - RNA, 19 nt, Artificial Sequence
  Description of Artificial Sequence: Synthetic oligonucleotide
  Antisense strand to SEQ ID NO: 2419988
cuuugcagagggcucaucc

SEQ ID NO: 2419990 - RNA, 19 nt, Artificial Sequence
  Description of Artificial Sequence: Synthetic oligonucleotide
  Sense strand starting at position 2403 of SEQ ID NO: 1886663
gagugugcguucuggugua

SEQ ID NO: 2419991 - RNA, 19 nt, Artificial Sequence
  Description of Artificial Sequence: Synthetic oligonucleotide
  Antisense strand to SEQ ID NO: 2419990
uacaccagaacgcacacuc

SEQ ID NO: 2419992 - RNA, 19 nt, Artificial Sequence
  Description of Artificial Sequence: Synthetic oligonucleotide
  Sense strand starting at position 2483 of SEQ ID NO: 1886663
gcgugugagaagagacgua

SEQ ID NO: 2419993 - RNA, 19 nt, Artificial Sequence
  Description of Artificial Sequence: Synthetic oligonucleotide
  Antisense strand to SEQ ID NO: 2419992
uacgucucuucucacacgc

SEQ ID NO: 2419994 - RNA, 19 nt, Artificial Sequence
  Description of Artificial Sequence: Synthetic oligonucleotide
  Sense strand starting at position 2488 of SEQ ID NO: 1886663
ugagaagagacguaugugu

SEQ ID NO: 2419995 - RNA, 19 nt, Artificial Sequence
  Description of Artificial Sequence: Synthetic oligonucleotide
  Antisense strand to SEQ ID NO: 2419994
acacauacgucucuucuca

SEQ ID NO: 2419996 - RNA, 19 nt, Artificial Sequence
  Description of Artificial Sequence: Synthetic oligonucleotide
  Sense strand starting at position 2934 of SEQ ID NO: 1886663
gaagacuguacguggaacu

SEQ ID NO: 2419997 - RNA, 19 nt, Artificial Sequence
  Description of Artificial Sequence: Synthetic oligonucleotide
  Antisense strand to SEQ ID NO: 2419996
aguuccacguacagucuuc

SEQ ID NO: 2419998 - RNA, 19 nt, Artificial Sequence
  Description of Artificial Sequence: Synthetic oligonucleotide
  Sense strand starting at position 3676 of SEQ ID NO: 1886663
cuggaugcucugugucagu

SEQ ID NO: 2419999 - RNA, 19 nt, Artificial Sequence
  Description of Artificial Sequence: Synthetic oligonucleotide
  Antisense strand to SEQ ID NO: 2419998
acugacacagagcauccag

SEQ ID NO: 2420000 - RNA, 19 nt, Artificial Sequence
  Description of Artificial Sequence: Synthetic oligonucleotide
  Sense strand starting at position 3906 of SEQ ID NO: 1886663
ccaaguaguugcgcuguga

SEQ ID NO: 2420001 - RNA, 19 nt, Artificial Sequence
  Description of Artificial Sequence: Synthetic oligonucleotide
  Antisense strand to SEQ ID NO: 2420000
ucacagcgcaacuacuugg

SEQ ID NO: 2420002 - RNA, 19 nt, Artificial Sequence
  Description of Artificial Sequence: Synthetic oligonucleotide
  Sense strand starting at position 3907 of SEQ ID NO: 1886663
caaguaguugcgcugugau

SEQ ID NO: 2420003 - RNA, 19 nt, Artificial Sequence
  Description of Artificial Sequence: Synthetic oligonucleotide
  Antisense strand to SEQ ID NO: 2420002
aucacagcgcaacuacuug

SEQ ID NO: 2420004 - RNA, 19 nt, Artificial Sequence
  Description of Artificial Sequence: Synthetic oligonucleotide
  Sense strand starting at position 3917 of SEQ ID NO: 1886663
cgcugugaucgccgcauca

SEQ ID NO: 2420005 - RNA, 19 nt, Artificial Sequence
  Description of Artificial Sequence: Synthetic oligonucleotide
  Antisense strand to SEQ ID NO: 2420004
ugaugcggcgaucacagcg

SEQ ID NO: 2420006 - RNA, 19 nt, Artificial Sequence
  Description of Artificial Sequence: Synthetic oligonucleotide
  Sense strand starting at position 2989 of SEQ ID NO: 1886664
caggcugucguguuacgua

SEQ ID NO: 2420007 - RNA, 19 nt, Artificial Sequence
  Description of Artificial Sequence: Synthetic oligonucleotide
  Antisense strand to SEQ ID NO: 2420006
uacguaacacgacagccug

SEQ ID NO: 2420008 - RNA, 19 nt, Artificial Sequence
  Description of Artificial Sequence: Synthetic oligonucleotide
  Sense strand starting at position 2992 of SEQ ID NO: 1886664
gcugucguguuacguagaa

SEQ ID NO: 2420009 - RNA, 19 nt, Artificial Sequence
  Description of Artificial Sequence: Synthetic oligonucleotide
  Antisense strand to SEQ ID NO: 2420008
uucuacguaacacgacagc

SEQ ID NO: 2420010 - RNA, 19 nt, Artificial Sequence
  Description of Artificial Sequence: Synthetic oligonucleotide
  Sense strand starting at position 2994 of SEQ ID NO: 1886664
ugucguguuacguagaauu

SEQ ID NO: 2420011 - RNA, 19 nt, Artificial Sequence
  Description of Artificial Sequence: Synthetic oligonucleotide
  Antisense strand to SEQ ID NO: 2420010
aauucuacguaacacgaca

SEQ ID NO: 2420012 - RNA, 19 nt, Artificial Sequence
  Description of Artificial Sequence: Synthetic oligonucleotide
  Sense strand starting at position 2996 of SEQ ID NO: 1886664
ucguguuacguagaauuug

SEQ ID NO: 2420013 - RNA, 19 nt, Artificial Sequence
  Description of Artificial Sequence: Synthetic oligonucleotide
  Antisense strand to SEQ ID NO: 2420012
caaauucuacguaacacga

SEQ ID NO: 2420014 - RNA, 19 nt, Artificial Sequence
  Description of Artificial Sequence: Synthetic oligonucleotide
  Sense strand starting at position 3085 of SEQ ID NO: 1886664
gggagguugggcuguccaa

SEQ ID NO: 2420015 - RNA, 19 nt, Artificial Sequence
  Description of Artificial Sequence: Synthetic oligonucleotide
  Antisense strand to SEQ ID NO: 2420014
uuggacagcccaaccuccc

SEQ ID NO: 2420016 - RNA, 19 nt, Artificial Sequence
  Description of Artificial Sequence: Synthetic oligonucleotide
  Sense strand starting at position 1022 of SEQ ID NO: 1886665
ggaugagcccucugcaaag

SEQ ID NO: 2420017 - RNA, 19 nt, Artificial Sequence
  Description of Artificial Sequence: Synthetic oligonucleotide
  Antisense strand to SEQ ID NO: 2420016
cuuugcagagggcucaucc

SEQ ID NO: 2420018 - RNA, 19 nt, Artificial Sequence
  Description of Artificial Sequence: Synthetic oligonucleotide
  Sense strand starting at position 2408 of SEQ ID NO: 1886665
gagugugcguucuggugua

SEQ ID NO: 2420019 - RNA, 19 nt, Artificial Sequence
  Description of Artificial Sequence: Synthetic oligonucleotide
  Antisense strand to SEQ ID NO: 2420018
uacaccagaacgcacacuc

SEQ ID NO: 2420020 - RNA, 19 nt, Artificial Sequence
  Description of Artificial Sequence: Synthetic oligonucleotide
  Sense strand starting at position 2488 of SEQ ID NO: 1886665
gcgugugagaagagacgua

SEQ ID NO: 2420021 - RNA, 19 nt, Artificial Sequence
  Description of Artificial Sequence: Synthetic oligonucleotide
  Antisense strand to SEQ ID NO: 2420020
uacgucucuucucacacgc

SEQ ID NO: 2420022 - RNA, 19 nt, Artificial Sequence
  Description of Artificial Sequence: Synthetic oligonucleotide
  Sense strand starting at position 2493 of SEQ ID NO: 1886665
ugagaagagacguaugugu

SEQ ID NO: 2420023 - RNA, 19 nt, Artificial Sequence
  Description of Artificial Sequence: Synthetic oligonucleotide
  Antisense strand to SEQ ID NO: 2420022
acacauacgucucuucuca

SEQ ID NO: 2420024 - RNA, 19 nt, Artificial Sequence
  Description of Artificial Sequence: Synthetic oligonucleotide
  Sense strand starting at position 2939 of SEQ ID NO: 1886665
gaagacuguacguggaacu

SEQ ID NO: 2420025 - RNA, 19 nt, Artificial Sequence
  Description of Artificial Sequence: Synthetic oligonucleotide
  Antisense strand to SEQ ID NO: 2420024
aguuccacguacagucuuc

SEQ ID NO: 2420026 - RNA, 19 nt, Artificial Sequence
  Description of Artificial Sequence: Synthetic oligonucleotide
  Sense strand starting at position 3681 of SEQ ID NO: 1886665
cuggaugcucugugucagu

SEQ ID NO: 2420027 - RNA, 19 nt, Artificial Sequence
  Description of Artificial Sequence: Synthetic oligonucleotide
  Antisense strand to SEQ ID NO: 2420026
acugacacagagcauccag

SEQ ID NO: 2420028 - RNA, 19 nt, Artificial Sequence
  Description of Artificial Sequence: Synthetic oligonucleotide
  Sense strand starting at position 3911 of SEQ ID NO: 1886665
ccaaguaguugcgcuguga

SEQ ID NO: 2420029 - RNA, 19 nt, Artificial Sequence
  Description of Artificial Sequence: Synthetic oligonucleotide
  Antisense strand to SEQ ID NO: 2420028
ucacagcgcaacuacuugg

SEQ ID NO: 2420030 - RNA, 19 nt, Artificial Sequence
  Description of Artificial Sequence: Synthetic oligonucleotide
  Sense strand starting at position 3912 of SEQ ID NO: 1886665
caaguaguugcgcugugau

SEQ ID NO: 2420031 - RNA, 19 nt, Artificial Sequence
  Description of Artificial Sequence: Synthetic oligonucleotide
  Antisense strand to SEQ ID NO: 2420030
aucacagcgcaacuacuug

SEQ ID NO: 2420032 - RNA, 19 nt, Artificial Sequence
  Description of Artificial Sequence: Synthetic oligonucleotide
  Sense strand starting at position 3922 of SEQ ID NO: 1886665
cgcugugaucgccgcauca

SEQ ID NO: 2420033 - RNA, 19 nt, Artificial Sequence
  Description of Artificial Sequence: Synthetic oligonucleotide
  Antisense strand to SEQ ID NO: 2420032
ugaugcggcgaucacagcg

SEQ ID NO: 2420034 - RNA, 19 nt, Artificial Sequence
  Description of Artificial Sequence: Synthetic oligonucleotide
  Sense strand starting at position 403 of SEQ ID NO: 1886666
uggcauugcugacaagguu

SEQ ID NO: 2420035 - RNA, 19 nt, Artificial Sequence
  Description of Artificial Sequence: Synthetic oligonucleotide
  Antisense strand to SEQ ID NO: 2420034
aaccuugucagcaaugcca

SEQ ID NO: 2420036 - RNA, 19 nt, Artificial Sequence
  Description of Artificial Sequence: Synthetic oligonucleotide
  Sense strand starting at position 496 of SEQ ID NO: 1886666
guccacauuucguauucuu

SEQ ID NO: 2420037 - RNA, 19 nt, Artificial Sequence
  Description of Artificial Sequence: Synthetic oligonucleotide
  Antisense strand to SEQ ID NO: 2420036
aagaauacgaaauguggac

SEQ ID NO: 2420038 - RNA, 19 nt, Artificial Sequence
  Description of Artificial Sequence: Synthetic oligonucleotide
  Sense strand starting at position 696 of SEQ ID NO: 1886666
ccaccuaggcuggaguuaa

SEQ ID NO: 2420039 - RNA, 19 nt, Artificial Sequence
  Description of Artificial Sequence: Synthetic oligonucleotide
  Antisense strand to SEQ ID NO: 2420038
uuaacuccagccuaggugg

SEQ ID NO: 2420040 - RNA, 19 nt, Artificial Sequence
  Description of Artificial Sequence: Synthetic oligonucleotide
  Sense strand starting at position 961 of SEQ ID NO: 1886666
agcuuucccuguucuuaga

SEQ ID NO: 2420041 - RNA, 19 nt, Artificial Sequence
  Description of Artificial Sequence: Synthetic oligonucleotide
  Antisense strand to SEQ ID NO: 2420040
ucuaagaacagggaaagcu

SEQ ID NO: 2420042 - RNA, 19 nt, Artificial Sequence
  Description of Artificial Sequence: Synthetic oligonucleotide
  Sense strand starting at position 975 of SEQ ID NO: 1886666
uuagaaggccuccagucau

SEQ ID NO: 2420043 - RNA, 19 nt, Artificial Sequence
  Description of Artificial Sequence: Synthetic oligonucleotide
  Antisense strand to SEQ ID NO: 2420042
augacuggaggccuucuaa

SEQ ID NO: 2420044 - RNA, 19 nt, Artificial Sequence
  Description of Artificial Sequence: Synthetic oligonucleotide
  Sense strand starting at position 982 of SEQ ID NO: 1886666
gccuccagucauugguuua

SEQ ID NO: 2420045 - RNA, 19 nt, Artificial Sequence
  Description of Artificial Sequence: Synthetic oligonucleotide
  Antisense strand to SEQ ID NO: 2420044
uaaaccaaugacuggaggc

SEQ ID NO: 2420046 - RNA, 19 nt, Artificial Sequence
  Description of Artificial Sequence: Synthetic oligonucleotide
  Sense strand starting at position 1899 of SEQ ID NO: 1886666
ggauguuggcaacgugacu

SEQ ID NO: 2420047 - RNA, 19 nt, Artificial Sequence
  Description of Artificial Sequence: Synthetic oligonucleotide
  Antisense strand to SEQ ID NO: 2420046
agucacguugccaacaucc

SEQ ID NO: 2420048 - RNA, 19 nt, Artificial Sequence
  Description of Artificial Sequence: Synthetic oligonucleotide
  Sense strand starting at position 2312 of SEQ ID NO: 1886666
cugaguuagagauacagcu

SEQ ID NO: 2420049 - RNA, 19 nt, Artificial Sequence
  Description of Artificial Sequence: Synthetic oligonucleotide
  Antisense strand to SEQ ID NO: 2420048
agcuguaucucuaacucag

SEQ ID NO: 2420050 - RNA, 19 nt, Artificial Sequence
  Description of Artificial Sequence: Synthetic oligonucleotide
  Sense strand starting at position 2372 of SEQ ID NO: 1886666
gggaaacuuugagaccuuu

SEQ ID NO: 2420051 - RNA, 19 nt, Artificial Sequence
  Description of Artificial Sequence: Synthetic oligonucleotide
  Antisense strand to SEQ ID NO: 2420050
aaaggucucaaaguuuccc

SEQ ID NO: 2420052 - RNA, 19 nt, Artificial Sequence
  Description of Artificial Sequence: Synthetic oligonucleotide
  Sense strand starting at position 2388 of SEQ ID NO: 1886666
uuuguugggucccaggaga

SEQ ID NO: 2420053 - RNA, 19 nt, Artificial Sequence
  Description of Artificial Sequence: Synthetic oligonucleotide
  Antisense strand to SEQ ID NO: 2420052
ucuccugggacccaacaaa

SEQ ID NO: 2420054 - RNA, 19 nt, Artificial Sequence
  Description of Artificial Sequence: Synthetic oligonucleotide
  Sense strand starting at position 2709 of SEQ ID NO: 1886666
guguuagauucagcuggac

SEQ ID NO: 2420055 - RNA, 19 nt, Artificial Sequence
  Description of Artificial Sequence: Synthetic oligonucleotide
  Antisense strand to SEQ ID NO: 2420054
guccagcugaaucuaacac

SEQ ID NO: 2420056 - RNA, 19 nt, Artificial Sequence
  Description of Artificial Sequence: Synthetic oligonucleotide
  Sense strand starting at position 3870 of SEQ ID NO: 1886666
caggcucuccuguguccaa

SEQ ID NO: 2420057 - RNA, 19 nt, Artificial Sequence
  Description of Artificial Sequence: Synthetic oligonucleotide
  Antisense strand to SEQ ID NO: 2420056
uuggacacaggagagccug

SEQ ID NO: 2420058 - RNA, 19 nt, Artificial Sequence
  Description of Artificial Sequence: Synthetic oligonucleotide
  Sense strand starting at position 3871 of SEQ ID NO: 1886666
aggcucuccuguguccaaa

SEQ ID NO: 2420059 - RNA, 19 nt, Artificial Sequence
  Description of Artificial Sequence: Synthetic oligonucleotide
  Antisense strand to SEQ ID NO: 2420058
uuuggacacaggagagccu

SEQ ID NO: 2420060 - RNA, 19 nt, Artificial Sequence
  Description of Artificial Sequence: Synthetic oligonucleotide
  Sense strand starting at position 142 of SEQ ID NO: 1886667
gggagcuguggugauaguu

SEQ ID NO: 2420061 - RNA, 19 nt, Artificial Sequence
  Description of Artificial Sequence: Synthetic oligonucleotide
  Antisense strand to SEQ ID NO: 2420060
aacuaucaccacagcuccc

SEQ ID NO: 2420062 - RNA, 19 nt, Artificial Sequence
  Description of Artificial Sequence: Synthetic oligonucleotide
  Sense strand starting at position 150 of SEQ ID NO: 1886667
uggugauaguuauauggac

SEQ ID NO: 2420063 - RNA, 19 nt, Artificial Sequence
  Description of Artificial Sequence: Synthetic oligonucleotide
  Antisense strand to SEQ ID NO: 2420062
guccauauaacuaucacca

SEQ ID NO: 2420064 - RNA, 19 nt, Artificial Sequence
  Description of Artificial Sequence: Synthetic oligonucleotide
  Sense strand starting at position 152 of SEQ ID NO: 1886667
gugauaguuauauggacca

SEQ ID NO: 2420065 - RNA, 19 nt, Artificial Sequence
  Description of Artificial Sequence: Synthetic oligonucleotide
  Antisense strand to SEQ ID NO: 2420064
ugguccauauaacuaucac

SEQ ID NO: 2420066 - RNA, 19 nt, Artificial Sequence
  Description of Artificial Sequence: Synthetic oligonucleotide
  Sense strand starting at position 276 of SEQ ID NO: 1886667
cguagguugcagugaugga

SEQ ID NO: 2420067 - RNA, 19 nt, Artificial Sequence
  Description of Artificial Sequence: Synthetic oligonucleotide
  Antisense strand to SEQ ID NO: 2420066
uccaucacugcaaccuacg

SEQ ID NO: 2420068 - RNA, 19 nt, Artificial Sequence
  Description of Artificial Sequence: Synthetic oligonucleotide
  Sense strand starting at position 277 of SEQ ID NO: 1886667
guagguugcagugauggau

SEQ ID NO: 2420069 - RNA, 19 nt, Artificial Sequence
  Description of Artificial Sequence: Synthetic oligonucleotide
  Antisense strand to SEQ ID NO: 2420068
auccaucacugcaaccuac

SEQ ID NO: 2420070 - RNA, 19 nt, Artificial Sequence
  Description of Artificial Sequence: Synthetic oligonucleotide
  Sense strand starting at position 336 of SEQ ID NO: 1886667
gucgucucuggucggaaga

SEQ ID NO: 2420071 - RNA, 19 nt, Artificial Sequence
  Description of Artificial Sequence: Synthetic oligonucleotide
  Antisense strand to SEQ ID NO: 2420070
ucuuccgaccagagacgac

SEQ ID NO: 2420072 - RNA, 19 nt, Artificial Sequence
  Description of Artificial Sequence: Synthetic oligonucleotide
  Sense strand starting at position 424 of SEQ ID NO: 1886667
ucccuccuuccaugggaau

SEQ ID NO: 2420073 - RNA, 19 nt, Artificial Sequence
  Description of Artificial Sequence: Synthetic oligonucleotide
  Antisense strand to SEQ ID NO: 2420072
auucccauggaaggaggga

SEQ ID NO: 2420074 - RNA, 19 nt, Artificial Sequence
  Description of Artificial Sequence: Synthetic oligonucleotide
  Sense strand starting at position 504 of SEQ ID NO: 1886667
gugagauguggucacaaga

SEQ ID NO: 2420075 - RNA, 19 nt, Artificial Sequence
  Description of Artificial Sequence: Synthetic oligonucleotide
  Antisense strand to SEQ ID NO: 2420074
ucuugugaccacaucucac

SEQ ID NO: 2420076 - RNA, 19 nt, Artificial Sequence
  Description of Artificial Sequence: Synthetic oligonucleotide
  Sense strand starting at position 520 of SEQ ID NO: 1886667
agacuaagcucagugcaaa

SEQ ID NO: 2420077 - RNA, 19 nt, Artificial Sequence
  Description of Artificial Sequence: Synthetic oligonucleotide
  Antisense strand to SEQ ID NO: 2420076
uuugcacugagcuuagucu

SEQ ID NO: 2420078 - RNA, 19 nt, Artificial Sequence
  Description of Artificial Sequence: Synthetic oligonucleotide
  Sense strand starting at position 587 of SEQ ID NO: 1886667
guugguggcagagauuaag

SEQ ID NO: 2420079 - RNA, 19 nt, Artificial Sequence
  Description of Artificial Sequence: Synthetic oligonucleotide
  Antisense strand to SEQ ID NO: 2420078
cuuaaucucugccaccaac

SEQ ID NO: 2420080 - RNA, 19 nt, Artificial Sequence
  Description of Artificial Sequence: Synthetic oligonucleotide
  Sense strand starting at position 680 of SEQ ID NO: 1886667
cuggguuaccugugcaaga

SEQ ID NO: 2420081 - RNA, 19 nt, Artificial Sequence
  Description of Artificial Sequence: Synthetic oligonucleotide
  Antisense strand to SEQ ID NO: 2420080
ucuugcacagguaacccag

SEQ ID NO: 2420082 - RNA, 19 nt, Artificial Sequence
  Description of Artificial Sequence: Synthetic oligonucleotide
  Sense strand starting at position 681 of SEQ ID NO: 1886667
uggguuaccugugcaagaa

SEQ ID NO: 2420083 - RNA, 19 nt, Artificial Sequence
  Description of Artificial Sequence: Synthetic oligonucleotide
  Antisense strand to SEQ ID NO: 2420082
uucuugcacagguaaccca

SEQ ID NO: 2420084 - RNA, 19 nt, Artificial Sequence
  Description of Artificial Sequence: Synthetic oligonucleotide
  Sense strand starting at position 682 of SEQ ID NO: 1886667
ggguuaccugugcaagaaa

SEQ ID NO: 2420085 - RNA, 19 nt, Artificial Sequence
  Description of Artificial Sequence: Synthetic oligonucleotide
  Antisense strand to SEQ ID NO: 2420084
uuucuugcacagguaaccc

SEQ ID NO: 2420086 - RNA, 19 nt, Artificial Sequence
  Description of Artificial Sequence: Synthetic oligonucleotide
  Sense strand starting at position 701 of SEQ ID NO: 1886667
gaaacaagucucuguagcu

SEQ ID NO: 2420087 - RNA, 19 nt, Artificial Sequence
  Description of Artificial Sequence: Synthetic oligonucleotide
  Antisense strand to SEQ ID NO: 2420086
agcuacagagacuuguuuc

SEQ ID NO: 2420088 - RNA, 19 nt, Artificial Sequence
  Description of Artificial Sequence: Synthetic oligonucleotide
  Sense strand starting at position 708 of SEQ ID NO: 1886667
gucucuguagcuuacacau

SEQ ID NO: 2420089 - RNA, 19 nt, Artificial Sequence
  Description of Artificial Sequence: Synthetic oligonucleotide
  Antisense strand to SEQ ID NO: 2420088
auguguaagcuacagagac

SEQ ID NO: 2420090 - RNA, 19 nt, Artificial Sequence
  Description of Artificial Sequence: Synthetic oligonucleotide
  Sense strand starting at position 785 of SEQ ID NO: 1886667
gaaagcacuuccucgggaa

SEQ ID NO: 2420091 - RNA, 19 nt, Artificial Sequence
  Description of Artificial Sequence: Synthetic oligonucleotide
  Antisense strand to SEQ ID NO: 2420090
uucccgaggaagugcuuuc

SEQ ID NO: 2420092 - RNA, 19 nt, Artificial Sequence
  Description of Artificial Sequence: Synthetic oligonucleotide
  Sense strand starting at position 786 of SEQ ID NO: 1886667
aaagcacuuccucgggaaa

SEQ ID NO: 2420093 - RNA, 19 nt, Artificial Sequence
  Description of Artificial Sequence: Synthetic oligonucleotide
  Antisense strand to SEQ ID NO: 2420092
uuucccgaggaagugcuuu

SEQ ID NO: 2420094 - RNA, 19 nt, Artificial Sequence
  Description of Artificial Sequence: Synthetic oligonucleotide
  Sense strand starting at position 787 of SEQ ID NO: 1886667
aagcacuuccucgggaaau

SEQ ID NO: 2420095 - RNA, 19 nt, Artificial Sequence
  Description of Artificial Sequence: Synthetic oligonucleotide
  Antisense strand to SEQ ID NO: 2420094
auuucccgaggaagugcuu

SEQ ID NO: 2420096 - RNA, 19 nt, Artificial Sequence
  Description of Artificial Sequence: Synthetic oligonucleotide
  Sense strand starting at position 789 of SEQ ID NO: 1886667
gcacuuccucgggaaaugu

SEQ ID NO: 2420097 - RNA, 19 nt, Artificial Sequence
  Description of Artificial Sequence: Synthetic oligonucleotide
  Antisense strand to SEQ ID NO: 2420096
acauuucccgaggaagugc

SEQ ID NO: 2420098 - RNA, 19 nt, Artificial Sequence
  Description of Artificial Sequence: Synthetic oligonucleotide
  Sense strand starting at position 844 of SEQ ID NO: 1886667
aucguauugugagaaucau

SEQ ID NO: 2420099 - RNA, 19 nt, Artificial Sequence
  Description of Artificial Sequence: Synthetic oligonucleotide
  Antisense strand to SEQ ID NO: 2420098
augauucucacaauacgau

SEQ ID NO: 2420100 - RNA, 19 nt, Artificial Sequence
  Description of Artificial Sequence: Synthetic oligonucleotide
  Sense strand starting at position 854 of SEQ ID NO: 1886667
gagaaucauuuccacguua

SEQ ID NO: 2420101 - RNA, 19 nt, Artificial Sequence
  Description of Artificial Sequence: Synthetic oligonucleotide
  Antisense strand to SEQ ID NO: 2420100
uaacguggaaaugauucuc

SEQ ID NO: 2420102 - RNA, 19 nt, Artificial Sequence
  Description of Artificial Sequence: Synthetic oligonucleotide
  Sense strand starting at position 892 of SEQ ID NO: 1886667
gggauccagcauuaguuaa

SEQ ID NO: 2420103 - RNA, 19 nt, Artificial Sequence
  Description of Artificial Sequence: Synthetic oligonucleotide
  Antisense strand to SEQ ID NO: 2420102
uuaacuaaugcuggauccc

SEQ ID NO: 2420104 - RNA, 19 nt, Artificial Sequence
  Description of Artificial Sequence: Synthetic oligonucleotide
  Sense strand starting at position 1031 of SEQ ID NO: 1886667
cucuaacuccaagagugua

SEQ ID NO: 2420105 - RNA, 19 nt, Artificial Sequence
  Description of Artificial Sequence: Synthetic oligonucleotide
  Antisense strand to SEQ ID NO: 2420104
uacacucuuggaguuagag

SEQ ID NO: 2420106 - RNA, 19 nt, Artificial Sequence
  Description of Artificial Sequence: Synthetic oligonucleotide
  Sense strand starting at position 1047 of SEQ ID NO: 1886667
guaggaaacucuggcaaca

SEQ ID NO: 2420107 - RNA, 19 nt, Artificial Sequence
  Description of Artificial Sequence: Synthetic oligonucleotide
  Antisense strand to SEQ ID NO: 2420106
uguugccagaguuuccuac

SEQ ID NO: 2420108 - RNA, 19 nt, Artificial Sequence
  Description of Artificial Sequence: Synthetic oligonucleotide
  Sense strand starting at position 1049 of SEQ ID NO: 1886667
aggaaacucuggcaacaga

SEQ ID NO: 2420109 - RNA, 19 nt, Artificial Sequence
  Description of Artificial Sequence: Synthetic oligonucleotide
  Antisense strand to SEQ ID NO: 2420108
ucuguugccagaguuuccu

SEQ ID NO: 2420110 - RNA, 19 nt, Artificial Sequence
  Description of Artificial Sequence: Synthetic oligonucleotide
  Sense strand starting at position 1203 of SEQ ID NO: 1886667
acugcaugccaggaugaau

SEQ ID NO: 2420111 - RNA, 19 nt, Artificial Sequence
  Description of Artificial Sequence: Synthetic oligonucleotide
  Antisense strand to SEQ ID NO: 2420110
auucauccuggcaugcagu

SEQ ID NO: 2420112 - RNA, 19 nt, Artificial Sequence
  Description of Artificial Sequence: Synthetic oligonucleotide
  Sense strand starting at position 1215 of SEQ ID NO: 1886667
gaugaauugccuggaugca

SEQ ID NO: 2420113 - RNA, 19 nt, Artificial Sequence
  Description of Artificial Sequence: Synthetic oligonucleotide
  Antisense strand to SEQ ID NO: 2420112
ugcauccaggcaauucauc

SEQ ID NO: 2420114 - RNA, 19 nt, Artificial Sequence
  Description of Artificial Sequence: Synthetic oligonucleotide
  Sense strand starting at position 1336 of SEQ ID NO: 1886667
cguggcucaugagucaaga

SEQ ID NO: 2420115 - RNA, 19 nt, Artificial Sequence
  Description of Artificial Sequence: Synthetic oligonucleotide
  Antisense strand to SEQ ID NO: 2420114
ucuugacucaugagccacg

SEQ ID NO: 2420116 - RNA, 19 nt, Artificial Sequence
  Description of Artificial Sequence: Synthetic oligonucleotide
  Sense strand starting at position 1925 of SEQ ID NO: 1886667
ucagaauguaccugcggaa

SEQ ID NO: 2420117 - RNA, 19 nt, Artificial Sequence
  Description of Artificial Sequence: Synthetic oligonucleotide
  Antisense strand to SEQ ID NO: 2420116
uuccgcagguacauucuga

SEQ ID NO: 2420118 - RNA, 19 nt, Artificial Sequence
  Description of Artificial Sequence: Synthetic oligonucleotide
  Sense strand starting at position 2032 of SEQ ID NO: 1886667
uggcuagcucuggaaucau

SEQ ID NO: 2420119 - RNA, 19 nt, Artificial Sequence
  Description of Artificial Sequence: Synthetic oligonucleotide
  Antisense strand to SEQ ID NO: 2420118
augauuccagagcuagcca

SEQ ID NO: 2420120 - RNA, 19 nt, Artificial Sequence
  Description of Artificial Sequence: Synthetic oligonucleotide
  Sense strand starting at position 2040 of SEQ ID NO: 1886667
ucuggaaucauggguuuac

SEQ ID NO: 2420121 - RNA, 19 nt, Artificial Sequence
  Description of Artificial Sequence: Synthetic oligonucleotide
  Antisense strand to SEQ ID NO: 2420120
guaaacccaugauuccaga

SEQ ID NO: 2420122 - RNA, 19 nt, Artificial Sequence
  Description of Artificial Sequence: Synthetic oligonucleotide
  Sense strand starting at position 2050 of SEQ ID NO: 1886667
uggguuuacccuggaacca

SEQ ID NO: 2420123 - RNA, 19 nt, Artificial Sequence
  Description of Artificial Sequence: Synthetic oligonucleotide
  Antisense strand to SEQ ID NO: 2420122
ugguuccaggguaaaccca

SEQ ID NO: 2420124 - RNA, 19 nt, Artificial Sequence
  Description of Artificial Sequence: Synthetic oligonucleotide
  Sense strand starting at position 2177 of SEQ ID NO: 1886667
cuuugagaccucgaccuga

SEQ ID NO: 2420125 - RNA, 19 nt, Artificial Sequence
  Description of Artificial Sequence: Synthetic oligonucleotide
  Antisense strand to SEQ ID NO: 2420124
ucaggucgaggucucaaag

SEQ ID NO: 2420126 - RNA, 19 nt, Artificial Sequence
  Description of Artificial Sequence: Synthetic oligonucleotide
  Sense strand starting at position 2333 of SEQ ID NO: 1886667
guaaaugccuuucugaaua

SEQ ID NO: 2420127 - RNA, 19 nt, Artificial Sequence
  Description of Artificial Sequence: Synthetic oligonucleotide
  Antisense strand to SEQ ID NO: 2420126
uauucagaaaggcauuuac

SEQ ID NO: 2420128 - RNA, 19 nt, Artificial Sequence
  Description of Artificial Sequence: Synthetic oligonucleotide
  Sense strand starting at position 2338 of SEQ ID NO: 1886667
ugccuuucugaauagagug

SEQ ID NO: 2420129 - RNA, 19 nt, Artificial Sequence
  Description of Artificial Sequence: Synthetic oligonucleotide
  Antisense strand to SEQ ID NO: 2420128
cacucuauucagaaaggca

SEQ ID NO: 2420130 - RNA, 19 nt, Artificial Sequence
  Description of Artificial Sequence: Synthetic oligonucleotide
  Sense strand starting at position 2499 of SEQ ID NO: 1886667
caauguguucuguggcuua

SEQ ID NO: 2420131 - RNA, 19 nt, Artificial Sequence
  Description of Artificial Sequence: Synthetic oligonucleotide
  Antisense strand to SEQ ID NO: 2420130
uaagccacagaacacauug

SEQ ID NO: 2420132 - RNA, 19 nt, Artificial Sequence
  Description of Artificial Sequence: Synthetic oligonucleotide
  Sense strand starting at position 3134 of SEQ ID NO: 1886667
ccacgauaacuuuggcauu

SEQ ID NO: 2420133 - RNA, 19 nt, Artificial Sequence
  Description of Artificial Sequence: Synthetic oligonucleotide
  Antisense strand to SEQ ID NO: 2420132
aaugccaaaguuaucgugg

SEQ ID NO: 2420134 - RNA, 19 nt, Artificial Sequence
  Description of Artificial Sequence: Synthetic oligonucleotide
  Sense strand starting at position 3760 of SEQ ID NO: 1886667
caaacaugagcgugagaca

SEQ ID NO: 2420135 - RNA, 19 nt, Artificial Sequence
  Description of Artificial Sequence: Synthetic oligonucleotide
  Antisense strand to SEQ ID NO: 2420134
ugucucacgcucauguuug

SEQ ID NO: 2420136 - RNA, 19 nt, Artificial Sequence
  Description of Artificial Sequence: Synthetic oligonucleotide
  Sense strand starting at position 3926 of SEQ ID NO: 1886667
aguaauagaugacaugaga

SEQ ID NO: 2420137 - RNA, 19 nt, Artificial Sequence
  Description of Artificial Sequence: Synthetic oligonucleotide
  Antisense strand to SEQ ID NO: 2420136
ucucaugucaucuauuacu

SEQ ID NO: 2420138 - RNA, 19 nt, Artificial Sequence
  Description of Artificial Sequence: Synthetic oligonucleotide
  Sense strand starting at position 3956 of SEQ ID NO: 1886667
augaaaugucaguggccuu

SEQ ID NO: 2420139 - RNA, 19 nt, Artificial Sequence
  Description of Artificial Sequence: Synthetic oligonucleotide
  Antisense strand to SEQ ID NO: 2420138
aaggccacugacauuucau

SEQ ID NO: 2420140 - RNA, 19 nt, Artificial Sequence
  Description of Artificial Sequence: Synthetic oligonucleotide
  Sense strand starting at position 120 of SEQ ID NO: 1886668
gccggccuguucuccaaua

SEQ ID NO: 2420141 - RNA, 19 nt, Artificial Sequence
  Description of Artificial Sequence: Synthetic oligonucleotide
  Antisense strand to SEQ ID NO: 2420140
uauuggagaacaggccggc

SEQ ID NO: 2420142 - RNA, 19 nt, Artificial Sequence
  Description of Artificial Sequence: Synthetic oligonucleotide
  Sense strand starting at position 121 of SEQ ID NO: 1886668
ccggccuguucuccaauau

SEQ ID NO: 2420143 - RNA, 19 nt, Artificial Sequence
  Description of Artificial Sequence: Synthetic oligonucleotide
  Antisense strand to SEQ ID NO: 2420142
auauuggagaacaggccgg

SEQ ID NO: 2420144 - RNA, 19 nt, Artificial Sequence
  Description of Artificial Sequence: Synthetic oligonucleotide
  Sense strand starting at position 122 of SEQ ID NO: 1886668
cggccuguucuccaauaug

SEQ ID NO: 2420145 - RNA, 19 nt, Artificial Sequence
  Description of Artificial Sequence: Synthetic oligonucleotide
  Antisense strand to SEQ ID NO: 2420144
cauauuggagaacaggccg

SEQ ID NO: 2420146 - RNA, 19 nt, Artificial Sequence
  Description of Artificial Sequence: Synthetic oligonucleotide
  Sense strand starting at position 133 of SEQ ID NO: 1886668
ccaauauggccuugugguu

SEQ ID NO: 2420147 - RNA, 19 nt, Artificial Sequence
  Description of Artificial Sequence: Synthetic oligonucleotide
  Antisense strand to SEQ ID NO: 2420146
aaccacaaggccauauugg

SEQ ID NO: 2420148 - RNA, 19 nt, Artificial Sequence
  Description of Artificial Sequence: Synthetic oligonucleotide
  Sense strand starting at position 151 of SEQ ID NO: 1886668
uuucguguccuccgaugaa

SEQ ID NO: 2420149 - RNA, 19 nt, Artificial Sequence
  Description of Artificial Sequence: Synthetic oligonucleotide
  Antisense strand to SEQ ID NO: 2420148
uucaucggaggacacgaaa

SEQ ID NO: 2420150 - RNA, 19 nt, Artificial Sequence
  Description of Artificial Sequence: Synthetic oligonucleotide
  Sense strand starting at position 231 of SEQ ID NO: 1886668
ggccuugucccguccuuua

SEQ ID NO: 2420151 - RNA, 19 nt, Artificial Sequence
  Description of Artificial Sequence: Synthetic oligonucleotide
  Antisense strand to SEQ ID NO: 2420150
uaaaggacgggacaaggcc

SEQ ID NO: 2420152 - RNA, 19 nt, Artificial Sequence
  Description of Artificial Sequence: Synthetic oligonucleotide
  Sense strand starting at position 238 of SEQ ID NO: 1886668
ucccguccuuuauacagaa

SEQ ID NO: 2420153 - RNA, 19 nt, Artificial Sequence
  Description of Artificial Sequence: Synthetic oligonucleotide
  Antisense strand to SEQ ID NO: 2420152
uucuguauaaaggacggga

SEQ ID NO: 2420154 - RNA, 19 nt, Artificial Sequence
  Description of Artificial Sequence: Synthetic oligonucleotide
  Sense strand starting at position 594 of SEQ ID NO: 1886668
uguaucaaccagugauaua

SEQ ID NO: 2420155 - RNA, 19 nt, Artificial Sequence
  Description of Artificial Sequence: Synthetic oligonucleotide
  Antisense strand to SEQ ID NO: 2420154
uauaucacugguugauaca

SEQ ID NO: 2420156 - RNA, 19 nt, Artificial Sequence
  Description of Artificial Sequence: Synthetic oligonucleotide
  Sense strand starting at position 651 of SEQ ID NO: 1886668
aguccuaccuuggcaugau

SEQ ID NO: 2420157 - RNA, 19 nt, Artificial Sequence
  Description of Artificial Sequence: Synthetic oligonucleotide
  Antisense strand to SEQ ID NO: 2420156
aucaugccaagguaggacu

SEQ ID NO: 2420158 - RNA, 19 nt, Artificial Sequence
  Description of Artificial Sequence: Synthetic oligonucleotide
  Sense strand starting at position 652 of SEQ ID NO: 1886668
guccuaccuuggcaugauu

SEQ ID NO: 2420159 - RNA, 19 nt, Artificial Sequence
  Description of Artificial Sequence: Synthetic oligonucleotide
  Antisense strand to SEQ ID NO: 2420158
aaucaugccaagguaggac

SEQ ID NO: 2420160 - RNA, 19 nt, Artificial Sequence
  Description of Artificial Sequence: Synthetic oligonucleotide
  Sense strand starting at position 1000 of SEQ ID NO: 1886668
acaaaugcuuucuaaagug

SEQ ID NO: 2420161 - RNA, 19 nt, Artificial Sequence
  Description of Artificial Sequence: Synthetic oligonucleotide
  Antisense strand to SEQ ID NO: 2420160
cacuuuagaaagcauuugu

SEQ ID NO: 2420162 - RNA, 19 nt, Artificial Sequence
  Description of Artificial Sequence: Synthetic oligonucleotide
  Sense strand starting at position 1928 of SEQ ID NO: 1886668
cgcugugugcacaggagaa

SEQ ID NO: 2420163 - RNA, 19 nt, Artificial Sequence
  Description of Artificial Sequence: Synthetic oligonucleotide
  Antisense strand to SEQ ID NO: 2420162
uucuccugugcacacagcg

SEQ ID NO: 2420164 - RNA, 19 nt, Artificial Sequence
  Description of Artificial Sequence: Synthetic oligonucleotide
  Sense strand starting at position 2036 of SEQ ID NO: 1886668
ggagaaaggugggcuuuca

SEQ ID NO: 2420165 - RNA, 19 nt, Artificial Sequence
  Description of Artificial Sequence: Synthetic oligonucleotide
  Antisense strand to SEQ ID NO: 2420164
ugaaagcccaccuuucucc

SEQ ID NO: 2420166 - RNA, 19 nt, Artificial Sequence
  Description of Artificial Sequence: Synthetic oligonucleotide
  Sense strand starting at position 2141 of SEQ ID NO: 1886668
ucuuuacuguguuuaugca

SEQ ID NO: 2420167 - RNA, 19 nt, Artificial Sequence
  Description of Artificial Sequence: Synthetic oligonucleotide
  Antisense strand to SEQ ID NO: 2420166
ugcauaaacacaguaaaga

SEQ ID NO: 2420168 - RNA, 19 nt, Artificial Sequence
  Description of Artificial Sequence: Synthetic oligonucleotide
  Sense strand starting at position 2148 of SEQ ID NO: 1886668
uguguuuaugcaugacuuu

SEQ ID NO: 2420169 - RNA, 19 nt, Artificial Sequence
  Description of Artificial Sequence: Synthetic oligonucleotide
  Antisense strand to SEQ ID NO: 2420168
aaagucaugcauaaacaca

SEQ ID NO: 2420170 - RNA, 19 nt, Artificial Sequence
  Description of Artificial Sequence: Synthetic oligonucleotide
  Sense strand starting at position 2166 of SEQ ID NO: 1886668
uuaugagauugucuuuccu

SEQ ID NO: 2420171 - RNA, 19 nt, Artificial Sequence
  Description of Artificial Sequence: Synthetic oligonucleotide
  Antisense strand to SEQ ID NO: 2420170
aggaaagacaaucucauaa

SEQ ID NO: 2420172 - RNA, 19 nt, Artificial Sequence
  Description of Artificial Sequence: Synthetic oligonucleotide
  Sense strand starting at position 2168 of SEQ ID NO: 1886668
augagauugucuuuccuuu

SEQ ID NO: 2420173 - RNA, 19 nt, Artificial Sequence
  Description of Artificial Sequence: Synthetic oligonucleotide
  Antisense strand to SEQ ID NO: 2420172
aaaggaaagacaaucucau

SEQ ID NO: 2420174 - RNA, 19 nt, Artificial Sequence
  Description of Artificial Sequence: Synthetic oligonucleotide
  Sense strand starting at position 2243 of SEQ ID NO: 1886668
ggaaacaaguucuauaaau

SEQ ID NO: 2420175 - RNA, 19 nt, Artificial Sequence
  Description of Artificial Sequence: Synthetic oligonucleotide
  Antisense strand to SEQ ID NO: 2420174
auuuauagaacuuguuucc

SEQ ID NO: 2420176 - RNA, 19 nt, Artificial Sequence
  Description of Artificial Sequence: Synthetic oligonucleotide
  Sense strand starting at position 2300 of SEQ ID NO: 1886668
agcugauucucacgagcua

SEQ ID NO: 2420177 - RNA, 19 nt, Artificial Sequence
  Description of Artificial Sequence: Synthetic oligonucleotide
  Antisense strand to SEQ ID NO: 2420176
uagcucgugagaaucagcu

SEQ ID NO: 2420178 - RNA, 19 nt, Artificial Sequence
  Description of Artificial Sequence: Synthetic oligonucleotide
  Sense strand starting at position 2963 of SEQ ID NO: 1886668
agcaacugcucagagcaau

SEQ ID NO: 2420179 - RNA, 19 nt, Artificial Sequence
  Description of Artificial Sequence: Synthetic oligonucleotide
  Antisense strand to SEQ ID NO: 2420178
auugcucugagcaguugcu

SEQ ID NO: 2420180 - RNA, 19 nt, Artificial Sequence
  Description of Artificial Sequence: Synthetic oligonucleotide
  Sense strand starting at position 2969 of SEQ ID NO: 1886668
ugcucagagcaaugagguu

SEQ ID NO: 2420181 - RNA, 19 nt, Artificial Sequence
  Description of Artificial Sequence: Synthetic oligonucleotide
  Antisense strand to SEQ ID NO: 2420180
aaccucauugcucugagca

SEQ ID NO: 2420182 - RNA, 19 nt, Artificial Sequence
  Description of Artificial Sequence: Synthetic oligonucleotide
  Sense strand starting at position 3040 of SEQ ID NO: 1886668
gcugacugcucccauagga

SEQ ID NO: 2420183 - RNA, 19 nt, Artificial Sequence
  Description of Artificial Sequence: Synthetic oligonucleotide
  Antisense strand to SEQ ID NO: 2420182
uccuaugggagcagucagc

SEQ ID NO: 2420184 - RNA, 19 nt, Artificial Sequence
  Description of Artificial Sequence: Synthetic oligonucleotide
  Sense strand starting at position 3865 of SEQ ID NO: 1886668
gguuauuccagccaguaag

SEQ ID NO: 2420185 - RNA, 19 nt, Artificial Sequence
  Description of Artificial Sequence: Synthetic oligonucleotide
  Antisense strand to SEQ ID NO: 2420184
cuuacuggcuggaauaacc

SEQ ID NO: 2420186 - RNA, 19 nt, Artificial Sequence
  Description of Artificial Sequence: Synthetic oligonucleotide
  Sense strand starting at position 3932 of SEQ ID NO: 1886668
gcgucuggcucugcugaau

SEQ ID NO: 2420187 - RNA, 19 nt, Artificial Sequence
  Description of Artificial Sequence: Synthetic oligonucleotide
  Antisense strand to SEQ ID NO: 2420186
auucagcagagccagacgc

SEQ ID NO: 2420188 - RNA, 19 nt, Artificial Sequence
  Description of Artificial Sequence: Synthetic oligonucleotide
  Sense strand starting at position 47 of SEQ ID NO: 1886669
cccaaaucaugagaacaug

SEQ ID NO: 2420189 - RNA, 19 nt, Artificial Sequence
  Description of Artificial Sequence: Synthetic oligonucleotide
  Antisense strand to SEQ ID NO: 2420188
cauguucucaugauuuggg

SEQ ID NO: 2420190 - RNA, 19 nt, Artificial Sequence
  Description of Artificial Sequence: Synthetic oligonucleotide
  Sense strand starting at position 55 of SEQ ID NO: 1886669
augagaacauggucucuuu

SEQ ID NO: 2420191 - RNA, 19 nt, Artificial Sequence
  Description of Artificial Sequence: Synthetic oligonucleotide
  Antisense strand to SEQ ID NO: 2420190
aaagagaccauguucucau

SEQ ID NO: 2420192 - RNA, 19 nt, Artificial Sequence
  Description of Artificial Sequence: Synthetic oligonucleotide
  Sense strand starting at position 121 of SEQ ID NO: 1886669
aacacaucuuccugagggu

SEQ ID NO: 2420193 - RNA, 19 nt, Artificial Sequence
  Description of Artificial Sequence: Synthetic oligonucleotide
  Antisense strand to SEQ ID NO: 2420192
acccucaggaagauguguu

SEQ ID NO: 2420194 - RNA, 19 nt, Artificial Sequence
  Description of Artificial Sequence: Synthetic oligonucleotide
  Sense strand starting at position 140 of SEQ ID NO: 1886669
caggguacccguuaucuuu

SEQ ID NO: 2420195 - RNA, 19 nt, Artificial Sequence
  Description of Artificial Sequence: Synthetic oligonucleotide
  Antisense strand to SEQ ID NO: 2420194
aaagauaacggguacccug

SEQ ID NO: 2420196 - RNA, 19 nt, Artificial Sequence
  Description of Artificial Sequence: Synthetic oligonucleotide
  Sense strand starting at position 146 of SEQ ID NO: 1886669
acccguuaucuuugguuua

SEQ ID NO: 2420197 - RNA, 19 nt, Artificial Sequence
  Description of Artificial Sequence: Synthetic oligonucleotide
  Antisense strand to SEQ ID NO: 2420196
uaaaccaaagauaacgggu

SEQ ID NO: 2420198 - RNA, 19 nt, Artificial Sequence
  Description of Artificial Sequence: Synthetic oligonucleotide
  Sense strand starting at position 147 of SEQ ID NO: 1886669
cccguuaucuuugguuuaa

SEQ ID NO: 2420199 - RNA, 19 nt, Artificial Sequence
  Description of Artificial Sequence: Synthetic oligonucleotide
  Antisense strand to SEQ ID NO: 2420198
uuaaaccaaagauaacggg

SEQ ID NO: 2420200 - RNA, 19 nt, Artificial Sequence
  Description of Artificial Sequence: Synthetic oligonucleotide
  Sense strand starting at position 148 of SEQ ID NO: 1886669
ccguuaucuuugguuuaaa

SEQ ID NO: 2420201 - RNA, 19 nt, Artificial Sequence
  Description of Artificial Sequence: Synthetic oligonucleotide
  Antisense strand to SEQ ID NO: 2420200
uuuaaaccaaagauaacgg

SEQ ID NO: 2420202 - RNA, 19 nt, Artificial Sequence
  Description of Artificial Sequence: Synthetic oligonucleotide
  Sense strand starting at position 599 of SEQ ID NO: 1886669
gccuguggccuguuucuau

SEQ ID NO: 2420203 - RNA, 19 nt, Artificial Sequence
  Description of Artificial Sequence: Synthetic oligonucleotide
  Antisense strand to SEQ ID NO: 2420202
auagaaacaggccacaggc

SEQ ID NO: 2420204 - RNA, 19 nt, Artificial Sequence
  Description of Artificial Sequence: Synthetic oligonucleotide
  Sense strand starting at position 602 of SEQ ID NO: 1886669
uguggccuguuucuauaaa

SEQ ID NO: 2420205 - RNA, 19 nt, Artificial Sequence
  Description of Artificial Sequence: Synthetic oligonucleotide
  Antisense strand to SEQ ID NO: 2420204
uuuauagaaacaggccaca

SEQ ID NO: 2420206 - RNA, 19 nt, Artificial Sequence
  Description of Artificial Sequence: Synthetic oligonucleotide
  Sense strand starting at position 603 of SEQ ID NO: 1886669
guggccuguuucuauaaau

SEQ ID NO: 2420207 - RNA, 19 nt, Artificial Sequence
  Description of Artificial Sequence: Synthetic oligonucleotide
  Antisense strand to SEQ ID NO: 2420206
auuuauagaaacaggccac

SEQ ID NO: 2420208 - RNA, 19 nt, Artificial Sequence
  Description of Artificial Sequence: Synthetic oligonucleotide
  Sense strand starting at position 668 of SEQ ID NO: 1886669
cccgcugcuccuguuguaa

SEQ ID NO: 2420209 - RNA, 19 nt, Artificial Sequence
  Description of Artificial Sequence: Synthetic oligonucleotide
  Antisense strand to SEQ ID NO: 2420208
uuacaacaggagcagcggg

SEQ ID NO: 2420210 - RNA, 19 nt, Artificial Sequence
  Description of Artificial Sequence: Synthetic oligonucleotide
  Sense strand starting at position 899 of SEQ ID NO: 1886669
cugugagacuuuccaagag

SEQ ID NO: 2420211 - RNA, 19 nt, Artificial Sequence
  Description of Artificial Sequence: Synthetic oligonucleotide
  Antisense strand to SEQ ID NO: 2420210
cucuuggaaagucucacag

SEQ ID NO: 2420212 - RNA, 19 nt, Artificial Sequence
  Description of Artificial Sequence: Synthetic oligonucleotide
  Sense strand starting at position 919 of SEQ ID NO: 1886669
ucuuaagaggcaggaguuu

SEQ ID NO: 2420213 - RNA, 19 nt, Artificial Sequence
  Description of Artificial Sequence: Synthetic oligonucleotide
  Antisense strand to SEQ ID NO: 2420212
aaacuccugccucuuaaga

SEQ ID NO: 2420214 - RNA, 19 nt, Artificial Sequence
  Description of Artificial Sequence: Synthetic oligonucleotide
  Sense strand starting at position 984 of SEQ ID NO: 1886669
uggucucaggccugaaauc

SEQ ID NO: 2420215 - RNA, 19 nt, Artificial Sequence
  Description of Artificial Sequence: Synthetic oligonucleotide
  Antisense strand to SEQ ID NO: 2420214
gauuucaggccugagacca

SEQ ID NO: 2420216 - RNA, 19 nt, Artificial Sequence
  Description of Artificial Sequence: Synthetic oligonucleotide
  Sense strand starting at position 1343 of SEQ ID NO: 1886669
ccaagaucucccugcugca

SEQ ID NO: 2420217 - RNA, 19 nt, Artificial Sequence
  Description of Artificial Sequence: Synthetic oligonucleotide
  Antisense strand to SEQ ID NO: 2420216
ugcagcagggagaucuugg

SEQ ID NO: 2420218 - RNA, 19 nt, Artificial Sequence
  Description of Artificial Sequence: Synthetic oligonucleotide
  Sense strand starting at position 1346 of SEQ ID NO: 1886669
agaucucccugcugcauua

SEQ ID NO: 2420219 - RNA, 19 nt, Artificial Sequence
  Description of Artificial Sequence: Synthetic oligonucleotide
  Antisense strand to SEQ ID NO: 2420218
uaaugcagcagggagaucu

SEQ ID NO: 2420220 - RNA, 19 nt, Artificial Sequence
  Description of Artificial Sequence: Synthetic oligonucleotide
  Sense strand starting at position 1456 of SEQ ID NO: 1886669
acggcuuauuugucaggca

SEQ ID NO: 2420221 - RNA, 19 nt, Artificial Sequence
  Description of Artificial Sequence: Synthetic oligonucleotide
  Antisense strand to SEQ ID NO: 2420220
ugccugacaaauaagccgu

SEQ ID NO: 2420222 - RNA, 19 nt, Artificial Sequence
  Description of Artificial Sequence: Synthetic oligonucleotide
  Sense strand starting at position 1459 of SEQ ID NO: 1886669
gcuuauuugucaggcacca

SEQ ID NO: 2420223 - RNA, 19 nt, Artificial Sequence
  Description of Artificial Sequence: Synthetic oligonucleotide
  Antisense strand to SEQ ID NO: 2420222
uggugccugacaaauaagc

SEQ ID NO: 2420224 - RNA, 19 nt, Artificial Sequence
  Description of Artificial Sequence: Synthetic oligonucleotide
  Sense strand starting at position 1654 of SEQ ID NO: 1886669
aucagaagcuagugaauuu

SEQ ID NO: 2420225 - RNA, 19 nt, Artificial Sequence
  Description of Artificial Sequence: Synthetic oligonucleotide
  Antisense strand to SEQ ID NO: 2420224
aaauucacuagcuucugau

SEQ ID NO: 2420226 - RNA, 19 nt, Artificial Sequence
  Description of Artificial Sequence: Synthetic oligonucleotide
  Sense strand starting at position 1663 of SEQ ID NO: 1886669
uagugaauuugcuggagaa

SEQ ID NO: 2420227 - RNA, 19 nt, Artificial Sequence
  Description of Artificial Sequence: Synthetic oligonucleotide
  Antisense strand to SEQ ID NO: 2420226
uucuccagcaaauucacua

SEQ ID NO: 2420228 - RNA, 19 nt, Artificial Sequence
  Description of Artificial Sequence: Synthetic oligonucleotide
  Sense strand starting at position 1817 of SEQ ID NO: 1886669
gggcuucuguaauggcaga

SEQ ID NO: 2420229 - RNA, 19 nt, Artificial Sequence
  Description of Artificial Sequence: Synthetic oligonucleotide
  Antisense strand to SEQ ID NO: 2420228
ucugccauuacagaagccc

SEQ ID NO: 2420230 - RNA, 19 nt, Artificial Sequence
  Description of Artificial Sequence: Synthetic oligonucleotide
  Sense strand starting at position 2502 of SEQ ID NO: 1886669
cuggucagcucucucaaca

SEQ ID NO: 2420231 - RNA, 19 nt, Artificial Sequence
  Description of Artificial Sequence: Synthetic oligonucleotide
  Antisense strand to SEQ ID NO: 2420230
uguugagagagcugaccag

SEQ ID NO: 2420232 - RNA, 19 nt, Artificial Sequence
  Description of Artificial Sequence: Synthetic oligonucleotide
  Sense strand starting at position 2581 of SEQ ID NO: 1886669
gcuagaguuugcugcaccu

SEQ ID NO: 2420233 - RNA, 19 nt, Artificial Sequence
  Description of Artificial Sequence: Synthetic oligonucleotide
  Antisense strand to SEQ ID NO: 2420232
aggugcagcaaacucuagc

SEQ ID NO: 2420234 - RNA, 19 nt, Artificial Sequence
  Description of Artificial Sequence: Synthetic oligonucleotide
  Sense strand starting at position 3222 of SEQ ID NO: 1886669
gcgagacucugucuugucu

SEQ ID NO: 2420235 - RNA, 19 nt, Artificial Sequence
  Description of Artificial Sequence: Synthetic oligonucleotide
  Antisense strand to SEQ ID NO: 2420234
agacaagacagagucucgc

SEQ ID NO: 2420236 - RNA, 19 nt, Artificial Sequence
  Description of Artificial Sequence: Synthetic oligonucleotide
  Sense strand starting at position 3224 of SEQ ID NO: 1886669
gagacucugucuugucuca

SEQ ID NO: 2420237 - RNA, 19 nt, Artificial Sequence
  Description of Artificial Sequence: Synthetic oligonucleotide
  Antisense strand to SEQ ID NO: 2420236
ugagacaagacagagucuc

SEQ ID NO: 2420238 - RNA, 19 nt, Artificial Sequence
  Description of Artificial Sequence: Synthetic oligonucleotide
  Sense strand starting at position 3318 of SEQ ID NO: 1886669
uggcuugaaacaggucuua

SEQ ID NO: 2420239 - RNA, 19 nt, Artificial Sequence
  Description of Artificial Sequence: Synthetic oligonucleotide
  Antisense strand to SEQ ID NO: 2420238
uaagaccuguuucaagcca

SEQ ID NO: 2420240 - RNA, 19 nt, Artificial Sequence
  Description of Artificial Sequence: Synthetic oligonucleotide
  Sense strand starting at position 3356 of SEQ ID NO: 1886669
cggaguaacuguuagcugu

SEQ ID NO: 2420241 - RNA, 19 nt, Artificial Sequence
  Description of Artificial Sequence: Synthetic oligonucleotide
  Antisense strand to SEQ ID NO: 2420240
acagcuaacaguuacuccg

SEQ ID NO: 2420242 - RNA, 19 nt, Artificial Sequence
  Description of Artificial Sequence: Synthetic oligonucleotide
  Sense strand starting at position 3362 of SEQ ID NO: 1886669
aacuguuagcuguggccua

SEQ ID NO: 2420243 - RNA, 19 nt, Artificial Sequence
  Description of Artificial Sequence: Synthetic oligonucleotide
  Antisense strand to SEQ ID NO: 2420242
uaggccacagcuaacaguu

SEQ ID NO: 2420244 - RNA, 19 nt, Artificial Sequence
  Description of Artificial Sequence: Synthetic oligonucleotide
  Sense strand starting at position 3430 of SEQ ID NO: 1886669
ucuaaauucucggugccua

SEQ ID NO: 2420245 - RNA, 19 nt, Artificial Sequence
  Description of Artificial Sequence: Synthetic oligonucleotide
  Antisense strand to SEQ ID NO: 2420244
uaggcaccgagaauuuaga

SEQ ID NO: 2420246 - RNA, 19 nt, Artificial Sequence
  Description of Artificial Sequence: Synthetic oligonucleotide
  Sense strand starting at position 3515 of SEQ ID NO: 1886669
gauguacugcucuauagcu

SEQ ID NO: 2420247 - RNA, 19 nt, Artificial Sequence
  Description of Artificial Sequence: Synthetic oligonucleotide
  Antisense strand to SEQ ID NO: 2420246
agcuauagagcaguacauc

SEQ ID NO: 2420248 - RNA, 19 nt, Artificial Sequence
  Description of Artificial Sequence: Synthetic oligonucleotide
  Sense strand starting at position 3584 of SEQ ID NO: 1886669
agcuaagucucuguccaau

SEQ ID NO: 2420249 - RNA, 19 nt, Artificial Sequence
  Description of Artificial Sequence: Synthetic oligonucleotide
  Antisense strand to SEQ ID NO: 2420248
auuggacagagacuuagcu

SEQ ID NO: 2420250 - RNA, 19 nt, Artificial Sequence
  Description of Artificial Sequence: Synthetic oligonucleotide
  Sense strand starting at position 3586 of SEQ ID NO: 1886669
cuaagucucuguccaauac

SEQ ID NO: 2420251 - RNA, 19 nt, Artificial Sequence
  Description of Artificial Sequence: Synthetic oligonucleotide
  Antisense strand to SEQ ID NO: 2420250
guauuggacagagacuuag

SEQ ID NO: 2420252 - RNA, 19 nt, Artificial Sequence
  Description of Artificial Sequence: Synthetic oligonucleotide
  Sense strand starting at position 3596 of SEQ ID NO: 1886669
guccaauacugacauauug

SEQ ID NO: 2420253 - RNA, 19 nt, Artificial Sequence
  Description of Artificial Sequence: Synthetic oligonucleotide
  Antisense strand to SEQ ID NO: 2420252
caauaugucaguauuggac

SEQ ID NO: 2420254 - RNA, 19 nt, Artificial Sequence
  Description of Artificial Sequence: Synthetic oligonucleotide
  Sense strand starting at position 3603 of SEQ ID NO: 1886669
acugacauauuggacaauu

SEQ ID NO: 2420255 - RNA, 19 nt, Artificial Sequence
  Description of Artificial Sequence: Synthetic oligonucleotide
  Antisense strand to SEQ ID NO: 2420254
aauuguccaauaugucagu

SEQ ID NO: 2420256 - RNA, 19 nt, Artificial Sequence
  Description of Artificial Sequence: Synthetic oligonucleotide
  Sense strand starting at position 3612 of SEQ ID NO: 1886669
uuggacaauuuguaaggaa

SEQ ID NO: 2420257 - RNA, 19 nt, Artificial Sequence
  Description of Artificial Sequence: Synthetic oligonucleotide
  Antisense strand to SEQ ID NO: 2420256
uuccuuacaaauuguccaa

SEQ ID NO: 2420258 - RNA, 19 nt, Artificial Sequence
  Description of Artificial Sequence: Synthetic oligonucleotide
  Sense strand starting at position 3615 of SEQ ID NO: 1886669
gacaauuuguaaggaagag

SEQ ID NO: 2420259 - RNA, 19 nt, Artificial Sequence
  Description of Artificial Sequence: Synthetic oligonucleotide
  Antisense strand to SEQ ID NO: 2420258
cucuuccuuacaaauuguc

SEQ ID NO: 2420260 - RNA, 19 nt, Artificial Sequence
  Description of Artificial Sequence: Synthetic oligonucleotide
  Sense strand starting at position 3682 of SEQ ID NO: 1886669
uccauccauucggcaaaua

SEQ ID NO: 2420261 - RNA, 19 nt, Artificial Sequence
  Description of Artificial Sequence: Synthetic oligonucleotide
  Antisense strand to SEQ ID NO: 2420260
uauuugccgaauggaugga

SEQ ID NO: 2420262 - RNA, 19 nt, Artificial Sequence
  Description of Artificial Sequence: Synthetic oligonucleotide
  Sense strand starting at position 3683 of SEQ ID NO: 1886669
ccauccauucggcaaauau

SEQ ID NO: 2420263 - RNA, 19 nt, Artificial Sequence
  Description of Artificial Sequence: Synthetic oligonucleotide
  Antisense strand to SEQ ID NO: 2420262
auauuugccgaauggaugg

SEQ ID NO: 2420264 - RNA, 19 nt, Artificial Sequence
  Description of Artificial Sequence: Synthetic oligonucleotide
  Sense strand starting at position 1401 of SEQ ID NO: 1886671
ggcgccuccgucugagaga

SEQ ID NO: 2420265 - RNA, 19 nt, Artificial Sequence
  Description of Artificial Sequence: Synthetic oligonucleotide
  Antisense strand to SEQ ID NO: 2420264
ucucucagacggaggcgcc

SEQ ID NO: 2420266 - RNA, 19 nt, Artificial Sequence
  Description of Artificial Sequence: Synthetic oligonucleotide
  Sense strand starting at position 1467 of SEQ ID NO: 1886671
gguagcgaugcucacguaa

SEQ ID NO: 2420267 - RNA, 19 nt, Artificial Sequence
  Description of Artificial Sequence: Synthetic oligonucleotide
  Antisense strand to SEQ ID NO: 2420266
uuacgugagcaucgcuacc

SEQ ID NO: 2420268 - RNA, 19 nt, Artificial Sequence
  Description of Artificial Sequence: Synthetic oligonucleotide
  Sense strand starting at position 1469 of SEQ ID NO: 1886671
uagcgaugcucacguaacu

SEQ ID NO: 2420269 - RNA, 19 nt, Artificial Sequence
  Description of Artificial Sequence: Synthetic oligonucleotide
  Antisense strand to SEQ ID NO: 2420268
aguuacgugagcaucgcua

SEQ ID NO: 2420270 - RNA, 19 nt, Artificial Sequence
  Description of Artificial Sequence: Synthetic oligonucleotide
  Sense strand starting at position 1470 of SEQ ID NO: 1886671
agcgaugcucacguaacuu

SEQ ID NO: 2420271 - RNA, 19 nt, Artificial Sequence
  Description of Artificial Sequence: Synthetic oligonucleotide
  Antisense strand to SEQ ID NO: 2420270
aaguuacgugagcaucgcu

SEQ ID NO: 2420272 - RNA, 19 nt, Artificial Sequence
  Description of Artificial Sequence: Synthetic oligonucleotide
  Sense strand starting at position 97 of SEQ ID NO: 1886672
ucggaucuuccacaugcua

SEQ ID NO: 2420273 - RNA, 19 nt, Artificial Sequence
  Description of Artificial Sequence: Synthetic oligonucleotide
  Antisense strand to SEQ ID NO: 2420272
uagcauguggaagauccga

SEQ ID NO: 2420274 - RNA, 19 nt, Artificial Sequence
  Description of Artificial Sequence: Synthetic oligonucleotide
  Sense strand starting at position 138 of SEQ ID NO: 1886672
ucuggaagauguccagacu

SEQ ID NO: 2420275 - RNA, 19 nt, Artificial Sequence
  Description of Artificial Sequence: Synthetic oligonucleotide
  Antisense strand to SEQ ID NO: 2420274
agucuggacaucuuccaga

SEQ ID NO: 2420276 - RNA, 19 nt, Artificial Sequence
  Description of Artificial Sequence: Synthetic oligonucleotide
  Sense strand starting at position 369 of SEQ ID NO: 1886672
uuugcacagcucugcuaua

SEQ ID NO: 2420277 - RNA, 19 nt, Artificial Sequence
  Description of Artificial Sequence: Synthetic oligonucleotide
  Antisense strand to SEQ ID NO: 2420276
uauagcagagcugugcaaa

SEQ ID NO: 2420278 - RNA, 19 nt, Artificial Sequence
  Description of Artificial Sequence: Synthetic oligonucleotide
  Sense strand starting at position 902 of SEQ ID NO: 1886672
ccgugauuagccugccuca

SEQ ID NO: 2420279 - RNA, 19 nt, Artificial Sequence
  Description of Artificial Sequence: Synthetic oligonucleotide
  Antisense strand to SEQ ID NO: 2420278
ugaggcaggcuaaucacgg

SEQ ID NO: 2420280 - RNA, 19 nt, Artificial Sequence
  Description of Artificial Sequence: Synthetic oligonucleotide
  Sense strand starting at position 1466 of SEQ ID NO: 1886672
gguagcgaugcucacguaa

SEQ ID NO: 2420281 - RNA, 19 nt, Artificial Sequence
  Description of Artificial Sequence: Synthetic oligonucleotide
  Antisense strand to SEQ ID NO: 2420280
uuacgugagcaucgcuacc

SEQ ID NO: 2420282 - RNA, 19 nt, Artificial Sequence
  Description of Artificial Sequence: Synthetic oligonucleotide
  Sense strand starting at position 1468 of SEQ ID NO: 1886672
uagcgaugcucacguaacu

SEQ ID NO: 2420283 - RNA, 19 nt, Artificial Sequence
  Description of Artificial Sequence: Synthetic oligonucleotide
  Antisense strand to SEQ ID NO: 2420282
aguuacgugagcaucgcua

SEQ ID NO: 2420284 - RNA, 19 nt, Artificial Sequence
  Description of Artificial Sequence: Synthetic oligonucleotide
  Sense strand starting at position 1469 of SEQ ID NO: 1886672
agcgaugcucacguaacuu

SEQ ID NO: 2420285 - RNA, 19 nt, Artificial Sequence
  Description of Artificial Sequence: Synthetic oligonucleotide
  Antisense strand to SEQ ID NO: 2420284
aaguuacgugagcaucgcu

SEQ ID NO: 2420286 - RNA, 19 nt, Artificial Sequence
  Description of Artificial Sequence: Synthetic oligonucleotide
  Sense strand starting at position 1929 of SEQ ID NO: 1886672
cgcuguuggcuccugugaa

SEQ ID NO: 2420287 - RNA, 19 nt, Artificial Sequence
  Description of Artificial Sequence: Synthetic oligonucleotide
  Antisense strand to SEQ ID NO: 2420286
uucacaggagccaacagcg

SEQ ID NO: 2420288 - RNA, 19 nt, Artificial Sequence
  Description of Artificial Sequence: Synthetic oligonucleotide
  Sense strand starting at position 1930 of SEQ ID NO: 1886672
gcuguuggcuccugugaag

SEQ ID NO: 2420289 - RNA, 19 nt, Artificial Sequence
  Description of Artificial Sequence: Synthetic oligonucleotide
  Antisense strand to SEQ ID NO: 2420288
cuucacaggagccaacagc

SEQ ID NO: 2420290 - RNA, 19 nt, Artificial Sequence
  Description of Artificial Sequence: Synthetic oligonucleotide
  Sense strand starting at position 1933 of SEQ ID NO: 1886672
guuggcuccugugaagaca

SEQ ID NO: 2420291 - RNA, 19 nt, Artificial Sequence
  Description of Artificial Sequence: Synthetic oligonucleotide
  Antisense strand to SEQ ID NO: 2420290
ugucuucacaggagccaac

SEQ ID NO: 2420292 - RNA, 19 nt, Artificial Sequence
  Description of Artificial Sequence: Synthetic oligonucleotide
  Sense strand starting at position 1401 of SEQ ID NO: 1886674
ggcgccuccgucugagaga

SEQ ID NO: 2420293 - RNA, 19 nt, Artificial Sequence
  Description of Artificial Sequence: Synthetic oligonucleotide
  Antisense strand to SEQ ID NO: 2420292
ucucucagacggaggcgcc

SEQ ID NO: 2420294 - RNA, 19 nt, Artificial Sequence
  Description of Artificial Sequence: Synthetic oligonucleotide
  Sense strand starting at position 1467 of SEQ ID NO: 1886674
gguagcgaugcucacguaa

SEQ ID NO: 2420295 - RNA, 19 nt, Artificial Sequence
  Description of Artificial Sequence: Synthetic oligonucleotide
  Antisense strand to SEQ ID NO: 2420294
uuacgugagcaucgcuacc

SEQ ID NO: 2420296 - RNA, 19 nt, Artificial Sequence
  Description of Artificial Sequence: Synthetic oligonucleotide
  Sense strand starting at position 1469 of SEQ ID NO: 1886674
uagcgaugcucacguaacu

SEQ ID NO: 2420297 - RNA, 19 nt, Artificial Sequence
  Description of Artificial Sequence: Synthetic oligonucleotide
  Antisense strand to SEQ ID NO: 2420296
aguuacgugagcaucgcua

SEQ ID NO: 2420298 - RNA, 19 nt, Artificial Sequence
  Description of Artificial Sequence: Synthetic oligonucleotide
  Sense strand starting at position 1470 of SEQ ID NO: 1886674
agcgaugcucacguaacuu

SEQ ID NO: 2420299 - RNA, 19 nt, Artificial Sequence
  Description of Artificial Sequence: Synthetic oligonucleotide
  Antisense strand to SEQ ID NO: 2420298
aaguuacgugagcaucgcu

SEQ ID NO: 2420300 - RNA, 19 nt, Artificial Sequence
  Description of Artificial Sequence: Synthetic oligonucleotide
  Sense strand starting at position 97 of SEQ ID NO: 1886675
ucggaucuuccacaugcua

SEQ ID NO: 2420301 - RNA, 19 nt, Artificial Sequence
  Description of Artificial Sequence: Synthetic oligonucleotide
  Antisense strand to SEQ ID NO: 2420300
uagcauguggaagauccga

SEQ ID NO: 2420302 - RNA, 19 nt, Artificial Sequence
  Description of Artificial Sequence: Synthetic oligonucleotide
  Sense strand starting at position 138 of SEQ ID NO: 1886675
ucuggaagauguccagacu

SEQ ID NO: 2420303 - RNA, 19 nt, Artificial Sequence
  Description of Artificial Sequence: Synthetic oligonucleotide
  Antisense strand to SEQ ID NO: 2420302
agucuggacaucuuccaga

SEQ ID NO: 2420304 - RNA, 19 nt, Artificial Sequence
  Description of Artificial Sequence: Synthetic oligonucleotide
  Sense strand starting at position 369 of SEQ ID NO: 1886675
uuugcacagcucugcuaua

SEQ ID NO: 2420305 - RNA, 19 nt, Artificial Sequence
  Description of Artificial Sequence: Synthetic oligonucleotide
  Antisense strand to SEQ ID NO: 2420304
uauagcagagcugugcaaa

SEQ ID NO: 2420306 - RNA, 19 nt, Artificial Sequence
  Description of Artificial Sequence: Synthetic oligonucleotide
  Sense strand starting at position 902 of SEQ ID NO: 1886675
ccgugauuagccugccuca

SEQ ID NO: 2420307 - RNA, 19 nt, Artificial Sequence
  Description of Artificial Sequence: Synthetic oligonucleotide
  Antisense strand to SEQ ID NO: 2420306
ugaggcaggcuaaucacgg

SEQ ID NO: 2420308 - RNA, 19 nt, Artificial Sequence
  Description of Artificial Sequence: Synthetic oligonucleotide
  Sense strand starting at position 1466 of SEQ ID NO: 1886675
gguagcgaugcucacguaa

SEQ ID NO: 2420309 - RNA, 19 nt, Artificial Sequence
  Description of Artificial Sequence: Synthetic oligonucleotide
  Antisense strand to SEQ ID NO: 2420308
uuacgugagcaucgcuacc

SEQ ID NO: 2420310 - RNA, 19 nt, Artificial Sequence
  Description of Artificial Sequence: Synthetic oligonucleotide
  Sense strand starting at position 1468 of SEQ ID NO: 1886675
uagcgaugcucacguaacu

SEQ ID NO: 2420311 - RNA, 19 nt, Artificial Sequence
  Description of Artificial Sequence: Synthetic oligonucleotide
  Antisense strand to SEQ ID NO: 2420310
aguuacgugagcaucgcua

SEQ ID NO: 2420312 - RNA, 19 nt, Artificial Sequence
  Description of Artificial Sequence: Synthetic oligonucleotide
  Sense strand starting at position 1469 of SEQ ID NO: 1886675
agcgaugcucacguaacuu

SEQ ID NO: 2420313 - RNA, 19 nt, Artificial Sequence
  Description of Artificial Sequence: Synthetic oligonucleotide
  Antisense strand to SEQ ID NO: 2420312
aaguuacgugagcaucgcu

SEQ ID NO: 2420314 - RNA, 19 nt, Artificial Sequence
  Description of Artificial Sequence: Synthetic oligonucleotide
  Sense strand starting at position 1929 of SEQ ID NO: 1886675
cgcuguuggcuccugugaa

SEQ ID NO: 2420315 - RNA, 19 nt, Artificial Sequence
  Description of Artificial Sequence: Synthetic oligonucleotide
  Antisense strand to SEQ ID NO: 2420314
uucacaggagccaacagcg

SEQ ID NO: 2420316 - RNA, 19 nt, Artificial Sequence
  Description of Artificial Sequence: Synthetic oligonucleotide
  Sense strand starting at position 1930 of SEQ ID NO: 1886675
gcuguuggcuccugugaag

SEQ ID NO: 2420317 - RNA, 19 nt, Artificial Sequence
  Description of Artificial Sequence: Synthetic oligonucleotide
  Antisense strand to SEQ ID NO: 2420316
cuucacaggagccaacagc

SEQ ID NO: 2420318 - RNA, 19 nt, Artificial Sequence
  Description of Artificial Sequence: Synthetic oligonucleotide
  Sense strand starting at position 1933 of SEQ ID NO: 1886675
guuggcuccugugaagaca

SEQ ID NO: 2420319 - RNA, 19 nt, Artificial Sequence
  Description of Artificial Sequence: Synthetic oligonucleotide
  Antisense strand to SEQ ID NO: 2420318
ugucuucacaggagccaac

SEQ ID NO: 2420320 - RNA, 19 nt, Artificial Sequence
  Description of Artificial Sequence: Synthetic oligonucleotide
  Sense strand starting at position 1401 of SEQ ID NO: 1886677
ggcgccuccgucugagaga

SEQ ID NO: 2420321 - RNA, 19 nt, Artificial Sequence
  Description of Artificial Sequence: Synthetic oligonucleotide
  Antisense strand to SEQ ID NO: 2420320
ucucucagacggaggcgcc

SEQ ID NO: 2420322 - RNA, 19 nt, Artificial Sequence
  Description of Artificial Sequence: Synthetic oligonucleotide
  Sense strand starting at position 1467 of SEQ ID NO: 1886677
gguagcgaugcucacguaa

SEQ ID NO: 2420323 - RNA, 19 nt, Artificial Sequence
  Description of Artificial Sequence: Synthetic oligonucleotide
  Antisense strand to SEQ ID NO: 2420322
uuacgugagcaucgcuacc

SEQ ID NO: 2420324 - RNA, 19 nt, Artificial Sequence
  Description of Artificial Sequence: Synthetic oligonucleotide
  Sense strand starting at position 1469 of SEQ ID NO: 1886677
uagcgaugcucacguaacu

SEQ ID NO: 2420325 - RNA, 19 nt, Artificial Sequence
  Description of Artificial Sequence: Synthetic oligonucleotide
  Antisense strand to SEQ ID NO: 2420324
aguuacgugagcaucgcua

SEQ ID NO: 2420326 - RNA, 19 nt, Artificial Sequence
  Description of Artificial Sequence: Synthetic oligonucleotide
  Sense strand starting at position 1470 of SEQ ID NO: 1886677
agcgaugcucacguaacuu

SEQ ID NO: 2420327 - RNA, 19 nt, Artificial Sequence
  Description of Artificial Sequence: Synthetic oligonucleotide
  Antisense strand to SEQ ID NO: 2420326
aaguuacgugagcaucgcu

SEQ ID NO: 2420328 - RNA, 19 nt, Artificial Sequence
  Description of Artificial Sequence: Synthetic oligonucleotide
  Sense strand starting at position 97 of SEQ ID NO: 1886678
ucggaucuuccacaugcua

SEQ ID NO: 2420329 - RNA, 19 nt, Artificial Sequence
  Description of Artificial Sequence: Synthetic oligonucleotide
  Antisense strand to SEQ ID NO: 2420328
uagcauguggaagauccga

SEQ ID NO: 2420330 - RNA, 19 nt, Artificial Sequence
  Description of Artificial Sequence: Synthetic oligonucleotide
  Sense strand starting at position 138 of SEQ ID NO: 1886678
ucuggaagauguccagacu

SEQ ID NO: 2420331 - RNA, 19 nt, Artificial Sequence
  Description of Artificial Sequence: Synthetic oligonucleotide
  Antisense strand to SEQ ID NO: 2420330
agucuggacaucuuccaga

SEQ ID NO: 2420332 - RNA, 19 nt, Artificial Sequence
  Description of Artificial Sequence: Synthetic oligonucleotide
  Sense strand starting at position 369 of SEQ ID NO: 1886678
uuugcacagcucugcuaua

SEQ ID NO: 2420333 - RNA, 19 nt, Artificial Sequence
  Description of Artificial Sequence: Synthetic oligonucleotide
  Antisense strand to SEQ ID NO: 2420332
uauagcagagcugugcaaa

SEQ ID NO: 2420334 - RNA, 19 nt, Artificial Sequence
  Description of Artificial Sequence: Synthetic oligonucleotide
  Sense strand starting at position 902 of SEQ ID NO: 1886678
ccgugauuagccugccuca

SEQ ID NO: 2420335 - RNA, 19 nt, Artificial Sequence
  Description of Artificial Sequence: Synthetic oligonucleotide
  Antisense strand to SEQ ID NO: 2420334
ugaggcaggcuaaucacgg

SEQ ID NO: 2420336 - RNA, 19 nt, Artificial Sequence
  Description of Artificial Sequence: Synthetic oligonucleotide
  Sense strand starting at position 1466 of SEQ ID NO: 1886678
gguagcgaugcucacguaa

SEQ ID NO: 2420337 - RNA, 19 nt, Artificial Sequence
  Description of Artificial Sequence: Synthetic oligonucleotide
  Antisense strand to SEQ ID NO: 2420336
uuacgugagcaucgcuacc

SEQ ID NO: 2420338 - RNA, 19 nt, Artificial Sequence
  Description of Artificial Sequence: Synthetic oligonucleotide
  Sense strand starting at position 1468 of SEQ ID NO: 1886678
uagcgaugcucacguaacu

SEQ ID NO: 2420339 - RNA, 19 nt, Artificial Sequence
  Description of Artificial Sequence: Synthetic oligonucleotide
  Antisense strand to SEQ ID NO: 2420338
aguuacgugagcaucgcua

SEQ ID NO: 2420340 - RNA, 19 nt, Artificial Sequence
  Description of Artificial Sequence: Synthetic oligonucleotide
  Sense strand starting at position 1469 of SEQ ID NO: 1886678
agcgaugcucacguaacuu

SEQ ID NO: 2420341 - RNA, 19 nt, Artificial Sequence
  Description of Artificial Sequence: Synthetic oligonucleotide
  Antisense strand to SEQ ID NO: 2420340
aaguuacgugagcaucgcu

SEQ ID NO: 2420342 - RNA, 19 nt, Artificial Sequence
  Description of Artificial Sequence: Synthetic oligonucleotide
  Sense strand starting at position 1929 of SEQ ID NO: 1886678
cgcuguuggcuccugugaa

SEQ ID NO: 2420343 - RNA, 19 nt, Artificial Sequence
  Description of Artificial Sequence: Synthetic oligonucleotide
  Antisense strand to SEQ ID NO: 2420342
uucacaggagccaacagcg

SEQ ID NO: 2420344 - RNA, 19 nt, Artificial Sequence
  Description of Artificial Sequence: Synthetic oligonucleotide
  Sense strand starting at position 1930 of SEQ ID NO: 1886678
gcuguuggcuccugugaag

SEQ ID NO: 2420345 - RNA, 19 nt, Artificial Sequence
  Description of Artificial Sequence: Synthetic oligonucleotide
  Antisense strand to SEQ ID NO: 2420344
cuucacaggagccaacagc

SEQ ID NO: 2420346 - RNA, 19 nt, Artificial Sequence
  Description of Artificial Sequence: Synthetic oligonucleotide
  Sense strand starting at position 1933 of SEQ ID NO: 1886678
guuggcuccugugaagaca

SEQ ID NO: 2420347 - RNA, 19 nt, Artificial Sequence
  Description of Artificial Sequence: Synthetic oligonucleotide
  Antisense strand to SEQ ID NO: 2420346
ugucuucacaggagccaac

SEQ ID NO: 2420348 - RNA, 19 nt, Artificial Sequence
  Description of Artificial Sequence: Synthetic oligonucleotide
  Sense strand starting at position 319 of SEQ ID NO: 1886679
ucagaacucccuggugaga

SEQ ID NO: 2420349 - RNA, 19 nt, Artificial Sequence
  Description of Artificial Sequence: Synthetic oligonucleotide
  Antisense strand to SEQ ID NO: 2420348
ucucaccagggaguucuga

SEQ ID NO: 2420350 - RNA, 19 nt, Artificial Sequence
  Description of Artificial Sequence: Synthetic oligonucleotide
  Sense strand starting at position 386 of SEQ ID NO: 1886679
ggcaucgaguccucacaca

SEQ ID NO: 2420351 - RNA, 19 nt, Artificial Sequence
  Description of Artificial Sequence: Synthetic oligonucleotide
  Antisense strand to SEQ ID NO: 2420350
ugugugaggacucgaugcc

SEQ ID NO: 2420352 - RNA, 19 nt, Artificial Sequence
  Description of Artificial Sequence: Synthetic oligonucleotide
  Sense strand starting at position 414 of SEQ ID NO: 1886679
gaacucccguucuacagau

SEQ ID NO: 2420353 - RNA, 19 nt, Artificial Sequence
  Description of Artificial Sequence: Synthetic oligonucleotide
  Antisense strand to SEQ ID NO: 2420352
aucuguagaacgggaguuc

SEQ ID NO: 2420354 - RNA, 19 nt, Artificial Sequence
  Description of Artificial Sequence: Synthetic oligonucleotide
  Sense strand starting at position 454 of SEQ ID NO: 1886679
cauugagacuugcugggaa

SEQ ID NO: 2420355 - RNA, 19 nt, Artificial Sequence
  Description of Artificial Sequence: Synthetic oligonucleotide
  Antisense strand to SEQ ID NO: 2420354
uucccagcaagucucaaug

SEQ ID NO: 2420356 - RNA, 19 nt, Artificial Sequence
  Description of Artificial Sequence: Synthetic oligonucleotide
  Sense strand starting at position 505 of SEQ ID NO: 1886679
gcuccaaaguccuuaagcu

SEQ ID NO: 2420357 - RNA, 19 nt, Artificial Sequence
  Description of Artificial Sequence: Synthetic oligonucleotide
  Antisense strand to SEQ ID NO: 2420356
agcuuaaggacuuuggagc

SEQ ID NO: 2420358 - RNA, 19 nt, Artificial Sequence
  Description of Artificial Sequence: Synthetic oligonucleotide
  Sense strand starting at position 695 of SEQ ID NO: 1886679
ugugguucccugcaaauca

SEQ ID NO: 2420359 - RNA, 19 nt, Artificial Sequence
  Description of Artificial Sequence: Synthetic oligonucleotide
  Antisense strand to SEQ ID NO: 2420358
ugauuugcagggaaccaca

SEQ ID NO: 2420360 - RNA, 19 nt, Artificial Sequence
  Description of Artificial Sequence: Synthetic oligonucleotide
  Sense strand starting at position 714 of SEQ ID NO: 1886679
gccaaagacaggugucaga

SEQ ID NO: 2420361 - RNA, 19 nt, Artificial Sequence
  Description of Artificial Sequence: Synthetic oligonucleotide
  Antisense strand to SEQ ID NO: 2420360
ucugacaccugucuuuggc

SEQ ID NO: 2420362 - RNA, 19 nt, Artificial Sequence
  Description of Artificial Sequence: Synthetic oligonucleotide
  Sense strand starting at position 798 of SEQ ID NO: 1886679
ugagaaccaucugaaagga

SEQ ID NO: 2420363 - RNA, 19 nt, Artificial Sequence
  Description of Artificial Sequence: Synthetic oligonucleotide
  Antisense strand to SEQ ID NO: 2420362
uccuuucagaugguucuca

SEQ ID NO: 2420364 - RNA, 19 nt, Artificial Sequence
  Description of Artificial Sequence: Synthetic oligonucleotide
  Sense strand starting at position 833 of SEQ ID NO: 1886679
agcuauguuugcucacaca

SEQ ID NO: 2420365 - RNA, 19 nt, Artificial Sequence
  Description of Artificial Sequence: Synthetic oligonucleotide
  Antisense strand to SEQ ID NO: 2420364
ugugugagcaaacauagcu

SEQ ID NO: 2420366 - RNA, 19 nt, Artificial Sequence
  Description of Artificial Sequence: Synthetic oligonucleotide
  Sense strand starting at position 1717 of SEQ ID NO: 1886679
augagugucucauguccaa

SEQ ID NO: 2420367 - RNA, 19 nt, Artificial Sequence
  Description of Artificial Sequence: Synthetic oligonucleotide
  Antisense strand to SEQ ID NO: 2420366
uuggacaugagacacucau

SEQ ID NO: 2420368 - RNA, 19 nt, Artificial Sequence
  Description of Artificial Sequence: Synthetic oligonucleotide
  Sense strand starting at position 1721 of SEQ ID NO: 1886679
gugucucauguccaacaga

SEQ ID NO: 2420369 - RNA, 19 nt, Artificial Sequence
  Description of Artificial Sequence: Synthetic oligonucleotide
  Antisense strand to SEQ ID NO: 2420368
ucuguuggacaugagacac

SEQ ID NO: 2420370 - RNA, 19 nt, Artificial Sequence
  Description of Artificial Sequence: Synthetic oligonucleotide
  Sense strand starting at position 2109 of SEQ ID NO: 1886679
gagcuagucuccuagugag

SEQ ID NO: 2420371 - RNA, 19 nt, Artificial Sequence
  Description of Artificial Sequence: Synthetic oligonucleotide
  Antisense strand to SEQ ID NO: 2420370
cucacuaggagacuagcuc

SEQ ID NO: 2420372 - RNA, 19 nt, Artificial Sequence
  Description of Artificial Sequence: Synthetic oligonucleotide
  Sense strand starting at position 2112 of SEQ ID NO: 1886679
cuagucuccuagugaguca

SEQ ID NO: 2420373 - RNA, 19 nt, Artificial Sequence
  Description of Artificial Sequence: Synthetic oligonucleotide
  Antisense strand to SEQ ID NO: 2420372
ugacucacuaggagacuag

SEQ ID NO: 2420374 - RNA, 19 nt, Artificial Sequence
  Description of Artificial Sequence: Synthetic oligonucleotide
  Sense strand starting at position 2625 of SEQ ID NO: 1886679
ggccuucgggucugauuca

SEQ ID NO: 2420375 - RNA, 19 nt, Artificial Sequence
  Description of Artificial Sequence: Synthetic oligonucleotide
  Antisense strand to SEQ ID NO: 2420374
ugaaucagacccgaaggcc

SEQ ID NO: 2420376 - RNA, 19 nt, Artificial Sequence
  Description of Artificial Sequence: Synthetic oligonucleotide
  Sense strand starting at position 2969 of SEQ ID NO: 1886679
cagugcguauccuuagguu

SEQ ID NO: 2420377 - RNA, 19 nt, Artificial Sequence
  Description of Artificial Sequence: Synthetic oligonucleotide
  Antisense strand to SEQ ID NO: 2420376
aaccuaaggauacgcacug

SEQ ID NO: 2420378 - RNA, 19 nt, Artificial Sequence
  Description of Artificial Sequence: Synthetic oligonucleotide
  Sense strand starting at position 3038 of SEQ ID NO: 1886679
gccauaauguguuucuagg

SEQ ID NO: 2420379 - RNA, 19 nt, Artificial Sequence
  Description of Artificial Sequence: Synthetic oligonucleotide
  Antisense strand to SEQ ID NO: 2420378
ccuagaaacacauuauggc

SEQ ID NO: 2420380 - RNA, 19 nt, Artificial Sequence
  Description of Artificial Sequence: Synthetic oligonucleotide
  Sense strand starting at position 3077 of SEQ ID NO: 1886679
caugguuuccugugcugau

SEQ ID NO: 2420381 - RNA, 19 nt, Artificial Sequence
  Description of Artificial Sequence: Synthetic oligonucleotide
  Antisense strand to SEQ ID NO: 2420380
aucagcacaggaaaccaug

SEQ ID NO: 2420382 - RNA, 19 nt, Artificial Sequence
  Description of Artificial Sequence: Synthetic oligonucleotide
  Sense strand starting at position 3175 of SEQ ID NO: 1886679
gugguucucgcucagcaga

SEQ ID NO: 2420383 - RNA, 19 nt, Artificial Sequence
  Description of Artificial Sequence: Synthetic oligonucleotide
  Antisense strand to SEQ ID NO: 2420382
ucugcugagcgagaaccac

SEQ ID NO: 2420384 - RNA, 19 nt, Artificial Sequence
  Description of Artificial Sequence: Synthetic oligonucleotide
  Sense strand starting at position 3177 of SEQ ID NO: 1886679
gguucucgcucagcagaaa

SEQ ID NO: 2420385 - RNA, 19 nt, Artificial Sequence
  Description of Artificial Sequence: Synthetic oligonucleotide
  Antisense strand to SEQ ID NO: 2420384
uuucugcugagcgagaacc

SEQ ID NO: 2420386 - RNA, 19 nt, Artificial Sequence
  Description of Artificial Sequence: Synthetic oligonucleotide
  Sense strand starting at position 3178 of SEQ ID NO: 1886679
guucucgcucagcagaaau

SEQ ID NO: 2420387 - RNA, 19 nt, Artificial Sequence
  Description of Artificial Sequence: Synthetic oligonucleotide
  Antisense strand to SEQ ID NO: 2420386
auuucugcugagcgagaac

SEQ ID NO: 2420388 - RNA, 19 nt, Artificial Sequence
  Description of Artificial Sequence: Synthetic oligonucleotide
  Sense strand starting at position 3180 of SEQ ID NO: 1886679
ucucgcucagcagaaauga

SEQ ID NO: 2420389 - RNA, 19 nt, Artificial Sequence
  Description of Artificial Sequence: Synthetic oligonucleotide
  Antisense strand to SEQ ID NO: 2420388
ucauuucugcugagcgaga

SEQ ID NO: 2420390 - RNA, 19 nt, Artificial Sequence
  Description of Artificial Sequence: Synthetic oligonucleotide
  Sense strand starting at position 3193 of SEQ ID NO: 1886679
aaaugauuaccgggaggcu

SEQ ID NO: 2420391 - RNA, 19 nt, Artificial Sequence
  Description of Artificial Sequence: Synthetic oligonucleotide
  Antisense strand to SEQ ID NO: 2420390
agccucccgguaaucauuu

SEQ ID NO: 2420392 - RNA, 19 nt, Artificial Sequence
  Description of Artificial Sequence: Synthetic oligonucleotide
  Sense strand starting at position 3387 of SEQ ID NO: 1886679
agccacaggagcugucaua

SEQ ID NO: 2420393 - RNA, 19 nt, Artificial Sequence
  Description of Artificial Sequence: Synthetic oligonucleotide
  Antisense strand to SEQ ID NO: 2420392
uaugacagcuccuguggcu

SEQ ID NO: 2420394 - RNA, 19 nt, Artificial Sequence
  Description of Artificial Sequence: Synthetic oligonucleotide
  Sense strand starting at position 3428 of SEQ ID NO: 1886679
gugugcuaccgcuugguga

SEQ ID NO: 2420395 - RNA, 19 nt, Artificial Sequence
  Description of Artificial Sequence: Synthetic oligonucleotide
  Antisense strand to SEQ ID NO: 2420394
ucaccaagcgguagcacac

SEQ ID NO: 2420396 - RNA, 19 nt, Artificial Sequence
  Description of Artificial Sequence: Synthetic oligonucleotide
  Sense strand starting at position 3504 of SEQ ID NO: 1886679
aggucgagcugguugagaa

SEQ ID NO: 2420397 - RNA, 19 nt, Artificial Sequence
  Description of Artificial Sequence: Synthetic oligonucleotide
  Antisense strand to SEQ ID NO: 2420396
uucucaaccagcucgaccu

SEQ ID NO: 2420398 - RNA, 19 nt, Artificial Sequence
  Description of Artificial Sequence: Synthetic oligonucleotide
  Sense strand starting at position 3505 of SEQ ID NO: 1886679
ggucgagcugguugagaaa

SEQ ID NO: 2420399 - RNA, 19 nt, Artificial Sequence
  Description of Artificial Sequence: Synthetic oligonucleotide
  Antisense strand to SEQ ID NO: 2420398
uuucucaaccagcucgacc

SEQ ID NO: 2420400 - RNA, 19 nt, Artificial Sequence
  Description of Artificial Sequence: Synthetic oligonucleotide
  Sense strand starting at position 3665 of SEQ ID NO: 1886679
ggccuuuccugacacagga

SEQ ID NO: 2420401 - RNA, 19 nt, Artificial Sequence
  Description of Artificial Sequence: Synthetic oligonucleotide
  Antisense strand to SEQ ID NO: 2420400
uccugugucaggaaaggcc

SEQ ID NO: 2420402 - RNA, 19 nt, Artificial Sequence
  Description of Artificial Sequence: Synthetic oligonucleotide
  Sense strand starting at position 3702 of SEQ ID NO: 1886679
gccucuuugagcugaaguu

SEQ ID NO: 2420403 - RNA, 19 nt, Artificial Sequence
  Description of Artificial Sequence: Synthetic oligonucleotide
  Antisense strand to SEQ ID NO: 2420402
aacuucagcucaaagaggc

SEQ ID NO: 2420404 - RNA, 19 nt, Artificial Sequence
  Description of Artificial Sequence: Synthetic oligonucleotide
  Sense strand starting at position 3711 of SEQ ID NO: 1886679
agcugaaguucugucaucu

SEQ ID NO: 2420405 - RNA, 19 nt, Artificial Sequence
  Description of Artificial Sequence: Synthetic oligonucleotide
  Antisense strand to SEQ ID NO: 2420404
agaugacagaacuucagcu

SEQ ID NO: 2420406 - RNA, 19 nt, Artificial Sequence
  Description of Artificial Sequence: Synthetic oligonucleotide
  Sense strand starting at position 97 of SEQ ID NO: 1886680
auguuuaaccgaugcauug

SEQ ID NO: 2420407 - RNA, 19 nt, Artificial Sequence
  Description of Artificial Sequence: Synthetic oligonucleotide
  Antisense strand to SEQ ID NO: 2420406
caaugcaucgguuaaacau

SEQ ID NO: 2420408 - RNA, 19 nt, Artificial Sequence
  Description of Artificial Sequence: Synthetic oligonucleotide
  Sense strand starting at position 328 of SEQ ID NO: 1886680
cuccacugucuugaugaca

SEQ ID NO: 2420409 - RNA, 19 nt, Artificial Sequence
  Description of Artificial Sequence: Synthetic oligonucleotide
  Antisense strand to SEQ ID NO: 2420408
ugucaucaagacaguggag

SEQ ID NO: 2420410 - RNA, 19 nt, Artificial Sequence
  Description of Artificial Sequence: Synthetic oligonucleotide
  Sense strand starting at position 431 of SEQ ID NO: 1886680
aaggaacucucgggaacau

SEQ ID NO: 2420411 - RNA, 19 nt, Artificial Sequence
  Description of Artificial Sequence: Synthetic oligonucleotide
  Antisense strand to SEQ ID NO: 2420410
auguucccgagaguuccuu

SEQ ID NO: 2420412 - RNA, 19 nt, Artificial Sequence
  Description of Artificial Sequence: Synthetic oligonucleotide
  Sense strand starting at position 488 of SEQ ID NO: 1886680
gguccuggcuuuccagaaa

SEQ ID NO: 2420413 - RNA, 19 nt, Artificial Sequence
  Description of Artificial Sequence: Synthetic oligonucleotide
  Antisense strand to SEQ ID NO: 2420412
uuucuggaaagccaggacc

SEQ ID NO: 2420414 - RNA, 19 nt, Artificial Sequence
  Description of Artificial Sequence: Synthetic oligonucleotide
  Sense strand starting at position 491 of SEQ ID NO: 1886680
ccuggcuuuccagaaagcu

SEQ ID NO: 2420415 - RNA, 19 nt, Artificial Sequence
  Description of Artificial Sequence: Synthetic oligonucleotide
  Antisense strand to SEQ ID NO: 2420414
agcuuucuggaaagccagg

SEQ ID NO: 2420416 - RNA, 19 nt, Artificial Sequence
  Description of Artificial Sequence: Synthetic oligonucleotide
  Sense strand starting at position 520 of SEQ ID NO: 1886680
ccuggaaccuucucagcuu

SEQ ID NO: 2420417 - RNA, 19 nt, Artificial Sequence
  Description of Artificial Sequence: Synthetic oligonucleotide
  Antisense strand to SEQ ID NO: 2420416
aagcugagaagguuccagg

SEQ ID NO: 2420418 - RNA, 19 nt, Artificial Sequence
  Description of Artificial Sequence: Synthetic oligonucleotide
  Sense strand starting at position 1592 of SEQ ID NO: 1886680
acccuauucugagugugaa

SEQ ID NO: 2420419 - RNA, 19 nt, Artificial Sequence
  Description of Artificial Sequence: Synthetic oligonucleotide
  Antisense strand to SEQ ID NO: 2420418
uucacacucagaauagggu

SEQ ID NO: 2420420 - RNA, 19 nt, Artificial Sequence
  Description of Artificial Sequence: Synthetic oligonucleotide
  Sense strand starting at position 1593 of SEQ ID NO: 1886680
cccuauucugagugugaaa

SEQ ID NO: 2420421 - RNA, 19 nt, Artificial Sequence
  Description of Artificial Sequence: Synthetic oligonucleotide
  Antisense strand to SEQ ID NO: 2420420
uuucacacucagaauaggg

SEQ ID NO: 2420422 - RNA, 19 nt, Artificial Sequence
  Description of Artificial Sequence: Synthetic oligonucleotide
  Sense strand starting at position 1595 of SEQ ID NO: 1886680
cuauucugagugugaaagu

SEQ ID NO: 2420423 - RNA, 19 nt, Artificial Sequence
  Description of Artificial Sequence: Synthetic oligonucleotide
  Antisense strand to SEQ ID NO: 2420422
acuuucacacucagaauag

SEQ ID NO: 2420424 - RNA, 19 nt, Artificial Sequence
  Description of Artificial Sequence: Synthetic oligonucleotide
  Sense strand starting at position 1625 of SEQ ID NO: 1886680
acauauuuauaccaggguu

SEQ ID NO: 2420425 - RNA, 19 nt, Artificial Sequence
  Description of Artificial Sequence: Synthetic oligonucleotide
  Antisense strand to SEQ ID NO: 2420424
aacccugguauaaauaugu

SEQ ID NO: 2420426 - RNA, 19 nt, Artificial Sequence
  Description of Artificial Sequence: Synthetic oligonucleotide
  Sense strand starting at position 1652 of SEQ ID NO: 1886680
cguuuaaugucagcaacag

SEQ ID NO: 2420427 - RNA, 19 nt, Artificial Sequence
  Description of Artificial Sequence: Synthetic oligonucleotide
  Antisense strand to SEQ ID NO: 2420426
cuguugcugacauuaaacg

SEQ ID NO: 2420428 - RNA, 19 nt, Artificial Sequence
  Description of Artificial Sequence: Synthetic oligonucleotide
  Sense strand starting at position 1653 of SEQ ID NO: 1886680
guuuaaugucagcaacaga

SEQ ID NO: 2420429 - RNA, 19 nt, Artificial Sequence
  Description of Artificial Sequence: Synthetic oligonucleotide
  Antisense strand to SEQ ID NO: 2420428
ucuguugcugacauuaaac

SEQ ID NO: 2420430 - RNA, 19 nt, Artificial Sequence
  Description of Artificial Sequence: Synthetic oligonucleotide
  Sense strand starting at position 1739 of SEQ ID NO: 1886680
cgguguguuucugagacag

SEQ ID NO: 2420431 - RNA, 19 nt, Artificial Sequence
  Description of Artificial Sequence: Synthetic oligonucleotide
  Antisense strand to SEQ ID NO: 2420430
cugucucagaaacacaccg

SEQ ID NO: 2420432 - RNA, 19 nt, Artificial Sequence
  Description of Artificial Sequence: Synthetic oligonucleotide
  Sense strand starting at position 2294 of SEQ ID NO: 1886680
ccugccugugucuauguaa

SEQ ID NO: 2420433 - RNA, 19 nt, Artificial Sequence
  Description of Artificial Sequence: Synthetic oligonucleotide
  Antisense strand to SEQ ID NO: 2420432
uuacauagacacaggcagg

SEQ ID NO: 2420434 - RNA, 19 nt, Artificial Sequence
  Description of Artificial Sequence: Synthetic oligonucleotide
  Sense strand starting at position 2297 of SEQ ID NO: 1886680
gccugugucuauguaauuu

SEQ ID NO: 2420435 - RNA, 19 nt, Artificial Sequence
  Description of Artificial Sequence: Synthetic oligonucleotide
  Antisense strand to SEQ ID NO: 2420434
aaauuacauagacacaggc

SEQ ID NO: 2420436 - RNA, 19 nt, Artificial Sequence
  Description of Artificial Sequence: Synthetic oligonucleotide
  Sense strand starting at position 2415 of SEQ ID NO: 1886680
gguggucucuggcaaguca

SEQ ID NO: 2420437 - RNA, 19 nt, Artificial Sequence
  Description of Artificial Sequence: Synthetic oligonucleotide
  Antisense strand to SEQ ID NO: 2420436
ugacuugccagagaccacc

SEQ ID NO: 2420438 - RNA, 19 nt, Artificial Sequence
  Description of Artificial Sequence: Synthetic oligonucleotide
  Sense strand starting at position 2427 of SEQ ID NO: 1886680
caagucagccuguggagau

SEQ ID NO: 2420439 - RNA, 19 nt, Artificial Sequence
  Description of Artificial Sequence: Synthetic oligonucleotide
  Antisense strand to SEQ ID NO: 2420438
aucuccacaggcugacuug

SEQ ID NO: 2420440 - RNA, 19 nt, Artificial Sequence
  Description of Artificial Sequence: Synthetic oligonucleotide
  Sense strand starting at position 2439 of SEQ ID NO: 1886680
uggagaugggucugccagu

SEQ ID NO: 2420441 - RNA, 19 nt, Artificial Sequence
  Description of Artificial Sequence: Synthetic oligonucleotide
  Antisense strand to SEQ ID NO: 2420440
acuggcagacccaucucca

SEQ ID NO: 2420442 - RNA, 19 nt, Artificial Sequence
  Description of Artificial Sequence: Synthetic oligonucleotide
  Sense strand starting at position 2733 of SEQ ID NO: 1886680
agaaaccucucucaggaaa

SEQ ID NO: 2420443 - RNA, 19 nt, Artificial Sequence
  Description of Artificial Sequence: Synthetic oligonucleotide
  Antisense strand to SEQ ID NO: 2420442
uuuccugagagagguuucu

SEQ ID NO: 2420444 - RNA, 19 nt, Artificial Sequence
  Description of Artificial Sequence: Synthetic oligonucleotide
  Sense strand starting at position 2844 of SEQ ID NO: 1886680
cgggaaaggugcgcuaaga

SEQ ID NO: 2420445 - RNA, 19 nt, Artificial Sequence
  Description of Artificial Sequence: Synthetic oligonucleotide
  Antisense strand to SEQ ID NO: 2420444
ucuuagcgcaccuuucccg

SEQ ID NO: 2420446 - RNA, 19 nt, Artificial Sequence
  Description of Artificial Sequence: Synthetic oligonucleotide
  Sense strand starting at position 2863 of SEQ ID NO: 1886680
gccagauuccuguguggug

SEQ ID NO: 2420447 - RNA, 19 nt, Artificial Sequence
  Description of Artificial Sequence: Synthetic oligonucleotide
  Antisense strand to SEQ ID NO: 2420446
caccacacaggaaucuggc

SEQ ID NO: 2420448 - RNA, 19 nt, Artificial Sequence
  Description of Artificial Sequence: Synthetic oligonucleotide
  Sense strand starting at position 2868 of SEQ ID NO: 1886680
auuccuguguggugguuua

SEQ ID NO: 2420449 - RNA, 19 nt, Artificial Sequence
  Description of Artificial Sequence: Synthetic oligonucleotide
  Antisense strand to SEQ ID NO: 2420448
uaaaccaccacacaggaau

SEQ ID NO: 2420450 - RNA, 19 nt, Artificial Sequence
  Description of Artificial Sequence: Synthetic oligonucleotide
  Sense strand starting at position 2901 of SEQ ID NO: 1886680
cuggguucucauuacuaaa

SEQ ID NO: 2420451 - RNA, 19 nt, Artificial Sequence
  Description of Artificial Sequence: Synthetic oligonucleotide
  Antisense strand to SEQ ID NO: 2420450
uuuaguaaugagaacccag

SEQ ID NO: 2420452 - RNA, 19 nt, Artificial Sequence
  Description of Artificial Sequence: Synthetic oligonucleotide
  Sense strand starting at position 2903 of SEQ ID NO: 1886680
ggguucucauuacuaaaug

SEQ ID NO: 2420453 - RNA, 19 nt, Artificial Sequence
  Description of Artificial Sequence: Synthetic oligonucleotide
  Antisense strand to SEQ ID NO: 2420452
cauuuaguaaugagaaccc

SEQ ID NO: 2420454 - RNA, 19 nt, Artificial Sequence
  Description of Artificial Sequence: Synthetic oligonucleotide
  Sense strand starting at position 2904 of SEQ ID NO: 1886680
gguucucauuacuaaauga

SEQ ID NO: 2420455 - RNA, 19 nt, Artificial Sequence
  Description of Artificial Sequence: Synthetic oligonucleotide
  Antisense strand to SEQ ID NO: 2420454
ucauuuaguaaugagaacc

SEQ ID NO: 2420456 - RNA, 19 nt, Artificial Sequence
  Description of Artificial Sequence: Synthetic oligonucleotide
  Sense strand starting at position 3163 of SEQ ID NO: 1886680
gcaccagugcacgcuuaua

SEQ ID NO: 2420457 - RNA, 19 nt, Artificial Sequence
  Description of Artificial Sequence: Synthetic oligonucleotide
  Antisense strand to SEQ ID NO: 2420456
uauaagcgugcacuggugc

SEQ ID NO: 2420458 - RNA, 19 nt, Artificial Sequence
  Description of Artificial Sequence: Synthetic oligonucleotide
  Sense strand starting at position 3352 of SEQ ID NO: 1886680
augcaucagccauaguuaa

SEQ ID NO: 2420459 - RNA, 19 nt, Artificial Sequence
  Description of Artificial Sequence: Synthetic oligonucleotide
  Antisense strand to SEQ ID NO: 2420458
uuaacuauggcugaugcau

SEQ ID NO: 2420460 - RNA, 19 nt, Artificial Sequence
  Description of Artificial Sequence: Synthetic oligonucleotide
  Sense strand starting at position 3416 of SEQ ID NO: 1886680
uacuuuacaugguugagau

SEQ ID NO: 2420461 - RNA, 19 nt, Artificial Sequence
  Description of Artificial Sequence: Synthetic oligonucleotide
  Antisense strand to SEQ ID NO: 2420460
aucucaaccauguaaagua

SEQ ID NO: 2420462 - RNA, 19 nt, Artificial Sequence
  Description of Artificial Sequence: Synthetic oligonucleotide
  Sense strand starting at position 3417 of SEQ ID NO: 1886680
acuuuacaugguugagaug

SEQ ID NO: 2420463 - RNA, 19 nt, Artificial Sequence
  Description of Artificial Sequence: Synthetic oligonucleotide
  Antisense strand to SEQ ID NO: 2420462
caucucaaccauguaaagu

SEQ ID NO: 2420464 - RNA, 19 nt, Artificial Sequence
  Description of Artificial Sequence: Synthetic oligonucleotide
  Sense strand starting at position 3420 of SEQ ID NO: 1886680
uuacaugguugagauguca

SEQ ID NO: 2420465 - RNA, 19 nt, Artificial Sequence
  Description of Artificial Sequence: Synthetic oligonucleotide
  Antisense strand to SEQ ID NO: 2420464
ugacaucucaaccauguaa

SEQ ID NO: 2420466 - RNA, 19 nt, Artificial Sequence
  Description of Artificial Sequence: Synthetic oligonucleotide
  Sense strand starting at position 3439 of SEQ ID NO: 1886680
ucaaacaagucugugucau

SEQ ID NO: 2420467 - RNA, 19 nt, Artificial Sequence
  Description of Artificial Sequence: Synthetic oligonucleotide
  Antisense strand to SEQ ID NO: 2420466
augacacagacuuguuuga

SEQ ID NO: 2420468 - RNA, 19 nt, Artificial Sequence
  Description of Artificial Sequence: Synthetic oligonucleotide
  Sense strand starting at position 3443 of SEQ ID NO: 1886680
acaagucugugucaucaaa

SEQ ID NO: 2420469 - RNA, 19 nt, Artificial Sequence
  Description of Artificial Sequence: Synthetic oligonucleotide
  Antisense strand to SEQ ID NO: 2420468
uuugaugacacagacuugu

SEQ ID NO: 2420470 - RNA, 19 nt, Artificial Sequence
  Description of Artificial Sequence: Synthetic oligonucleotide
  Sense strand starting at position 3465 of SEQ ID NO: 1886680
gguaguguucggccucgga

SEQ ID NO: 2420471 - RNA, 19 nt, Artificial Sequence
  Description of Artificial Sequence: Synthetic oligonucleotide
  Antisense strand to SEQ ID NO: 2420470
uccgaggccgaacacuacc

SEQ ID NO: 2420472 - RNA, 19 nt, Artificial Sequence
  Description of Artificial Sequence: Synthetic oligonucleotide
  Sense strand starting at position 3540 of SEQ ID NO: 1886680
cugaguggucagggaggaa

SEQ ID NO: 2420473 - RNA, 19 nt, Artificial Sequence
  Description of Artificial Sequence: Synthetic oligonucleotide
  Antisense strand to SEQ ID NO: 2420472
uuccucccugaccacucag

SEQ ID NO: 2420474 - RNA, 19 nt, Artificial Sequence
  Description of Artificial Sequence: Synthetic oligonucleotide
  Sense strand starting at position 3645 of SEQ ID NO: 1886680
augcaagacccaggugaaa

SEQ ID NO: 2420475 - RNA, 19 nt, Artificial Sequence
  Description of Artificial Sequence: Synthetic oligonucleotide
  Antisense strand to SEQ ID NO: 2420474
uuucaccugggucuugcau

SEQ ID NO: 2420476 - RNA, 19 nt, Artificial Sequence
  Description of Artificial Sequence: Synthetic oligonucleotide
  Sense strand starting at position 3825 of SEQ ID NO: 1886680
cgcucagugccugaugaga

SEQ ID NO: 2420477 - RNA, 19 nt, Artificial Sequence
  Description of Artificial Sequence: Synthetic oligonucleotide
  Antisense strand to SEQ ID NO: 2420476
ucucaucaggcacugagcg

SEQ ID NO: 2420478 - RNA, 19 nt, Artificial Sequence
  Description of Artificial Sequence: Synthetic oligonucleotide
  Sense strand starting at position 3963 of SEQ ID NO: 1886680
ggugaauuacaauguguau

SEQ ID NO: 2420479 - RNA, 19 nt, Artificial Sequence
  Description of Artificial Sequence: Synthetic oligonucleotide
  Antisense strand to SEQ ID NO: 2420478
auacacauuguaauucacc

SEQ ID NO: 2420480 - RNA, 19 nt, Artificial Sequence
  Description of Artificial Sequence: Synthetic oligonucleotide
  Sense strand starting at position 316 of SEQ ID NO: 1886681
gcugcagugcuccggaaga

SEQ ID NO: 2420481 - RNA, 19 nt, Artificial Sequence
  Description of Artificial Sequence: Synthetic oligonucleotide
  Antisense strand to SEQ ID NO: 2420480
ucuuccggagcacugcagc

SEQ ID NO: 2420482 - RNA, 19 nt, Artificial Sequence
  Description of Artificial Sequence: Synthetic oligonucleotide
  Sense strand starting at position 318 of SEQ ID NO: 1886681
ugcagugcuccggaagagu

SEQ ID NO: 2420483 - RNA, 19 nt, Artificial Sequence
  Description of Artificial Sequence: Synthetic oligonucleotide
  Antisense strand to SEQ ID NO: 2420482
acucuuccggagcacugca

SEQ ID NO: 2420484 - RNA, 19 nt, Artificial Sequence
  Description of Artificial Sequence: Synthetic oligonucleotide
  Sense strand starting at position 326 of SEQ ID NO: 1886681
uccggaagaguucaaugua

SEQ ID NO: 2420485 - RNA, 19 nt, Artificial Sequence
  Description of Artificial Sequence: Synthetic oligonucleotide
  Antisense strand to SEQ ID NO: 2420484
uacauugaacucuuccgga

SEQ ID NO: 2420486 - RNA, 19 nt, Artificial Sequence
  Description of Artificial Sequence: Synthetic oligonucleotide
  Sense strand starting at position 329 of SEQ ID NO: 1886681
ggaagaguucaauguaucg

SEQ ID NO: 2420487 - RNA, 19 nt, Artificial Sequence
  Description of Artificial Sequence: Synthetic oligonucleotide
  Antisense strand to SEQ ID NO: 2420486
cgauacauugaacucuucc

SEQ ID NO: 2420488 - RNA, 19 nt, Artificial Sequence
  Description of Artificial Sequence: Synthetic oligonucleotide
  Sense strand starting at position 561 of SEQ ID NO: 1886681
uuggucuucccgugacaag

SEQ ID NO: 2420489 - RNA, 19 nt, Artificial Sequence
  Description of Artificial Sequence: Synthetic oligonucleotide
  Antisense strand to SEQ ID NO: 2420488
cuugucacgggaagaccaa

SEQ ID NO: 2420490 - RNA, 19 nt, Artificial Sequence
  Description of Artificial Sequence: Synthetic oligonucleotide
  Sense strand starting at position 562 of SEQ ID NO: 1886681
uggucuucccgugacaaga

SEQ ID NO: 2420491 - RNA, 19 nt, Artificial Sequence
  Description of Artificial Sequence: Synthetic oligonucleotide
  Antisense strand to SEQ ID NO: 2420490
ucuugucacgggaagacca

SEQ ID NO: 2420492 - RNA, 19 nt, Artificial Sequence
  Description of Artificial Sequence: Synthetic oligonucleotide
  Sense strand starting at position 779 of SEQ ID NO: 1886681
gcuuuauacaccugugggu

SEQ ID NO: 2420493 - RNA, 19 nt, Artificial Sequence
  Description of Artificial Sequence: Synthetic oligonucleotide
  Antisense strand to SEQ ID NO: 2420492
acccacagguguauaaagc

SEQ ID NO: 2420494 - RNA, 19 nt, Artificial Sequence
  Description of Artificial Sequence: Synthetic oligonucleotide
  Sense strand starting at position 946 of SEQ ID NO: 1886681
ggaugagggccucgccauu

SEQ ID NO: 2420495 - RNA, 19 nt, Artificial Sequence
  Description of Artificial Sequence: Synthetic oligonucleotide
  Antisense strand to SEQ ID NO: 2420494
aauggcgaggcccucaucc

SEQ ID NO: 2420496 - RNA, 19 nt, Artificial Sequence
  Description of Artificial Sequence: Synthetic oligonucleotide
  Sense strand starting at position 1085 of SEQ ID NO: 1886681
cguugagcccuuugaagaa

SEQ ID NO: 2420497 - RNA, 19 nt, Artificial Sequence
  Description of Artificial Sequence: Synthetic oligonucleotide
  Antisense strand to SEQ ID NO: 2420496
uucuucaaagggcucaacg

SEQ ID NO: 2420498 - RNA, 19 nt, Artificial Sequence
  Description of Artificial Sequence: Synthetic oligonucleotide
  Sense strand starting at position 1272 of SEQ ID NO: 1886681
ucucguauuucugcuuuau

SEQ ID NO: 2420499 - RNA, 19 nt, Artificial Sequence
  Description of Artificial Sequence: Synthetic oligonucleotide
  Antisense strand to SEQ ID NO: 2420498
auaaagcagaaauacgaga

SEQ ID NO: 2420500 - RNA, 19 nt, Artificial Sequence
  Description of Artificial Sequence: Synthetic oligonucleotide
  Sense strand starting at position 1274 of SEQ ID NO: 1886681
ucguauuucugcuuuauca

SEQ ID NO: 2420501 - RNA, 19 nt, Artificial Sequence
  Description of Artificial Sequence: Synthetic oligonucleotide
  Antisense strand to SEQ ID NO: 2420500
ugauaaagcagaaauacga

SEQ ID NO: 2420502 - RNA, 19 nt, Artificial Sequence
  Description of Artificial Sequence: Synthetic oligonucleotide
  Sense strand starting at position 1284 of SEQ ID NO: 1886681
gcuuuaucaccucgggcuu

SEQ ID NO: 2420503 - RNA, 19 nt, Artificial Sequence
  Description of Artificial Sequence: Synthetic oligonucleotide
  Antisense strand to SEQ ID NO: 2420502
aagcccgaggugauaaagc

SEQ ID NO: 2420504 - RNA, 19 nt, Artificial Sequence
  Description of Artificial Sequence: Synthetic oligonucleotide
  Sense strand starting at position 1889 of SEQ ID NO: 1886681
aaagucauccucuguggca

SEQ ID NO: 2420505 - RNA, 19 nt, Artificial Sequence
  Description of Artificial Sequence: Synthetic oligonucleotide
  Antisense strand to SEQ ID NO: 2420504
ugccacagaggaugacuuu

SEQ ID NO: 2420506 - RNA, 19 nt, Artificial Sequence
  Description of Artificial Sequence: Synthetic oligonucleotide
  Sense strand starting at position 1890 of SEQ ID NO: 1886681
aagucauccucuguggcau

SEQ ID NO: 2420507 - RNA, 19 nt, Artificial Sequence
  Description of Artificial Sequence: Synthetic oligonucleotide
  Antisense strand to SEQ ID NO: 2420506
augccacagaggaugacuu

SEQ ID NO: 2420508 - RNA, 19 nt, Artificial Sequence
  Description of Artificial Sequence: Synthetic oligonucleotide
  Sense strand starting at position 1977 of SEQ ID NO: 1886681
uguuuacuccugggcccaa

SEQ ID NO: 2420509 - RNA, 19 nt, Artificial Sequence
  Description of Artificial Sequence: Synthetic oligonucleotide
  Antisense strand to SEQ ID NO: 2420508
uugggcccaggaguaaaca

SEQ ID NO: 2420510 - RNA, 19 nt, Artificial Sequence
  Description of Artificial Sequence: Synthetic oligonucleotide
  Sense strand starting at position 2150 of SEQ ID NO: 1886681
ggacuuagcagauaacgca

SEQ ID NO: 2420511 - RNA, 19 nt, Artificial Sequence
  Description of Artificial Sequence: Synthetic oligonucleotide
  Antisense strand to SEQ ID NO: 2420510
ugcguuaucugcuaagucc

SEQ ID NO: 2420512 - RNA, 19 nt, Artificial Sequence
  Description of Artificial Sequence: Synthetic oligonucleotide
  Sense strand starting at position 2168 of SEQ ID NO: 1886681
agucuuguauguguccaua

SEQ ID NO: 2420513 - RNA, 19 nt, Artificial Sequence
  Description of Artificial Sequence: Synthetic oligonucleotide
  Antisense strand to SEQ ID NO: 2420512
uauggacacauacaagacu

SEQ ID NO: 2420514 - RNA, 19 nt, Artificial Sequence
  Description of Artificial Sequence: Synthetic oligonucleotide
  Sense strand starting at position 2170 of SEQ ID NO: 1886681
ucuuguauguguccauauu

SEQ ID NO: 2420515 - RNA, 19 nt, Artificial Sequence
  Description of Artificial Sequence: Synthetic oligonucleotide
  Antisense strand to SEQ ID NO: 2420514
aauauggacacauacaaga

SEQ ID NO: 2420516 - RNA, 19 nt, Artificial Sequence
  Description of Artificial Sequence: Synthetic oligonucleotide
  Sense strand starting at position 2171 of SEQ ID NO: 1886681
cuuguauguguccauauua

SEQ ID NO: 2420517 - RNA, 19 nt, Artificial Sequence
  Description of Artificial Sequence: Synthetic oligonucleotide
  Antisense strand to SEQ ID NO: 2420516
uaauauggacacauacaag

SEQ ID NO: 2420518 - RNA, 19 nt, Artificial Sequence
  Description of Artificial Sequence: Synthetic oligonucleotide
  Sense strand starting at position 2316 of SEQ ID NO: 1886681
ggaugcugcauauggaauu

SEQ ID NO: 2420519 - RNA, 19 nt, Artificial Sequence
  Description of Artificial Sequence: Synthetic oligonucleotide
  Antisense strand to SEQ ID NO: 2420518
aauuccauaugcagcaucc

SEQ ID NO: 2420520 - RNA, 19 nt, Artificial Sequence
  Description of Artificial Sequence: Synthetic oligonucleotide
  Sense strand starting at position 2328 of SEQ ID NO: 1886681
uggaauucucuucggaggu

SEQ ID NO: 2420521 - RNA, 19 nt, Artificial Sequence
  Description of Artificial Sequence: Synthetic oligonucleotide
  Antisense strand to SEQ ID NO: 2420520
accuccgaagagaauucca

SEQ ID NO: 2420522 - RNA, 19 nt, Artificial Sequence
  Description of Artificial Sequence: Synthetic oligonucleotide
  Sense strand starting at position 2332 of SEQ ID NO: 1886681
auucucuucggaggucaua

SEQ ID NO: 2420523 - RNA, 19 nt, Artificial Sequence
  Description of Artificial Sequence: Synthetic oligonucleotide
  Antisense strand to SEQ ID NO: 2420522
uaugaccuccgaagagaau

SEQ ID NO: 2420524 - RNA, 19 nt, Artificial Sequence
  Description of Artificial Sequence: Synthetic oligonucleotide
  Sense strand starting at position 2389 of SEQ ID NO: 1886681
ggcacauaggauugaggau

SEQ ID NO: 2420525 - RNA, 19 nt, Artificial Sequence
  Description of Artificial Sequence: Synthetic oligonucleotide
  Antisense strand to SEQ ID NO: 2420524
auccucaauccuaugugcc

SEQ ID NO: 2420526 - RNA, 19 nt, Artificial Sequence
  Description of Artificial Sequence: Synthetic oligonucleotide
  Sense strand starting at position 2720 of SEQ ID NO: 1886681
gcccuauccugccugggaa

SEQ ID NO: 2420527 - RNA, 19 nt, Artificial Sequence
  Description of Artificial Sequence: Synthetic oligonucleotide
  Antisense strand to SEQ ID NO: 2420526
uucccaggcaggauagggc

SEQ ID NO: 2420528 - RNA, 19 nt, Artificial Sequence
  Description of Artificial Sequence: Synthetic oligonucleotide
  Sense strand starting at position 2721 of SEQ ID NO: 1886681
cccuauccugccugggaau

SEQ ID NO: 2420529 - RNA, 19 nt, Artificial Sequence
  Description of Artificial Sequence: Synthetic oligonucleotide
  Antisense strand to SEQ ID NO: 2420528
auucccaggcaggauaggg

SEQ ID NO: 2420530 - RNA, 19 nt, Artificial Sequence
  Description of Artificial Sequence: Synthetic oligonucleotide
  Sense strand starting at position 2722 of SEQ ID NO: 1886681
ccuauccugccugggaaua

SEQ ID NO: 2420531 - RNA, 19 nt, Artificial Sequence
  Description of Artificial Sequence: Synthetic oligonucleotide
  Antisense strand to SEQ ID NO: 2420530
uauucccaggcaggauagg

SEQ ID NO: 2420532 - RNA, 19 nt, Artificial Sequence
  Description of Artificial Sequence: Synthetic oligonucleotide
  Sense strand starting at position 2723 of SEQ ID NO: 1886681
cuauccugccugggaauaa

SEQ ID NO: 2420533 - RNA, 19 nt, Artificial Sequence
  Description of Artificial Sequence: Synthetic oligonucleotide
  Antisense strand to SEQ ID NO: 2420532
uuauucccaggcaggauag

SEQ ID NO: 2420534 - RNA, 19 nt, Artificial Sequence
  Description of Artificial Sequence: Synthetic oligonucleotide
  Sense strand starting at position 2945 of SEQ ID NO: 1886681
gguuaaaccugucuuugac

SEQ ID NO: 2420535 - RNA, 19 nt, Artificial Sequence
  Description of Artificial Sequence: Synthetic oligonucleotide
  Antisense strand to SEQ ID NO: 2420534
gucaaagacagguuuaacc

SEQ ID NO: 2420536 - RNA, 19 nt, Artificial Sequence
  Description of Artificial Sequence: Synthetic oligonucleotide
  Sense strand starting at position 3149 of SEQ ID NO: 1886681
cacugagcuguuugcucau

SEQ ID NO: 2420537 - RNA, 19 nt, Artificial Sequence
  Description of Artificial Sequence: Synthetic oligonucleotide
  Antisense strand to SEQ ID NO: 2420536
augagcaaacagcucagug

SEQ ID NO: 2420538 - RNA, 19 nt, Artificial Sequence
  Description of Artificial Sequence: Synthetic oligonucleotide
  Sense strand starting at position 3214 of SEQ ID NO: 1886681
auccuugcuggagaaguau

SEQ ID NO: 2420539 - RNA, 19 nt, Artificial Sequence
  Description of Artificial Sequence: Synthetic oligonucleotide
  Antisense strand to SEQ ID NO: 2420538
auacuucuccagcaaggau

SEQ ID NO: 2420540 - RNA, 19 nt, Artificial Sequence
  Description of Artificial Sequence: Synthetic oligonucleotide
  Sense strand starting at position 3263 of SEQ ID NO: 1886681
cugccaauucugugacacu

SEQ ID NO: 2420541 - RNA, 19 nt, Artificial Sequence
  Description of Artificial Sequence: Synthetic oligonucleotide
  Antisense strand to SEQ ID NO: 2420540
agugucacagaauuggcag

SEQ ID NO: 2420542 - RNA, 19 nt, Artificial Sequence
  Description of Artificial Sequence: Synthetic oligonucleotide
  Sense strand starting at position 3406 of SEQ ID NO: 1886681
ccacaagaguuguuggaag

SEQ ID NO: 2420543 - RNA, 19 nt, Artificial Sequence
  Description of Artificial Sequence: Synthetic oligonucleotide
  Antisense strand to SEQ ID NO: 2420542
cuuccaacaacucuugugg

SEQ ID NO: 2420544 - RNA, 19 nt, Artificial Sequence
  Description of Artificial Sequence: Synthetic oligonucleotide
  Sense strand starting at position 3408 of SEQ ID NO: 1886681
acaagaguuguuggaagau

SEQ ID NO: 2420545 - RNA, 19 nt, Artificial Sequence
  Description of Artificial Sequence: Synthetic oligonucleotide
  Antisense strand to SEQ ID NO: 2420544
aucuuccaacaacucuugu

SEQ ID NO: 2420546 - RNA, 19 nt, Artificial Sequence
  Description of Artificial Sequence: Synthetic oligonucleotide
  Sense strand starting at position 3414 of SEQ ID NO: 1886681
guuguuggaagaugaaaga

SEQ ID NO: 2420547 - RNA, 19 nt, Artificial Sequence
  Description of Artificial Sequence: Synthetic oligonucleotide
  Antisense strand to SEQ ID NO: 2420546
ucuuucaucuuccaacaac

SEQ ID NO: 2420548 - RNA, 19 nt, Artificial Sequence
  Description of Artificial Sequence: Synthetic oligonucleotide
  Sense strand starting at position 3427 of SEQ ID NO: 1886681
gaaagaacgugaguguaua

SEQ ID NO: 2420549 - RNA, 19 nt, Artificial Sequence
  Description of Artificial Sequence: Synthetic oligonucleotide
  Antisense strand to SEQ ID NO: 2420548
uauacacucacguucuuuc

SEQ ID NO: 2420550 - RNA, 19 nt, Artificial Sequence
  Description of Artificial Sequence: Synthetic oligonucleotide
  Sense strand starting at position 3428 of SEQ ID NO: 1886681
aaagaacgugaguguauaa

SEQ ID NO: 2420551 - RNA, 19 nt, Artificial Sequence
  Description of Artificial Sequence: Synthetic oligonucleotide
  Antisense strand to SEQ ID NO: 2420550
uuauacacucacguucuuu

SEQ ID NO: 2420552 - RNA, 19 nt, Artificial Sequence
  Description of Artificial Sequence: Synthetic oligonucleotide
  Sense strand starting at position 3485 of SEQ ID NO: 1886681
gaaugagcgccguagugaa

SEQ ID NO: 2420553 - RNA, 19 nt, Artificial Sequence
  Description of Artificial Sequence: Synthetic oligonucleotide
  Antisense strand to SEQ ID NO: 2420552
uucacuacggcgcucauuc

SEQ ID NO: 2420554 - RNA, 19 nt, Artificial Sequence
  Description of Artificial Sequence: Synthetic oligonucleotide
  Sense strand starting at position 3646 of SEQ ID NO: 1886681
ggccuagacgagcaguuua

SEQ ID NO: 2420555 - RNA, 19 nt, Artificial Sequence
  Description of Artificial Sequence: Synthetic oligonucleotide
  Antisense strand to SEQ ID NO: 2420554
uaaacugcucgucuaggcc

SEQ ID NO: 2420556 - RNA, 19 nt, Artificial Sequence
  Description of Artificial Sequence: Synthetic oligonucleotide
  Sense strand starting at position 3906 of SEQ ID NO: 1886681
aggaguagguuccugcaau

SEQ ID NO: 2420557 - RNA, 19 nt, Artificial Sequence
  Description of Artificial Sequence: Synthetic oligonucleotide
  Antisense strand to SEQ ID NO: 2420556
auugcaggaaccuacuccu

SEQ ID NO: 2420558 - RNA, 19 nt, Artificial Sequence
  Description of Artificial Sequence: Synthetic oligonucleotide
  Sense strand starting at position 3913 of SEQ ID NO: 1886681
gguuccugcaaugguugaa

SEQ ID NO: 2420559 - RNA, 19 nt, Artificial Sequence
  Description of Artificial Sequence: Synthetic oligonucleotide
  Antisense strand to SEQ ID NO: 2420558
uucaaccauugcaggaacc

SEQ ID NO: 2420560 - RNA, 19 nt, Artificial Sequence
  Description of Artificial Sequence: Synthetic oligonucleotide
  Sense strand starting at position 115 of SEQ ID NO: 1886682
cauacuuaccugcacgaga

SEQ ID NO: 2420561 - RNA, 19 nt, Artificial Sequence
  Description of Artificial Sequence: Synthetic oligonucleotide
  Antisense strand to SEQ ID NO: 2420560
ucucgugcagguaaguaug

SEQ ID NO: 2420562 - RNA, 19 nt, Artificial Sequence
  Description of Artificial Sequence: Synthetic oligonucleotide
  Sense strand starting at position 401 of SEQ ID NO: 1886682
ggagcuguucguuuggcca

SEQ ID NO: 2420563 - RNA, 19 nt, Artificial Sequence
  Description of Artificial Sequence: Synthetic oligonucleotide
  Antisense strand to SEQ ID NO: 2420562
uggccaaacgaacagcucc

SEQ ID NO: 2420564 - RNA, 19 nt, Artificial Sequence
  Description of Artificial Sequence: Synthetic oligonucleotide
  Sense strand starting at position 423 of SEQ ID NO: 1886682
cagguuguugccgggauuu

SEQ ID NO: 2420565 - RNA, 19 nt, Artificial Sequence
  Description of Artificial Sequence: Synthetic oligonucleotide
  Antisense strand to SEQ ID NO: 2420564
aaaucccggcaacaaccug

SEQ ID NO: 2420566 - RNA, 19 nt, Artificial Sequence
  Description of Artificial Sequence: Synthetic oligonucleotide
  Sense strand starting at position 440 of SEQ ID NO: 1886682
uuuaaugccucguuugaac

SEQ ID NO: 2420567 - RNA, 19 nt, Artificial Sequence
  Description of Artificial Sequence: Synthetic oligonucleotide
  Antisense strand to SEQ ID NO: 2420566
guucaaacgaggcauuaaa

SEQ ID NO: 2420568 - RNA, 19 nt, Artificial Sequence
  Description of Artificial Sequence: Synthetic oligonucleotide
  Sense strand starting at position 615 of SEQ ID NO: 1886682
cugaaagggucucaaagug

SEQ ID NO: 2420569 - RNA, 19 nt, Artificial Sequence
  Description of Artificial Sequence: Synthetic oligonucleotide
  Antisense strand to SEQ ID NO: 2420568
cacuuugagacccuuucag

SEQ ID NO: 2420570 - RNA, 19 nt, Artificial Sequence
  Description of Artificial Sequence: Synthetic oligonucleotide
  Sense strand starting at position 821 of SEQ ID NO: 1886682
gggauuccucagggcuuau

SEQ ID NO: 2420571 - RNA, 19 nt, Artificial Sequence
  Description of Artificial Sequence: Synthetic oligonucleotide
  Antisense strand to SEQ ID NO: 2420570
auaagcccugaggaauccc

SEQ ID NO: 2420572 - RNA, 19 nt, Artificial Sequence
  Description of Artificial Sequence: Synthetic oligonucleotide
  Sense strand starting at position 1086 of SEQ ID NO: 1886682
cugccauccugagcacuua

SEQ ID NO: 2420573 - RNA, 19 nt, Artificial Sequence
  Description of Artificial Sequence: Synthetic oligonucleotide
  Antisense strand to SEQ ID NO: 2420572
uaagugcucaggauggcag

SEQ ID NO: 2420574 - RNA, 19 nt, Artificial Sequence
  Description of Artificial Sequence: Synthetic oligonucleotide
  Sense strand starting at position 1097 of SEQ ID NO: 1886682
agcacuuagugugcggaaa

SEQ ID NO: 2420575 - RNA, 19 nt, Artificial Sequence
  Description of Artificial Sequence: Synthetic oligonucleotide
  Antisense strand to SEQ ID NO: 2420574
uuuccgcacacuaagugcu

SEQ ID NO: 2420576 - RNA, 19 nt, Artificial Sequence
  Description of Artificial Sequence: Synthetic oligonucleotide
  Sense strand starting at position 1229 of SEQ ID NO: 1886682
ggaccauccuuggaacaua

SEQ ID NO: 2420577 - RNA, 19 nt, Artificial Sequence
  Description of Artificial Sequence: Synthetic oligonucleotide
  Antisense strand to SEQ ID NO: 2420576
uauguuccaaggauggucc

SEQ ID NO: 2420578 - RNA, 19 nt, Artificial Sequence
  Description of Artificial Sequence: Synthetic oligonucleotide
  Sense strand starting at position 1283 of SEQ ID NO: 1886682
ccgacaaucaccugaugag

SEQ ID NO: 2420579 - RNA, 19 nt, Artificial Sequence
  Description of Artificial Sequence: Synthetic oligonucleotide
  Antisense strand to SEQ ID NO: 2420578
cucaucaggugauugucgg

SEQ ID NO: 2420580 - RNA, 19 nt, Artificial Sequence
  Description of Artificial Sequence: Synthetic oligonucleotide
  Sense strand starting at position 1496 of SEQ ID NO: 1886682
aggcgugaucucuaagaug

SEQ ID NO: 2420581 - RNA, 19 nt, Artificial Sequence
  Description of Artificial Sequence: Synthetic oligonucleotide
  Antisense strand to SEQ ID NO: 2420580
caucuuagagaucacgccu

SEQ ID NO: 2420582 - RNA, 19 nt, Artificial Sequence
  Description of Artificial Sequence: Synthetic oligonucleotide
  Sense strand starting at position 1536 of SEQ ID NO: 1886682
gguacagaccucggaagaa

SEQ ID NO: 2420583 - RNA, 19 nt, Artificial Sequence
  Description of Artificial Sequence: Synthetic oligonucleotide
  Antisense strand to SEQ ID NO: 2420582
uucuuccgaggucuguacc

SEQ ID NO: 2420584 - RNA, 19 nt, Artificial Sequence
  Description of Artificial Sequence: Synthetic oligonucleotide
  Sense strand starting at position 1923 of SEQ ID NO: 1886682
gggagaaugcuguggacaa

SEQ ID NO: 2420585 - RNA, 19 nt, Artificial Sequence
  Description of Artificial Sequence: Synthetic oligonucleotide
  Antisense strand to SEQ ID NO: 2420584
uuguccacagcauucuccc

SEQ ID NO: 2420586 - RNA, 19 nt, Artificial Sequence
  Description of Artificial Sequence: Synthetic oligonucleotide
  Sense strand starting at position 2027 of SEQ ID NO: 1886682
cucuuugugugucuugaac

SEQ ID NO: 2420587 - RNA, 19 nt, Artificial Sequence
  Description of Artificial Sequence: Synthetic oligonucleotide
  Antisense strand to SEQ ID NO: 2420586
guucaagacacacaaagag

SEQ ID NO: 2420588 - RNA, 19 nt, Artificial Sequence
  Description of Artificial Sequence: Synthetic oligonucleotide
  Sense strand starting at position 2061 of SEQ ID NO: 1886682
gggaaauccauguacugcu

SEQ ID NO: 2420589 - RNA, 19 nt, Artificial Sequence
  Description of Artificial Sequence: Synthetic oligonucleotide
  Antisense strand to SEQ ID NO: 2420588
agcaguacauggauuuccc

SEQ ID NO: 2420590 - RNA, 19 nt, Artificial Sequence
  Description of Artificial Sequence: Synthetic oligonucleotide
  Sense strand starting at position 2068 of SEQ ID NO: 1886682
ccauguacugcuuguagaa

SEQ ID NO: 2420591 - RNA, 19 nt, Artificial Sequence
  Description of Artificial Sequence: Synthetic oligonucleotide
  Antisense strand to SEQ ID NO: 2420590
uucuacaagcaguacaugg

SEQ ID NO: 2420592 - RNA, 19 nt, Artificial Sequence
  Description of Artificial Sequence: Synthetic oligonucleotide
  Sense strand starting at position 2210 of SEQ ID NO: 1886682
aggucugguaacuguugua

SEQ ID NO: 2420593 - RNA, 19 nt, Artificial Sequence
  Description of Artificial Sequence: Synthetic oligonucleotide
  Antisense strand to SEQ ID NO: 2420592
uacaacaguuaccagaccu

SEQ ID NO: 2420594 - RNA, 19 nt, Artificial Sequence
  Description of Artificial Sequence: Synthetic oligonucleotide
  Sense strand starting at position 2215 of SEQ ID NO: 1886682
ugguaacuguuguaauuua

SEQ ID NO: 2420595 - RNA, 19 nt, Artificial Sequence
  Description of Artificial Sequence: Synthetic oligonucleotide
  Antisense strand to SEQ ID NO: 2420594
uaaauuacaacaguuacca

SEQ ID NO: 2420596 - RNA, 19 nt, Artificial Sequence
  Description of Artificial Sequence: Synthetic oligonucleotide
  Sense strand starting at position 2248 of SEQ ID NO: 1886682
ggcaaacgauguuucgaca

SEQ ID NO: 2420597 - RNA, 19 nt, Artificial Sequence
  Description of Artificial Sequence: Synthetic oligonucleotide
  Antisense strand to SEQ ID NO: 2420596
ugucgaaacaucguuugcc

SEQ ID NO: 2420598 - RNA, 19 nt, Artificial Sequence
  Description of Artificial Sequence: Synthetic oligonucleotide
  Sense strand starting at position 2278 of SEQ ID NO: 1886682
augacaauacuccgucuca

SEQ ID NO: 2420599 - RNA, 19 nt, Artificial Sequence
  Description of Artificial Sequence: Synthetic oligonucleotide
  Antisense strand to SEQ ID NO: 2420598
ugagacggaguauugucau

SEQ ID NO: 2420600 - RNA, 19 nt, Artificial Sequence
  Description of Artificial Sequence: Synthetic oligonucleotide
  Sense strand starting at position 2279 of SEQ ID NO: 1886682
ugacaauacuccgucucau

SEQ ID NO: 2420601 - RNA, 19 nt, Artificial Sequence
  Description of Artificial Sequence: Synthetic oligonucleotide
  Antisense strand to SEQ ID NO: 2420600
augagacggaguauuguca

SEQ ID NO: 2420602 - RNA, 19 nt, Artificial Sequence
  Description of Artificial Sequence: Synthetic oligonucleotide
  Sense strand starting at position 2419 of SEQ ID NO: 1886682
cuugguauuuccuggauuu

SEQ ID NO: 2420603 - RNA, 19 nt, Artificial Sequence
  Description of Artificial Sequence: Synthetic oligonucleotide
  Antisense strand to SEQ ID NO: 2420602
aaauccaggaaauaccaag

SEQ ID NO: 2420604 - RNA, 19 nt, Artificial Sequence
  Description of Artificial Sequence: Synthetic oligonucleotide
  Sense strand starting at position 2468 of SEQ ID NO: 1886682
ccaaaucuguucucaggaa

SEQ ID NO: 2420605 - RNA, 19 nt, Artificial Sequence
  Description of Artificial Sequence: Synthetic oligonucleotide
  Antisense strand to SEQ ID NO: 2420604
uuccugagaacagauuugg

SEQ ID NO: 2420606 - RNA, 19 nt, Artificial Sequence
  Description of Artificial Sequence: Synthetic oligonucleotide
  Sense strand starting at position 2641 of SEQ ID NO: 1886682
gcugauagcucucuaacac

SEQ ID NO: 2420607 - RNA, 19 nt, Artificial Sequence
  Description of Artificial Sequence: Synthetic oligonucleotide
  Antisense strand to SEQ ID NO: 2420606
guguuagagagcuaucagc

SEQ ID NO: 2420608 - RNA, 19 nt, Artificial Sequence
  Description of Artificial Sequence: Synthetic oligonucleotide
  Sense strand starting at position 2681 of SEQ ID NO: 1886682
uuugaauaauggcacugaa

SEQ ID NO: 2420609 - RNA, 19 nt, Artificial Sequence
  Description of Artificial Sequence: Synthetic oligonucleotide
  Antisense strand to SEQ ID NO: 2420608
uucagugccauuauucaaa

SEQ ID NO: 2420610 - RNA, 19 nt, Artificial Sequence
  Description of Artificial Sequence: Synthetic oligonucleotide
  Sense strand starting at position 2719 of SEQ ID NO: 1886682
ggcauugucagaggucaag

SEQ ID NO: 2420611 - RNA, 19 nt, Artificial Sequence
  Description of Artificial Sequence: Synthetic oligonucleotide
  Antisense strand to SEQ ID NO: 2420610
cuugaccucugacaaugcc

SEQ ID NO: 2420612 - RNA, 19 nt, Artificial Sequence
  Description of Artificial Sequence: Synthetic oligonucleotide
  Sense strand starting at position 2822 of SEQ ID NO: 1886682
cuuuacagccaaugauagu

SEQ ID NO: 2420613 - RNA, 19 nt, Artificial Sequence
  Description of Artificial Sequence: Synthetic oligonucleotide
  Antisense strand to SEQ ID NO: 2420612
acuaucauuggcuguaaag

SEQ ID NO: 2420614 - RNA, 19 nt, Artificial Sequence
  Description of Artificial Sequence: Synthetic oligonucleotide
  Sense strand starting at position 2831 of SEQ ID NO: 1886682
caaugauaguggguucuca

SEQ ID NO: 2420615 - RNA, 19 nt, Artificial Sequence
  Description of Artificial Sequence: Synthetic oligonucleotide
  Antisense strand to SEQ ID NO: 2420614
ugagaacccacuaucauug

SEQ ID NO: 2420616 - RNA, 19 nt, Artificial Sequence
  Description of Artificial Sequence: Synthetic oligonucleotide
  Sense strand starting at position 2910 of SEQ ID NO: 1886682
aacaguccaggcugugaaa

SEQ ID NO: 2420617 - RNA, 19 nt, Artificial Sequence
  Description of Artificial Sequence: Synthetic oligonucleotide
  Antisense strand to SEQ ID NO: 2420616
uuucacagccuggacuguu

SEQ ID NO: 2420618 - RNA, 19 nt, Artificial Sequence
  Description of Artificial Sequence: Synthetic oligonucleotide
  Sense strand starting at position 2971 of SEQ ID NO: 1886682
acacuaaucuaagguagga

SEQ ID NO: 2420619 - RNA, 19 nt, Artificial Sequence
  Description of Artificial Sequence: Synthetic oligonucleotide
  Antisense strand to SEQ ID NO: 2420618
uccuaccuuagauuagugu

SEQ ID NO: 2420620 - RNA, 19 nt, Artificial Sequence
  Description of Artificial Sequence: Synthetic oligonucleotide
  Sense strand starting at position 3002 of SEQ ID NO: 1886682
uguaaaugcagggagguau

SEQ ID NO: 2420621 - RNA, 19 nt, Artificial Sequence
  Description of Artificial Sequence: Synthetic oligonucleotide
  Antisense strand to SEQ ID NO: 2420620
auaccucccugcauuuaca

SEQ ID NO: 2420622 - RNA, 19 nt, Artificial Sequence
  Description of Artificial Sequence: Synthetic oligonucleotide
  Sense strand starting at position 3136 of SEQ ID NO: 1886682
caaguugugaggugccuaa

SEQ ID NO: 2420623 - RNA, 19 nt, Artificial Sequence
  Description of Artificial Sequence: Synthetic oligonucleotide
  Antisense strand to SEQ ID NO: 2420622
uuaggcaccucacaacuug

SEQ ID NO: 2420624 - RNA, 19 nt, Artificial Sequence
  Description of Artificial Sequence: Synthetic oligonucleotide
  Sense strand starting at position 3168 of SEQ ID NO: 1886682
ccuagaguugugcaaggcu

SEQ ID NO: 2420625 - RNA, 19 nt, Artificial Sequence
  Description of Artificial Sequence: Synthetic oligonucleotide
  Antisense strand to SEQ ID NO: 2420624
agccuugcacaacucuagg

SEQ ID NO: 2420626 - RNA, 19 nt, Artificial Sequence
  Description of Artificial Sequence: Synthetic oligonucleotide
  Sense strand starting at position 3334 of SEQ ID NO: 1886682
uggaguuacgcagguucua

SEQ ID NO: 2420627 - RNA, 19 nt, Artificial Sequence
  Description of Artificial Sequence: Synthetic oligonucleotide
  Antisense strand to SEQ ID NO: 2420626
uagaaccugcguaacucca

SEQ ID NO: 2420628 - RNA, 19 nt, Artificial Sequence
  Description of Artificial Sequence: Synthetic oligonucleotide
  Sense strand starting at position 3349 of SEQ ID NO: 1886682
ucuagaaucaugcagggua

SEQ ID NO: 2420629 - RNA, 19 nt, Artificial Sequence
  Description of Artificial Sequence: Synthetic oligonucleotide
  Antisense strand to SEQ ID NO: 2420628
uacccugcaugauucuaga

SEQ ID NO: 2420630 - RNA, 19 nt, Artificial Sequence
  Description of Artificial Sequence: Synthetic oligonucleotide
  Sense strand starting at position 3604 of SEQ ID NO: 1886682
uuucgaacuuuguuccaaa

SEQ ID NO: 2420631 - RNA, 19 nt, Artificial Sequence
  Description of Artificial Sequence: Synthetic oligonucleotide
  Antisense strand to SEQ ID NO: 2420630
uuuggaacaaaguucgaaa

SEQ ID NO: 2420632 - RNA, 19 nt, Artificial Sequence
  Description of Artificial Sequence: Synthetic oligonucleotide
  Sense strand starting at position 3605 of SEQ ID NO: 1886682
uucgaacuuuguuccaaau

SEQ ID NO: 2420633 - RNA, 19 nt, Artificial Sequence
  Description of Artificial Sequence: Synthetic oligonucleotide
  Antisense strand to SEQ ID NO: 2420632
auuuggaacaaaguucgaa

SEQ ID NO: 2420634 - RNA, 19 nt, Artificial Sequence
  Description of Artificial Sequence: Synthetic oligonucleotide
  Sense strand starting at position 3768 of SEQ ID NO: 1886682
aggagugucuuagugacca

SEQ ID NO: 2420635 - RNA, 19 nt, Artificial Sequence
  Description of Artificial Sequence: Synthetic oligonucleotide
  Antisense strand to SEQ ID NO: 2420634
uggucacuaagacacuccu

SEQ ID NO: 2420636 - RNA, 19 nt, Artificial Sequence
  Description of Artificial Sequence: Synthetic oligonucleotide
  Sense strand starting at position 3772 of SEQ ID NO: 1886682
gugucuuagugaccacaca

SEQ ID NO: 2420637 - RNA, 19 nt, Artificial Sequence
  Description of Artificial Sequence: Synthetic oligonucleotide
  Antisense strand to SEQ ID NO: 2420636
uguguggucacuaagacac

SEQ ID NO: 2420638 - RNA, 19 nt, Artificial Sequence
  Description of Artificial Sequence: Synthetic oligonucleotide
  Sense strand starting at position 3886 of SEQ ID NO: 1886682
gugagccuucugcaacagu

SEQ ID NO: 2420639 - RNA, 19 nt, Artificial Sequence
  Description of Artificial Sequence: Synthetic oligonucleotide
  Antisense strand to SEQ ID NO: 2420638
acuguugcagaaggcucac

SEQ ID NO: 2420640 - RNA, 19 nt, Artificial Sequence
  Description of Artificial Sequence: Synthetic oligonucleotide
  Sense strand starting at position 122 of SEQ ID NO: 1886683
ucaguugagggaugagauu

SEQ ID NO: 2420641 - RNA, 19 nt, Artificial Sequence
  Description of Artificial Sequence: Synthetic oligonucleotide
  Antisense strand to SEQ ID NO: 2420640
aaucucaucccucaacuga

SEQ ID NO: 2420642 - RNA, 19 nt, Artificial Sequence
  Description of Artificial Sequence: Synthetic oligonucleotide
  Sense strand starting at position 131 of SEQ ID NO: 1886683
ggaugagauucguaccaga

SEQ ID NO: 2420643 - RNA, 19 nt, Artificial Sequence
  Description of Artificial Sequence: Synthetic oligonucleotide
  Antisense strand to SEQ ID NO: 2420642
ucugguacgaaucucaucc

SEQ ID NO: 2420644 - RNA, 19 nt, Artificial Sequence
  Description of Artificial Sequence: Synthetic oligonucleotide
  Sense strand starting at position 134 of SEQ ID NO: 1886683
ugagauucguaccagaguu

SEQ ID NO: 2420645 - RNA, 19 nt, Artificial Sequence
  Description of Artificial Sequence: Synthetic oligonucleotide
  Antisense strand to SEQ ID NO: 2420644
aacucugguacgaaucuca

SEQ ID NO: 2420646 - RNA, 19 nt, Artificial Sequence
  Description of Artificial Sequence: Synthetic oligonucleotide
  Sense strand starting at position 374 of SEQ ID NO: 1886683
agagaagacagcuguguua

SEQ ID NO: 2420647 - RNA, 19 nt, Artificial Sequence
  Description of Artificial Sequence: Synthetic oligonucleotide
  Antisense strand to SEQ ID NO: 2420646
uaacacagcugucuucucu

SEQ ID NO: 2420648 - RNA, 19 nt, Artificial Sequence
  Description of Artificial Sequence: Synthetic oligonucleotide
  Sense strand starting at position 657 of SEQ ID NO: 1886683
ccuggugucucagcaaagu

SEQ ID NO: 2420649 - RNA, 19 nt, Artificial Sequence
  Description of Artificial Sequence: Synthetic oligonucleotide
  Antisense strand to SEQ ID NO: 2420648
acuuugcugagacaccagg

SEQ ID NO: 2420650 - RNA, 19 nt, Artificial Sequence
  Description of Artificial Sequence: Synthetic oligonucleotide
  Sense strand starting at position 823 of SEQ ID NO: 1886683
gagacaucacucuguggag

SEQ ID NO: 2420651 - RNA, 19 nt, Artificial Sequence
  Description of Artificial Sequence: Synthetic oligonucleotide
  Antisense strand to SEQ ID NO: 2420650
cuccacagagugaugucuc

SEQ ID NO: 2420652 - RNA, 19 nt, Artificial Sequence
  Description of Artificial Sequence: Synthetic oligonucleotide
  Sense strand starting at position 880 of SEQ ID NO: 1886683
agcucuugguguccugaau

SEQ ID NO: 2420653 - RNA, 19 nt, Artificial Sequence
  Description of Artificial Sequence: Synthetic oligonucleotide
  Antisense strand to SEQ ID NO: 2420652
auucaggacaccaagagcu

SEQ ID NO: 2420654 - RNA, 19 nt, Artificial Sequence
  Description of Artificial Sequence: Synthetic oligonucleotide
  Sense strand starting at position 886 of SEQ ID NO: 1886683
ugguguccugaaugacagu

SEQ ID NO: 2420655 - RNA, 19 nt, Artificial Sequence
  Description of Artificial Sequence: Synthetic oligonucleotide
  Antisense strand to SEQ ID NO: 2420654
acugucauucaggacacca

SEQ ID NO: 2420656 - RNA, 19 nt, Artificial Sequence
  Description of Artificial Sequence: Synthetic oligonucleotide
  Sense strand starting at position 889 of SEQ ID NO: 1886683
uguccugaaugacaguuaa

SEQ ID NO: 2420657 - RNA, 19 nt, Artificial Sequence
  Description of Artificial Sequence: Synthetic oligonucleotide
  Antisense strand to SEQ ID NO: 2420656
uuaacugucauucaggaca

SEQ ID NO: 2420658 - RNA, 19 nt, Artificial Sequence
  Description of Artificial Sequence: Synthetic oligonucleotide
  Sense strand starting at position 920 of SEQ ID NO: 1886683
ugcaaagcuugaggcaaau

SEQ ID NO: 2420659 - RNA, 19 nt, Artificial Sequence
  Description of Artificial Sequence: Synthetic oligonucleotide
  Antisense strand to SEQ ID NO: 2420658
auuugccucaagcuuugca

SEQ ID NO: 2420660 - RNA, 19 nt, Artificial Sequence
  Description of Artificial Sequence: Synthetic oligonucleotide
  Sense strand starting at position 926 of SEQ ID NO: 1886683
gcuugaggcaaauguucua

SEQ ID NO: 2420661 - RNA, 19 nt, Artificial Sequence
  Description of Artificial Sequence: Synthetic oligonucleotide
  Antisense strand to SEQ ID NO: 2420660
uagaacauuugccucaagc

SEQ ID NO: 2420662 - RNA, 19 nt, Artificial Sequence
  Description of Artificial Sequence: Synthetic oligonucleotide
  Sense strand starting at position 931 of SEQ ID NO: 1886683
aggcaaauguucuaccaug

SEQ ID NO: 2420663 - RNA, 19 nt, Artificial Sequence
  Description of Artificial Sequence: Synthetic oligonucleotide
  Antisense strand to SEQ ID NO: 2420662
caugguagaacauuugccu

SEQ ID NO: 2420664 - RNA, 19 nt, Artificial Sequence
  Description of Artificial Sequence: Synthetic oligonucleotide
  Sense strand starting at position 1006 of SEQ ID NO: 1886683
cugccaucccgggaauucu

SEQ ID NO: 2420665 - RNA, 19 nt, Artificial Sequence
  Description of Artificial Sequence: Synthetic oligonucleotide
  Antisense strand to SEQ ID NO: 2420664
agaauucccgggauggcag

SEQ ID NO: 2420666 - RNA, 19 nt, Artificial Sequence
  Description of Artificial Sequence: Synthetic oligonucleotide
  Sense strand starting at position 1014 of SEQ ID NO: 1886683
ccgggaauucuccaagcca

SEQ ID NO: 2420667 - RNA, 19 nt, Artificial Sequence
  Description of Artificial Sequence: Synthetic oligonucleotide
  Antisense strand to SEQ ID NO: 2420666
uggcuuggagaauucccgg

SEQ ID NO: 2420668 - RNA, 19 nt, Artificial Sequence
  Description of Artificial Sequence: Synthetic oligonucleotide
  Sense strand starting at position 1121 of SEQ ID NO: 1886683
gguccugagcuuggugaca

SEQ ID NO: 2420669 - RNA, 19 nt, Artificial Sequence
  Description of Artificial Sequence: Synthetic oligonucleotide
  Antisense strand to SEQ ID NO: 2420668
ugucaccaagcucaggacc

SEQ ID NO: 2420670 - RNA, 19 nt, Artificial Sequence
  Description of Artificial Sequence: Synthetic oligonucleotide
  Sense strand starting at position 1123 of SEQ ID NO: 1886683
uccugagcuuggugacaaa

SEQ ID NO: 2420671 - RNA, 19 nt, Artificial Sequence
  Description of Artificial Sequence: Synthetic oligonucleotide
  Antisense strand to SEQ ID NO: 2420670
uuugucaccaagcucagga

SEQ ID NO: 2420672 - RNA, 19 nt, Artificial Sequence
  Description of Artificial Sequence: Synthetic oligonucleotide
  Sense strand starting at position 1352 of SEQ ID NO: 1886683
cccagcugaucuguguauu

SEQ ID NO: 2420673 - RNA, 19 nt, Artificial Sequence
  Description of Artificial Sequence: Synthetic oligonucleotide
  Antisense strand to SEQ ID NO: 2420672
aauacacagaucagcuggg

SEQ ID NO: 2420674 - RNA, 19 nt, Artificial Sequence
  Description of Artificial Sequence: Synthetic oligonucleotide
  Sense strand starting at position 1353 of SEQ ID NO: 1886683
ccagcugaucuguguauuu

SEQ ID NO: 2420675 - RNA, 19 nt, Artificial Sequence
  Description of Artificial Sequence: Synthetic oligonucleotide
  Antisense strand to SEQ ID NO: 2420674
aaauacacagaucagcugg

SEQ ID NO: 2420676 - RNA, 19 nt, Artificial Sequence
  Description of Artificial Sequence: Synthetic oligonucleotide
  Sense strand starting at position 1456 of SEQ ID NO: 1886683
ugccuuucuggguaagucu

SEQ ID NO: 2420677 - RNA, 19 nt, Artificial Sequence
  Description of Artificial Sequence: Synthetic oligonucleotide
  Antisense strand to SEQ ID NO: 2420676
agacuuacccagaaaggca

SEQ ID NO: 2420678 - RNA, 19 nt, Artificial Sequence
  Description of Artificial Sequence: Synthetic oligonucleotide
  Sense strand starting at position 1539 of SEQ ID NO: 1886683
aaucccucguccugagaga

SEQ ID NO: 2420679 - RNA, 19 nt, Artificial Sequence
  Description of Artificial Sequence: Synthetic oligonucleotide
  Antisense strand to SEQ ID NO: 2420678
ucucucaggacgagggauu

SEQ ID NO: 2420680 - RNA, 19 nt, Artificial Sequence
  Description of Artificial Sequence: Synthetic oligonucleotide
  Sense strand starting at position 1540 of SEQ ID NO: 1886683
aucccucguccugagagau

SEQ ID NO: 2420681 - RNA, 19 nt, Artificial Sequence
  Description of Artificial Sequence: Synthetic oligonucleotide
  Antisense strand to SEQ ID NO: 2420680
aucucucaggacgagggau

SEQ ID NO: 2420682 - RNA, 19 nt, Artificial Sequence
  Description of Artificial Sequence: Synthetic oligonucleotide
  Sense strand starting at position 1573 of SEQ ID NO: 1886683
cugugugucuuaucccuga

SEQ ID NO: 2420683 - RNA, 19 nt, Artificial Sequence
  Description of Artificial Sequence: Synthetic oligonucleotide
  Antisense strand to SEQ ID NO: 2420682
ucagggauaagacacacag

SEQ ID NO: 2420684 - RNA, 19 nt, Artificial Sequence
  Description of Artificial Sequence: Synthetic oligonucleotide
  Sense strand starting at position 1577 of SEQ ID NO: 1886683
gugucuuaucccugaacca

SEQ ID NO: 2420685 - RNA, 19 nt, Artificial Sequence
  Description of Artificial Sequence: Synthetic oligonucleotide
  Antisense strand to SEQ ID NO: 2420684
ugguucagggauaagacac

SEQ ID NO: 2420686 - RNA, 19 nt, Artificial Sequence
  Description of Artificial Sequence: Synthetic oligonucleotide
  Sense strand starting at position 2143 of SEQ ID NO: 1886683
gcggcuuaugaugagggau

SEQ ID NO: 2420687 - RNA, 19 nt, Artificial Sequence
  Description of Artificial Sequence: Synthetic oligonucleotide
  Antisense strand to SEQ ID NO: 2420686
aucccucaucauaagccgc

SEQ ID NO: 2420688 - RNA, 19 nt, Artificial Sequence
  Description of Artificial Sequence: Synthetic oligonucleotide
  Sense strand starting at position 2146 of SEQ ID NO: 1886683
gcuuaugaugagggaugga

SEQ ID NO: 2420689 - RNA, 19 nt, Artificial Sequence
  Description of Artificial Sequence: Synthetic oligonucleotide
  Antisense strand to SEQ ID NO: 2420688
uccaucccucaucauaagc

SEQ ID NO: 2420690 - RNA, 19 nt, Artificial Sequence
  Description of Artificial Sequence: Synthetic oligonucleotide
  Sense strand starting at position 2268 of SEQ ID NO: 1886683
gccugaugcuuccaggaga

SEQ ID NO: 2420691 - RNA, 19 nt, Artificial Sequence
  Description of Artificial Sequence: Synthetic oligonucleotide
  Antisense strand to SEQ ID NO: 2420690
ucuccuggaagcaucaggc

SEQ ID NO: 2420692 - RNA, 19 nt, Artificial Sequence
  Description of Artificial Sequence: Synthetic oligonucleotide
  Sense strand starting at position 2483 of SEQ ID NO: 1886683
ugacucagcuguccugaau

SEQ ID NO: 2420693 - RNA, 19 nt, Artificial Sequence
  Description of Artificial Sequence: Synthetic oligonucleotide
  Antisense strand to SEQ ID NO: 2420692
auucaggacagcugaguca

SEQ ID NO: 2420694 - RNA, 19 nt, Artificial Sequence
  Description of Artificial Sequence: Synthetic oligonucleotide
  Sense strand starting at position 2799 of SEQ ID NO: 1886683
gguucuugugcugacugua

SEQ ID NO: 2420695 - RNA, 19 nt, Artificial Sequence
  Description of Artificial Sequence: Synthetic oligonucleotide
  Antisense strand to SEQ ID NO: 2420694
uacagucagcacaagaacc

SEQ ID NO: 2420696 - RNA, 19 nt, Artificial Sequence
  Description of Artificial Sequence: Synthetic oligonucleotide
  Sense strand starting at position 3271 of SEQ ID NO: 1886683
ggccucuuguucuguguca

SEQ ID NO: 2420697 - RNA, 19 nt, Artificial Sequence
  Description of Artificial Sequence: Synthetic oligonucleotide
  Antisense strand to SEQ ID NO: 2420696
ugacacagaacaagaggcc

SEQ ID NO: 2420698 - RNA, 19 nt, Artificial Sequence
  Description of Artificial Sequence: Synthetic oligonucleotide
  Sense strand starting at position 3620 of SEQ ID NO: 1886683
ucugcuguccuuugaggaa

SEQ ID NO: 2420699 - RNA, 19 nt, Artificial Sequence
  Description of Artificial Sequence: Synthetic oligonucleotide
  Antisense strand to SEQ ID NO: 2420698
uuccucaaaggacagcaga

SEQ ID NO: 2420700 - RNA, 19 nt, Artificial Sequence
  Description of Artificial Sequence: Synthetic oligonucleotide
  Sense strand starting at position 3682 of SEQ ID NO: 1886683
ucaagucaucaccggaauu

SEQ ID NO: 2420701 - RNA, 19 nt, Artificial Sequence
  Description of Artificial Sequence: Synthetic oligonucleotide
  Antisense strand to SEQ ID NO: 2420700
aauuccggugaugacuuga

SEQ ID NO: 2420702 - RNA, 19 nt, Artificial Sequence
  Description of Artificial Sequence: Synthetic oligonucleotide
  Sense strand starting at position 3876 of SEQ ID NO: 1886683
gccagaucaugccgaugau

SEQ ID NO: 2420703 - RNA, 19 nt, Artificial Sequence
  Description of Artificial Sequence: Synthetic oligonucleotide
  Antisense strand to SEQ ID NO: 2420702
aucaucggcaugaucuggc

SEQ ID NO: 2420704 - RNA, 19 nt, Artificial Sequence
  Description of Artificial Sequence: Synthetic oligonucleotide
  Sense strand starting at position 3906 of SEQ ID NO: 1886683
cgcagagccaguugaagaa

SEQ ID NO: 2420705 - RNA, 19 nt, Artificial Sequence
  Description of Artificial Sequence: Synthetic oligonucleotide
  Antisense strand to SEQ ID NO: 2420704
uucuucaacuggcucugcg

SEQ ID NO: 2420706 - RNA, 19 nt, Artificial Sequence
  Description of Artificial Sequence: Synthetic oligonucleotide
  Sense strand starting at position 3930 of SEQ ID NO: 1886683
agaaguugaugacggagaa

SEQ ID NO: 2420707 - RNA, 19 nt, Artificial Sequence
  Description of Artificial Sequence: Synthetic oligonucleotide
  Antisense strand to SEQ ID NO: 2420706
uucuccgucaucaacuucu

SEQ ID NO: 2420708 - RNA, 19 nt, Artificial Sequence
  Description of Artificial Sequence: Synthetic oligonucleotide
  Sense strand starting at position 3942 of SEQ ID NO: 1886683
cggagaagauguccuugga

SEQ ID NO: 2420709 - RNA, 19 nt, Artificial Sequence
  Description of Artificial Sequence: Synthetic oligonucleotide
  Antisense strand to SEQ ID NO: 2420708
uccaaggacaucuucuccg

SEQ ID NO: 2420710 - RNA, 19 nt, Artificial Sequence
  Description of Artificial Sequence: Synthetic oligonucleotide
  Sense strand starting at position 32 of SEQ ID NO: 1886688
ucagguggucccuacuuaa

SEQ ID NO: 2420711 - RNA, 19 nt, Artificial Sequence
  Description of Artificial Sequence: Synthetic oligonucleotide
  Antisense strand to SEQ ID NO: 2420710
uuaaguagggaccaccuga

SEQ ID NO: 2420712 - RNA, 19 nt, Artificial Sequence
  Description of Artificial Sequence: Synthetic oligonucleotide
  Sense strand starting at position 53 of SEQ ID NO: 1886688
gugcuuucuccagcuguua

SEQ ID NO: 2420713 - RNA, 19 nt, Artificial Sequence
  Description of Artificial Sequence: Synthetic oligonucleotide
  Antisense strand to SEQ ID NO: 2420712
uaacagcuggagaaagcac

SEQ ID NO: 2420714 - RNA, 19 nt, Artificial Sequence
  Description of Artificial Sequence: Synthetic oligonucleotide
  Sense strand starting at position 111 of SEQ ID NO: 1886688
gcccuaguuuaacucugaa

SEQ ID NO: 2420715 - RNA, 19 nt, Artificial Sequence
  Description of Artificial Sequence: Synthetic oligonucleotide
  Antisense strand to SEQ ID NO: 2420714
uucagaguuaaacuagggc

SEQ ID NO: 2420716 - RNA, 19 nt, Artificial Sequence
  Description of Artificial Sequence: Synthetic oligonucleotide
  Sense strand starting at position 438 of SEQ ID NO: 1886688
gcaccuggcccagaauuau

SEQ ID NO: 2420717 - RNA, 19 nt, Artificial Sequence
  Description of Artificial Sequence: Synthetic oligonucleotide
  Antisense strand to SEQ ID NO: 2420716
auaauucugggccaggugc

SEQ ID NO: 2420718 - RNA, 19 nt, Artificial Sequence
  Description of Artificial Sequence: Synthetic oligonucleotide
  Sense strand starting at position 444 of SEQ ID NO: 1886688
ggcccagaauuaucuuaac

SEQ ID NO: 2420719 - RNA, 19 nt, Artificial Sequence
  Description of Artificial Sequence: Synthetic oligonucleotide
  Antisense strand to SEQ ID NO: 2420718
guuaagauaauucugggcc

SEQ ID NO: 2420720 - RNA, 19 nt, Artificial Sequence
  Description of Artificial Sequence: Synthetic oligonucleotide
  Sense strand starting at position 838 of SEQ ID NO: 1886688
uuggcugccuuguuaauca

SEQ ID NO: 2420721 - RNA, 19 nt, Artificial Sequence
  Description of Artificial Sequence: Synthetic oligonucleotide
  Antisense strand to SEQ ID NO: 2420720
ugauuaacaaggcagccaa

SEQ ID NO: 2420722 - RNA, 19 nt, Artificial Sequence
  Description of Artificial Sequence: Synthetic oligonucleotide
  Sense strand starting at position 972 of SEQ ID NO: 1886688
cccaaagguucucaaagua

SEQ ID NO: 2420723 - RNA, 19 nt, Artificial Sequence
  Description of Artificial Sequence: Synthetic oligonucleotide
  Antisense strand to SEQ ID NO: 2420722
uacuuugagaaccuuuggg

SEQ ID NO: 2420724 - RNA, 19 nt, Artificial Sequence
  Description of Artificial Sequence: Synthetic oligonucleotide
  Sense strand starting at position 986 of SEQ ID NO: 1886688
aaguauagcccugagacca

SEQ ID NO: 2420725 - RNA, 19 nt, Artificial Sequence
  Description of Artificial Sequence: Synthetic oligonucleotide
  Antisense strand to SEQ ID NO: 2420724
uggucucagggcuauacuu

SEQ ID NO: 2420726 - RNA, 19 nt, Artificial Sequence
  Description of Artificial Sequence: Synthetic oligonucleotide
  Sense strand starting at position 1105 of SEQ ID NO: 1886688
ccgugugaacgcuagguaa

SEQ ID NO: 2420727 - RNA, 19 nt, Artificial Sequence
  Description of Artificial Sequence: Synthetic oligonucleotide
  Antisense strand to SEQ ID NO: 2420726
uuaccuagcguucacacgg

SEQ ID NO: 2420728 - RNA, 19 nt, Artificial Sequence
  Description of Artificial Sequence: Synthetic oligonucleotide
  Sense strand starting at position 1107 of SEQ ID NO: 1886688
gugugaacgcuagguaagu

SEQ ID NO: 2420729 - RNA, 19 nt, Artificial Sequence
  Description of Artificial Sequence: Synthetic oligonucleotide
  Antisense strand to SEQ ID NO: 2420728
acuuaccuagcguucacac

SEQ ID NO: 2420730 - RNA, 19 nt, Artificial Sequence
  Description of Artificial Sequence: Synthetic oligonucleotide
  Sense strand starting at position 1108 of SEQ ID NO: 1886688
ugugaacgcuagguaaguu

SEQ ID NO: 2420731 - RNA, 19 nt, Artificial Sequence
  Description of Artificial Sequence: Synthetic oligonucleotide
  Antisense strand to SEQ ID NO: 2420730
aacuuaccuagcguucaca

SEQ ID NO: 2420732 - RNA, 19 nt, Artificial Sequence
  Description of Artificial Sequence: Synthetic oligonucleotide
  Sense strand starting at position 1243 of SEQ ID NO: 1886688
gggagugagggucaguauu

SEQ ID NO: 2420733 - RNA, 19 nt, Artificial Sequence
  Description of Artificial Sequence: Synthetic oligonucleotide
  Antisense strand to SEQ ID NO: 2420732
aauacugacccucacuccc

SEQ ID NO: 2420734 - RNA, 19 nt, Artificial Sequence
  Description of Artificial Sequence: Synthetic oligonucleotide
  Sense strand starting at position 1286 of SEQ ID NO: 1886688
auccauucguuccaccaga

SEQ ID NO: 2420735 - RNA, 19 nt, Artificial Sequence
  Description of Artificial Sequence: Synthetic oligonucleotide
  Antisense strand to SEQ ID NO: 2420734
ucugguggaacgaauggau

SEQ ID NO: 2420736 - RNA, 19 nt, Artificial Sequence
  Description of Artificial Sequence: Synthetic oligonucleotide
  Sense strand starting at position 1543 of SEQ ID NO: 1886688
ggauauccaucagcucauu

SEQ ID NO: 2420737 - RNA, 19 nt, Artificial Sequence
  Description of Artificial Sequence: Synthetic oligonucleotide
  Antisense strand to SEQ ID NO: 2420736
aaugagcugauggauaucc

SEQ ID NO: 2420738 - RNA, 19 nt, Artificial Sequence
  Description of Artificial Sequence: Synthetic oligonucleotide
  Sense strand starting at position 1549 of SEQ ID NO: 1886688
ccaucagcucauugaugca

SEQ ID NO: 2420739 - RNA, 19 nt, Artificial Sequence
  Description of Artificial Sequence: Synthetic oligonucleotide
  Antisense strand to SEQ ID NO: 2420738
ugcaucaaugagcugaugg

SEQ ID NO: 2420740 - RNA, 19 nt, Artificial Sequence
  Description of Artificial Sequence: Synthetic oligonucleotide
  Sense strand starting at position 1587 of SEQ ID NO: 1886688
aucucuggcugccaagauu

SEQ ID NO: 2420741 - RNA, 19 nt, Artificial Sequence
  Description of Artificial Sequence: Synthetic oligonucleotide
  Antisense strand to SEQ ID NO: 2420740
aaucuuggcagccagagau

SEQ ID NO: 2420742 - RNA, 19 nt, Artificial Sequence
  Description of Artificial Sequence: Synthetic oligonucleotide
  Sense strand starting at position 1619 of SEQ ID NO: 1886688
gagucagaggugugaaggu

SEQ ID NO: 2420743 - RNA, 19 nt, Artificial Sequence
  Description of Artificial Sequence: Synthetic oligonucleotide
  Antisense strand to SEQ ID NO: 2420742
accuucacaccucugacuc

SEQ ID NO: 2420744 - RNA, 19 nt, Artificial Sequence
  Description of Artificial Sequence: Synthetic oligonucleotide
  Sense strand starting at position 1751 of SEQ ID NO: 1886688
cagcgaugcccugagauga

SEQ ID NO: 2420745 - RNA, 19 nt, Artificial Sequence
  Description of Artificial Sequence: Synthetic oligonucleotide
  Antisense strand to SEQ ID NO: 2420744
ucaucucagggcaucgcug

SEQ ID NO: 2420746 - RNA, 19 nt, Artificial Sequence
  Description of Artificial Sequence: Synthetic oligonucleotide
  Sense strand starting at position 1830 of SEQ ID NO: 1886688
aggcgaugauauugaacuu

SEQ ID NO: 2420747 - RNA, 19 nt, Artificial Sequence
  Description of Artificial Sequence: Synthetic oligonucleotide
  Antisense strand to SEQ ID NO: 2420746
aaguucaauaucaucgccu

SEQ ID NO: 2420748 - RNA, 19 nt, Artificial Sequence
  Description of Artificial Sequence: Synthetic oligonucleotide
  Sense strand starting at position 1842 of SEQ ID NO: 1886688
ugaacuugaucuugacaau

SEQ ID NO: 2420749 - RNA, 19 nt, Artificial Sequence
  Description of Artificial Sequence: Synthetic oligonucleotide
  Antisense strand to SEQ ID NO: 2420748
auugucaagaucaaguuca

SEQ ID NO: 2420750 - RNA, 19 nt, Artificial Sequence
  Description of Artificial Sequence: Synthetic oligonucleotide
  Sense strand starting at position 1845 of SEQ ID NO: 1886688
acuugaucuugacaaugac

SEQ ID NO: 2420751 - RNA, 19 nt, Artificial Sequence
  Description of Artificial Sequence: Synthetic oligonucleotide
  Antisense strand to SEQ ID NO: 2420750
gucauugucaagaucaagu

SEQ ID NO: 2420752 - RNA, 19 nt, Artificial Sequence
  Description of Artificial Sequence: Synthetic oligonucleotide
  Sense strand starting at position 1949 of SEQ ID NO: 1886688
gggugaggcuuuggagaca

SEQ ID NO: 2420753 - RNA, 19 nt, Artificial Sequence
  Description of Artificial Sequence: Synthetic oligonucleotide
  Antisense strand to SEQ ID NO: 2420752
ugucuccaaagccucaccc

SEQ ID NO: 2420754 - RNA, 19 nt, Artificial Sequence
  Description of Artificial Sequence: Synthetic oligonucleotide
  Sense strand starting at position 2081 of SEQ ID NO: 1886688
ccuggaaugcugugaaaug

SEQ ID NO: 2420755 - RNA, 19 nt, Artificial Sequence
  Description of Artificial Sequence: Synthetic oligonucleotide
  Antisense strand to SEQ ID NO: 2420754
cauuucacagcauuccagg

SEQ ID NO: 2420756 - RNA, 19 nt, Artificial Sequence
  Description of Artificial Sequence: Synthetic oligonucleotide
  Sense strand starting at position 2486 of SEQ ID NO: 1886688
acauuaucucauuguauag

SEQ ID NO: 2420757 - RNA, 19 nt, Artificial Sequence
  Description of Artificial Sequence: Synthetic oligonucleotide
  Antisense strand to SEQ ID NO: 2420756
cuauacaaugagauaaugu

SEQ ID NO: 2420758 - RNA, 19 nt, Artificial Sequence
  Description of Artificial Sequence: Synthetic oligonucleotide
  Sense strand starting at position 2523 of SEQ ID NO: 1886688
aacguuaagugauugguuu

SEQ ID NO: 2420759 - RNA, 19 nt, Artificial Sequence
  Description of Artificial Sequence: Synthetic oligonucleotide
  Antisense strand to SEQ ID NO: 2420758
aaaccaaucacuuaacguu

SEQ ID NO: 2420760 - RNA, 19 nt, Artificial Sequence
  Description of Artificial Sequence: Synthetic oligonucleotide
  Sense strand starting at position 2688 of SEQ ID NO: 1886688
ccacgaaucuuaccgauca

SEQ ID NO: 2420761 - RNA, 19 nt, Artificial Sequence
  Description of Artificial Sequence: Synthetic oligonucleotide
  Antisense strand to SEQ ID NO: 2420760
ugaucgguaagauucgugg

SEQ ID NO: 2420762 - RNA, 19 nt, Artificial Sequence
  Description of Artificial Sequence: Synthetic oligonucleotide
  Sense strand starting at position 2690 of SEQ ID NO: 1886688
acgaaucuuaccgaucagu

SEQ ID NO: 2420763 - RNA, 19 nt, Artificial Sequence
  Description of Artificial Sequence: Synthetic oligonucleotide
  Antisense strand to SEQ ID NO: 2420762
acugaucgguaagauucgu

SEQ ID NO: 2420764 - RNA, 19 nt, Artificial Sequence
  Description of Artificial Sequence: Synthetic oligonucleotide
  Sense strand starting at position 2794 of SEQ ID NO: 1886688
uuuggcuucuccuguauca

SEQ ID NO: 2420765 - RNA, 19 nt, Artificial Sequence
  Description of Artificial Sequence: Synthetic oligonucleotide
  Antisense strand to SEQ ID NO: 2420764
ugauacaggagaagccaaa

SEQ ID NO: 2420766 - RNA, 19 nt, Artificial Sequence
  Description of Artificial Sequence: Synthetic oligonucleotide
  Sense strand starting at position 2796 of SEQ ID NO: 1886688
uggcuucuccuguaucagu

SEQ ID NO: 2420767 - RNA, 19 nt, Artificial Sequence
  Description of Artificial Sequence: Synthetic oligonucleotide
  Antisense strand to SEQ ID NO: 2420766
acugauacaggagaagcca

SEQ ID NO: 2420768 - RNA, 19 nt, Artificial Sequence
  Description of Artificial Sequence: Synthetic oligonucleotide
  Sense strand starting at position 2801 of SEQ ID NO: 1886688
ucuccuguaucaguacaua

SEQ ID NO: 2420769 - RNA, 19 nt, Artificial Sequence
  Description of Artificial Sequence: Synthetic oligonucleotide
  Antisense strand to SEQ ID NO: 2420768
uauguacugauacaggaga

SEQ ID NO: 2420770 - RNA, 19 nt, Artificial Sequence
  Description of Artificial Sequence: Synthetic oligonucleotide
  Sense strand starting at position 2841 of SEQ ID NO: 1886688
gggaaacuguccuugccuu

SEQ ID NO: 2420771 - RNA, 19 nt, Artificial Sequence
  Description of Artificial Sequence: Synthetic oligonucleotide
  Antisense strand to SEQ ID NO: 2420770
aaggcaaggacaguuuccc

SEQ ID NO: 2420772 - RNA, 19 nt, Artificial Sequence
  Description of Artificial Sequence: Synthetic oligonucleotide
  Sense strand starting at position 2842 of SEQ ID NO: 1886688
ggaaacuguccuugccuuu

SEQ ID NO: 2420773 - RNA, 19 nt, Artificial Sequence
  Description of Artificial Sequence: Synthetic oligonucleotide
  Antisense strand to SEQ ID NO: 2420772
aaaggcaaggacaguuucc

SEQ ID NO: 2420774 - RNA, 19 nt, Artificial Sequence
  Description of Artificial Sequence: Synthetic oligonucleotide
  Sense strand starting at position 3188 of SEQ ID NO: 1886688
ggguccaaguuaugcucua

SEQ ID NO: 2420775 - RNA, 19 nt, Artificial Sequence
  Description of Artificial Sequence: Synthetic oligonucleotide
  Antisense strand to SEQ ID NO: 2420774
uagagcauaacuuggaccc

SEQ ID NO: 2420776 - RNA, 19 nt, Artificial Sequence
  Description of Artificial Sequence: Synthetic oligonucleotide
  Sense strand starting at position 3307 of SEQ ID NO: 1886688
gucagcuaagcaugguaga

SEQ ID NO: 2420777 - RNA, 19 nt, Artificial Sequence
  Description of Artificial Sequence: Synthetic oligonucleotide
  Antisense strand to SEQ ID NO: 2420776
ucuaccaugcuuagcugac

SEQ ID NO: 2420778 - RNA, 19 nt, Artificial Sequence
  Description of Artificial Sequence: Synthetic oligonucleotide
  Sense strand starting at position 3308 of SEQ ID NO: 1886688
ucagcuaagcaugguagau

SEQ ID NO: 2420779 - RNA, 19 nt, Artificial Sequence
  Description of Artificial Sequence: Synthetic oligonucleotide
  Antisense strand to SEQ ID NO: 2420778
aucuaccaugcuuagcuga

SEQ ID NO: 2420780 - RNA, 19 nt, Artificial Sequence
  Description of Artificial Sequence: Synthetic oligonucleotide
  Sense strand starting at position 3883 of SEQ ID NO: 1886688
acuggauguugccugaaac

SEQ ID NO: 2420781 - RNA, 19 nt, Artificial Sequence
  Description of Artificial Sequence: Synthetic oligonucleotide
  Antisense strand to SEQ ID NO: 2420780
guuucaggcaacauccagu

SEQ ID NO: 2420782 - RNA, 19 nt, Artificial Sequence
  Description of Artificial Sequence: Synthetic oligonucleotide
  Sense strand starting at position 3906 of SEQ ID NO: 1886688
uccagacuugaguauguau

SEQ ID NO: 2420783 - RNA, 19 nt, Artificial Sequence
  Description of Artificial Sequence: Synthetic oligonucleotide
  Antisense strand to SEQ ID NO: 2420782
auacauacucaagucugga

SEQ ID NO: 2420784 - RNA, 19 nt, Artificial Sequence
  Description of Artificial Sequence: Synthetic oligonucleotide
  Sense strand starting at position 33 of SEQ ID NO: 1886689
ucagguggucccuacuuaa

SEQ ID NO: 2420785 - RNA, 19 nt, Artificial Sequence
  Description of Artificial Sequence: Synthetic oligonucleotide
  Antisense strand to SEQ ID NO: 2420784
uuaaguagggaccaccuga

SEQ ID NO: 2420786 - RNA, 19 nt, Artificial Sequence
  Description of Artificial Sequence: Synthetic oligonucleotide
  Sense strand starting at position 54 of SEQ ID NO: 1886689
gugcuuucuccagcuguua

SEQ ID NO: 2420787 - RNA, 19 nt, Artificial Sequence
  Description of Artificial Sequence: Synthetic oligonucleotide
  Antisense strand to SEQ ID NO: 2420786
uaacagcuggagaaagcac

SEQ ID NO: 2420788 - RNA, 19 nt, Artificial Sequence
  Description of Artificial Sequence: Synthetic oligonucleotide
  Sense strand starting at position 112 of SEQ ID NO: 1886689
gcccuaguuuaacucugaa

SEQ ID NO: 2420789 - RNA, 19 nt, Artificial Sequence
  Description of Artificial Sequence: Synthetic oligonucleotide
  Antisense strand to SEQ ID NO: 2420788
uucagaguuaaacuagggc

SEQ ID NO: 2420790 - RNA, 19 nt, Artificial Sequence
  Description of Artificial Sequence: Synthetic oligonucleotide
  Sense strand starting at position 439 of SEQ ID NO: 1886689
gcaccuggcccagaauuau

SEQ ID NO: 2420791 - RNA, 19 nt, Artificial Sequence
  Description of Artificial Sequence: Synthetic oligonucleotide
  Antisense strand to SEQ ID NO: 2420790
auaauucugggccaggugc

SEQ ID NO: 2420792 - RNA, 19 nt, Artificial Sequence
  Description of Artificial Sequence: Synthetic oligonucleotide
  Sense strand starting at position 445 of SEQ ID NO: 1886689
ggcccagaauuaucuuaac

SEQ ID NO: 2420793 - RNA, 19 nt, Artificial Sequence
  Description of Artificial Sequence: Synthetic oligonucleotide
  Antisense strand to SEQ ID NO: 2420792
guuaagauaauucugggcc

SEQ ID NO: 2420794 - RNA, 19 nt, Artificial Sequence
  Description of Artificial Sequence: Synthetic oligonucleotide
  Sense strand starting at position 839 of SEQ ID NO: 1886689
uuggcugccuuguuaauca

SEQ ID NO: 2420795 - RNA, 19 nt, Artificial Sequence
  Description of Artificial Sequence: Synthetic oligonucleotide
  Antisense strand to SEQ ID NO: 2420794
ugauuaacaaggcagccaa

SEQ ID NO: 2420796 - RNA, 19 nt, Artificial Sequence
  Description of Artificial Sequence: Synthetic oligonucleotide
  Sense strand starting at position 973 of SEQ ID NO: 1886689
cccaaagguucucaaagua

SEQ ID NO: 2420797 - RNA, 19 nt, Artificial Sequence
  Description of Artificial Sequence: Synthetic oligonucleotide
  Antisense strand to SEQ ID NO: 2420796
uacuuugagaaccuuuggg

SEQ ID NO: 2420798 - RNA, 19 nt, Artificial Sequence
  Description of Artificial Sequence: Synthetic oligonucleotide
  Sense strand starting at position 987 of SEQ ID NO: 1886689
aaguauagcccugagacca

SEQ ID NO: 2420799 - RNA, 19 nt, Artificial Sequence
  Description of Artificial Sequence: Synthetic oligonucleotide
  Antisense strand to SEQ ID NO: 2420798
uggucucagggcuauacuu

SEQ ID NO: 2420800 - RNA, 19 nt, Artificial Sequence
  Description of Artificial Sequence: Synthetic oligonucleotide
  Sense strand starting at position 1106 of SEQ ID NO: 1886689
ccgugugaacgcuagguaa

SEQ ID NO: 2420801 - RNA, 19 nt, Artificial Sequence
  Description of Artificial Sequence: Synthetic oligonucleotide
  Antisense strand to SEQ ID NO: 2420800
uuaccuagcguucacacgg

SEQ ID NO: 2420802 - RNA, 19 nt, Artificial Sequence
  Description of Artificial Sequence: Synthetic oligonucleotide
  Sense strand starting at position 1108 of SEQ ID NO: 1886689
gugugaacgcuagguaagu

SEQ ID NO: 2420803 - RNA, 19 nt, Artificial Sequence
  Description of Artificial Sequence: Synthetic oligonucleotide
  Antisense strand to SEQ ID NO: 2420802
acuuaccuagcguucacac

SEQ ID NO: 2420804 - RNA, 19 nt, Artificial Sequence
  Description of Artificial Sequence: Synthetic oligonucleotide
  Sense strand starting at position 1109 of SEQ ID NO: 1886689
ugugaacgcuagguaaguu

SEQ ID NO: 2420805 - RNA, 19 nt, Artificial Sequence
  Description of Artificial Sequence: Synthetic oligonucleotide
  Antisense strand to SEQ ID NO: 2420804
aacuuaccuagcguucaca

SEQ ID NO: 2420806 - RNA, 19 nt, Artificial Sequence
  Description of Artificial Sequence: Synthetic oligonucleotide
  Sense strand starting at position 1588 of SEQ ID NO: 1886689
aucucuggcugccaagauu

SEQ ID NO: 2420807 - RNA, 19 nt, Artificial Sequence
  Description of Artificial Sequence: Synthetic oligonucleotide
  Antisense strand to SEQ ID NO: 2420806
aaucuuggcagccagagau

SEQ ID NO: 2420808 - RNA, 19 nt, Artificial Sequence
  Description of Artificial Sequence: Synthetic oligonucleotide
  Sense strand starting at position 1620 of SEQ ID NO: 1886689
gagucagaggugugaaggu

SEQ ID NO: 2420809 - RNA, 19 nt, Artificial Sequence
  Description of Artificial Sequence: Synthetic oligonucleotide
  Antisense strand to SEQ ID NO: 2420808
accuucacaccucugacuc

SEQ ID NO: 2420810 - RNA, 19 nt, Artificial Sequence
  Description of Artificial Sequence: Synthetic oligonucleotide
  Sense strand starting at position 1752 of SEQ ID NO: 1886689
cagcgaugcccugagauga

SEQ ID NO: 2420811 - RNA, 19 nt, Artificial Sequence
  Description of Artificial Sequence: Synthetic oligonucleotide
  Antisense strand to SEQ ID NO: 2420810
ucaucucagggcaucgcug

SEQ ID NO: 2420812 - RNA, 19 nt, Artificial Sequence
  Description of Artificial Sequence: Synthetic oligonucleotide
  Sense strand starting at position 2082 of SEQ ID NO: 1886689
ccuggaaugcugugaaaug

SEQ ID NO: 2420813 - RNA, 19 nt, Artificial Sequence
  Description of Artificial Sequence: Synthetic oligonucleotide
  Antisense strand to SEQ ID NO: 2420812
cauuucacagcauuccagg

SEQ ID NO: 2420814 - RNA, 19 nt, Artificial Sequence
  Description of Artificial Sequence: Synthetic oligonucleotide
  Sense strand starting at position 2524 of SEQ ID NO: 1886689
aacguuaagugauugguuu

SEQ ID NO: 2420815 - RNA, 19 nt, Artificial Sequence
  Description of Artificial Sequence: Synthetic oligonucleotide
  Antisense strand to SEQ ID NO: 2420814
aaaccaaucacuuaacguu

SEQ ID NO: 2420816 - RNA, 19 nt, Artificial Sequence
  Description of Artificial Sequence: Synthetic oligonucleotide
  Sense strand starting at position 2689 of SEQ ID NO: 1886689
ccacgaaucuuaccgauca

SEQ ID NO: 2420817 - RNA, 19 nt, Artificial Sequence
  Description of Artificial Sequence: Synthetic oligonucleotide
  Antisense strand to SEQ ID NO: 2420816
ugaucgguaagauucgugg

SEQ ID NO: 2420818 - RNA, 19 nt, Artificial Sequence
  Description of Artificial Sequence: Synthetic oligonucleotide
  Sense strand starting at position 2691 of SEQ ID NO: 1886689
acgaaucuuaccgaucagu

SEQ ID NO: 2420819 - RNA, 19 nt, Artificial Sequence
  Description of Artificial Sequence: Synthetic oligonucleotide
  Antisense strand to SEQ ID NO: 2420818
acugaucgguaagauucgu

SEQ ID NO: 2420820 - RNA, 19 nt, Artificial Sequence
  Description of Artificial Sequence: Synthetic oligonucleotide
  Sense strand starting at position 2795 of SEQ ID NO: 1886689
uuuggcuucuccuguauca

SEQ ID NO: 2420821 - RNA, 19 nt, Artificial Sequence
  Description of Artificial Sequence: Synthetic oligonucleotide
  Antisense strand to SEQ ID NO: 2420820
ugauacaggagaagccaaa

SEQ ID NO: 2420822 - RNA, 19 nt, Artificial Sequence
  Description of Artificial Sequence: Synthetic oligonucleotide
  Sense strand starting at position 2802 of SEQ ID NO: 1886689
ucuccuguaucagcacaua

SEQ ID NO: 2420823 - RNA, 19 nt, Artificial Sequence
  Description of Artificial Sequence: Synthetic oligonucleotide
  Antisense strand to SEQ ID NO: 2420822
uaugugcugauacaggaga

SEQ ID NO: 2420824 - RNA, 19 nt, Artificial Sequence
  Description of Artificial Sequence: Synthetic oligonucleotide
  Sense strand starting at position 2842 of SEQ ID NO: 1886689
gggaaacuguccuugccuu

SEQ ID NO: 2420825 - RNA, 19 nt, Artificial Sequence
  Description of Artificial Sequence: Synthetic oligonucleotide
  Antisense strand to SEQ ID NO: 2420824
aaggcaaggacaguuuccc

SEQ ID NO: 2420826 - RNA, 19 nt, Artificial Sequence
  Description of Artificial Sequence: Synthetic oligonucleotide
  Sense strand starting at position 2843 of SEQ ID NO: 1886689
ggaaacuguccuugccuuu

SEQ ID NO: 2420827 - RNA, 19 nt, Artificial Sequence
  Description of Artificial Sequence: Synthetic oligonucleotide
  Antisense strand to SEQ ID NO: 2420826
aaaggcaaggacaguuucc

SEQ ID NO: 2420828 - RNA, 19 nt, Artificial Sequence
  Description of Artificial Sequence: Synthetic oligonucleotide
  Sense strand starting at position 3186 of SEQ ID NO: 1886689
ggguccaaguuaugcucua

SEQ ID NO: 2420829 - RNA, 19 nt, Artificial Sequence
  Description of Artificial Sequence: Synthetic oligonucleotide
  Antisense strand to SEQ ID NO: 2420828
uagagcauaacuuggaccc

SEQ ID NO: 2420830 - RNA, 19 nt, Artificial Sequence
  Description of Artificial Sequence: Synthetic oligonucleotide
  Sense strand starting at position 3305 of SEQ ID NO: 1886689
gucagcuaagcaugguaga

SEQ ID NO: 2420831 - RNA, 19 nt, Artificial Sequence
  Description of Artificial Sequence: Synthetic oligonucleotide
  Antisense strand to SEQ ID NO: 2420830
ucuaccaugcuuagcugac

SEQ ID NO: 2420832 - RNA, 19 nt, Artificial Sequence
  Description of Artificial Sequence: Synthetic oligonucleotide
  Sense strand starting at position 3306 of SEQ ID NO: 1886689
ucagcuaagcaugguagau

SEQ ID NO: 2420833 - RNA, 19 nt, Artificial Sequence
  Description of Artificial Sequence: Synthetic oligonucleotide
  Antisense strand to SEQ ID NO: 2420832
aucuaccaugcuuagcuga

SEQ ID NO: 2420834 - RNA, 19 nt, Artificial Sequence
  Description of Artificial Sequence: Synthetic oligonucleotide
  Sense strand starting at position 3881 of SEQ ID NO: 1886689
acuggauguugccugaaac

SEQ ID NO: 2420835 - RNA, 19 nt, Artificial Sequence
  Description of Artificial Sequence: Synthetic oligonucleotide
  Antisense strand to SEQ ID NO: 2420834
guuucaggcaacauccagu

SEQ ID NO: 2420836 - RNA, 19 nt, Artificial Sequence
  Description of Artificial Sequence: Synthetic oligonucleotide
  Sense strand starting at position 3904 of SEQ ID NO: 1886689
uccagacuugaguauguau

SEQ ID NO: 2420837 - RNA, 19 nt, Artificial Sequence
  Description of Artificial Sequence: Synthetic oligonucleotide
  Antisense strand to SEQ ID NO: 2420836
auacauacucaagucugga

SEQ ID NO: 2420838 - RNA, 19 nt, Artificial Sequence
  Description of Artificial Sequence: Synthetic oligonucleotide
  Sense strand starting at position 32 of SEQ ID NO: 1886690
ucagguggucccuacuuaa

SEQ ID NO: 2420839 - RNA, 19 nt, Artificial Sequence
  Description of Artificial Sequence: Synthetic oligonucleotide
  Antisense strand to SEQ ID NO: 2420838
uuaaguagggaccaccuga

SEQ ID NO: 2420840 - RNA, 19 nt, Artificial Sequence
  Description of Artificial Sequence: Synthetic oligonucleotide
  Sense strand starting at position 53 of SEQ ID NO: 1886690
gugcuuucuccagcuguua

SEQ ID NO: 2420841 - RNA, 19 nt, Artificial Sequence
  Description of Artificial Sequence: Synthetic oligonucleotide
  Antisense strand to SEQ ID NO: 2420840
uaacagcuggagaaagcac

SEQ ID NO: 2420842 - RNA, 19 nt, Artificial Sequence
  Description of Artificial Sequence: Synthetic oligonucleotide
  Sense strand starting at position 111 of SEQ ID NO: 1886690
gcccuaguuuaacucugaa

SEQ ID NO: 2420843 - RNA, 19 nt, Artificial Sequence
  Description of Artificial Sequence: Synthetic oligonucleotide
  Antisense strand to SEQ ID NO: 2420842
uucagaguuaaacuagggc

SEQ ID NO: 2420844 - RNA, 19 nt, Artificial Sequence
  Description of Artificial Sequence: Synthetic oligonucleotide
  Sense strand starting at position 438 of SEQ ID NO: 1886690
gcaccuggcccagaauuau

SEQ ID NO: 2420845 - RNA, 19 nt, Artificial Sequence
  Description of Artificial Sequence: Synthetic oligonucleotide
  Antisense strand to SEQ ID NO: 2420844
auaauucugggccaggugc

SEQ ID NO: 2420846 - RNA, 19 nt, Artificial Sequence
  Description of Artificial Sequence: Synthetic oligonucleotide
  Sense strand starting at position 444 of SEQ ID NO: 1886690
ggcccagaauuaucuuaac

SEQ ID NO: 2420847 - RNA, 19 nt, Artificial Sequence
  Description of Artificial Sequence: Synthetic oligonucleotide
  Antisense strand to SEQ ID NO: 2420846
guuaagauaauucugggcc

SEQ ID NO: 2420848 - RNA, 19 nt, Artificial Sequence
  Description of Artificial Sequence: Synthetic oligonucleotide
  Sense strand starting at position 838 of SEQ ID NO: 1886690
uuggcugccuuguuaauca

SEQ ID NO: 2420849 - RNA, 19 nt, Artificial Sequence
  Description of Artificial Sequence: Synthetic oligonucleotide
  Antisense strand to SEQ ID NO: 2420848
ugauuaacaaggcagccaa

SEQ ID NO: 2420850 - RNA, 19 nt, Artificial Sequence
  Description of Artificial Sequence: Synthetic oligonucleotide
  Sense strand starting at position 972 of SEQ ID NO: 1886690
cccaaagguucucaaagua

SEQ ID NO: 2420851 - RNA, 19 nt, Artificial Sequence
  Description of Artificial Sequence: Synthetic oligonucleotide
  Antisense strand to SEQ ID NO: 2420850
uacuuugagaaccuuuggg

SEQ ID NO: 2420852 - RNA, 19 nt, Artificial Sequence
  Description of Artificial Sequence: Synthetic oligonucleotide
  Sense strand starting at position 986 of SEQ ID NO: 1886690
aaguauagcccugagacca

SEQ ID NO: 2420853 - RNA, 19 nt, Artificial Sequence
  Description of Artificial Sequence: Synthetic oligonucleotide
  Antisense strand to SEQ ID NO: 2420852
uggucucagggcuauacuu

SEQ ID NO: 2420854 - RNA, 19 nt, Artificial Sequence
  Description of Artificial Sequence: Synthetic oligonucleotide
  Sense strand starting at position 1105 of SEQ ID NO: 1886690
ccgugugaacgcuagguaa

SEQ ID NO: 2420855 - RNA, 19 nt, Artificial Sequence
  Description of Artificial Sequence: Synthetic oligonucleotide
  Antisense strand to SEQ ID NO: 2420854
uuaccuagcguucacacgg

SEQ ID NO: 2420856 - RNA, 19 nt, Artificial Sequence
  Description of Artificial Sequence: Synthetic oligonucleotide
  Sense strand starting at position 1107 of SEQ ID NO: 1886690
gugugaacgcuagguaagu

SEQ ID NO: 2420857 - RNA, 19 nt, Artificial Sequence
  Description of Artificial Sequence: Synthetic oligonucleotide
  Antisense strand to SEQ ID NO: 2420856
acuuaccuagcguucacac

SEQ ID NO: 2420858 - RNA, 19 nt, Artificial Sequence
  Description of Artificial Sequence: Synthetic oligonucleotide
  Sense strand starting at position 1108 of SEQ ID NO: 1886690
ugugaacgcuagguaaguu

SEQ ID NO: 2420859 - RNA, 19 nt, Artificial Sequence
  Description of Artificial Sequence: Synthetic oligonucleotide
  Antisense strand to SEQ ID NO: 2420858
aacuuaccuagcguucaca

SEQ ID NO: 2420860 - RNA, 19 nt, Artificial Sequence
  Description of Artificial Sequence: Synthetic oligonucleotide
  Sense strand starting at position 1243 of SEQ ID NO: 1886690
gggagugagggucaguauu

SEQ ID NO: 2420861 - RNA, 19 nt, Artificial Sequence
  Description of Artificial Sequence: Synthetic oligonucleotide
  Antisense strand to SEQ ID NO: 2420860
aauacugacccucacuccc

SEQ ID NO: 2420862 - RNA, 19 nt, Artificial Sequence
  Description of Artificial Sequence: Synthetic oligonucleotide
  Sense strand starting at position 1286 of SEQ ID NO: 1886690
auccauucguuccaccaga

SEQ ID NO: 2420863 - RNA, 19 nt, Artificial Sequence
  Description of Artificial Sequence: Synthetic oligonucleotide
  Antisense strand to SEQ ID NO: 2420862
ucugguggaacgaauggau

SEQ ID NO: 2420864 - RNA, 19 nt, Artificial Sequence
  Description of Artificial Sequence: Synthetic oligonucleotide
  Sense strand starting at position 1543 of SEQ ID NO: 1886690
ggauauccaucagcucauu

SEQ ID NO: 2420865 - RNA, 19 nt, Artificial Sequence
  Description of Artificial Sequence: Synthetic oligonucleotide
  Antisense strand to SEQ ID NO: 2420864
aaugagcugauggauaucc

SEQ ID NO: 2420866 - RNA, 19 nt, Artificial Sequence
  Description of Artificial Sequence: Synthetic oligonucleotide
  Sense strand starting at position 1549 of SEQ ID NO: 1886690
ccaucagcucauugaugca

SEQ ID NO: 2420867 - RNA, 19 nt, Artificial Sequence
  Description of Artificial Sequence: Synthetic oligonucleotide
  Antisense strand to SEQ ID NO: 2420866
ugcaucaaugagcugaugg

SEQ ID NO: 2420868 - RNA, 19 nt, Artificial Sequence
  Description of Artificial Sequence: Synthetic oligonucleotide
  Sense strand starting at position 1587 of SEQ ID NO: 1886690
aucucuggcugccaagauu

SEQ ID NO: 2420869 - RNA, 19 nt, Artificial Sequence
  Description of Artificial Sequence: Synthetic oligonucleotide
  Antisense strand to SEQ ID NO: 2420868
aaucuuggcagccagagau

SEQ ID NO: 2420870 - RNA, 19 nt, Artificial Sequence
  Description of Artificial Sequence: Synthetic oligonucleotide
  Sense strand starting at position 1619 of SEQ ID NO: 1886690
gagucagaggugugaaggu

SEQ ID NO: 2420871 - RNA, 19 nt, Artificial Sequence
  Description of Artificial Sequence: Synthetic oligonucleotide
  Antisense strand to SEQ ID NO: 2420870
accuucacaccucugacuc

SEQ ID NO: 2420872 - RNA, 19 nt, Artificial Sequence
  Description of Artificial Sequence: Synthetic oligonucleotide
  Sense strand starting at position 1751 of SEQ ID NO: 1886690
cagcgaugcccugagauga

SEQ ID NO: 2420873 - RNA, 19 nt, Artificial Sequence
  Description of Artificial Sequence: Synthetic oligonucleotide
  Antisense strand to SEQ ID NO: 2420872
ucaucucagggcaucgcug

SEQ ID NO: 2420874 - RNA, 19 nt, Artificial Sequence
  Description of Artificial Sequence: Synthetic oligonucleotide
  Sense strand starting at position 1830 of SEQ ID NO: 1886690
aggcgaugauauugaacuu

SEQ ID NO: 2420875 - RNA, 19 nt, Artificial Sequence
  Description of Artificial Sequence: Synthetic oligonucleotide
  Antisense strand to SEQ ID NO: 2420874
aaguucaauaucaucgccu

SEQ ID NO: 2420876 - RNA, 19 nt, Artificial Sequence
  Description of Artificial Sequence: Synthetic oligonucleotide
  Sense strand starting at position 1842 of SEQ ID NO: 1886690
ugaacuugaucuugacaau

SEQ ID NO: 2420877 - RNA, 19 nt, Artificial Sequence
  Description of Artificial Sequence: Synthetic oligonucleotide
  Antisense strand to SEQ ID NO: 2420876
auugucaagaucaaguuca

SEQ ID NO: 2420878 - RNA, 19 nt, Artificial Sequence
  Description of Artificial Sequence: Synthetic oligonucleotide
  Sense strand starting at position 1845 of SEQ ID NO: 1886690
acuugaucuugacaaugac

SEQ ID NO: 2420879 - RNA, 19 nt, Artificial Sequence
  Description of Artificial Sequence: Synthetic oligonucleotide
  Antisense strand to SEQ ID NO: 2420878
gucauugucaagaucaagu

SEQ ID NO: 2420880 - RNA, 19 nt, Artificial Sequence
  Description of Artificial Sequence: Synthetic oligonucleotide
  Sense strand starting at position 1949 of SEQ ID NO: 1886690
gggugaggcuuuggagaca

SEQ ID NO: 2420881 - RNA, 19 nt, Artificial Sequence
  Description of Artificial Sequence: Synthetic oligonucleotide
  Antisense strand to SEQ ID NO: 2420880
ugucuccaaagccucaccc

SEQ ID NO: 2420882 - RNA, 19 nt, Artificial Sequence
  Description of Artificial Sequence: Synthetic oligonucleotide
  Sense strand starting at position 2081 of SEQ ID NO: 1886690
ccuggaaugcugugaaaug

SEQ ID NO: 2420883 - RNA, 19 nt, Artificial Sequence
  Description of Artificial Sequence: Synthetic oligonucleotide
  Antisense strand to SEQ ID NO: 2420882
cauuucacagcauuccagg

SEQ ID NO: 2420884 - RNA, 19 nt, Artificial Sequence
  Description of Artificial Sequence: Synthetic oligonucleotide
  Sense strand starting at position 2486 of SEQ ID NO: 1886690
acauuaucucauuguauag

SEQ ID NO: 2420885 - RNA, 19 nt, Artificial Sequence
  Description of Artificial Sequence: Synthetic oligonucleotide
  Antisense strand to SEQ ID NO: 2420884
cuauacaaugagauaaugu

SEQ ID NO: 2420886 - RNA, 19 nt, Artificial Sequence
  Description of Artificial Sequence: Synthetic oligonucleotide
  Sense strand starting at position 2523 of SEQ ID NO: 1886690
aacguuaagugauugguuu

SEQ ID NO: 2420887 - RNA, 19 nt, Artificial Sequence
  Description of Artificial Sequence: Synthetic oligonucleotide
  Antisense strand to SEQ ID NO: 2420886
aaaccaaucacuuaacguu

SEQ ID NO: 2420888 - RNA, 19 nt, Artificial Sequence
  Description of Artificial Sequence: Synthetic oligonucleotide
  Sense strand starting at position 2688 of SEQ ID NO: 1886690
ccacgaaucuuaccgauca

SEQ ID NO: 2420889 - RNA, 19 nt, Artificial Sequence
  Description of Artificial Sequence: Synthetic oligonucleotide
  Antisense strand to SEQ ID NO: 2420888
ugaucgguaagauucgugg

SEQ ID NO: 2420890 - RNA, 19 nt, Artificial Sequence
  Description of Artificial Sequence: Synthetic oligonucleotide
  Sense strand starting at position 2690 of SEQ ID NO: 1886690
acgaaucuuaccgaucagu

SEQ ID NO: 2420891 - RNA, 19 nt, Artificial Sequence
  Description of Artificial Sequence: Synthetic oligonucleotide
  Antisense strand to SEQ ID NO: 2420890
acugaucgguaagauucgu

SEQ ID NO: 2420892 - RNA, 19 nt, Artificial Sequence
  Description of Artificial Sequence: Synthetic oligonucleotide
  Sense strand starting at position 2794 of SEQ ID NO: 1886690
uuuggcuucuccuguauca

SEQ ID NO: 2420893 - RNA, 19 nt, Artificial Sequence
  Description of Artificial Sequence: Synthetic oligonucleotide
  Antisense strand to SEQ ID NO: 2420892
ugauacaggagaagccaaa

SEQ ID NO: 2420894 - RNA, 19 nt, Artificial Sequence
  Description of Artificial Sequence: Synthetic oligonucleotide
  Sense strand starting at position 2796 of SEQ ID NO: 1886690
uggcuucuccuguaucagu

SEQ ID NO: 2420895 - RNA, 19 nt, Artificial Sequence
  Description of Artificial Sequence: Synthetic oligonucleotide
  Antisense strand to SEQ ID NO: 2420894
acugauacaggagaagcca

SEQ ID NO: 2420896 - RNA, 19 nt, Artificial Sequence
  Description of Artificial Sequence: Synthetic oligonucleotide
  Sense strand starting at position 2801 of SEQ ID NO: 1886690
ucuccuguaucaguacaua

SEQ ID NO: 2420897 - RNA, 19 nt, Artificial Sequence
  Description of Artificial Sequence: Synthetic oligonucleotide
  Antisense strand to SEQ ID NO: 2420896
uauguacugauacaggaga

SEQ ID NO: 2420898 - RNA, 19 nt, Artificial Sequence
  Description of Artificial Sequence: Synthetic oligonucleotide
  Sense strand starting at position 2841 of SEQ ID NO: 1886690
gggaaacuguccuugccuu

SEQ ID NO: 2420899 - RNA, 19 nt, Artificial Sequence
  Description of Artificial Sequence: Synthetic oligonucleotide
  Antisense strand to SEQ ID NO: 2420898
aaggcaaggacaguuuccc

SEQ ID NO: 2420900 - RNA, 19 nt, Artificial Sequence
  Description of Artificial Sequence: Synthetic oligonucleotide
  Sense strand starting at position 2842 of SEQ ID NO: 1886690
ggaaacuguccuugccuuu

SEQ ID NO: 2420901 - RNA, 19 nt, Artificial Sequence
  Description of Artificial Sequence: Synthetic oligonucleotide
  Antisense strand to SEQ ID NO: 2420900
aaaggcaaggacaguuucc

SEQ ID NO: 2420902 - RNA, 19 nt, Artificial Sequence
  Description of Artificial Sequence: Synthetic oligonucleotide
  Sense strand starting at position 3188 of SEQ ID NO: 1886690
ggguccaaguuaugcucua

SEQ ID NO: 2420903 - RNA, 19 nt, Artificial Sequence
  Description of Artificial Sequence: Synthetic oligonucleotide
  Antisense strand to SEQ ID NO: 2420902
uagagcauaacuuggaccc

SEQ ID NO: 2420904 - RNA, 19 nt, Artificial Sequence
  Description of Artificial Sequence: Synthetic oligonucleotide
  Sense strand starting at position 3307 of SEQ ID NO: 1886690
gucagcuaagcaugguaga

SEQ ID NO: 2420905 - RNA, 19 nt, Artificial Sequence
  Description of Artificial Sequence: Synthetic oligonucleotide
  Antisense strand to SEQ ID NO: 2420904
ucuaccaugcuuagcugac

SEQ ID NO: 2420906 - RNA, 19 nt, Artificial Sequence
  Description of Artificial Sequence: Synthetic oligonucleotide
  Sense strand starting at position 3308 of SEQ ID NO: 1886690
ucagcuaagcaugguagau

SEQ ID NO: 2420907 - RNA, 19 nt, Artificial Sequence
  Description of Artificial Sequence: Synthetic oligonucleotide
  Antisense strand to SEQ ID NO: 2420906
aucuaccaugcuuagcuga

SEQ ID NO: 2420908 - RNA, 19 nt, Artificial Sequence
  Description of Artificial Sequence: Synthetic oligonucleotide
  Sense strand starting at position 3883 of SEQ ID NO: 1886690
acuggauguugccugaaac

SEQ ID NO: 2420909 - RNA, 19 nt, Artificial Sequence
  Description of Artificial Sequence: Synthetic oligonucleotide
  Antisense strand to SEQ ID NO: 2420908
guuucaggcaacauccagu

SEQ ID NO: 2420910 - RNA, 19 nt, Artificial Sequence
  Description of Artificial Sequence: Synthetic oligonucleotide
  Sense strand starting at position 3906 of SEQ ID NO: 1886690
uccagacuugaguauguau

SEQ ID NO: 2420911 - RNA, 19 nt, Artificial Sequence
  Description of Artificial Sequence: Synthetic oligonucleotide
  Antisense strand to SEQ ID NO: 2420910
auacauacucaagucugga

SEQ ID NO: 2420912 - RNA, 19 nt, Artificial Sequence
  Description of Artificial Sequence: Synthetic oligonucleotide
  Sense strand starting at position 33 of SEQ ID NO: 1886691
ucagguggucccuacuuaa

SEQ ID NO: 2420913 - RNA, 19 nt, Artificial Sequence
  Description of Artificial Sequence: Synthetic oligonucleotide
  Antisense strand to SEQ ID NO: 2420912
uuaaguagggaccaccuga

SEQ ID NO: 2420914 - RNA, 19 nt, Artificial Sequence
  Description of Artificial Sequence: Synthetic oligonucleotide
  Sense strand starting at position 54 of SEQ ID NO: 1886691
gugcuuucuccagcuguua

SEQ ID NO: 2420915 - RNA, 19 nt, Artificial Sequence
  Description of Artificial Sequence: Synthetic oligonucleotide
  Antisense strand to SEQ ID NO: 2420914
uaacagcuggagaaagcac

SEQ ID NO: 2420916 - RNA, 19 nt, Artificial Sequence
  Description of Artificial Sequence: Synthetic oligonucleotide
  Sense strand starting at position 112 of SEQ ID NO: 1886691
gcccuaguuuaacucugaa

SEQ ID NO: 2420917 - RNA, 19 nt, Artificial Sequence
  Description of Artificial Sequence: Synthetic oligonucleotide
  Antisense strand to SEQ ID NO: 2420916
uucagaguuaaacuagggc

SEQ ID NO: 2420918 - RNA, 19 nt, Artificial Sequence
  Description of Artificial Sequence: Synthetic oligonucleotide
  Sense strand starting at position 439 of SEQ ID NO: 1886691
gcaccuggcccagaauuau

SEQ ID NO: 2420919 - RNA, 19 nt, Artificial Sequence
  Description of Artificial Sequence: Synthetic oligonucleotide
  Antisense strand to SEQ ID NO: 2420918
auaauucugggccaggugc

SEQ ID NO: 2420920 - RNA, 19 nt, Artificial Sequence
  Description of Artificial Sequence: Synthetic oligonucleotide
  Sense strand starting at position 445 of SEQ ID NO: 1886691
ggcccagaauuaucuuaac

SEQ ID NO: 2420921 - RNA, 19 nt, Artificial Sequence
  Description of Artificial Sequence: Synthetic oligonucleotide
  Antisense strand to SEQ ID NO: 2420920
guuaagauaauucugggcc

SEQ ID NO: 2420922 - RNA, 19 nt, Artificial Sequence
  Description of Artificial Sequence: Synthetic oligonucleotide
  Sense strand starting at position 839 of SEQ ID NO: 1886691
uuggcugccuuguuaauca

SEQ ID NO: 2420923 - RNA, 19 nt, Artificial Sequence
  Description of Artificial Sequence: Synthetic oligonucleotide
  Antisense strand to SEQ ID NO: 2420922
ugauuaacaaggcagccaa

SEQ ID NO: 2420924 - RNA, 19 nt, Artificial Sequence
  Description of Artificial Sequence: Synthetic oligonucleotide
  Sense strand starting at position 973 of SEQ ID NO: 1886691
cccaaagguucucaaagua

SEQ ID NO: 2420925 - RNA, 19 nt, Artificial Sequence
  Description of Artificial Sequence: Synthetic oligonucleotide
  Antisense strand to SEQ ID NO: 2420924
uacuuugagaaccuuuggg

SEQ ID NO: 2420926 - RNA, 19 nt, Artificial Sequence
  Description of Artificial Sequence: Synthetic oligonucleotide
  Sense strand starting at position 987 of SEQ ID NO: 1886691
aaguauagcccugagacca

SEQ ID NO: 2420927 - RNA, 19 nt, Artificial Sequence
  Description of Artificial Sequence: Synthetic oligonucleotide
  Antisense strand to SEQ ID NO: 2420926
uggucucagggcuauacuu

SEQ ID NO: 2420928 - RNA, 19 nt, Artificial Sequence
  Description of Artificial Sequence: Synthetic oligonucleotide
  Sense strand starting at position 1106 of SEQ ID NO: 1886691
ccgugugaacgcuagguaa

SEQ ID NO: 2420929 - RNA, 19 nt, Artificial Sequence
  Description of Artificial Sequence: Synthetic oligonucleotide
  Antisense strand to SEQ ID NO: 2420928
uuaccuagcguucacacgg

SEQ ID NO: 2420930 - RNA, 19 nt, Artificial Sequence
  Description of Artificial Sequence: Synthetic oligonucleotide
  Sense strand starting at position 1108 of SEQ ID NO: 1886691
gugugaacgcuagguaagu

SEQ ID NO: 2420931 - RNA, 19 nt, Artificial Sequence
  Description of Artificial Sequence: Synthetic oligonucleotide
  Antisense strand to SEQ ID NO: 2420930
acuuaccuagcguucacac

SEQ ID NO: 2420932 - RNA, 19 nt, Artificial Sequence
  Description of Artificial Sequence: Synthetic oligonucleotide
  Sense strand starting at position 1109 of SEQ ID NO: 1886691
ugugaacgcuagguaaguu

SEQ ID NO: 2420933 - RNA, 19 nt, Artificial Sequence
  Description of Artificial Sequence: Synthetic oligonucleotide
  Antisense strand to SEQ ID NO: 2420932
aacuuaccuagcguucaca

SEQ ID NO: 2420934 - RNA, 19 nt, Artificial Sequence
  Description of Artificial Sequence: Synthetic oligonucleotide
  Sense strand starting at position 1588 of SEQ ID NO: 1886691
aucucuggcugccaagauu

SEQ ID NO: 2420935 - RNA, 19 nt, Artificial Sequence
  Description of Artificial Sequence: Synthetic oligonucleotide
  Antisense strand to SEQ ID NO: 2420934
aaucuuggcagccagagau

SEQ ID NO: 2420936 - RNA, 19 nt, Artificial Sequence
  Description of Artificial Sequence: Synthetic oligonucleotide
  Sense strand starting at position 1620 of SEQ ID NO: 1886691
gagucagaggugugaaggu

SEQ ID NO: 2420937 - RNA, 19 nt, Artificial Sequence
  Description of Artificial Sequence: Synthetic oligonucleotide
  Antisense strand to SEQ ID NO: 2420936
accuucacaccucugacuc

SEQ ID NO: 2420938 - RNA, 19 nt, Artificial Sequence
  Description of Artificial Sequence: Synthetic oligonucleotide
  Sense strand starting at position 1752 of SEQ ID NO: 1886691
cagcgaugcccugagauga

SEQ ID NO: 2420939 - RNA, 19 nt, Artificial Sequence
  Description of Artificial Sequence: Synthetic oligonucleotide
  Antisense strand to SEQ ID NO: 2420938
ucaucucagggcaucgcug

SEQ ID NO: 2420940 - RNA, 19 nt, Artificial Sequence
  Description of Artificial Sequence: Synthetic oligonucleotide
  Sense strand starting at position 2082 of SEQ ID NO: 1886691
ccuggaaugcugugaaaug

SEQ ID NO: 2420941 - RNA, 19 nt, Artificial Sequence
  Description of Artificial Sequence: Synthetic oligonucleotide
  Antisense strand to SEQ ID NO: 2420940
cauuucacagcauuccagg

SEQ ID NO: 2420942 - RNA, 19 nt, Artificial Sequence
  Description of Artificial Sequence: Synthetic oligonucleotide
  Sense strand starting at position 2524 of SEQ ID NO: 1886691
aacguuaagugauugguuu

SEQ ID NO: 2420943 - RNA, 19 nt, Artificial Sequence
  Description of Artificial Sequence: Synthetic oligonucleotide
  Antisense strand to SEQ ID NO: 2420942
aaaccaaucacuuaacguu

SEQ ID NO: 2420944 - RNA, 19 nt, Artificial Sequence
  Description of Artificial Sequence: Synthetic oligonucleotide
  Sense strand starting at position 2689 of SEQ ID NO: 1886691
ccacgaaucuuaccgauca

SEQ ID NO: 2420945 - RNA, 19 nt, Artificial Sequence
  Description of Artificial Sequence: Synthetic oligonucleotide
  Antisense strand to SEQ ID NO: 2420944
ugaucgguaagauucgugg

SEQ ID NO: 2420946 - RNA, 19 nt, Artificial Sequence
  Description of Artificial Sequence: Synthetic oligonucleotide
  Sense strand starting at position 2691 of SEQ ID NO: 1886691
acgaaucuuaccgaucagu

SEQ ID NO: 2420947 - RNA, 19 nt, Artificial Sequence
  Description of Artificial Sequence: Synthetic oligonucleotide
  Antisense strand to SEQ ID NO: 2420946
acugaucgguaagauucgu

SEQ ID NO: 2420948 - RNA, 19 nt, Artificial Sequence
  Description of Artificial Sequence: Synthetic oligonucleotide
  Sense strand starting at position 2795 of SEQ ID NO: 1886691
uuuggcuucuccuguauca

SEQ ID NO: 2420949 - RNA, 19 nt, Artificial Sequence
  Description of Artificial Sequence: Synthetic oligonucleotide
  Antisense strand to SEQ ID NO: 2420948
ugauacaggagaagccaaa

SEQ ID NO: 2420950 - RNA, 19 nt, Artificial Sequence
  Description of Artificial Sequence: Synthetic oligonucleotide
  Sense strand starting at position 2802 of SEQ ID NO: 1886691
ucuccuguaucagcacaua

SEQ ID NO: 2420951 - RNA, 19 nt, Artificial Sequence
  Description of Artificial Sequence: Synthetic oligonucleotide
  Antisense strand to SEQ ID NO: 2420950
uaugugcugauacaggaga

SEQ ID NO: 2420952 - RNA, 19 nt, Artificial Sequence
  Description of Artificial Sequence: Synthetic oligonucleotide
  Sense strand starting at position 2842 of SEQ ID NO: 1886691
gggaaacuguccuugccuu

SEQ ID NO: 2420953 - RNA, 19 nt, Artificial Sequence
  Description of Artificial Sequence: Synthetic oligonucleotide
  Antisense strand to SEQ ID NO: 2420952
aaggcaaggacaguuuccc

SEQ ID NO: 2420954 - RNA, 19 nt, Artificial Sequence
  Description of Artificial Sequence: Synthetic oligonucleotide
  Sense strand starting at position 2843 of SEQ ID NO: 1886691
ggaaacuguccuugccuuu

SEQ ID NO: 2420955 - RNA, 19 nt, Artificial Sequence
  Description of Artificial Sequence: Synthetic oligonucleotide
  Antisense strand to SEQ ID NO: 2420954
aaaggcaaggacaguuucc

SEQ ID NO: 2420956 - RNA, 19 nt, Artificial Sequence
  Description of Artificial Sequence: Synthetic oligonucleotide
  Sense strand starting at position 3186 of SEQ ID NO: 1886691
ggguccaaguuaugcucua

SEQ ID NO: 2420957 - RNA, 19 nt, Artificial Sequence
  Description of Artificial Sequence: Synthetic oligonucleotide
  Antisense strand to SEQ ID NO: 2420956
uagagcauaacuuggaccc

SEQ ID NO: 2420958 - RNA, 19 nt, Artificial Sequence
  Description of Artificial Sequence: Synthetic oligonucleotide
  Sense strand starting at position 3305 of SEQ ID NO: 1886691
gucagcuaagcaugguaga

SEQ ID NO: 2420959 - RNA, 19 nt, Artificial Sequence
  Description of Artificial Sequence: Synthetic oligonucleotide
  Antisense strand to SEQ ID NO: 2420958
ucuaccaugcuuagcugac

SEQ ID NO: 2420960 - RNA, 19 nt, Artificial Sequence
  Description of Artificial Sequence: Synthetic oligonucleotide
  Sense strand starting at position 3306 of SEQ ID NO: 1886691
ucagcuaagcaugguagau

SEQ ID NO: 2420961 - RNA, 19 nt, Artificial Sequence
  Description of Artificial Sequence: Synthetic oligonucleotide
  Antisense strand to SEQ ID NO: 2420960
aucuaccaugcuuagcuga

SEQ ID NO: 2420962 - RNA, 19 nt, Artificial Sequence
  Description of Artificial Sequence: Synthetic oligonucleotide
  Sense strand starting at position 3881 of SEQ ID NO: 1886691
acuggauguugccugaaac

SEQ ID NO: 2420963 - RNA, 19 nt, Artificial Sequence
  Description of Artificial Sequence: Synthetic oligonucleotide
  Antisense strand to SEQ ID NO: 2420962
guuucaggcaacauccagu

SEQ ID NO: 2420964 - RNA, 19 nt, Artificial Sequence
  Description of Artificial Sequence: Synthetic oligonucleotide
  Sense strand starting at position 3904 of SEQ ID NO: 1886691
uccagacuugaguauguau

SEQ ID NO: 2420965 - RNA, 19 nt, Artificial Sequence
  Description of Artificial Sequence: Synthetic oligonucleotide
  Antisense strand to SEQ ID NO: 2420964
auacauacucaagucugga

SEQ ID NO: 2420966 - RNA, 19 nt, Artificial Sequence
  Description of Artificial Sequence: Synthetic oligonucleotide
  Sense strand starting at position 165 of SEQ ID NO: 1886692
ucugcagucuaggucagau

SEQ ID NO: 2420967 - RNA, 19 nt, Artificial Sequence
  Description of Artificial Sequence: Synthetic oligonucleotide
  Antisense strand to SEQ ID NO: 2420966
aucugaccuagacugcaga

SEQ ID NO: 2420968 - RNA, 19 nt, Artificial Sequence
  Description of Artificial Sequence: Synthetic oligonucleotide
  Sense strand starting at position 183 of SEQ ID NO: 1886692
uggugacaagucugggaau

SEQ ID NO: 2420969 - RNA, 19 nt, Artificial Sequence
  Description of Artificial Sequence: Synthetic oligonucleotide
  Antisense strand to SEQ ID NO: 2420968
auucccagacuugucacca

SEQ ID NO: 2420970 - RNA, 19 nt, Artificial Sequence
  Description of Artificial Sequence: Synthetic oligonucleotide
  Sense strand starting at position 194 of SEQ ID NO: 1886692
cugggaauggguuguauca

SEQ ID NO: 2420971 - RNA, 19 nt, Artificial Sequence
  Description of Artificial Sequence: Synthetic oligonucleotide
  Antisense strand to SEQ ID NO: 2420970
ugauacaacccauucccag

SEQ ID NO: 2420972 - RNA, 19 nt, Artificial Sequence
  Description of Artificial Sequence: Synthetic oligonucleotide
  Sense strand starting at position 204 of SEQ ID NO: 1886692
guuguaucaccagagcuga

SEQ ID NO: 2420973 - RNA, 19 nt, Artificial Sequence
  Description of Artificial Sequence: Synthetic oligonucleotide
  Antisense strand to SEQ ID NO: 2420972
ucagcucuggugauacaac

SEQ ID NO: 2420974 - RNA, 19 nt, Artificial Sequence
  Description of Artificial Sequence: Synthetic oligonucleotide
  Sense strand starting at position 218 of SEQ ID NO: 1886692
gcugaaggaucccuccuau

SEQ ID NO: 2420975 - RNA, 19 nt, Artificial Sequence
  Description of Artificial Sequence: Synthetic oligonucleotide
  Antisense strand to SEQ ID NO: 2420974
auaggagggauccuucagc

SEQ ID NO: 2420976 - RNA, 19 nt, Artificial Sequence
  Description of Artificial Sequence: Synthetic oligonucleotide
  Sense strand starting at position 280 of SEQ ID NO: 1886692
gggaccuucuugccagaga

SEQ ID NO: 2420977 - RNA, 19 nt, Artificial Sequence
  Description of Artificial Sequence: Synthetic oligonucleotide
  Antisense strand to SEQ ID NO: 2420976
ucucuggcaagaagguccc

SEQ ID NO: 2420978 - RNA, 19 nt, Artificial Sequence
  Description of Artificial Sequence: Synthetic oligonucleotide
  Sense strand starting at position 308 of SEQ ID NO: 1886692
ugaugaggcacuugugguu

SEQ ID NO: 2420979 - RNA, 19 nt, Artificial Sequence
  Description of Artificial Sequence: Synthetic oligonucleotide
  Antisense strand to SEQ ID NO: 2420978
aaccacaagugccucauca

SEQ ID NO: 2420980 - RNA, 19 nt, Artificial Sequence
  Description of Artificial Sequence: Synthetic oligonucleotide
  Sense strand starting at position 389 of SEQ ID NO: 1886692
aaaugauacccugacguuu

SEQ ID NO: 2420981 - RNA, 19 nt, Artificial Sequence
  Description of Artificial Sequence: Synthetic oligonucleotide
  Antisense strand to SEQ ID NO: 2420980
aaacgucaggguaucauuu

SEQ ID NO: 2420982 - RNA, 19 nt, Artificial Sequence
  Description of Artificial Sequence: Synthetic oligonucleotide
  Sense strand starting at position 415 of SEQ ID NO: 1886692
acgucaucaucugucuaca

SEQ ID NO: 2420983 - RNA, 19 nt, Artificial Sequence
  Description of Artificial Sequence: Synthetic oligonucleotide
  Antisense strand to SEQ ID NO: 2420982
uguagacagaugaugacgu

SEQ ID NO: 2420984 - RNA, 19 nt, Artificial Sequence
  Description of Artificial Sequence: Synthetic oligonucleotide
  Sense strand starting at position 417 of SEQ ID NO: 1886692
gucaucaucugucuacauc

SEQ ID NO: 2420985 - RNA, 19 nt, Artificial Sequence
  Description of Artificial Sequence: Synthetic oligonucleotide
  Antisense strand to SEQ ID NO: 2420984
gauguagacagaugaugac

SEQ ID NO: 2420986 - RNA, 19 nt, Artificial Sequence
  Description of Artificial Sequence: Synthetic oligonucleotide
  Sense strand starting at position 443 of SEQ ID NO: 1886692
aaacuaugaucaguugugu

SEQ ID NO: 2420987 - RNA, 19 nt, Artificial Sequence
  Description of Artificial Sequence: Synthetic oligonucleotide
  Antisense strand to SEQ ID NO: 2420986
acacaacugaucauaguuu

SEQ ID NO: 2420988 - RNA, 19 nt, Artificial Sequence
  Description of Artificial Sequence: Synthetic oligonucleotide
  Sense strand starting at position 483 of SEQ ID NO: 1886692
uuuccaccacugugagauu

SEQ ID NO: 2420989 - RNA, 19 nt, Artificial Sequence
  Description of Artificial Sequence: Synthetic oligonucleotide
  Antisense strand to SEQ ID NO: 2420988
aaucucacagugguggaaa

SEQ ID NO: 2420990 - RNA, 19 nt, Artificial Sequence
  Description of Artificial Sequence: Synthetic oligonucleotide
  Sense strand starting at position 519 of SEQ ID NO: 1886692
cauacauccuaugugagga

SEQ ID NO: 2420991 - RNA, 19 nt, Artificial Sequence
  Description of Artificial Sequence: Synthetic oligonucleotide
  Antisense strand to SEQ ID NO: 2420990
uccucacauaggauguaug

SEQ ID NO: 2420992 - RNA, 19 nt, Artificial Sequence
  Description of Artificial Sequence: Synthetic oligonucleotide
  Sense strand starting at position 543 of SEQ ID NO: 1886692
gggagacugcuuugaaagg

SEQ ID NO: 2420993 - RNA, 19 nt, Artificial Sequence
  Description of Artificial Sequence: Synthetic oligonucleotide
  Antisense strand to SEQ ID NO: 2420992
ccuuucaaagcagucuccc

SEQ ID NO: 2420994 - RNA, 19 nt, Artificial Sequence
  Description of Artificial Sequence: Synthetic oligonucleotide
  Sense strand starting at position 577 of SEQ ID NO: 1886692
ucuuaauaguuucugagca

SEQ ID NO: 2420995 - RNA, 19 nt, Artificial Sequence
  Description of Artificial Sequence: Synthetic oligonucleotide
  Antisense strand to SEQ ID NO: 2420994
ugcucagaaacuauuaaga

SEQ ID NO: 2420996 - RNA, 19 nt, Artificial Sequence
  Description of Artificial Sequence: Synthetic oligonucleotide
  Sense strand starting at position 581 of SEQ ID NO: 1886692
aauaguuucugagcaaggu

SEQ ID NO: 2420997 - RNA, 19 nt, Artificial Sequence
  Description of Artificial Sequence: Synthetic oligonucleotide
  Antisense strand to SEQ ID NO: 2420996
accuugcucagaaacuauu

SEQ ID NO: 2420998 - RNA, 19 nt, Artificial Sequence
  Description of Artificial Sequence: Synthetic oligonucleotide
  Sense strand starting at position 679 of SEQ ID NO: 1886692
acgaacauuucggcuguca

SEQ ID NO: 2420999 - RNA, 19 nt, Artificial Sequence
  Description of Artificial Sequence: Synthetic oligonucleotide
  Antisense strand to SEQ ID NO: 2420998
ugacagccgaaauguucgu

SEQ ID NO: 2421000 - RNA, 19 nt, Artificial Sequence
  Description of Artificial Sequence: Synthetic oligonucleotide
  Sense strand starting at position 681 of SEQ ID NO: 1886692
gaacauuucggcugucaug

SEQ ID NO: 2421001 - RNA, 19 nt, Artificial Sequence
  Description of Artificial Sequence: Synthetic oligonucleotide
  Antisense strand to SEQ ID NO: 2421000
caugacagccgaaauguuc

SEQ ID NO: 2421002 - RNA, 19 nt, Artificial Sequence
  Description of Artificial Sequence: Synthetic oligonucleotide
  Sense strand starting at position 765 of SEQ ID NO: 1886692
gccgaaagaucccuucugu

SEQ ID NO: 2421003 - RNA, 19 nt, Artificial Sequence
  Description of Artificial Sequence: Synthetic oligonucleotide
  Antisense strand to SEQ ID NO: 2421002
acagaagggaucuuucggc

SEQ ID NO: 2421004 - RNA, 19 nt, Artificial Sequence
  Description of Artificial Sequence: Synthetic oligonucleotide
  Sense strand starting at position 782 of SEQ ID NO: 1886692
gucugauucccaggugguu

SEQ ID NO: 2421005 - RNA, 19 nt, Artificial Sequence
  Description of Artificial Sequence: Synthetic oligonucleotide
  Antisense strand to SEQ ID NO: 2421004
aaccaccugggaaucagac

SEQ ID NO: 2421006 - RNA, 19 nt, Artificial Sequence
  Description of Artificial Sequence: Synthetic oligonucleotide
  Sense strand starting at position 827 of SEQ ID NO: 1886692
aguuacuuaccuuggcgaa

SEQ ID NO: 2421007 - RNA, 19 nt, Artificial Sequence
  Description of Artificial Sequence: Synthetic oligonucleotide
  Antisense strand to SEQ ID NO: 2421006
uucgccaagguaaguaacu

SEQ ID NO: 2421008 - RNA, 19 nt, Artificial Sequence
  Description of Artificial Sequence: Synthetic oligonucleotide
  Sense strand starting at position 829 of SEQ ID NO: 1886692
uuacuuaccuuggcgaaga

SEQ ID NO: 2421009 - RNA, 19 nt, Artificial Sequence
  Description of Artificial Sequence: Synthetic oligonucleotide
  Antisense strand to SEQ ID NO: 2421008
ucuucgccaagguaaguaa

SEQ ID NO: 2421010 - RNA, 19 nt, Artificial Sequence
  Description of Artificial Sequence: Synthetic oligonucleotide
  Sense strand starting at position 1204 of SEQ ID NO: 1886692
ggccaaucauguucuucuu

SEQ ID NO: 2421011 - RNA, 19 nt, Artificial Sequence
  Description of Artificial Sequence: Synthetic oligonucleotide
  Antisense strand to SEQ ID NO: 2421010
aagaagaacaugauuggcc

SEQ ID NO: 2421012 - RNA, 19 nt, Artificial Sequence
  Description of Artificial Sequence: Synthetic oligonucleotide
  Sense strand starting at position 1248 of SEQ ID NO: 1886692
cccugagaccuuugcugca

SEQ ID NO: 2421013 - RNA, 19 nt, Artificial Sequence
  Description of Artificial Sequence: Synthetic oligonucleotide
  Antisense strand to SEQ ID NO: 2421012
ugcagcaaaggucucaggg

SEQ ID NO: 2421014 - RNA, 19 nt, Artificial Sequence
  Description of Artificial Sequence: Synthetic oligonucleotide
  Sense strand starting at position 1250 of SEQ ID NO: 1886692
cugagaccuuugcugcaua

SEQ ID NO: 2421015 - RNA, 19 nt, Artificial Sequence
  Description of Artificial Sequence: Synthetic oligonucleotide
  Antisense strand to SEQ ID NO: 2421014
uaugcagcaaaggucucag

SEQ ID NO: 2421016 - RNA, 19 nt, Artificial Sequence
  Description of Artificial Sequence: Synthetic oligonucleotide
  Sense strand starting at position 1508 of SEQ ID NO: 1886692
aguggaauuugguaggaaa

SEQ ID NO: 2421017 - RNA, 19 nt, Artificial Sequence
  Description of Artificial Sequence: Synthetic oligonucleotide
  Antisense strand to SEQ ID NO: 2421016
uuuccuaccaaauuccacu

SEQ ID NO: 2421018 - RNA, 19 nt, Artificial Sequence
  Description of Artificial Sequence: Synthetic oligonucleotide
  Sense strand starting at position 1562 of SEQ ID NO: 1886692
gucacugaugccugggaca

SEQ ID NO: 2421019 - RNA, 19 nt, Artificial Sequence
  Description of Artificial Sequence: Synthetic oligonucleotide
  Antisense strand to SEQ ID NO: 2421018
ugucccaggcaucagugac

SEQ ID NO: 2421020 - RNA, 19 nt, Artificial Sequence
  Description of Artificial Sequence: Synthetic oligonucleotide
  Sense strand starting at position 1647 of SEQ ID NO: 1886692
uaagaaucgccagggcuau

SEQ ID NO: 2421021 - RNA, 19 nt, Artificial Sequence
  Description of Artificial Sequence: Synthetic oligonucleotide
  Antisense strand to SEQ ID NO: 2421020
auagcccuggcgauucuua

SEQ ID NO: 2421022 - RNA, 19 nt, Artificial Sequence
  Description of Artificial Sequence: Synthetic oligonucleotide
  Sense strand starting at position 1657 of SEQ ID NO: 1886692
cagggcuauguuuauggga

SEQ ID NO: 2421023 - RNA, 19 nt, Artificial Sequence
  Description of Artificial Sequence: Synthetic oligonucleotide
  Antisense strand to SEQ ID NO: 2421022
ucccauaaacauagcccug

SEQ ID NO: 2421024 - RNA, 19 nt, Artificial Sequence
  Description of Artificial Sequence: Synthetic oligonucleotide
  Sense strand starting at position 1892 of SEQ ID NO: 1886692
ggucacuucccauaucauc

SEQ ID NO: 2421025 - RNA, 19 nt, Artificial Sequence
  Description of Artificial Sequence: Synthetic oligonucleotide
  Antisense strand to SEQ ID NO: 2421024
gaugauaugggaagugacc

SEQ ID NO: 2421026 - RNA, 19 nt, Artificial Sequence
  Description of Artificial Sequence: Synthetic oligonucleotide
  Sense strand starting at position 1901 of SEQ ID NO: 1886692
ccauaucaucgaggucacu

SEQ ID NO: 2421027 - RNA, 19 nt, Artificial Sequence
  Description of Artificial Sequence: Synthetic oligonucleotide
  Antisense strand to SEQ ID NO: 2421026
agugaccucgaugauaugg

SEQ ID NO: 2421028 - RNA, 19 nt, Artificial Sequence
  Description of Artificial Sequence: Synthetic oligonucleotide
  Sense strand starting at position 2074 of SEQ ID NO: 1886692
agaagcauucuguggcuuu

SEQ ID NO: 2421029 - RNA, 19 nt, Artificial Sequence
  Description of Artificial Sequence: Synthetic oligonucleotide
  Antisense strand to SEQ ID NO: 2421028
aaagccacagaaugcuucu

SEQ ID NO: 2421030 - RNA, 19 nt, Artificial Sequence
  Description of Artificial Sequence: Synthetic oligonucleotide
  Sense strand starting at position 2390 of SEQ ID NO: 1886692
gucuucuucggacacaaug

SEQ ID NO: 2421031 - RNA, 19 nt, Artificial Sequence
  Description of Artificial Sequence: Synthetic oligonucleotide
  Antisense strand to SEQ ID NO: 2421030
cauuguguccgaagaagac

SEQ ID NO: 2421032 - RNA, 19 nt, Artificial Sequence
  Description of Artificial Sequence: Synthetic oligonucleotide
  Sense strand starting at position 2520 of SEQ ID NO: 1886692
gugggagacuccuuccaac

SEQ ID NO: 2421033 - RNA, 19 nt, Artificial Sequence
  Description of Artificial Sequence: Synthetic oligonucleotide
  Antisense strand to SEQ ID NO: 2421032
guuggaaggagucucccac

SEQ ID NO: 2421034 - RNA, 19 nt, Artificial Sequence
  Description of Artificial Sequence: Synthetic oligonucleotide
  Sense strand starting at position 2633 of SEQ ID NO: 1886692
gggaguuaacguggguaag

SEQ ID NO: 2421035 - RNA, 19 nt, Artificial Sequence
  Description of Artificial Sequence: Synthetic oligonucleotide
  Antisense strand to SEQ ID NO: 2421034
cuuacccacguuaacuccc

SEQ ID NO: 2421036 - RNA, 19 nt, Artificial Sequence
  Description of Artificial Sequence: Synthetic oligonucleotide
  Sense strand starting at position 2660 of SEQ ID NO: 1886692
gaccuugcacuguaguuau

SEQ ID NO: 2421037 - RNA, 19 nt, Artificial Sequence
  Description of Artificial Sequence: Synthetic oligonucleotide
  Antisense strand to SEQ ID NO: 2421036
auaacuacagugcaagguc

SEQ ID NO: 2421038 - RNA, 19 nt, Artificial Sequence
  Description of Artificial Sequence: Synthetic oligonucleotide
  Sense strand starting at position 3410 of SEQ ID NO: 1886692
cuaauuauaccuuggcugu

SEQ ID NO: 2421039 - RNA, 19 nt, Artificial Sequence
  Description of Artificial Sequence: Synthetic oligonucleotide
  Antisense strand to SEQ ID NO: 2421038
acagccaagguauaauuag

SEQ ID NO: 2421040 - RNA, 19 nt, Artificial Sequence
  Description of Artificial Sequence: Synthetic oligonucleotide
  Sense strand starting at position 3564 of SEQ ID NO: 1886692
caaggauagcacugaguuc

SEQ ID NO: 2421041 - RNA, 19 nt, Artificial Sequence
  Description of Artificial Sequence: Synthetic oligonucleotide
  Antisense strand to SEQ ID NO: 2421040
gaacucagugcuauccuug

SEQ ID NO: 2421042 - RNA, 19 nt, Artificial Sequence
  Description of Artificial Sequence: Synthetic oligonucleotide
  Sense strand starting at position 3609 of SEQ ID NO: 1886692
acgacuguggcuugaggau

SEQ ID NO: 2421043 - RNA, 19 nt, Artificial Sequence
  Description of Artificial Sequence: Synthetic oligonucleotide
  Antisense strand to SEQ ID NO: 2421042
auccucaagccacagucgu

SEQ ID NO: 2421044 - RNA, 19 nt, Artificial Sequence
  Description of Artificial Sequence: Synthetic oligonucleotide
  Sense strand starting at position 3719 of SEQ ID NO: 1886692
ugaugugucgcguuuccca

SEQ ID NO: 2421045 - RNA, 19 nt, Artificial Sequence
  Description of Artificial Sequence: Synthetic oligonucleotide
  Antisense strand to SEQ ID NO: 2421044
ugggaaacgcgacacauca

SEQ ID NO: 2421046 - RNA, 19 nt, Artificial Sequence
  Description of Artificial Sequence: Synthetic oligonucleotide
  Sense strand starting at position 113 of SEQ ID NO: 1886693
gcgugugugcgaguggauu

SEQ ID NO: 2421047 - RNA, 19 nt, Artificial Sequence
  Description of Artificial Sequence: Synthetic oligonucleotide
  Antisense strand to SEQ ID NO: 2421046
aauccacucgcacacacgc

SEQ ID NO: 2421048 - RNA, 19 nt, Artificial Sequence
  Description of Artificial Sequence: Synthetic oligonucleotide
  Sense strand starting at position 114 of SEQ ID NO: 1886693
cgugugugcgaguggauuu

SEQ ID NO: 2421049 - RNA, 19 nt, Artificial Sequence
  Description of Artificial Sequence: Synthetic oligonucleotide
  Antisense strand to SEQ ID NO: 2421048
aaauccacucgcacacacg

SEQ ID NO: 2421050 - RNA, 19 nt, Artificial Sequence
  Description of Artificial Sequence: Synthetic oligonucleotide
  Sense strand starting at position 124 of SEQ ID NO: 1886693
aguggauuugugugcgugu

SEQ ID NO: 2421051 - RNA, 19 nt, Artificial Sequence
  Description of Artificial Sequence: Synthetic oligonucleotide
  Antisense strand to SEQ ID NO: 2421050
acacgcacacaaauccacu

SEQ ID NO: 2421052 - RNA, 19 nt, Artificial Sequence
  Description of Artificial Sequence: Synthetic oligonucleotide
  Sense strand starting at position 126 of SEQ ID NO: 1886693
uggauuugugugcguguga

SEQ ID NO: 2421053 - RNA, 19 nt, Artificial Sequence
  Description of Artificial Sequence: Synthetic oligonucleotide
  Antisense strand to SEQ ID NO: 2421052
ucacacgcacacaaaucca

SEQ ID NO: 2421054 - RNA, 19 nt, Artificial Sequence
  Description of Artificial Sequence: Synthetic oligonucleotide
  Sense strand starting at position 127 of SEQ ID NO: 1886693
ggauuugugugcgugugag

SEQ ID NO: 2421055 - RNA, 19 nt, Artificial Sequence
  Description of Artificial Sequence: Synthetic oligonucleotide
  Antisense strand to SEQ ID NO: 2421054
cucacacgcacacaaaucc

SEQ ID NO: 2421056 - RNA, 19 nt, Artificial Sequence
  Description of Artificial Sequence: Synthetic oligonucleotide
  Sense strand starting at position 189 of SEQ ID NO: 1886693
gcguguguucgugugagug

SEQ ID NO: 2421057 - RNA, 19 nt, Artificial Sequence
  Description of Artificial Sequence: Synthetic oligonucleotide
  Antisense strand to SEQ ID NO: 2421056
cacucacacgaacacacgc

SEQ ID NO: 2421058 - RNA, 19 nt, Artificial Sequence
  Description of Artificial Sequence: Synthetic oligonucleotide
  Sense strand starting at position 211 of SEQ ID NO: 1886693
guguguauugccgugagca

SEQ ID NO: 2421059 - RNA, 19 nt, Artificial Sequence
  Description of Artificial Sequence: Synthetic oligonucleotide
  Antisense strand to SEQ ID NO: 2421058
ugcucacggcaauacacac

SEQ ID NO: 2421060 - RNA, 19 nt, Artificial Sequence
  Description of Artificial Sequence: Synthetic oligonucleotide
  Sense strand starting at position 212 of SEQ ID NO: 1886693
uguguauugccgugagcaa

SEQ ID NO: 2421061 - RNA, 19 nt, Artificial Sequence
  Description of Artificial Sequence: Synthetic oligonucleotide
  Antisense strand to SEQ ID NO: 2421060
uugcucacggcaauacaca

SEQ ID NO: 2421062 - RNA, 19 nt, Artificial Sequence
  Description of Artificial Sequence: Synthetic oligonucleotide
  Sense strand starting at position 213 of SEQ ID NO: 1886693
guguauugccgugagcaau

SEQ ID NO: 2421063 - RNA, 19 nt, Artificial Sequence
  Description of Artificial Sequence: Synthetic oligonucleotide
  Antisense strand to SEQ ID NO: 2421062
auugcucacggcaauacac

SEQ ID NO: 2421064 - RNA, 19 nt, Artificial Sequence
  Description of Artificial Sequence: Synthetic oligonucleotide
  Sense strand starting at position 223 of SEQ ID NO: 1886693
gugagcaauugcuggaaua

SEQ ID NO: 2421065 - RNA, 19 nt, Artificial Sequence
  Description of Artificial Sequence: Synthetic oligonucleotide
  Antisense strand to SEQ ID NO: 2421064
uauuccagcaauugcucac

SEQ ID NO: 2421066 - RNA, 19 nt, Artificial Sequence
  Description of Artificial Sequence: Synthetic oligonucleotide
  Sense strand starting at position 224 of SEQ ID NO: 1886693
ugagcaauugcuggaauaa

SEQ ID NO: 2421067 - RNA, 19 nt, Artificial Sequence
  Description of Artificial Sequence: Synthetic oligonucleotide
  Antisense strand to SEQ ID NO: 2421066
uuauuccagcaauugcuca

SEQ ID NO: 2421068 - RNA, 19 nt, Artificial Sequence
  Description of Artificial Sequence: Synthetic oligonucleotide
  Sense strand starting at position 309 of SEQ ID NO: 1886693
acaaucacauguguauuaa

SEQ ID NO: 2421069 - RNA, 19 nt, Artificial Sequence
  Description of Artificial Sequence: Synthetic oligonucleotide
  Antisense strand to SEQ ID NO: 2421068
uuaauacacaugugauugu

SEQ ID NO: 2421070 - RNA, 19 nt, Artificial Sequence
  Description of Artificial Sequence: Synthetic oligonucleotide
  Sense strand starting at position 389 of SEQ ID NO: 1886693
uuaacuaacuccuguguua

SEQ ID NO: 2421071 - RNA, 19 nt, Artificial Sequence
  Description of Artificial Sequence: Synthetic oligonucleotide
  Antisense strand to SEQ ID NO: 2421070
uaacacaggaguuaguuaa

SEQ ID NO: 2421072 - RNA, 19 nt, Artificial Sequence
  Description of Artificial Sequence: Synthetic oligonucleotide
  Sense strand starting at position 400 of SEQ ID NO: 1886693
cuguguuauagaugcggaa

SEQ ID NO: 2421073 - RNA, 19 nt, Artificial Sequence
  Description of Artificial Sequence: Synthetic oligonucleotide
  Antisense strand to SEQ ID NO: 2421072
uuccgcaucuauaacacag

SEQ ID NO: 2421074 - RNA, 19 nt, Artificial Sequence
  Description of Artificial Sequence: Synthetic oligonucleotide
  Sense strand starting at position 402 of SEQ ID NO: 1886693
guguuauagaugcggaaua

SEQ ID NO: 2421075 - RNA, 19 nt, Artificial Sequence
  Description of Artificial Sequence: Synthetic oligonucleotide
  Antisense strand to SEQ ID NO: 2421074
uauuccgcaucuauaacac

SEQ ID NO: 2421076 - RNA, 19 nt, Artificial Sequence
  Description of Artificial Sequence: Synthetic oligonucleotide
  Sense strand starting at position 404 of SEQ ID NO: 1886693
guuauagaugcggaauaga

SEQ ID NO: 2421077 - RNA, 19 nt, Artificial Sequence
  Description of Artificial Sequence: Synthetic oligonucleotide
  Antisense strand to SEQ ID NO: 2421076
ucuauuccgcaucuauaac

SEQ ID NO: 2421078 - RNA, 19 nt, Artificial Sequence
  Description of Artificial Sequence: Synthetic oligonucleotide
  Sense strand starting at position 629 of SEQ ID NO: 1886693
auggucuuaucugcugaca

SEQ ID NO: 2421079 - RNA, 19 nt, Artificial Sequence
  Description of Artificial Sequence: Synthetic oligonucleotide
  Antisense strand to SEQ ID NO: 2421078
ugucagcagauaagaccau

SEQ ID NO: 2421080 - RNA, 19 nt, Artificial Sequence
  Description of Artificial Sequence: Synthetic oligonucleotide
  Sense strand starting at position 631 of SEQ ID NO: 1886693
ggucuuaucugcugacaag

SEQ ID NO: 2421081 - RNA, 19 nt, Artificial Sequence
  Description of Artificial Sequence: Synthetic oligonucleotide
  Antisense strand to SEQ ID NO: 2421080
cuugucagcagauaagacc

SEQ ID NO: 2421082 - RNA, 19 nt, Artificial Sequence
  Description of Artificial Sequence: Synthetic oligonucleotide
  Sense strand starting at position 1362 of SEQ ID NO: 1886693
gcguaauuggcacucaguu

SEQ ID NO: 2421083 - RNA, 19 nt, Artificial Sequence
  Description of Artificial Sequence: Synthetic oligonucleotide
  Antisense strand to SEQ ID NO: 2421082
aacugagugccaauuacgc

SEQ ID NO: 2421084 - RNA, 19 nt, Artificial Sequence
  Description of Artificial Sequence: Synthetic oligonucleotide
  Sense strand starting at position 1377 of SEQ ID NO: 1886693
aguuaacaagacuguugaa

SEQ ID NO: 2421085 - RNA, 19 nt, Artificial Sequence
  Description of Artificial Sequence: Synthetic oligonucleotide
  Antisense strand to SEQ ID NO: 2421084
uucaacagucuuguuaacu

SEQ ID NO: 2421086 - RNA, 19 nt, Artificial Sequence
  Description of Artificial Sequence: Synthetic oligonucleotide
  Sense strand starting at position 1399 of SEQ ID NO: 1886693
auggaugacugaguaaguu

SEQ ID NO: 2421087 - RNA, 19 nt, Artificial Sequence
  Description of Artificial Sequence: Synthetic oligonucleotide
  Antisense strand to SEQ ID NO: 2421086
aacuuacucagucauccau

SEQ ID NO: 2421088 - RNA, 19 nt, Artificial Sequence
  Description of Artificial Sequence: Synthetic oligonucleotide
  Sense strand starting at position 1409 of SEQ ID NO: 1886693
gaguaaguugggcggugua

SEQ ID NO: 2421089 - RNA, 19 nt, Artificial Sequence
  Description of Artificial Sequence: Synthetic oligonucleotide
  Antisense strand to SEQ ID NO: 2421088
uacaccgcccaacuuacuc

SEQ ID NO: 2421090 - RNA, 19 nt, Artificial Sequence
  Description of Artificial Sequence: Synthetic oligonucleotide
  Sense strand starting at position 2138 of SEQ ID NO: 1886693
ccggguguucgguguaucu

SEQ ID NO: 2421091 - RNA, 19 nt, Artificial Sequence
  Description of Artificial Sequence: Synthetic oligonucleotide
  Antisense strand to SEQ ID NO: 2421090
agauacaccgaacacccgg

SEQ ID NO: 2421092 - RNA, 19 nt, Artificial Sequence
  Description of Artificial Sequence: Synthetic oligonucleotide
  Sense strand starting at position 2636 of SEQ ID NO: 1886693
ggcgacacuucccuucgua

SEQ ID NO: 2421093 - RNA, 19 nt, Artificial Sequence
  Description of Artificial Sequence: Synthetic oligonucleotide
  Antisense strand to SEQ ID NO: 2421092
uacgaagggaagugucgcc

SEQ ID NO: 2421094 - RNA, 19 nt, Artificial Sequence
  Description of Artificial Sequence: Synthetic oligonucleotide
  Sense strand starting at position 3108 of SEQ ID NO: 1886693
gaguguacuagggaucuca

SEQ ID NO: 2421095 - RNA, 19 nt, Artificial Sequence
  Description of Artificial Sequence: Synthetic oligonucleotide
  Antisense strand to SEQ ID NO: 2421094
ugagaucccuaguacacuc

SEQ ID NO: 2421096 - RNA, 19 nt, Artificial Sequence
  Description of Artificial Sequence: Synthetic oligonucleotide
  Sense strand starting at position 3173 of SEQ ID NO: 1886693
gaguuuccauucggaaggu

SEQ ID NO: 2421097 - RNA, 19 nt, Artificial Sequence
  Description of Artificial Sequence: Synthetic oligonucleotide
  Antisense strand to SEQ ID NO: 2421096
accuuccgaauggaaacuc

SEQ ID NO: 2421098 - RNA, 19 nt, Artificial Sequence
  Description of Artificial Sequence: Synthetic oligonucleotide
  Sense strand starting at position 3174 of SEQ ID NO: 1886693
aguuuccauucggaagguu

SEQ ID NO: 2421099 - RNA, 19 nt, Artificial Sequence
  Description of Artificial Sequence: Synthetic oligonucleotide
  Antisense strand to SEQ ID NO: 2421098
aaccuuccgaauggaaacu

SEQ ID NO: 2421100 - RNA, 19 nt, Artificial Sequence
  Description of Artificial Sequence: Synthetic oligonucleotide
  Sense strand starting at position 3183 of SEQ ID NO: 1886693
ucggaagguucccugcaaa

SEQ ID NO: 2421101 - RNA, 19 nt, Artificial Sequence
  Description of Artificial Sequence: Synthetic oligonucleotide
  Antisense strand to SEQ ID NO: 2421100
uuugcagggaaccuuccga

SEQ ID NO: 2421102 - RNA, 19 nt, Artificial Sequence
  Description of Artificial Sequence: Synthetic oligonucleotide
  Sense strand starting at position 3339 of SEQ ID NO: 1886693
ggagcucucuccucuaagu

SEQ ID NO: 2421103 - RNA, 19 nt, Artificial Sequence
  Description of Artificial Sequence: Synthetic oligonucleotide
  Antisense strand to SEQ ID NO: 2421102
acuuagaggagagagcucc

SEQ ID NO: 2421104 - RNA, 19 nt, Artificial Sequence
  Description of Artificial Sequence: Synthetic oligonucleotide
  Sense strand starting at position 3359 of SEQ ID NO: 1886693
cugucuucuccagagucua

SEQ ID NO: 2421105 - RNA, 19 nt, Artificial Sequence
  Description of Artificial Sequence: Synthetic oligonucleotide
  Antisense strand to SEQ ID NO: 2421104
uagacucuggagaagacag

SEQ ID NO: 2421106 - RNA, 19 nt, Artificial Sequence
  Description of Artificial Sequence: Synthetic oligonucleotide
  Sense strand starting at position 3446 of SEQ ID NO: 1886693
gcagaaucucccuguagcu

SEQ ID NO: 2421107 - RNA, 19 nt, Artificial Sequence
  Description of Artificial Sequence: Synthetic oligonucleotide
  Antisense strand to SEQ ID NO: 2421106
agcuacagggagauucugc

SEQ ID NO: 2421108 - RNA, 19 nt, Artificial Sequence
  Description of Artificial Sequence: Synthetic oligonucleotide
  Sense strand starting at position 3471 of SEQ ID NO: 1886693
ucauuccucuggucucuua

SEQ ID NO: 2421109 - RNA, 19 nt, Artificial Sequence
  Description of Artificial Sequence: Synthetic oligonucleotide
  Antisense strand to SEQ ID NO: 2421108
uaagagaccagaggaauga

SEQ ID NO: 2421110 - RNA, 19 nt, Artificial Sequence
  Description of Artificial Sequence: Synthetic oligonucleotide
  Sense strand starting at position 3474 of SEQ ID NO: 1886693
uuccucuggucucuuagaa

SEQ ID NO: 2421111 - RNA, 19 nt, Artificial Sequence
  Description of Artificial Sequence: Synthetic oligonucleotide
  Antisense strand to SEQ ID NO: 2421110
uucuaagagaccagaggaa

SEQ ID NO: 2421112 - RNA, 19 nt, Artificial Sequence
  Description of Artificial Sequence: Synthetic oligonucleotide
  Sense strand starting at position 3478 of SEQ ID NO: 1886693
ucuggucucuuagaaucua

SEQ ID NO: 2421113 - RNA, 19 nt, Artificial Sequence
  Description of Artificial Sequence: Synthetic oligonucleotide
  Antisense strand to SEQ ID NO: 2421112
uagauucuaagagaccaga

SEQ ID NO: 2421114 - RNA, 19 nt, Artificial Sequence
  Description of Artificial Sequence: Synthetic oligonucleotide
  Sense strand starting at position 3502 of SEQ ID NO: 1886693
acauaucacugucugagau

SEQ ID NO: 2421115 - RNA, 19 nt, Artificial Sequence
  Description of Artificial Sequence: Synthetic oligonucleotide
  Antisense strand to SEQ ID NO: 2421114
aucucagacagugauaugu

SEQ ID NO: 2421116 - RNA, 19 nt, Artificial Sequence
  Description of Artificial Sequence: Synthetic oligonucleotide
  Sense strand starting at position 3504 of SEQ ID NO: 1886693
auaucacugucugagauuu

SEQ ID NO: 2421117 - RNA, 19 nt, Artificial Sequence
  Description of Artificial Sequence: Synthetic oligonucleotide
  Antisense strand to SEQ ID NO: 2421116
aaaucucagacagugauau

SEQ ID NO: 2421118 - RNA, 19 nt, Artificial Sequence
  Description of Artificial Sequence: Synthetic oligonucleotide
  Sense strand starting at position 3568 of SEQ ID NO: 1886693
augucaguuuccugaaugu

SEQ ID NO: 2421119 - RNA, 19 nt, Artificial Sequence
  Description of Artificial Sequence: Synthetic oligonucleotide
  Antisense strand to SEQ ID NO: 2421118
acauucaggaaacugacau

SEQ ID NO: 2421120 - RNA, 19 nt, Artificial Sequence
  Description of Artificial Sequence: Synthetic oligonucleotide
  Sense strand starting at position 3578 of SEQ ID NO: 1886693
ccugaauguugggcccaua

SEQ ID NO: 2421121 - RNA, 19 nt, Artificial Sequence
  Description of Artificial Sequence: Synthetic oligonucleotide
  Antisense strand to SEQ ID NO: 2421120
uaugggcccaacauucagg

SEQ ID NO: 2421122 - RNA, 19 nt, Artificial Sequence
  Description of Artificial Sequence: Synthetic oligonucleotide
  Sense strand starting at position 3968 of SEQ ID NO: 1886693
gcuggaguacucuggugca

SEQ ID NO: 2421123 - RNA, 19 nt, Artificial Sequence
  Description of Artificial Sequence: Synthetic oligonucleotide
  Antisense strand to SEQ ID NO: 2421122
ugcaccagaguacuccagc

SEQ ID NO: 2421124 - RNA, 19 nt, Artificial Sequence
  Description of Artificial Sequence: Synthetic oligonucleotide
  Sense strand starting at position 3971 of SEQ ID NO: 1886693
ggaguacucuggugcaauc

SEQ ID NO: 2421125 - RNA, 19 nt, Artificial Sequence
  Description of Artificial Sequence: Synthetic oligonucleotide
  Antisense strand to SEQ ID NO: 2421124
gauugcaccagaguacucc

SEQ ID NO: 2421126 - RNA, 19 nt, Artificial Sequence
  Description of Artificial Sequence: Synthetic oligonucleotide
  Sense strand starting at position 214 of SEQ ID NO: 1886694
agcagauauucugagauac

SEQ ID NO: 2421127 - RNA, 19 nt, Artificial Sequence
  Description of Artificial Sequence: Synthetic oligonucleotide
  Antisense strand to SEQ ID NO: 2421126
guaucucagaauaucugcu

SEQ ID NO: 2421128 - RNA, 19 nt, Artificial Sequence
  Description of Artificial Sequence: Synthetic oligonucleotide
  Sense strand starting at position 216 of SEQ ID NO: 1886694
cagauauucugagauacug

SEQ ID NO: 2421129 - RNA, 19 nt, Artificial Sequence
  Description of Artificial Sequence: Synthetic oligonucleotide
  Antisense strand to SEQ ID NO: 2421128
caguaucucagaauaucug

SEQ ID NO: 2421130 - RNA, 19 nt, Artificial Sequence
  Description of Artificial Sequence: Synthetic oligonucleotide
  Sense strand starting at position 234 of SEQ ID NO: 1886694
gaguuugccuccuggagug

SEQ ID NO: 2421131 - RNA, 19 nt, Artificial Sequence
  Description of Artificial Sequence: Synthetic oligonucleotide
  Antisense strand to SEQ ID NO: 2421130
cacuccaggaggcaaacuc

SEQ ID NO: 2421132 - RNA, 19 nt, Artificial Sequence
  Description of Artificial Sequence: Synthetic oligonucleotide
  Sense strand starting at position 401 of SEQ ID NO: 1886694
caggcuaauggcugaguuu

SEQ ID NO: 2421133 - RNA, 19 nt, Artificial Sequence
  Description of Artificial Sequence: Synthetic oligonucleotide
  Antisense strand to SEQ ID NO: 2421132
aaacucagccauuagccug

SEQ ID NO: 2421134 - RNA, 19 nt, Artificial Sequence
  Description of Artificial Sequence: Synthetic oligonucleotide
  Sense strand starting at position 574 of SEQ ID NO: 1886694
ccaccaaguuccuuauggu

SEQ ID NO: 2421135 - RNA, 19 nt, Artificial Sequence
  Description of Artificial Sequence: Synthetic oligonucleotide
  Antisense strand to SEQ ID NO: 2421134
accauaaggaacuuggugg

SEQ ID NO: 2421136 - RNA, 19 nt, Artificial Sequence
  Description of Artificial Sequence: Synthetic oligonucleotide
  Sense strand starting at position 774 of SEQ ID NO: 1886694
ggcuuuggguuugauuuca

SEQ ID NO: 2421137 - RNA, 19 nt, Artificial Sequence
  Description of Artificial Sequence: Synthetic oligonucleotide
  Antisense strand to SEQ ID NO: 2421136
ugaaaucaaacccaaagcc

SEQ ID NO: 2421138 - RNA, 19 nt, Artificial Sequence
  Description of Artificial Sequence: Synthetic oligonucleotide
  Sense strand starting at position 833 of SEQ ID NO: 1886694
ccugguuagucacuauacu

SEQ ID NO: 2421139 - RNA, 19 nt, Artificial Sequence
  Description of Artificial Sequence: Synthetic oligonucleotide
  Antisense strand to SEQ ID NO: 2421138
aguauagugacuaaccagg

SEQ ID NO: 2421140 - RNA, 19 nt, Artificial Sequence
  Description of Artificial Sequence: Synthetic oligonucleotide
  Sense strand starting at position 834 of SEQ ID NO: 1886694
cugguuagucacuauacuu

SEQ ID NO: 2421141 - RNA, 19 nt, Artificial Sequence
  Description of Artificial Sequence: Synthetic oligonucleotide
  Antisense strand to SEQ ID NO: 2421140
aaguauagugacuaaccag

SEQ ID NO: 2421142 - RNA, 19 nt, Artificial Sequence
  Description of Artificial Sequence: Synthetic oligonucleotide
  Sense strand starting at position 889 of SEQ ID NO: 1886694
agaauaaggccacaucugu

SEQ ID NO: 2421143 - RNA, 19 nt, Artificial Sequence
  Description of Artificial Sequence: Synthetic oligonucleotide
  Antisense strand to SEQ ID NO: 2421142
acagauguggccuuauucu

SEQ ID NO: 2421144 - RNA, 19 nt, Artificial Sequence
  Description of Artificial Sequence: Synthetic oligonucleotide
  Sense strand starting at position 896 of SEQ ID NO: 1886694
ggccacaucugucucauaa

SEQ ID NO: 2421145 - RNA, 19 nt, Artificial Sequence
  Description of Artificial Sequence: Synthetic oligonucleotide
  Antisense strand to SEQ ID NO: 2421144
uuaugagacagauguggcc

SEQ ID NO: 2421146 - RNA, 19 nt, Artificial Sequence
  Description of Artificial Sequence: Synthetic oligonucleotide
  Sense strand starting at position 934 of SEQ ID NO: 1886694
uaguguggugccuggcaua

SEQ ID NO: 2421147 - RNA, 19 nt, Artificial Sequence
  Description of Artificial Sequence: Synthetic oligonucleotide
  Antisense strand to SEQ ID NO: 2421146
uaugccaggcaccacacua

SEQ ID NO: 2421148 - RNA, 19 nt, Artificial Sequence
  Description of Artificial Sequence: Synthetic oligonucleotide
  Sense strand starting at position 952 of SEQ ID NO: 1886694
acaguaggugcucauuaau

SEQ ID NO: 2421149 - RNA, 19 nt, Artificial Sequence
  Description of Artificial Sequence: Synthetic oligonucleotide
  Antisense strand to SEQ ID NO: 2421148
auuaaugagcaccuacugu

SEQ ID NO: 2421150 - RNA, 19 nt, Artificial Sequence
  Description of Artificial Sequence: Synthetic oligonucleotide
  Sense strand starting at position 955 of SEQ ID NO: 1886694
guaggugcucauuaaugau

SEQ ID NO: 2421151 - RNA, 19 nt, Artificial Sequence
  Description of Artificial Sequence: Synthetic oligonucleotide
  Antisense strand to SEQ ID NO: 2421150
aucauuaaugagcaccuac

SEQ ID NO: 2421152 - RNA, 19 nt, Artificial Sequence
  Description of Artificial Sequence: Synthetic oligonucleotide
  Sense strand starting at position 958 of SEQ ID NO: 1886694
ggugcucauuaaugauaaa

SEQ ID NO: 2421153 - RNA, 19 nt, Artificial Sequence
  Description of Artificial Sequence: Synthetic oligonucleotide
  Antisense strand to SEQ ID NO: 2421152
uuuaucauuaaugagcacc

SEQ ID NO: 2421154 - RNA, 19 nt, Artificial Sequence
  Description of Artificial Sequence: Synthetic oligonucleotide
  Sense strand starting at position 961 of SEQ ID NO: 1886694
gcucauuaaugauaaauga

SEQ ID NO: 2421155 - RNA, 19 nt, Artificial Sequence
  Description of Artificial Sequence: Synthetic oligonucleotide
  Antisense strand to SEQ ID NO: 2421154
ucauuuaucauuaaugagc

SEQ ID NO: 2421156 - RNA, 19 nt, Artificial Sequence
  Description of Artificial Sequence: Synthetic oligonucleotide
  Sense strand starting at position 1032 of SEQ ID NO: 1886694
ugguuacauuucuccugua

SEQ ID NO: 2421157 - RNA, 19 nt, Artificial Sequence
  Description of Artificial Sequence: Synthetic oligonucleotide
  Antisense strand to SEQ ID NO: 2421156
uacaggagaaauguaacca

SEQ ID NO: 2421158 - RNA, 19 nt, Artificial Sequence
  Description of Artificial Sequence: Synthetic oligonucleotide
  Sense strand starting at position 1035 of SEQ ID NO: 1886694
uuacauuucuccuguagca

SEQ ID NO: 2421159 - RNA, 19 nt, Artificial Sequence
  Description of Artificial Sequence: Synthetic oligonucleotide
  Antisense strand to SEQ ID NO: 2421158
ugcuacaggagaaauguaa

SEQ ID NO: 2421160 - RNA, 19 nt, Artificial Sequence
  Description of Artificial Sequence: Synthetic oligonucleotide
  Sense strand starting at position 1055 of SEQ ID NO: 1886694
ccaauucuguucucgagac

SEQ ID NO: 2421161 - RNA, 19 nt, Artificial Sequence
  Description of Artificial Sequence: Synthetic oligonucleotide
  Antisense strand to SEQ ID NO: 2421160
gucucgagaacagaauugg

SEQ ID NO: 2421162 - RNA, 19 nt, Artificial Sequence
  Description of Artificial Sequence: Synthetic oligonucleotide
  Sense strand starting at position 1059 of SEQ ID NO: 1886694
uucuguucucgagacccaa

SEQ ID NO: 2421163 - RNA, 19 nt, Artificial Sequence
  Description of Artificial Sequence: Synthetic oligonucleotide
  Antisense strand to SEQ ID NO: 2421162
uugggucucgagaacagaa

SEQ ID NO: 2421164 - RNA, 19 nt, Artificial Sequence
  Description of Artificial Sequence: Synthetic oligonucleotide
  Sense strand starting at position 1088 of SEQ ID NO: 1886694
agguccugugaucaaugga

SEQ ID NO: 2421165 - RNA, 19 nt, Artificial Sequence
  Description of Artificial Sequence: Synthetic oligonucleotide
  Antisense strand to SEQ ID NO: 2421164
uccauugaucacaggaccu

SEQ ID NO: 2421166 - RNA, 19 nt, Artificial Sequence
  Description of Artificial Sequence: Synthetic oligonucleotide
  Sense strand starting at position 1091 of SEQ ID NO: 1886694
uccugugaucaauggaguu

SEQ ID NO: 2421167 - RNA, 19 nt, Artificial Sequence
  Description of Artificial Sequence: Synthetic oligonucleotide
  Antisense strand to SEQ ID NO: 2421166
aacuccauugaucacagga

SEQ ID NO: 2421168 - RNA, 19 nt, Artificial Sequence
  Description of Artificial Sequence: Synthetic oligonucleotide
  Sense strand starting at position 1232 of SEQ ID NO: 1886694
ccauuaguuaacugggugu

SEQ ID NO: 2421169 - RNA, 19 nt, Artificial Sequence
  Description of Artificial Sequence: Synthetic oligonucleotide
  Antisense strand to SEQ ID NO: 2421168
acacccaguuaacuaaugg

SEQ ID NO: 2421170 - RNA, 19 nt, Artificial Sequence
  Description of Artificial Sequence: Synthetic oligonucleotide
  Sense strand starting at position 2197 of SEQ ID NO: 1886694
gggauaugucgcguggccu

SEQ ID NO: 2421171 - RNA, 19 nt, Artificial Sequence
  Description of Artificial Sequence: Synthetic oligonucleotide
  Antisense strand to SEQ ID NO: 2421170
aggccacgcgacauauccc

SEQ ID NO: 2421172 - RNA, 19 nt, Artificial Sequence
  Description of Artificial Sequence: Synthetic oligonucleotide
  Sense strand starting at position 2388 of SEQ ID NO: 1886694
acuguaugcccguuaugca

SEQ ID NO: 2421173 - RNA, 19 nt, Artificial Sequence
  Description of Artificial Sequence: Synthetic oligonucleotide
  Antisense strand to SEQ ID NO: 2421172
ugcauaacgggcauacagu

SEQ ID NO: 2421174 - RNA, 19 nt, Artificial Sequence
  Description of Artificial Sequence: Synthetic oligonucleotide
  Sense strand starting at position 2397 of SEQ ID NO: 1886694
ccguuaugcagucaggaaa

SEQ ID NO: 2421175 - RNA, 19 nt, Artificial Sequence
  Description of Artificial Sequence: Synthetic oligonucleotide
  Antisense strand to SEQ ID NO: 2421174
uuuccugacugcauaacgg

SEQ ID NO: 2421176 - RNA, 19 nt, Artificial Sequence
  Description of Artificial Sequence: Synthetic oligonucleotide
  Sense strand starting at position 2643 of SEQ ID NO: 1886694
gccguucccgugucacaga

SEQ ID NO: 2421177 - RNA, 19 nt, Artificial Sequence
  Description of Artificial Sequence: Synthetic oligonucleotide
  Antisense strand to SEQ ID NO: 2421176
ucugugacacgggaacggc

SEQ ID NO: 2421178 - RNA, 19 nt, Artificial Sequence
  Description of Artificial Sequence: Synthetic oligonucleotide
  Sense strand starting at position 2648 of SEQ ID NO: 1886694
ucccgugucacagacagaa

SEQ ID NO: 2421179 - RNA, 19 nt, Artificial Sequence
  Description of Artificial Sequence: Synthetic oligonucleotide
  Antisense strand to SEQ ID NO: 2421178
uucugucugugacacggga

SEQ ID NO: 2421180 - RNA, 19 nt, Artificial Sequence
  Description of Artificial Sequence: Synthetic oligonucleotide
  Sense strand starting at position 2678 of SEQ ID NO: 1886694
ggugauuuauccggaguca

SEQ ID NO: 2421181 - RNA, 19 nt, Artificial Sequence
  Description of Artificial Sequence: Synthetic oligonucleotide
  Antisense strand to SEQ ID NO: 2421180
ugacuccggauaaaucacc

SEQ ID NO: 2421182 - RNA, 19 nt, Artificial Sequence
  Description of Artificial Sequence: Synthetic oligonucleotide
  Sense strand starting at position 2710 of SEQ ID NO: 1886694
uggcucagucgggaaggau

SEQ ID NO: 2421183 - RNA, 19 nt, Artificial Sequence
  Description of Artificial Sequence: Synthetic oligonucleotide
  Antisense strand to SEQ ID NO: 2421182
auccuucccgacugagcca

SEQ ID NO: 2421184 - RNA, 19 nt, Artificial Sequence
  Description of Artificial Sequence: Synthetic oligonucleotide
  Sense strand starting at position 2733 of SEQ ID NO: 1886694
acccaagcuuccuccgaau

SEQ ID NO: 2421185 - RNA, 19 nt, Artificial Sequence
  Description of Artificial Sequence: Synthetic oligonucleotide
  Antisense strand to SEQ ID NO: 2421184
auucggaggaagcuugggu

SEQ ID NO: 2421186 - RNA, 19 nt, Artificial Sequence
  Description of Artificial Sequence: Synthetic oligonucleotide
  Sense strand starting at position 2736 of SEQ ID NO: 1886694
caagcuuccuccgaauggu

SEQ ID NO: 2421187 - RNA, 19 nt, Artificial Sequence
  Description of Artificial Sequence: Synthetic oligonucleotide
  Antisense strand to SEQ ID NO: 2421186
accauucggaggaagcuug

SEQ ID NO: 2421188 - RNA, 19 nt, Artificial Sequence
  Description of Artificial Sequence: Synthetic oligonucleotide
  Sense strand starting at position 2744 of SEQ ID NO: 1886694
cuccgaaugguucagagac

SEQ ID NO: 2421189 - RNA, 19 nt, Artificial Sequence
  Description of Artificial Sequence: Synthetic oligonucleotide
  Antisense strand to SEQ ID NO: 2421188
gucucugaaccauucggag

SEQ ID NO: 2421190 - RNA, 19 nt, Artificial Sequence
  Description of Artificial Sequence: Synthetic oligonucleotide
  Sense strand starting at position 18 of SEQ ID NO: 1886695
cacugagaucccuggccua

SEQ ID NO: 2421191 - RNA, 19 nt, Artificial Sequence
  Description of Artificial Sequence: Synthetic oligonucleotide
  Antisense strand to SEQ ID NO: 2421190
uaggccagggaucucagug

SEQ ID NO: 2421192 - RNA, 19 nt, Artificial Sequence
  Description of Artificial Sequence: Synthetic oligonucleotide
  Sense strand starting at position 236 of SEQ ID NO: 1886695
gagggaagcuaugaacaca

SEQ ID NO: 2421193 - RNA, 19 nt, Artificial Sequence
  Description of Artificial Sequence: Synthetic oligonucleotide
  Antisense strand to SEQ ID NO: 2421192
uguguucauagcuucccuc

SEQ ID NO: 2421194 - RNA, 19 nt, Artificial Sequence
  Description of Artificial Sequence: Synthetic oligonucleotide
  Sense strand starting at position 274 of SEQ ID NO: 1886695
agcauaauggaagguucua

SEQ ID NO: 2421195 - RNA, 19 nt, Artificial Sequence
  Description of Artificial Sequence: Synthetic oligonucleotide
  Antisense strand to SEQ ID NO: 2421194
uagaaccuuccauuaugcu

SEQ ID NO: 2421196 - RNA, 19 nt, Artificial Sequence
  Description of Artificial Sequence: Synthetic oligonucleotide
  Sense strand starting at position 349 of SEQ ID NO: 1886695
cauagaguuugagagggaa

SEQ ID NO: 2421197 - RNA, 19 nt, Artificial Sequence
  Description of Artificial Sequence: Synthetic oligonucleotide
  Antisense strand to SEQ ID NO: 2421196
uucccucucaaacucuaug

SEQ ID NO: 2421198 - RNA, 19 nt, Artificial Sequence
  Description of Artificial Sequence: Synthetic oligonucleotide
  Sense strand starting at position 427 of SEQ ID NO: 1886695
gagaguuuacugugucccu

SEQ ID NO: 2421199 - RNA, 19 nt, Artificial Sequence
  Description of Artificial Sequence: Synthetic oligonucleotide
  Antisense strand to SEQ ID NO: 2421198
agggacacaguaaacucuc

SEQ ID NO: 2421200 - RNA, 19 nt, Artificial Sequence
  Description of Artificial Sequence: Synthetic oligonucleotide
  Sense strand starting at position 428 of SEQ ID NO: 1886695
agaguuuacugugucccua

SEQ ID NO: 2421201 - RNA, 19 nt, Artificial Sequence
  Description of Artificial Sequence: Synthetic oligonucleotide
  Antisense strand to SEQ ID NO: 2421200
uagggacacaguaaacucu

SEQ ID NO: 2421202 - RNA, 19 nt, Artificial Sequence
  Description of Artificial Sequence: Synthetic oligonucleotide
  Sense strand starting at position 514 of SEQ ID NO: 1886695
guauguuccguccaaucug

SEQ ID NO: 2421203 - RNA, 19 nt, Artificial Sequence
  Description of Artificial Sequence: Synthetic oligonucleotide
  Antisense strand to SEQ ID NO: 2421202
cagauuggacggaacauac

SEQ ID NO: 2421204 - RNA, 19 nt, Artificial Sequence
  Description of Artificial Sequence: Synthetic oligonucleotide
  Sense strand starting at position 675 of SEQ ID NO: 1886695
gaaguaaagugacuuauuc

SEQ ID NO: 2421205 - RNA, 19 nt, Artificial Sequence
  Description of Artificial Sequence: Synthetic oligonucleotide
  Antisense strand to SEQ ID NO: 2421204
gaauaagucacuuuacuuc

SEQ ID NO: 2421206 - RNA, 19 nt, Artificial Sequence
  Description of Artificial Sequence: Synthetic oligonucleotide
  Sense strand starting at position 736 of SEQ ID NO: 1886695
guacuuccucgcugaagga

SEQ ID NO: 2421207 - RNA, 19 nt, Artificial Sequence
  Description of Artificial Sequence: Synthetic oligonucleotide
  Antisense strand to SEQ ID NO: 2421206
uccuucagcgaggaaguac

SEQ ID NO: 2421208 - RNA, 19 nt, Artificial Sequence
  Description of Artificial Sequence: Synthetic oligonucleotide
  Sense strand starting at position 737 of SEQ ID NO: 1886695
uacuuccucgcugaaggau

SEQ ID NO: 2421209 - RNA, 19 nt, Artificial Sequence
  Description of Artificial Sequence: Synthetic oligonucleotide
  Antisense strand to SEQ ID NO: 2421208
auccuucagcgaggaagua

SEQ ID NO: 2421210 - RNA, 19 nt, Artificial Sequence
  Description of Artificial Sequence: Synthetic oligonucleotide
  Sense strand starting at position 995 of SEQ ID NO: 1886695
augcuucugcgugccuaua

SEQ ID NO: 2421211 - RNA, 19 nt, Artificial Sequence
  Description of Artificial Sequence: Synthetic oligonucleotide
  Antisense strand to SEQ ID NO: 2421210
uauaggcacgcagaagcau

SEQ ID NO: 2421212 - RNA, 19 nt, Artificial Sequence
  Description of Artificial Sequence: Synthetic oligonucleotide
  Sense strand starting at position 996 of SEQ ID NO: 1886695
ugcuucugcgugccuauaa

SEQ ID NO: 2421213 - RNA, 19 nt, Artificial Sequence
  Description of Artificial Sequence: Synthetic oligonucleotide
  Antisense strand to SEQ ID NO: 2421212
uuauaggcacgcagaagca

SEQ ID NO: 2421214 - RNA, 19 nt, Artificial Sequence
  Description of Artificial Sequence: Synthetic oligonucleotide
  Sense strand starting at position 1341 of SEQ ID NO: 1886695
cuuggaagggaauguguaa

SEQ ID NO: 2421215 - RNA, 19 nt, Artificial Sequence
  Description of Artificial Sequence: Synthetic oligonucleotide
  Antisense strand to SEQ ID NO: 2421214
uuacacauucccuuccaag

SEQ ID NO: 2421216 - RNA, 19 nt, Artificial Sequence
  Description of Artificial Sequence: Synthetic oligonucleotide
  Sense strand starting at position 1576 of SEQ ID NO: 1886695
uggucuucuuucccaguaa

SEQ ID NO: 2421217 - RNA, 19 nt, Artificial Sequence
  Description of Artificial Sequence: Synthetic oligonucleotide
  Antisense strand to SEQ ID NO: 2421216
uuacugggaaagaagacca

SEQ ID NO: 2421218 - RNA, 19 nt, Artificial Sequence
  Description of Artificial Sequence: Synthetic oligonucleotide
  Sense strand starting at position 1678 of SEQ ID NO: 1886695
gauguaaggugaucccaaa

SEQ ID NO: 2421219 - RNA, 19 nt, Artificial Sequence
  Description of Artificial Sequence: Synthetic oligonucleotide
  Antisense strand to SEQ ID NO: 2421218
uuugggaucaccuuacauc

SEQ ID NO: 2421220 - RNA, 19 nt, Artificial Sequence
  Description of Artificial Sequence: Synthetic oligonucleotide
  Sense strand starting at position 2025 of SEQ ID NO: 1886695
ugguauggccguagucgaa

SEQ ID NO: 2421221 - RNA, 19 nt, Artificial Sequence
  Description of Artificial Sequence: Synthetic oligonucleotide
  Antisense strand to SEQ ID NO: 2421220
uucgacuacggccauacca

SEQ ID NO: 2421222 - RNA, 19 nt, Artificial Sequence
  Description of Artificial Sequence: Synthetic oligonucleotide
  Sense strand starting at position 2261 of SEQ ID NO: 1886695
aaguuugggugccugugaa

SEQ ID NO: 2421223 - RNA, 19 nt, Artificial Sequence
  Description of Artificial Sequence: Synthetic oligonucleotide
  Antisense strand to SEQ ID NO: 2421222
uucacaggcacccaaacuu

SEQ ID NO: 2421224 - RNA, 19 nt, Artificial Sequence
  Description of Artificial Sequence: Synthetic oligonucleotide
  Sense strand starting at position 2317 of SEQ ID NO: 1886695
aaauauaggcccuguguuu

SEQ ID NO: 2421225 - RNA, 19 nt, Artificial Sequence
  Description of Artificial Sequence: Synthetic oligonucleotide
  Antisense strand to SEQ ID NO: 2421224
aaacacagggccuauauuu

SEQ ID NO: 2421226 - RNA, 19 nt, Artificial Sequence
  Description of Artificial Sequence: Synthetic oligonucleotide
  Sense strand starting at position 2328 of SEQ ID NO: 1886695
cuguguuuccaaggccaga

SEQ ID NO: 2421227 - RNA, 19 nt, Artificial Sequence
  Description of Artificial Sequence: Synthetic oligonucleotide
  Antisense strand to SEQ ID NO: 2421226
ucuggccuuggaaacacag

SEQ ID NO: 2421228 - RNA, 19 nt, Artificial Sequence
  Description of Artificial Sequence: Synthetic oligonucleotide
  Sense strand starting at position 2430 of SEQ ID NO: 1886695
ugugguuacuaggcuaaua

SEQ ID NO: 2421229 - RNA, 19 nt, Artificial Sequence
  Description of Artificial Sequence: Synthetic oligonucleotide
  Antisense strand to SEQ ID NO: 2421228
uauuagccuaguaaccaca

SEQ ID NO: 2421230 - RNA, 19 nt, Artificial Sequence
  Description of Artificial Sequence: Synthetic oligonucleotide
  Sense strand starting at position 2432 of SEQ ID NO: 1886695
ugguuacuaggcuaauacu

SEQ ID NO: 2421231 - RNA, 19 nt, Artificial Sequence
  Description of Artificial Sequence: Synthetic oligonucleotide
  Antisense strand to SEQ ID NO: 2421230
aguauuagccuaguaacca

SEQ ID NO: 2421232 - RNA, 19 nt, Artificial Sequence
  Description of Artificial Sequence: Synthetic oligonucleotide
  Sense strand starting at position 2496 of SEQ ID NO: 1886695
gugugcuaugaagaaggaa

SEQ ID NO: 2421233 - RNA, 19 nt, Artificial Sequence
  Description of Artificial Sequence: Synthetic oligonucleotide
  Antisense strand to SEQ ID NO: 2421232
uuccuucuucauagcacac

SEQ ID NO: 2421234 - RNA, 19 nt, Artificial Sequence
  Description of Artificial Sequence: Synthetic oligonucleotide
  Sense strand starting at position 2526 of SEQ ID NO: 1886695
acucuaaaggacuggguua

SEQ ID NO: 2421235 - RNA, 19 nt, Artificial Sequence
  Description of Artificial Sequence: Synthetic oligonucleotide
  Antisense strand to SEQ ID NO: 2421234
uaacccaguccuuuagagu

SEQ ID NO: 2421236 - RNA, 19 nt, Artificial Sequence
  Description of Artificial Sequence: Synthetic oligonucleotide
  Sense strand starting at position 2527 of SEQ ID NO: 1886695
cucuaaaggacuggguuau

SEQ ID NO: 2421237 - RNA, 19 nt, Artificial Sequence
  Description of Artificial Sequence: Synthetic oligonucleotide
  Antisense strand to SEQ ID NO: 2421236
auaacccaguccuuuagag

SEQ ID NO: 2421238 - RNA, 19 nt, Artificial Sequence
  Description of Artificial Sequence: Synthetic oligonucleotide
  Sense strand starting at position 2528 of SEQ ID NO: 1886695
ucuaaaggacuggguuauu

SEQ ID NO: 2421239 - RNA, 19 nt, Artificial Sequence
  Description of Artificial Sequence: Synthetic oligonucleotide
  Antisense strand to SEQ ID NO: 2421238
aauaacccaguccuuuaga

SEQ ID NO: 2421240 - RNA, 19 nt, Artificial Sequence
  Description of Artificial Sequence: Synthetic oligonucleotide
  Sense strand starting at position 2538 of SEQ ID NO: 1886695
uggguuauuagccaggcau

SEQ ID NO: 2421241 - RNA, 19 nt, Artificial Sequence
  Description of Artificial Sequence: Synthetic oligonucleotide
  Antisense strand to SEQ ID NO: 2421240
augccuggcuaauaaccca

SEQ ID NO: 2421242 - RNA, 19 nt, Artificial Sequence
  Description of Artificial Sequence: Synthetic oligonucleotide
  Sense strand starting at position 2834 of SEQ ID NO: 1886695
guuuauuacaguugaguuu

SEQ ID NO: 2421243 - RNA, 19 nt, Artificial Sequence
  Description of Artificial Sequence: Synthetic oligonucleotide
  Antisense strand to SEQ ID NO: 2421242
aaacucaacuguaauaaac

SEQ ID NO: 2421244 - RNA, 19 nt, Artificial Sequence
  Description of Artificial Sequence: Synthetic oligonucleotide
  Sense strand starting at position 2881 of SEQ ID NO: 1886695
auucuagaagcuggagaua

SEQ ID NO: 2421245 - RNA, 19 nt, Artificial Sequence
  Description of Artificial Sequence: Synthetic oligonucleotide
  Antisense strand to SEQ ID NO: 2421244
uaucuccagcuucuagaau

SEQ ID NO: 2421246 - RNA, 19 nt, Artificial Sequence
  Description of Artificial Sequence: Synthetic oligonucleotide
  Sense strand starting at position 2990 of SEQ ID NO: 1886695
gaguuaagacccuacagcu

SEQ ID NO: 2421247 - RNA, 19 nt, Artificial Sequence
  Description of Artificial Sequence: Synthetic oligonucleotide
  Antisense strand to SEQ ID NO: 2421246
agcuguagggucuuaacuc

SEQ ID NO: 2421248 - RNA, 19 nt, Artificial Sequence
  Description of Artificial Sequence: Synthetic oligonucleotide
  Sense strand starting at position 3053 of SEQ ID NO: 1886695
uggaguaaauucuccauga

SEQ ID NO: 2421249 - RNA, 19 nt, Artificial Sequence
  Description of Artificial Sequence: Synthetic oligonucleotide
  Antisense strand to SEQ ID NO: 2421248
ucauggagaauuuacucca

SEQ ID NO: 2421250 - RNA, 19 nt, Artificial Sequence
  Description of Artificial Sequence: Synthetic oligonucleotide
  Sense strand starting at position 3054 of SEQ ID NO: 1886695
ggaguaaauucuccaugaa

SEQ ID NO: 2421251 - RNA, 19 nt, Artificial Sequence
  Description of Artificial Sequence: Synthetic oligonucleotide
  Antisense strand to SEQ ID NO: 2421250
uucauggagaauuuacucc

SEQ ID NO: 2421252 - RNA, 19 nt, Artificial Sequence
  Description of Artificial Sequence: Synthetic oligonucleotide
  Sense strand starting at position 3057 of SEQ ID NO: 1886695
guaaauucuccaugaagcc

SEQ ID NO: 2421253 - RNA, 19 nt, Artificial Sequence
  Description of Artificial Sequence: Synthetic oligonucleotide
  Antisense strand to SEQ ID NO: 2421252
ggcuucauggagaauuuac

SEQ ID NO: 2421254 - RNA, 19 nt, Artificial Sequence
  Description of Artificial Sequence: Synthetic oligonucleotide
  Sense strand starting at position 3066 of SEQ ID NO: 1886695
ccaugaagccaaugucuaa

SEQ ID NO: 2421255 - RNA, 19 nt, Artificial Sequence
  Description of Artificial Sequence: Synthetic oligonucleotide
  Antisense strand to SEQ ID NO: 2421254
uuagacauuggcuucaugg

SEQ ID NO: 2421256 - RNA, 19 nt, Artificial Sequence
  Description of Artificial Sequence: Synthetic oligonucleotide
  Sense strand starting at position 3191 of SEQ ID NO: 1886695
ucagauugaacgugugauu

SEQ ID NO: 2421257 - RNA, 19 nt, Artificial Sequence
  Description of Artificial Sequence: Synthetic oligonucleotide
  Antisense strand to SEQ ID NO: 2421256
aaucacacguucaaucuga

SEQ ID NO: 2421258 - RNA, 19 nt, Artificial Sequence
  Description of Artificial Sequence: Synthetic oligonucleotide
  Sense strand starting at position 3242 of SEQ ID NO: 1886695
uccacauuggacugauaca

SEQ ID NO: 2421259 - RNA, 19 nt, Artificial Sequence
  Description of Artificial Sequence: Synthetic oligonucleotide
  Antisense strand to SEQ ID NO: 2421258
uguaucaguccaaugugga

SEQ ID NO: 2421260 - RNA, 19 nt, Artificial Sequence
  Description of Artificial Sequence: Synthetic oligonucleotide
  Sense strand starting at position 3641 of SEQ ID NO: 1886695
acagaauugcuuuaugccu

SEQ ID NO: 2421261 - RNA, 19 nt, Artificial Sequence
  Description of Artificial Sequence: Synthetic oligonucleotide
  Antisense strand to SEQ ID NO: 2421260
aggcauaaagcaauucugu

SEQ ID NO: 2421262 - RNA, 19 nt, Artificial Sequence
  Description of Artificial Sequence: Synthetic oligonucleotide
  Sense strand starting at position 3710 of SEQ ID NO: 1886695
cguucuagugaagacuaaa

SEQ ID NO: 2421263 - RNA, 19 nt, Artificial Sequence
  Description of Artificial Sequence: Synthetic oligonucleotide
  Antisense strand to SEQ ID NO: 2421262
uuuagucuucacuagaacg

SEQ ID NO: 2421264 - RNA, 19 nt, Artificial Sequence
  Description of Artificial Sequence: Synthetic oligonucleotide
  Sense strand starting at position 3776 of SEQ ID NO: 1886695
gaauacgugucacuauuaa

SEQ ID NO: 2421265 - RNA, 19 nt, Artificial Sequence
  Description of Artificial Sequence: Synthetic oligonucleotide
  Antisense strand to SEQ ID NO: 2421264
uuaauagugacacguauuc

SEQ ID NO: 2421266 - RNA, 19 nt, Artificial Sequence
  Description of Artificial Sequence: Synthetic oligonucleotide
  Sense strand starting at position 3947 of SEQ ID NO: 1886695
ccagacgcaugcucagaua

SEQ ID NO: 2421267 - RNA, 19 nt, Artificial Sequence
  Description of Artificial Sequence: Synthetic oligonucleotide
  Antisense strand to SEQ ID NO: 2421266
uaucugagcaugcgucugg

SEQ ID NO: 2421268 - RNA, 19 nt, Artificial Sequence
  Description of Artificial Sequence: Synthetic oligonucleotide
  Sense strand starting at position 3962 of SEQ ID NO: 1886695
gauacaagcuuguuucuag

SEQ ID NO: 2421269 - RNA, 19 nt, Artificial Sequence
  Description of Artificial Sequence: Synthetic oligonucleotide
  Antisense strand to SEQ ID NO: 2421268
cuagaaacaagcuuguauc

SEQ ID NO: 2421270 - RNA, 19 nt, Artificial Sequence
  Description of Artificial Sequence: Synthetic oligonucleotide
  Sense strand starting at position 26 of SEQ ID NO: 1886696
ccuggaguccuaggagcuu

SEQ ID NO: 2421271 - RNA, 19 nt, Artificial Sequence
  Description of Artificial Sequence: Synthetic oligonucleotide
  Antisense strand to SEQ ID NO: 2421270
aagcuccuaggacuccagg

SEQ ID NO: 2421272 - RNA, 19 nt, Artificial Sequence
  Description of Artificial Sequence: Synthetic oligonucleotide
  Sense strand starting at position 155 of SEQ ID NO: 1886696
guccaacaucuguaaacga

SEQ ID NO: 2421273 - RNA, 19 nt, Artificial Sequence
  Description of Artificial Sequence: Synthetic oligonucleotide
  Antisense strand to SEQ ID NO: 2421272
ucguuuacagauguuggac

SEQ ID NO: 2421274 - RNA, 19 nt, Artificial Sequence
  Description of Artificial Sequence: Synthetic oligonucleotide
  Sense strand starting at position 163 of SEQ ID NO: 1886696
ucuguaaacgagugucuga

SEQ ID NO: 2421275 - RNA, 19 nt, Artificial Sequence
  Description of Artificial Sequence: Synthetic oligonucleotide
  Antisense strand to SEQ ID NO: 2421274
ucagacacucguuuacaga

SEQ ID NO: 2421276 - RNA, 19 nt, Artificial Sequence
  Description of Artificial Sequence: Synthetic oligonucleotide
  Sense strand starting at position 191 of SEQ ID NO: 1886696
ggcaacugaucaccaaacu

SEQ ID NO: 2421277 - RNA, 19 nt, Artificial Sequence
  Description of Artificial Sequence: Synthetic oligonucleotide
  Antisense strand to SEQ ID NO: 2421276
aguuuggugaucaguugcc

SEQ ID NO: 2421278 - RNA, 19 nt, Artificial Sequence
  Description of Artificial Sequence: Synthetic oligonucleotide
  Sense strand starting at position 445 of SEQ ID NO: 1886696
gugcuauaccaugagcaga

SEQ ID NO: 2421279 - RNA, 19 nt, Artificial Sequence
  Description of Artificial Sequence: Synthetic oligonucleotide
  Antisense strand to SEQ ID NO: 2421278
ucugcucaugguauagcac

SEQ ID NO: 2421280 - RNA, 19 nt, Artificial Sequence
  Description of Artificial Sequence: Synthetic oligonucleotide
  Sense strand starting at position 515 of SEQ ID NO: 1886696
gguuaaauacacuggaauu

SEQ ID NO: 2421281 - RNA, 19 nt, Artificial Sequence
  Description of Artificial Sequence: Synthetic oligonucleotide
  Antisense strand to SEQ ID NO: 2421280
aauuccaguguauuuaacc

SEQ ID NO: 2421282 - RNA, 19 nt, Artificial Sequence
  Description of Artificial Sequence: Synthetic oligonucleotide
  Sense strand starting at position 555 of SEQ ID NO: 1886696
acagcauuuggcuguguga

SEQ ID NO: 2421283 - RNA, 19 nt, Artificial Sequence
  Description of Artificial Sequence: Synthetic oligonucleotide
  Antisense strand to SEQ ID NO: 2421282
ucacacagccaaaugcugu

SEQ ID NO: 2421284 - RNA, 19 nt, Artificial Sequence
  Description of Artificial Sequence: Synthetic oligonucleotide
  Sense strand starting at position 995 of SEQ ID NO: 1886696
gacaguauaucagugguaa

SEQ ID NO: 2421285 - RNA, 19 nt, Artificial Sequence
  Description of Artificial Sequence: Synthetic oligonucleotide
  Antisense strand to SEQ ID NO: 2421284
uuaccacugauauacuguc

SEQ ID NO: 2421286 - RNA, 19 nt, Artificial Sequence
  Description of Artificial Sequence: Synthetic oligonucleotide
  Sense strand starting at position 996 of SEQ ID NO: 1886696
acaguauaucagugguaac

SEQ ID NO: 2421287 - RNA, 19 nt, Artificial Sequence
  Description of Artificial Sequence: Synthetic oligonucleotide
  Antisense strand to SEQ ID NO: 2421286
guuaccacugauauacugu

SEQ ID NO: 2421288 - RNA, 19 nt, Artificial Sequence
  Description of Artificial Sequence: Synthetic oligonucleotide
  Sense strand starting at position 1109 of SEQ ID NO: 1886696
uugagugaaugauaacaga

SEQ ID NO: 2421289 - RNA, 19 nt, Artificial Sequence
  Description of Artificial Sequence: Synthetic oligonucleotide
  Antisense strand to SEQ ID NO: 2421288
ucuguuaucauucacucaa

SEQ ID NO: 2421290 - RNA, 19 nt, Artificial Sequence
  Description of Artificial Sequence: Synthetic oligonucleotide
  Sense strand starting at position 1112 of SEQ ID NO: 1886696
agugaaugauaacagacaa

SEQ ID NO: 2421291 - RNA, 19 nt, Artificial Sequence
  Description of Artificial Sequence: Synthetic oligonucleotide
  Antisense strand to SEQ ID NO: 2421290
uugucuguuaucauucacu

SEQ ID NO: 2421292 - RNA, 19 nt, Artificial Sequence
  Description of Artificial Sequence: Synthetic oligonucleotide
  Sense strand starting at position 1263 of SEQ ID NO: 1886696
gggaauguuugcucaaucu

SEQ ID NO: 2421293 - RNA, 19 nt, Artificial Sequence
  Description of Artificial Sequence: Synthetic oligonucleotide
  Antisense strand to SEQ ID NO: 2421292
agauugagcaaacauuccc

SEQ ID NO: 2421294 - RNA, 19 nt, Artificial Sequence
  Description of Artificial Sequence: Synthetic oligonucleotide
  Sense strand starting at position 1681 of SEQ ID NO: 1886696
cucagaguccacugcuauu

SEQ ID NO: 2421295 - RNA, 19 nt, Artificial Sequence
  Description of Artificial Sequence: Synthetic oligonucleotide
  Antisense strand to SEQ ID NO: 2421294
aauagcaguggacucugag

SEQ ID NO: 2421296 - RNA, 19 nt, Artificial Sequence
  Description of Artificial Sequence: Synthetic oligonucleotide
  Sense strand starting at position 1731 of SEQ ID NO: 1886696
gggugcauuccugaaaguc

SEQ ID NO: 2421297 - RNA, 19 nt, Artificial Sequence
  Description of Artificial Sequence: Synthetic oligonucleotide
  Antisense strand to SEQ ID NO: 2421296
gacuuucaggaaugcaccc

SEQ ID NO: 2421298 - RNA, 19 nt, Artificial Sequence
  Description of Artificial Sequence: Synthetic oligonucleotide
  Sense strand starting at position 1845 of SEQ ID NO: 1886696
gugguagccgugagcagua

SEQ ID NO: 2421299 - RNA, 19 nt, Artificial Sequence
  Description of Artificial Sequence: Synthetic oligonucleotide
  Antisense strand to SEQ ID NO: 2421298
uacugcucacggcuaccac

SEQ ID NO: 2421300 - RNA, 19 nt, Artificial Sequence
  Description of Artificial Sequence: Synthetic oligonucleotide
  Sense strand starting at position 2022 of SEQ ID NO: 1886696
ccuccuucugacuaguguu

SEQ ID NO: 2421301 - RNA, 19 nt, Artificial Sequence
  Description of Artificial Sequence: Synthetic oligonucleotide
  Antisense strand to SEQ ID NO: 2421300
aacacuagucagaaggagg

SEQ ID NO: 2421302 - RNA, 19 nt, Artificial Sequence
  Description of Artificial Sequence: Synthetic oligonucleotide
  Sense strand starting at position 2518 of SEQ ID NO: 1886696
ggcaaacuuuauuccaaug

SEQ ID NO: 2421303 - RNA, 19 nt, Artificial Sequence
  Description of Artificial Sequence: Synthetic oligonucleotide
  Antisense strand to SEQ ID NO: 2421302
cauuggaauaaaguuugcc

SEQ ID NO: 2421304 - RNA, 19 nt, Artificial Sequence
  Description of Artificial Sequence: Synthetic oligonucleotide
  Sense strand starting at position 2541 of SEQ ID NO: 1886696
aagugagugcugcaaaguu

SEQ ID NO: 2421305 - RNA, 19 nt, Artificial Sequence
  Description of Artificial Sequence: Synthetic oligonucleotide
  Antisense strand to SEQ ID NO: 2421304
aacuuugcagcacucacuu

SEQ ID NO: 2421306 - RNA, 19 nt, Artificial Sequence
  Description of Artificial Sequence: Synthetic oligonucleotide
  Sense strand starting at position 2555 of SEQ ID NO: 1886696
aaguuugacugacugauga

SEQ ID NO: 2421307 - RNA, 19 nt, Artificial Sequence
  Description of Artificial Sequence: Synthetic oligonucleotide
  Antisense strand to SEQ ID NO: 2421306
ucaucagucagucaaacuu

SEQ ID NO: 2421308 - RNA, 19 nt, Artificial Sequence
  Description of Artificial Sequence: Synthetic oligonucleotide
  Sense strand starting at position 2684 of SEQ ID NO: 1886696
gccuuucuagugggaugga

SEQ ID NO: 2421309 - RNA, 19 nt, Artificial Sequence
  Description of Artificial Sequence: Synthetic oligonucleotide
  Antisense strand to SEQ ID NO: 2421308
uccaucccacuagaaaggc

SEQ ID NO: 2421310 - RNA, 19 nt, Artificial Sequence
  Description of Artificial Sequence: Synthetic oligonucleotide
  Sense strand starting at position 2687 of SEQ ID NO: 1886696
uuucuagugggauggaaua

SEQ ID NO: 2421311 - RNA, 19 nt, Artificial Sequence
  Description of Artificial Sequence: Synthetic oligonucleotide
  Antisense strand to SEQ ID NO: 2421310
uauuccaucccacuagaaa

SEQ ID NO: 2421312 - RNA, 19 nt, Artificial Sequence
  Description of Artificial Sequence: Synthetic oligonucleotide
  Sense strand starting at position 2726 of SEQ ID NO: 1886696
acgcguggucugucagaug

SEQ ID NO: 2421313 - RNA, 19 nt, Artificial Sequence
  Description of Artificial Sequence: Synthetic oligonucleotide
  Antisense strand to SEQ ID NO: 2421312
caucugacagaccacgcgu

SEQ ID NO: 2421314 - RNA, 19 nt, Artificial Sequence
  Description of Artificial Sequence: Synthetic oligonucleotide
  Sense strand starting at position 2731 of SEQ ID NO: 1886696
uggucugucagaugauaac

SEQ ID NO: 2421315 - RNA, 19 nt, Artificial Sequence
  Description of Artificial Sequence: Synthetic oligonucleotide
  Antisense strand to SEQ ID NO: 2421314
guuaucaucugacagacca

SEQ ID NO: 2421316 - RNA, 19 nt, Artificial Sequence
  Description of Artificial Sequence: Synthetic oligonucleotide
  Sense strand starting at position 2898 of SEQ ID NO: 1886696
ugguguggguguuuagaca

SEQ ID NO: 2421317 - RNA, 19 nt, Artificial Sequence
  Description of Artificial Sequence: Synthetic oligonucleotide
  Antisense strand to SEQ ID NO: 2421316
ugucuaaacacccacacca

SEQ ID NO: 2421318 - RNA, 19 nt, Artificial Sequence
  Description of Artificial Sequence: Synthetic oligonucleotide
  Sense strand starting at position 3036 of SEQ ID NO: 1886696
caugcugucugggcagaga

SEQ ID NO: 2421319 - RNA, 19 nt, Artificial Sequence
  Description of Artificial Sequence: Synthetic oligonucleotide
  Antisense strand to SEQ ID NO: 2421318
ucucugcccagacagcaug

SEQ ID NO: 2421320 - RNA, 19 nt, Artificial Sequence
  Description of Artificial Sequence: Synthetic oligonucleotide
  Sense strand starting at position 3088 of SEQ ID NO: 1886696
cacaguuaaucauugagag

SEQ ID NO: 2421321 - RNA, 19 nt, Artificial Sequence
  Description of Artificial Sequence: Synthetic oligonucleotide
  Antisense strand to SEQ ID NO: 2421320
cucucaaugauuaacugug

SEQ ID NO: 2421322 - RNA, 19 nt, Artificial Sequence
  Description of Artificial Sequence: Synthetic oligonucleotide
  Sense strand starting at position 3298 of SEQ ID NO: 1886696
gggaaagguucucccgacu

SEQ ID NO: 2421323 - RNA, 19 nt, Artificial Sequence
  Description of Artificial Sequence: Synthetic oligonucleotide
  Antisense strand to SEQ ID NO: 2421322
agucgggagaaccuuuccc

SEQ ID NO: 2421324 - RNA, 19 nt, Artificial Sequence
  Description of Artificial Sequence: Synthetic oligonucleotide
  Sense strand starting at position 3405 of SEQ ID NO: 1886696
cgggauucuaaagguacuu

SEQ ID NO: 2421325 - RNA, 19 nt, Artificial Sequence
  Description of Artificial Sequence: Synthetic oligonucleotide
  Antisense strand to SEQ ID NO: 2421324
aaguaccuuuagaaucccg

SEQ ID NO: 2421326 - RNA, 19 nt, Artificial Sequence
  Description of Artificial Sequence: Synthetic oligonucleotide
  Sense strand starting at position 3410 of SEQ ID NO: 1886696
uucuaaagguacuuagaga

SEQ ID NO: 2421327 - RNA, 19 nt, Artificial Sequence
  Description of Artificial Sequence: Synthetic oligonucleotide
  Antisense strand to SEQ ID NO: 2421326
ucucuaaguaccuuuagaa

SEQ ID NO: 2421328 - RNA, 19 nt, Artificial Sequence
  Description of Artificial Sequence: Synthetic oligonucleotide
  Sense strand starting at position 3418 of SEQ ID NO: 1886696
guacuuagagacugcgaau

SEQ ID NO: 2421329 - RNA, 19 nt, Artificial Sequence
  Description of Artificial Sequence: Synthetic oligonucleotide
  Antisense strand to SEQ ID NO: 2421328
auucgcagucucuaaguac

SEQ ID NO: 2421330 - RNA, 19 nt, Artificial Sequence
  Description of Artificial Sequence: Synthetic oligonucleotide
  Sense strand starting at position 3430 of SEQ ID NO: 1886696
ugcgaauaaguucagggau

SEQ ID NO: 2421331 - RNA, 19 nt, Artificial Sequence
  Description of Artificial Sequence: Synthetic oligonucleotide
  Antisense strand to SEQ ID NO: 2421330
aucccugaacuuauucgca

SEQ ID NO: 2421332 - RNA, 19 nt, Artificial Sequence
  Description of Artificial Sequence: Synthetic oligonucleotide
  Sense strand starting at position 3448 of SEQ ID NO: 1886696
uuuaucuguugggcucaau

SEQ ID NO: 2421333 - RNA, 19 nt, Artificial Sequence
  Description of Artificial Sequence: Synthetic oligonucleotide
  Antisense strand to SEQ ID NO: 2421332
auugagcccaacagauaaa

SEQ ID NO: 2421334 - RNA, 19 nt, Artificial Sequence
  Description of Artificial Sequence: Synthetic oligonucleotide
  Sense strand starting at position 3451 of SEQ ID NO: 1886696
aucuguugggcucaaugua

SEQ ID NO: 2421335 - RNA, 19 nt, Artificial Sequence
  Description of Artificial Sequence: Synthetic oligonucleotide
  Antisense strand to SEQ ID NO: 2421334
uacauugagcccaacagau

SEQ ID NO: 2421336 - RNA, 19 nt, Artificial Sequence
  Description of Artificial Sequence: Synthetic oligonucleotide
  Sense strand starting at position 3547 of SEQ ID NO: 1886696
gugcguauaccuccugcau

SEQ ID NO: 2421337 - RNA, 19 nt, Artificial Sequence
  Description of Artificial Sequence: Synthetic oligonucleotide
  Antisense strand to SEQ ID NO: 2421336
augcaggagguauacgcac

SEQ ID NO: 2421338 - RNA, 19 nt, Artificial Sequence
  Description of Artificial Sequence: Synthetic oligonucleotide
  Sense strand starting at position 3800 of SEQ ID NO: 1886696
ucgauuuccuuaucuguag

SEQ ID NO: 2421339 - RNA, 19 nt, Artificial Sequence
  Description of Artificial Sequence: Synthetic oligonucleotide
  Antisense strand to SEQ ID NO: 2421338
cuacagauaaggaaaucga

SEQ ID NO: 2421340 - RNA, 19 nt, Artificial Sequence
  Description of Artificial Sequence: Synthetic oligonucleotide
  Sense strand starting at position 3806 of SEQ ID NO: 1886696
uccuuaucuguagagugga

SEQ ID NO: 2421341 - RNA, 19 nt, Artificial Sequence
  Description of Artificial Sequence: Synthetic oligonucleotide
  Antisense strand to SEQ ID NO: 2421340
uccacucuacagauaagga

SEQ ID NO: 2421342 - RNA, 19 nt, Artificial Sequence
  Description of Artificial Sequence: Synthetic oligonucleotide
  Sense strand starting at position 3829 of SEQ ID NO: 1886696
accagauugcuaggagaac

SEQ ID NO: 2421343 - RNA, 19 nt, Artificial Sequence
  Description of Artificial Sequence: Synthetic oligonucleotide
  Antisense strand to SEQ ID NO: 2421342
guucuccuagcaaucuggu

SEQ ID NO: 2421344 - RNA, 19 nt, Artificial Sequence
  Description of Artificial Sequence: Synthetic oligonucleotide
  Sense strand starting at position 3871 of SEQ ID NO: 1886696
gugccugacauccagaaga

SEQ ID NO: 2421345 - RNA, 19 nt, Artificial Sequence
  Description of Artificial Sequence: Synthetic oligonucleotide
  Antisense strand to SEQ ID NO: 2421344
ucuucuggaugucaggcac

SEQ ID NO: 2421346 - RNA, 19 nt, Artificial Sequence
  Description of Artificial Sequence: Synthetic oligonucleotide
  Sense strand starting at position 3885 of SEQ ID NO: 1886696
gaagaagcgccaugaaaug

SEQ ID NO: 2421347 - RNA, 19 nt, Artificial Sequence
  Description of Artificial Sequence: Synthetic oligonucleotide
  Antisense strand to SEQ ID NO: 2421346
cauuucauggcgcuucuuc

SEQ ID NO: 2421348 - RNA, 19 nt, Artificial Sequence
  Description of Artificial Sequence: Synthetic oligonucleotide
  Sense strand starting at position 3909 of SEQ ID NO: 1886696
uaucaaaucgcaggacagu

SEQ ID NO: 2421349 - RNA, 19 nt, Artificial Sequence
  Description of Artificial Sequence: Synthetic oligonucleotide
  Antisense strand to SEQ ID NO: 2421348
acuguccugcgauuugaua

SEQ ID NO: 2421350 - RNA, 19 nt, Artificial Sequence
  Description of Artificial Sequence: Synthetic oligonucleotide
  Sense strand starting at position 189 of SEQ ID NO: 1886697
gcauaaggauaucuaccau

SEQ ID NO: 2421351 - RNA, 19 nt, Artificial Sequence
  Description of Artificial Sequence: Synthetic oligonucleotide
  Antisense strand to SEQ ID NO: 2421350
augguagauauccuuaugc

SEQ ID NO: 2421352 - RNA, 19 nt, Artificial Sequence
  Description of Artificial Sequence: Synthetic oligonucleotide
  Sense strand starting at position 195 of SEQ ID NO: 1886697
ggauaucuaccauguuucu

SEQ ID NO: 2421353 - RNA, 19 nt, Artificial Sequence
  Description of Artificial Sequence: Synthetic oligonucleotide
  Antisense strand to SEQ ID NO: 2421352
agaaacaugguagauaucc

SEQ ID NO: 2421354 - RNA, 19 nt, Artificial Sequence
  Description of Artificial Sequence: Synthetic oligonucleotide
  Sense strand starting at position 268 of SEQ ID NO: 1886697
ucauuacuguggguacaau

SEQ ID NO: 2421355 - RNA, 19 nt, Artificial Sequence
  Description of Artificial Sequence: Synthetic oligonucleotide
  Antisense strand to SEQ ID NO: 2421354
auuguacccacaguaauga

SEQ ID NO: 2421356 - RNA, 19 nt, Artificial Sequence
  Description of Artificial Sequence: Synthetic oligonucleotide
  Sense strand starting at position 280 of SEQ ID NO: 1886697
guacaauggucaccuauau

SEQ ID NO: 2421357 - RNA, 19 nt, Artificial Sequence
  Description of Artificial Sequence: Synthetic oligonucleotide
  Antisense strand to SEQ ID NO: 2421356
auauaggugaccauuguac

SEQ ID NO: 2421358 - RNA, 19 nt, Artificial Sequence
  Description of Artificial Sequence: Synthetic oligonucleotide
  Sense strand starting at position 296 of SEQ ID NO: 1886697
uaugaaaggcuuugggcau

SEQ ID NO: 2421359 - RNA, 19 nt, Artificial Sequence
  Description of Artificial Sequence: Synthetic oligonucleotide
  Antisense strand to SEQ ID NO: 2421358
augcccaaagccuuucaua

SEQ ID NO: 2421360 - RNA, 19 nt, Artificial Sequence
  Description of Artificial Sequence: Synthetic oligonucleotide
  Sense strand starting at position 300 of SEQ ID NO: 1886697
aaaggcuuugggcaucaga

SEQ ID NO: 2421361 - RNA, 19 nt, Artificial Sequence
  Description of Artificial Sequence: Synthetic oligonucleotide
  Antisense strand to SEQ ID NO: 2421360
ucugaugcccaaagccuuu

SEQ ID NO: 2421362 - RNA, 19 nt, Artificial Sequence
  Description of Artificial Sequence: Synthetic oligonucleotide
  Sense strand starting at position 341 of SEQ ID NO: 1886697
gcucauucucacgagauga

SEQ ID NO: 2421363 - RNA, 19 nt, Artificial Sequence
  Description of Artificial Sequence: Synthetic oligonucleotide
  Antisense strand to SEQ ID NO: 2421362
ucaucucgugagaaugagc

SEQ ID NO: 2421364 - RNA, 19 nt, Artificial Sequence
  Description of Artificial Sequence: Synthetic oligonucleotide
  Sense strand starting at position 405 of SEQ ID NO: 1886697
uccagaauagcuuaggcua

SEQ ID NO: 2421365 - RNA, 19 nt, Artificial Sequence
  Description of Artificial Sequence: Synthetic oligonucleotide
  Antisense strand to SEQ ID NO: 2421364
uagccuaagcuauucugga

SEQ ID NO: 2421366 - RNA, 19 nt, Artificial Sequence
  Description of Artificial Sequence: Synthetic oligonucleotide
  Sense strand starting at position 413 of SEQ ID NO: 1886697
agcuuaggcuaaucuacaa

SEQ ID NO: 2421367 - RNA, 19 nt, Artificial Sequence
  Description of Artificial Sequence: Synthetic oligonucleotide
  Antisense strand to SEQ ID NO: 2421366
uuguagauuagccuaagcu

SEQ ID NO: 2421368 - RNA, 19 nt, Artificial Sequence
  Description of Artificial Sequence: Synthetic oligonucleotide
  Sense strand starting at position 607 of SEQ ID NO: 1886697
augcuuuaggguugacaca

SEQ ID NO: 2421369 - RNA, 19 nt, Artificial Sequence
  Description of Artificial Sequence: Synthetic oligonucleotide
  Antisense strand to SEQ ID NO: 2421368
ugugucaacccuaaagcau

SEQ ID NO: 2421370 - RNA, 19 nt, Artificial Sequence
  Description of Artificial Sequence: Synthetic oligonucleotide
  Sense strand starting at position 608 of SEQ ID NO: 1886697
ugcuuuaggguugacacau

SEQ ID NO: 2421371 - RNA, 19 nt, Artificial Sequence
  Description of Artificial Sequence: Synthetic oligonucleotide
  Antisense strand to SEQ ID NO: 2421370
augugucaacccuaaagca

SEQ ID NO: 2421372 - RNA, 19 nt, Artificial Sequence
  Description of Artificial Sequence: Synthetic oligonucleotide
  Sense strand starting at position 638 of SEQ ID NO: 1886697
ucugguagucuacacagua

SEQ ID NO: 2421373 - RNA, 19 nt, Artificial Sequence
  Description of Artificial Sequence: Synthetic oligonucleotide
  Antisense strand to SEQ ID NO: 2421372
uacuguguagacuaccaga

SEQ ID NO: 2421374 - RNA, 19 nt, Artificial Sequence
  Description of Artificial Sequence: Synthetic oligonucleotide
  Sense strand starting at position 1099 of SEQ ID NO: 1886697
cugggacagaaaugcauua

SEQ ID NO: 2421375 - RNA, 19 nt, Artificial Sequence
  Description of Artificial Sequence: Synthetic oligonucleotide
  Antisense strand to SEQ ID NO: 2421374
uaaugcauuucugucccag

SEQ ID NO: 2421376 - RNA, 19 nt, Artificial Sequence
  Description of Artificial Sequence: Synthetic oligonucleotide
  Sense strand starting at position 1362 of SEQ ID NO: 1886697
gaaauauggcagugacgga

SEQ ID NO: 2421377 - RNA, 19 nt, Artificial Sequence
  Description of Artificial Sequence: Synthetic oligonucleotide
  Antisense strand to SEQ ID NO: 2421376
uccgucacugccauauuuc

SEQ ID NO: 2421378 - RNA, 19 nt, Artificial Sequence
  Description of Artificial Sequence: Synthetic oligonucleotide
  Sense strand starting at position 1438 of SEQ ID NO: 1886697
uugugagauucaguuugga

SEQ ID NO: 2421379 - RNA, 19 nt, Artificial Sequence
  Description of Artificial Sequence: Synthetic oligonucleotide
  Antisense strand to SEQ ID NO: 2421378
uccaaacugaaucucacaa

SEQ ID NO: 2421380 - RNA, 19 nt, Artificial Sequence
  Description of Artificial Sequence: Synthetic oligonucleotide
  Sense strand starting at position 1556 of SEQ ID NO: 1886697
auuggcuuucuguaagagu

SEQ ID NO: 2421381 - RNA, 19 nt, Artificial Sequence
  Description of Artificial Sequence: Synthetic oligonucleotide
  Antisense strand to SEQ ID NO: 2421380
acucuuacagaaagccaau

SEQ ID NO: 2421382 - RNA, 19 nt, Artificial Sequence
  Description of Artificial Sequence: Synthetic oligonucleotide
  Sense strand starting at position 1563 of SEQ ID NO: 1886697
uucuguaagaguggaugaa

SEQ ID NO: 2421383 - RNA, 19 nt, Artificial Sequence
  Description of Artificial Sequence: Synthetic oligonucleotide
  Antisense strand to SEQ ID NO: 2421382
uucauccacucuuacagaa

SEQ ID NO: 2421384 - RNA, 19 nt, Artificial Sequence
  Description of Artificial Sequence: Synthetic oligonucleotide
  Sense strand starting at position 1791 of SEQ ID NO: 1886697
gaauaaaccugaguaagug

SEQ ID NO: 2421385 - RNA, 19 nt, Artificial Sequence
  Description of Artificial Sequence: Synthetic oligonucleotide
  Antisense strand to SEQ ID NO: 2421384
cacuuacucagguuuauuc

SEQ ID NO: 2421386 - RNA, 19 nt, Artificial Sequence
  Description of Artificial Sequence: Synthetic oligonucleotide
  Sense strand starting at position 1807 of SEQ ID NO: 1886697
guguguuaacccuacuaga

SEQ ID NO: 2421387 - RNA, 19 nt, Artificial Sequence
  Description of Artificial Sequence: Synthetic oligonucleotide
  Antisense strand to SEQ ID NO: 2421386
ucuaguaggguuaacacac

SEQ ID NO: 2421388 - RNA, 19 nt, Artificial Sequence
  Description of Artificial Sequence: Synthetic oligonucleotide
  Sense strand starting at position 1853 of SEQ ID NO: 1886697
uugcccuaagcaugaagaa

SEQ ID NO: 2421389 - RNA, 19 nt, Artificial Sequence
  Description of Artificial Sequence: Synthetic oligonucleotide
  Antisense strand to SEQ ID NO: 2421388
uucuucaugcuuagggcaa

SEQ ID NO: 2421390 - RNA, 19 nt, Artificial Sequence
  Description of Artificial Sequence: Synthetic oligonucleotide
  Sense strand starting at position 1882 of SEQ ID NO: 1886697
gugaaagacagcugaccua

SEQ ID NO: 2421391 - RNA, 19 nt, Artificial Sequence
  Description of Artificial Sequence: Synthetic oligonucleotide
  Antisense strand to SEQ ID NO: 2421390
uaggucagcugucuuucac

SEQ ID NO: 2421392 - RNA, 19 nt, Artificial Sequence
  Description of Artificial Sequence: Synthetic oligonucleotide
  Sense strand starting at position 1893 of SEQ ID NO: 1886697
cugaccuaguucuuaaaug

SEQ ID NO: 2421393 - RNA, 19 nt, Artificial Sequence
  Description of Artificial Sequence: Synthetic oligonucleotide
  Antisense strand to SEQ ID NO: 2421392
cauuuaagaacuaggucag

SEQ ID NO: 2421394 - RNA, 19 nt, Artificial Sequence
  Description of Artificial Sequence: Synthetic oligonucleotide
  Sense strand starting at position 1912 of SEQ ID NO: 1886697
gaggcauaccauuauggca

SEQ ID NO: 2421395 - RNA, 19 nt, Artificial Sequence
  Description of Artificial Sequence: Synthetic oligonucleotide
  Antisense strand to SEQ ID NO: 2421394
ugccauaaugguaugccuc

SEQ ID NO: 2421396 - RNA, 19 nt, Artificial Sequence
  Description of Artificial Sequence: Synthetic oligonucleotide
  Sense strand starting at position 2051 of SEQ ID NO: 1886697
gaagcaaauuggucacaug

SEQ ID NO: 2421397 - RNA, 19 nt, Artificial Sequence
  Description of Artificial Sequence: Synthetic oligonucleotide
  Antisense strand to SEQ ID NO: 2421396
caugugaccaauuugcuuc

SEQ ID NO: 2421398 - RNA, 19 nt, Artificial Sequence
  Description of Artificial Sequence: Synthetic oligonucleotide
  Sense strand starting at position 2231 of SEQ ID NO: 1886697
auugaaugcucacuugauc

SEQ ID NO: 2421399 - RNA, 19 nt, Artificial Sequence
  Description of Artificial Sequence: Synthetic oligonucleotide
  Antisense strand to SEQ ID NO: 2421398
gaucaagugagcauucaau

SEQ ID NO: 2421400 - RNA, 19 nt, Artificial Sequence
  Description of Artificial Sequence: Synthetic oligonucleotide
  Sense strand starting at position 2310 of SEQ ID NO: 1886697
agaagcaugucaucagaug

SEQ ID NO: 2421401 - RNA, 19 nt, Artificial Sequence
  Description of Artificial Sequence: Synthetic oligonucleotide
  Antisense strand to SEQ ID NO: 2421400
caucugaugacaugcuucu

SEQ ID NO: 2421402 - RNA, 19 nt, Artificial Sequence
  Description of Artificial Sequence: Synthetic oligonucleotide
  Sense strand starting at position 2319 of SEQ ID NO: 1886697
ucaucagaugaaugauguu

SEQ ID NO: 2421403 - RNA, 19 nt, Artificial Sequence
  Description of Artificial Sequence: Synthetic oligonucleotide
  Antisense strand to SEQ ID NO: 2421402
aacaucauucaucugauga

SEQ ID NO: 2421404 - RNA, 19 nt, Artificial Sequence
  Description of Artificial Sequence: Synthetic oligonucleotide
  Sense strand starting at position 2396 of SEQ ID NO: 1886697
cugagucuccauugaugga

SEQ ID NO: 2421405 - RNA, 19 nt, Artificial Sequence
  Description of Artificial Sequence: Synthetic oligonucleotide
  Antisense strand to SEQ ID NO: 2421404
uccaucaauggagacucag

SEQ ID NO: 2421406 - RNA, 19 nt, Artificial Sequence
  Description of Artificial Sequence: Synthetic oligonucleotide
  Sense strand starting at position 2433 of SEQ ID NO: 1886697
ugaauucugcuuugauaga

SEQ ID NO: 2421407 - RNA, 19 nt, Artificial Sequence
  Description of Artificial Sequence: Synthetic oligonucleotide
  Antisense strand to SEQ ID NO: 2421406
ucuaucaaagcagaauuca

SEQ ID NO: 2421408 - RNA, 19 nt, Artificial Sequence
  Description of Artificial Sequence: Synthetic oligonucleotide
  Sense strand starting at position 2455 of SEQ ID NO: 1886697
cagagucuugaauggugau

SEQ ID NO: 2421409 - RNA, 19 nt, Artificial Sequence
  Description of Artificial Sequence: Synthetic oligonucleotide
  Antisense strand to SEQ ID NO: 2421408
aucaccauucaagacucug

SEQ ID NO: 2421410 - RNA, 19 nt, Artificial Sequence
  Description of Artificial Sequence: Synthetic oligonucleotide
  Sense strand starting at position 2637 of SEQ ID NO: 1886697
auuuguagaucagaaacca

SEQ ID NO: 2421411 - RNA, 19 nt, Artificial Sequence
  Description of Artificial Sequence: Synthetic oligonucleotide
  Antisense strand to SEQ ID NO: 2421410
ugguuucugaucuacaaau

SEQ ID NO: 2421412 - RNA, 19 nt, Artificial Sequence
  Description of Artificial Sequence: Synthetic oligonucleotide
  Sense strand starting at position 2754 of SEQ ID NO: 1886697
gcugguucacuugaggcaa

SEQ ID NO: 2421413 - RNA, 19 nt, Artificial Sequence
  Description of Artificial Sequence: Synthetic oligonucleotide
  Antisense strand to SEQ ID NO: 2421412
uugccucaagugaaccagc

SEQ ID NO: 2421414 - RNA, 19 nt, Artificial Sequence
  Description of Artificial Sequence: Synthetic oligonucleotide
  Sense strand starting at position 2792 of SEQ ID NO: 1886697
ugguuacuuguuuagagau

SEQ ID NO: 2421415 - RNA, 19 nt, Artificial Sequence
  Description of Artificial Sequence: Synthetic oligonucleotide
  Antisense strand to SEQ ID NO: 2421414
aucucuaaacaaguaacca

SEQ ID NO: 2421416 - RNA, 19 nt, Artificial Sequence
  Description of Artificial Sequence: Synthetic oligonucleotide
  Sense strand starting at position 2897 of SEQ ID NO: 1886697
ccauauagaucugugauca

SEQ ID NO: 2421417 - RNA, 19 nt, Artificial Sequence
  Description of Artificial Sequence: Synthetic oligonucleotide
  Antisense strand to SEQ ID NO: 2421416
ugaucacagaucuauaugg

SEQ ID NO: 2421418 - RNA, 19 nt, Artificial Sequence
  Description of Artificial Sequence: Synthetic oligonucleotide
  Sense strand starting at position 2901 of SEQ ID NO: 1886697
auagaucugugaucacuga

SEQ ID NO: 2421419 - RNA, 19 nt, Artificial Sequence
  Description of Artificial Sequence: Synthetic oligonucleotide
  Antisense strand to SEQ ID NO: 2421418
ucagugaucacagaucuau

SEQ ID NO: 2421420 - RNA, 19 nt, Artificial Sequence
  Description of Artificial Sequence: Synthetic oligonucleotide
  Sense strand starting at position 3578 of SEQ ID NO: 1886697
aaaguuguccuccagcuga

SEQ ID NO: 2421421 - RNA, 19 nt, Artificial Sequence
  Description of Artificial Sequence: Synthetic oligonucleotide
  Antisense strand to SEQ ID NO: 2421420
ucagcuggaggacaacuuu

SEQ ID NO: 2421422 - RNA, 19 nt, Artificial Sequence
  Description of Artificial Sequence: Synthetic oligonucleotide
  Sense strand starting at position 3644 of SEQ ID NO: 1886697
cccaguaucccagaaguua

SEQ ID NO: 2421423 - RNA, 19 nt, Artificial Sequence
  Description of Artificial Sequence: Synthetic oligonucleotide
  Antisense strand to SEQ ID NO: 2421422
uaacuucugggauacuggg

SEQ ID NO: 2421424 - RNA, 19 nt, Artificial Sequence
  Description of Artificial Sequence: Synthetic oligonucleotide
  Sense strand starting at position 3836 of SEQ ID NO: 1886697
ggguaagacucaguuccau

SEQ ID NO: 2421425 - RNA, 19 nt, Artificial Sequence
  Description of Artificial Sequence: Synthetic oligonucleotide
  Antisense strand to SEQ ID NO: 2421424
auggaacugagucuuaccc

SEQ ID NO: 2421426 - RNA, 19 nt, Artificial Sequence
  Description of Artificial Sequence: Synthetic oligonucleotide
  Sense strand starting at position 3886 of SEQ ID NO: 1886697
ggcagauuccuacaucuac

SEQ ID NO: 2421427 - RNA, 19 nt, Artificial Sequence
  Description of Artificial Sequence: Synthetic oligonucleotide
  Antisense strand to SEQ ID NO: 2421426
guagauguaggaaucugcc

SEQ ID NO: 2421428 - RNA, 19 nt, Artificial Sequence
  Description of Artificial Sequence: Synthetic oligonucleotide
  Sense strand starting at position 3938 of SEQ ID NO: 1886697
aucuuuauugaacgaagca

SEQ ID NO: 2421429 - RNA, 19 nt, Artificial Sequence
  Description of Artificial Sequence: Synthetic oligonucleotide
  Antisense strand to SEQ ID NO: 2421428
ugcuucguucaauaaagau

SEQ ID NO: 2421430 - RNA, 19 nt, Artificial Sequence
  Description of Artificial Sequence: Synthetic oligonucleotide
  Sense strand starting at position 31 of SEQ ID NO: 1886698
agcuuaaaugaguaagugu

SEQ ID NO: 2421431 - RNA, 19 nt, Artificial Sequence
  Description of Artificial Sequence: Synthetic oligonucleotide
  Antisense strand to SEQ ID NO: 2421430
acacuuacucauuuaagcu

SEQ ID NO: 2421432 - RNA, 19 nt, Artificial Sequence
  Description of Artificial Sequence: Synthetic oligonucleotide
  Sense strand starting at position 39 of SEQ ID NO: 1886698
ugaguaaguguccaauuac

SEQ ID NO: 2421433 - RNA, 19 nt, Artificial Sequence
  Description of Artificial Sequence: Synthetic oligonucleotide
  Antisense strand to SEQ ID NO: 2421432
guaauuggacacuuacuca

SEQ ID NO: 2421434 - RNA, 19 nt, Artificial Sequence
  Description of Artificial Sequence: Synthetic oligonucleotide
  Sense strand starting at position 56 of SEQ ID NO: 1886698
acaguuaaauugucccuau

SEQ ID NO: 2421435 - RNA, 19 nt, Artificial Sequence
  Description of Artificial Sequence: Synthetic oligonucleotide
  Antisense strand to SEQ ID NO: 2421434
auagggacaauuuaacugu

SEQ ID NO: 2421436 - RNA, 19 nt, Artificial Sequence
  Description of Artificial Sequence: Synthetic oligonucleotide
  Sense strand starting at position 142 of SEQ ID NO: 1886698
uuccacucuguauaaagua

SEQ ID NO: 2421437 - RNA, 19 nt, Artificial Sequence
  Description of Artificial Sequence: Synthetic oligonucleotide
  Antisense strand to SEQ ID NO: 2421436
uacuuuauacagaguggaa

SEQ ID NO: 2421438 - RNA, 19 nt, Artificial Sequence
  Description of Artificial Sequence: Synthetic oligonucleotide
  Sense strand starting at position 149 of SEQ ID NO: 1886698
cuguauaaaguauggagaa

SEQ ID NO: 2421439 - RNA, 19 nt, Artificial Sequence
  Description of Artificial Sequence: Synthetic oligonucleotide
  Antisense strand to SEQ ID NO: 2421438
uucuccauacuuuauacag

SEQ ID NO: 2421440 - RNA, 19 nt, Artificial Sequence
  Description of Artificial Sequence: Synthetic oligonucleotide
  Sense strand starting at position 185 of SEQ ID NO: 1886698
aaaugauugcacuaccguu

SEQ ID NO: 2421441 - RNA, 19 nt, Artificial Sequence
  Description of Artificial Sequence: Synthetic oligonucleotide
  Antisense strand to SEQ ID NO: 2421440
aacgguagugcaaucauuu

SEQ ID NO: 2421442 - RNA, 19 nt, Artificial Sequence
  Description of Artificial Sequence: Synthetic oligonucleotide
  Sense strand starting at position 247 of SEQ ID NO: 1886698
agcugucagguauaucaaa

SEQ ID NO: 2421443 - RNA, 19 nt, Artificial Sequence
  Description of Artificial Sequence: Synthetic oligonucleotide
  Antisense strand to SEQ ID NO: 2421442
uuugauauaccugacagcu

SEQ ID NO: 2421444 - RNA, 19 nt, Artificial Sequence
  Description of Artificial Sequence: Synthetic oligonucleotide
  Sense strand starting at position 311 of SEQ ID NO: 1886698
cugaauuugcuaugugcaa

SEQ ID NO: 2421445 - RNA, 19 nt, Artificial Sequence
  Description of Artificial Sequence: Synthetic oligonucleotide
  Antisense strand to SEQ ID NO: 2421444
uugcacauagcaaauucag

SEQ ID NO: 2421446 - RNA, 19 nt, Artificial Sequence
  Description of Artificial Sequence: Synthetic oligonucleotide
  Sense strand starting at position 312 of SEQ ID NO: 1886698
ugaauuugcuaugugcaaa

SEQ ID NO: 2421447 - RNA, 19 nt, Artificial Sequence
  Description of Artificial Sequence: Synthetic oligonucleotide
  Antisense strand to SEQ ID NO: 2421446
uuugcacauagcaaauuca

SEQ ID NO: 2421448 - RNA, 19 nt, Artificial Sequence
  Description of Artificial Sequence: Synthetic oligonucleotide
  Sense strand starting at position 402 of SEQ ID NO: 1886698
uaaugacgcuuauuugagu

SEQ ID NO: 2421449 - RNA, 19 nt, Artificial Sequence
  Description of Artificial Sequence: Synthetic oligonucleotide
  Antisense strand to SEQ ID NO: 2421448
acucaaauaagcgucauua

SEQ ID NO: 2421450 - RNA, 19 nt, Artificial Sequence
  Description of Artificial Sequence: Synthetic oligonucleotide
  Sense strand starting at position 543 of SEQ ID NO: 1886698
guuuguugggugucuguau

SEQ ID NO: 2421451 - RNA, 19 nt, Artificial Sequence
  Description of Artificial Sequence: Synthetic oligonucleotide
  Antisense strand to SEQ ID NO: 2421450
auacagacacccaacaaac

SEQ ID NO: 2421452 - RNA, 19 nt, Artificial Sequence
  Description of Artificial Sequence: Synthetic oligonucleotide
  Sense strand starting at position 570 of SEQ ID NO: 1886698
uugagaacugucuauguau

SEQ ID NO: 2421453 - RNA, 19 nt, Artificial Sequence
  Description of Artificial Sequence: Synthetic oligonucleotide
  Antisense strand to SEQ ID NO: 2421452
auacauagacaguucucaa

SEQ ID NO: 2421454 - RNA, 19 nt, Artificial Sequence
  Description of Artificial Sequence: Synthetic oligonucleotide
  Sense strand starting at position 581 of SEQ ID NO: 1886698
cuauguauuuccuuugucu

SEQ ID NO: 2421455 - RNA, 19 nt, Artificial Sequence
  Description of Artificial Sequence: Synthetic oligonucleotide
  Antisense strand to SEQ ID NO: 2421454
agacaaaggaaauacauag

SEQ ID NO: 2421456 - RNA, 19 nt, Artificial Sequence
  Description of Artificial Sequence: Synthetic oligonucleotide
  Sense strand starting at position 583 of SEQ ID NO: 1886698
auguauuuccuuugucuac

SEQ ID NO: 2421457 - RNA, 19 nt, Artificial Sequence
  Description of Artificial Sequence: Synthetic oligonucleotide
  Antisense strand to SEQ ID NO: 2421456
guagacaaaggaaauacau

SEQ ID NO: 2421458 - RNA, 19 nt, Artificial Sequence
  Description of Artificial Sequence: Synthetic oligonucleotide
  Sense strand starting at position 585 of SEQ ID NO: 1886698
guauuuccuuugucuacuu

SEQ ID NO: 2421459 - RNA, 19 nt, Artificial Sequence
  Description of Artificial Sequence: Synthetic oligonucleotide
  Antisense strand to SEQ ID NO: 2421458
aaguagacaaaggaaauac

SEQ ID NO: 2421460 - RNA, 19 nt, Artificial Sequence
  Description of Artificial Sequence: Synthetic oligonucleotide
  Sense strand starting at position 1020 of SEQ ID NO: 1886698
cagugaugagugcaacaaa

SEQ ID NO: 2421461 - RNA, 19 nt, Artificial Sequence
  Description of Artificial Sequence: Synthetic oligonucleotide
  Antisense strand to SEQ ID NO: 2421460
uuuguugcacucaucacug

SEQ ID NO: 2421462 - RNA, 19 nt, Artificial Sequence
  Description of Artificial Sequence: Synthetic oligonucleotide
  Sense strand starting at position 1059 of SEQ ID NO: 1886698
agagcucauccauguaaug

SEQ ID NO: 2421463 - RNA, 19 nt, Artificial Sequence
  Description of Artificial Sequence: Synthetic oligonucleotide
  Antisense strand to SEQ ID NO: 2421462
cauuacauggaugagcucu

SEQ ID NO: 2421464 - RNA, 19 nt, Artificial Sequence
  Description of Artificial Sequence: Synthetic oligonucleotide
  Sense strand starting at position 1132 of SEQ ID NO: 1886698
uaugcuuuggaaugagaaa

SEQ ID NO: 2421465 - RNA, 19 nt, Artificial Sequence
  Description of Artificial Sequence: Synthetic oligonucleotide
  Antisense strand to SEQ ID NO: 2421464
uuucucauuccaaagcaua

SEQ ID NO: 2421466 - RNA, 19 nt, Artificial Sequence
  Description of Artificial Sequence: Synthetic oligonucleotide
  Sense strand starting at position 1164 of SEQ ID NO: 1886698
gugugguuccagggagaag

SEQ ID NO: 2421467 - RNA, 19 nt, Artificial Sequence
  Description of Artificial Sequence: Synthetic oligonucleotide
  Antisense strand to SEQ ID NO: 2421466
cuucucccuggaaccacac

SEQ ID NO: 2421468 - RNA, 19 nt, Artificial Sequence
  Description of Artificial Sequence: Synthetic oligonucleotide
  Sense strand starting at position 1628 of SEQ ID NO: 1886698
gcugcaguucucccagcuu

SEQ ID NO: 2421469 - RNA, 19 nt, Artificial Sequence
  Description of Artificial Sequence: Synthetic oligonucleotide
  Antisense strand to SEQ ID NO: 2421468
aagcugggagaacugcagc

SEQ ID NO: 2421470 - RNA, 19 nt, Artificial Sequence
  Description of Artificial Sequence: Synthetic oligonucleotide
  Sense strand starting at position 1640 of SEQ ID NO: 1886698
ccagcuuauauggaagagu

SEQ ID NO: 2421471 - RNA, 19 nt, Artificial Sequence
  Description of Artificial Sequence: Synthetic oligonucleotide
  Antisense strand to SEQ ID NO: 2421470
acucuuccauauaagcugg

SEQ ID NO: 2421472 - RNA, 19 nt, Artificial Sequence
  Description of Artificial Sequence: Synthetic oligonucleotide
  Sense strand starting at position 1690 of SEQ ID NO: 1886698
ucaugaccacuuuguaaag

SEQ ID NO: 2421473 - RNA, 19 nt, Artificial Sequence
  Description of Artificial Sequence: Synthetic oligonucleotide
  Antisense strand to SEQ ID NO: 2421472
cuuuacaaaguggucauga

SEQ ID NO: 2421474 - RNA, 19 nt, Artificial Sequence
  Description of Artificial Sequence: Synthetic oligonucleotide
  Sense strand starting at position 1736 of SEQ ID NO: 1886698
guaagugcucacuaaauca

SEQ ID NO: 2421475 - RNA, 19 nt, Artificial Sequence
  Description of Artificial Sequence: Synthetic oligonucleotide
  Antisense strand to SEQ ID NO: 2421474
ugauuuagugagcacuuac

SEQ ID NO: 2421476 - RNA, 19 nt, Artificial Sequence
  Description of Artificial Sequence: Synthetic oligonucleotide
  Sense strand starting at position 1873 of SEQ ID NO: 1886698
ccagauaaaucaccgcuga

SEQ ID NO: 2421477 - RNA, 19 nt, Artificial Sequence
  Description of Artificial Sequence: Synthetic oligonucleotide
  Antisense strand to SEQ ID NO: 2421476
ucagcggugauuuaucugg

SEQ ID NO: 2421478 - RNA, 19 nt, Artificial Sequence
  Description of Artificial Sequence: Synthetic oligonucleotide
  Sense strand starting at position 1889 of SEQ ID NO: 1886698
ugauauuguguguaauuac

SEQ ID NO: 2421479 - RNA, 19 nt, Artificial Sequence
  Description of Artificial Sequence: Synthetic oligonucleotide
  Antisense strand to SEQ ID NO: 2421478
guaauuacacacaauauca

SEQ ID NO: 2421480 - RNA, 19 nt, Artificial Sequence
  Description of Artificial Sequence: Synthetic oligonucleotide
  Sense strand starting at position 1898 of SEQ ID NO: 1886698
guguaauuacaugaagcca

SEQ ID NO: 2421481 - RNA, 19 nt, Artificial Sequence
  Description of Artificial Sequence: Synthetic oligonucleotide
  Antisense strand to SEQ ID NO: 2421480
uggcuucauguaauuacac

SEQ ID NO: 2421482 - RNA, 19 nt, Artificial Sequence
  Description of Artificial Sequence: Synthetic oligonucleotide
  Sense strand starting at position 2098 of SEQ ID NO: 1886698
uaacguugaccaggaaaca

SEQ ID NO: 2421483 - RNA, 19 nt, Artificial Sequence
  Description of Artificial Sequence: Synthetic oligonucleotide
  Antisense strand to SEQ ID NO: 2421482
uguuuccuggucaacguua

SEQ ID NO: 2421484 - RNA, 19 nt, Artificial Sequence
  Description of Artificial Sequence: Synthetic oligonucleotide
  Sense strand starting at position 2151 of SEQ ID NO: 1886698
cagagauugauguggguug

SEQ ID NO: 2421485 - RNA, 19 nt, Artificial Sequence
  Description of Artificial Sequence: Synthetic oligonucleotide
  Antisense strand to SEQ ID NO: 2421484
caacccacaucaaucucug

SEQ ID NO: 2421486 - RNA, 19 nt, Artificial Sequence
  Description of Artificial Sequence: Synthetic oligonucleotide
  Sense strand starting at position 2154 of SEQ ID NO: 1886698
agauugauguggguuggga

SEQ ID NO: 2421487 - RNA, 19 nt, Artificial Sequence
  Description of Artificial Sequence: Synthetic oligonucleotide
  Antisense strand to SEQ ID NO: 2421486
ucccaacccacaucaaucu

SEQ ID NO: 2421488 - RNA, 19 nt, Artificial Sequence
  Description of Artificial Sequence: Synthetic oligonucleotide
  Sense strand starting at position 2238 of SEQ ID NO: 1886698
augacaucgucucuaauac

SEQ ID NO: 2421489 - RNA, 19 nt, Artificial Sequence
  Description of Artificial Sequence: Synthetic oligonucleotide
  Antisense strand to SEQ ID NO: 2421488
guauuagagacgaugucau

SEQ ID NO: 2421490 - RNA, 19 nt, Artificial Sequence
  Description of Artificial Sequence: Synthetic oligonucleotide
  Sense strand starting at position 2239 of SEQ ID NO: 1886698
ugacaucgucucuaauaca

SEQ ID NO: 2421491 - RNA, 19 nt, Artificial Sequence
  Description of Artificial Sequence: Synthetic oligonucleotide
  Antisense strand to SEQ ID NO: 2421490
uguauuagagacgauguca

SEQ ID NO: 2421492 - RNA, 19 nt, Artificial Sequence
  Description of Artificial Sequence: Synthetic oligonucleotide
  Sense strand starting at position 2446 of SEQ ID NO: 1886698
ccaauccuccugugagauc

SEQ ID NO: 2421493 - RNA, 19 nt, Artificial Sequence
  Description of Artificial Sequence: Synthetic oligonucleotide
  Antisense strand to SEQ ID NO: 2421492
gaucucacaggaggauugg

SEQ ID NO: 2421494 - RNA, 19 nt, Artificial Sequence
  Description of Artificial Sequence: Synthetic oligonucleotide
  Sense strand starting at position 2615 of SEQ ID NO: 1886698
gcugccuuuggccaaauuu

SEQ ID NO: 2421495 - RNA, 19 nt, Artificial Sequence
  Description of Artificial Sequence: Synthetic oligonucleotide
  Antisense strand to SEQ ID NO: 2421494
aaauuuggccaaaggcagc

SEQ ID NO: 2421496 - RNA, 19 nt, Artificial Sequence
  Description of Artificial Sequence: Synthetic oligonucleotide
  Sense strand starting at position 3203 of SEQ ID NO: 1886698
uuuaaaugugcaugaggau

SEQ ID NO: 2421497 - RNA, 19 nt, Artificial Sequence
  Description of Artificial Sequence: Synthetic oligonucleotide
  Antisense strand to SEQ ID NO: 2421496
auccucaugcacauuuaaa

SEQ ID NO: 2421498 - RNA, 19 nt, Artificial Sequence
  Description of Artificial Sequence: Synthetic oligonucleotide
  Sense strand starting at position 3204 of SEQ ID NO: 1886698
uuaaaugugcaugaggauu

SEQ ID NO: 2421499 - RNA, 19 nt, Artificial Sequence
  Description of Artificial Sequence: Synthetic oligonucleotide
  Antisense strand to SEQ ID NO: 2421498
aauccucaugcacauuuaa

SEQ ID NO: 2421500 - RNA, 19 nt, Artificial Sequence
  Description of Artificial Sequence: Synthetic oligonucleotide
  Sense strand starting at position 3299 of SEQ ID NO: 1886698
agcaaauuccgacauacuc

SEQ ID NO: 2421501 - RNA, 19 nt, Artificial Sequence
  Description of Artificial Sequence: Synthetic oligonucleotide
  Antisense strand to SEQ ID NO: 2421500
gaguaugucggaauuugcu

SEQ ID NO: 2421502 - RNA, 19 nt, Artificial Sequence
  Description of Artificial Sequence: Synthetic oligonucleotide
  Sense strand starting at position 3725 of SEQ ID NO: 1886698
gauacugccuggguaugaa

SEQ ID NO: 2421503 - RNA, 19 nt, Artificial Sequence
  Description of Artificial Sequence: Synthetic oligonucleotide
  Antisense strand to SEQ ID NO: 2421502
uucauacccaggcaguauc

SEQ ID NO: 2421504 - RNA, 19 nt, Artificial Sequence
  Description of Artificial Sequence: Synthetic oligonucleotide
  Sense strand starting at position 3803 of SEQ ID NO: 1886698
gggaaacgcugguugauga

SEQ ID NO: 2421505 - RNA, 19 nt, Artificial Sequence
  Description of Artificial Sequence: Synthetic oligonucleotide
  Antisense strand to SEQ ID NO: 2421504
ucaucaaccagcguuuccc

SEQ ID NO: 2421506 - RNA, 19 nt, Artificial Sequence
  Description of Artificial Sequence: Synthetic oligonucleotide
  Sense strand starting at position 3851 of SEQ ID NO: 1886698
aguccuuuccaucaagagu

SEQ ID NO: 2421507 - RNA, 19 nt, Artificial Sequence
  Description of Artificial Sequence: Synthetic oligonucleotide
  Antisense strand to SEQ ID NO: 2421506
acucuugauggaaaggacu

SEQ ID NO: 2421508 - RNA, 19 nt, Artificial Sequence
  Description of Artificial Sequence: Synthetic oligonucleotide
  Sense strand starting at position 3916 of SEQ ID NO: 1886698
gcaggcagagauugaagaa

SEQ ID NO: 2421509 - RNA, 19 nt, Artificial Sequence
  Description of Artificial Sequence: Synthetic oligonucleotide
  Antisense strand to SEQ ID NO: 2421508
uucuucaaucucugccugc

SEQ ID NO: 2421510 - RNA, 19 nt, Artificial Sequence
  Description of Artificial Sequence: Synthetic oligonucleotide
  Sense strand starting at position 291 of SEQ ID NO: 1886699
gcuugcugaggguaucaga

SEQ ID NO: 2421511 - RNA, 19 nt, Artificial Sequence
  Description of Artificial Sequence: Synthetic oligonucleotide
  Antisense strand to SEQ ID NO: 2421510
ucugauacccucagcaagc

SEQ ID NO: 2421512 - RNA, 19 nt, Artificial Sequence
  Description of Artificial Sequence: Synthetic oligonucleotide
  Sense strand starting at position 317 of SEQ ID NO: 1886699
aggucacagugguuugaaa

SEQ ID NO: 2421513 - RNA, 19 nt, Artificial Sequence
  Description of Artificial Sequence: Synthetic oligonucleotide
  Antisense strand to SEQ ID NO: 2421512
uuucaaaccacugugaccu

SEQ ID NO: 2421514 - RNA, 19 nt, Artificial Sequence
  Description of Artificial Sequence: Synthetic oligonucleotide
  Sense strand starting at position 341 of SEQ ID NO: 1886699
guuuauuucucagccaugu

SEQ ID NO: 2421515 - RNA, 19 nt, Artificial Sequence
  Description of Artificial Sequence: Synthetic oligonucleotide
  Antisense strand to SEQ ID NO: 2421514
acauggcugagaaauaaac

SEQ ID NO: 2421516 - RNA, 19 nt, Artificial Sequence
  Description of Artificial Sequence: Synthetic oligonucleotide
  Sense strand starting at position 464 of SEQ ID NO: 1886699
cucuguguucaaggaagug

SEQ ID NO: 2421517 - RNA, 19 nt, Artificial Sequence
  Description of Artificial Sequence: Synthetic oligonucleotide
  Antisense strand to SEQ ID NO: 2421516
cacuuccuugaacacagag

SEQ ID NO: 2421518 - RNA, 19 nt, Artificial Sequence
  Description of Artificial Sequence: Synthetic oligonucleotide
  Sense strand starting at position 540 of SEQ ID NO: 1886699
ggcggaucaugaagucgaa

SEQ ID NO: 2421519 - RNA, 19 nt, Artificial Sequence
  Description of Artificial Sequence: Synthetic oligonucleotide
  Antisense strand to SEQ ID NO: 2421518
uucgacuucaugauccgcc

SEQ ID NO: 2421520 - RNA, 19 nt, Artificial Sequence
  Description of Artificial Sequence: Synthetic oligonucleotide
  Sense strand starting at position 778 of SEQ ID NO: 1886699
aaaggaagugcucaaguuc

SEQ ID NO: 2421521 - RNA, 19 nt, Artificial Sequence
  Description of Artificial Sequence: Synthetic oligonucleotide
  Antisense strand to SEQ ID NO: 2421520
gaacuugagcacuuccuuu

SEQ ID NO: 2421522 - RNA, 19 nt, Artificial Sequence
  Description of Artificial Sequence: Synthetic oligonucleotide
  Sense strand starting at position 907 of SEQ ID NO: 1886699
guuucccaucucugucuua

SEQ ID NO: 2421523 - RNA, 19 nt, Artificial Sequence
  Description of Artificial Sequence: Synthetic oligonucleotide
  Antisense strand to SEQ ID NO: 2421522
uaagacagagaugggaaac

SEQ ID NO: 2421524 - RNA, 19 nt, Artificial Sequence
  Description of Artificial Sequence: Synthetic oligonucleotide
  Sense strand starting at position 1014 of SEQ ID NO: 1886699
aaauguguccagcagggaa

SEQ ID NO: 2421525 - RNA, 19 nt, Artificial Sequence
  Description of Artificial Sequence: Synthetic oligonucleotide
  Antisense strand to SEQ ID NO: 2421524
uucccugcuggacacauuu

SEQ ID NO: 2421526 - RNA, 19 nt, Artificial Sequence
  Description of Artificial Sequence: Synthetic oligonucleotide
  Sense strand starting at position 1035 of SEQ ID NO: 1886699
uaauguguccagcagggaa

SEQ ID NO: 2421527 - RNA, 19 nt, Artificial Sequence
  Description of Artificial Sequence: Synthetic oligonucleotide
  Antisense strand to SEQ ID NO: 2421526
uucccugcuggacacauua

SEQ ID NO: 2421528 - RNA, 19 nt, Artificial Sequence
  Description of Artificial Sequence: Synthetic oligonucleotide
  Sense strand starting at position 1168 of SEQ ID NO: 1886699
ggguuuccugagugaggug

SEQ ID NO: 2421529 - RNA, 19 nt, Artificial Sequence
  Description of Artificial Sequence: Synthetic oligonucleotide
  Antisense strand to SEQ ID NO: 2421528
caccucacucaggaaaccc

SEQ ID NO: 2421530 - RNA, 19 nt, Artificial Sequence
  Description of Artificial Sequence: Synthetic oligonucleotide
  Sense strand starting at position 1474 of SEQ ID NO: 1886699
gcaccaugcucauggcaua

SEQ ID NO: 2421531 - RNA, 19 nt, Artificial Sequence
  Description of Artificial Sequence: Synthetic oligonucleotide
  Antisense strand to SEQ ID NO: 2421530
uaugccaugagcauggugc

SEQ ID NO: 2421532 - RNA, 19 nt, Artificial Sequence
  Description of Artificial Sequence: Synthetic oligonucleotide
  Sense strand starting at position 2012 of SEQ ID NO: 1886699
guuggaugcuucggcuuga

SEQ ID NO: 2421533 - RNA, 19 nt, Artificial Sequence
  Description of Artificial Sequence: Synthetic oligonucleotide
  Antisense strand to SEQ ID NO: 2421532
ucaagccgaagcauccaac

SEQ ID NO: 2421534 - RNA, 19 nt, Artificial Sequence
  Description of Artificial Sequence: Synthetic oligonucleotide
  Sense strand starting at position 2013 of SEQ ID NO: 1886699
uuggaugcuucggcuugaa

SEQ ID NO: 2421535 - RNA, 19 nt, Artificial Sequence
  Description of Artificial Sequence: Synthetic oligonucleotide
  Antisense strand to SEQ ID NO: 2421534
uucaagccgaagcauccaa

SEQ ID NO: 2421536 - RNA, 19 nt, Artificial Sequence
  Description of Artificial Sequence: Synthetic oligonucleotide
  Sense strand starting at position 2016 of SEQ ID NO: 1886699
gaugcuucggcuugaagga

SEQ ID NO: 2421537 - RNA, 19 nt, Artificial Sequence
  Description of Artificial Sequence: Synthetic oligonucleotide
  Antisense strand to SEQ ID NO: 2421536
uccuucaagccgaagcauc

SEQ ID NO: 2421538 - RNA, 19 nt, Artificial Sequence
  Description of Artificial Sequence: Synthetic oligonucleotide
  Sense strand starting at position 2228 of SEQ ID NO: 1886699
aauggagugcuuugagcuu

SEQ ID NO: 2421539 - RNA, 19 nt, Artificial Sequence
  Description of Artificial Sequence: Synthetic oligonucleotide
  Antisense strand to SEQ ID NO: 2421538
aagcucaaagcacuccauu

SEQ ID NO: 2421540 - RNA, 19 nt, Artificial Sequence
  Description of Artificial Sequence: Synthetic oligonucleotide
  Sense strand starting at position 2234 of SEQ ID NO: 1886699
gugcuuugagcuugugaug

SEQ ID NO: 2421541 - RNA, 19 nt, Artificial Sequence
  Description of Artificial Sequence: Synthetic oligonucleotide
  Antisense strand to SEQ ID NO: 2421540
caucacaagcucaaagcac

SEQ ID NO: 2421542 - RNA, 19 nt, Artificial Sequence
  Description of Artificial Sequence: Synthetic oligonucleotide
  Sense strand starting at position 2630 of SEQ ID NO: 1886699
cuugcugugcuuuaccaga

SEQ ID NO: 2421543 - RNA, 19 nt, Artificial Sequence
  Description of Artificial Sequence: Synthetic oligonucleotide
  Antisense strand to SEQ ID NO: 2421542
ucugguaaagcacagcaag

SEQ ID NO: 2421544 - RNA, 19 nt, Artificial Sequence
  Description of Artificial Sequence: Synthetic oligonucleotide
  Sense strand starting at position 2632 of SEQ ID NO: 1886699
ugcugugcuuuaccagaga

SEQ ID NO: 2421545 - RNA, 19 nt, Artificial Sequence
  Description of Artificial Sequence: Synthetic oligonucleotide
  Antisense strand to SEQ ID NO: 2421544
ucucugguaaagcacagca

SEQ ID NO: 2421546 - RNA, 19 nt, Artificial Sequence
  Description of Artificial Sequence: Synthetic oligonucleotide
  Sense strand starting at position 2635 of SEQ ID NO: 1886699
ugugcuuuaccagagaaug

SEQ ID NO: 2421547 - RNA, 19 nt, Artificial Sequence
  Description of Artificial Sequence: Synthetic oligonucleotide
  Antisense strand to SEQ ID NO: 2421546
cauucucugguaaagcaca

SEQ ID NO: 2421548 - RNA, 19 nt, Artificial Sequence
  Description of Artificial Sequence: Synthetic oligonucleotide
  Sense strand starting at position 3213 of SEQ ID NO: 1886699
cagacaugcuucugcugau

SEQ ID NO: 2421549 - RNA, 19 nt, Artificial Sequence
  Description of Artificial Sequence: Synthetic oligonucleotide
  Antisense strand to SEQ ID NO: 2421548
aucagcagaagcaugucug

SEQ ID NO: 2421550 - RNA, 19 nt, Artificial Sequence
  Description of Artificial Sequence: Synthetic oligonucleotide
  Sense strand starting at position 3283 of SEQ ID NO: 1886699
uggcacauuugauaacaaa

SEQ ID NO: 2421551 - RNA, 19 nt, Artificial Sequence
  Description of Artificial Sequence: Synthetic oligonucleotide
  Antisense strand to SEQ ID NO: 2421550
uuuguuaucaaaugugcca

SEQ ID NO: 2421552 - RNA, 19 nt, Artificial Sequence
  Description of Artificial Sequence: Synthetic oligonucleotide
  Sense strand starting at position 3334 of SEQ ID NO: 1886699
auucguaagugccugaaua

SEQ ID NO: 2421553 - RNA, 19 nt, Artificial Sequence
  Description of Artificial Sequence: Synthetic oligonucleotide
  Antisense strand to SEQ ID NO: 2421552
uauucaggcacuuacgaau

SEQ ID NO: 2421554 - RNA, 19 nt, Artificial Sequence
  Description of Artificial Sequence: Synthetic oligonucleotide
  Sense strand starting at position 3335 of SEQ ID NO: 1886699
uucguaagugccugaauaa

SEQ ID NO: 2421555 - RNA, 19 nt, Artificial Sequence
  Description of Artificial Sequence: Synthetic oligonucleotide
  Antisense strand to SEQ ID NO: 2421554
uuauucaggcacuuacgaa

SEQ ID NO: 2421556 - RNA, 19 nt, Artificial Sequence
  Description of Artificial Sequence: Synthetic oligonucleotide
  Sense strand starting at position 3336 of SEQ ID NO: 1886699
ucguaagugccugaauaaa

SEQ ID NO: 2421557 - RNA, 19 nt, Artificial Sequence
  Description of Artificial Sequence: Synthetic oligonucleotide
  Antisense strand to SEQ ID NO: 2421556
uuuauucaggcacuuacga

SEQ ID NO: 2421558 - RNA, 19 nt, Artificial Sequence
  Description of Artificial Sequence: Synthetic oligonucleotide
  Sense strand starting at position 3388 of SEQ ID NO: 1886699
agcuuauucgcaggccaaa

SEQ ID NO: 2421559 - RNA, 19 nt, Artificial Sequence
  Description of Artificial Sequence: Synthetic oligonucleotide
  Antisense strand to SEQ ID NO: 2421558
uuuggccugcgaauaagcu

SEQ ID NO: 2421560 - RNA, 19 nt, Artificial Sequence
  Description of Artificial Sequence: Synthetic oligonucleotide
  Sense strand starting at position 3401 of SEQ ID NO: 1886699
gccaaaugacauuacugca

SEQ ID NO: 2421561 - RNA, 19 nt, Artificial Sequence
  Description of Artificial Sequence: Synthetic oligonucleotide
  Antisense strand to SEQ ID NO: 2421560
ugcaguaaugucauuuggc

SEQ ID NO: 2421562 - RNA, 19 nt, Artificial Sequence
  Description of Artificial Sequence: Synthetic oligonucleotide
  Sense strand starting at position 3408 of SEQ ID NO: 1886699
gacauuacugcagagcauu

SEQ ID NO: 2421563 - RNA, 19 nt, Artificial Sequence
  Description of Artificial Sequence: Synthetic oligonucleotide
  Antisense strand to SEQ ID NO: 2421562
aaugcucugcaguaauguc

SEQ ID NO: 2421564 - RNA, 19 nt, Artificial Sequence
  Description of Artificial Sequence: Synthetic oligonucleotide
  Sense strand starting at position 3411 of SEQ ID NO: 1886699
auuacugcagagcauuaaa

SEQ ID NO: 2421565 - RNA, 19 nt, Artificial Sequence
  Description of Artificial Sequence: Synthetic oligonucleotide
  Antisense strand to SEQ ID NO: 2421564
uuuaaugcucugcaguaau

SEQ ID NO: 2421566 - RNA, 19 nt, Artificial Sequence
  Description of Artificial Sequence: Synthetic oligonucleotide
  Sense strand starting at position 3596 of SEQ ID NO: 1886699
cucagagaauuccgccuau

SEQ ID NO: 2421567 - RNA, 19 nt, Artificial Sequence
  Description of Artificial Sequence: Synthetic oligonucleotide
  Antisense strand to SEQ ID NO: 2421566
auaggcggaauucucugag

SEQ ID NO: 2421568 - RNA, 19 nt, Artificial Sequence
  Description of Artificial Sequence: Synthetic oligonucleotide
  Sense strand starting at position 3600 of SEQ ID NO: 1886699
gagaauuccgccuaugccu

SEQ ID NO: 2421569 - RNA, 19 nt, Artificial Sequence
  Description of Artificial Sequence: Synthetic oligonucleotide
  Antisense strand to SEQ ID NO: 2421568
aggcauaggcggaauucuc

SEQ ID NO: 2421570 - RNA, 19 nt, Artificial Sequence
  Description of Artificial Sequence: Synthetic oligonucleotide
  Sense strand starting at position 3829 of SEQ ID NO: 1886699
ggaacacacuggugacuua

SEQ ID NO: 2421571 - RNA, 19 nt, Artificial Sequence
  Description of Artificial Sequence: Synthetic oligonucleotide
  Antisense strand to SEQ ID NO: 2421570
uaagucaccaguguguucc

SEQ ID NO: 2421572 - RNA, 19 nt, Artificial Sequence
  Description of Artificial Sequence: Synthetic oligonucleotide
  Sense strand starting at position 3839 of SEQ ID NO: 1886699
ggugacuuacugcagcaga

SEQ ID NO: 2421573 - RNA, 19 nt, Artificial Sequence
  Description of Artificial Sequence: Synthetic oligonucleotide
  Antisense strand to SEQ ID NO: 2421572
ucugcugcaguaagucacc

SEQ ID NO: 2421574 - RNA, 19 nt, Artificial Sequence
  Description of Artificial Sequence: Synthetic oligonucleotide
  Sense strand starting at position 72 of SEQ ID NO: 1886700
cucaguguccucugagaug

SEQ ID NO: 2421575 - RNA, 19 nt, Artificial Sequence
  Description of Artificial Sequence: Synthetic oligonucleotide
  Antisense strand to SEQ ID NO: 2421574
caucucagaggacacugag

SEQ ID NO: 2421576 - RNA, 19 nt, Artificial Sequence
  Description of Artificial Sequence: Synthetic oligonucleotide
  Sense strand starting at position 101 of SEQ ID NO: 1886700
gggucccugccuuggagaa

SEQ ID NO: 2421577 - RNA, 19 nt, Artificial Sequence
  Description of Artificial Sequence: Synthetic oligonucleotide
  Antisense strand to SEQ ID NO: 2421576
uucuccaaggcagggaccc

SEQ ID NO: 2421578 - RNA, 19 nt, Artificial Sequence
  Description of Artificial Sequence: Synthetic oligonucleotide
  Sense strand starting at position 102 of SEQ ID NO: 1886700
ggucccugccuuggagaaa

SEQ ID NO: 2421579 - RNA, 19 nt, Artificial Sequence
  Description of Artificial Sequence: Synthetic oligonucleotide
  Antisense strand to SEQ ID NO: 2421578
uuucuccaaggcagggacc

SEQ ID NO: 2421580 - RNA, 19 nt, Artificial Sequence
  Description of Artificial Sequence: Synthetic oligonucleotide
  Sense strand starting at position 484 of SEQ ID NO: 1886700
acgccuugcuaguaauuua

SEQ ID NO: 2421581 - RNA, 19 nt, Artificial Sequence
  Description of Artificial Sequence: Synthetic oligonucleotide
  Antisense strand to SEQ ID NO: 2421580
uaaauuacuagcaaggcgu

SEQ ID NO: 2421582 - RNA, 19 nt, Artificial Sequence
  Description of Artificial Sequence: Synthetic oligonucleotide
  Sense strand starting at position 549 of SEQ ID NO: 1886700
ggcucaaucuccuggcuca

SEQ ID NO: 2421583 - RNA, 19 nt, Artificial Sequence
  Description of Artificial Sequence: Synthetic oligonucleotide
  Antisense strand to SEQ ID NO: 2421582
ugagccaggagauugagcc

SEQ ID NO: 2421584 - RNA, 19 nt, Artificial Sequence
  Description of Artificial Sequence: Synthetic oligonucleotide
  Sense strand starting at position 567 of SEQ ID NO: 1886700
aggugauucuccgguguca

SEQ ID NO: 2421585 - RNA, 19 nt, Artificial Sequence
  Description of Artificial Sequence: Synthetic oligonucleotide
  Antisense strand to SEQ ID NO: 2421584
ugacaccggagaaucaccu

SEQ ID NO: 2421586 - RNA, 19 nt, Artificial Sequence
  Description of Artificial Sequence: Synthetic oligonucleotide
  Sense strand starting at position 3363 of SEQ ID NO: 1886700
ccauucuucugagcauuga

SEQ ID NO: 2421587 - RNA, 19 nt, Artificial Sequence
  Description of Artificial Sequence: Synthetic oligonucleotide
  Antisense strand to SEQ ID NO: 2421586
ucaaugcucagaagaaugg

SEQ ID NO: 2421588 - RNA, 19 nt, Artificial Sequence
  Description of Artificial Sequence: Synthetic oligonucleotide
  Sense strand starting at position 3367 of SEQ ID NO: 1886700
ucuucugagcauugaugga

SEQ ID NO: 2421589 - RNA, 19 nt, Artificial Sequence
  Description of Artificial Sequence: Synthetic oligonucleotide
  Antisense strand to SEQ ID NO: 2421588
uccaucaaugcucagaaga

SEQ ID NO: 2421590 - RNA, 19 nt, Artificial Sequence
  Description of Artificial Sequence: Synthetic oligonucleotide
  Sense strand starting at position 3430 of SEQ ID NO: 1886700
cccugcuucgcagaaggaa

SEQ ID NO: 2421591 - RNA, 19 nt, Artificial Sequence
  Description of Artificial Sequence: Synthetic oligonucleotide
  Antisense strand to SEQ ID NO: 2421590
uuccuucugcgaagcaggg

SEQ ID NO: 2421592 - RNA, 19 nt, Artificial Sequence
  Description of Artificial Sequence: Synthetic oligonucleotide
  Sense strand starting at position 3903 of SEQ ID NO: 1886700
uguagacuuccagagccuu

SEQ ID NO: 2421593 - RNA, 19 nt, Artificial Sequence
  Description of Artificial Sequence: Synthetic oligonucleotide
  Antisense strand to SEQ ID NO: 2421592
aaggcucuggaagucuaca

SEQ ID NO: 2421594 - RNA, 19 nt, Artificial Sequence
  Description of Artificial Sequence: Synthetic oligonucleotide
  Sense strand starting at position 109 of SEQ ID NO: 1886702
gaugaagugggcugugaac

SEQ ID NO: 2421595 - RNA, 19 nt, Artificial Sequence
  Description of Artificial Sequence: Synthetic oligonucleotide
  Antisense strand to SEQ ID NO: 2421594
guucacagcccacuucauc

SEQ ID NO: 2421596 - RNA, 19 nt, Artificial Sequence
  Description of Artificial Sequence: Synthetic oligonucleotide
  Sense strand starting at position 379 of SEQ ID NO: 1886702
cagcaugaugcuuagucuu

SEQ ID NO: 2421597 - RNA, 19 nt, Artificial Sequence
  Description of Artificial Sequence: Synthetic oligonucleotide
  Antisense strand to SEQ ID NO: 2421596
aagacuaagcaucaugcug

SEQ ID NO: 2421598 - RNA, 19 nt, Artificial Sequence
  Description of Artificial Sequence: Synthetic oligonucleotide
  Sense strand starting at position 537 of SEQ ID NO: 1886702
agaugugcagcguuaguau

SEQ ID NO: 2421599 - RNA, 19 nt, Artificial Sequence
  Description of Artificial Sequence: Synthetic oligonucleotide
  Antisense strand to SEQ ID NO: 2421598
auacuaacgcugcacaucu

SEQ ID NO: 2421600 - RNA, 19 nt, Artificial Sequence
  Description of Artificial Sequence: Synthetic oligonucleotide
  Sense strand starting at position 669 of SEQ ID NO: 1886702
aaagcauagguccaugacu

SEQ ID NO: 2421601 - RNA, 19 nt, Artificial Sequence
  Description of Artificial Sequence: Synthetic oligonucleotide
  Antisense strand to SEQ ID NO: 2421600
agucauggaccuaugcuuu

SEQ ID NO: 2421602 - RNA, 19 nt, Artificial Sequence
  Description of Artificial Sequence: Synthetic oligonucleotide
  Sense strand starting at position 671 of SEQ ID NO: 1886702
agcauagguccaugacuga

SEQ ID NO: 2421603 - RNA, 19 nt, Artificial Sequence
  Description of Artificial Sequence: Synthetic oligonucleotide
  Antisense strand to SEQ ID NO: 2421602
ucagucauggaccuaugcu

SEQ ID NO: 2421604 - RNA, 19 nt, Artificial Sequence
  Description of Artificial Sequence: Synthetic oligonucleotide
  Sense strand starting at position 684 of SEQ ID NO: 1886702
gacugauuccugugcccuc

SEQ ID NO: 2421605 - RNA, 19 nt, Artificial Sequence
  Description of Artificial Sequence: Synthetic oligonucleotide
  Antisense strand to SEQ ID NO: 2421604
gagggcacaggaaucaguc

SEQ ID NO: 2421606 - RNA, 19 nt, Artificial Sequence
  Description of Artificial Sequence: Synthetic oligonucleotide
  Sense strand starting at position 687 of SEQ ID NO: 1886702
ugauuccugugcccucaua

SEQ ID NO: 2421607 - RNA, 19 nt, Artificial Sequence
  Description of Artificial Sequence: Synthetic oligonucleotide
  Antisense strand to SEQ ID NO: 2421606
uaugagggcacaggaauca

SEQ ID NO: 2421608 - RNA, 19 nt, Artificial Sequence
  Description of Artificial Sequence: Synthetic oligonucleotide
  Sense strand starting at position 809 of SEQ ID NO: 1886702
cugggucugaggugucuua

SEQ ID NO: 2421609 - RNA, 19 nt, Artificial Sequence
  Description of Artificial Sequence: Synthetic oligonucleotide
  Antisense strand to SEQ ID NO: 2421608
uaagacaccucagacccag

SEQ ID NO: 2421610 - RNA, 19 nt, Artificial Sequence
  Description of Artificial Sequence: Synthetic oligonucleotide
  Sense strand starting at position 1114 of SEQ ID NO: 1886702
gagagaucagagcaggcuu

SEQ ID NO: 2421611 - RNA, 19 nt, Artificial Sequence
  Description of Artificial Sequence: Synthetic oligonucleotide
  Antisense strand to SEQ ID NO: 2421610
aagccugcucugaucucuc

SEQ ID NO: 2421612 - RNA, 19 nt, Artificial Sequence
  Description of Artificial Sequence: Synthetic oligonucleotide
  Sense strand starting at position 1209 of SEQ ID NO: 1886702
uggcauuguucugucagga

SEQ ID NO: 2421613 - RNA, 19 nt, Artificial Sequence
  Description of Artificial Sequence: Synthetic oligonucleotide
  Antisense strand to SEQ ID NO: 2421612
uccugacagaacaaugcca

SEQ ID NO: 2421614 - RNA, 19 nt, Artificial Sequence
  Description of Artificial Sequence: Synthetic oligonucleotide
  Sense strand starting at position 1214 of SEQ ID NO: 1886702
uuguucugucaggagacaa

SEQ ID NO: 2421615 - RNA, 19 nt, Artificial Sequence
  Description of Artificial Sequence: Synthetic oligonucleotide
  Antisense strand to SEQ ID NO: 2421614
uugucuccugacagaacaa

SEQ ID NO: 2421616 - RNA, 19 nt, Artificial Sequence
  Description of Artificial Sequence: Synthetic oligonucleotide
  Sense strand starting at position 1249 of SEQ ID NO: 1886702
gugagagucuugccaugaa

SEQ ID NO: 2421617 - RNA, 19 nt, Artificial Sequence
  Description of Artificial Sequence: Synthetic oligonucleotide
  Antisense strand to SEQ ID NO: 2421616
uucauggcaagacucucac

SEQ ID NO: 2421618 - RNA, 19 nt, Artificial Sequence
  Description of Artificial Sequence: Synthetic oligonucleotide
  Sense strand starting at position 1376 of SEQ ID NO: 1886702
ugaggaaaguccucaagua

SEQ ID NO: 2421619 - RNA, 19 nt, Artificial Sequence
  Description of Artificial Sequence: Synthetic oligonucleotide
  Antisense strand to SEQ ID NO: 2421618
uacuugaggacuuuccuca

SEQ ID NO: 2421620 - RNA, 19 nt, Artificial Sequence
  Description of Artificial Sequence: Synthetic oligonucleotide
  Sense strand starting at position 1422 of SEQ ID NO: 1886702
gcucucuuggugucaguuu

SEQ ID NO: 2421621 - RNA, 19 nt, Artificial Sequence
  Description of Artificial Sequence: Synthetic oligonucleotide
  Antisense strand to SEQ ID NO: 2421620
aaacugacaccaagagagc

SEQ ID NO: 2421622 - RNA, 19 nt, Artificial Sequence
  Description of Artificial Sequence: Synthetic oligonucleotide
  Sense strand starting at position 1452 of SEQ ID NO: 1886702
gaauaaagauugggaauua

SEQ ID NO: 2421623 - RNA, 19 nt, Artificial Sequence
  Description of Artificial Sequence: Synthetic oligonucleotide
  Antisense strand to SEQ ID NO: 2421622
uaauucccaaucuuuauuc

SEQ ID NO: 2421624 - RNA, 19 nt, Artificial Sequence
  Description of Artificial Sequence: Synthetic oligonucleotide
  Sense strand starting at position 1529 of SEQ ID NO: 1886702
ugggaaguucgucauuggu

SEQ ID NO: 2421625 - RNA, 19 nt, Artificial Sequence
  Description of Artificial Sequence: Synthetic oligonucleotide
  Antisense strand to SEQ ID NO: 2421624
accaaugacgaacuuccca

SEQ ID NO: 2421626 - RNA, 19 nt, Artificial Sequence
  Description of Artificial Sequence: Synthetic oligonucleotide
  Sense strand starting at position 1531 of SEQ ID NO: 1886702
ggaaguucgucauuggucu

SEQ ID NO: 2421627 - RNA, 19 nt, Artificial Sequence
  Description of Artificial Sequence: Synthetic oligonucleotide
  Antisense strand to SEQ ID NO: 2421626
agaccaaugacgaacuucc

SEQ ID NO: 2421628 - RNA, 19 nt, Artificial Sequence
  Description of Artificial Sequence: Synthetic oligonucleotide
  Sense strand starting at position 1993 of SEQ ID NO: 1886702
auguucuauucugugguau

SEQ ID NO: 2421629 - RNA, 19 nt, Artificial Sequence
  Description of Artificial Sequence: Synthetic oligonucleotide
  Antisense strand to SEQ ID NO: 2421628
auaccacagaauagaacau

SEQ ID NO: 2421630 - RNA, 19 nt, Artificial Sequence
  Description of Artificial Sequence: Synthetic oligonucleotide
  Sense strand starting at position 1994 of SEQ ID NO: 1886702
uguucuauucugugguaug

SEQ ID NO: 2421631 - RNA, 19 nt, Artificial Sequence
  Description of Artificial Sequence: Synthetic oligonucleotide
  Antisense strand to SEQ ID NO: 2421630
cauaccacagaauagaaca

SEQ ID NO: 2421632 - RNA, 19 nt, Artificial Sequence
  Description of Artificial Sequence: Synthetic oligonucleotide
  Sense strand starting at position 2287 of SEQ ID NO: 1886702
ggcgcaggauccuccuuaa

SEQ ID NO: 2421633 - RNA, 19 nt, Artificial Sequence
  Description of Artificial Sequence: Synthetic oligonucleotide
  Antisense strand to SEQ ID NO: 2421632
uuaaggaggauccugcgcc

SEQ ID NO: 2421634 - RNA, 19 nt, Artificial Sequence
  Description of Artificial Sequence: Synthetic oligonucleotide
  Sense strand starting at position 2290 of SEQ ID NO: 1886702
gcaggauccuccuuaacgu

SEQ ID NO: 2421635 - RNA, 19 nt, Artificial Sequence
  Description of Artificial Sequence: Synthetic oligonucleotide
  Antisense strand to SEQ ID NO: 2421634
acguuaaggaggauccugc

SEQ ID NO: 2421636 - RNA, 19 nt, Artificial Sequence
  Description of Artificial Sequence: Synthetic oligonucleotide
  Sense strand starting at position 2379 of SEQ ID NO: 1886702
cgcggcgucccugcuauaa

SEQ ID NO: 2421637 - RNA, 19 nt, Artificial Sequence
  Description of Artificial Sequence: Synthetic oligonucleotide
  Antisense strand to SEQ ID NO: 2421636
uuauagcagggacgccgcg

SEQ ID NO: 2421638 - RNA, 19 nt, Artificial Sequence
  Description of Artificial Sequence: Synthetic oligonucleotide
  Sense strand starting at position 2625 of SEQ ID NO: 1886702
ccaugugaucuucgaccca

SEQ ID NO: 2421639 - RNA, 19 nt, Artificial Sequence
  Description of Artificial Sequence: Synthetic oligonucleotide
  Antisense strand to SEQ ID NO: 2421638
ugggucgaagaucacaugg

SEQ ID NO: 2421640 - RNA, 19 nt, Artificial Sequence
  Description of Artificial Sequence: Synthetic oligonucleotide
  Sense strand starting at position 2756 of SEQ ID NO: 1886702
cgaugugcauauuugcuua

SEQ ID NO: 2421641 - RNA, 19 nt, Artificial Sequence
  Description of Artificial Sequence: Synthetic oligonucleotide
  Antisense strand to SEQ ID NO: 2421640
uaagcaaauaugcacaucg

SEQ ID NO: 2421642 - RNA, 19 nt, Artificial Sequence
  Description of Artificial Sequence: Synthetic oligonucleotide
  Sense strand starting at position 2759 of SEQ ID NO: 1886702
ugugcauauuugcuuaagu

SEQ ID NO: 2421643 - RNA, 19 nt, Artificial Sequence
  Description of Artificial Sequence: Synthetic oligonucleotide
  Antisense strand to SEQ ID NO: 2421642
acuuaagcaaauaugcaca

SEQ ID NO: 2421644 - RNA, 19 nt, Artificial Sequence
  Description of Artificial Sequence: Synthetic oligonucleotide
  Sense strand starting at position 2760 of SEQ ID NO: 1886702
gugcauauuugcuuaaguc

SEQ ID NO: 2421645 - RNA, 19 nt, Artificial Sequence
  Description of Artificial Sequence: Synthetic oligonucleotide
  Antisense strand to SEQ ID NO: 2421644
gacuuaagcaaauaugcac

SEQ ID NO: 2421646 - RNA, 19 nt, Artificial Sequence
  Description of Artificial Sequence: Synthetic oligonucleotide
  Sense strand starting at position 2897 of SEQ ID NO: 1886702
acauuaaauuaggaagcau

SEQ ID NO: 2421647 - RNA, 19 nt, Artificial Sequence
  Description of Artificial Sequence: Synthetic oligonucleotide
  Antisense strand to SEQ ID NO: 2421646
augcuuccuaauuuaaugu

SEQ ID NO: 2421648 - RNA, 19 nt, Artificial Sequence
  Description of Artificial Sequence: Synthetic oligonucleotide
  Sense strand starting at position 2945 of SEQ ID NO: 1886702
cugacuauugccgagcuuu

SEQ ID NO: 2421649 - RNA, 19 nt, Artificial Sequence
  Description of Artificial Sequence: Synthetic oligonucleotide
  Antisense strand to SEQ ID NO: 2421648
aaagcucggcaauagucag

SEQ ID NO: 2421650 - RNA, 19 nt, Artificial Sequence
  Description of Artificial Sequence: Synthetic oligonucleotide
  Sense strand starting at position 3011 of SEQ ID NO: 1886702
ucagcaacccucgaggaua

SEQ ID NO: 2421651 - RNA, 19 nt, Artificial Sequence
  Description of Artificial Sequence: Synthetic oligonucleotide
  Antisense strand to SEQ ID NO: 2421650
uauccucgaggguugcuga

SEQ ID NO: 2421652 - RNA, 19 nt, Artificial Sequence
  Description of Artificial Sequence: Synthetic oligonucleotide
  Sense strand starting at position 3013 of SEQ ID NO: 1886702
agcaacccucgaggauaau

SEQ ID NO: 2421653 - RNA, 19 nt, Artificial Sequence
  Description of Artificial Sequence: Synthetic oligonucleotide
  Antisense strand to SEQ ID NO: 2421652
auuauccucgaggguugcu

SEQ ID NO: 2421654 - RNA, 19 nt, Artificial Sequence
  Description of Artificial Sequence: Synthetic oligonucleotide
  Sense strand starting at position 3014 of SEQ ID NO: 1886702
gcaacccucgaggauaaua

SEQ ID NO: 2421655 - RNA, 19 nt, Artificial Sequence
  Description of Artificial Sequence: Synthetic oligonucleotide
  Antisense strand to SEQ ID NO: 2421654
uauuauccucgaggguugc

SEQ ID NO: 2421656 - RNA, 19 nt, Artificial Sequence
  Description of Artificial Sequence: Synthetic oligonucleotide
  Sense strand starting at position 3022 of SEQ ID NO: 1886702
cgaggauaauacucuuuau

SEQ ID NO: 2421657 - RNA, 19 nt, Artificial Sequence
  Description of Artificial Sequence: Synthetic oligonucleotide
  Antisense strand to SEQ ID NO: 2421656
auaaagaguauuauccucg

SEQ ID NO: 2421658 - RNA, 19 nt, Artificial Sequence
  Description of Artificial Sequence: Synthetic oligonucleotide
  Sense strand starting at position 3084 of SEQ ID NO: 1886702
guaacuagcccggaacaga

SEQ ID NO: 2421659 - RNA, 19 nt, Artificial Sequence
  Description of Artificial Sequence: Synthetic oligonucleotide
  Antisense strand to SEQ ID NO: 2421658
ucuguuccgggcuaguuac

SEQ ID NO: 2421660 - RNA, 19 nt, Artificial Sequence
  Description of Artificial Sequence: Synthetic oligonucleotide
  Sense strand starting at position 3255 of SEQ ID NO: 1886702
ccacuuugucugcauggga

SEQ ID NO: 2421661 - RNA, 19 nt, Artificial Sequence
  Description of Artificial Sequence: Synthetic oligonucleotide
  Antisense strand to SEQ ID NO: 2421660
ucccaugcagacaaagugg

SEQ ID NO: 2421662 - RNA, 19 nt, Artificial Sequence
  Description of Artificial Sequence: Synthetic oligonucleotide
  Sense strand starting at position 3258 of SEQ ID NO: 1886702
cuuugucugcaugggagau

SEQ ID NO: 2421663 - RNA, 19 nt, Artificial Sequence
  Description of Artificial Sequence: Synthetic oligonucleotide
  Antisense strand to SEQ ID NO: 2421662
aucucccaugcagacaaag

SEQ ID NO: 2421664 - RNA, 19 nt, Artificial Sequence
  Description of Artificial Sequence: Synthetic oligonucleotide
  Sense strand starting at position 3437 of SEQ ID NO: 1886702
guacauagaguguacacua

SEQ ID NO: 2421665 - RNA, 19 nt, Artificial Sequence
  Description of Artificial Sequence: Synthetic oligonucleotide
  Antisense strand to SEQ ID NO: 2421664
uaguguacacucuauguac

SEQ ID NO: 2421666 - RNA, 19 nt, Artificial Sequence
  Description of Artificial Sequence: Synthetic oligonucleotide
  Sense strand starting at position 3442 of SEQ ID NO: 1886702
uagaguguacacuaagcaa

SEQ ID NO: 2421667 - RNA, 19 nt, Artificial Sequence
  Description of Artificial Sequence: Synthetic oligonucleotide
  Antisense strand to SEQ ID NO: 2421666
uugcuuaguguacacucua

SEQ ID NO: 2421668 - RNA, 19 nt, Artificial Sequence
  Description of Artificial Sequence: Synthetic oligonucleotide
  Sense strand starting at position 3791 of SEQ ID NO: 1886702
aacaaacguccaggucaau

SEQ ID NO: 2421669 - RNA, 19 nt, Artificial Sequence
  Description of Artificial Sequence: Synthetic oligonucleotide
  Antisense strand to SEQ ID NO: 2421668
auugaccuggacguuuguu

SEQ ID NO: 2421670 - RNA, 19 nt, Artificial Sequence
  Description of Artificial Sequence: Synthetic oligonucleotide
  Sense strand starting at position 3853 of SEQ ID NO: 1886702
cuuccauaucugcaagugu

SEQ ID NO: 2421671 - RNA, 19 nt, Artificial Sequence
  Description of Artificial Sequence: Synthetic oligonucleotide
  Antisense strand to SEQ ID NO: 2421670
acacuugcagauauggaag

SEQ ID NO: 2421672 - RNA, 19 nt, Artificial Sequence
  Description of Artificial Sequence: Synthetic oligonucleotide
  Sense strand starting at position 3864 of SEQ ID NO: 1886702
gcaagugugacugauucuu

SEQ ID NO: 2421673 - RNA, 19 nt, Artificial Sequence
  Description of Artificial Sequence: Synthetic oligonucleotide
  Antisense strand to SEQ ID NO: 2421672
aagaaucagucacacuugc

SEQ ID NO: 2421674 - RNA, 19 nt, Artificial Sequence
  Description of Artificial Sequence: Synthetic oligonucleotide
  Sense strand starting at position 262 of SEQ ID NO: 1886701
cagcaugaugcuuagucuu

SEQ ID NO: 2421675 - RNA, 19 nt, Artificial Sequence
  Description of Artificial Sequence: Synthetic oligonucleotide
  Antisense strand to SEQ ID NO: 2421674
aagacuaagcaucaugcug

SEQ ID NO: 2421676 - RNA, 19 nt, Artificial Sequence
  Description of Artificial Sequence: Synthetic oligonucleotide
  Sense strand starting at position 420 of SEQ ID NO: 1886701
agaugugcagcguuaguau

SEQ ID NO: 2421677 - RNA, 19 nt, Artificial Sequence
  Description of Artificial Sequence: Synthetic oligonucleotide
  Antisense strand to SEQ ID NO: 2421676
auacuaacgcugcacaucu

SEQ ID NO: 2421678 - RNA, 19 nt, Artificial Sequence
  Description of Artificial Sequence: Synthetic oligonucleotide
  Sense strand starting at position 552 of SEQ ID NO: 1886701
aaagcauagguccaugacu

SEQ ID NO: 2421679 - RNA, 19 nt, Artificial Sequence
  Description of Artificial Sequence: Synthetic oligonucleotide
  Antisense strand to SEQ ID NO: 2421678
agucauggaccuaugcuuu

SEQ ID NO: 2421680 - RNA, 19 nt, Artificial Sequence
  Description of Artificial Sequence: Synthetic oligonucleotide
  Sense strand starting at position 554 of SEQ ID NO: 1886701
agcauagguccaugacuga

SEQ ID NO: 2421681 - RNA, 19 nt, Artificial Sequence
  Description of Artificial Sequence: Synthetic oligonucleotide
  Antisense strand to SEQ ID NO: 2421680
ucagucauggaccuaugcu

SEQ ID NO: 2421682 - RNA, 19 nt, Artificial Sequence
  Description of Artificial Sequence: Synthetic oligonucleotide
  Sense strand starting at position 567 of SEQ ID NO: 1886701
gacugauuccugugcccuc

SEQ ID NO: 2421683 - RNA, 19 nt, Artificial Sequence
  Description of Artificial Sequence: Synthetic oligonucleotide
  Antisense strand to SEQ ID NO: 2421682
gagggcacaggaaucaguc

SEQ ID NO: 2421684 - RNA, 19 nt, Artificial Sequence
  Description of Artificial Sequence: Synthetic oligonucleotide
  Sense strand starting at position 570 of SEQ ID NO: 1886701
ugauuccugugcccucaua

SEQ ID NO: 2421685 - RNA, 19 nt, Artificial Sequence
  Description of Artificial Sequence: Synthetic oligonucleotide
  Antisense strand to SEQ ID NO: 2421684
uaugagggcacaggaauca

SEQ ID NO: 2421686 - RNA, 19 nt, Artificial Sequence
  Description of Artificial Sequence: Synthetic oligonucleotide
  Sense strand starting at position 692 of SEQ ID NO: 1886701
cugggucugaggugucuua

SEQ ID NO: 2421687 - RNA, 19 nt, Artificial Sequence
  Description of Artificial Sequence: Synthetic oligonucleotide
  Antisense strand to SEQ ID NO: 2421686
uaagacaccucagacccag

SEQ ID NO: 2421688 - RNA, 19 nt, Artificial Sequence
  Description of Artificial Sequence: Synthetic oligonucleotide
  Sense strand starting at position 997 of SEQ ID NO: 1886701
gagagaucagagcaggcuu

SEQ ID NO: 2421689 - RNA, 19 nt, Artificial Sequence
  Description of Artificial Sequence: Synthetic oligonucleotide
  Antisense strand to SEQ ID NO: 2421688
aagccugcucugaucucuc

SEQ ID NO: 2421690 - RNA, 19 nt, Artificial Sequence
  Description of Artificial Sequence: Synthetic oligonucleotide
  Sense strand starting at position 1092 of SEQ ID NO: 1886701
uggcauuguucugucagga

SEQ ID NO: 2421691 - RNA, 19 nt, Artificial Sequence
  Description of Artificial Sequence: Synthetic oligonucleotide
  Antisense strand to SEQ ID NO: 2421690
uccugacagaacaaugcca

SEQ ID NO: 2421692 - RNA, 19 nt, Artificial Sequence
  Description of Artificial Sequence: Synthetic oligonucleotide
  Sense strand starting at position 1097 of SEQ ID NO: 1886701
uuguucugucaggagacaa

SEQ ID NO: 2421693 - RNA, 19 nt, Artificial Sequence
  Description of Artificial Sequence: Synthetic oligonucleotide
  Antisense strand to SEQ ID NO: 2421692
uugucuccugacagaacaa

SEQ ID NO: 2421694 - RNA, 19 nt, Artificial Sequence
  Description of Artificial Sequence: Synthetic oligonucleotide
  Sense strand starting at position 1132 of SEQ ID NO: 1886701
gugagagucuugccaugaa

SEQ ID NO: 2421695 - RNA, 19 nt, Artificial Sequence
  Description of Artificial Sequence: Synthetic oligonucleotide
  Antisense strand to SEQ ID NO: 2421694
uucauggcaagacucucac

SEQ ID NO: 2421696 - RNA, 19 nt, Artificial Sequence
  Description of Artificial Sequence: Synthetic oligonucleotide
  Sense strand starting at position 1259 of SEQ ID NO: 1886701
ugaggaaaguccucaagua

SEQ ID NO: 2421697 - RNA, 19 nt, Artificial Sequence
  Description of Artificial Sequence: Synthetic oligonucleotide
  Antisense strand to SEQ ID NO: 2421696
uacuugaggacuuuccuca

SEQ ID NO: 2421698 - RNA, 19 nt, Artificial Sequence
  Description of Artificial Sequence: Synthetic oligonucleotide
  Sense strand starting at position 1305 of SEQ ID NO: 1886701
gcucucuuggugucaguuu

SEQ ID NO: 2421699 - RNA, 19 nt, Artificial Sequence
  Description of Artificial Sequence: Synthetic oligonucleotide
  Antisense strand to SEQ ID NO: 2421698
aaacugacaccaagagagc

SEQ ID NO: 2421700 - RNA, 19 nt, Artificial Sequence
  Description of Artificial Sequence: Synthetic oligonucleotide
  Sense strand starting at position 1335 of SEQ ID NO: 1886701
gaauaaagauugggaauua

SEQ ID NO: 2421701 - RNA, 19 nt, Artificial Sequence
  Description of Artificial Sequence: Synthetic oligonucleotide
  Antisense strand to SEQ ID NO: 2421700
uaauucccaaucuuuauuc

SEQ ID NO: 2421702 - RNA, 19 nt, Artificial Sequence
  Description of Artificial Sequence: Synthetic oligonucleotide
  Sense strand starting at position 1412 of SEQ ID NO: 1886701
ugggaaguucgucauuggu

SEQ ID NO: 2421703 - RNA, 19 nt, Artificial Sequence
  Description of Artificial Sequence: Synthetic oligonucleotide
  Antisense strand to SEQ ID NO: 2421702
accaaugacgaacuuccca

SEQ ID NO: 2421704 - RNA, 19 nt, Artificial Sequence
  Description of Artificial Sequence: Synthetic oligonucleotide
  Sense strand starting at position 1414 of SEQ ID NO: 1886701
ggaaguucgucauuggucu

SEQ ID NO: 2421705 - RNA, 19 nt, Artificial Sequence
  Description of Artificial Sequence: Synthetic oligonucleotide
  Antisense strand to SEQ ID NO: 2421704
agaccaaugacgaacuucc

SEQ ID NO: 2421706 - RNA, 19 nt, Artificial Sequence
  Description of Artificial Sequence: Synthetic oligonucleotide
  Sense strand starting at position 1876 of SEQ ID NO: 1886701
auguucuauucugugguau

SEQ ID NO: 2421707 - RNA, 19 nt, Artificial Sequence
  Description of Artificial Sequence: Synthetic oligonucleotide
  Antisense strand to SEQ ID NO: 2421706
auaccacagaauagaacau

SEQ ID NO: 2421708 - RNA, 19 nt, Artificial Sequence
  Description of Artificial Sequence: Synthetic oligonucleotide
  Sense strand starting at position 2170 of SEQ ID NO: 1886701
ggcgcaggauccuccuuaa

SEQ ID NO: 2421709 - RNA, 19 nt, Artificial Sequence
  Description of Artificial Sequence: Synthetic oligonucleotide
  Antisense strand to SEQ ID NO: 2421708
uuaaggaggauccugcgcc

SEQ ID NO: 2421710 - RNA, 19 nt, Artificial Sequence
  Description of Artificial Sequence: Synthetic oligonucleotide
  Sense strand starting at position 2173 of SEQ ID NO: 1886701
gcaggauccuccuuaacgu

SEQ ID NO: 2421711 - RNA, 19 nt, Artificial Sequence
  Description of Artificial Sequence: Synthetic oligonucleotide
  Antisense strand to SEQ ID NO: 2421710
acguuaaggaggauccugc

SEQ ID NO: 2421712 - RNA, 19 nt, Artificial Sequence
  Description of Artificial Sequence: Synthetic oligonucleotide
  Sense strand starting at position 2262 of SEQ ID NO: 1886701
cgcggcgucccugcuauaa

SEQ ID NO: 2421713 - RNA, 19 nt, Artificial Sequence
  Description of Artificial Sequence: Synthetic oligonucleotide
  Antisense strand to SEQ ID NO: 2421712
uuauagcagggacgccgcg

SEQ ID NO: 2421714 - RNA, 19 nt, Artificial Sequence
  Description of Artificial Sequence: Synthetic oligonucleotide
  Sense strand starting at position 2508 of SEQ ID NO: 1886701
ccaugugaucuucgaccca

SEQ ID NO: 2421715 - RNA, 19 nt, Artificial Sequence
  Description of Artificial Sequence: Synthetic oligonucleotide
  Antisense strand to SEQ ID NO: 2421714
ugggucgaagaucacaugg

SEQ ID NO: 2421716 - RNA, 19 nt, Artificial Sequence
  Description of Artificial Sequence: Synthetic oligonucleotide
  Sense strand starting at position 2639 of SEQ ID NO: 1886701
cgaugugcauauuugcuua

SEQ ID NO: 2421717 - RNA, 19 nt, Artificial Sequence
  Description of Artificial Sequence: Synthetic oligonucleotide
  Antisense strand to SEQ ID NO: 2421716
uaagcaaauaugcacaucg

SEQ ID NO: 2421718 - RNA, 19 nt, Artificial Sequence
  Description of Artificial Sequence: Synthetic oligonucleotide
  Sense strand starting at position 2642 of SEQ ID NO: 1886701
ugugcauauuugcuuaagu

SEQ ID NO: 2421719 - RNA, 19 nt, Artificial Sequence
  Description of Artificial Sequence: Synthetic oligonucleotide
  Antisense strand to SEQ ID NO: 2421718
acuuaagcaaauaugcaca

SEQ ID NO: 2421720 - RNA, 19 nt, Artificial Sequence
  Description of Artificial Sequence: Synthetic oligonucleotide
  Sense strand starting at position 2643 of SEQ ID NO: 1886701
gugcauauuugcuuaaguc

SEQ ID NO: 2421721 - RNA, 19 nt, Artificial Sequence
  Description of Artificial Sequence: Synthetic oligonucleotide
  Antisense strand to SEQ ID NO: 2421720
gacuuaagcaaauaugcac

SEQ ID NO: 2421722 - RNA, 19 nt, Artificial Sequence
  Description of Artificial Sequence: Synthetic oligonucleotide
  Sense strand starting at position 2780 of SEQ ID NO: 1886701
acauuaaauuaggaagcau

SEQ ID NO: 2421723 - RNA, 19 nt, Artificial Sequence
  Description of Artificial Sequence: Synthetic oligonucleotide
  Antisense strand to SEQ ID NO: 2421722
augcuuccuaauuuaaugu

SEQ ID NO: 2421724 - RNA, 19 nt, Artificial Sequence
  Description of Artificial Sequence: Synthetic oligonucleotide
  Sense strand starting at position 2828 of SEQ ID NO: 1886701
cugacuauugccgagcuuu

SEQ ID NO: 2421725 - RNA, 19 nt, Artificial Sequence
  Description of Artificial Sequence: Synthetic oligonucleotide
  Antisense strand to SEQ ID NO: 2421724
aaagcucggcaauagucag

SEQ ID NO: 2421726 - RNA, 19 nt, Artificial Sequence
  Description of Artificial Sequence: Synthetic oligonucleotide
  Sense strand starting at position 2894 of SEQ ID NO: 1886701
ucagcaacccucgaggaua

SEQ ID NO: 2421727 - RNA, 19 nt, Artificial Sequence
  Description of Artificial Sequence: Synthetic oligonucleotide
  Antisense strand to SEQ ID NO: 2421726
uauccucgaggguugcuga

SEQ ID NO: 2421728 - RNA, 19 nt, Artificial Sequence
  Description of Artificial Sequence: Synthetic oligonucleotide
  Sense strand starting at position 2896 of SEQ ID NO: 1886701
agcaacccucgaggauaau

SEQ ID NO: 2421729 - RNA, 19 nt, Artificial Sequence
  Description of Artificial Sequence: Synthetic oligonucleotide
  Antisense strand to SEQ ID NO: 2421728
auuauccucgaggguugcu

SEQ ID NO: 2421730 - RNA, 19 nt, Artificial Sequence
  Description of Artificial Sequence: Synthetic oligonucleotide
  Sense strand starting at position 2897 of SEQ ID NO: 1886701
gcaacccucgaggauaaua

SEQ ID NO: 2421731 - RNA, 19 nt, Artificial Sequence
  Description of Artificial Sequence: Synthetic oligonucleotide
  Antisense strand to SEQ ID NO: 2421730
uauuauccucgaggguugc

SEQ ID NO: 2421732 - RNA, 19 nt, Artificial Sequence
  Description of Artificial Sequence: Synthetic oligonucleotide
  Sense strand starting at position 2905 of SEQ ID NO: 1886701
cgaggauaauacucuuuau

SEQ ID NO: 2421733 - RNA, 19 nt, Artificial Sequence
  Description of Artificial Sequence: Synthetic oligonucleotide
  Antisense strand to SEQ ID NO: 2421732
auaaagaguauuauccucg

SEQ ID NO: 2421734 - RNA, 19 nt, Artificial Sequence
  Description of Artificial Sequence: Synthetic oligonucleotide
  Sense strand starting at position 2967 of SEQ ID NO: 1886701
guaacuagcccggaacaga

SEQ ID NO: 2421735 - RNA, 19 nt, Artificial Sequence
  Description of Artificial Sequence: Synthetic oligonucleotide
  Antisense strand to SEQ ID NO: 2421734
ucuguuccgggcuaguuac

SEQ ID NO: 2421736 - RNA, 19 nt, Artificial Sequence
  Description of Artificial Sequence: Synthetic oligonucleotide
  Sense strand starting at position 3138 of SEQ ID NO: 1886701
ccacuuugucugcauggga

SEQ ID NO: 2421737 - RNA, 19 nt, Artificial Sequence
  Description of Artificial Sequence: Synthetic oligonucleotide
  Antisense strand to SEQ ID NO: 2421736
ucccaugcagacaaagugg

SEQ ID NO: 2421738 - RNA, 19 nt, Artificial Sequence
  Description of Artificial Sequence: Synthetic oligonucleotide
  Sense strand starting at position 3141 of SEQ ID NO: 1886701
cuuugucugcaugggagau

SEQ ID NO: 2421739 - RNA, 19 nt, Artificial Sequence
  Description of Artificial Sequence: Synthetic oligonucleotide
  Antisense strand to SEQ ID NO: 2421738
aucucccaugcagacaaag

SEQ ID NO: 2421740 - RNA, 19 nt, Artificial Sequence
  Description of Artificial Sequence: Synthetic oligonucleotide
  Sense strand starting at position 3320 of SEQ ID NO: 1886701
guacauagaguguacacua

SEQ ID NO: 2421741 - RNA, 19 nt, Artificial Sequence
  Description of Artificial Sequence: Synthetic oligonucleotide
  Antisense strand to SEQ ID NO: 2421740
uaguguacacucuauguac

SEQ ID NO: 2421742 - RNA, 19 nt, Artificial Sequence
  Description of Artificial Sequence: Synthetic oligonucleotide
  Sense strand starting at position 3325 of SEQ ID NO: 1886701
uagaguguacacuaagcaa

SEQ ID NO: 2421743 - RNA, 19 nt, Artificial Sequence
  Description of Artificial Sequence: Synthetic oligonucleotide
  Antisense strand to SEQ ID NO: 2421742
uugcuuaguguacacucua

SEQ ID NO: 2421744 - RNA, 19 nt, Artificial Sequence
  Description of Artificial Sequence: Synthetic oligonucleotide
  Sense strand starting at position 3674 of SEQ ID NO: 1886701
aacaaacguccaggucaau

SEQ ID NO: 2421745 - RNA, 19 nt, Artificial Sequence
  Description of Artificial Sequence: Synthetic oligonucleotide
  Antisense strand to SEQ ID NO: 2421744
auugaccuggacguuuguu

SEQ ID NO: 2421746 - RNA, 19 nt, Artificial Sequence
  Description of Artificial Sequence: Synthetic oligonucleotide
  Sense strand starting at position 3736 of SEQ ID NO: 1886701
cuuccauaucugcaagugu

SEQ ID NO: 2421747 - RNA, 19 nt, Artificial Sequence
  Description of Artificial Sequence: Synthetic oligonucleotide
  Antisense strand to SEQ ID NO: 2421746
acacuugcagauauggaag

SEQ ID NO: 2421748 - RNA, 19 nt, Artificial Sequence
  Description of Artificial Sequence: Synthetic oligonucleotide
  Sense strand starting at position 3747 of SEQ ID NO: 1886701
gcaagugugacugauucuu

SEQ ID NO: 2421749 - RNA, 19 nt, Artificial Sequence
  Description of Artificial Sequence: Synthetic oligonucleotide
  Antisense strand to SEQ ID NO: 2421748
aagaaucagucacacuugc

SEQ ID NO: 2421750 - RNA, 19 nt, Artificial Sequence
  Description of Artificial Sequence: Synthetic oligonucleotide
  Sense strand starting at position 3888 of SEQ ID NO: 1886701
ugcauuuguuaugcagaca

SEQ ID NO: 2421751 - RNA, 19 nt, Artificial Sequence
  Description of Artificial Sequence: Synthetic oligonucleotide
  Antisense strand to SEQ ID NO: 2421750
ugucugcauaacaaaugca

SEQ ID NO: 2421752 - RNA, 19 nt, Artificial Sequence
  Description of Artificial Sequence: Synthetic oligonucleotide
  Sense strand starting at position 3944 of SEQ ID NO: 1886701
gauccuuauuuguggacua

SEQ ID NO: 2421753 - RNA, 19 nt, Artificial Sequence
  Description of Artificial Sequence: Synthetic oligonucleotide
  Antisense strand to SEQ ID NO: 2421752
uaguccacaaauaaggauc

SEQ ID NO: 2421754 - RNA, 19 nt, Artificial Sequence
  Description of Artificial Sequence: Synthetic oligonucleotide
  Sense strand starting at position 81 of SEQ ID NO: 1886703
agagacagguaaugugauu

SEQ ID NO: 2421755 - RNA, 19 nt, Artificial Sequence
  Description of Artificial Sequence: Synthetic oligonucleotide
  Antisense strand to SEQ ID NO: 2421754
aaucacauuaccugucucu

SEQ ID NO: 2421756 - RNA, 19 nt, Artificial Sequence
  Description of Artificial Sequence: Synthetic oligonucleotide
  Sense strand starting at position 88 of SEQ ID NO: 1886703
gguaaugugauuugucuua

SEQ ID NO: 2421757 - RNA, 19 nt, Artificial Sequence
  Description of Artificial Sequence: Synthetic oligonucleotide
  Antisense strand to SEQ ID NO: 2421756
uaagacaaaucacauuacc

SEQ ID NO: 2421758 - RNA, 19 nt, Artificial Sequence
  Description of Artificial Sequence: Synthetic oligonucleotide
  Sense strand starting at position 93 of SEQ ID NO: 1886703
ugugauuugucuuaaggca

SEQ ID NO: 2421759 - RNA, 19 nt, Artificial Sequence
  Description of Artificial Sequence: Synthetic oligonucleotide
  Antisense strand to SEQ ID NO: 2421758
ugccuuaagacaaaucaca

SEQ ID NO: 2421760 - RNA, 19 nt, Artificial Sequence
  Description of Artificial Sequence: Synthetic oligonucleotide
  Sense strand starting at position 112 of SEQ ID NO: 1886703
cucaguguguaaggugaua

SEQ ID NO: 2421761 - RNA, 19 nt, Artificial Sequence
  Description of Artificial Sequence: Synthetic oligonucleotide
  Antisense strand to SEQ ID NO: 2421760
uaucaccuuacacacugag

SEQ ID NO: 2421762 - RNA, 19 nt, Artificial Sequence
  Description of Artificial Sequence: Synthetic oligonucleotide
  Sense strand starting at position 156 of SEQ ID NO: 1886703
cuggacucucaaugcaauu

SEQ ID NO: 2421763 - RNA, 19 nt, Artificial Sequence
  Description of Artificial Sequence: Synthetic oligonucleotide
  Antisense strand to SEQ ID NO: 2421762
aauugcauugagaguccag

SEQ ID NO: 2421764 - RNA, 19 nt, Artificial Sequence
  Description of Artificial Sequence: Synthetic oligonucleotide
  Sense strand starting at position 184 of SEQ ID NO: 1886703
agcucuguuggguaucaga

SEQ ID NO: 2421765 - RNA, 19 nt, Artificial Sequence
  Description of Artificial Sequence: Synthetic oligonucleotide
  Antisense strand to SEQ ID NO: 2421764
ucugauacccaacagagcu

SEQ ID NO: 2421766 - RNA, 19 nt, Artificial Sequence
  Description of Artificial Sequence: Synthetic oligonucleotide
  Sense strand starting at position 579 of SEQ ID NO: 1886703
gauggugugcucugugaga

SEQ ID NO: 2421767 - RNA, 19 nt, Artificial Sequence
  Description of Artificial Sequence: Synthetic oligonucleotide
  Antisense strand to SEQ ID NO: 2421766
ucucacagagcacaccauc

SEQ ID NO: 2421768 - RNA, 19 nt, Artificial Sequence
  Description of Artificial Sequence: Synthetic oligonucleotide
  Sense strand starting at position 581 of SEQ ID NO: 1886703
uggugugcucugugagaca

SEQ ID NO: 2421769 - RNA, 19 nt, Artificial Sequence
  Description of Artificial Sequence: Synthetic oligonucleotide
  Antisense strand to SEQ ID NO: 2421768
ugucucacagagcacacca

SEQ ID NO: 2421770 - RNA, 19 nt, Artificial Sequence
  Description of Artificial Sequence: Synthetic oligonucleotide
  Sense strand starting at position 590 of SEQ ID NO: 1886703
cugugagacaaugguggau

SEQ ID NO: 2421771 - RNA, 19 nt, Artificial Sequence
  Description of Artificial Sequence: Synthetic oligonucleotide
  Antisense strand to SEQ ID NO: 2421770
auccaccauugucucacag

SEQ ID NO: 2421772 - RNA, 19 nt, Artificial Sequence
  Description of Artificial Sequence: Synthetic oligonucleotide
  Sense strand starting at position 602 of SEQ ID NO: 1886703
gguggaucuuuggagugag

SEQ ID NO: 2421773 - RNA, 19 nt, Artificial Sequence
  Description of Artificial Sequence: Synthetic oligonucleotide
  Antisense strand to SEQ ID NO: 2421772
cucacuccaaagauccacc

SEQ ID NO: 2421774 - RNA, 19 nt, Artificial Sequence
  Description of Artificial Sequence: Synthetic oligonucleotide
  Sense strand starting at position 603 of SEQ ID NO: 1886703
guggaucuuuggagugaga

SEQ ID NO: 2421775 - RNA, 19 nt, Artificial Sequence
  Description of Artificial Sequence: Synthetic oligonucleotide
  Antisense strand to SEQ ID NO: 2421774
ucucacuccaaagauccac

SEQ ID NO: 2421776 - RNA, 19 nt, Artificial Sequence
  Description of Artificial Sequence: Synthetic oligonucleotide
  Sense strand starting at position 605 of SEQ ID NO: 1886703
ggaucuuuggagugagagc

SEQ ID NO: 2421777 - RNA, 19 nt, Artificial Sequence
  Description of Artificial Sequence: Synthetic oligonucleotide
  Antisense strand to SEQ ID NO: 2421776
gcucucacuccaaagaucc

SEQ ID NO: 2421778 - RNA, 19 nt, Artificial Sequence
  Description of Artificial Sequence: Synthetic oligonucleotide
  Sense strand starting at position 616 of SEQ ID NO: 1886703
gugagagccuuccugugaa

SEQ ID NO: 2421779 - RNA, 19 nt, Artificial Sequence
  Description of Artificial Sequence: Synthetic oligonucleotide
  Antisense strand to SEQ ID NO: 2421778
uucacaggaaggcucucac

SEQ ID NO: 2421780 - RNA, 19 nt, Artificial Sequence
  Description of Artificial Sequence: Synthetic oligonucleotide
  Sense strand starting at position 757 of SEQ ID NO: 1886703
aagaaucaggucugugguu

SEQ ID NO: 2421781 - RNA, 19 nt, Artificial Sequence
  Description of Artificial Sequence: Synthetic oligonucleotide
  Antisense strand to SEQ ID NO: 2421780
aaccacagaccugauucuu

SEQ ID NO: 2421782 - RNA, 19 nt, Artificial Sequence
  Description of Artificial Sequence: Synthetic oligonucleotide
  Sense strand starting at position 784 of SEQ ID NO: 1886703
gguacauucuugugaccuc

SEQ ID NO: 2421783 - RNA, 19 nt, Artificial Sequence
  Description of Artificial Sequence: Synthetic oligonucleotide
  Antisense strand to SEQ ID NO: 2421782
gaggucacaagaauguacc

SEQ ID NO: 2421784 - RNA, 19 nt, Artificial Sequence
  Description of Artificial Sequence: Synthetic oligonucleotide
  Sense strand starting at position 785 of SEQ ID NO: 1886703
guacauucuugugaccuca

SEQ ID NO: 2421785 - RNA, 19 nt, Artificial Sequence
  Description of Artificial Sequence: Synthetic oligonucleotide
  Antisense strand to SEQ ID NO: 2421784
ugaggucacaagaauguac

SEQ ID NO: 2421786 - RNA, 19 nt, Artificial Sequence
  Description of Artificial Sequence: Synthetic oligonucleotide
  Sense strand starting at position 787 of SEQ ID NO: 1886703
acauucuugugaccucagu

SEQ ID NO: 2421787 - RNA, 19 nt, Artificial Sequence
  Description of Artificial Sequence: Synthetic oligonucleotide
  Antisense strand to SEQ ID NO: 2421786
acugaggucacaagaaugu

SEQ ID NO: 2421788 - RNA, 19 nt, Artificial Sequence
  Description of Artificial Sequence: Synthetic oligonucleotide
  Sense strand starting at position 811 of SEQ ID NO: 1886703
cauuguuaagaaugaaggu

SEQ ID NO: 2421789 - RNA, 19 nt, Artificial Sequence
  Description of Artificial Sequence: Synthetic oligonucleotide
  Antisense strand to SEQ ID NO: 2421788
accuucauucuuaacaaug

SEQ ID NO: 2421790 - RNA, 19 nt, Artificial Sequence
  Description of Artificial Sequence: Synthetic oligonucleotide
  Sense strand starting at position 824 of SEQ ID NO: 1886703
gaagguuggguaggaauca

SEQ ID NO: 2421791 - RNA, 19 nt, Artificial Sequence
  Description of Artificial Sequence: Synthetic oligonucleotide
  Antisense strand to SEQ ID NO: 2421790
ugauuccuacccaaccuuc

SEQ ID NO: 2421792 - RNA, 19 nt, Artificial Sequence
  Description of Artificial Sequence: Synthetic oligonucleotide
  Sense strand starting at position 933 of SEQ ID NO: 1886703
ugagaucccuccucugacu

SEQ ID NO: 2421793 - RNA, 19 nt, Artificial Sequence
  Description of Artificial Sequence: Synthetic oligonucleotide
  Antisense strand to SEQ ID NO: 2421792
agucagaggagggaucuca

SEQ ID NO: 2421794 - RNA, 19 nt, Artificial Sequence
  Description of Artificial Sequence: Synthetic oligonucleotide
  Sense strand starting at position 1128 of SEQ ID NO: 1886703
cugcucagugcaugggaaa

SEQ ID NO: 2421795 - RNA, 19 nt, Artificial Sequence
  Description of Artificial Sequence: Synthetic oligonucleotide
  Antisense strand to SEQ ID NO: 2421794
uuucccaugcacugagcag

SEQ ID NO: 2421796 - RNA, 19 nt, Artificial Sequence
  Description of Artificial Sequence: Synthetic oligonucleotide
  Sense strand starting at position 1303 of SEQ ID NO: 1886703
agcucuaaugcuggacaga

SEQ ID NO: 2421797 - RNA, 19 nt, Artificial Sequence
  Description of Artificial Sequence: Synthetic oligonucleotide
  Antisense strand to SEQ ID NO: 2421796
ucuguccagcauuagagcu

SEQ ID NO: 2421798 - RNA, 19 nt, Artificial Sequence
  Description of Artificial Sequence: Synthetic oligonucleotide
  Sense strand starting at position 1732 of SEQ ID NO: 1886703
cauuccaagugguaaugaa

SEQ ID NO: 2421799 - RNA, 19 nt, Artificial Sequence
  Description of Artificial Sequence: Synthetic oligonucleotide
  Antisense strand to SEQ ID NO: 2421798
uucauuaccacuuggaaug

SEQ ID NO: 2421800 - RNA, 19 nt, Artificial Sequence
  Description of Artificial Sequence: Synthetic oligonucleotide
  Sense strand starting at position 1769 of SEQ ID NO: 1886703
acacgagaagugcaaagua

SEQ ID NO: 2421801 - RNA, 19 nt, Artificial Sequence
  Description of Artificial Sequence: Synthetic oligonucleotide
  Antisense strand to SEQ ID NO: 2421800
uacuuugcacuucucgugu

SEQ ID NO: 2421802 - RNA, 19 nt, Artificial Sequence
  Description of Artificial Sequence: Synthetic oligonucleotide
  Sense strand starting at position 1885 of SEQ ID NO: 1886703
cccgguaucccuuacuagu

SEQ ID NO: 2421803 - RNA, 19 nt, Artificial Sequence
  Description of Artificial Sequence: Synthetic oligonucleotide
  Antisense strand to SEQ ID NO: 2421802
acuaguaagggauaccggg

SEQ ID NO: 2421804 - RNA, 19 nt, Artificial Sequence
  Description of Artificial Sequence: Synthetic oligonucleotide
  Sense strand starting at position 2402 of SEQ ID NO: 1886703
gagugagcagugugcagau

SEQ ID NO: 2421805 - RNA, 19 nt, Artificial Sequence
  Description of Artificial Sequence: Synthetic oligonucleotide
  Antisense strand to SEQ ID NO: 2421804
aucugcacacugcucacuc

SEQ ID NO: 2421806 - RNA, 19 nt, Artificial Sequence
  Description of Artificial Sequence: Synthetic oligonucleotide
  Sense strand starting at position 2415 of SEQ ID NO: 1886703
gcagaugagccauggugga

SEQ ID NO: 2421807 - RNA, 19 nt, Artificial Sequence
  Description of Artificial Sequence: Synthetic oligonucleotide
  Antisense strand to SEQ ID NO: 2421806
uccaccauggcucaucugc

SEQ ID NO: 2421808 - RNA, 19 nt, Artificial Sequence
  Description of Artificial Sequence: Synthetic oligonucleotide
  Sense strand starting at position 2585 of SEQ ID NO: 1886703
cgggcacauuugucaguuu

SEQ ID NO: 2421809 - RNA, 19 nt, Artificial Sequence
  Description of Artificial Sequence: Synthetic oligonucleotide
  Antisense strand to SEQ ID NO: 2421808
aaacugacaaaugugcccg

SEQ ID NO: 2421810 - RNA, 19 nt, Artificial Sequence
  Description of Artificial Sequence: Synthetic oligonucleotide
  Sense strand starting at position 2588 of SEQ ID NO: 1886703
gcacauuugucaguuuccu

SEQ ID NO: 2421811 - RNA, 19 nt, Artificial Sequence
  Description of Artificial Sequence: Synthetic oligonucleotide
  Antisense strand to SEQ ID NO: 2421810
aggaaacugacaaaugugc

SEQ ID NO: 2421812 - RNA, 19 nt, Artificial Sequence
  Description of Artificial Sequence: Synthetic oligonucleotide
  Sense strand starting at position 2613 of SEQ ID NO: 1886703
cauauaguucuccgggacu

SEQ ID NO: 2421813 - RNA, 19 nt, Artificial Sequence
  Description of Artificial Sequence: Synthetic oligonucleotide
  Antisense strand to SEQ ID NO: 2421812
agucccggagaacuauaug

SEQ ID NO: 2421814 - RNA, 19 nt, Artificial Sequence
  Description of Artificial Sequence: Synthetic oligonucleotide
  Sense strand starting at position 2615 of SEQ ID NO: 1886703
uauaguucuccgggacuuu

SEQ ID NO: 2421815 - RNA, 19 nt, Artificial Sequence
  Description of Artificial Sequence: Synthetic oligonucleotide
  Antisense strand to SEQ ID NO: 2421814
aaagucccggagaacuaua

SEQ ID NO: 2421816 - RNA, 19 nt, Artificial Sequence
  Description of Artificial Sequence: Synthetic oligonucleotide
  Sense strand starting at position 2698 of SEQ ID NO: 1886703
ggaugacuuuaggugacau

SEQ ID NO: 2421817 - RNA, 19 nt, Artificial Sequence
  Description of Artificial Sequence: Synthetic oligonucleotide
  Antisense strand to SEQ ID NO: 2421816
augucaccuaaagucaucc

SEQ ID NO: 2421818 - RNA, 19 nt, Artificial Sequence
  Description of Artificial Sequence: Synthetic oligonucleotide
  Sense strand starting at position 2726 of SEQ ID NO: 1886703
gcggucaaucaaggagaga

SEQ ID NO: 2421819 - RNA, 19 nt, Artificial Sequence
  Description of Artificial Sequence: Synthetic oligonucleotide
  Antisense strand to SEQ ID NO: 2421818
ucucuccuugauugaccgc

SEQ ID NO: 2421820 - RNA, 19 nt, Artificial Sequence
  Description of Artificial Sequence: Synthetic oligonucleotide
  Sense strand starting at position 2763 of SEQ ID NO: 1886703
auguucuuaucauguaaca

SEQ ID NO: 2421821 - RNA, 19 nt, Artificial Sequence
  Description of Artificial Sequence: Synthetic oligonucleotide
  Antisense strand to SEQ ID NO: 2421820
uguuacaugauaagaacau

SEQ ID NO: 2421822 - RNA, 19 nt, Artificial Sequence
  Description of Artificial Sequence: Synthetic oligonucleotide
  Sense strand starting at position 2852 of SEQ ID NO: 1886703
ucacuugcauccuugugaa

SEQ ID NO: 2421823 - RNA, 19 nt, Artificial Sequence
  Description of Artificial Sequence: Synthetic oligonucleotide
  Antisense strand to SEQ ID NO: 2421822
uucacaaggaugcaaguga

SEQ ID NO: 2421824 - RNA, 19 nt, Artificial Sequence
  Description of Artificial Sequence: Synthetic oligonucleotide
  Sense strand starting at position 2855 of SEQ ID NO: 1886703
cuugcauccuugugaagag

SEQ ID NO: 2421825 - RNA, 19 nt, Artificial Sequence
  Description of Artificial Sequence: Synthetic oligonucleotide
  Antisense strand to SEQ ID NO: 2421824
cucuucacaaggaugcaag

SEQ ID NO: 2421826 - RNA, 19 nt, Artificial Sequence
  Description of Artificial Sequence: Synthetic oligonucleotide
  Sense strand starting at position 3485 of SEQ ID NO: 1886703
cgcccuaacugaucaaugu

SEQ ID NO: 2421827 - RNA, 19 nt, Artificial Sequence
  Description of Artificial Sequence: Synthetic oligonucleotide
  Antisense strand to SEQ ID NO: 2421826
acauugaucaguuagggcg

SEQ ID NO: 2421828 - RNA, 19 nt, Artificial Sequence
  Description of Artificial Sequence: Synthetic oligonucleotide
  Sense strand starting at position 3486 of SEQ ID NO: 1886703
gcccuaacugaucaaugua

SEQ ID NO: 2421829 - RNA, 19 nt, Artificial Sequence
  Description of Artificial Sequence: Synthetic oligonucleotide
  Antisense strand to SEQ ID NO: 2421828
uacauugaucaguuagggc

SEQ ID NO: 2421830 - RNA, 19 nt, Artificial Sequence
  Description of Artificial Sequence: Synthetic oligonucleotide
  Sense strand starting at position 3932 of SEQ ID NO: 1886703
uucucuauugcugguaauc

SEQ ID NO: 2421831 - RNA, 19 nt, Artificial Sequence
  Description of Artificial Sequence: Synthetic oligonucleotide
  Antisense strand to SEQ ID NO: 2421830
gauuaccagcaauagagaa

SEQ ID NO: 2421832 - RNA, 19 nt, Artificial Sequence
  Description of Artificial Sequence: Synthetic oligonucleotide
  Sense strand starting at position 3934 of SEQ ID NO: 1886703
cucuauugcugguaaucuu

SEQ ID NO: 2421833 - RNA, 19 nt, Artificial Sequence
  Description of Artificial Sequence: Synthetic oligonucleotide
  Antisense strand to SEQ ID NO: 2421832
aagauuaccagcaauagag

SEQ ID NO: 2421834 - RNA, 19 nt, Artificial Sequence
  Description of Artificial Sequence: Synthetic oligonucleotide
  Sense strand starting at position 150 of SEQ ID NO: 1886704
cacucuuuaccaugggaug

SEQ ID NO: 2421835 - RNA, 19 nt, Artificial Sequence
  Description of Artificial Sequence: Synthetic oligonucleotide
  Antisense strand to SEQ ID NO: 2421834
caucccaugguaaagagug

SEQ ID NO: 2421836 - RNA, 19 nt, Artificial Sequence
  Description of Artificial Sequence: Synthetic oligonucleotide
  Sense strand starting at position 168 of SEQ ID NO: 1886704
ggcaccaagucauucuuua

SEQ ID NO: 2421837 - RNA, 19 nt, Artificial Sequence
  Description of Artificial Sequence: Synthetic oligonucleotide
  Antisense strand to SEQ ID NO: 2421836
uaaagaaugacuuggugcc

SEQ ID NO: 2421838 - RNA, 19 nt, Artificial Sequence
  Description of Artificial Sequence: Synthetic oligonucleotide
  Sense strand starting at position 172 of SEQ ID NO: 1886704
ccaagucauucuuuaggga

SEQ ID NO: 2421839 - RNA, 19 nt, Artificial Sequence
  Description of Artificial Sequence: Synthetic oligonucleotide
  Antisense strand to SEQ ID NO: 2421838
ucccuaaagaaugacuugg

SEQ ID NO: 2421840 - RNA, 19 nt, Artificial Sequence
  Description of Artificial Sequence: Synthetic oligonucleotide
  Sense strand starting at position 177 of SEQ ID NO: 1886704
ucauucuuuagggaugugu

SEQ ID NO: 2421841 - RNA, 19 nt, Artificial Sequence
  Description of Artificial Sequence: Synthetic oligonucleotide
  Antisense strand to SEQ ID NO: 2421840
acacaucccuaaagaauga

SEQ ID NO: 2421842 - RNA, 19 nt, Artificial Sequence
  Description of Artificial Sequence: Synthetic oligonucleotide
  Sense strand starting at position 186 of SEQ ID NO: 1886704
agggauguguccucaugac

SEQ ID NO: 2421843 - RNA, 19 nt, Artificial Sequence
  Description of Artificial Sequence: Synthetic oligonucleotide
  Antisense strand to SEQ ID NO: 2421842
gucaugaggacacaucccu

SEQ ID NO: 2421844 - RNA, 19 nt, Artificial Sequence
  Description of Artificial Sequence: Synthetic oligonucleotide
  Sense strand starting at position 413 of SEQ ID NO: 1886704
gaaguuucugugccacguu

SEQ ID NO: 2421845 - RNA, 19 nt, Artificial Sequence
  Description of Artificial Sequence: Synthetic oligonucleotide
  Antisense strand to SEQ ID NO: 2421844
aacguggcacagaaacuuc

SEQ ID NO: 2421846 - RNA, 19 nt, Artificial Sequence
  Description of Artificial Sequence: Synthetic oligonucleotide
  Sense strand starting at position 425 of SEQ ID NO: 1886704
ccacguuuggcaugagacu

SEQ ID NO: 2421847 - RNA, 19 nt, Artificial Sequence
  Description of Artificial Sequence: Synthetic oligonucleotide
  Antisense strand to SEQ ID NO: 2421846
agucucaugccaaacgugg

SEQ ID NO: 2421848 - RNA, 19 nt, Artificial Sequence
  Description of Artificial Sequence: Synthetic oligonucleotide
  Sense strand starting at position 441 of SEQ ID NO: 1886704
acuggaagcgaucauguau

SEQ ID NO: 2421849 - RNA, 19 nt, Artificial Sequence
  Description of Artificial Sequence: Synthetic oligonucleotide
  Antisense strand to SEQ ID NO: 2421848
auacaugaucgcuuccagu

SEQ ID NO: 2421850 - RNA, 19 nt, Artificial Sequence
  Description of Artificial Sequence: Synthetic oligonucleotide
  Sense strand starting at position 467 of SEQ ID NO: 1886704
acccauaugguguggcaaa

SEQ ID NO: 2421851 - RNA, 19 nt, Artificial Sequence
  Description of Artificial Sequence: Synthetic oligonucleotide
  Antisense strand to SEQ ID NO: 2421850
uuugccacaccauaugggu

SEQ ID NO: 2421852 - RNA, 19 nt, Artificial Sequence
  Description of Artificial Sequence: Synthetic oligonucleotide
  Sense strand starting at position 480 of SEQ ID NO: 1886704
ggcaaagugcaguaccauu

SEQ ID NO: 2421853 - RNA, 19 nt, Artificial Sequence
  Description of Artificial Sequence: Synthetic oligonucleotide
  Antisense strand to SEQ ID NO: 2421852
aaugguacugcacuuugcc

SEQ ID NO: 2421854 - RNA, 19 nt, Artificial Sequence
  Description of Artificial Sequence: Synthetic oligonucleotide
  Sense strand starting at position 507 of SEQ ID NO: 1886704
gugugaacucagugaggua

SEQ ID NO: 2421855 - RNA, 19 nt, Artificial Sequence
  Description of Artificial Sequence: Synthetic oligonucleotide
  Antisense strand to SEQ ID NO: 2421854
uaccucacugaguucacac

SEQ ID NO: 2421856 - RNA, 19 nt, Artificial Sequence
  Description of Artificial Sequence: Synthetic oligonucleotide
  Sense strand starting at position 508 of SEQ ID NO: 1886704
ugugaacucagugagguaa

SEQ ID NO: 2421857 - RNA, 19 nt, Artificial Sequence
  Description of Artificial Sequence: Synthetic oligonucleotide
  Antisense strand to SEQ ID NO: 2421856
uuaccucacugaguucaca

SEQ ID NO: 2421858 - RNA, 19 nt, Artificial Sequence
  Description of Artificial Sequence: Synthetic oligonucleotide
  Sense strand starting at position 578 of SEQ ID NO: 1886704
gagccuggucucuaagcuu

SEQ ID NO: 2421859 - RNA, 19 nt, Artificial Sequence
  Description of Artificial Sequence: Synthetic oligonucleotide
  Antisense strand to SEQ ID NO: 2421858
aagcuuagagaccaggcuc

SEQ ID NO: 2421860 - RNA, 19 nt, Artificial Sequence
  Description of Artificial Sequence: Synthetic oligonucleotide
  Sense strand starting at position 1004 of SEQ ID NO: 1886704
uggcauagcucuguucuga

SEQ ID NO: 2421861 - RNA, 19 nt, Artificial Sequence
  Description of Artificial Sequence: Synthetic oligonucleotide
  Antisense strand to SEQ ID NO: 2421860
ucagaacagagcuaugcca

SEQ ID NO: 2421862 - RNA, 19 nt, Artificial Sequence
  Description of Artificial Sequence: Synthetic oligonucleotide
  Sense strand starting at position 1523 of SEQ ID NO: 1886704
caacccagguauucugaga

SEQ ID NO: 2421863 - RNA, 19 nt, Artificial Sequence
  Description of Artificial Sequence: Synthetic oligonucleotide
  Antisense strand to SEQ ID NO: 2421862
ucucagaauaccuggguug

SEQ ID NO: 2421864 - RNA, 19 nt, Artificial Sequence
  Description of Artificial Sequence: Synthetic oligonucleotide
  Sense strand starting at position 1702 of SEQ ID NO: 1886704
ccuuaacucugacuuagag

SEQ ID NO: 2421865 - RNA, 19 nt, Artificial Sequence
  Description of Artificial Sequence: Synthetic oligonucleotide
  Antisense strand to SEQ ID NO: 2421864
cucuaagucagaguuaagg

SEQ ID NO: 2421866 - RNA, 19 nt, Artificial Sequence
  Description of Artificial Sequence: Synthetic oligonucleotide
  Sense strand starting at position 1748 of SEQ ID NO: 1886704
gagcgcgaucaggaagaaa

SEQ ID NO: 2421867 - RNA, 19 nt, Artificial Sequence
  Description of Artificial Sequence: Synthetic oligonucleotide
  Antisense strand to SEQ ID NO: 2421866
uuucuuccugaucgcgcuc

SEQ ID NO: 2421868 - RNA, 19 nt, Artificial Sequence
  Description of Artificial Sequence: Synthetic oligonucleotide
  Sense strand starting at position 2015 of SEQ ID NO: 1886704
cugcuuuccuacucaagga

SEQ ID NO: 2421869 - RNA, 19 nt, Artificial Sequence
  Description of Artificial Sequence: Synthetic oligonucleotide
  Antisense strand to SEQ ID NO: 2421868
uccuugaguaggaaagcag

SEQ ID NO: 2421870 - RNA, 19 nt, Artificial Sequence
  Description of Artificial Sequence: Synthetic oligonucleotide
  Sense strand starting at position 2254 of SEQ ID NO: 1886704
uucccaguuucccugaagu

SEQ ID NO: 2421871 - RNA, 19 nt, Artificial Sequence
  Description of Artificial Sequence: Synthetic oligonucleotide
  Antisense strand to SEQ ID NO: 2421870
acuucagggaaacugggaa

SEQ ID NO: 2421872 - RNA, 19 nt, Artificial Sequence
  Description of Artificial Sequence: Synthetic oligonucleotide
  Sense strand starting at position 2601 of SEQ ID NO: 1886704
gucgauucuccucgccuga

SEQ ID NO: 2421873 - RNA, 19 nt, Artificial Sequence
  Description of Artificial Sequence: Synthetic oligonucleotide
  Antisense strand to SEQ ID NO: 2421872
ucaggcgaggagaaucgac

SEQ ID NO: 2421874 - RNA, 19 nt, Artificial Sequence
  Description of Artificial Sequence: Synthetic oligonucleotide
  Sense strand starting at position 2603 of SEQ ID NO: 1886704
cgauucuccucgccugaga

SEQ ID NO: 2421875 - RNA, 19 nt, Artificial Sequence
  Description of Artificial Sequence: Synthetic oligonucleotide
  Antisense strand to SEQ ID NO: 2421874
ucucaggcgaggagaaucg

SEQ ID NO: 2421876 - RNA, 19 nt, Artificial Sequence
  Description of Artificial Sequence: Synthetic oligonucleotide
  Sense strand starting at position 2645 of SEQ ID NO: 1886704
ggucguccuuugcugauaa

SEQ ID NO: 2421877 - RNA, 19 nt, Artificial Sequence
  Description of Artificial Sequence: Synthetic oligonucleotide
  Antisense strand to SEQ ID NO: 2421876
uuaucagcaaaggacgacc

SEQ ID NO: 2421878 - RNA, 19 nt, Artificial Sequence
  Description of Artificial Sequence: Synthetic oligonucleotide
  Sense strand starting at position 2647 of SEQ ID NO: 1886704
ucguccuuugcugauaaau

SEQ ID NO: 2421879 - RNA, 19 nt, Artificial Sequence
  Description of Artificial Sequence: Synthetic oligonucleotide
  Antisense strand to SEQ ID NO: 2421878
auuuaucagcaaaggacga

SEQ ID NO: 2421880 - RNA, 19 nt, Artificial Sequence
  Description of Artificial Sequence: Synthetic oligonucleotide
  Sense strand starting at position 2656 of SEQ ID NO: 1886704
gcugauaaaucuccaugcu

SEQ ID NO: 2421881 - RNA, 19 nt, Artificial Sequence
  Description of Artificial Sequence: Synthetic oligonucleotide
  Antisense strand to SEQ ID NO: 2421880
agcauggagauuuaucagc

SEQ ID NO: 2421882 - RNA, 19 nt, Artificial Sequence
  Description of Artificial Sequence: Synthetic oligonucleotide
  Sense strand starting at position 2832 of SEQ ID NO: 1886704
ccagcuaucccguggcuga

SEQ ID NO: 2421883 - RNA, 19 nt, Artificial Sequence
  Description of Artificial Sequence: Synthetic oligonucleotide
  Antisense strand to SEQ ID NO: 2421882
ucagccacgggauagcugg

SEQ ID NO: 2421884 - RNA, 19 nt, Artificial Sequence
  Description of Artificial Sequence: Synthetic oligonucleotide
  Sense strand starting at position 2833 of SEQ ID NO: 1886704
cagcuaucccguggcugaa

SEQ ID NO: 2421885 - RNA, 19 nt, Artificial Sequence
  Description of Artificial Sequence: Synthetic oligonucleotide
  Antisense strand to SEQ ID NO: 2421884
uucagccacgggauagcug

SEQ ID NO: 2421886 - RNA, 19 nt, Artificial Sequence
  Description of Artificial Sequence: Synthetic oligonucleotide
  Sense strand starting at position 3145 of SEQ ID NO: 1886704
aguuauuucucugaaguau

SEQ ID NO: 2421887 - RNA, 19 nt, Artificial Sequence
  Description of Artificial Sequence: Synthetic oligonucleotide
  Antisense strand to SEQ ID NO: 2421886
auacuucagagaaauaacu

SEQ ID NO: 2421888 - RNA, 19 nt, Artificial Sequence
  Description of Artificial Sequence: Synthetic oligonucleotide
  Sense strand starting at position 3154 of SEQ ID NO: 1886704
ucugaaguauaccugacua

SEQ ID NO: 2421889 - RNA, 19 nt, Artificial Sequence
  Description of Artificial Sequence: Synthetic oligonucleotide
  Antisense strand to SEQ ID NO: 2421888
uagucagguauacuucaga

SEQ ID NO: 2421890 - RNA, 19 nt, Artificial Sequence
  Description of Artificial Sequence: Synthetic oligonucleotide
  Sense strand starting at position 3175 of SEQ ID NO: 1886704
gcauaacauugagucuaua

SEQ ID NO: 2421891 - RNA, 19 nt, Artificial Sequence
  Description of Artificial Sequence: Synthetic oligonucleotide
  Antisense strand to SEQ ID NO: 2421890
uauagacucaauguuaugc

SEQ ID NO: 2421892 - RNA, 19 nt, Artificial Sequence
  Description of Artificial Sequence: Synthetic oligonucleotide
  Sense strand starting at position 3393 of SEQ ID NO: 1886704
auagcacccguguaggauu

SEQ ID NO: 2421893 - RNA, 19 nt, Artificial Sequence
  Description of Artificial Sequence: Synthetic oligonucleotide
  Antisense strand to SEQ ID NO: 2421892
aauccuacacgggugcuau

SEQ ID NO: 2421894 - RNA, 19 nt, Artificial Sequence
  Description of Artificial Sequence: Synthetic oligonucleotide
  Sense strand starting at position 3514 of SEQ ID NO: 1886704
gaugaaguuucuguaccac

SEQ ID NO: 2421895 - RNA, 19 nt, Artificial Sequence
  Description of Artificial Sequence: Synthetic oligonucleotide
  Antisense strand to SEQ ID NO: 2421894
gugguacagaaacuucauc

SEQ ID NO: 2421896 - RNA, 19 nt, Artificial Sequence
  Description of Artificial Sequence: Synthetic oligonucleotide
  Sense strand starting at position 3571 of SEQ ID NO: 1886704
acccauauggugugcacaa

SEQ ID NO: 2421897 - RNA, 19 nt, Artificial Sequence
  Description of Artificial Sequence: Synthetic oligonucleotide
  Antisense strand to SEQ ID NO: 2421896
uugugcacaccauaugggu

SEQ ID NO: 2421898 - RNA, 19 nt, Artificial Sequence
  Description of Artificial Sequence: Synthetic oligonucleotide
  Sense strand starting at position 3572 of SEQ ID NO: 1886704
cccauauggugugcacaau

SEQ ID NO: 2421899 - RNA, 19 nt, Artificial Sequence
  Description of Artificial Sequence: Synthetic oligonucleotide
  Antisense strand to SEQ ID NO: 2421898
auugugcacaccauauggg

SEQ ID NO: 2421900 - RNA, 19 nt, Artificial Sequence
  Description of Artificial Sequence: Synthetic oligonucleotide
  Sense strand starting at position 3578 of SEQ ID NO: 1886704
uggugugcacaaugcaaua

SEQ ID NO: 2421901 - RNA, 19 nt, Artificial Sequence
  Description of Artificial Sequence: Synthetic oligonucleotide
  Antisense strand to SEQ ID NO: 2421900
uauugcauugugcacacca

SEQ ID NO: 2421902 - RNA, 19 nt, Artificial Sequence
  Description of Artificial Sequence: Synthetic oligonucleotide
  Sense strand starting at position 3610 of SEQ ID NO: 1886704
gggugaacucagugaguaa

SEQ ID NO: 2421903 - RNA, 19 nt, Artificial Sequence
  Description of Artificial Sequence: Synthetic oligonucleotide
  Antisense strand to SEQ ID NO: 2421902
uuacucacugaguucaccc

SEQ ID NO: 2421904 - RNA, 19 nt, Artificial Sequence
  Description of Artificial Sequence: Synthetic oligonucleotide
  Sense strand starting at position 3611 of SEQ ID NO: 1886704
ggugaacucagugaguaac

SEQ ID NO: 2421905 - RNA, 19 nt, Artificial Sequence
  Description of Artificial Sequence: Synthetic oligonucleotide
  Antisense strand to SEQ ID NO: 2421904
guuacucacugaguucacc

SEQ ID NO: 2421906 - RNA, 19 nt, Artificial Sequence
  Description of Artificial Sequence: Synthetic oligonucleotide
  Sense strand starting at position 3643 of SEQ ID NO: 1886704
agguguucacauuguuagu

SEQ ID NO: 2421907 - RNA, 19 nt, Artificial Sequence
  Description of Artificial Sequence: Synthetic oligonucleotide
  Antisense strand to SEQ ID NO: 2421906
acuaacaaugugaacaccu

SEQ ID NO: 2421908 - RNA, 19 nt, Artificial Sequence
  Description of Artificial Sequence: Synthetic oligonucleotide
  Sense strand starting at position 3645 of SEQ ID NO: 1886704
guguucacauuguuaguga

SEQ ID NO: 2421909 - RNA, 19 nt, Artificial Sequence
  Description of Artificial Sequence: Synthetic oligonucleotide
  Antisense strand to SEQ ID NO: 2421908
ucacuaacaaugugaacac

SEQ ID NO: 2421910 - RNA, 19 nt, Artificial Sequence
  Description of Artificial Sequence: Synthetic oligonucleotide
  Sense strand starting at position 3676 of SEQ ID NO: 1886704
uccagagacuggucucuaa

SEQ ID NO: 2421911 - RNA, 19 nt, Artificial Sequence
  Description of Artificial Sequence: Synthetic oligonucleotide
  Antisense strand to SEQ ID NO: 2421910
uuagagaccagucucugga

SEQ ID NO: 2421912 - RNA, 19 nt, Artificial Sequence
  Description of Artificial Sequence: Synthetic oligonucleotide
  Sense strand starting at position 3679 of SEQ ID NO: 1886704
agagacuggucucuaaacu

SEQ ID NO: 2421913 - RNA, 19 nt, Artificial Sequence
  Description of Artificial Sequence: Synthetic oligonucleotide
  Antisense strand to SEQ ID NO: 2421912
aguuuagagaccagucucu

SEQ ID NO: 2421914 - RNA, 19 nt, Artificial Sequence
  Description of Artificial Sequence: Synthetic oligonucleotide
  Sense strand starting at position 56 of SEQ ID NO: 1886705
gggacuaugccaggcuaaa

SEQ ID NO: 2421915 - RNA, 19 nt, Artificial Sequence
  Description of Artificial Sequence: Synthetic oligonucleotide
  Antisense strand to SEQ ID NO: 2421914
uuuagccuggcauaguccc

SEQ ID NO: 2421916 - RNA, 19 nt, Artificial Sequence
  Description of Artificial Sequence: Synthetic oligonucleotide
  Sense strand starting at position 216 of SEQ ID NO: 1886705
aaagguuuauaucugggau

SEQ ID NO: 2421917 - RNA, 19 nt, Artificial Sequence
  Description of Artificial Sequence: Synthetic oligonucleotide
  Antisense strand to SEQ ID NO: 2421916
aucccagauauaaaccuuu

SEQ ID NO: 2421918 - RNA, 19 nt, Artificial Sequence
  Description of Artificial Sequence: Synthetic oligonucleotide
  Sense strand starting at position 219 of SEQ ID NO: 1886705
gguuuauaucugggaugca

SEQ ID NO: 2421919 - RNA, 19 nt, Artificial Sequence
  Description of Artificial Sequence: Synthetic oligonucleotide
  Antisense strand to SEQ ID NO: 2421918
ugcaucccagauauaaacc

SEQ ID NO: 2421920 - RNA, 19 nt, Artificial Sequence
  Description of Artificial Sequence: Synthetic oligonucleotide
  Sense strand starting at position 228 of SEQ ID NO: 1886705
cugggaugcauagguagua

SEQ ID NO: 2421921 - RNA, 19 nt, Artificial Sequence
  Description of Artificial Sequence: Synthetic oligonucleotide
  Antisense strand to SEQ ID NO: 2421920
uacuaccuaugcaucccag

SEQ ID NO: 2421922 - RNA, 19 nt, Artificial Sequence
  Description of Artificial Sequence: Synthetic oligonucleotide
  Sense strand starting at position 399 of SEQ ID NO: 1886705
agaaguuucugugccacaa

SEQ ID NO: 2421923 - RNA, 19 nt, Artificial Sequence
  Description of Artificial Sequence: Synthetic oligonucleotide
  Antisense strand to SEQ ID NO: 2421922
uuguggcacagaaacuucu

SEQ ID NO: 2421924 - RNA, 19 nt, Artificial Sequence
  Description of Artificial Sequence: Synthetic oligonucleotide
  Sense strand starting at position 403 of SEQ ID NO: 1886705
guuucugugccacaauuga

SEQ ID NO: 2421925 - RNA, 19 nt, Artificial Sequence
  Description of Artificial Sequence: Synthetic oligonucleotide
  Antisense strand to SEQ ID NO: 2421924
ucaauuguggcacagaaac

SEQ ID NO: 2421926 - RNA, 19 nt, Artificial Sequence
  Description of Artificial Sequence: Synthetic oligonucleotide
  Sense strand starting at position 490 of SEQ ID NO: 1886705
gaugaagcucagugaggua

SEQ ID NO: 2421927 - RNA, 19 nt, Artificial Sequence
  Description of Artificial Sequence: Synthetic oligonucleotide
  Antisense strand to SEQ ID NO: 2421926
uaccucacugagcuucauc

SEQ ID NO: 2421928 - RNA, 19 nt, Artificial Sequence
  Description of Artificial Sequence: Synthetic oligonucleotide
  Sense strand starting at position 503 of SEQ ID NO: 1886705
gagguaaccuggcuuguca

SEQ ID NO: 2421929 - RNA, 19 nt, Artificial Sequence
  Description of Artificial Sequence: Synthetic oligonucleotide
  Antisense strand to SEQ ID NO: 2421928
ugacaagccagguuaccuc

SEQ ID NO: 2421930 - RNA, 19 nt, Artificial Sequence
  Description of Artificial Sequence: Synthetic oligonucleotide
  Sense strand starting at position 561 of SEQ ID NO: 1886705
gagccugggucucuaaacu

SEQ ID NO: 2421931 - RNA, 19 nt, Artificial Sequence
  Description of Artificial Sequence: Synthetic oligonucleotide
  Antisense strand to SEQ ID NO: 2421930
aguuuagagacccaggcuc

SEQ ID NO: 2421932 - RNA, 19 nt, Artificial Sequence
  Description of Artificial Sequence: Synthetic oligonucleotide
  Sense strand starting at position 988 of SEQ ID NO: 1886705
ugguacagcucuguucuaa

SEQ ID NO: 2421933 - RNA, 19 nt, Artificial Sequence
  Description of Artificial Sequence: Synthetic oligonucleotide
  Antisense strand to SEQ ID NO: 2421932
uuagaacagagcuguacca

SEQ ID NO: 2421934 - RNA, 19 nt, Artificial Sequence
  Description of Artificial Sequence: Synthetic oligonucleotide
  Sense strand starting at position 1023 of SEQ ID NO: 1886705
uuuggaguuugugucucaa

SEQ ID NO: 2421935 - RNA, 19 nt, Artificial Sequence
  Description of Artificial Sequence: Synthetic oligonucleotide
  Antisense strand to SEQ ID NO: 2421934
uugagacacaaacuccaaa

SEQ ID NO: 2421936 - RNA, 19 nt, Artificial Sequence
  Description of Artificial Sequence: Synthetic oligonucleotide
  Sense strand starting at position 1744 of SEQ ID NO: 1886705
gaaaguacuggacgaagua

SEQ ID NO: 2421937 - RNA, 19 nt, Artificial Sequence
  Description of Artificial Sequence: Synthetic oligonucleotide
  Antisense strand to SEQ ID NO: 2421936
uacuucguccaguacuuuc

SEQ ID NO: 2421938 - RNA, 19 nt, Artificial Sequence
  Description of Artificial Sequence: Synthetic oligonucleotide
  Sense strand starting at position 1817 of SEQ ID NO: 1886705
cuguacuguggcugggaau

SEQ ID NO: 2421939 - RNA, 19 nt, Artificial Sequence
  Description of Artificial Sequence: Synthetic oligonucleotide
  Antisense strand to SEQ ID NO: 2421938
auucccagccacaguacag

SEQ ID NO: 2421940 - RNA, 19 nt, Artificial Sequence
  Description of Artificial Sequence: Synthetic oligonucleotide
  Sense strand starting at position 1818 of SEQ ID NO: 1886705
uguacuguggcugggaauu

SEQ ID NO: 2421941 - RNA, 19 nt, Artificial Sequence
  Description of Artificial Sequence: Synthetic oligonucleotide
  Antisense strand to SEQ ID NO: 2421940
aauucccagccacaguaca

SEQ ID NO: 2421942 - RNA, 19 nt, Artificial Sequence
  Description of Artificial Sequence: Synthetic oligonucleotide
  Sense strand starting at position 2393 of SEQ ID NO: 1886705
agggaguugugugcagaga

SEQ ID NO: 2421943 - RNA, 19 nt, Artificial Sequence
  Description of Artificial Sequence: Synthetic oligonucleotide
  Antisense strand to SEQ ID NO: 2421942
ucucugcacacaacucccu

SEQ ID NO: 2421944 - RNA, 19 nt, Artificial Sequence
  Description of Artificial Sequence: Synthetic oligonucleotide
  Sense strand starting at position 2394 of SEQ ID NO: 1886705
gggaguugugugcagagaa

SEQ ID NO: 2421945 - RNA, 19 nt, Artificial Sequence
  Description of Artificial Sequence: Synthetic oligonucleotide
  Antisense strand to SEQ ID NO: 2421944
uucucugcacacaacuccc

SEQ ID NO: 2421946 - RNA, 19 nt, Artificial Sequence
  Description of Artificial Sequence: Synthetic oligonucleotide
  Sense strand starting at position 2546 of SEQ ID NO: 1886705
ccauuccugagagguugua

SEQ ID NO: 2421947 - RNA, 19 nt, Artificial Sequence
  Description of Artificial Sequence: Synthetic oligonucleotide
  Antisense strand to SEQ ID NO: 2421946
uacaaccucucaggaaugg

SEQ ID NO: 2421948 - RNA, 19 nt, Artificial Sequence
  Description of Artificial Sequence: Synthetic oligonucleotide
  Sense strand starting at position 2556 of SEQ ID NO: 1886705
gagguuguaugggcacauu

SEQ ID NO: 2421949 - RNA, 19 nt, Artificial Sequence
  Description of Artificial Sequence: Synthetic oligonucleotide
  Antisense strand to SEQ ID NO: 2421948
aaugugcccauacaaccuc

SEQ ID NO: 2421950 - RNA, 19 nt, Artificial Sequence
  Description of Artificial Sequence: Synthetic oligonucleotide
  Sense strand starting at position 2644 of SEQ ID NO: 1886705
ccaggagaguaguccugaa

SEQ ID NO: 2421951 - RNA, 19 nt, Artificial Sequence
  Description of Artificial Sequence: Synthetic oligonucleotide
  Antisense strand to SEQ ID NO: 2421950
uucaggacuacucuccugg

SEQ ID NO: 2421952 - RNA, 19 nt, Artificial Sequence
  Description of Artificial Sequence: Synthetic oligonucleotide
  Sense strand starting at position 2683 of SEQ ID NO: 1886705
gcgggaucugcuuagguga

SEQ ID NO: 2421953 - RNA, 19 nt, Artificial Sequence
  Description of Artificial Sequence: Synthetic oligonucleotide
  Antisense strand to SEQ ID NO: 2421952
ucaccuaagcagaucccgc

SEQ ID NO: 2421954 - RNA, 19 nt, Artificial Sequence
  Description of Artificial Sequence: Synthetic oligonucleotide
  Sense strand starting at position 2718 of SEQ ID NO: 1886705
ugcagaaccuacguuaaau

SEQ ID NO: 2421955 - RNA, 19 nt, Artificial Sequence
  Description of Artificial Sequence: Synthetic oligonucleotide
  Antisense strand to SEQ ID NO: 2421954
auuuaacguagguucugca

SEQ ID NO: 2421956 - RNA, 19 nt, Artificial Sequence
  Description of Artificial Sequence: Synthetic oligonucleotide
  Sense strand starting at position 2780 of SEQ ID NO: 1886705
cacaacaaucugcgugagu

SEQ ID NO: 2421957 - RNA, 19 nt, Artificial Sequence
  Description of Artificial Sequence: Synthetic oligonucleotide
  Antisense strand to SEQ ID NO: 2421956
acucacgcagauuguugug

SEQ ID NO: 2421958 - RNA, 19 nt, Artificial Sequence
  Description of Artificial Sequence: Synthetic oligonucleotide
  Sense strand starting at position 2787 of SEQ ID NO: 1886705
aucugcgugagucuguuua

SEQ ID NO: 2421959 - RNA, 19 nt, Artificial Sequence
  Description of Artificial Sequence: Synthetic oligonucleotide
  Antisense strand to SEQ ID NO: 2421958
uaaacagacucacgcagau

SEQ ID NO: 2421960 - RNA, 19 nt, Artificial Sequence
  Description of Artificial Sequence: Synthetic oligonucleotide
  Sense strand starting at position 2798 of SEQ ID NO: 1886705
ucuguuuaaucacuuuagu

SEQ ID NO: 2421961 - RNA, 19 nt, Artificial Sequence
  Description of Artificial Sequence: Synthetic oligonucleotide
  Antisense strand to SEQ ID NO: 2421960
acuaaagugauuaaacaga

SEQ ID NO: 2421962 - RNA, 19 nt, Artificial Sequence
  Description of Artificial Sequence: Synthetic oligonucleotide
  Sense strand starting at position 2916 of SEQ ID NO: 1886705
agguuauggcucugugaaa

SEQ ID NO: 2421963 - RNA, 19 nt, Artificial Sequence
  Description of Artificial Sequence: Synthetic oligonucleotide
  Antisense strand to SEQ ID NO: 2421962
uuucacagagccauaaccu

SEQ ID NO: 2421964 - RNA, 19 nt, Artificial Sequence
  Description of Artificial Sequence: Synthetic oligonucleotide
  Sense strand starting at position 2917 of SEQ ID NO: 1886705
gguuauggcucugugaaau

SEQ ID NO: 2421965 - RNA, 19 nt, Artificial Sequence
  Description of Artificial Sequence: Synthetic oligonucleotide
  Antisense strand to SEQ ID NO: 2421964
auuucacagagccauaacc

SEQ ID NO: 2421966 - RNA, 19 nt, Artificial Sequence
  Description of Artificial Sequence: Synthetic oligonucleotide
  Sense strand starting at position 3309 of SEQ ID NO: 1886705
gcucgagugauccaccuac

SEQ ID NO: 2421967 - RNA, 19 nt, Artificial Sequence
  Description of Artificial Sequence: Synthetic oligonucleotide
  Antisense strand to SEQ ID NO: 2421966
guagguggaucacucgagc

SEQ ID NO: 2421968 - RNA, 19 nt, Artificial Sequence
  Description of Artificial Sequence: Synthetic oligonucleotide
  Sense strand starting at position 3799 of SEQ ID NO: 1886705
acauuagaguaaucgauau

SEQ ID NO: 2421969 - RNA, 19 nt, Artificial Sequence
  Description of Artificial Sequence: Synthetic oligonucleotide
  Antisense strand to SEQ ID NO: 2421968
auaucgauuacucuaaugu

SEQ ID NO: 2421970 - RNA, 19 nt, Artificial Sequence
  Description of Artificial Sequence: Synthetic oligonucleotide
  Sense strand starting at position 3801 of SEQ ID NO: 1886705
auuagaguaaucgauaugu

SEQ ID NO: 2421971 - RNA, 19 nt, Artificial Sequence
  Description of Artificial Sequence: Synthetic oligonucleotide
  Antisense strand to SEQ ID NO: 2421970
acauaucgauuacucuaau

SEQ ID NO: 2421972 - RNA, 19 nt, Artificial Sequence
  Description of Artificial Sequence: Synthetic oligonucleotide
  Sense strand starting at position 3803 of SEQ ID NO: 1886705
uagaguaaucgauaugucu

SEQ ID NO: 2421973 - RNA, 19 nt, Artificial Sequence
  Description of Artificial Sequence: Synthetic oligonucleotide
  Antisense strand to SEQ ID NO: 2421972
agacauaucgauuacucua

SEQ ID NO: 2421974 - RNA, 19 nt, Artificial Sequence
  Description of Artificial Sequence: Synthetic oligonucleotide
  Sense strand starting at position 3805 of SEQ ID NO: 1886705
gaguaaucgauaugucugu

SEQ ID NO: 2421975 - RNA, 19 nt, Artificial Sequence
  Description of Artificial Sequence: Synthetic oligonucleotide
  Antisense strand to SEQ ID NO: 2421974
acagacauaucgauuacuc

SEQ ID NO: 2421976 - RNA, 19 nt, Artificial Sequence
  Description of Artificial Sequence: Synthetic oligonucleotide
  Sense strand starting at position 3806 of SEQ ID NO: 1886705
aguaaucgauaugucugua

SEQ ID NO: 2421977 - RNA, 19 nt, Artificial Sequence
  Description of Artificial Sequence: Synthetic oligonucleotide
  Antisense strand to SEQ ID NO: 2421976
uacagacauaucgauuacu

SEQ ID NO: 2421978 - RNA, 19 nt, Artificial Sequence
  Description of Artificial Sequence: Synthetic oligonucleotide
  Sense strand starting at position 3809 of SEQ ID NO: 1886705
aaucgauaugucuguaagu

SEQ ID NO: 2421979 - RNA, 19 nt, Artificial Sequence
  Description of Artificial Sequence: Synthetic oligonucleotide
  Antisense strand to SEQ ID NO: 2421978
acuuacagacauaucgauu

SEQ ID NO: 2421980 - RNA, 19 nt, Artificial Sequence
  Description of Artificial Sequence: Synthetic oligonucleotide
  Sense strand starting at position 3810 of SEQ ID NO: 1886705
aucgauaugucuguaagua

SEQ ID NO: 2421981 - RNA, 19 nt, Artificial Sequence
  Description of Artificial Sequence: Synthetic oligonucleotide
  Antisense strand to SEQ ID NO: 2421980
uacuuacagacauaucgau

SEQ ID NO: 2421982 - RNA, 19 nt, Artificial Sequence
  Description of Artificial Sequence: Synthetic oligonucleotide
  Sense strand starting at position 3811 of SEQ ID NO: 1886705
ucgauaugucuguaaguaa

SEQ ID NO: 2421983 - RNA, 19 nt, Artificial Sequence
  Description of Artificial Sequence: Synthetic oligonucleotide
  Antisense strand to SEQ ID NO: 2421982
uuacuuacagacauaucga

SEQ ID NO: 2421984 - RNA, 19 nt, Artificial Sequence
  Description of Artificial Sequence: Synthetic oligonucleotide
  Sense strand starting at position 3824 of SEQ ID NO: 1886705
aaguaagacugauucuuga

SEQ ID NO: 2421985 - RNA, 19 nt, Artificial Sequence
  Description of Artificial Sequence: Synthetic oligonucleotide
  Antisense strand to SEQ ID NO: 2421984
ucaagaaucagucuuacuu

SEQ ID NO: 2421986 - RNA, 19 nt, Artificial Sequence
  Description of Artificial Sequence: Synthetic oligonucleotide
  Sense strand starting at position 3904 of SEQ ID NO: 1886705
caacuugacuaggcaaagu

SEQ ID NO: 2421987 - RNA, 19 nt, Artificial Sequence
  Description of Artificial Sequence: Synthetic oligonucleotide
  Antisense strand to SEQ ID NO: 2421986
acuuugccuagucaaguug

SEQ ID NO: 2421988 - RNA, 19 nt, Artificial Sequence
  Description of Artificial Sequence: Synthetic oligonucleotide
  Sense strand starting at position 3924 of SEQ ID NO: 1886705
cccaguuccuuggucaaau

SEQ ID NO: 2421989 - RNA, 19 nt, Artificial Sequence
  Description of Artificial Sequence: Synthetic oligonucleotide
  Antisense strand to SEQ ID NO: 2421988
auuugaccaaggaacuggg

SEQ ID NO: 2421990 - RNA, 19 nt, Artificial Sequence
  Description of Artificial Sequence: Synthetic oligonucleotide
  Sense strand starting at position 3925 of SEQ ID NO: 1886705
ccaguuccuuggucaaaua

SEQ ID NO: 2421991 - RNA, 19 nt, Artificial Sequence
  Description of Artificial Sequence: Synthetic oligonucleotide
  Antisense strand to SEQ ID NO: 2421990
uauuugaccaaggaacugg

SEQ ID NO: 2421992 - RNA, 19 nt, Artificial Sequence
  Description of Artificial Sequence: Synthetic oligonucleotide
  Sense strand starting at position 3950 of SEQ ID NO: 1886705
uagauauugcagcaaaguu

SEQ ID NO: 2421993 - RNA, 19 nt, Artificial Sequence
  Description of Artificial Sequence: Synthetic oligonucleotide
  Antisense strand to SEQ ID NO: 2421992
aacuuugcugcaauaucua

SEQ ID NO: 2421994 - RNA, 19 nt, Artificial Sequence
  Description of Artificial Sequence: Synthetic oligonucleotide
  Sense strand starting at position 550 of SEQ ID NO: 1886706
gcgggaucugcugggugaa

SEQ ID NO: 2421995 - RNA, 19 nt, Artificial Sequence
  Description of Artificial Sequence: Synthetic oligonucleotide
  Antisense strand to SEQ ID NO: 2421994
uucacccagcagaucccgc

SEQ ID NO: 2421996 - RNA, 19 nt, Artificial Sequence
  Description of Artificial Sequence: Synthetic oligonucleotide
  Sense strand starting at position 903 of SEQ ID NO: 1886706
gaagguuuguucuuugcaa

SEQ ID NO: 2421997 - RNA, 19 nt, Artificial Sequence
  Description of Artificial Sequence: Synthetic oligonucleotide
  Antisense strand to SEQ ID NO: 2421996
uugcaaagaacaaaccuuc

SEQ ID NO: 2421998 - RNA, 19 nt, Artificial Sequence
  Description of Artificial Sequence: Synthetic oligonucleotide
  Sense strand starting at position 904 of SEQ ID NO: 1886706
aagguuuguucuuugcaau

SEQ ID NO: 2421999 - RNA, 19 nt, Artificial Sequence
  Description of Artificial Sequence: Synthetic oligonucleotide
  Antisense strand to SEQ ID NO: 2421998
auugcaaagaacaaaccuu

SEQ ID NO: 2422000 - RNA, 19 nt, Artificial Sequence
  Description of Artificial Sequence: Synthetic oligonucleotide
  Sense strand starting at position 958 of SEQ ID NO: 1886706
gccuuugugagcugcaaca

SEQ ID NO: 2422001 - RNA, 19 nt, Artificial Sequence
  Description of Artificial Sequence: Synthetic oligonucleotide
  Antisense strand to SEQ ID NO: 2422000
uguugcagcucacaaaggc

SEQ ID NO: 2422002 - RNA, 19 nt, Artificial Sequence
  Description of Artificial Sequence: Synthetic oligonucleotide
  Sense strand starting at position 1266 of SEQ ID NO: 1886706
gccaaauggcuuugauuuc

SEQ ID NO: 2422003 - RNA, 19 nt, Artificial Sequence
  Description of Artificial Sequence: Synthetic oligonucleotide
  Antisense strand to SEQ ID NO: 2422002
gaaaucaaagccauuuggc

SEQ ID NO: 2422004 - RNA, 19 nt, Artificial Sequence
  Description of Artificial Sequence: Synthetic oligonucleotide
  Sense strand starting at position 1293 of SEQ ID NO: 1886706
gcucacugcucgccacauu

SEQ ID NO: 2422005 - RNA, 19 nt, Artificial Sequence
  Description of Artificial Sequence: Synthetic oligonucleotide
  Antisense strand to SEQ ID NO: 2422004
aauguggcgagcagugagc

SEQ ID NO: 2422006 - RNA, 19 nt, Artificial Sequence
  Description of Artificial Sequence: Synthetic oligonucleotide
  Sense strand starting at position 1394 of SEQ ID NO: 1886706
agaaauaugucaguaccuu

SEQ ID NO: 2422007 - RNA, 19 nt, Artificial Sequence
  Description of Artificial Sequence: Synthetic oligonucleotide
  Antisense strand to SEQ ID NO: 2422006
aagguacugacauauuucu

SEQ ID NO: 2422008 - RNA, 19 nt, Artificial Sequence
  Description of Artificial Sequence: Synthetic oligonucleotide
  Sense strand starting at position 1400 of SEQ ID NO: 1886706
augucaguaccuuaaaguu

SEQ ID NO: 2422009 - RNA, 19 nt, Artificial Sequence
  Description of Artificial Sequence: Synthetic oligonucleotide
  Antisense strand to SEQ ID NO: 2422008
aacuuuaagguacugacau

SEQ ID NO: 2422010 - RNA, 19 nt, Artificial Sequence
  Description of Artificial Sequence: Synthetic oligonucleotide
  Sense strand starting at position 1406 of SEQ ID NO: 1886706
guaccuuaaaguuggguau

SEQ ID NO: 2422011 - RNA, 19 nt, Artificial Sequence
  Description of Artificial Sequence: Synthetic oligonucleotide
  Antisense strand to SEQ ID NO: 2422010
auacccaacuuuaagguac

SEQ ID NO: 2422012 - RNA, 19 nt, Artificial Sequence
  Description of Artificial Sequence: Synthetic oligonucleotide
  Sense strand starting at position 1417 of SEQ ID NO: 1886706
uuggguauccugugaugaa

SEQ ID NO: 2422013 - RNA, 19 nt, Artificial Sequence
  Description of Artificial Sequence: Synthetic oligonucleotide
  Antisense strand to SEQ ID NO: 2422012
uucaucacaggauacccaa

SEQ ID NO: 2422014 - RNA, 19 nt, Artificial Sequence
  Description of Artificial Sequence: Synthetic oligonucleotide
  Sense strand starting at position 1418 of SEQ ID NO: 1886706
uggguauccugugaugaac

SEQ ID NO: 2422015 - RNA, 19 nt, Artificial Sequence
  Description of Artificial Sequence: Synthetic oligonucleotide
  Antisense strand to SEQ ID NO: 2422014
guucaucacaggauaccca

SEQ ID NO: 2422016 - RNA, 19 nt, Artificial Sequence
  Description of Artificial Sequence: Synthetic oligonucleotide
  Sense strand starting at position 1493 of SEQ ID NO: 1886706
guauguccuguuuggagac

SEQ ID NO: 2422017 - RNA, 19 nt, Artificial Sequence
  Description of Artificial Sequence: Synthetic oligonucleotide
  Antisense strand to SEQ ID NO: 2422016
gucuccaaacaggacauac

SEQ ID NO: 2422018 - RNA, 19 nt, Artificial Sequence
  Description of Artificial Sequence: Synthetic oligonucleotide
  Sense strand starting at position 1569 of SEQ ID NO: 1886706
gcugaaaccgcuuaacagu

SEQ ID NO: 2422019 - RNA, 19 nt, Artificial Sequence
  Description of Artificial Sequence: Synthetic oligonucleotide
  Antisense strand to SEQ ID NO: 2422018
acuguuaagcgguuucagc

SEQ ID NO: 2422020 - RNA, 19 nt, Artificial Sequence
  Description of Artificial Sequence: Synthetic oligonucleotide
  Sense strand starting at position 1575 of SEQ ID NO: 1886706
accgcuuaacaguaguuaa

SEQ ID NO: 2422021 - RNA, 19 nt, Artificial Sequence
  Description of Artificial Sequence: Synthetic oligonucleotide
  Antisense strand to SEQ ID NO: 2422020
uuaacuacuguuaagcggu

SEQ ID NO: 2422022 - RNA, 19 nt, Artificial Sequence
  Description of Artificial Sequence: Synthetic oligonucleotide
  Sense strand starting at position 1707 of SEQ ID NO: 1886706
cucgucuucucguuaucuu

SEQ ID NO: 2422023 - RNA, 19 nt, Artificial Sequence
  Description of Artificial Sequence: Synthetic oligonucleotide
  Antisense strand to SEQ ID NO: 2422022
aagauaacgagaagacgag

SEQ ID NO: 2422024 - RNA, 19 nt, Artificial Sequence
  Description of Artificial Sequence: Synthetic oligonucleotide
  Sense strand starting at position 1708 of SEQ ID NO: 1886706
ucgucuucucguuaucuuu

SEQ ID NO: 2422025 - RNA, 19 nt, Artificial Sequence
  Description of Artificial Sequence: Synthetic oligonucleotide
  Antisense strand to SEQ ID NO: 2422024
aaagauaacgagaagacga

SEQ ID NO: 2422026 - RNA, 19 nt, Artificial Sequence
  Description of Artificial Sequence: Synthetic oligonucleotide
  Sense strand starting at position 1710 of SEQ ID NO: 1886706
gucuucucguuaucuuuau

SEQ ID NO: 2422027 - RNA, 19 nt, Artificial Sequence
  Description of Artificial Sequence: Synthetic oligonucleotide
  Antisense strand to SEQ ID NO: 2422026
auaaagauaacgagaagac

SEQ ID NO: 2422028 - RNA, 19 nt, Artificial Sequence
  Description of Artificial Sequence: Synthetic oligonucleotide
  Sense strand starting at position 1711 of SEQ ID NO: 1886706
ucuucucguuaucuuuauu

SEQ ID NO: 2422029 - RNA, 19 nt, Artificial Sequence
  Description of Artificial Sequence: Synthetic oligonucleotide
  Antisense strand to SEQ ID NO: 2422028
aauaaagauaacgagaaga

SEQ ID NO: 2422030 - RNA, 19 nt, Artificial Sequence
  Description of Artificial Sequence: Synthetic oligonucleotide
  Sense strand starting at position 1734 of SEQ ID NO: 1886706
cugacaucuuucucgggau

SEQ ID NO: 2422031 - RNA, 19 nt, Artificial Sequence
  Description of Artificial Sequence: Synthetic oligonucleotide
  Antisense strand to SEQ ID NO: 2422030
aucccgagaaagaugucag

SEQ ID NO: 2422032 - RNA, 19 nt, Artificial Sequence
  Description of Artificial Sequence: Synthetic oligonucleotide
  Sense strand starting at position 1735 of SEQ ID NO: 1886706
ugacaucuuucucgggauu

SEQ ID NO: 2422033 - RNA, 19 nt, Artificial Sequence
  Description of Artificial Sequence: Synthetic oligonucleotide
  Antisense strand to SEQ ID NO: 2422032
aaucccgagaaagauguca

SEQ ID NO: 2422034 - RNA, 19 nt, Artificial Sequence
  Description of Artificial Sequence: Synthetic oligonucleotide
  Sense strand starting at position 1747 of SEQ ID NO: 1886706
cgggauuccgggcgagaga

SEQ ID NO: 2422035 - RNA, 19 nt, Artificial Sequence
  Description of Artificial Sequence: Synthetic oligonucleotide
  Antisense strand to SEQ ID NO: 2422034
ucucucgcccggaaucccg

SEQ ID NO: 2422036 - RNA, 19 nt, Artificial Sequence
  Description of Artificial Sequence: Synthetic oligonucleotide
  Sense strand starting at position 75 of SEQ ID NO: 1886707
cgcagaagcccuuuguucu

SEQ ID NO: 2422037 - RNA, 19 nt, Artificial Sequence
  Description of Artificial Sequence: Synthetic oligonucleotide
  Antisense strand to SEQ ID NO: 2422036
agaacaaagggcuucugcg

SEQ ID NO: 2422038 - RNA, 19 nt, Artificial Sequence
  Description of Artificial Sequence: Synthetic oligonucleotide
  Sense strand starting at position 237 of SEQ ID NO: 1886707
ugcacuugccuagagacau

SEQ ID NO: 2422039 - RNA, 19 nt, Artificial Sequence
  Description of Artificial Sequence: Synthetic oligonucleotide
  Antisense strand to SEQ ID NO: 2422038
augucucuaggcaagugca

SEQ ID NO: 2422040 - RNA, 19 nt, Artificial Sequence
  Description of Artificial Sequence: Synthetic oligonucleotide
  Sense strand starting at position 303 of SEQ ID NO: 1886707
guaagaaguuacucaguua

SEQ ID NO: 2422041 - RNA, 19 nt, Artificial Sequence
  Description of Artificial Sequence: Synthetic oligonucleotide
  Antisense strand to SEQ ID NO: 2422040
uaacugaguaacuucuuac

SEQ ID NO: 2422042 - RNA, 19 nt, Artificial Sequence
  Description of Artificial Sequence: Synthetic oligonucleotide
  Sense strand starting at position 306 of SEQ ID NO: 1886707
agaaguuacucaguuacca

SEQ ID NO: 2422043 - RNA, 19 nt, Artificial Sequence
  Description of Artificial Sequence: Synthetic oligonucleotide
  Antisense strand to SEQ ID NO: 2422042
ugguaacugaguaacuucu

SEQ ID NO: 2422044 - RNA, 19 nt, Artificial Sequence
  Description of Artificial Sequence: Synthetic oligonucleotide
  Sense strand starting at position 325 of SEQ ID NO: 1886707
ggaggagagcaguguccua

SEQ ID NO: 2422045 - RNA, 19 nt, Artificial Sequence
  Description of Artificial Sequence: Synthetic oligonucleotide
  Antisense strand to SEQ ID NO: 2422044
uaggacacugcucuccucc

SEQ ID NO: 2422046 - RNA, 19 nt, Artificial Sequence
  Description of Artificial Sequence: Synthetic oligonucleotide
  Sense strand starting at position 1284 of SEQ ID NO: 1886707
aagcaacuccuggguuaca

SEQ ID NO: 2422047 - RNA, 19 nt, Artificial Sequence
  Description of Artificial Sequence: Synthetic oligonucleotide
  Antisense strand to SEQ ID NO: 2422046
uguaacccaggaguugcuu

SEQ ID NO: 2422048 - RNA, 19 nt, Artificial Sequence
  Description of Artificial Sequence: Synthetic oligonucleotide
  Sense strand starting at position 1357 of SEQ ID NO: 1886707
gaagguuagcuguggauga

SEQ ID NO: 2422049 - RNA, 19 nt, Artificial Sequence
  Description of Artificial Sequence: Synthetic oligonucleotide
  Antisense strand to SEQ ID NO: 2422048
ucauccacagcuaaccuuc

SEQ ID NO: 2422050 - RNA, 19 nt, Artificial Sequence
  Description of Artificial Sequence: Synthetic oligonucleotide
  Sense strand starting at position 1359 of SEQ ID NO: 1886707
agguuagcuguggaugaca

SEQ ID NO: 2422051 - RNA, 19 nt, Artificial Sequence
  Description of Artificial Sequence: Synthetic oligonucleotide
  Antisense strand to SEQ ID NO: 2422050
ugucauccacagcuaaccu

SEQ ID NO: 2422052 - RNA, 19 nt, Artificial Sequence
  Description of Artificial Sequence: Synthetic oligonucleotide
  Sense strand starting at position 1381 of SEQ ID NO: 1886707
cagaaaugucaaugggagu

SEQ ID NO: 2422053 - RNA, 19 nt, Artificial Sequence
  Description of Artificial Sequence: Synthetic oligonucleotide
  Antisense strand to SEQ ID NO: 2422052
acucccauugacauuucug

SEQ ID NO: 2422054 - RNA, 19 nt, Artificial Sequence
  Description of Artificial Sequence: Synthetic oligonucleotide
  Sense strand starting at position 1388 of SEQ ID NO: 1886707
gucaaugggaguuguccua

SEQ ID NO: 2422055 - RNA, 19 nt, Artificial Sequence
  Description of Artificial Sequence: Synthetic oligonucleotide
  Antisense strand to SEQ ID NO: 2422054
uaggacaacucccauugac

SEQ ID NO: 2422056 - RNA, 19 nt, Artificial Sequence
  Description of Artificial Sequence: Synthetic oligonucleotide
  Sense strand starting at position 1408 of SEQ ID NO: 1886707
ugauauuugcccugugguu

SEQ ID NO: 2422057 - RNA, 19 nt, Artificial Sequence
  Description of Artificial Sequence: Synthetic oligonucleotide
  Antisense strand to SEQ ID NO: 2422056
aaccacagggcaaauauca

SEQ ID NO: 2422058 - RNA, 19 nt, Artificial Sequence
  Description of Artificial Sequence: Synthetic oligonucleotide
  Sense strand starting at position 1410 of SEQ ID NO: 1886707
auauuugcccugugguuaa

SEQ ID NO: 2422059 - RNA, 19 nt, Artificial Sequence
  Description of Artificial Sequence: Synthetic oligonucleotide
  Antisense strand to SEQ ID NO: 2422058
uuaaccacagggcaaauau

SEQ ID NO: 2422060 - RNA, 19 nt, Artificial Sequence
  Description of Artificial Sequence: Synthetic oligonucleotide
  Sense strand starting at position 1413 of SEQ ID NO: 1886707
uuugcccugugguuaagaa

SEQ ID NO: 2422061 - RNA, 19 nt, Artificial Sequence
  Description of Artificial Sequence: Synthetic oligonucleotide
  Antisense strand to SEQ ID NO: 2422060
uucuuaaccacagggcaaa

SEQ ID NO: 2422062 - RNA, 19 nt, Artificial Sequence
  Description of Artificial Sequence: Synthetic oligonucleotide
  Sense strand starting at position 1414 of SEQ ID NO: 1886707
uugcccugugguuaagaaa

SEQ ID NO: 2422063 - RNA, 19 nt, Artificial Sequence
  Description of Artificial Sequence: Synthetic oligonucleotide
  Antisense strand to SEQ ID NO: 2422062
uuucuuaaccacagggcaa

SEQ ID NO: 2422064 - RNA, 19 nt, Artificial Sequence
  Description of Artificial Sequence: Synthetic oligonucleotide
  Sense strand starting at position 1449 of SEQ ID NO: 1886707
gagauucauggcgagguau

SEQ ID NO: 2422065 - RNA, 19 nt, Artificial Sequence
  Description of Artificial Sequence: Synthetic oligonucleotide
  Antisense strand to SEQ ID NO: 2422064
auaccucgccaugaaucuc

SEQ ID NO: 2422066 - RNA, 19 nt, Artificial Sequence
  Description of Artificial Sequence: Synthetic oligonucleotide
  Sense strand starting at position 1488 of SEQ ID NO: 1886707
cugcaauuugguugccauu

SEQ ID NO: 2422067 - RNA, 19 nt, Artificial Sequence
  Description of Artificial Sequence: Synthetic oligonucleotide
  Antisense strand to SEQ ID NO: 2422066
aauggcaaccaaauugcag

SEQ ID NO: 2422068 - RNA, 19 nt, Artificial Sequence
  Description of Artificial Sequence: Synthetic oligonucleotide
  Sense strand starting at position 1581 of SEQ ID NO: 1886707
auaacaguucuacgagagu

SEQ ID NO: 2422069 - RNA, 19 nt, Artificial Sequence
  Description of Artificial Sequence: Synthetic oligonucleotide
  Antisense strand to SEQ ID NO: 2422068
acucucguagaacuguuau

SEQ ID NO: 2422070 - RNA, 19 nt, Artificial Sequence
  Description of Artificial Sequence: Synthetic oligonucleotide
  Sense strand starting at position 1584 of SEQ ID NO: 1886707
acaguucuacgagaguucu

SEQ ID NO: 2422071 - RNA, 19 nt, Artificial Sequence
  Description of Artificial Sequence: Synthetic oligonucleotide
  Antisense strand to SEQ ID NO: 2422070
agaacucucguagaacugu

SEQ ID NO: 2422072 - RNA, 19 nt, Artificial Sequence
  Description of Artificial Sequence: Synthetic oligonucleotide
  Sense strand starting at position 1592 of SEQ ID NO: 1886707
acgagaguucuuuaugcuc

SEQ ID NO: 2422073 - RNA, 19 nt, Artificial Sequence
  Description of Artificial Sequence: Synthetic oligonucleotide
  Antisense strand to SEQ ID NO: 2422072
gagcauaaagaacucucgu

SEQ ID NO: 2422074 - RNA, 19 nt, Artificial Sequence
  Description of Artificial Sequence: Synthetic oligonucleotide
  Sense strand starting at position 1615 of SEQ ID NO: 1886707
ugcaacuuccuguagguuu

SEQ ID NO: 2422075 - RNA, 19 nt, Artificial Sequence
  Description of Artificial Sequence: Synthetic oligonucleotide
  Antisense strand to SEQ ID NO: 2422074
aaaccuacaggaaguugca

SEQ ID NO: 2422076 - RNA, 19 nt, Artificial Sequence
  Description of Artificial Sequence: Synthetic oligonucleotide
  Sense strand starting at position 1630 of SEQ ID NO: 1886707
guuugagauuaccuggaga

SEQ ID NO: 2422077 - RNA, 19 nt, Artificial Sequence
  Description of Artificial Sequence: Synthetic oligonucleotide
  Antisense strand to SEQ ID NO: 2422076
ucuccagguaaucucaaac

SEQ ID NO: 2422078 - RNA, 19 nt, Artificial Sequence
  Description of Artificial Sequence: Synthetic oligonucleotide
  Sense strand starting at position 2638 of SEQ ID NO: 1886707
gugagauagccgugaacaa

SEQ ID NO: 2422079 - RNA, 19 nt, Artificial Sequence
  Description of Artificial Sequence: Synthetic oligonucleotide
  Antisense strand to SEQ ID NO: 2422078
uuguucacggcuaucucac

SEQ ID NO: 2422080 - RNA, 19 nt, Artificial Sequence
  Description of Artificial Sequence: Synthetic oligonucleotide
  Sense strand starting at position 2709 of SEQ ID NO: 1886707
ccggguaaauagcuaacau

SEQ ID NO: 2422081 - RNA, 19 nt, Artificial Sequence
  Description of Artificial Sequence: Synthetic oligonucleotide
  Antisense strand to SEQ ID NO: 2422080
auguuagcuauuuacccgg

SEQ ID NO: 2422082 - RNA, 19 nt, Artificial Sequence
  Description of Artificial Sequence: Synthetic oligonucleotide
  Sense strand starting at position 2710 of SEQ ID NO: 1886707
cggguaaauagcuaacaua

SEQ ID NO: 2422083 - RNA, 19 nt, Artificial Sequence
  Description of Artificial Sequence: Synthetic oligonucleotide
  Antisense strand to SEQ ID NO: 2422082
uauguuagcuauuuacccg

SEQ ID NO: 2422084 - RNA, 19 nt, Artificial Sequence
  Description of Artificial Sequence: Synthetic oligonucleotide
  Sense strand starting at position 2766 of SEQ ID NO: 1886707
gggugaacccguuguaaau

SEQ ID NO: 2422085 - RNA, 19 nt, Artificial Sequence
  Description of Artificial Sequence: Synthetic oligonucleotide
  Antisense strand to SEQ ID NO: 2422084
auuuacaacggguucaccc

SEQ ID NO: 2422086 - RNA, 19 nt, Artificial Sequence
  Description of Artificial Sequence: Synthetic oligonucleotide
  Sense strand starting at position 2831 of SEQ ID NO: 1886707
gaccuuugagugggaacuu

SEQ ID NO: 2422087 - RNA, 19 nt, Artificial Sequence
  Description of Artificial Sequence: Synthetic oligonucleotide
  Antisense strand to SEQ ID NO: 2422086
aaguucccacucaaagguc

SEQ ID NO: 2422088 - RNA, 19 nt, Artificial Sequence
  Description of Artificial Sequence: Synthetic oligonucleotide
  Sense strand starting at position 2893 of SEQ ID NO: 1886707
agcguuucaguccaaagga

SEQ ID NO: 2422089 - RNA, 19 nt, Artificial Sequence
  Description of Artificial Sequence: Synthetic oligonucleotide
  Antisense strand to SEQ ID NO: 2422088
uccuuuggacugaaacgcu

SEQ ID NO: 2422090 - RNA, 19 nt, Artificial Sequence
  Description of Artificial Sequence: Synthetic oligonucleotide
  Sense strand starting at position 2944 of SEQ ID NO: 1886707
ggcuuguguguaugaggga

SEQ ID NO: 2422091 - RNA, 19 nt, Artificial Sequence
  Description of Artificial Sequence: Synthetic oligonucleotide
  Antisense strand to SEQ ID NO: 2422090
ucccucauacacacaagcc

SEQ ID NO: 2422092 - RNA, 19 nt, Artificial Sequence
  Description of Artificial Sequence: Synthetic oligonucleotide
  Sense strand starting at position 2949 of SEQ ID NO: 1886707
guguguaugagggacugaa

SEQ ID NO: 2422093 - RNA, 19 nt, Artificial Sequence
  Description of Artificial Sequence: Synthetic oligonucleotide
  Antisense strand to SEQ ID NO: 2422092
uucagucccucauacacac

SEQ ID NO: 2422094 - RNA, 19 nt, Artificial Sequence
  Description of Artificial Sequence: Synthetic oligonucleotide
  Sense strand starting at position 3326 of SEQ ID NO: 1886707
uggcaagauugaugauuug

SEQ ID NO: 2422095 - RNA, 19 nt, Artificial Sequence
  Description of Artificial Sequence: Synthetic oligonucleotide
  Antisense strand to SEQ ID NO: 2422094
caaaucaucaaucuugcca

SEQ ID NO: 2422096 - RNA, 19 nt, Artificial Sequence
  Description of Artificial Sequence: Synthetic oligonucleotide
  Sense strand starting at position 3402 of SEQ ID NO: 1886707
ugauaaagcuuguucugau

SEQ ID NO: 2422097 - RNA, 19 nt, Artificial Sequence
  Description of Artificial Sequence: Synthetic oligonucleotide
  Antisense strand to SEQ ID NO: 2422096
aucagaacaagcuuuauca

SEQ ID NO: 2422098 - RNA, 19 nt, Artificial Sequence
  Description of Artificial Sequence: Synthetic oligonucleotide
  Sense strand starting at position 3403 of SEQ ID NO: 1886707
gauaaagcuuguucugauc

SEQ ID NO: 2422099 - RNA, 19 nt, Artificial Sequence
  Description of Artificial Sequence: Synthetic oligonucleotide
  Antisense strand to SEQ ID NO: 2422098
gaucagaacaagcuuuauc

SEQ ID NO: 2422100 - RNA, 19 nt, Artificial Sequence
  Description of Artificial Sequence: Synthetic oligonucleotide
  Sense strand starting at position 3483 of SEQ ID NO: 1886707
cagggaucaagugguaguu

SEQ ID NO: 2422101 - RNA, 19 nt, Artificial Sequence
  Description of Artificial Sequence: Synthetic oligonucleotide
  Antisense strand to SEQ ID NO: 2422100
aacuaccacuugaucccug

SEQ ID NO: 2422102 - RNA, 19 nt, Artificial Sequence
  Description of Artificial Sequence: Synthetic oligonucleotide
  Sense strand starting at position 3561 of SEQ ID NO: 1886707
ggucauuucuguuaaauga

SEQ ID NO: 2422103 - RNA, 19 nt, Artificial Sequence
  Description of Artificial Sequence: Synthetic oligonucleotide
  Antisense strand to SEQ ID NO: 2422102
ucauuuaacagaaaugacc

SEQ ID NO: 2422104 - RNA, 19 nt, Artificial Sequence
  Description of Artificial Sequence: Synthetic oligonucleotide
  Sense strand starting at position 3578 of SEQ ID NO: 1886707
gaaacagacuguuugcaaa

SEQ ID NO: 2422105 - RNA, 19 nt, Artificial Sequence
  Description of Artificial Sequence: Synthetic oligonucleotide
  Antisense strand to SEQ ID NO: 2422104
uuugcaaacagucuguuuc

SEQ ID NO: 2422106 - RNA, 19 nt, Artificial Sequence
  Description of Artificial Sequence: Synthetic oligonucleotide
  Sense strand starting at position 3605 of SEQ ID NO: 1886707
gggauuguauugucagaac

SEQ ID NO: 2422107 - RNA, 19 nt, Artificial Sequence
  Description of Artificial Sequence: Synthetic oligonucleotide
  Antisense strand to SEQ ID NO: 2422106
guucugacaauacaauccc

SEQ ID NO: 2422108 - RNA, 19 nt, Artificial Sequence
  Description of Artificial Sequence: Synthetic oligonucleotide
  Sense strand starting at position 3650 of SEQ ID NO: 1886707
gggagauuccuagggcugu

SEQ ID NO: 2422109 - RNA, 19 nt, Artificial Sequence
  Description of Artificial Sequence: Synthetic oligonucleotide
  Antisense strand to SEQ ID NO: 2422108
acagcccuaggaaucuccc

SEQ ID NO: 2422110 - RNA, 19 nt, Artificial Sequence
  Description of Artificial Sequence: Synthetic oligonucleotide
  Sense strand starting at position 3815 of SEQ ID NO: 1886707
ccagguaccugucugagga

SEQ ID NO: 2422111 - RNA, 19 nt, Artificial Sequence
  Description of Artificial Sequence: Synthetic oligonucleotide
  Antisense strand to SEQ ID NO: 2422110
uccucagacagguaccugg

SEQ ID NO: 2422112 - RNA, 19 nt, Artificial Sequence
  Description of Artificial Sequence: Synthetic oligonucleotide
  Sense strand starting at position 3889 of SEQ ID NO: 1886707
cugauucguaauggaagca

SEQ ID NO: 2422113 - RNA, 19 nt, Artificial Sequence
  Description of Artificial Sequence: Synthetic oligonucleotide
  Antisense strand to SEQ ID NO: 2422112
ugcuuccauuacgaaucag

SEQ ID NO: 2422114 - RNA, 19 nt, Artificial Sequence
  Description of Artificial Sequence: Synthetic oligonucleotide
  Sense strand starting at position 3890 of SEQ ID NO: 1886707
ugauucguaauggaagcau

SEQ ID NO: 2422115 - RNA, 19 nt, Artificial Sequence
  Description of Artificial Sequence: Synthetic oligonucleotide
  Antisense strand to SEQ ID NO: 2422114
augcuuccauuacgaauca

SEQ ID NO: 2422116 - RNA, 19 nt, Artificial Sequence
  Description of Artificial Sequence: Synthetic oligonucleotide
  Sense strand starting at position 72 of SEQ ID NO: 1886708
gcugcauguucacaggaga

SEQ ID NO: 2422117 - RNA, 19 nt, Artificial Sequence
  Description of Artificial Sequence: Synthetic oligonucleotide
  Antisense strand to SEQ ID NO: 2422116
ucuccugugaacaugcagc

SEQ ID NO: 2422118 - RNA, 19 nt, Artificial Sequence
  Description of Artificial Sequence: Synthetic oligonucleotide
  Sense strand starting at position 472 of SEQ ID NO: 1886708
uacgaaguccagugaccuu

SEQ ID NO: 2422119 - RNA, 19 nt, Artificial Sequence
  Description of Artificial Sequence: Synthetic oligonucleotide
  Antisense strand to SEQ ID NO: 2422118
aaggucacuggacuucgua

SEQ ID NO: 2422120 - RNA, 19 nt, Artificial Sequence
  Description of Artificial Sequence: Synthetic oligonucleotide
  Sense strand starting at position 479 of SEQ ID NO: 1886708
uccagugaccuucgcugaa

SEQ ID NO: 2422121 - RNA, 19 nt, Artificial Sequence
  Description of Artificial Sequence: Synthetic oligonucleotide
  Antisense strand to SEQ ID NO: 2422120
uucagcgaaggucacugga

SEQ ID NO: 2422122 - RNA, 19 nt, Artificial Sequence
  Description of Artificial Sequence: Synthetic oligonucleotide
  Sense strand starting at position 879 of SEQ ID NO: 1886708
gccugucagccgcaucaau

SEQ ID NO: 2422123 - RNA, 19 nt, Artificial Sequence
  Description of Artificial Sequence: Synthetic oligonucleotide
  Antisense strand to SEQ ID NO: 2422122
auugaugcggcugacaggc

SEQ ID NO: 2422124 - RNA, 19 nt, Artificial Sequence
  Description of Artificial Sequence: Synthetic oligonucleotide
  Sense strand starting at position 963 of SEQ ID NO: 1886708
ugaccuaucgucugcggaa

SEQ ID NO: 2422125 - RNA, 19 nt, Artificial Sequence
  Description of Artificial Sequence: Synthetic oligonucleotide
  Antisense strand to SEQ ID NO: 2422124
uuccgcagacgauagguca

SEQ ID NO: 2422126 - RNA, 19 nt, Artificial Sequence
  Description of Artificial Sequence: Synthetic oligonucleotide
  Sense strand starting at position 964 of SEQ ID NO: 1886708
gaccuaucgucugcggaac

SEQ ID NO: 2422127 - RNA, 19 nt, Artificial Sequence
  Description of Artificial Sequence: Synthetic oligonucleotide
  Antisense strand to SEQ ID NO: 2422126
guuccgcagacgauagguc

SEQ ID NO: 2422128 - RNA, 19 nt, Artificial Sequence
  Description of Artificial Sequence: Synthetic oligonucleotide
  Sense strand starting at position 1031 of SEQ ID NO: 1886708
gccucucccuccugaggaa

SEQ ID NO: 2422129 - RNA, 19 nt, Artificial Sequence
  Description of Artificial Sequence: Synthetic oligonucleotide
  Antisense strand to SEQ ID NO: 2422128
uuccucaggagggagaggc

SEQ ID NO: 2422130 - RNA, 19 nt, Artificial Sequence
  Description of Artificial Sequence: Synthetic oligonucleotide
  Sense strand starting at position 1291 of SEQ ID NO: 1886708
ugagguggcuccuaaggaa

SEQ ID NO: 2422131 - RNA, 19 nt, Artificial Sequence
  Description of Artificial Sequence: Synthetic oligonucleotide
  Antisense strand to SEQ ID NO: 2422130
uuccuuaggagccaccuca

SEQ ID NO: 2422132 - RNA, 19 nt, Artificial Sequence
  Description of Artificial Sequence: Synthetic oligonucleotide
  Sense strand starting at position 1594 of SEQ ID NO: 1886708
cguuccauuuccugcagau

SEQ ID NO: 2422133 - RNA, 19 nt, Artificial Sequence
  Description of Artificial Sequence: Synthetic oligonucleotide
  Antisense strand to SEQ ID NO: 2422132
aucugcaggaaauggaacg

SEQ ID NO: 2422134 - RNA, 19 nt, Artificial Sequence
  Description of Artificial Sequence: Synthetic oligonucleotide
  Sense strand starting at position 1809 of SEQ ID NO: 1886708
ugcggugggucauaaggau

SEQ ID NO: 2422135 - RNA, 19 nt, Artificial Sequence
  Description of Artificial Sequence: Synthetic oligonucleotide
  Antisense strand to SEQ ID NO: 2422134
auccuuaugacccaccgca

SEQ ID NO: 2422136 - RNA, 19 nt, Artificial Sequence
  Description of Artificial Sequence: Synthetic oligonucleotide
  Sense strand starting at position 2204 of SEQ ID NO: 1886708
acacaucauccuugauggu

SEQ ID NO: 2422137 - RNA, 19 nt, Artificial Sequence
  Description of Artificial Sequence: Synthetic oligonucleotide
  Antisense strand to SEQ ID NO: 2422136
accaucaaggaugaugugu

SEQ ID NO: 2422138 - RNA, 19 nt, Artificial Sequence
  Description of Artificial Sequence: Synthetic oligonucleotide
  Sense strand starting at position 2280 of SEQ ID NO: 1886708
acgggauccuccgaauaca

SEQ ID NO: 2422139 - RNA, 19 nt, Artificial Sequence
  Description of Artificial Sequence: Synthetic oligonucleotide
  Antisense strand to SEQ ID NO: 2422138
uguauucggaggaucccgu

SEQ ID NO: 2422140 - RNA, 19 nt, Artificial Sequence
  Description of Artificial Sequence: Synthetic oligonucleotide
  Sense strand starting at position 2518 of SEQ ID NO: 1886708
gguuccaucgcuuaaccuu

SEQ ID NO: 2422141 - RNA, 19 nt, Artificial Sequence
  Description of Artificial Sequence: Synthetic oligonucleotide
  Antisense strand to SEQ ID NO: 2422140
aagguuaagcgauggaacc

SEQ ID NO: 2422142 - RNA, 19 nt, Artificial Sequence
  Description of Artificial Sequence: Synthetic oligonucleotide
  Sense strand starting at position 2819 of SEQ ID NO: 1886708
gaggcagcuugcugacauu

SEQ ID NO: 2422143 - RNA, 19 nt, Artificial Sequence
  Description of Artificial Sequence: Synthetic oligonucleotide
  Antisense strand to SEQ ID NO: 2422142
aaugucagcaagcugccuc

SEQ ID NO: 2422144 - RNA, 19 nt, Artificial Sequence
  Description of Artificial Sequence: Synthetic oligonucleotide
  Sense strand starting at position 2920 of SEQ ID NO: 1886708
agcagaacacuaggucuau

SEQ ID NO: 2422145 - RNA, 19 nt, Artificial Sequence
  Description of Artificial Sequence: Synthetic oligonucleotide
  Antisense strand to SEQ ID NO: 2422144
auagaccuaguguucugcu

SEQ ID NO: 2422146 - RNA, 19 nt, Artificial Sequence
  Description of Artificial Sequence: Synthetic oligonucleotide
  Sense strand starting at position 3153 of SEQ ID NO: 1886708
ccaugaagauuauauguau

SEQ ID NO: 2422147 - RNA, 19 nt, Artificial Sequence
  Description of Artificial Sequence: Synthetic oligonucleotide
  Antisense strand to SEQ ID NO: 2422146
auacauauaaucuucaugg

SEQ ID NO: 2422148 - RNA, 19 nt, Artificial Sequence
  Description of Artificial Sequence: Synthetic oligonucleotide
  Sense strand starting at position 3165 of SEQ ID NO: 1886708
uauguauuaucguugcaac

SEQ ID NO: 2422149 - RNA, 19 nt, Artificial Sequence
  Description of Artificial Sequence: Synthetic oligonucleotide
  Antisense strand to SEQ ID NO: 2422148
guugcaacgauaauacaua

SEQ ID NO: 2422150 - RNA, 19 nt, Artificial Sequence
  Description of Artificial Sequence: Synthetic oligonucleotide
  Sense strand starting at position 3166 of SEQ ID NO: 1886708
auguauuaucguugcaacu

SEQ ID NO: 2422151 - RNA, 19 nt, Artificial Sequence
  Description of Artificial Sequence: Synthetic oligonucleotide
  Antisense strand to SEQ ID NO: 2422150
aguugcaacgauaauacau

SEQ ID NO: 2422152 - RNA, 19 nt, Artificial Sequence
  Description of Artificial Sequence: Synthetic oligonucleotide
  Sense strand starting at position 3202 of SEQ ID NO: 1886708
ugcuguuucucccauuuau

SEQ ID NO: 2422153 - RNA, 19 nt, Artificial Sequence
  Description of Artificial Sequence: Synthetic oligonucleotide
  Antisense strand to SEQ ID NO: 2422152
auaaaugggagaaacagca

SEQ ID NO: 2422154 - RNA, 19 nt, Artificial Sequence
  Description of Artificial Sequence: Synthetic oligonucleotide
  Sense strand starting at position 3296 of SEQ ID NO: 1886708
caggguuuggcuggcaaga

SEQ ID NO: 2422155 - RNA, 19 nt, Artificial Sequence
  Description of Artificial Sequence: Synthetic oligonucleotide
  Antisense strand to SEQ ID NO: 2422154
ucuugccagccaaacccug

SEQ ID NO: 2422156 - RNA, 19 nt, Artificial Sequence
  Description of Artificial Sequence: Synthetic oligonucleotide
  Sense strand starting at position 3323 of SEQ ID NO: 1886708
ugccuugucuggccacgau

SEQ ID NO: 2422157 - RNA, 19 nt, Artificial Sequence
  Description of Artificial Sequence: Synthetic oligonucleotide
  Antisense strand to SEQ ID NO: 2422156
aucguggccagacaaggca

SEQ ID NO: 2422158 - RNA, 19 nt, Artificial Sequence
  Description of Artificial Sequence: Synthetic oligonucleotide
  Sense strand starting at position 3327 of SEQ ID NO: 1886708
uugucuggccacgauaacu

SEQ ID NO: 2422159 - RNA, 19 nt, Artificial Sequence
  Description of Artificial Sequence: Synthetic oligonucleotide
  Antisense strand to SEQ ID NO: 2422158
aguuaucguggccagacaa

SEQ ID NO: 2422160 - RNA, 19 nt, Artificial Sequence
  Description of Artificial Sequence: Synthetic oligonucleotide
  Sense strand starting at position 3335 of SEQ ID NO: 1886708
ccacgauaacugcacaacu

SEQ ID NO: 2422161 - RNA, 19 nt, Artificial Sequence
  Description of Artificial Sequence: Synthetic oligonucleotide
  Antisense strand to SEQ ID NO: 2422160
aguugugcaguuaucgugg

SEQ ID NO: 2422162 - RNA, 19 nt, Artificial Sequence
  Description of Artificial Sequence: Synthetic oligonucleotide
  Sense strand starting at position 3437 of SEQ ID NO: 1886708
gggcacagagccugagaua

SEQ ID NO: 2422163 - RNA, 19 nt, Artificial Sequence
  Description of Artificial Sequence: Synthetic oligonucleotide
  Antisense strand to SEQ ID NO: 2422162
uaucucaggcucugugccc

SEQ ID NO: 2422164 - RNA, 19 nt, Artificial Sequence
  Description of Artificial Sequence: Synthetic oligonucleotide
  Sense strand starting at position 3448 of SEQ ID NO: 1886708
cugagauagcccuaguguc

SEQ ID NO: 2422165 - RNA, 19 nt, Artificial Sequence
  Description of Artificial Sequence: Synthetic oligonucleotide
  Antisense strand to SEQ ID NO: 2422164
gacacuagggcuaucucag

SEQ ID NO: 2422166 - RNA, 19 nt, Artificial Sequence
  Description of Artificial Sequence: Synthetic oligonucleotide
  Sense strand starting at position 3586 of SEQ ID NO: 1886708
cucccugucuugcugaaga

SEQ ID NO: 2422167 - RNA, 19 nt, Artificial Sequence
  Description of Artificial Sequence: Synthetic oligonucleotide
  Antisense strand to SEQ ID NO: 2422166
ucuucagcaagacagggag

SEQ ID NO: 2422168 - RNA, 19 nt, Artificial Sequence
  Description of Artificial Sequence: Synthetic oligonucleotide
  Sense strand starting at position 3588 of SEQ ID NO: 1886708
cccugucuugcugaagaag

SEQ ID NO: 2422169 - RNA, 19 nt, Artificial Sequence
  Description of Artificial Sequence: Synthetic oligonucleotide
  Antisense strand to SEQ ID NO: 2422168
cuucuucagcaagacaggg

SEQ ID NO: 2422170 - RNA, 19 nt, Artificial Sequence
  Description of Artificial Sequence: Synthetic oligonucleotide
  Sense strand starting at position 3653 of SEQ ID NO: 1886708
cuggcugcccuuggagaaa

SEQ ID NO: 2422171 - RNA, 19 nt, Artificial Sequence
  Description of Artificial Sequence: Synthetic oligonucleotide
  Antisense strand to SEQ ID NO: 2422170
uuucuccaagggcagccag

SEQ ID NO: 2422172 - RNA, 19 nt, Artificial Sequence
  Description of Artificial Sequence: Synthetic oligonucleotide
  Sense strand starting at position 3724 of SEQ ID NO: 1886708
guacacuauugcuggucau

SEQ ID NO: 2422173 - RNA, 19 nt, Artificial Sequence
  Description of Artificial Sequence: Synthetic oligonucleotide
  Antisense strand to SEQ ID NO: 2422172
augaccagcaauaguguac

SEQ ID NO: 2422174 - RNA, 19 nt, Artificial Sequence
  Description of Artificial Sequence: Synthetic oligonucleotide
  Sense strand starting at position 188 of SEQ ID NO: 1886709
ccuagagcuuugucuguga

SEQ ID NO: 2422175 - RNA, 19 nt, Artificial Sequence
  Description of Artificial Sequence: Synthetic oligonucleotide
  Antisense strand to SEQ ID NO: 2422174
ucacagacaaagcucuagg

SEQ ID NO: 2422176 - RNA, 19 nt, Artificial Sequence
  Description of Artificial Sequence: Synthetic oligonucleotide
  Sense strand starting at position 192 of SEQ ID NO: 1886709
gagcuuugucugugagcga

SEQ ID NO: 2422177 - RNA, 19 nt, Artificial Sequence
  Description of Artificial Sequence: Synthetic oligonucleotide
  Antisense strand to SEQ ID NO: 2422176
ucgcucacagacaaagcuc

SEQ ID NO: 2422178 - RNA, 19 nt, Artificial Sequence
  Description of Artificial Sequence: Synthetic oligonucleotide
  Sense strand starting at position 193 of SEQ ID NO: 1886709
agcuuugucugugagcgaa

SEQ ID NO: 2422179 - RNA, 19 nt, Artificial Sequence
  Description of Artificial Sequence: Synthetic oligonucleotide
  Antisense strand to SEQ ID NO: 2422178
uucgcucacagacaaagcu

SEQ ID NO: 2422180 - RNA, 19 nt, Artificial Sequence
  Description of Artificial Sequence: Synthetic oligonucleotide
  Sense strand starting at position 280 of SEQ ID NO: 1886709
gcugccucauuccugagaa

SEQ ID NO: 2422181 - RNA, 19 nt, Artificial Sequence
  Description of Artificial Sequence: Synthetic oligonucleotide
  Antisense strand to SEQ ID NO: 2422180
uucucaggaaugaggcagc

SEQ ID NO: 2422182 - RNA, 19 nt, Artificial Sequence
  Description of Artificial Sequence: Synthetic oligonucleotide
  Sense strand starting at position 281 of SEQ ID NO: 1886709
cugccucauuccugagaag

SEQ ID NO: 2422183 - RNA, 19 nt, Artificial Sequence
  Description of Artificial Sequence: Synthetic oligonucleotide
  Antisense strand to SEQ ID NO: 2422182
cuucucaggaaugaggcag

SEQ ID NO: 2422184 - RNA, 19 nt, Artificial Sequence
  Description of Artificial Sequence: Synthetic oligonucleotide
  Sense strand starting at position 284 of SEQ ID NO: 1886709
ccucauuccugagaagccu

SEQ ID NO: 2422185 - RNA, 19 nt, Artificial Sequence
  Description of Artificial Sequence: Synthetic oligonucleotide
  Antisense strand to SEQ ID NO: 2422184
aggcuucucaggaaugagg

SEQ ID NO: 2422186 - RNA, 19 nt, Artificial Sequence
  Description of Artificial Sequence: Synthetic oligonucleotide
  Sense strand starting at position 552 of SEQ ID NO: 1886709
gcaucaucacuugagcuca

SEQ ID NO: 2422187 - RNA, 19 nt, Artificial Sequence
  Description of Artificial Sequence: Synthetic oligonucleotide
  Antisense strand to SEQ ID NO: 2422186
ugagcucaagugaugaugc

SEQ ID NO: 2422188 - RNA, 19 nt, Artificial Sequence
  Description of Artificial Sequence: Synthetic oligonucleotide
  Sense strand starting at position 573 of SEQ ID NO: 1886709
agccuucccgaaggaagaa

SEQ ID NO: 2422189 - RNA, 19 nt, Artificial Sequence
  Description of Artificial Sequence: Synthetic oligonucleotide
  Antisense strand to SEQ ID NO: 2422188
uucuuccuucgggaaggcu

SEQ ID NO: 2422190 - RNA, 19 nt, Artificial Sequence
  Description of Artificial Sequence: Synthetic oligonucleotide
  Sense strand starting at position 720 of SEQ ID NO: 1886709
gccugugauggccaacagu

SEQ ID NO: 2422191 - RNA, 19 nt, Artificial Sequence
  Description of Artificial Sequence: Synthetic oligonucleotide
  Antisense strand to SEQ ID NO: 2422190
acuguuggccaucacaggc

SEQ ID NO: 2422192 - RNA, 19 nt, Artificial Sequence
  Description of Artificial Sequence: Synthetic oligonucleotide
  Sense strand starting at position 852 of SEQ ID NO: 1886709
uggcacuucuuccgagaag

SEQ ID NO: 2422193 - RNA, 19 nt, Artificial Sequence
  Description of Artificial Sequence: Synthetic oligonucleotide
  Antisense strand to SEQ ID NO: 2422192
cuucucggaagaagugcca

SEQ ID NO: 2422194 - RNA, 19 nt, Artificial Sequence
  Description of Artificial Sequence: Synthetic oligonucleotide
  Sense strand starting at position 1220 of SEQ ID NO: 1886709
gggccauucuuaguuaccu

SEQ ID NO: 2422195 - RNA, 19 nt, Artificial Sequence
  Description of Artificial Sequence: Synthetic oligonucleotide
  Antisense strand to SEQ ID NO: 2422194
agguaacuaagaauggccc

SEQ ID NO: 2422196 - RNA, 19 nt, Artificial Sequence
  Description of Artificial Sequence: Synthetic oligonucleotide
  Sense strand starting at position 1289 of SEQ ID NO: 1886709
cgcuuugucacccaggauu

SEQ ID NO: 2422197 - RNA, 19 nt, Artificial Sequence
  Description of Artificial Sequence: Synthetic oligonucleotide
  Antisense strand to SEQ ID NO: 2422196
aauccugggugacaaagcg

SEQ ID NO: 2422198 - RNA, 19 nt, Artificial Sequence
  Description of Artificial Sequence: Synthetic oligonucleotide
  Sense strand starting at position 1291 of SEQ ID NO: 1886709
cuuugucacccaggauuga

SEQ ID NO: 2422199 - RNA, 19 nt, Artificial Sequence
  Description of Artificial Sequence: Synthetic oligonucleotide
  Antisense strand to SEQ ID NO: 2422198
ucaauccugggugacaaag

SEQ ID NO: 2422200 - RNA, 19 nt, Artificial Sequence
  Description of Artificial Sequence: Synthetic oligonucleotide
  Sense strand starting at position 1605 of SEQ ID NO: 1886709
ggagacagcuucuuggagu

SEQ ID NO: 2422201 - RNA, 19 nt, Artificial Sequence
  Description of Artificial Sequence: Synthetic oligonucleotide
  Antisense strand to SEQ ID NO: 2422200
acuccaagaagcugucucc

SEQ ID NO: 2422202 - RNA, 19 nt, Artificial Sequence
  Description of Artificial Sequence: Synthetic oligonucleotide
  Sense strand starting at position 1652 of SEQ ID NO: 1886709
cagaguagcucaggccuua

SEQ ID NO: 2422203 - RNA, 19 nt, Artificial Sequence
  Description of Artificial Sequence: Synthetic oligonucleotide
  Antisense strand to SEQ ID NO: 2422202
uaaggccugagcuacucug

SEQ ID NO: 2422204 - RNA, 19 nt, Artificial Sequence
  Description of Artificial Sequence: Synthetic oligonucleotide
  Sense strand starting at position 1844 of SEQ ID NO: 1886709
gguagaugcccugggaauc

SEQ ID NO: 2422205 - RNA, 19 nt, Artificial Sequence
  Description of Artificial Sequence: Synthetic oligonucleotide
  Antisense strand to SEQ ID NO: 2422204
gauucccagggcaucuacc

SEQ ID NO: 2422206 - RNA, 19 nt, Artificial Sequence
  Description of Artificial Sequence: Synthetic oligonucleotide
  Sense strand starting at position 2038 of SEQ ID NO: 1886709
cuuccuuccugucugauuu

SEQ ID NO: 2422207 - RNA, 19 nt, Artificial Sequence
  Description of Artificial Sequence: Synthetic oligonucleotide
  Antisense strand to SEQ ID NO: 2422206
aaaucagacaggaaggaag

SEQ ID NO: 2422208 - RNA, 19 nt, Artificial Sequence
  Description of Artificial Sequence: Synthetic oligonucleotide
  Sense strand starting at position 2150 of SEQ ID NO: 1886709
gggucuugacucugggauu

SEQ ID NO: 2422209 - RNA, 19 nt, Artificial Sequence
  Description of Artificial Sequence: Synthetic oligonucleotide
  Antisense strand to SEQ ID NO: 2422208
aaucccagagucaagaccc

SEQ ID NO: 2422210 - RNA, 19 nt, Artificial Sequence
  Description of Artificial Sequence: Synthetic oligonucleotide
  Sense strand starting at position 2151 of SEQ ID NO: 1886709
ggucuugacucugggauua

SEQ ID NO: 2422211 - RNA, 19 nt, Artificial Sequence
  Description of Artificial Sequence: Synthetic oligonucleotide
  Antisense strand to SEQ ID NO: 2422210
uaaucccagagucaagacc

SEQ ID NO: 2422212 - RNA, 19 nt, Artificial Sequence
  Description of Artificial Sequence: Synthetic oligonucleotide
  Sense strand starting at position 2153 of SEQ ID NO: 1886709
ucuugacucugggauuaag

SEQ ID NO: 2422213 - RNA, 19 nt, Artificial Sequence
  Description of Artificial Sequence: Synthetic oligonucleotide
  Antisense strand to SEQ ID NO: 2422212
cuuaaucccagagucaaga

SEQ ID NO: 2422214 - RNA, 19 nt, Artificial Sequence
  Description of Artificial Sequence: Synthetic oligonucleotide
  Sense strand starting at position 2163 of SEQ ID NO: 1886709
gggauuaagugucccugca

SEQ ID NO: 2422215 - RNA, 19 nt, Artificial Sequence
  Description of Artificial Sequence: Synthetic oligonucleotide
  Antisense strand to SEQ ID NO: 2422214
ugcagggacacuuaauccc

SEQ ID NO: 2422216 - RNA, 19 nt, Artificial Sequence
  Description of Artificial Sequence: Synthetic oligonucleotide
  Sense strand starting at position 2183 of SEQ ID NO: 1886709
guggcaugcucaggauaaa

SEQ ID NO: 2422217 - RNA, 19 nt, Artificial Sequence
  Description of Artificial Sequence: Synthetic oligonucleotide
  Antisense strand to SEQ ID NO: 2422216
uuuauccugagcaugccac

SEQ ID NO: 2422218 - RNA, 19 nt, Artificial Sequence
  Description of Artificial Sequence: Synthetic oligonucleotide
  Sense strand starting at position 2184 of SEQ ID NO: 1886709
uggcaugcucaggauaaag

SEQ ID NO: 2422219 - RNA, 19 nt, Artificial Sequence
  Description of Artificial Sequence: Synthetic oligonucleotide
  Antisense strand to SEQ ID NO: 2422218
cuuuauccugagcaugcca

SEQ ID NO: 2422220 - RNA, 19 nt, Artificial Sequence
  Description of Artificial Sequence: Synthetic oligonucleotide
  Sense strand starting at position 2287 of SEQ ID NO: 1886709
gcggguggucaggaaauca

SEQ ID NO: 2422221 - RNA, 19 nt, Artificial Sequence
  Description of Artificial Sequence: Synthetic oligonucleotide
  Antisense strand to SEQ ID NO: 2422220
ugauuuccugaccacccgc

SEQ ID NO: 2422222 - RNA, 19 nt, Artificial Sequence
  Description of Artificial Sequence: Synthetic oligonucleotide
  Sense strand starting at position 2934 of SEQ ID NO: 1886709
acaucuuccugugagcaaa

SEQ ID NO: 2422223 - RNA, 19 nt, Artificial Sequence
  Description of Artificial Sequence: Synthetic oligonucleotide
  Antisense strand to SEQ ID NO: 2422222
uuugcucacaggaagaugu

SEQ ID NO: 2422224 - RNA, 19 nt, Artificial Sequence
  Description of Artificial Sequence: Synthetic oligonucleotide
  Sense strand starting at position 3127 of SEQ ID NO: 1886709
acaauaaaguaugggacau

SEQ ID NO: 2422225 - RNA, 19 nt, Artificial Sequence
  Description of Artificial Sequence: Synthetic oligonucleotide
  Antisense strand to SEQ ID NO: 2422224
augucccauacuuuauugu

SEQ ID NO: 2422226 - RNA, 19 nt, Artificial Sequence
  Description of Artificial Sequence: Synthetic oligonucleotide
  Sense strand starting at position 3650 of SEQ ID NO: 1886709
guggguauccgucacauaa

SEQ ID NO: 2422227 - RNA, 19 nt, Artificial Sequence
  Description of Artificial Sequence: Synthetic oligonucleotide
  Antisense strand to SEQ ID NO: 2422226
uuaugugacggauacccac

SEQ ID NO: 2422228 - RNA, 19 nt, Artificial Sequence
  Description of Artificial Sequence: Synthetic oligonucleotide
  Sense strand starting at position 3739 of SEQ ID NO: 1886709
gccucauccacgggaucuu

SEQ ID NO: 2422229 - RNA, 19 nt, Artificial Sequence
  Description of Artificial Sequence: Synthetic oligonucleotide
  Antisense strand to SEQ ID NO: 2422228
aagaucccguggaugaggc

SEQ ID NO: 2422230 - RNA, 19 nt, Artificial Sequence
  Description of Artificial Sequence: Synthetic oligonucleotide
  Sense strand starting at position 320 of SEQ ID NO: 1886710
uguaguagucuaugaggaa

SEQ ID NO: 2422231 - RNA, 19 nt, Artificial Sequence
  Description of Artificial Sequence: Synthetic oligonucleotide
  Antisense strand to SEQ ID NO: 2422230
uuccucauagacuacuaca

SEQ ID NO: 2422232 - RNA, 19 nt, Artificial Sequence
  Description of Artificial Sequence: Synthetic oligonucleotide
  Sense strand starting at position 350 of SEQ ID NO: 1886710
gugcuuaaugcauaauaca

SEQ ID NO: 2422233 - RNA, 19 nt, Artificial Sequence
  Description of Artificial Sequence: Synthetic oligonucleotide
  Antisense strand to SEQ ID NO: 2422232
uguauuaugcauuaagcac

SEQ ID NO: 2422234 - RNA, 19 nt, Artificial Sequence
  Description of Artificial Sequence: Synthetic oligonucleotide
  Sense strand starting at position 378 of SEQ ID NO: 1886710
gcuguuauucuccagaguc

SEQ ID NO: 2422235 - RNA, 19 nt, Artificial Sequence
  Description of Artificial Sequence: Synthetic oligonucleotide
  Antisense strand to SEQ ID NO: 2422234
gacucuggagaauaacagc

SEQ ID NO: 2422236 - RNA, 19 nt, Artificial Sequence
  Description of Artificial Sequence: Synthetic oligonucleotide
  Sense strand starting at position 380 of SEQ ID NO: 1886710
uguuauucuccagagucau

SEQ ID NO: 2422237 - RNA, 19 nt, Artificial Sequence
  Description of Artificial Sequence: Synthetic oligonucleotide
  Antisense strand to SEQ ID NO: 2422236
augacucuggagaauaaca

SEQ ID NO: 2422238 - RNA, 19 nt, Artificial Sequence
  Description of Artificial Sequence: Synthetic oligonucleotide
  Sense strand starting at position 469 of SEQ ID NO: 1886710
cuagguauauugcucuuau

SEQ ID NO: 2422239 - RNA, 19 nt, Artificial Sequence
  Description of Artificial Sequence: Synthetic oligonucleotide
  Antisense strand to SEQ ID NO: 2422238
auaagagcaauauaccuag

SEQ ID NO: 2422240 - RNA, 19 nt, Artificial Sequence
  Description of Artificial Sequence: Synthetic oligonucleotide
  Sense strand starting at position 558 of SEQ ID NO: 1886710
aaagcuuuauguguuaaug

SEQ ID NO: 2422241 - RNA, 19 nt, Artificial Sequence
  Description of Artificial Sequence: Synthetic oligonucleotide
  Antisense strand to SEQ ID NO: 2422240
cauuaacacauaaagcuuu

SEQ ID NO: 2422242 - RNA, 19 nt, Artificial Sequence
  Description of Artificial Sequence: Synthetic oligonucleotide
  Sense strand starting at position 612 of SEQ ID NO: 1886710
aguauuuccucggaaagau

SEQ ID NO: 2422243 - RNA, 19 nt, Artificial Sequence
  Description of Artificial Sequence: Synthetic oligonucleotide
  Antisense strand to SEQ ID NO: 2422242
aucuuuccgaggaaauacu

SEQ ID NO: 2422244 - RNA, 19 nt, Artificial Sequence
  Description of Artificial Sequence: Synthetic oligonucleotide
  Sense strand starting at position 630 of SEQ ID NO: 1886710
uuuaguaaguuggcaaaga

SEQ ID NO: 2422245 - RNA, 19 nt, Artificial Sequence
  Description of Artificial Sequence: Synthetic oligonucleotide
  Antisense strand to SEQ ID NO: 2422244
ucuuugccaacuuacuaaa

SEQ ID NO: 2422246 - RNA, 19 nt, Artificial Sequence
  Description of Artificial Sequence: Synthetic oligonucleotide
  Sense strand starting at position 658 of SEQ ID NO: 1886710
uacuaaguugguggagaaa

SEQ ID NO: 2422247 - RNA, 19 nt, Artificial Sequence
  Description of Artificial Sequence: Synthetic oligonucleotide
  Antisense strand to SEQ ID NO: 2422246
uuucuccaccaacuuagua

SEQ ID NO: 2422248 - RNA, 19 nt, Artificial Sequence
  Description of Artificial Sequence: Synthetic oligonucleotide
  Sense strand starting at position 757 of SEQ ID NO: 1886710
gggccuuuccuggguauca

SEQ ID NO: 2422249 - RNA, 19 nt, Artificial Sequence
  Description of Artificial Sequence: Synthetic oligonucleotide
  Antisense strand to SEQ ID NO: 2422248
ugauacccaggaaaggccc

SEQ ID NO: 2422250 - RNA, 19 nt, Artificial Sequence
  Description of Artificial Sequence: Synthetic oligonucleotide
  Sense strand starting at position 1197 of SEQ ID NO: 1886710
agaucuuuguauccaguca

SEQ ID NO: 2422251 - RNA, 19 nt, Artificial Sequence
  Description of Artificial Sequence: Synthetic oligonucleotide
  Antisense strand to SEQ ID NO: 2422250
ugacuggauacaaagaucu

SEQ ID NO: 2422252 - RNA, 19 nt, Artificial Sequence
  Description of Artificial Sequence: Synthetic oligonucleotide
  Sense strand starting at position 1420 of SEQ ID NO: 1886710
auuugaaugcuaugcccga

SEQ ID NO: 2422253 - RNA, 19 nt, Artificial Sequence
  Description of Artificial Sequence: Synthetic oligonucleotide
  Antisense strand to SEQ ID NO: 2422252
ucgggcauagcauucaaau

SEQ ID NO: 2422254 - RNA, 19 nt, Artificial Sequence
  Description of Artificial Sequence: Synthetic oligonucleotide
  Sense strand starting at position 1425 of SEQ ID NO: 1886710
aaugcuaugcccgagagca

SEQ ID NO: 2422255 - RNA, 19 nt, Artificial Sequence
  Description of Artificial Sequence: Synthetic oligonucleotide
  Antisense strand to SEQ ID NO: 2422254
ugcucucgggcauagcauu

SEQ ID NO: 2422256 - RNA, 19 nt, Artificial Sequence
  Description of Artificial Sequence: Synthetic oligonucleotide
  Sense strand starting at position 1427 of SEQ ID NO: 1886710
ugcuaugcccgagagcaua

SEQ ID NO: 2422257 - RNA, 19 nt, Artificial Sequence
  Description of Artificial Sequence: Synthetic oligonucleotide
  Antisense strand to SEQ ID NO: 2422256
uaugcucucgggcauagca

SEQ ID NO: 2422258 - RNA, 19 nt, Artificial Sequence
  Description of Artificial Sequence: Synthetic oligonucleotide
  Sense strand starting at position 1501 of SEQ ID NO: 1886710
cuagaaagugcuggcucua

SEQ ID NO: 2422259 - RNA, 19 nt, Artificial Sequence
  Description of Artificial Sequence: Synthetic oligonucleotide
  Antisense strand to SEQ ID NO: 2422258
uagagccagcacuuucuag

SEQ ID NO: 2422260 - RNA, 19 nt, Artificial Sequence
  Description of Artificial Sequence: Synthetic oligonucleotide
  Sense strand starting at position 1506 of SEQ ID NO: 1886710
aagugcuggcucuaaaucu

SEQ ID NO: 2422261 - RNA, 19 nt, Artificial Sequence
  Description of Artificial Sequence: Synthetic oligonucleotide
  Antisense strand to SEQ ID NO: 2422260
agauuuagagccagcacuu

SEQ ID NO: 2422262 - RNA, 19 nt, Artificial Sequence
  Description of Artificial Sequence: Synthetic oligonucleotide
  Sense strand starting at position 1737 of SEQ ID NO: 1886710
uguaaauguucuucccgau

SEQ ID NO: 2422263 - RNA, 19 nt, Artificial Sequence
  Description of Artificial Sequence: Synthetic oligonucleotide
  Antisense strand to SEQ ID NO: 2422262
aucgggaagaacauuuaca

SEQ ID NO: 2422264 - RNA, 19 nt, Artificial Sequence
  Description of Artificial Sequence: Synthetic oligonucleotide
  Sense strand starting at position 1752 of SEQ ID NO: 1886710
cgauguccugcggacagaa

SEQ ID NO: 2422265 - RNA, 19 nt, Artificial Sequence
  Description of Artificial Sequence: Synthetic oligonucleotide
  Antisense strand to SEQ ID NO: 2422264
uucuguccgcaggacaucg

SEQ ID NO: 2422266 - RNA, 19 nt, Artificial Sequence
  Description of Artificial Sequence: Synthetic oligonucleotide
  Sense strand starting at position 2110 of SEQ ID NO: 1886710
cccgcauagccagagaagu

SEQ ID NO: 2422267 - RNA, 19 nt, Artificial Sequence
  Description of Artificial Sequence: Synthetic oligonucleotide
  Antisense strand to SEQ ID NO: 2422266
acuucucuggcuaugcggg

SEQ ID NO: 2422268 - RNA, 19 nt, Artificial Sequence
  Description of Artificial Sequence: Synthetic oligonucleotide
  Sense strand starting at position 2359 of SEQ ID NO: 1886710
cuguauauauucuuauggu

SEQ ID NO: 2422269 - RNA, 19 nt, Artificial Sequence
  Description of Artificial Sequence: Synthetic oligonucleotide
  Antisense strand to SEQ ID NO: 2422268
accauaagaauauauacag

SEQ ID NO: 2422270 - RNA, 19 nt, Artificial Sequence
  Description of Artificial Sequence: Synthetic oligonucleotide
  Sense strand starting at position 2482 of SEQ ID NO: 1886710
gcugcauuacugcuccagu

SEQ ID NO: 2422271 - RNA, 19 nt, Artificial Sequence
  Description of Artificial Sequence: Synthetic oligonucleotide
  Antisense strand to SEQ ID NO: 2422270
acuggagcaguaaugcagc

SEQ ID NO: 2422272 - RNA, 19 nt, Artificial Sequence
  Description of Artificial Sequence: Synthetic oligonucleotide
  Sense strand starting at position 2491 of SEQ ID NO: 1886710
cugcuccaguucucagaaa

SEQ ID NO: 2422273 - RNA, 19 nt, Artificial Sequence
  Description of Artificial Sequence: Synthetic oligonucleotide
  Antisense strand to SEQ ID NO: 2422272
uuucugagaacuggagcag

SEQ ID NO: 2422274 - RNA, 19 nt, Artificial Sequence
  Description of Artificial Sequence: Synthetic oligonucleotide
  Sense strand starting at position 2629 of SEQ ID NO: 1886710
cccuguucccaagauugua

SEQ ID NO: 2422275 - RNA, 19 nt, Artificial Sequence
  Description of Artificial Sequence: Synthetic oligonucleotide
  Antisense strand to SEQ ID NO: 2422274
uacaaucuugggaacaggg

SEQ ID NO: 2422276 - RNA, 19 nt, Artificial Sequence
  Description of Artificial Sequence: Synthetic oligonucleotide
  Sense strand starting at position 2818 of SEQ ID NO: 1886710
gguaauauaugggauauaa

SEQ ID NO: 2422277 - RNA, 19 nt, Artificial Sequence
  Description of Artificial Sequence: Synthetic oligonucleotide
  Antisense strand to SEQ ID NO: 2422276
uuauaucccauauauuacc

SEQ ID NO: 2422278 - RNA, 19 nt, Artificial Sequence
  Description of Artificial Sequence: Synthetic oligonucleotide
  Sense strand starting at position 2833 of SEQ ID NO: 1886710
auaauagaaccguauguac

SEQ ID NO: 2422279 - RNA, 19 nt, Artificial Sequence
  Description of Artificial Sequence: Synthetic oligonucleotide
  Antisense strand to SEQ ID NO: 2422278
guacauacgguucuauuau

SEQ ID NO: 2422280 - RNA, 19 nt, Artificial Sequence
  Description of Artificial Sequence: Synthetic oligonucleotide
  Sense strand starting at position 2867 of SEQ ID NO: 1886710
uguggacguuuaccugaau

SEQ ID NO: 2422281 - RNA, 19 nt, Artificial Sequence
  Description of Artificial Sequence: Synthetic oligonucleotide
  Antisense strand to SEQ ID NO: 2422280
auucagguaaacguccaca

SEQ ID NO: 2422282 - RNA, 19 nt, Artificial Sequence
  Description of Artificial Sequence: Synthetic oligonucleotide
  Sense strand starting at position 2868 of SEQ ID NO: 1886710
guggacguuuaccugaauu

SEQ ID NO: 2422283 - RNA, 19 nt, Artificial Sequence
  Description of Artificial Sequence: Synthetic oligonucleotide
  Antisense strand to SEQ ID NO: 2422282
aauucagguaaacguccac

SEQ ID NO: 2422284 - RNA, 19 nt, Artificial Sequence
  Description of Artificial Sequence: Synthetic oligonucleotide
  Sense strand starting at position 2870 of SEQ ID NO: 1886710
ggacguuuaccugaauucu

SEQ ID NO: 2422285 - RNA, 19 nt, Artificial Sequence
  Description of Artificial Sequence: Synthetic oligonucleotide
  Antisense strand to SEQ ID NO: 2422284
agaauucagguaaacgucc

SEQ ID NO: 2422286 - RNA, 19 nt, Artificial Sequence
  Description of Artificial Sequence: Synthetic oligonucleotide
  Sense strand starting at position 3425 of SEQ ID NO: 1886710
ccagcauacucccuagagu

SEQ ID NO: 2422287 - RNA, 19 nt, Artificial Sequence
  Description of Artificial Sequence: Synthetic oligonucleotide
  Antisense strand to SEQ ID NO: 2422286
acucuagggaguaugcugg

SEQ ID NO: 2422288 - RNA, 19 nt, Artificial Sequence
  Description of Artificial Sequence: Synthetic oligonucleotide
  Sense strand starting at position 3428 of SEQ ID NO: 1886710
gcauacucccuagaguagu

SEQ ID NO: 2422289 - RNA, 19 nt, Artificial Sequence
  Description of Artificial Sequence: Synthetic oligonucleotide
  Antisense strand to SEQ ID NO: 2422288
acuacucuagggaguaugc

SEQ ID NO: 2422290 - RNA, 19 nt, Artificial Sequence
  Description of Artificial Sequence: Synthetic oligonucleotide
  Sense strand starting at position 3460 of SEQ ID NO: 1886710
aucuaacuauuggaaggaa

SEQ ID NO: 2422291 - RNA, 19 nt, Artificial Sequence
  Description of Artificial Sequence: Synthetic oligonucleotide
  Antisense strand to SEQ ID NO: 2422290
uuccuuccaauaguuagau

SEQ ID NO: 2422292 - RNA, 19 nt, Artificial Sequence
  Description of Artificial Sequence: Synthetic oligonucleotide
  Sense strand starting at position 3499 of SEQ ID NO: 1886710
uagaauucuggcuggucca

SEQ ID NO: 2422293 - RNA, 19 nt, Artificial Sequence
  Description of Artificial Sequence: Synthetic oligonucleotide
  Antisense strand to SEQ ID NO: 2422292
uggaccagccagaauucua

SEQ ID NO: 2422294 - RNA, 19 nt, Artificial Sequence
  Description of Artificial Sequence: Synthetic oligonucleotide
  Sense strand starting at position 3500 of SEQ ID NO: 1886710
agaauucuggcugguccaa

SEQ ID NO: 2422295 - RNA, 19 nt, Artificial Sequence
  Description of Artificial Sequence: Synthetic oligonucleotide
  Antisense strand to SEQ ID NO: 2422294
uuggaccagccagaauucu

SEQ ID NO: 2422296 - RNA, 19 nt, Artificial Sequence
  Description of Artificial Sequence: Synthetic oligonucleotide
  Sense strand starting at position 3581 of SEQ ID NO: 1886710
guuuguuuggagcaaauuc

SEQ ID NO: 2422297 - RNA, 19 nt, Artificial Sequence
  Description of Artificial Sequence: Synthetic oligonucleotide
  Antisense strand to SEQ ID NO: 2422296
gaauuugcuccaaacaaac

SEQ ID NO: 2422298 - RNA, 19 nt, Artificial Sequence
  Description of Artificial Sequence: Synthetic oligonucleotide
  Sense strand starting at position 3617 of SEQ ID NO: 1886710
gguugaaugcaggaggagu

SEQ ID NO: 2422299 - RNA, 19 nt, Artificial Sequence
  Description of Artificial Sequence: Synthetic oligonucleotide
  Antisense strand to SEQ ID NO: 2422298
acuccuccugcauucaacc

SEQ ID NO: 2422300 - RNA, 19 nt, Artificial Sequence
  Description of Artificial Sequence: Synthetic oligonucleotide
  Sense strand starting at position 3628 of SEQ ID NO: 1886710
ggaggaguuucaccaauug

SEQ ID NO: 2422301 - RNA, 19 nt, Artificial Sequence
  Description of Artificial Sequence: Synthetic oligonucleotide
  Antisense strand to SEQ ID NO: 2422300
caauuggugaaacuccucc

SEQ ID NO: 2422302 - RNA, 19 nt, Artificial Sequence
  Description of Artificial Sequence: Synthetic oligonucleotide
  Sense strand starting at position 3711 of SEQ ID NO: 1886710
aguuccauccggcaucaua

SEQ ID NO: 2422303 - RNA, 19 nt, Artificial Sequence
  Description of Artificial Sequence: Synthetic oligonucleotide
  Antisense strand to SEQ ID NO: 2422302
uaugaugccggauggaacu

SEQ ID NO: 2422304 - RNA, 19 nt, Artificial Sequence
  Description of Artificial Sequence: Synthetic oligonucleotide
  Sense strand starting at position 3857 of SEQ ID NO: 1886710
cagggaagguucccuugaa

SEQ ID NO: 2422305 - RNA, 19 nt, Artificial Sequence
  Description of Artificial Sequence: Synthetic oligonucleotide
  Antisense strand to SEQ ID NO: 2422304
uucaagggaaccuucccug

SEQ ID NO: 2422306 - RNA, 19 nt, Artificial Sequence
  Description of Artificial Sequence: Synthetic oligonucleotide
  Sense strand starting at position 3858 of SEQ ID NO: 1886710
agggaagguucccuugaau

SEQ ID NO: 2422307 - RNA, 19 nt, Artificial Sequence
  Description of Artificial Sequence: Synthetic oligonucleotide
  Antisense strand to SEQ ID NO: 2422306
auucaagggaaccuucccu

SEQ ID NO: 2422308 - RNA, 19 nt, Artificial Sequence
  Description of Artificial Sequence: Synthetic oligonucleotide
  Sense strand starting at position 3861 of SEQ ID NO: 1886710
gaagguucccuugaauccu

SEQ ID NO: 2422309 - RNA, 19 nt, Artificial Sequence
  Description of Artificial Sequence: Synthetic oligonucleotide
  Antisense strand to SEQ ID NO: 2422308
aggauucaagggaaccuuc

SEQ ID NO: 2422310 - RNA, 19 nt, Artificial Sequence
  Description of Artificial Sequence: Synthetic oligonucleotide
  Sense strand starting at position 51 of SEQ ID NO: 1886711
cguagagacuguuucucua

SEQ ID NO: 2422311 - RNA, 19 nt, Artificial Sequence
  Description of Artificial Sequence: Synthetic oligonucleotide
  Antisense strand to SEQ ID NO: 2422310
uagagaaacagucucuacg

SEQ ID NO: 2422312 - RNA, 19 nt, Artificial Sequence
  Description of Artificial Sequence: Synthetic oligonucleotide
  Sense strand starting at position 53 of SEQ ID NO: 1886711
uagagacuguuucucuaug

SEQ ID NO: 2422313 - RNA, 19 nt, Artificial Sequence
  Description of Artificial Sequence: Synthetic oligonucleotide
  Antisense strand to SEQ ID NO: 2422312
cauagagaaacagucucua

SEQ ID NO: 2422314 - RNA, 19 nt, Artificial Sequence
  Description of Artificial Sequence: Synthetic oligonucleotide
  Sense strand starting at position 54 of SEQ ID NO: 1886711
agagacuguuucucuaugu

SEQ ID NO: 2422315 - RNA, 19 nt, Artificial Sequence
  Description of Artificial Sequence: Synthetic oligonucleotide
  Antisense strand to SEQ ID NO: 2422314
acauagagaaacagucucu

SEQ ID NO: 2422316 - RNA, 19 nt, Artificial Sequence
  Description of Artificial Sequence: Synthetic oligonucleotide
  Sense strand starting at position 55 of SEQ ID NO: 1886711
gagacuguuucucuauguu

SEQ ID NO: 2422317 - RNA, 19 nt, Artificial Sequence
  Description of Artificial Sequence: Synthetic oligonucleotide
  Antisense strand to SEQ ID NO: 2422316
aacauagagaaacagucuc

SEQ ID NO: 2422318 - RNA, 19 nt, Artificial Sequence
  Description of Artificial Sequence: Synthetic oligonucleotide
  Sense strand starting at position 442 of SEQ ID NO: 1886711
ugcagugagccgucaucga

SEQ ID NO: 2422319 - RNA, 19 nt, Artificial Sequence
  Description of Artificial Sequence: Synthetic oligonucleotide
  Antisense strand to SEQ ID NO: 2422318
ucgaugacggcucacugca

SEQ ID NO: 2422320 - RNA, 19 nt, Artificial Sequence
  Description of Artificial Sequence: Synthetic oligonucleotide
  Sense strand starting at position 446 of SEQ ID NO: 1886711
gugagccgucaucgagauu

SEQ ID NO: 2422321 - RNA, 19 nt, Artificial Sequence
  Description of Artificial Sequence: Synthetic oligonucleotide
  Antisense strand to SEQ ID NO: 2422320
aaucucgaugacggcucac

SEQ ID NO: 2422322 - RNA, 19 nt, Artificial Sequence
  Description of Artificial Sequence: Synthetic oligonucleotide
  Sense strand starting at position 589 of SEQ ID NO: 1886711
gaaggaucauuucggucca

SEQ ID NO: 2422323 - RNA, 19 nt, Artificial Sequence
  Description of Artificial Sequence: Synthetic oligonucleotide
  Antisense strand to SEQ ID NO: 2422322
uggaccgaaaugauccuuc

SEQ ID NO: 2422324 - RNA, 19 nt, Artificial Sequence
  Description of Artificial Sequence: Synthetic oligonucleotide
  Sense strand starting at position 608 of SEQ ID NO: 1886711
ggaggaguuccgcaccacu

SEQ ID NO: 2422325 - RNA, 19 nt, Artificial Sequence
  Description of Artificial Sequence: Synthetic oligonucleotide
  Antisense strand to SEQ ID NO: 2422324
aguggugcggaacuccucc

SEQ ID NO: 2422326 - RNA, 19 nt, Artificial Sequence
  Description of Artificial Sequence: Synthetic oligonucleotide
  Sense strand starting at position 785 of SEQ ID NO: 1886711
cagccuuggcgacaguuaa

SEQ ID NO: 2422327 - RNA, 19 nt, Artificial Sequence
  Description of Artificial Sequence: Synthetic oligonucleotide
  Antisense strand to SEQ ID NO: 2422326
uuaacugucgccaaggcug

SEQ ID NO: 2422328 - RNA, 19 nt, Artificial Sequence
  Description of Artificial Sequence: Synthetic oligonucleotide
  Sense strand starting at position 845 of SEQ ID NO: 1886711
guaauauccuuacuuugua

SEQ ID NO: 2422329 - RNA, 19 nt, Artificial Sequence
  Description of Artificial Sequence: Synthetic oligonucleotide
  Antisense strand to SEQ ID NO: 2422328
uacaaaguaaggauauuac

SEQ ID NO: 2422330 - RNA, 19 nt, Artificial Sequence
  Description of Artificial Sequence: Synthetic oligonucleotide
  Sense strand starting at position 848 of SEQ ID NO: 1886711
auauccuuacuuuguagua

SEQ ID NO: 2422331 - RNA, 19 nt, Artificial Sequence
  Description of Artificial Sequence: Synthetic oligonucleotide
  Antisense strand to SEQ ID NO: 2422330
uacuacaaaguaaggauau

SEQ ID NO: 2422332 - RNA, 19 nt, Artificial Sequence
  Description of Artificial Sequence: Synthetic oligonucleotide
  Sense strand starting at position 850 of SEQ ID NO: 1886711
auccuuacuuuguaguaaa

SEQ ID NO: 2422333 - RNA, 19 nt, Artificial Sequence
  Description of Artificial Sequence: Synthetic oligonucleotide
  Antisense strand to SEQ ID NO: 2422332
uuuacuacaaaguaaggau

SEQ ID NO: 2422334 - RNA, 19 nt, Artificial Sequence
  Description of Artificial Sequence: Synthetic oligonucleotide
  Sense strand starting at position 1233 of SEQ ID NO: 1886711
cucgguuucuaaucuguca

SEQ ID NO: 2422335 - RNA, 19 nt, Artificial Sequence
  Description of Artificial Sequence: Synthetic oligonucleotide
  Antisense strand to SEQ ID NO: 2422334
ugacagauuagaaaccgag

SEQ ID NO: 2422336 - RNA, 19 nt, Artificial Sequence
  Description of Artificial Sequence: Synthetic oligonucleotide
  Sense strand starting at position 1235 of SEQ ID NO: 1886711
cgguuucuaaucugucaga

SEQ ID NO: 2422337 - RNA, 19 nt, Artificial Sequence
  Description of Artificial Sequence: Synthetic oligonucleotide
  Antisense strand to SEQ ID NO: 2422336
ucugacagauuagaaaccg

SEQ ID NO: 2422338 - RNA, 19 nt, Artificial Sequence
  Description of Artificial Sequence: Synthetic oligonucleotide
  Sense strand starting at position 1236 of SEQ ID NO: 1886711
gguuucuaaucugucagag

SEQ ID NO: 2422339 - RNA, 19 nt, Artificial Sequence
  Description of Artificial Sequence: Synthetic oligonucleotide
  Antisense strand to SEQ ID NO: 2422338
cucugacagauuagaaacc

SEQ ID NO: 2422340 - RNA, 19 nt, Artificial Sequence
  Description of Artificial Sequence: Synthetic oligonucleotide
  Sense strand starting at position 1266 of SEQ ID NO: 1886711
gaccuugcuguccgaggaa

SEQ ID NO: 2422341 - RNA, 19 nt, Artificial Sequence
  Description of Artificial Sequence: Synthetic oligonucleotide
  Antisense strand to SEQ ID NO: 2422340
uuccucggacagcaagguc

SEQ ID NO: 2422342 - RNA, 19 nt, Artificial Sequence
  Description of Artificial Sequence: Synthetic oligonucleotide
  Sense strand starting at position 1269 of SEQ ID NO: 1886711
cuugcuguccgaggaaugu

SEQ ID NO: 2422343 - RNA, 19 nt, Artificial Sequence
  Description of Artificial Sequence: Synthetic oligonucleotide
  Antisense strand to SEQ ID NO: 2422342
acauuccucggacagcaag

SEQ ID NO: 2422344 - RNA, 19 nt, Artificial Sequence
  Description of Artificial Sequence: Synthetic oligonucleotide
  Sense strand starting at position 1308 of SEQ ID NO: 1886711
cgaggucucuuagaagaua

SEQ ID NO: 2422345 - RNA, 19 nt, Artificial Sequence
  Description of Artificial Sequence: Synthetic oligonucleotide
  Antisense strand to SEQ ID NO: 2422344
uaucuucuaagagaccucg

SEQ ID NO: 2422346 - RNA, 19 nt, Artificial Sequence
  Description of Artificial Sequence: Synthetic oligonucleotide
  Sense strand starting at position 1393 of SEQ ID NO: 1886711
gugaauucugucccgcgca

SEQ ID NO: 2422347 - RNA, 19 nt, Artificial Sequence
  Description of Artificial Sequence: Synthetic oligonucleotide
  Antisense strand to SEQ ID NO: 2422346
ugcgcgggacagaauucac

SEQ ID NO: 2422348 - RNA, 19 nt, Artificial Sequence
  Description of Artificial Sequence: Synthetic oligonucleotide
  Sense strand starting at position 1437 of SEQ ID NO: 1886711
gcgccacuuccacaaagaa

SEQ ID NO: 2422349 - RNA, 19 nt, Artificial Sequence
  Description of Artificial Sequence: Synthetic oligonucleotide
  Antisense strand to SEQ ID NO: 2422348
uucuuuguggaaguggcgc

SEQ ID NO: 2422350 - RNA, 19 nt, Artificial Sequence
  Description of Artificial Sequence: Synthetic oligonucleotide
  Sense strand starting at position 1501 of SEQ ID NO: 1886711
gcgcgcgugugauuuauuu

SEQ ID NO: 2422351 - RNA, 19 nt, Artificial Sequence
  Description of Artificial Sequence: Synthetic oligonucleotide
  Antisense strand to SEQ ID NO: 2422350
aaauaaaucacacgcgcgc

SEQ ID NO: 2422352 - RNA, 19 nt, Artificial Sequence
  Description of Artificial Sequence: Synthetic oligonucleotide
  Sense strand starting at position 1616 of SEQ ID NO: 1886711
cgcggugcucaacaaaguu

SEQ ID NO: 2422353 - RNA, 19 nt, Artificial Sequence
  Description of Artificial Sequence: Synthetic oligonucleotide
  Antisense strand to SEQ ID NO: 2422352
aacuuuguugagcaccgcg

SEQ ID NO: 2422354 - RNA, 19 nt, Artificial Sequence
  Description of Artificial Sequence: Synthetic oligonucleotide
  Sense strand starting at position 1715 of SEQ ID NO: 1886711
aaacgacccuguuuagaaa

SEQ ID NO: 2422355 - RNA, 19 nt, Artificial Sequence
  Description of Artificial Sequence: Synthetic oligonucleotide
  Antisense strand to SEQ ID NO: 2422354
uuucuaaacagggucguuu

SEQ ID NO: 2422356 - RNA, 19 nt, Artificial Sequence
  Description of Artificial Sequence: Synthetic oligonucleotide
  Sense strand starting at position 2217 of SEQ ID NO: 1886711
uuggauuaggacugacagu

SEQ ID NO: 2422357 - RNA, 19 nt, Artificial Sequence
  Description of Artificial Sequence: Synthetic oligonucleotide
  Antisense strand to SEQ ID NO: 2422356
acugucaguccuaauccaa

SEQ ID NO: 2422358 - RNA, 19 nt, Artificial Sequence
  Description of Artificial Sequence: Synthetic oligonucleotide
  Sense strand starting at position 2226 of SEQ ID NO: 1886711
gacugacaguuccugaaac

SEQ ID NO: 2422359 - RNA, 19 nt, Artificial Sequence
  Description of Artificial Sequence: Synthetic oligonucleotide
  Antisense strand to SEQ ID NO: 2422358
guuucaggaacugucaguc

SEQ ID NO: 2422360 - RNA, 19 nt, Artificial Sequence
  Description of Artificial Sequence: Synthetic oligonucleotide
  Sense strand starting at position 2228 of SEQ ID NO: 1886711
cugacaguuccugaaaccu

SEQ ID NO: 2422361 - RNA, 19 nt, Artificial Sequence
  Description of Artificial Sequence: Synthetic oligonucleotide
  Antisense strand to SEQ ID NO: 2422360
agguuucaggaacugucag

SEQ ID NO: 2422362 - RNA, 19 nt, Artificial Sequence
  Description of Artificial Sequence: Synthetic oligonucleotide
  Sense strand starting at position 2238 of SEQ ID NO: 1886711
cugaaaccucucggcaaua

SEQ ID NO: 2422363 - RNA, 19 nt, Artificial Sequence
  Description of Artificial Sequence: Synthetic oligonucleotide
  Antisense strand to SEQ ID NO: 2422362
uauugccgagagguuucag

SEQ ID NO: 2422364 - RNA, 19 nt, Artificial Sequence
  Description of Artificial Sequence: Synthetic oligonucleotide
  Sense strand starting at position 2254 of SEQ ID NO: 1886711
auagcuuugucacccgacu

SEQ ID NO: 2422365 - RNA, 19 nt, Artificial Sequence
  Description of Artificial Sequence: Synthetic oligonucleotide
  Antisense strand to SEQ ID NO: 2422364
agucgggugacaaagcuau

SEQ ID NO: 2422366 - RNA, 19 nt, Artificial Sequence
  Description of Artificial Sequence: Synthetic oligonucleotide
  Sense strand starting at position 2900 of SEQ ID NO: 1886711
auuuguguuucacgaggag

SEQ ID NO: 2422367 - RNA, 19 nt, Artificial Sequence
  Description of Artificial Sequence: Synthetic oligonucleotide
  Antisense strand to SEQ ID NO: 2422366
cuccucgugaaacacaaau

SEQ ID NO: 2422368 - RNA, 19 nt, Artificial Sequence
  Description of Artificial Sequence: Synthetic oligonucleotide
  Sense strand starting at position 3044 of SEQ ID NO: 1886711
gugcuucuggcaugaggaa

SEQ ID NO: 2422369 - RNA, 19 nt, Artificial Sequence
  Description of Artificial Sequence: Synthetic oligonucleotide
  Antisense strand to SEQ ID NO: 2422368
uuccucaugccagaagcac

SEQ ID NO: 2422370 - RNA, 19 nt, Artificial Sequence
  Description of Artificial Sequence: Synthetic oligonucleotide
  Sense strand starting at position 3122 of SEQ ID NO: 1886711
uuuagaugccugcgggaca

SEQ ID NO: 2422371 - RNA, 19 nt, Artificial Sequence
  Description of Artificial Sequence: Synthetic oligonucleotide
  Antisense strand to SEQ ID NO: 2422370
ugucccgcaggcaucuaaa

SEQ ID NO: 2422372 - RNA, 19 nt, Artificial Sequence
  Description of Artificial Sequence: Synthetic oligonucleotide
  Sense strand starting at position 3192 of SEQ ID NO: 1886711
auucgcauuccggagucau

SEQ ID NO: 2422373 - RNA, 19 nt, Artificial Sequence
  Description of Artificial Sequence: Synthetic oligonucleotide
  Antisense strand to SEQ ID NO: 2422372
augacuccggaaugcgaau

SEQ ID NO: 2422374 - RNA, 19 nt, Artificial Sequence
  Description of Artificial Sequence: Synthetic oligonucleotide
  Sense strand starting at position 3258 of SEQ ID NO: 1886711
ugcucagauccuggaguga

SEQ ID NO: 2422375 - RNA, 19 nt, Artificial Sequence
  Description of Artificial Sequence: Synthetic oligonucleotide
  Antisense strand to SEQ ID NO: 2422374
ucacuccaggaucugagca

SEQ ID NO: 2422376 - RNA, 19 nt, Artificial Sequence
  Description of Artificial Sequence: Synthetic oligonucleotide
  Sense strand starting at position 3392 of SEQ ID NO: 1886711
gagucuuccuuugcccaga

SEQ ID NO: 2422377 - RNA, 19 nt, Artificial Sequence
  Description of Artificial Sequence: Synthetic oligonucleotide
  Antisense strand to SEQ ID NO: 2422376
ucugggcaaaggaagacuc

SEQ ID NO: 2422378 - RNA, 19 nt, Artificial Sequence
  Description of Artificial Sequence: Synthetic oligonucleotide
  Sense strand starting at position 3630 of SEQ ID NO: 1886711
ggcagacauuaccugaaca

SEQ ID NO: 2422379 - RNA, 19 nt, Artificial Sequence
  Description of Artificial Sequence: Synthetic oligonucleotide
  Antisense strand to SEQ ID NO: 2422378
uguucagguaaugucugcc

SEQ ID NO: 2422380 - RNA, 19 nt, Artificial Sequence
  Description of Artificial Sequence: Synthetic oligonucleotide
  Sense strand starting at position 3647 of SEQ ID NO: 1886711
cacggaaucagucggagaa

SEQ ID NO: 2422381 - RNA, 19 nt, Artificial Sequence
  Description of Artificial Sequence: Synthetic oligonucleotide
  Antisense strand to SEQ ID NO: 2422380
uucuccgacugauuccgug

SEQ ID NO: 2422382 - RNA, 19 nt, Artificial Sequence
  Description of Artificial Sequence: Synthetic oligonucleotide
  Sense strand starting at position 3648 of SEQ ID NO: 1886711
acggaaucagucggagaaa

SEQ ID NO: 2422383 - RNA, 19 nt, Artificial Sequence
  Description of Artificial Sequence: Synthetic oligonucleotide
  Antisense strand to SEQ ID NO: 2422382
uuucuccgacugauuccgu

SEQ ID NO: 2422384 - RNA, 19 nt, Artificial Sequence
  Description of Artificial Sequence: Synthetic oligonucleotide
  Sense strand starting at position 3666 of SEQ ID NO: 1886711
aaagaugcuucugaggcua

SEQ ID NO: 2422385 - RNA, 19 nt, Artificial Sequence
  Description of Artificial Sequence: Synthetic oligonucleotide
  Antisense strand to SEQ ID NO: 2422384
uagccucagaagcaucuuu

SEQ ID NO: 2422386 - RNA, 19 nt, Artificial Sequence
  Description of Artificial Sequence: Synthetic oligonucleotide
  Sense strand starting at position 3739 of SEQ ID NO: 1886711
ucuuuaauuuggcaaagga

SEQ ID NO: 2422387 - RNA, 19 nt, Artificial Sequence
  Description of Artificial Sequence: Synthetic oligonucleotide
  Antisense strand to SEQ ID NO: 2422386
uccuuugccaaauuaaaga

SEQ ID NO: 2422388 - RNA, 19 nt, Artificial Sequence
  Description of Artificial Sequence: Synthetic oligonucleotide
  Sense strand starting at position 3809 of SEQ ID NO: 1886711
ugugcuuucuccucugaaa

SEQ ID NO: 2422389 - RNA, 19 nt, Artificial Sequence
  Description of Artificial Sequence: Synthetic oligonucleotide
  Antisense strand to SEQ ID NO: 2422388
uuucagaggagaaagcaca

SEQ ID NO: 2422390 - RNA, 19 nt, Artificial Sequence
  Description of Artificial Sequence: Synthetic oligonucleotide
  Sense strand starting at position 306 of SEQ ID NO: 1886712
gcaucuacuccagagcaca

SEQ ID NO: 2422391 - RNA, 19 nt, Artificial Sequence
  Description of Artificial Sequence: Synthetic oligonucleotide
  Antisense strand to SEQ ID NO: 2422390
ugugcucuggaguagaugc

SEQ ID NO: 2422392 - RNA, 19 nt, Artificial Sequence
  Description of Artificial Sequence: Synthetic oligonucleotide
  Sense strand starting at position 397 of SEQ ID NO: 1886712
cacuauucccgaugcugau

SEQ ID NO: 2422393 - RNA, 19 nt, Artificial Sequence
  Description of Artificial Sequence: Synthetic oligonucleotide
  Antisense strand to SEQ ID NO: 2422392
aucagcaucgggaauagug

SEQ ID NO: 2422394 - RNA, 19 nt, Artificial Sequence
  Description of Artificial Sequence: Synthetic oligonucleotide
  Sense strand starting at position 420 of SEQ ID NO: 1886712
uguauucucccuuguuaua

SEQ ID NO: 2422395 - RNA, 19 nt, Artificial Sequence
  Description of Artificial Sequence: Synthetic oligonucleotide
  Antisense strand to SEQ ID NO: 2422394
uauaacaagggagaauaca

SEQ ID NO: 2422396 - RNA, 19 nt, Artificial Sequence
  Description of Artificial Sequence: Synthetic oligonucleotide
  Sense strand starting at position 491 of SEQ ID NO: 1886712
gcaggagggcauugacaau

SEQ ID NO: 2422397 - RNA, 19 nt, Artificial Sequence
  Description of Artificial Sequence: Synthetic oligonucleotide
  Antisense strand to SEQ ID NO: 2422396
auugucaaugcccuccugc

SEQ ID NO: 2422398 - RNA, 19 nt, Artificial Sequence
  Description of Artificial Sequence: Synthetic oligonucleotide
  Sense strand starting at position 508 of SEQ ID NO: 1886712
auuggaauugucgggucau

SEQ ID NO: 2422399 - RNA, 19 nt, Artificial Sequence
  Description of Artificial Sequence: Synthetic oligonucleotide
  Antisense strand to SEQ ID NO: 2422398
augacccgacaauuccaau

SEQ ID NO: 2422400 - RNA, 19 nt, Artificial Sequence
  Description of Artificial Sequence: Synthetic oligonucleotide
  Sense strand starting at position 514 of SEQ ID NO: 1886712
auugucgggucauuuaauu

SEQ ID NO: 2422401 - RNA, 19 nt, Artificial Sequence
  Description of Artificial Sequence: Synthetic oligonucleotide
  Antisense strand to SEQ ID NO: 2422400
aauuaaaugacccgacaau

SEQ ID NO: 2422402 - RNA, 19 nt, Artificial Sequence
  Description of Artificial Sequence: Synthetic oligonucleotide
  Sense strand starting at position 992 of SEQ ID NO: 1886712
ggacuuucuuaagccuaua

SEQ ID NO: 2422403 - RNA, 19 nt, Artificial Sequence
  Description of Artificial Sequence: Synthetic oligonucleotide
  Antisense strand to SEQ ID NO: 2422402
uauaggcuuaagaaagucc

SEQ ID NO: 2422404 - RNA, 19 nt, Artificial Sequence
  Description of Artificial Sequence: Synthetic oligonucleotide
  Sense strand starting at position 1996 of SEQ ID NO: 1886712
acacaugggugguuaagau

SEQ ID NO: 2422405 - RNA, 19 nt, Artificial Sequence
  Description of Artificial Sequence: Synthetic oligonucleotide
  Antisense strand to SEQ ID NO: 2422404
aucuuaaccacccaugugu

SEQ ID NO: 2422406 - RNA, 19 nt, Artificial Sequence
  Description of Artificial Sequence: Synthetic oligonucleotide
  Sense strand starting at position 2004 of SEQ ID NO: 1886712
gugguuaagaugugaugag

SEQ ID NO: 2422407 - RNA, 19 nt, Artificial Sequence
  Description of Artificial Sequence: Synthetic oligonucleotide
  Antisense strand to SEQ ID NO: 2422406
cucaucacaucuuaaccac

SEQ ID NO: 2422408 - RNA, 19 nt, Artificial Sequence
  Description of Artificial Sequence: Synthetic oligonucleotide
  Sense strand starting at position 2134 of SEQ ID NO: 1886712
acgacucacugauucuuau

SEQ ID NO: 2422409 - RNA, 19 nt, Artificial Sequence
  Description of Artificial Sequence: Synthetic oligonucleotide
  Antisense strand to SEQ ID NO: 2422408
auaagaaucagugagucgu

SEQ ID NO: 2422410 - RNA, 19 nt, Artificial Sequence
  Description of Artificial Sequence: Synthetic oligonucleotide
  Sense strand starting at position 2341 of SEQ ID NO: 1886712
auagccugacucugagaau

SEQ ID NO: 2422411 - RNA, 19 nt, Artificial Sequence
  Description of Artificial Sequence: Synthetic oligonucleotide
  Antisense strand to SEQ ID NO: 2422410
auucucagagucaggcuau

SEQ ID NO: 2422412 - RNA, 19 nt, Artificial Sequence
  Description of Artificial Sequence: Synthetic oligonucleotide
  Sense strand starting at position 2422 of SEQ ID NO: 1886712
aggaaugacugaugauuac

SEQ ID NO: 2422413 - RNA, 19 nt, Artificial Sequence
  Description of Artificial Sequence: Synthetic oligonucleotide
  Antisense strand to SEQ ID NO: 2422412
guaaucaucagucauuccu

SEQ ID NO: 2422414 - RNA, 19 nt, Artificial Sequence
  Description of Artificial Sequence: Synthetic oligonucleotide
  Sense strand starting at position 2428 of SEQ ID NO: 1886712
gacugaugauuacuggguu

SEQ ID NO: 2422415 - RNA, 19 nt, Artificial Sequence
  Description of Artificial Sequence: Synthetic oligonucleotide
  Antisense strand to SEQ ID NO: 2422414
aacccaguaaucaucaguc

SEQ ID NO: 2422416 - RNA, 19 nt, Artificial Sequence
  Description of Artificial Sequence: Synthetic oligonucleotide
  Sense strand starting at position 2431 of SEQ ID NO: 1886712
ugaugauuacuggguuaau

SEQ ID NO: 2422417 - RNA, 19 nt, Artificial Sequence
  Description of Artificial Sequence: Synthetic oligonucleotide
  Antisense strand to SEQ ID NO: 2422416
auuaacccaguaaucauca

SEQ ID NO: 2422418 - RNA, 19 nt, Artificial Sequence
  Description of Artificial Sequence: Synthetic oligonucleotide
  Sense strand starting at position 2432 of SEQ ID NO: 1886712
gaugauuacuggguuaauc

SEQ ID NO: 2422419 - RNA, 19 nt, Artificial Sequence
  Description of Artificial Sequence: Synthetic oligonucleotide
  Antisense strand to SEQ ID NO: 2422418
gauuaacccaguaaucauc

SEQ ID NO: 2422420 - RNA, 19 nt, Artificial Sequence
  Description of Artificial Sequence: Synthetic oligonucleotide
  Sense strand starting at position 2515 of SEQ ID NO: 1886712
ccuguaucuggaugaugua

SEQ ID NO: 2422421 - RNA, 19 nt, Artificial Sequence
  Description of Artificial Sequence: Synthetic oligonucleotide
  Antisense strand to SEQ ID NO: 2422420
uacaucauccagauacagg

SEQ ID NO: 2422422 - RNA, 19 nt, Artificial Sequence
  Description of Artificial Sequence: Synthetic oligonucleotide
  Sense strand starting at position 2594 of SEQ ID NO: 1886712
cugcgaccuuuccuggaga

SEQ ID NO: 2422423 - RNA, 19 nt, Artificial Sequence
  Description of Artificial Sequence: Synthetic oligonucleotide
  Antisense strand to SEQ ID NO: 2422422
ucuccaggaaaggucgcag

SEQ ID NO: 2422424 - RNA, 19 nt, Artificial Sequence
  Description of Artificial Sequence: Synthetic oligonucleotide
  Sense strand starting at position 2596 of SEQ ID NO: 1886712
gcgaccuuuccuggagaag

SEQ ID NO: 2422425 - RNA, 19 nt, Artificial Sequence
  Description of Artificial Sequence: Synthetic oligonucleotide
  Antisense strand to SEQ ID NO: 2422424
cuucuccaggaaaggucgc

SEQ ID NO: 2422426 - RNA, 19 nt, Artificial Sequence
  Description of Artificial Sequence: Synthetic oligonucleotide
  Sense strand starting at position 2685 of SEQ ID NO: 1886712
uuggaaugucuuggaaaca

SEQ ID NO: 2422427 - RNA, 19 nt, Artificial Sequence
  Description of Artificial Sequence: Synthetic oligonucleotide
  Antisense strand to SEQ ID NO: 2422426
uguuuccaagacauuccaa

SEQ ID NO: 2422428 - RNA, 19 nt, Artificial Sequence
  Description of Artificial Sequence: Synthetic oligonucleotide
  Sense strand starting at position 2686 of SEQ ID NO: 1886712
uggaaugucuuggaaacac

SEQ ID NO: 2422429 - RNA, 19 nt, Artificial Sequence
  Description of Artificial Sequence: Synthetic oligonucleotide
  Antisense strand to SEQ ID NO: 2422428
guguuuccaagacauucca

SEQ ID NO: 2422430 - RNA, 19 nt, Artificial Sequence
  Description of Artificial Sequence: Synthetic oligonucleotide
  Sense strand starting at position 2745 of SEQ ID NO: 1886712
uuaguccucuguguaagua

SEQ ID NO: 2422431 - RNA, 19 nt, Artificial Sequence
  Description of Artificial Sequence: Synthetic oligonucleotide
  Antisense strand to SEQ ID NO: 2422430
uacuuacacagaggacuaa

SEQ ID NO: 2422432 - RNA, 19 nt, Artificial Sequence
  Description of Artificial Sequence: Synthetic oligonucleotide
  Sense strand starting at position 2746 of SEQ ID NO: 1886712
uaguccucuguguaaguaa

SEQ ID NO: 2422433 - RNA, 19 nt, Artificial Sequence
  Description of Artificial Sequence: Synthetic oligonucleotide
  Antisense strand to SEQ ID NO: 2422432
uuacuuacacagaggacua

SEQ ID NO: 2422434 - RNA, 19 nt, Artificial Sequence
  Description of Artificial Sequence: Synthetic oligonucleotide
  Sense strand starting at position 2830 of SEQ ID NO: 1886712
cugagagccucauuaggga

SEQ ID NO: 2422435 - RNA, 19 nt, Artificial Sequence
  Description of Artificial Sequence: Synthetic oligonucleotide
  Antisense strand to SEQ ID NO: 2422434
ucccuaaugaggcucucag

SEQ ID NO: 2422436 - RNA, 19 nt, Artificial Sequence
  Description of Artificial Sequence: Synthetic oligonucleotide
  Sense strand starting at position 3046 of SEQ ID NO: 1886712
ugcccacagguguggaaau

SEQ ID NO: 2422437 - RNA, 19 nt, Artificial Sequence
  Description of Artificial Sequence: Synthetic oligonucleotide
  Antisense strand to SEQ ID NO: 2422436
auuuccacaccugugggca

SEQ ID NO: 2422438 - RNA, 19 nt, Artificial Sequence
  Description of Artificial Sequence: Synthetic oligonucleotide
  Sense strand starting at position 3056 of SEQ ID NO: 1886712
uguggaaauucugucauga

SEQ ID NO: 2422439 - RNA, 19 nt, Artificial Sequence
  Description of Artificial Sequence: Synthetic oligonucleotide
  Antisense strand to SEQ ID NO: 2422438
ucaugacagaauuuccaca

SEQ ID NO: 2422440 - RNA, 19 nt, Artificial Sequence
  Description of Artificial Sequence: Synthetic oligonucleotide
  Sense strand starting at position 3058 of SEQ ID NO: 1886712
uggaaauucugucaugaaa

SEQ ID NO: 2422441 - RNA, 19 nt, Artificial Sequence
  Description of Artificial Sequence: Synthetic oligonucleotide
  Antisense strand to SEQ ID NO: 2422440
uuucaugacagaauuucca

SEQ ID NO: 2422442 - RNA, 19 nt, Artificial Sequence
  Description of Artificial Sequence: Synthetic oligonucleotide
  Sense strand starting at position 3071 of SEQ ID NO: 1886712
augaaauccuuugcaguau

SEQ ID NO: 2422443 - RNA, 19 nt, Artificial Sequence
  Description of Artificial Sequence: Synthetic oligonucleotide
  Antisense strand to SEQ ID NO: 2422442
auacugcaaaggauuucau

SEQ ID NO: 2422444 - RNA, 19 nt, Artificial Sequence
  Description of Artificial Sequence: Synthetic oligonucleotide
  Sense strand starting at position 3088 of SEQ ID NO: 1886712
aucacuuccuuuguugaga

SEQ ID NO: 2422445 - RNA, 19 nt, Artificial Sequence
  Description of Artificial Sequence: Synthetic oligonucleotide
  Antisense strand to SEQ ID NO: 2422444
ucucaacaaaggaagugau

SEQ ID NO: 2422446 - RNA, 19 nt, Artificial Sequence
  Description of Artificial Sequence: Synthetic oligonucleotide
  Sense strand starting at position 3089 of SEQ ID NO: 1886712
ucacuuccuuuguugagau

SEQ ID NO: 2422447 - RNA, 19 nt, Artificial Sequence
  Description of Artificial Sequence: Synthetic oligonucleotide
  Antisense strand to SEQ ID NO: 2422446
aucucaacaaaggaaguga

SEQ ID NO: 2422448 - RNA, 19 nt, Artificial Sequence
  Description of Artificial Sequence: Synthetic oligonucleotide
  Sense strand starting at position 3091 of SEQ ID NO: 1886712
acuuccuuuguugagauau

SEQ ID NO: 2422449 - RNA, 19 nt, Artificial Sequence
  Description of Artificial Sequence: Synthetic oligonucleotide
  Antisense strand to SEQ ID NO: 2422448
auaucucaacaaaggaagu

SEQ ID NO: 2422450 - RNA, 19 nt, Artificial Sequence
  Description of Artificial Sequence: Synthetic oligonucleotide
  Sense strand starting at position 3169 of SEQ ID NO: 1886712
auuagugaugcuucguguu

SEQ ID NO: 2422451 - RNA, 19 nt, Artificial Sequence
  Description of Artificial Sequence: Synthetic oligonucleotide
  Antisense strand to SEQ ID NO: 2422450
aacacgaagcaucacuaau

SEQ ID NO: 2422452 - RNA, 19 nt, Artificial Sequence
  Description of Artificial Sequence: Synthetic oligonucleotide
  Sense strand starting at position 3205 of SEQ ID NO: 1886712
gaauguuacgagcacauua

SEQ ID NO: 2422453 - RNA, 19 nt, Artificial Sequence
  Description of Artificial Sequence: Synthetic oligonucleotide
  Antisense strand to SEQ ID NO: 2422452
uaaugugcucguaacauuc

SEQ ID NO: 2422454 - RNA, 19 nt, Artificial Sequence
  Description of Artificial Sequence: Synthetic oligonucleotide
  Sense strand starting at position 3218 of SEQ ID NO: 1886712
acauuacugagaugggcuu

SEQ ID NO: 2422455 - RNA, 19 nt, Artificial Sequence
  Description of Artificial Sequence: Synthetic oligonucleotide
  Antisense strand to SEQ ID NO: 2422454
aagcccaucucaguaaugu

SEQ ID NO: 2422456 - RNA, 19 nt, Artificial Sequence
  Description of Artificial Sequence: Synthetic oligonucleotide
  Sense strand starting at position 3229 of SEQ ID NO: 1886712
augggcuuaauucgugaaa

SEQ ID NO: 2422457 - RNA, 19 nt, Artificial Sequence
  Description of Artificial Sequence: Synthetic oligonucleotide
  Antisense strand to SEQ ID NO: 2422456
uuucacgaauuaagcccau

SEQ ID NO: 2422458 - RNA, 19 nt, Artificial Sequence
  Description of Artificial Sequence: Synthetic oligonucleotide
  Sense strand starting at position 3566 of SEQ ID NO: 1886712
guuugagaugaaggguagu

SEQ ID NO: 2422459 - RNA, 19 nt, Artificial Sequence
  Description of Artificial Sequence: Synthetic oligonucleotide
  Antisense strand to SEQ ID NO: 2422458
acuacccuucaucucaaac

SEQ ID NO: 2422460 - RNA, 19 nt, Artificial Sequence
  Description of Artificial Sequence: Synthetic oligonucleotide
  Sense strand starting at position 3572 of SEQ ID NO: 1886712
gaugaaggguagucugauu

SEQ ID NO: 2422461 - RNA, 19 nt, Artificial Sequence
  Description of Artificial Sequence: Synthetic oligonucleotide
  Antisense strand to SEQ ID NO: 2422460
aaucagacuacccuucauc

SEQ ID NO: 2422462 - RNA, 19 nt, Artificial Sequence
  Description of Artificial Sequence: Synthetic oligonucleotide
  Sense strand starting at position 3577 of SEQ ID NO: 1886712
aggguagucugauuguaag

SEQ ID NO: 2422463 - RNA, 19 nt, Artificial Sequence
  Description of Artificial Sequence: Synthetic oligonucleotide
  Antisense strand to SEQ ID NO: 2422462
cuuacaaucagacuacccu

SEQ ID NO: 2422464 - RNA, 19 nt, Artificial Sequence
  Description of Artificial Sequence: Synthetic oligonucleotide
  Sense strand starting at position 3710 of SEQ ID NO: 1886712
agagcuuccuaaucugcau

SEQ ID NO: 2422465 - RNA, 19 nt, Artificial Sequence
  Description of Artificial Sequence: Synthetic oligonucleotide
  Antisense strand to SEQ ID NO: 2422464
augcagauuaggaagcucu

SEQ ID NO: 2422466 - RNA, 19 nt, Artificial Sequence
  Description of Artificial Sequence: Synthetic oligonucleotide
  Sense strand starting at position 3787 of SEQ ID NO: 1886712
cugguugaaccagaguauu

SEQ ID NO: 2422467 - RNA, 19 nt, Artificial Sequence
  Description of Artificial Sequence: Synthetic oligonucleotide
  Antisense strand to SEQ ID NO: 2422466
aauacucugguucaaccag

SEQ ID NO: 2422468 - RNA, 19 nt, Artificial Sequence
  Description of Artificial Sequence: Synthetic oligonucleotide
  Sense strand starting at position 3833 of SEQ ID NO: 1886712
cuacaugcuuggcuacaau

SEQ ID NO: 2422469 - RNA, 19 nt, Artificial Sequence
  Description of Artificial Sequence: Synthetic oligonucleotide
  Antisense strand to SEQ ID NO: 2422468
auuguagccaagcauguag

SEQ ID NO: 2422470 - RNA, 19 nt, Artificial Sequence
  Description of Artificial Sequence: Synthetic oligonucleotide
  Sense strand starting at position 76 of SEQ ID NO: 1886713
auaauaauccagcgaaauu

SEQ ID NO: 2422471 - RNA, 19 nt, Artificial Sequence
  Description of Artificial Sequence: Synthetic oligonucleotide
  Antisense strand to SEQ ID NO: 2422470
aauuucgcuggauuauuau

SEQ ID NO: 2422472 - RNA, 19 nt, Artificial Sequence
  Description of Artificial Sequence: Synthetic oligonucleotide
  Sense strand starting at position 244 of SEQ ID NO: 1886713
uuuggaaauacgugcuuua

SEQ ID NO: 2422473 - RNA, 19 nt, Artificial Sequence
  Description of Artificial Sequence: Synthetic oligonucleotide
  Antisense strand to SEQ ID NO: 2422472
uaaagcacguauuuccaaa

SEQ ID NO: 2422474 - RNA, 19 nt, Artificial Sequence
  Description of Artificial Sequence: Synthetic oligonucleotide
  Sense strand starting at position 295 of SEQ ID NO: 1886713
auggccucuagccgagaaa

SEQ ID NO: 2422475 - RNA, 19 nt, Artificial Sequence
  Description of Artificial Sequence: Synthetic oligonucleotide
  Antisense strand to SEQ ID NO: 2422474
uuucucggcuagaggccau

SEQ ID NO: 2422476 - RNA, 19 nt, Artificial Sequence
  Description of Artificial Sequence: Synthetic oligonucleotide
  Sense strand starting at position 483 of SEQ ID NO: 1886713
aauguugcacuggauuauu

SEQ ID NO: 2422477 - RNA, 19 nt, Artificial Sequence
  Description of Artificial Sequence: Synthetic oligonucleotide
  Antisense strand to SEQ ID NO: 2422476
aauaauccagugcaacauu

SEQ ID NO: 2422478 - RNA, 19 nt, Artificial Sequence
  Description of Artificial Sequence: Synthetic oligonucleotide
  Sense strand starting at position 503 of SEQ ID NO: 1886713
agacauucggugggaccua

SEQ ID NO: 2422479 - RNA, 19 nt, Artificial Sequence
  Description of Artificial Sequence: Synthetic oligonucleotide
  Antisense strand to SEQ ID NO: 2422478
uaggucccaccgaaugucu

SEQ ID NO: 2422480 - RNA, 19 nt, Artificial Sequence
  Description of Artificial Sequence: Synthetic oligonucleotide
  Sense strand starting at position 692 of SEQ ID NO: 1886713
ucagaaguuugcucaacac

SEQ ID NO: 2422481 - RNA, 19 nt, Artificial Sequence
  Description of Artificial Sequence: Synthetic oligonucleotide
  Antisense strand to SEQ ID NO: 2422480
guguugagcaaacuucuga

SEQ ID NO: 2422482 - RNA, 19 nt, Artificial Sequence
  Description of Artificial Sequence: Synthetic oligonucleotide
  Sense strand starting at position 711 of SEQ ID NO: 1886713
guugguaaacaaugaauac

SEQ ID NO: 2422483 - RNA, 19 nt, Artificial Sequence
  Description of Artificial Sequence: Synthetic oligonucleotide
  Antisense strand to SEQ ID NO: 2422482
guauucauuguuuaccaac

SEQ ID NO: 2422484 - RNA, 19 nt, Artificial Sequence
  Description of Artificial Sequence: Synthetic oligonucleotide
  Sense strand starting at position 793 of SEQ ID NO: 1886713
ggucauauccucuggugag

SEQ ID NO: 2422485 - RNA, 19 nt, Artificial Sequence
  Description of Artificial Sequence: Synthetic oligonucleotide
  Antisense strand to SEQ ID NO: 2422484
cucaccagaggauaugacc

SEQ ID NO: 2422486 - RNA, 19 nt, Artificial Sequence
  Description of Artificial Sequence: Synthetic oligonucleotide
  Sense strand starting at position 840 of SEQ ID NO: 1886713
acaucacugugcucaaaug

SEQ ID NO: 2422487 - RNA, 19 nt, Artificial Sequence
  Description of Artificial Sequence: Synthetic oligonucleotide
  Antisense strand to SEQ ID NO: 2422486
cauuugagcacagugaugu

SEQ ID NO: 2422488 - RNA, 19 nt, Artificial Sequence
  Description of Artificial Sequence: Synthetic oligonucleotide
  Sense strand starting at position 986 of SEQ ID NO: 1886713
ccuuuaaaucaguaguucu

SEQ ID NO: 2422489 - RNA, 19 nt, Artificial Sequence
  Description of Artificial Sequence: Synthetic oligonucleotide
  Antisense strand to SEQ ID NO: 2422488
agaacuacugauuuaaagg

SEQ ID NO: 2422490 - RNA, 19 nt, Artificial Sequence
  Description of Artificial Sequence: Synthetic oligonucleotide
  Sense strand starting at position 1000 of SEQ ID NO: 1886713
guucuuaaacuugauggua

SEQ ID NO: 2422491 - RNA, 19 nt, Artificial Sequence
  Description of Artificial Sequence: Synthetic oligonucleotide
  Antisense strand to SEQ ID NO: 2422490
uaccaucaaguuuaagaac

SEQ ID NO: 2422492 - RNA, 19 nt, Artificial Sequence
  Description of Artificial Sequence: Synthetic oligonucleotide
  Sense strand starting at position 1062 of SEQ ID NO: 1886713
ccgaguuacugaucagcag

SEQ ID NO: 2422493 - RNA, 19 nt, Artificial Sequence
  Description of Artificial Sequence: Synthetic oligonucleotide
  Antisense strand to SEQ ID NO: 2422492
cugcugaucaguaacucgg

SEQ ID NO: 2422494 - RNA, 19 nt, Artificial Sequence
  Description of Artificial Sequence: Synthetic oligonucleotide
  Sense strand starting at position 1103 of SEQ ID NO: 1886713
uuguauuucuaacaaguga

SEQ ID NO: 2422495 - RNA, 19 nt, Artificial Sequence
  Description of Artificial Sequence: Synthetic oligonucleotide
  Antisense strand to SEQ ID NO: 2422494
ucacuuguuagaaauacaa

SEQ ID NO: 2422496 - RNA, 19 nt, Artificial Sequence
  Description of Artificial Sequence: Synthetic oligonucleotide
  Sense strand starting at position 1594 of SEQ ID NO: 1886713
gcggaaugaacggaaaguu

SEQ ID NO: 2422497 - RNA, 19 nt, Artificial Sequence
  Description of Artificial Sequence: Synthetic oligonucleotide
  Antisense strand to SEQ ID NO: 2422496
aacuuuccguucauuccgc

SEQ ID NO: 2422498 - RNA, 19 nt, Artificial Sequence
  Description of Artificial Sequence: Synthetic oligonucleotide
  Sense strand starting at position 1606 of SEQ ID NO: 1886713
gaaaguucucccuggcuca

SEQ ID NO: 2422499 - RNA, 19 nt, Artificial Sequence
  Description of Artificial Sequence: Synthetic oligonucleotide
  Antisense strand to SEQ ID NO: 2422498
ugagccagggagaacuuuc

SEQ ID NO: 2422500 - RNA, 19 nt, Artificial Sequence
  Description of Artificial Sequence: Synthetic oligonucleotide
  Sense strand starting at position 1666 of SEQ ID NO: 1886713
gugccaucgccguuugcua

SEQ ID NO: 2422501 - RNA, 19 nt, Artificial Sequence
  Description of Artificial Sequence: Synthetic oligonucleotide
  Antisense strand to SEQ ID NO: 2422500
uagcaaacggcgauggcac

SEQ ID NO: 2422502 - RNA, 19 nt, Artificial Sequence
  Description of Artificial Sequence: Synthetic oligonucleotide
  Sense strand starting at position 1709 of SEQ ID NO: 1886713
agcucacggccgagaaguu

SEQ ID NO: 2422503 - RNA, 19 nt, Artificial Sequence
  Description of Artificial Sequence: Synthetic oligonucleotide
  Antisense strand to SEQ ID NO: 2422502
aacuucucggccgugagcu

SEQ ID NO: 2422504 - RNA, 19 nt, Artificial Sequence
  Description of Artificial Sequence: Synthetic oligonucleotide
  Sense strand starting at position 2316 of SEQ ID NO: 1886713
cguccaucuagcguuaagu

SEQ ID NO: 2422505 - RNA, 19 nt, Artificial Sequence
  Description of Artificial Sequence: Synthetic oligonucleotide
  Antisense strand to SEQ ID NO: 2422504
acuuaacgcuagauggacg

SEQ ID NO: 2422506 - RNA, 19 nt, Artificial Sequence
  Description of Artificial Sequence: Synthetic oligonucleotide
  Sense strand starting at position 2318 of SEQ ID NO: 1886713
uccaucuagcguuaaguga

SEQ ID NO: 2422507 - RNA, 19 nt, Artificial Sequence
  Description of Artificial Sequence: Synthetic oligonucleotide
  Antisense strand to SEQ ID NO: 2422506
ucacuuaacgcuagaugga

SEQ ID NO: 2422508 - RNA, 19 nt, Artificial Sequence
  Description of Artificial Sequence: Synthetic oligonucleotide
  Sense strand starting at position 2641 of SEQ ID NO: 1886713
cgauuuggccugcgggaua

SEQ ID NO: 2422509 - RNA, 19 nt, Artificial Sequence
  Description of Artificial Sequence: Synthetic oligonucleotide
  Antisense strand to SEQ ID NO: 2422508
uaucccgcaggccaaaucg

SEQ ID NO: 2422510 - RNA, 19 nt, Artificial Sequence
  Description of Artificial Sequence: Synthetic oligonucleotide
  Sense strand starting at position 3073 of SEQ ID NO: 1886713
acaugaauuuccuggaagg

SEQ ID NO: 2422511 - RNA, 19 nt, Artificial Sequence
  Description of Artificial Sequence: Synthetic oligonucleotide
  Antisense strand to SEQ ID NO: 2422510
ccuuccaggaaauucaugu

SEQ ID NO: 2422512 - RNA, 19 nt, Artificial Sequence
  Description of Artificial Sequence: Synthetic oligonucleotide
  Sense strand starting at position 3091 of SEQ ID NO: 1886713
gacucaggcugucuucuaa

SEQ ID NO: 2422513 - RNA, 19 nt, Artificial Sequence
  Description of Artificial Sequence: Synthetic oligonucleotide
  Antisense strand to SEQ ID NO: 2422512
uuagaagacagccugaguc

SEQ ID NO: 2422514 - RNA, 19 nt, Artificial Sequence
  Description of Artificial Sequence: Synthetic oligonucleotide
  Sense strand starting at position 3126 of SEQ ID NO: 1886713
ggagacugauuguuuacuu

SEQ ID NO: 2422515 - RNA, 19 nt, Artificial Sequence
  Description of Artificial Sequence: Synthetic oligonucleotide
  Antisense strand to SEQ ID NO: 2422514
aaguaaacaaucagucucc

SEQ ID NO: 2422516 - RNA, 19 nt, Artificial Sequence
  Description of Artificial Sequence: Synthetic oligonucleotide
  Sense strand starting at position 3127 of SEQ ID NO: 1886713
gagacugauuguuuacuuu

SEQ ID NO: 2422517 - RNA, 19 nt, Artificial Sequence
  Description of Artificial Sequence: Synthetic oligonucleotide
  Antisense strand to SEQ ID NO: 2422516
aaaguaaacaaucagucuc

SEQ ID NO: 2422518 - RNA, 19 nt, Artificial Sequence
  Description of Artificial Sequence: Synthetic oligonucleotide
  Sense strand starting at position 3131 of SEQ ID NO: 1886713
cugauuguuuacuuuagca

SEQ ID NO: 2422519 - RNA, 19 nt, Artificial Sequence
  Description of Artificial Sequence: Synthetic oligonucleotide
  Antisense strand to SEQ ID NO: 2422518
ugcuaaaguaaacaaucag

SEQ ID NO: 2422520 - RNA, 19 nt, Artificial Sequence
  Description of Artificial Sequence: Synthetic oligonucleotide
  Sense strand starting at position 3314 of SEQ ID NO: 1886713
ugugucugguucccacaaa

SEQ ID NO: 2422521 - RNA, 19 nt, Artificial Sequence
  Description of Artificial Sequence: Synthetic oligonucleotide
  Antisense strand to SEQ ID NO: 2422520
uuugugggaaccagacaca

SEQ ID NO: 2422522 - RNA, 19 nt, Artificial Sequence
  Description of Artificial Sequence: Synthetic oligonucleotide
  Sense strand starting at position 3371 of SEQ ID NO: 1886713
gccugcacuguguaaauaa

SEQ ID NO: 2422523 - RNA, 19 nt, Artificial Sequence
  Description of Artificial Sequence: Synthetic oligonucleotide
  Antisense strand to SEQ ID NO: 2422522
uuauuuacacagugcaggc

SEQ ID NO: 2422524 - RNA, 19 nt, Artificial Sequence
  Description of Artificial Sequence: Synthetic oligonucleotide
  Sense strand starting at position 3428 of SEQ ID NO: 1886713
uuacucacucuguguagau

SEQ ID NO: 2422525 - RNA, 19 nt, Artificial Sequence
  Description of Artificial Sequence: Synthetic oligonucleotide
  Antisense strand to SEQ ID NO: 2422524
aucuacacagagugaguaa

SEQ ID NO: 2422526 - RNA, 19 nt, Artificial Sequence
  Description of Artificial Sequence: Synthetic oligonucleotide
  Sense strand starting at position 3452 of SEQ ID NO: 1886713
ucuguaaaucuguaagccu

SEQ ID NO: 2422527 - RNA, 19 nt, Artificial Sequence
  Description of Artificial Sequence: Synthetic oligonucleotide
  Antisense strand to SEQ ID NO: 2422526
aggcuuacagauuuacaga

SEQ ID NO: 2422528 - RNA, 19 nt, Artificial Sequence
  Description of Artificial Sequence: Synthetic oligonucleotide
  Sense strand starting at position 3459 of SEQ ID NO: 1886713
aucuguaagccuggaaaca

SEQ ID NO: 2422529 - RNA, 19 nt, Artificial Sequence
  Description of Artificial Sequence: Synthetic oligonucleotide
  Antisense strand to SEQ ID NO: 2422528
uguuuccaggcuuacagau

SEQ ID NO: 2422530 - RNA, 19 nt, Artificial Sequence
  Description of Artificial Sequence: Synthetic oligonucleotide
  Sense strand starting at position 3501 of SEQ ID NO: 1886713
gccagaaaggauuaagugu

SEQ ID NO: 2422531 - RNA, 19 nt, Artificial Sequence
  Description of Artificial Sequence: Synthetic oligonucleotide
  Antisense strand to SEQ ID NO: 2422530
acacuuaauccuuucuggc

SEQ ID NO: 2422532 - RNA, 19 nt, Artificial Sequence
  Description of Artificial Sequence: Synthetic oligonucleotide
  Sense strand starting at position 3629 of SEQ ID NO: 1886713
uaggauuuguguguuucca

SEQ ID NO: 2422533 - RNA, 19 nt, Artificial Sequence
  Description of Artificial Sequence: Synthetic oligonucleotide
  Antisense strand to SEQ ID NO: 2422532
uggaaacacacaaauccua

SEQ ID NO: 2422534 - RNA, 19 nt, Artificial Sequence
  Description of Artificial Sequence: Synthetic oligonucleotide
  Sense strand starting at position 3638 of SEQ ID NO: 1886713
uguguuuccagcguuuaug

SEQ ID NO: 2422535 - RNA, 19 nt, Artificial Sequence
  Description of Artificial Sequence: Synthetic oligonucleotide
  Antisense strand to SEQ ID NO: 2422534
cauaaacgcuggaaacaca

SEQ ID NO: 2422536 - RNA, 19 nt, Artificial Sequence
  Description of Artificial Sequence: Synthetic oligonucleotide
  Sense strand starting at position 3691 of SEQ ID NO: 1886713
cuuaauugaggauguauua

SEQ ID NO: 2422537 - RNA, 19 nt, Artificial Sequence
  Description of Artificial Sequence: Synthetic oligonucleotide
  Antisense strand to SEQ ID NO: 2422536
uaauacauccucaauuaag

SEQ ID NO: 2422538 - RNA, 19 nt, Artificial Sequence
  Description of Artificial Sequence: Synthetic oligonucleotide
  Sense strand starting at position 3717 of SEQ ID NO: 1886713
cgauucuuuguugggugaa

SEQ ID NO: 2422539 - RNA, 19 nt, Artificial Sequence
  Description of Artificial Sequence: Synthetic oligonucleotide
  Antisense strand to SEQ ID NO: 2422538
uucacccaacaaagaaucg

SEQ ID NO: 2422540 - RNA, 19 nt, Artificial Sequence
  Description of Artificial Sequence: Synthetic oligonucleotide
  Sense strand starting at position 3720 of SEQ ID NO: 1886713
uucuuuguugggugaacca

SEQ ID NO: 2422541 - RNA, 19 nt, Artificial Sequence
  Description of Artificial Sequence: Synthetic oligonucleotide
  Antisense strand to SEQ ID NO: 2422540
ugguucacccaacaaagaa

SEQ ID NO: 2422542 - RNA, 19 nt, Artificial Sequence
  Description of Artificial Sequence: Synthetic oligonucleotide
  Sense strand starting at position 3762 of SEQ ID NO: 1886713
acagucuuguccucaugaa

SEQ ID NO: 2422543 - RNA, 19 nt, Artificial Sequence
  Description of Artificial Sequence: Synthetic oligonucleotide
  Antisense strand to SEQ ID NO: 2422542
uucaugaggacaagacugu

SEQ ID NO: 2422544 - RNA, 19 nt, Artificial Sequence
  Description of Artificial Sequence: Synthetic oligonucleotide
  Sense strand starting at position 3793 of SEQ ID NO: 1886713
aggaaacuugaguauucgu

SEQ ID NO: 2422545 - RNA, 19 nt, Artificial Sequence
  Description of Artificial Sequence: Synthetic oligonucleotide
  Antisense strand to SEQ ID NO: 2422544
acgaauacucaaguuuccu

SEQ ID NO: 2422546 - RNA, 19 nt, Artificial Sequence
  Description of Artificial Sequence: Synthetic oligonucleotide
  Sense strand starting at position 3818 of SEQ ID NO: 1886713
acagucacugucuauaauu

SEQ ID NO: 2422547 - RNA, 19 nt, Artificial Sequence
  Description of Artificial Sequence: Synthetic oligonucleotide
  Antisense strand to SEQ ID NO: 2422546
aauuauagacagugacugu

SEQ ID NO: 2422548 - RNA, 19 nt, Artificial Sequence
  Description of Artificial Sequence: Synthetic oligonucleotide
  Sense strand starting at position 3954 of SEQ ID NO: 1886713
ucuugugugccuucagugu

SEQ ID NO: 2422549 - RNA, 19 nt, Artificial Sequence
  Description of Artificial Sequence: Synthetic oligonucleotide
  Antisense strand to SEQ ID NO: 2422548
acacugaaggcacacaaga

SEQ ID NO: 2422550 - RNA, 19 nt, Artificial Sequence
  Description of Artificial Sequence: Synthetic oligonucleotide
  Sense strand starting at position 236 of SEQ ID NO: 1886714
cagagaauucuccagcgug

SEQ ID NO: 2422551 - RNA, 19 nt, Artificial Sequence
  Description of Artificial Sequence: Synthetic oligonucleotide
  Antisense strand to SEQ ID NO: 2422550
cacgcuggagaauucucug

SEQ ID NO: 2422552 - RNA, 19 nt, Artificial Sequence
  Description of Artificial Sequence: Synthetic oligonucleotide
  Sense strand starting at position 647 of SEQ ID NO: 1886714
ucaacucuccagugacaag

SEQ ID NO: 2422553 - RNA, 19 nt, Artificial Sequence
  Description of Artificial Sequence: Synthetic oligonucleotide
  Antisense strand to SEQ ID NO: 2422552
cuugucacuggagaguuga

SEQ ID NO: 2422554 - RNA, 19 nt, Artificial Sequence
  Description of Artificial Sequence: Synthetic oligonucleotide
  Sense strand starting at position 767 of SEQ ID NO: 1886714
uccugaaugccacaugcau

SEQ ID NO: 2422555 - RNA, 19 nt, Artificial Sequence
  Description of Artificial Sequence: Synthetic oligonucleotide
  Antisense strand to SEQ ID NO: 2422554
augcauguggcauucagga

SEQ ID NO: 2422556 - RNA, 19 nt, Artificial Sequence
  Description of Artificial Sequence: Synthetic oligonucleotide
  Sense strand starting at position 922 of SEQ ID NO: 1886714
gcccuaacacugggacaau

SEQ ID NO: 2422557 - RNA, 19 nt, Artificial Sequence
  Description of Artificial Sequence: Synthetic oligonucleotide
  Antisense strand to SEQ ID NO: 2422556
auugucccaguguuagggc

SEQ ID NO: 2422558 - RNA, 19 nt, Artificial Sequence
  Description of Artificial Sequence: Synthetic oligonucleotide
  Sense strand starting at position 1280 of SEQ ID NO: 1886714
gggacugaaucuccgcauu

SEQ ID NO: 2422559 - RNA, 19 nt, Artificial Sequence
  Description of Artificial Sequence: Synthetic oligonucleotide
  Antisense strand to SEQ ID NO: 2422558
aaugcggagauucaguccc

SEQ ID NO: 2422560 - RNA, 19 nt, Artificial Sequence
  Description of Artificial Sequence: Synthetic oligonucleotide
  Sense strand starting at position 1736 of SEQ ID NO: 1886714
gggaaauaguugccucgga

SEQ ID NO: 2422561 - RNA, 19 nt, Artificial Sequence
  Description of Artificial Sequence: Synthetic oligonucleotide
  Antisense strand to SEQ ID NO: 2422560
uccgaggcaacuauuuccc

SEQ ID NO: 2422562 - RNA, 19 nt, Artificial Sequence
  Description of Artificial Sequence: Synthetic oligonucleotide
  Sense strand starting at position 1737 of SEQ ID NO: 1886714
ggaaauaguugccucggaa

SEQ ID NO: 2422563 - RNA, 19 nt, Artificial Sequence
  Description of Artificial Sequence: Synthetic oligonucleotide
  Antisense strand to SEQ ID NO: 2422562
uuccgaggcaacuauuucc

SEQ ID NO: 2422564 - RNA, 19 nt, Artificial Sequence
  Description of Artificial Sequence: Synthetic oligonucleotide
  Sense strand starting at position 2152 of SEQ ID NO: 1886714
guugcaaucaucuagguag

SEQ ID NO: 2422565 - RNA, 19 nt, Artificial Sequence
  Description of Artificial Sequence: Synthetic oligonucleotide
  Antisense strand to SEQ ID NO: 2422564
cuaccuagaugauugcaac

SEQ ID NO: 2422566 - RNA, 19 nt, Artificial Sequence
  Description of Artificial Sequence: Synthetic oligonucleotide
  Sense strand starting at position 2154 of SEQ ID NO: 1886714
ugcaaucaucuagguagaa

SEQ ID NO: 2422567 - RNA, 19 nt, Artificial Sequence
  Description of Artificial Sequence: Synthetic oligonucleotide
  Antisense strand to SEQ ID NO: 2422566
uucuaccuagaugauugca

SEQ ID NO: 2422568 - RNA, 19 nt, Artificial Sequence
  Description of Artificial Sequence: Synthetic oligonucleotide
  Sense strand starting at position 2155 of SEQ ID NO: 1886714
gcaaucaucuagguagaag

SEQ ID NO: 2422569 - RNA, 19 nt, Artificial Sequence
  Description of Artificial Sequence: Synthetic oligonucleotide
  Antisense strand to SEQ ID NO: 2422568
cuucuaccuagaugauugc

SEQ ID NO: 2422570 - RNA, 19 nt, Artificial Sequence
  Description of Artificial Sequence: Synthetic oligonucleotide
  Sense strand starting at position 2277 of SEQ ID NO: 1886714
ccggcaucccucgagaaug

SEQ ID NO: 2422571 - RNA, 19 nt, Artificial Sequence
  Description of Artificial Sequence: Synthetic oligonucleotide
  Antisense strand to SEQ ID NO: 2422570
cauucucgagggaugccgg

SEQ ID NO: 2422572 - RNA, 19 nt, Artificial Sequence
  Description of Artificial Sequence: Synthetic oligonucleotide
  Sense strand starting at position 2411 of SEQ ID NO: 1886714
gugaacgcuguucagagaa

SEQ ID NO: 2422573 - RNA, 19 nt, Artificial Sequence
  Description of Artificial Sequence: Synthetic oligonucleotide
  Antisense strand to SEQ ID NO: 2422572
uucucugaacagcguucac

SEQ ID NO: 2422574 - RNA, 19 nt, Artificial Sequence
  Description of Artificial Sequence: Synthetic oligonucleotide
  Sense strand starting at position 2423 of SEQ ID NO: 1886714
cagagaaggcacugaucua

SEQ ID NO: 2422575 - RNA, 19 nt, Artificial Sequence
  Description of Artificial Sequence: Synthetic oligonucleotide
  Antisense strand to SEQ ID NO: 2422574
uagaucagugccuucucug

SEQ ID NO: 2422576 - RNA, 19 nt, Artificial Sequence
  Description of Artificial Sequence: Synthetic oligonucleotide
  Sense strand starting at position 2468 of SEQ ID NO: 1886714
cgccgaauucuagacggaa

SEQ ID NO: 2422577 - RNA, 19 nt, Artificial Sequence
  Description of Artificial Sequence: Synthetic oligonucleotide
  Antisense strand to SEQ ID NO: 2422576
uuccgucuagaauucggcg

SEQ ID NO: 2422578 - RNA, 19 nt, Artificial Sequence
  Description of Artificial Sequence: Synthetic oligonucleotide
  Sense strand starting at position 2527 of SEQ ID NO: 1886714
aauuaugacuugucaggua

SEQ ID NO: 2422579 - RNA, 19 nt, Artificial Sequence
  Description of Artificial Sequence: Synthetic oligonucleotide
  Antisense strand to SEQ ID NO: 2422578
uaccugacaagucauaauu

SEQ ID NO: 2422580 - RNA, 19 nt, Artificial Sequence
  Description of Artificial Sequence: Synthetic oligonucleotide
  Sense strand starting at position 2610 of SEQ ID NO: 1886714
gcagcucuaggagaucauu

SEQ ID NO: 2422581 - RNA, 19 nt, Artificial Sequence
  Description of Artificial Sequence: Synthetic oligonucleotide
  Antisense strand to SEQ ID NO: 2422580
aaugaucuccuagagcugc

SEQ ID NO: 2422582 - RNA, 19 nt, Artificial Sequence
  Description of Artificial Sequence: Synthetic oligonucleotide
  Sense strand starting at position 2613 of SEQ ID NO: 1886714
gcucuaggagaucauuauc

SEQ ID NO: 2422583 - RNA, 19 nt, Artificial Sequence
  Description of Artificial Sequence: Synthetic oligonucleotide
  Antisense strand to SEQ ID NO: 2422582
gauaaugaucuccuagagc

SEQ ID NO: 2422584 - RNA, 19 nt, Artificial Sequence
  Description of Artificial Sequence: Synthetic oligonucleotide
  Sense strand starting at position 2644 of SEQ ID NO: 1886714
ugccgaucuagguaggauu

SEQ ID NO: 2422585 - RNA, 19 nt, Artificial Sequence
  Description of Artificial Sequence: Synthetic oligonucleotide
  Antisense strand to SEQ ID NO: 2422584
aauccuaccuagaucggca

SEQ ID NO: 2422586 - RNA, 19 nt, Artificial Sequence
  Description of Artificial Sequence: Synthetic oligonucleotide
  Sense strand starting at position 2749 of SEQ ID NO: 1886714
uuaucuuguuaaccgauga

SEQ ID NO: 2422587 - RNA, 19 nt, Artificial Sequence
  Description of Artificial Sequence: Synthetic oligonucleotide
  Antisense strand to SEQ ID NO: 2422586
ucaucgguuaacaagauaa

SEQ ID NO: 2422588 - RNA, 19 nt, Artificial Sequence
  Description of Artificial Sequence: Synthetic oligonucleotide
  Sense strand starting at position 2753 of SEQ ID NO: 1886714
cuuguuaaccgaugaacug

SEQ ID NO: 2422589 - RNA, 19 nt, Artificial Sequence
  Description of Artificial Sequence: Synthetic oligonucleotide
  Antisense strand to SEQ ID NO: 2422588
caguucaucgguuaacaag

SEQ ID NO: 2422590 - RNA, 19 nt, Artificial Sequence
  Description of Artificial Sequence: Synthetic oligonucleotide
  Sense strand starting at position 2754 of SEQ ID NO: 1886714
uuguuaaccgaugaacuga

SEQ ID NO: 2422591 - RNA, 19 nt, Artificial Sequence
  Description of Artificial Sequence: Synthetic oligonucleotide
  Antisense strand to SEQ ID NO: 2422590
ucaguucaucgguuaacaa

SEQ ID NO: 2422592 - RNA, 19 nt, Artificial Sequence
  Description of Artificial Sequence: Synthetic oligonucleotide
  Sense strand starting at position 2969 of SEQ ID NO: 1886714
ggcguacauuugcuuagua

SEQ ID NO: 2422593 - RNA, 19 nt, Artificial Sequence
  Description of Artificial Sequence: Synthetic oligonucleotide
  Antisense strand to SEQ ID NO: 2422592
uacuaagcaaauguacgcc

SEQ ID NO: 2422594 - RNA, 19 nt, Artificial Sequence
  Description of Artificial Sequence: Synthetic oligonucleotide
  Sense strand starting at position 2997 of SEQ ID NO: 1886714
caccuuaaugugggaaacu

SEQ ID NO: 2422595 - RNA, 19 nt, Artificial Sequence
  Description of Artificial Sequence: Synthetic oligonucleotide
  Antisense strand to SEQ ID NO: 2422594
aguuucccacauuaaggug

SEQ ID NO: 2422596 - RNA, 19 nt, Artificial Sequence
  Description of Artificial Sequence: Synthetic oligonucleotide
  Sense strand starting at position 3108 of SEQ ID NO: 1886714
acucuucgucccgaaaucu

SEQ ID NO: 2422597 - RNA, 19 nt, Artificial Sequence
  Description of Artificial Sequence: Synthetic oligonucleotide
  Antisense strand to SEQ ID NO: 2422596
agauuucgggacgaagagu

SEQ ID NO: 2422598 - RNA, 19 nt, Artificial Sequence
  Description of Artificial Sequence: Synthetic oligonucleotide
  Sense strand starting at position 3116 of SEQ ID NO: 1886714
ucccgaaaucuguguaaac

SEQ ID NO: 2422599 - RNA, 19 nt, Artificial Sequence
  Description of Artificial Sequence: Synthetic oligonucleotide
  Antisense strand to SEQ ID NO: 2422598
guuuacacagauuucggga

SEQ ID NO: 2422600 - RNA, 19 nt, Artificial Sequence
  Description of Artificial Sequence: Synthetic oligonucleotide
  Sense strand starting at position 3117 of SEQ ID NO: 1886714
cccgaaaucuguguaaaca

SEQ ID NO: 2422601 - RNA, 19 nt, Artificial Sequence
  Description of Artificial Sequence: Synthetic oligonucleotide
  Antisense strand to SEQ ID NO: 2422600
uguuuacacagauuucggg

SEQ ID NO: 2422602 - RNA, 19 nt, Artificial Sequence
  Description of Artificial Sequence: Synthetic oligonucleotide
  Sense strand starting at position 3118 of SEQ ID NO: 1886714
ccgaaaucuguguaaacag

SEQ ID NO: 2422603 - RNA, 19 nt, Artificial Sequence
  Description of Artificial Sequence: Synthetic oligonucleotide
  Antisense strand to SEQ ID NO: 2422602
cuguuuacacagauuucgg

SEQ ID NO: 2422604 - RNA, 19 nt, Artificial Sequence
  Description of Artificial Sequence: Synthetic oligonucleotide
  Sense strand starting at position 3171 of SEQ ID NO: 1886714
agcuaucuacguuguauuu

SEQ ID NO: 2422605 - RNA, 19 nt, Artificial Sequence
  Description of Artificial Sequence: Synthetic oligonucleotide
  Antisense strand to SEQ ID NO: 2422604
aaauacaacguagauagcu

SEQ ID NO: 2422606 - RNA, 19 nt, Artificial Sequence
  Description of Artificial Sequence: Synthetic oligonucleotide
  Sense strand starting at position 3177 of SEQ ID NO: 1886714
cuacguuguauuugguaaa

SEQ ID NO: 2422607 - RNA, 19 nt, Artificial Sequence
  Description of Artificial Sequence: Synthetic oligonucleotide
  Antisense strand to SEQ ID NO: 2422606
uuuaccaaauacaacguag

SEQ ID NO: 2422608 - RNA, 19 nt, Artificial Sequence
  Description of Artificial Sequence: Synthetic oligonucleotide
  Sense strand starting at position 3252 of SEQ ID NO: 1886714
uagacuguacugugggaau

SEQ ID NO: 2422609 - RNA, 19 nt, Artificial Sequence
  Description of Artificial Sequence: Synthetic oligonucleotide
  Antisense strand to SEQ ID NO: 2422608
auucccacaguacagucua

SEQ ID NO: 2422610 - RNA, 19 nt, Artificial Sequence
  Description of Artificial Sequence: Synthetic oligonucleotide
  Sense strand starting at position 3254 of SEQ ID NO: 1886714
gacuguacugugggaauua

SEQ ID NO: 2422611 - RNA, 19 nt, Artificial Sequence
  Description of Artificial Sequence: Synthetic oligonucleotide
  Antisense strand to SEQ ID NO: 2422610
uaauucccacaguacaguc

SEQ ID NO: 2422612 - RNA, 19 nt, Artificial Sequence
  Description of Artificial Sequence: Synthetic oligonucleotide
  Sense strand starting at position 3418 of SEQ ID NO: 1886714
acaauuguacagugaacaa

SEQ ID NO: 2422613 - RNA, 19 nt, Artificial Sequence
  Description of Artificial Sequence: Synthetic oligonucleotide
  Antisense strand to SEQ ID NO: 2422612
uuguucacuguacaauugu

SEQ ID NO: 2422614 - RNA, 19 nt, Artificial Sequence
  Description of Artificial Sequence: Synthetic oligonucleotide
  Sense strand starting at position 3509 of SEQ ID NO: 1886714
uccauccaucgauauaugu

SEQ ID NO: 2422615 - RNA, 19 nt, Artificial Sequence
  Description of Artificial Sequence: Synthetic oligonucleotide
  Antisense strand to SEQ ID NO: 2422614
acauauaucgauggaugga

SEQ ID NO: 2422616 - RNA, 19 nt, Artificial Sequence
  Description of Artificial Sequence: Synthetic oligonucleotide
  Sense strand starting at position 3518 of SEQ ID NO: 1886714
cgauauauguuaguacauu

SEQ ID NO: 2422617 - RNA, 19 nt, Artificial Sequence
  Description of Artificial Sequence: Synthetic oligonucleotide
  Antisense strand to SEQ ID NO: 2422616
aauguacuaacauauaucg

SEQ ID NO: 2422618 - RNA, 19 nt, Artificial Sequence
  Description of Artificial Sequence: Synthetic oligonucleotide
  Sense strand starting at position 3549 of SEQ ID NO: 1886714
accucaguauggguaucau

SEQ ID NO: 2422619 - RNA, 19 nt, Artificial Sequence
  Description of Artificial Sequence: Synthetic oligonucleotide
  Antisense strand to SEQ ID NO: 2422618
augauacccauacugaggu

SEQ ID NO: 2422620 - RNA, 19 nt, Artificial Sequence
  Description of Artificial Sequence: Synthetic oligonucleotide
  Sense strand starting at position 3597 of SEQ ID NO: 1886714
cuccaaguuucuguggauu

SEQ ID NO: 2422621 - RNA, 19 nt, Artificial Sequence
  Description of Artificial Sequence: Synthetic oligonucleotide
  Antisense strand to SEQ ID NO: 2422620
aauccacagaaacuuggag

SEQ ID NO: 2422622 - RNA, 19 nt, Artificial Sequence
  Description of Artificial Sequence: Synthetic oligonucleotide
  Sense strand starting at position 3600 of SEQ ID NO: 1886714
caaguuucuguggauuaca

SEQ ID NO: 2422623 - RNA, 19 nt, Artificial Sequence
  Description of Artificial Sequence: Synthetic oligonucleotide
  Antisense strand to SEQ ID NO: 2422622
uguaauccacagaaacuug

SEQ ID NO: 2422624 - RNA, 19 nt, Artificial Sequence
  Description of Artificial Sequence: Synthetic oligonucleotide
  Sense strand starting at position 3603 of SEQ ID NO: 1886714
guuucuguggauuacauua

SEQ ID NO: 2422625 - RNA, 19 nt, Artificial Sequence
  Description of Artificial Sequence: Synthetic oligonucleotide
  Antisense strand to SEQ ID NO: 2422624
uaauguaauccacagaaac

SEQ ID NO: 2422626 - RNA, 19 nt, Artificial Sequence
  Description of Artificial Sequence: Synthetic oligonucleotide
  Sense strand starting at position 3775 of SEQ ID NO: 1886714
gacaguugugcuggaaaua

SEQ ID NO: 2422627 - RNA, 19 nt, Artificial Sequence
  Description of Artificial Sequence: Synthetic oligonucleotide
  Antisense strand to SEQ ID NO: 2422626
uauuuccagcacaacuguc

SEQ ID NO: 2422628 - RNA, 19 nt, Artificial Sequence
  Description of Artificial Sequence: Synthetic oligonucleotide
  Sense strand starting at position 3776 of SEQ ID NO: 1886714
acaguugugcuggaaauag

SEQ ID NO: 2422629 - RNA, 19 nt, Artificial Sequence
  Description of Artificial Sequence: Synthetic oligonucleotide
  Antisense strand to SEQ ID NO: 2422628
cuauuuccagcacaacugu

SEQ ID NO: 2422630 - RNA, 19 nt, Artificial Sequence
  Description of Artificial Sequence: Synthetic oligonucleotide
  Sense strand starting at position 81 of SEQ ID NO: 1886715
gcaugcucaggaugaacua

SEQ ID NO: 2422631 - RNA, 19 nt, Artificial Sequence
  Description of Artificial Sequence: Synthetic oligonucleotide
  Antisense strand to SEQ ID NO: 2422630
uaguucauccugagcaugc

SEQ ID NO: 2422632 - RNA, 19 nt, Artificial Sequence
  Description of Artificial Sequence: Synthetic oligonucleotide
  Sense strand starting at position 186 of SEQ ID NO: 1886715
ugcuguugaaagugagauc

SEQ ID NO: 2422633 - RNA, 19 nt, Artificial Sequence
  Description of Artificial Sequence: Synthetic oligonucleotide
  Antisense strand to SEQ ID NO: 2422632
gaucucacuuucaacagca

SEQ ID NO: 2422634 - RNA, 19 nt, Artificial Sequence
  Description of Artificial Sequence: Synthetic oligonucleotide
  Sense strand starting at position 286 of SEQ ID NO: 1886715
gcacuaugguccucggaga

SEQ ID NO: 2422635 - RNA, 19 nt, Artificial Sequence
  Description of Artificial Sequence: Synthetic oligonucleotide
  Antisense strand to SEQ ID NO: 2422634
ucuccgaggaccauagugc

SEQ ID NO: 2422636 - RNA, 19 nt, Artificial Sequence
  Description of Artificial Sequence: Synthetic oligonucleotide
  Sense strand starting at position 358 of SEQ ID NO: 1886715
aggcuagucagacagcaau

SEQ ID NO: 2422637 - RNA, 19 nt, Artificial Sequence
  Description of Artificial Sequence: Synthetic oligonucleotide
  Antisense strand to SEQ ID NO: 2422636
auugcugucugacuagccu

SEQ ID NO: 2422638 - RNA, 19 nt, Artificial Sequence
  Description of Artificial Sequence: Synthetic oligonucleotide
  Sense strand starting at position 528 of SEQ ID NO: 1886715
acaagaauugcucagugca

SEQ ID NO: 2422639 - RNA, 19 nt, Artificial Sequence
  Description of Artificial Sequence: Synthetic oligonucleotide
  Antisense strand to SEQ ID NO: 2422638
ugcacugagcaauucuugu

SEQ ID NO: 2422640 - RNA, 19 nt, Artificial Sequence
  Description of Artificial Sequence: Synthetic oligonucleotide
  Sense strand starting at position 531 of SEQ ID NO: 1886715
agaauugcucagugcagga

SEQ ID NO: 2422641 - RNA, 19 nt, Artificial Sequence
  Description of Artificial Sequence: Synthetic oligonucleotide
  Antisense strand to SEQ ID NO: 2422640
uccugcacugagcaauucu

SEQ ID NO: 2422642 - RNA, 19 nt, Artificial Sequence
  Description of Artificial Sequence: Synthetic oligonucleotide
  Sense strand starting at position 597 of SEQ ID NO: 1886715
gugauuagagccugggcaa

SEQ ID NO: 2422643 - RNA, 19 nt, Artificial Sequence
  Description of Artificial Sequence: Synthetic oligonucleotide
  Antisense strand to SEQ ID NO: 2422642
uugcccaggcucuaaucac

SEQ ID NO: 2422644 - RNA, 19 nt, Artificial Sequence
  Description of Artificial Sequence: Synthetic oligonucleotide
  Sense strand starting at position 746 of SEQ ID NO: 1886715
gugaaacaccguugcuacu

SEQ ID NO: 2422645 - RNA, 19 nt, Artificial Sequence
  Description of Artificial Sequence: Synthetic oligonucleotide
  Antisense strand to SEQ ID NO: 2422644
aguagcaacgguguuucac

SEQ ID NO: 2422646 - RNA, 19 nt, Artificial Sequence
  Description of Artificial Sequence: Synthetic oligonucleotide
  Sense strand starting at position 1199 of SEQ ID NO: 1886715
ggcuccuuacuaugugauu

SEQ ID NO: 2422647 - RNA, 19 nt, Artificial Sequence
  Description of Artificial Sequence: Synthetic oligonucleotide
  Antisense strand to SEQ ID NO: 2422646
aaucacauaguaaggagcc

SEQ ID NO: 2422648 - RNA, 19 nt, Artificial Sequence
  Description of Artificial Sequence: Synthetic oligonucleotide
  Sense strand starting at position 1200 of SEQ ID NO: 1886715
gcuccuuacuaugugauuu

SEQ ID NO: 2422649 - RNA, 19 nt, Artificial Sequence
  Description of Artificial Sequence: Synthetic oligonucleotide
  Antisense strand to SEQ ID NO: 2422648
aaaucacauaguaaggagc

SEQ ID NO: 2422650 - RNA, 19 nt, Artificial Sequence
  Description of Artificial Sequence: Synthetic oligonucleotide
  Sense strand starting at position 1224 of SEQ ID NO: 1886715
uuaugauguucuccaugga

SEQ ID NO: 2422651 - RNA, 19 nt, Artificial Sequence
  Description of Artificial Sequence: Synthetic oligonucleotide
  Antisense strand to SEQ ID NO: 2422650
uccauggagaacaucauaa

SEQ ID NO: 2422652 - RNA, 19 nt, Artificial Sequence
  Description of Artificial Sequence: Synthetic oligonucleotide
  Sense strand starting at position 1350 of SEQ ID NO: 1886715
guggaacuguucccuaucu

SEQ ID NO: 2422653 - RNA, 19 nt, Artificial Sequence
  Description of Artificial Sequence: Synthetic oligonucleotide
  Antisense strand to SEQ ID NO: 2422652
agauagggaacaguuccac

SEQ ID NO: 2422654 - RNA, 19 nt, Artificial Sequence
  Description of Artificial Sequence: Synthetic oligonucleotide
  Sense strand starting at position 1351 of SEQ ID NO: 1886715
uggaacuguucccuaucuu

SEQ ID NO: 2422655 - RNA, 19 nt, Artificial Sequence
  Description of Artificial Sequence: Synthetic oligonucleotide
  Antisense strand to SEQ ID NO: 2422654
aagauagggaacaguucca

SEQ ID NO: 2422656 - RNA, 19 nt, Artificial Sequence
  Description of Artificial Sequence: Synthetic oligonucleotide
  Sense strand starting at position 1352 of SEQ ID NO: 1886715
ggaacuguucccuaucuug

SEQ ID NO: 2422657 - RNA, 19 nt, Artificial Sequence
  Description of Artificial Sequence: Synthetic oligonucleotide
  Antisense strand to SEQ ID NO: 2422656
caagauagggaacaguucc

SEQ ID NO: 2422658 - RNA, 19 nt, Artificial Sequence
  Description of Artificial Sequence: Synthetic oligonucleotide
  Sense strand starting at position 1436 of SEQ ID NO: 1886715
aucuuacugcauggaaauu

SEQ ID NO: 2422659 - RNA, 19 nt, Artificial Sequence
  Description of Artificial Sequence: Synthetic oligonucleotide
  Antisense strand to SEQ ID NO: 2422658
aauuuccaugcaguaagau

SEQ ID NO: 2422660 - RNA, 19 nt, Artificial Sequence
  Description of Artificial Sequence: Synthetic oligonucleotide
  Sense strand starting at position 2148 of SEQ ID NO: 1886715
accauuguacuguauggaa

SEQ ID NO: 2422661 - RNA, 19 nt, Artificial Sequence
  Description of Artificial Sequence: Synthetic oligonucleotide
  Antisense strand to SEQ ID NO: 2422660
uuccauacaguacaauggu

SEQ ID NO: 2422662 - RNA, 19 nt, Artificial Sequence
  Description of Artificial Sequence: Synthetic oligonucleotide
  Sense strand starting at position 2150 of SEQ ID NO: 1886715
cauuguacuguauggaaac

SEQ ID NO: 2422663 - RNA, 19 nt, Artificial Sequence
  Description of Artificial Sequence: Synthetic oligonucleotide
  Antisense strand to SEQ ID NO: 2422662
guuuccauacaguacaaug

SEQ ID NO: 2422664 - RNA, 19 nt, Artificial Sequence
  Description of Artificial Sequence: Synthetic oligonucleotide
  Sense strand starting at position 2164 of SEQ ID NO: 1886715
gaaacuucugcagagguua

SEQ ID NO: 2422665 - RNA, 19 nt, Artificial Sequence
  Description of Artificial Sequence: Synthetic oligonucleotide
  Antisense strand to SEQ ID NO: 2422664
uaaccucugcagaaguuuc

SEQ ID NO: 2422666 - RNA, 19 nt, Artificial Sequence
  Description of Artificial Sequence: Synthetic oligonucleotide
  Sense strand starting at position 2389 of SEQ ID NO: 1886715
uggugaaccuaagaaauag

SEQ ID NO: 2422667 - RNA, 19 nt, Artificial Sequence
  Description of Artificial Sequence: Synthetic oligonucleotide
  Antisense strand to SEQ ID NO: 2422666
cuauuucuuagguucacca

SEQ ID NO: 2422668 - RNA, 19 nt, Artificial Sequence
  Description of Artificial Sequence: Synthetic oligonucleotide
  Sense strand starting at position 2431 of SEQ ID NO: 1886715
gggugucucaaagauguga

SEQ ID NO: 2422669 - RNA, 19 nt, Artificial Sequence
  Description of Artificial Sequence: Synthetic oligonucleotide
  Antisense strand to SEQ ID NO: 2422668
ucacaucuuugagacaccc

SEQ ID NO: 2422670 - RNA, 19 nt, Artificial Sequence
  Description of Artificial Sequence: Synthetic oligonucleotide
  Sense strand starting at position 2451 of SEQ ID NO: 1886715
guggucugcagaggaagau

SEQ ID NO: 2422671 - RNA, 19 nt, Artificial Sequence
  Description of Artificial Sequence: Synthetic oligonucleotide
  Antisense strand to SEQ ID NO: 2422670
aucuuccucugcagaccac

SEQ ID NO: 2422672 - RNA, 19 nt, Artificial Sequence
  Description of Artificial Sequence: Synthetic oligonucleotide
  Sense strand starting at position 2572 of SEQ ID NO: 1886715
gcuccaaugcuuuggaacu

SEQ ID NO: 2422673 - RNA, 19 nt, Artificial Sequence
  Description of Artificial Sequence: Synthetic oligonucleotide
  Antisense strand to SEQ ID NO: 2422672
aguuccaaagcauuggagc

SEQ ID NO: 2422674 - RNA, 19 nt, Artificial Sequence
  Description of Artificial Sequence: Synthetic oligonucleotide
  Sense strand starting at position 2649 of SEQ ID NO: 1886715
augagucacuauuaggaga

SEQ ID NO: 2422675 - RNA, 19 nt, Artificial Sequence
  Description of Artificial Sequence: Synthetic oligonucleotide
  Antisense strand to SEQ ID NO: 2422674
ucuccuaauagugacucau

SEQ ID NO: 2422676 - RNA, 19 nt, Artificial Sequence
  Description of Artificial Sequence: Synthetic oligonucleotide
  Sense strand starting at position 2747 of SEQ ID NO: 1886715
gggagcuguucugucauuu

SEQ ID NO: 2422677 - RNA, 19 nt, Artificial Sequence
  Description of Artificial Sequence: Synthetic oligonucleotide
  Antisense strand to SEQ ID NO: 2422676
aaaugacagaacagcuccc

SEQ ID NO: 2422678 - RNA, 19 nt, Artificial Sequence
  Description of Artificial Sequence: Synthetic oligonucleotide
  Sense strand starting at position 2751 of SEQ ID NO: 1886715
gcuguucugucauuuacug

SEQ ID NO: 2422679 - RNA, 19 nt, Artificial Sequence
  Description of Artificial Sequence: Synthetic oligonucleotide
  Antisense strand to SEQ ID NO: 2422678
caguaaaugacagaacagc

SEQ ID NO: 2422680 - RNA, 19 nt, Artificial Sequence
  Description of Artificial Sequence: Synthetic oligonucleotide
  Sense strand starting at position 2911 of SEQ ID NO: 1886715
gucuaacaccuguaauccu

SEQ ID NO: 2422681 - RNA, 19 nt, Artificial Sequence
  Description of Artificial Sequence: Synthetic oligonucleotide
  Antisense strand to SEQ ID NO: 2422680
aggauuacagguguuagac

SEQ ID NO: 2422682 - RNA, 19 nt, Artificial Sequence
  Description of Artificial Sequence: Synthetic oligonucleotide
  Sense strand starting at position 3130 of SEQ ID NO: 1886715
augauugagucaccaccuu

SEQ ID NO: 2422683 - RNA, 19 nt, Artificial Sequence
  Description of Artificial Sequence: Synthetic oligonucleotide
  Antisense strand to SEQ ID NO: 2422682
aagguggugacucaaucau

SEQ ID NO: 2422684 - RNA, 19 nt, Artificial Sequence
  Description of Artificial Sequence: Synthetic oligonucleotide
  Sense strand starting at position 3238 of SEQ ID NO: 1886715
gagguaggcccugguguua

SEQ ID NO: 2422685 - RNA, 19 nt, Artificial Sequence
  Description of Artificial Sequence: Synthetic oligonucleotide
  Antisense strand to SEQ ID NO: 2422684
uaacaccagggccuaccuc

SEQ ID NO: 2422686 - RNA, 19 nt, Artificial Sequence
  Description of Artificial Sequence: Synthetic oligonucleotide
  Sense strand starting at position 3266 of SEQ ID NO: 1886715
ugaugaaacugagaggcua

SEQ ID NO: 2422687 - RNA, 19 nt, Artificial Sequence
  Description of Artificial Sequence: Synthetic oligonucleotide
  Antisense strand to SEQ ID NO: 2422686
uagccucucaguuucauca

SEQ ID NO: 2422688 - RNA, 19 nt, Artificial Sequence
  Description of Artificial Sequence: Synthetic oligonucleotide
  Sense strand starting at position 3346 of SEQ ID NO: 1886715
ugcaaagauuuccauggua

SEQ ID NO: 2422689 - RNA, 19 nt, Artificial Sequence
  Description of Artificial Sequence: Synthetic oligonucleotide
  Antisense strand to SEQ ID NO: 2422688
uaccauggaaaucuuugca

SEQ ID NO: 2422690 - RNA, 19 nt, Artificial Sequence
  Description of Artificial Sequence: Synthetic oligonucleotide
  Sense strand starting at position 3351 of SEQ ID NO: 1886715
agauuuccaugguagaucu

SEQ ID NO: 2422691 - RNA, 19 nt, Artificial Sequence
  Description of Artificial Sequence: Synthetic oligonucleotide
  Antisense strand to SEQ ID NO: 2422690
agaucuaccauggaaaucu

SEQ ID NO: 2422692 - RNA, 19 nt, Artificial Sequence
  Description of Artificial Sequence: Synthetic oligonucleotide
  Sense strand starting at position 3367 of SEQ ID NO: 1886715
ucugguuauguccaagcuu

SEQ ID NO: 2422693 - RNA, 19 nt, Artificial Sequence
  Description of Artificial Sequence: Synthetic oligonucleotide
  Antisense strand to SEQ ID NO: 2422692
aagcuuggacauaaccaga

SEQ ID NO: 2422694 - RNA, 19 nt, Artificial Sequence
  Description of Artificial Sequence: Synthetic oligonucleotide
  Sense strand starting at position 3424 of SEQ ID NO: 1886715
agggcagauuccucuuuag

SEQ ID NO: 2422695 - RNA, 19 nt, Artificial Sequence
  Description of Artificial Sequence: Synthetic oligonucleotide
  Antisense strand to SEQ ID NO: 2422694
cuaaagaggaaucugcccu

SEQ ID NO: 2422696 - RNA, 19 nt, Artificial Sequence
  Description of Artificial Sequence: Synthetic oligonucleotide
  Sense strand starting at position 3427 of SEQ ID NO: 1886715
gcagauuccucuuuagguu

SEQ ID NO: 2422697 - RNA, 19 nt, Artificial Sequence
  Description of Artificial Sequence: Synthetic oligonucleotide
  Antisense strand to SEQ ID NO: 2422696
aaccuaaagaggaaucugc

SEQ ID NO: 2422698 - RNA, 19 nt, Artificial Sequence
  Description of Artificial Sequence: Synthetic oligonucleotide
  Sense strand starting at position 3805 of SEQ ID NO: 1886715
ucaagucuccuguggguga

SEQ ID NO: 2422699 - RNA, 19 nt, Artificial Sequence
  Description of Artificial Sequence: Synthetic oligonucleotide
  Antisense strand to SEQ ID NO: 2422698
ucacccacaggagacuuga

SEQ ID NO: 2422700 - RNA, 19 nt, Artificial Sequence
  Description of Artificial Sequence: Synthetic oligonucleotide
  Sense strand starting at position 3941 of SEQ ID NO: 1886715
aggguaagaguuuguggga

SEQ ID NO: 2422701 - RNA, 19 nt, Artificial Sequence
  Description of Artificial Sequence: Synthetic oligonucleotide
  Antisense strand to SEQ ID NO: 2422700
ucccacaaacucuuacccu

SEQ ID NO: 2422702 - RNA, 19 nt, Artificial Sequence
  Description of Artificial Sequence: Synthetic oligonucleotide
  Sense strand starting at position 3942 of SEQ ID NO: 1886715
ggguaagaguuugugggaa

SEQ ID NO: 2422703 - RNA, 19 nt, Artificial Sequence
  Description of Artificial Sequence: Synthetic oligonucleotide
  Antisense strand to SEQ ID NO: 2422702
uucccacaaacucuuaccc

SEQ ID NO: 2422704 - RNA, 19 nt, Artificial Sequence
  Description of Artificial Sequence: Synthetic oligonucleotide
  Sense strand starting at position 3946 of SEQ ID NO: 1886715
aagaguuugugggaauaga

SEQ ID NO: 2422705 - RNA, 19 nt, Artificial Sequence
  Description of Artificial Sequence: Synthetic oligonucleotide
  Antisense strand to SEQ ID NO: 2422704
ucuauucccacaaacucuu

SEQ ID NO: 2422706 - RNA, 19 nt, Artificial Sequence
  Description of Artificial Sequence: Synthetic oligonucleotide
  Sense strand starting at position 3980 of SEQ ID NO: 1886715
ugguucugugauggagcau

SEQ ID NO: 2422707 - RNA, 19 nt, Artificial Sequence
  Description of Artificial Sequence: Synthetic oligonucleotide
  Antisense strand to SEQ ID NO: 2422706
augcuccaucacagaacca

SEQ ID NO: 2422708 - RNA, 19 nt, Artificial Sequence
  Description of Artificial Sequence: Synthetic oligonucleotide
  Sense strand starting at position 3981 of SEQ ID NO: 1886715
gguucugugauggagcaua

SEQ ID NO: 2422709 - RNA, 19 nt, Artificial Sequence
  Description of Artificial Sequence: Synthetic oligonucleotide
  Antisense strand to SEQ ID NO: 2422708
uaugcuccaucacagaacc

SEQ ID NO: 2422710 - RNA, 19 nt, Artificial Sequence
  Description of Artificial Sequence: Synthetic oligonucleotide
  Sense strand starting at position 65 of SEQ ID NO: 1886716
ggccaugucucauuucuca

SEQ ID NO: 2422711 - RNA, 19 nt, Artificial Sequence
  Description of Artificial Sequence: Synthetic oligonucleotide
  Antisense strand to SEQ ID NO: 2422710
ugagaaaugagacauggcc

SEQ ID NO: 2422712 - RNA, 19 nt, Artificial Sequence
  Description of Artificial Sequence: Synthetic oligonucleotide
  Sense strand starting at position 126 of SEQ ID NO: 1886716
caaggugcccaguaggaaa

SEQ ID NO: 2422713 - RNA, 19 nt, Artificial Sequence
  Description of Artificial Sequence: Synthetic oligonucleotide
  Antisense strand to SEQ ID NO: 2422712
uuuccuacugggcaccuug

SEQ ID NO: 2422714 - RNA, 19 nt, Artificial Sequence
  Description of Artificial Sequence: Synthetic oligonucleotide
  Sense strand starting at position 141 of SEQ ID NO: 1886716
gaaagucaggcuuagcauu

SEQ ID NO: 2422715 - RNA, 19 nt, Artificial Sequence
  Description of Artificial Sequence: Synthetic oligonucleotide
  Antisense strand to SEQ ID NO: 2422714
aaugcuaagccugacuuuc

SEQ ID NO: 2422716 - RNA, 19 nt, Artificial Sequence
  Description of Artificial Sequence: Synthetic oligonucleotide
  Sense strand starting at position 655 of SEQ ID NO: 1886716
gugucuaggcacugggaaa

SEQ ID NO: 2422717 - RNA, 19 nt, Artificial Sequence
  Description of Artificial Sequence: Synthetic oligonucleotide
  Antisense strand to SEQ ID NO: 2422716
uuucccagugccuagacac

SEQ ID NO: 2422718 - RNA, 19 nt, Artificial Sequence
  Description of Artificial Sequence: Synthetic oligonucleotide
  Sense strand starting at position 710 of SEQ ID NO: 1886716
gcuuguagucuaggaggga

SEQ ID NO: 2422719 - RNA, 19 nt, Artificial Sequence
  Description of Artificial Sequence: Synthetic oligonucleotide
  Antisense strand to SEQ ID NO: 2422718
ucccuccuagacuacaagc

SEQ ID NO: 2422720 - RNA, 19 nt, Artificial Sequence
  Description of Artificial Sequence: Synthetic oligonucleotide
  Sense strand starting at position 743 of SEQ ID NO: 1886716
cuguuuaagccacagcaaa

SEQ ID NO: 2422721 - RNA, 19 nt, Artificial Sequence
  Description of Artificial Sequence: Synthetic oligonucleotide
  Antisense strand to SEQ ID NO: 2422720
uuugcuguggcuuaaacag

SEQ ID NO: 2422722 - RNA, 19 nt, Artificial Sequence
  Description of Artificial Sequence: Synthetic oligonucleotide
  Sense strand starting at position 760 of SEQ ID NO: 1886716
aaaguacugccuuggaagu

SEQ ID NO: 2422723 - RNA, 19 nt, Artificial Sequence
  Description of Artificial Sequence: Synthetic oligonucleotide
  Antisense strand to SEQ ID NO: 2422722
acuuccaaggcaguacuuu

SEQ ID NO: 2422724 - RNA, 19 nt, Artificial Sequence
  Description of Artificial Sequence: Synthetic oligonucleotide
  Sense strand starting at position 894 of SEQ ID NO: 1886716
ugugaauggaacuaugcua

SEQ ID NO: 2422725 - RNA, 19 nt, Artificial Sequence
  Description of Artificial Sequence: Synthetic oligonucleotide
  Antisense strand to SEQ ID NO: 2422724
uagcauaguuccauucaca

SEQ ID NO: 2422726 - RNA, 19 nt, Artificial Sequence
  Description of Artificial Sequence: Synthetic oligonucleotide
  Sense strand starting at position 1367 of SEQ ID NO: 1886716
uucucauuguuauuguaag

SEQ ID NO: 2422727 - RNA, 19 nt, Artificial Sequence
  Description of Artificial Sequence: Synthetic oligonucleotide
  Antisense strand to SEQ ID NO: 2422726
cuuacaauaacaaugagaa

SEQ ID NO: 2422728 - RNA, 19 nt, Artificial Sequence
  Description of Artificial Sequence: Synthetic oligonucleotide
  Sense strand starting at position 1417 of SEQ ID NO: 1886716
aggauagugccuggcacua

SEQ ID NO: 2422729 - RNA, 19 nt, Artificial Sequence
  Description of Artificial Sequence: Synthetic oligonucleotide
  Antisense strand to SEQ ID NO: 2422728
uagugccaggcacuauccu

SEQ ID NO: 2422730 - RNA, 19 nt, Artificial Sequence
  Description of Artificial Sequence: Synthetic oligonucleotide
  Sense strand starting at position 1456 of SEQ ID NO: 1886716
gucagaguauuacuauuag

SEQ ID NO: 2422731 - RNA, 19 nt, Artificial Sequence
  Description of Artificial Sequence: Synthetic oligonucleotide
  Antisense strand to SEQ ID NO: 2422730
cuaauaguaauacucugac

SEQ ID NO: 2422732 - RNA, 19 nt, Artificial Sequence
  Description of Artificial Sequence: Synthetic oligonucleotide
  Sense strand starting at position 1527 of SEQ ID NO: 1886716
uucugugcuaggcauuaga

SEQ ID NO: 2422733 - RNA, 19 nt, Artificial Sequence
  Description of Artificial Sequence: Synthetic oligonucleotide
  Antisense strand to SEQ ID NO: 2422732
ucuaaugccuagcacagaa

SEQ ID NO: 2422734 - RNA, 19 nt, Artificial Sequence
  Description of Artificial Sequence: Synthetic oligonucleotide
  Sense strand starting at position 1530 of SEQ ID NO: 1886716
ugugcuaggcauuagacau

SEQ ID NO: 2422735 - RNA, 19 nt, Artificial Sequence
  Description of Artificial Sequence: Synthetic oligonucleotide
  Antisense strand to SEQ ID NO: 2422734
augucuaaugccuagcaca

SEQ ID NO: 2422736 - RNA, 19 nt, Artificial Sequence
  Description of Artificial Sequence: Synthetic oligonucleotide
  Sense strand starting at position 1584 of SEQ ID NO: 1886716
guauccauaccaugagaau

SEQ ID NO: 2422737 - RNA, 19 nt, Artificial Sequence
  Description of Artificial Sequence: Synthetic oligonucleotide
  Antisense strand to SEQ ID NO: 2422736
auucucaugguauggauac

SEQ ID NO: 2422738 - RNA, 19 nt, Artificial Sequence
  Description of Artificial Sequence: Synthetic oligonucleotide
  Sense strand starting at position 1596 of SEQ ID NO: 1886716
ugagaauuaggucguauua

SEQ ID NO: 2422739 - RNA, 19 nt, Artificial Sequence
  Description of Artificial Sequence: Synthetic oligonucleotide
  Antisense strand to SEQ ID NO: 2422738
uaauacgaccuaauucuca

SEQ ID NO: 2422740 - RNA, 19 nt, Artificial Sequence
  Description of Artificial Sequence: Synthetic oligonucleotide
  Sense strand starting at position 1606 of SEQ ID NO: 1886716
gucguauuaauuuguucca

SEQ ID NO: 2422741 - RNA, 19 nt, Artificial Sequence
  Description of Artificial Sequence: Synthetic oligonucleotide
  Antisense strand to SEQ ID NO: 2422740
uggaacaaauuaauacgac

SEQ ID NO: 2422742 - RNA, 19 nt, Artificial Sequence
  Description of Artificial Sequence: Synthetic oligonucleotide
  Sense strand starting at position 1607 of SEQ ID NO: 1886716
ucguauuaauuuguuccau

SEQ ID NO: 2422743 - RNA, 19 nt, Artificial Sequence
  Description of Artificial Sequence: Synthetic oligonucleotide
  Antisense strand to SEQ ID NO: 2422742
auggaacaaauuaauacga

SEQ ID NO: 2422744 - RNA, 19 nt, Artificial Sequence
  Description of Artificial Sequence: Synthetic oligonucleotide
  Sense strand starting at position 1609 of SEQ ID NO: 1886716
guauuaauuuguuccaugu

SEQ ID NO: 2422745 - RNA, 19 nt, Artificial Sequence
  Description of Artificial Sequence: Synthetic oligonucleotide
  Antisense strand to SEQ ID NO: 2422744
acauggaacaaauuaauac

SEQ ID NO: 2422746 - RNA, 19 nt, Artificial Sequence
  Description of Artificial Sequence: Synthetic oligonucleotide
  Sense strand starting at position 1636 of SEQ ID NO: 1886716
gugagaagugauggcaaga

SEQ ID NO: 2422747 - RNA, 19 nt, Artificial Sequence
  Description of Artificial Sequence: Synthetic oligonucleotide
  Antisense strand to SEQ ID NO: 2422746
ucuugccaucacuucucac

SEQ ID NO: 2422748 - RNA, 19 nt, Artificial Sequence
  Description of Artificial Sequence: Synthetic oligonucleotide
  Sense strand starting at position 1708 of SEQ ID NO: 1886716
guuccauuccgugccaagu

SEQ ID NO: 2422749 - RNA, 19 nt, Artificial Sequence
  Description of Artificial Sequence: Synthetic oligonucleotide
  Antisense strand to SEQ ID NO: 2422748
acuuggcacggaauggaac

SEQ ID NO: 2422750 - RNA, 19 nt, Artificial Sequence
  Description of Artificial Sequence: Synthetic oligonucleotide
  Sense strand starting at position 1763 of SEQ ID NO: 1886716
agaugugcuucugcagaaa

SEQ ID NO: 2422751 - RNA, 19 nt, Artificial Sequence
  Description of Artificial Sequence: Synthetic oligonucleotide
  Antisense strand to SEQ ID NO: 2422750
uuucugcagaagcacaucu

SEQ ID NO: 2422752 - RNA, 19 nt, Artificial Sequence
  Description of Artificial Sequence: Synthetic oligonucleotide
  Sense strand starting at position 1766 of SEQ ID NO: 1886716
ugugcuucugcagaaacca

SEQ ID NO: 2422753 - RNA, 19 nt, Artificial Sequence
  Description of Artificial Sequence: Synthetic oligonucleotide
  Antisense strand to SEQ ID NO: 2422752
ugguuucugcagaagcaca

SEQ ID NO: 2422754 - RNA, 19 nt, Artificial Sequence
  Description of Artificial Sequence: Synthetic oligonucleotide
  Sense strand starting at position 1790 of SEQ ID NO: 1886716
ugccuucguccugaaugaa

SEQ ID NO: 2422755 - RNA, 19 nt, Artificial Sequence
  Description of Artificial Sequence: Synthetic oligonucleotide
  Antisense strand to SEQ ID NO: 2422754
uucauucaggacgaaggca

SEQ ID NO: 2422756 - RNA, 19 nt, Artificial Sequence
  Description of Artificial Sequence: Synthetic oligonucleotide
  Sense strand starting at position 2223 of SEQ ID NO: 1886716
gauggucuucucgggaaag

SEQ ID NO: 2422757 - RNA, 19 nt, Artificial Sequence
  Description of Artificial Sequence: Synthetic oligonucleotide
  Antisense strand to SEQ ID NO: 2422756
cuuucccgagaagaccauc

SEQ ID NO: 2422758 - RNA, 19 nt, Artificial Sequence
  Description of Artificial Sequence: Synthetic oligonucleotide
  Sense strand starting at position 2225 of SEQ ID NO: 1886716
uggucuucucgggaaagau

SEQ ID NO: 2422759 - RNA, 19 nt, Artificial Sequence
  Description of Artificial Sequence: Synthetic oligonucleotide
  Antisense strand to SEQ ID NO: 2422758
aucuuucccgagaagacca

SEQ ID NO: 2422760 - RNA, 19 nt, Artificial Sequence
  Description of Artificial Sequence: Synthetic oligonucleotide
  Sense strand starting at position 2330 of SEQ ID NO: 1886716
cccugagggcuguauguuu

SEQ ID NO: 2422761 - RNA, 19 nt, Artificial Sequence
  Description of Artificial Sequence: Synthetic oligonucleotide
  Antisense strand to SEQ ID NO: 2422760
aaacauacagcccucaggg

SEQ ID NO: 2422762 - RNA, 19 nt, Artificial Sequence
  Description of Artificial Sequence: Synthetic oligonucleotide
  Sense strand starting at position 2368 of SEQ ID NO: 1886716
gugggaagugugugauaaa

SEQ ID NO: 2422763 - RNA, 19 nt, Artificial Sequence
  Description of Artificial Sequence: Synthetic oligonucleotide
  Antisense strand to SEQ ID NO: 2422762
uuuaucacacacuucccac

SEQ ID NO: 2422764 - RNA, 19 nt, Artificial Sequence
  Description of Artificial Sequence: Synthetic oligonucleotide
  Sense strand starting at position 2576 of SEQ ID NO: 1886716
cccauaccugcuggagaau

SEQ ID NO: 2422765 - RNA, 19 nt, Artificial Sequence
  Description of Artificial Sequence: Synthetic oligonucleotide
  Antisense strand to SEQ ID NO: 2422764
auucuccagcagguauggg

SEQ ID NO: 2422766 - RNA, 19 nt, Artificial Sequence
  Description of Artificial Sequence: Synthetic oligonucleotide
  Sense strand starting at position 2620 of SEQ ID NO: 1886716
augucauaagcucagaacu

SEQ ID NO: 2422767 - RNA, 19 nt, Artificial Sequence
  Description of Artificial Sequence: Synthetic oligonucleotide
  Antisense strand to SEQ ID NO: 2422766
aguucugagcuuaugacau

SEQ ID NO: 2422768 - RNA, 19 nt, Artificial Sequence
  Description of Artificial Sequence: Synthetic oligonucleotide
  Sense strand starting at position 2676 of SEQ ID NO: 1886716
uuccaugguccauggauca

SEQ ID NO: 2422769 - RNA, 19 nt, Artificial Sequence
  Description of Artificial Sequence: Synthetic oligonucleotide
  Antisense strand to SEQ ID NO: 2422768
ugauccauggaccauggaa

SEQ ID NO: 2422770 - RNA, 19 nt, Artificial Sequence
  Description of Artificial Sequence: Synthetic oligonucleotide
  Sense strand starting at position 2735 of SEQ ID NO: 1886716
ucuggccuccgagaguauu

SEQ ID NO: 2422771 - RNA, 19 nt, Artificial Sequence
  Description of Artificial Sequence: Synthetic oligonucleotide
  Antisense strand to SEQ ID NO: 2422770
aauacucucggaggccaga

SEQ ID NO: 2422772 - RNA, 19 nt, Artificial Sequence
  Description of Artificial Sequence: Synthetic oligonucleotide
  Sense strand starting at position 2777 of SEQ ID NO: 1886716
ggagaaacaagcugucucu

SEQ ID NO: 2422773 - RNA, 19 nt, Artificial Sequence
  Description of Artificial Sequence: Synthetic oligonucleotide
  Antisense strand to SEQ ID NO: 2422772
agagacagcuuguuucucc

SEQ ID NO: 2422774 - RNA, 19 nt, Artificial Sequence
  Description of Artificial Sequence: Synthetic oligonucleotide
  Sense strand starting at position 2827 of SEQ ID NO: 1886716
uauugugggcaaugugaua

SEQ ID NO: 2422775 - RNA, 19 nt, Artificial Sequence
  Description of Artificial Sequence: Synthetic oligonucleotide
  Antisense strand to SEQ ID NO: 2422774
uaucacauugcccacaaua

SEQ ID NO: 2422776 - RNA, 19 nt, Artificial Sequence
  Description of Artificial Sequence: Synthetic oligonucleotide
  Sense strand starting at position 2932 of SEQ ID NO: 1886716
ugugaaaugccauaugaau

SEQ ID NO: 2422777 - RNA, 19 nt, Artificial Sequence
  Description of Artificial Sequence: Synthetic oligonucleotide
  Antisense strand to SEQ ID NO: 2422776
auucauauggcauuucaca

SEQ ID NO: 2422778 - RNA, 19 nt, Artificial Sequence
  Description of Artificial Sequence: Synthetic oligonucleotide
  Sense strand starting at position 2949 of SEQ ID NO: 1886716
auaagauuauucuuggcag

SEQ ID NO: 2422779 - RNA, 19 nt, Artificial Sequence
  Description of Artificial Sequence: Synthetic oligonucleotide
  Antisense strand to SEQ ID NO: 2422778
cugccaagaauaaucuuau

SEQ ID NO: 2422780 - RNA, 19 nt, Artificial Sequence
  Description of Artificial Sequence: Synthetic oligonucleotide
  Sense strand starting at position 2952 of SEQ ID NO: 1886716
agauuauucuuggcagaau

SEQ ID NO: 2422781 - RNA, 19 nt, Artificial Sequence
  Description of Artificial Sequence: Synthetic oligonucleotide
  Antisense strand to SEQ ID NO: 2422780
auucugccaagaauaaucu

SEQ ID NO: 2422782 - RNA, 19 nt, Artificial Sequence
  Description of Artificial Sequence: Synthetic oligonucleotide
  Sense strand starting at position 2963 of SEQ ID NO: 1886716
ggcagaauuuguuaagaag

SEQ ID NO: 2422783 - RNA, 19 nt, Artificial Sequence
  Description of Artificial Sequence: Synthetic oligonucleotide
  Antisense strand to SEQ ID NO: 2422782
cuucuuaacaaauucugcc

SEQ ID NO: 2422784 - RNA, 19 nt, Artificial Sequence
  Description of Artificial Sequence: Synthetic oligonucleotide
  Sense strand starting at position 2999 of SEQ ID NO: 1886716
cuaaauguccauugauagg

SEQ ID NO: 2422785 - RNA, 19 nt, Artificial Sequence
  Description of Artificial Sequence: Synthetic oligonucleotide
  Antisense strand to SEQ ID NO: 2422784
ccuaucaauggacauuuag

SEQ ID NO: 2422786 - RNA, 19 nt, Artificial Sequence
  Description of Artificial Sequence: Synthetic oligonucleotide
  Sense strand starting at position 3080 of SEQ ID NO: 1886716
ucugcaaauuuggaaggau

SEQ ID NO: 2422787 - RNA, 19 nt, Artificial Sequence
  Description of Artificial Sequence: Synthetic oligonucleotide
  Antisense strand to SEQ ID NO: 2422786
auccuuccaaauuugcaga

SEQ ID NO: 2422788 - RNA, 19 nt, Artificial Sequence
  Description of Artificial Sequence: Synthetic oligonucleotide
  Sense strand starting at position 3400 of SEQ ID NO: 1886716
gccaauguaccuggugaga

SEQ ID NO: 2422789 - RNA, 19 nt, Artificial Sequence
  Description of Artificial Sequence: Synthetic oligonucleotide
  Antisense strand to SEQ ID NO: 2422788
ucucaccagguacauuggc

SEQ ID NO: 2422790 - RNA, 19 nt, Artificial Sequence
  Description of Artificial Sequence: Synthetic oligonucleotide
  Sense strand starting at position 188 of SEQ ID NO: 1886718
ucugacgucugcgaugaga

SEQ ID NO: 2422791 - RNA, 19 nt, Artificial Sequence
  Description of Artificial Sequence: Synthetic oligonucleotide
  Antisense strand to SEQ ID NO: 2422790
ucucaucgcagacgucaga

SEQ ID NO: 2422792 - RNA, 19 nt, Artificial Sequence
  Description of Artificial Sequence: Synthetic oligonucleotide
  Sense strand starting at position 190 of SEQ ID NO: 1886718
ugacgucugcgaugagacu

SEQ ID NO: 2422793 - RNA, 19 nt, Artificial Sequence
  Description of Artificial Sequence: Synthetic oligonucleotide
  Antisense strand to SEQ ID NO: 2422792
agucucaucgcagacguca

SEQ ID NO: 2422794 - RNA, 19 nt, Artificial Sequence
  Description of Artificial Sequence: Synthetic oligonucleotide
  Sense strand starting at position 229 of SEQ ID NO: 1886719
aggauagguucccugacca

SEQ ID NO: 2422795 - RNA, 19 nt, Artificial Sequence
  Description of Artificial Sequence: Synthetic oligonucleotide
  Antisense strand to SEQ ID NO: 2422794
uggucagggaaccuauccu

SEQ ID NO: 2422796 - RNA, 19 nt, Artificial Sequence
  Description of Artificial Sequence: Synthetic oligonucleotide
  Sense strand starting at position 317 of SEQ ID NO: 1886719
gucucaucuuaaucuggaa

SEQ ID NO: 2422797 - RNA, 19 nt, Artificial Sequence
  Description of Artificial Sequence: Synthetic oligonucleotide
  Antisense strand to SEQ ID NO: 2422796
uuccagauuaagaugagac

SEQ ID NO: 2422798 - RNA, 19 nt, Artificial Sequence
  Description of Artificial Sequence: Synthetic oligonucleotide
  Sense strand starting at position 330 of SEQ ID NO: 1886719
cuggaacuaccuggucuau

SEQ ID NO: 2422799 - RNA, 19 nt, Artificial Sequence
  Description of Artificial Sequence: Synthetic oligonucleotide
  Antisense strand to SEQ ID NO: 2422798
auagaccagguaguuccag

SEQ ID NO: 2422800 - RNA, 19 nt, Artificial Sequence
  Description of Artificial Sequence: Synthetic oligonucleotide
  Sense strand starting at position 342 of SEQ ID NO: 1886719
ggucuauuugcucaggugu

SEQ ID NO: 2422801 - RNA, 19 nt, Artificial Sequence
  Description of Artificial Sequence: Synthetic oligonucleotide
  Antisense strand to SEQ ID NO: 2422800
acaccugagcaaauagacc

SEQ ID NO: 2422802 - RNA, 19 nt, Artificial Sequence
  Description of Artificial Sequence: Synthetic oligonucleotide
  Sense strand starting at position 359 of SEQ ID NO: 1886719
guuguuugucuucugcaau

SEQ ID NO: 2422803 - RNA, 19 nt, Artificial Sequence
  Description of Artificial Sequence: Synthetic oligonucleotide
  Antisense strand to SEQ ID NO: 2422802
auugcagaagacaaacaac

SEQ ID NO: 2422804 - RNA, 19 nt, Artificial Sequence
  Description of Artificial Sequence: Synthetic oligonucleotide
  Sense strand starting at position 362 of SEQ ID NO: 1886719
guuugucuucugcaauaga

SEQ ID NO: 2422805 - RNA, 19 nt, Artificial Sequence
  Description of Artificial Sequence: Synthetic oligonucleotide
  Antisense strand to SEQ ID NO: 2422804
ucuauugcagaagacaaac

SEQ ID NO: 2422806 - RNA, 19 nt, Artificial Sequence
  Description of Artificial Sequence: Synthetic oligonucleotide
  Sense strand starting at position 539 of SEQ ID NO: 1886719
guugacacucaauauagua

SEQ ID NO: 2422807 - RNA, 19 nt, Artificial Sequence
  Description of Artificial Sequence: Synthetic oligonucleotide
  Antisense strand to SEQ ID NO: 2422806
uacuauauugagugucaac

SEQ ID NO: 2422808 - RNA, 19 nt, Artificial Sequence
  Description of Artificial Sequence: Synthetic oligonucleotide
  Sense strand starting at position 749 of SEQ ID NO: 1886719
gauaaacggcaguaugguu

SEQ ID NO: 2422809 - RNA, 19 nt, Artificial Sequence
  Description of Artificial Sequence: Synthetic oligonucleotide
  Antisense strand to SEQ ID NO: 2422808
aaccauacugccguuuauc

SEQ ID NO: 2422810 - RNA, 19 nt, Artificial Sequence
  Description of Artificial Sequence: Synthetic oligonucleotide
  Sense strand starting at position 761 of SEQ ID NO: 1886719
uaugguuaaguggguaaga

SEQ ID NO: 2422811 - RNA, 19 nt, Artificial Sequence
  Description of Artificial Sequence: Synthetic oligonucleotide
  Antisense strand to SEQ ID NO: 2422810
ucuuacccacuuaaccaua

SEQ ID NO: 2422812 - RNA, 19 nt, Artificial Sequence
  Description of Artificial Sequence: Synthetic oligonucleotide
  Sense strand starting at position 956 of SEQ ID NO: 1886719
aaacguaaccucugggaag

SEQ ID NO: 2422813 - RNA, 19 nt, Artificial Sequence
  Description of Artificial Sequence: Synthetic oligonucleotide
  Antisense strand to SEQ ID NO: 2422812
cuucccagagguuacguuu

SEQ ID NO: 2422814 - RNA, 19 nt, Artificial Sequence
  Description of Artificial Sequence: Synthetic oligonucleotide
  Sense strand starting at position 967 of SEQ ID NO: 1886719
cugggaagguuuguuauua

SEQ ID NO: 2422815 - RNA, 19 nt, Artificial Sequence
  Description of Artificial Sequence: Synthetic oligonucleotide
  Antisense strand to SEQ ID NO: 2422814
uaauaacaaaccuucccag

SEQ ID NO: 2422816 - RNA, 19 nt, Artificial Sequence
  Description of Artificial Sequence: Synthetic oligonucleotide
  Sense strand starting at position 968 of SEQ ID NO: 1886719
ugggaagguuuguuauuac

SEQ ID NO: 2422817 - RNA, 19 nt, Artificial Sequence
  Description of Artificial Sequence: Synthetic oligonucleotide
  Antisense strand to SEQ ID NO: 2422816
guaauaacaaaccuuccca

SEQ ID NO: 2422818 - RNA, 19 nt, Artificial Sequence
  Description of Artificial Sequence: Synthetic oligonucleotide
  Sense strand starting at position 971 of SEQ ID NO: 1886719
gaagguuuguuauuacuug

SEQ ID NO: 2422819 - RNA, 19 nt, Artificial Sequence
  Description of Artificial Sequence: Synthetic oligonucleotide
  Antisense strand to SEQ ID NO: 2422818
caaguaauaacaaaccuuc

SEQ ID NO: 2422820 - RNA, 19 nt, Artificial Sequence
  Description of Artificial Sequence: Synthetic oligonucleotide
  Sense strand starting at position 975 of SEQ ID NO: 1886719
guuuguuauuacuugacaa

SEQ ID NO: 2422821 - RNA, 19 nt, Artificial Sequence
  Description of Artificial Sequence: Synthetic oligonucleotide
  Antisense strand to SEQ ID NO: 2422820
uugucaaguaauaacaaac

SEQ ID NO: 2422822 - RNA, 19 nt, Artificial Sequence
  Description of Artificial Sequence: Synthetic oligonucleotide
  Sense strand starting at position 1016 of SEQ ID NO: 1886719
ggguaaugacgcuaagcca

SEQ ID NO: 2422823 - RNA, 19 nt, Artificial Sequence
  Description of Artificial Sequence: Synthetic oligonucleotide
  Antisense strand to SEQ ID NO: 2422822
uggcuuagcgucauuaccc

SEQ ID NO: 2422824 - RNA, 19 nt, Artificial Sequence
  Description of Artificial Sequence: Synthetic oligonucleotide
  Sense strand starting at position 1056 of SEQ ID NO: 1886719
gagcgucacccgguuucua

SEQ ID NO: 2422825 - RNA, 19 nt, Artificial Sequence
  Description of Artificial Sequence: Synthetic oligonucleotide
  Antisense strand to SEQ ID NO: 2422824
uagaaaccgggugacgcuc

SEQ ID NO: 2422826 - RNA, 19 nt, Artificial Sequence
  Description of Artificial Sequence: Synthetic oligonucleotide
  Sense strand starting at position 1141 of SEQ ID NO: 1886719
uguggagaucgcuaagauc

SEQ ID NO: 2422827 - RNA, 19 nt, Artificial Sequence
  Description of Artificial Sequence: Synthetic oligonucleotide
  Antisense strand to SEQ ID NO: 2422826
gaucuuagcgaucuccaca

SEQ ID NO: 2422828 - RNA, 19 nt, Artificial Sequence
  Description of Artificial Sequence: Synthetic oligonucleotide
  Sense strand starting at position 1211 of SEQ ID NO: 1886719
gaccuuguuuguuuacuga

SEQ ID NO: 2422829 - RNA, 19 nt, Artificial Sequence
  Description of Artificial Sequence: Synthetic oligonucleotide
  Antisense strand to SEQ ID NO: 2422828
ucaguaaacaaacaagguc

SEQ ID NO: 2422830 - RNA, 19 nt, Artificial Sequence
  Description of Artificial Sequence: Synthetic oligonucleotide
  Sense strand starting at position 1271 of SEQ ID NO: 1886719
agaguuggcucgguaaaca

SEQ ID NO: 2422831 - RNA, 19 nt, Artificial Sequence
  Description of Artificial Sequence: Synthetic oligonucleotide
  Antisense strand to SEQ ID NO: 2422830
uguuuaccgagccaacucu

SEQ ID NO: 2422832 - RNA, 19 nt, Artificial Sequence
  Description of Artificial Sequence: Synthetic oligonucleotide
  Sense strand starting at position 1280 of SEQ ID NO: 1886719
ucgguaaacacugaauggu

SEQ ID NO: 2422833 - RNA, 19 nt, Artificial Sequence
  Description of Artificial Sequence: Synthetic oligonucleotide
  Antisense strand to SEQ ID NO: 2422832
accauucaguguuuaccga

SEQ ID NO: 2422834 - RNA, 19 nt, Artificial Sequence
  Description of Artificial Sequence: Synthetic oligonucleotide
  Sense strand starting at position 1289 of SEQ ID NO: 1886719
acugaaugguugccugaau

SEQ ID NO: 2422835 - RNA, 19 nt, Artificial Sequence
  Description of Artificial Sequence: Synthetic oligonucleotide
  Antisense strand to SEQ ID NO: 2422834
auucaggcaaccauucagu

SEQ ID NO: 2422836 - RNA, 19 nt, Artificial Sequence
  Description of Artificial Sequence: Synthetic oligonucleotide
  Sense strand starting at position 1290 of SEQ ID NO: 1886719
cugaaugguugccugaaua

SEQ ID NO: 2422837 - RNA, 19 nt, Artificial Sequence
  Description of Artificial Sequence: Synthetic oligonucleotide
  Antisense strand to SEQ ID NO: 2422836
uauucaggcaaccauucag

SEQ ID NO: 2422838 - RNA, 19 nt, Artificial Sequence
  Description of Artificial Sequence: Synthetic oligonucleotide
  Sense strand starting at position 1751 of SEQ ID NO: 1886719
uggccuacucgggaaucua

SEQ ID NO: 2422839 - RNA, 19 nt, Artificial Sequence
  Description of Artificial Sequence: Synthetic oligonucleotide
  Antisense strand to SEQ ID NO: 2422838
uagauucccgaguaggcca

SEQ ID NO: 2422840 - RNA, 19 nt, Artificial Sequence
  Description of Artificial Sequence: Synthetic oligonucleotide
  Sense strand starting at position 2240 of SEQ ID NO: 1886719
cugcaauauguuuaugcca

SEQ ID NO: 2422841 - RNA, 19 nt, Artificial Sequence
  Description of Artificial Sequence: Synthetic oligonucleotide
  Antisense strand to SEQ ID NO: 2422840
uggcauaaacauauugcag

SEQ ID NO: 2422842 - RNA, 19 nt, Artificial Sequence
  Description of Artificial Sequence: Synthetic oligonucleotide
  Sense strand starting at position 2423 of SEQ ID NO: 1886719
guugguuccgaauagguau

SEQ ID NO: 2422843 - RNA, 19 nt, Artificial Sequence
  Description of Artificial Sequence: Synthetic oligonucleotide
  Antisense strand to SEQ ID NO: 2422842
auaccuauucggaaccaac

SEQ ID NO: 2422844 - RNA, 19 nt, Artificial Sequence
  Description of Artificial Sequence: Synthetic oligonucleotide
  Sense strand starting at position 2462 of SEQ ID NO: 1886719
gaaacuuuacucugaguug

SEQ ID NO: 2422845 - RNA, 19 nt, Artificial Sequence
  Description of Artificial Sequence: Synthetic oligonucleotide
  Antisense strand to SEQ ID NO: 2422844
caacucagaguaaaguuuc

SEQ ID NO: 2422846 - RNA, 19 nt, Artificial Sequence
  Description of Artificial Sequence: Synthetic oligonucleotide
  Sense strand starting at position 2465 of SEQ ID NO: 1886719
acuuuacucugaguuggau

SEQ ID NO: 2422847 - RNA, 19 nt, Artificial Sequence
  Description of Artificial Sequence: Synthetic oligonucleotide
  Antisense strand to SEQ ID NO: 2422846
auccaacucagaguaaagu

SEQ ID NO: 2422848 - RNA, 19 nt, Artificial Sequence
  Description of Artificial Sequence: Synthetic oligonucleotide
  Sense strand starting at position 2471 of SEQ ID NO: 1886719
cucugaguuggaugguuaa

SEQ ID NO: 2422849 - RNA, 19 nt, Artificial Sequence
  Description of Artificial Sequence: Synthetic oligonucleotide
  Antisense strand to SEQ ID NO: 2422848
uuaaccauccaacucagag

SEQ ID NO: 2422850 - RNA, 19 nt, Artificial Sequence
  Description of Artificial Sequence: Synthetic oligonucleotide
  Sense strand starting at position 2501 of SEQ ID NO: 1886719
cugguuaacccacagguaa

SEQ ID NO: 2422851 - RNA, 19 nt, Artificial Sequence
  Description of Artificial Sequence: Synthetic oligonucleotide
  Antisense strand to SEQ ID NO: 2422850
uuaccuguggguuaaccag

SEQ ID NO: 2422852 - RNA, 19 nt, Artificial Sequence
  Description of Artificial Sequence: Synthetic oligonucleotide
  Sense strand starting at position 2539 of SEQ ID NO: 1886719
gugucuccgggagaagaaa

SEQ ID NO: 2422853 - RNA, 19 nt, Artificial Sequence
  Description of Artificial Sequence: Synthetic oligonucleotide
  Antisense strand to SEQ ID NO: 2422852
uuucuucucccggagacac

SEQ ID NO: 2422854 - RNA, 19 nt, Artificial Sequence
  Description of Artificial Sequence: Synthetic oligonucleotide
  Sense strand starting at position 2553 of SEQ ID NO: 1886719
agaaauugaucugaucaga

SEQ ID NO: 2422855 - RNA, 19 nt, Artificial Sequence
  Description of Artificial Sequence: Synthetic oligonucleotide
  Antisense strand to SEQ ID NO: 2422854
ucugaucagaucaauuucu

SEQ ID NO: 2422856 - RNA, 19 nt, Artificial Sequence
  Description of Artificial Sequence: Synthetic oligonucleotide
  Sense strand starting at position 2704 of SEQ ID NO: 1886719
agguacaaaugcucuuuga

SEQ ID NO: 2422857 - RNA, 19 nt, Artificial Sequence
  Description of Artificial Sequence: Synthetic oligonucleotide
  Antisense strand to SEQ ID NO: 2422856
ucaaagagcauuuguaccu

SEQ ID NO: 2422858 - RNA, 19 nt, Artificial Sequence
  Description of Artificial Sequence: Synthetic oligonucleotide
  Sense strand starting at position 2751 of SEQ ID NO: 1886719
cgagguaacuaaccauuau

SEQ ID NO: 2422859 - RNA, 19 nt, Artificial Sequence
  Description of Artificial Sequence: Synthetic oligonucleotide
  Antisense strand to SEQ ID NO: 2422858
auaaugguuaguuaccucg

SEQ ID NO: 2422860 - RNA, 19 nt, Artificial Sequence
  Description of Artificial Sequence: Synthetic oligonucleotide
  Sense strand starting at position 2781 of SEQ ID NO: 1886719
uaugaacuaugguuugaau

SEQ ID NO: 2422861 - RNA, 19 nt, Artificial Sequence
  Description of Artificial Sequence: Synthetic oligonucleotide
  Antisense strand to SEQ ID NO: 2422860
auucaaaccauaguucaua

SEQ ID NO: 2422862 - RNA, 19 nt, Artificial Sequence
  Description of Artificial Sequence: Synthetic oligonucleotide
  Sense strand starting at position 2783 of SEQ ID NO: 1886719
ugaacuaugguuugaaugu

SEQ ID NO: 2422863 - RNA, 19 nt, Artificial Sequence
  Description of Artificial Sequence: Synthetic oligonucleotide
  Antisense strand to SEQ ID NO: 2422862
acauucaaaccauaguuca

SEQ ID NO: 2422864 - RNA, 19 nt, Artificial Sequence
  Description of Artificial Sequence: Synthetic oligonucleotide
  Sense strand starting at position 2999 of SEQ ID NO: 1886719
gagagaccuuagcuagcaa

SEQ ID NO: 2422865 - RNA, 19 nt, Artificial Sequence
  Description of Artificial Sequence: Synthetic oligonucleotide
  Antisense strand to SEQ ID NO: 2422864
uugcuagcuaaggucucuc

SEQ ID NO: 2422866 - RNA, 19 nt, Artificial Sequence
  Description of Artificial Sequence: Synthetic oligonucleotide
  Sense strand starting at position 3323 of SEQ ID NO: 1886719
guguauggauuugaacaca

SEQ ID NO: 2422867 - RNA, 19 nt, Artificial Sequence
  Description of Artificial Sequence: Synthetic oligonucleotide
  Antisense strand to SEQ ID NO: 2422866
uguguucaaauccauacac

SEQ ID NO: 2422868 - RNA, 19 nt, Artificial Sequence
  Description of Artificial Sequence: Synthetic oligonucleotide
  Sense strand starting at position 3358 of SEQ ID NO: 1886719
ucauauagaucugcaauug

SEQ ID NO: 2422869 - RNA, 19 nt, Artificial Sequence
  Description of Artificial Sequence: Synthetic oligonucleotide
  Antisense strand to SEQ ID NO: 2422868
caauugcagaucuauauga

SEQ ID NO: 2422870 - RNA, 19 nt, Artificial Sequence
  Description of Artificial Sequence: Synthetic oligonucleotide
  Sense strand starting at position 3407 of SEQ ID NO: 1886719
aauaccuauccguguggau

SEQ ID NO: 2422871 - RNA, 19 nt, Artificial Sequence
  Description of Artificial Sequence: Synthetic oligonucleotide
  Antisense strand to SEQ ID NO: 2422870
auccacacggauagguauu

SEQ ID NO: 2422872 - RNA, 19 nt, Artificial Sequence
  Description of Artificial Sequence: Synthetic oligonucleotide
  Sense strand starting at position 3826 of SEQ ID NO: 1886719
gugagaaacucggucucaa

SEQ ID NO: 2422873 - RNA, 19 nt, Artificial Sequence
  Description of Artificial Sequence: Synthetic oligonucleotide
  Antisense strand to SEQ ID NO: 2422872
uugagaccgaguuucucac

SEQ ID NO: 2422874 - RNA, 19 nt, Artificial Sequence
  Description of Artificial Sequence: Synthetic oligonucleotide
  Sense strand starting at position 205 of SEQ ID NO: 1886720
agcgaaacuccgucuguuu

SEQ ID NO: 2422875 - RNA, 19 nt, Artificial Sequence
  Description of Artificial Sequence: Synthetic oligonucleotide
  Antisense strand to SEQ ID NO: 2422874
aaacagacggaguuucgcu

SEQ ID NO: 2422876 - RNA, 19 nt, Artificial Sequence
  Description of Artificial Sequence: Synthetic oligonucleotide
  Sense strand starting at position 253 of SEQ ID NO: 1886720
gaaacucguugcuuccuaa

SEQ ID NO: 2422877 - RNA, 19 nt, Artificial Sequence
  Description of Artificial Sequence: Synthetic oligonucleotide
  Antisense strand to SEQ ID NO: 2422876
uuaggaagcaacgaguuuc

SEQ ID NO: 2422878 - RNA, 19 nt, Artificial Sequence
  Description of Artificial Sequence: Synthetic oligonucleotide
  Sense strand starting at position 256 of SEQ ID NO: 1886720
acucguugcuuccuaaaga

SEQ ID NO: 2422879 - RNA, 19 nt, Artificial Sequence
  Description of Artificial Sequence: Synthetic oligonucleotide
  Antisense strand to SEQ ID NO: 2422878
ucuuuaggaagcaacgagu

SEQ ID NO: 2422880 - RNA, 19 nt, Artificial Sequence
  Description of Artificial Sequence: Synthetic oligonucleotide
  Sense strand starting at position 264 of SEQ ID NO: 1886720
cuuccuaaagauuggucau

SEQ ID NO: 2422881 - RNA, 19 nt, Artificial Sequence
  Description of Artificial Sequence: Synthetic oligonucleotide
  Antisense strand to SEQ ID NO: 2422880
augaccaaucuuuaggaag

SEQ ID NO: 2422882 - RNA, 19 nt, Artificial Sequence
  Description of Artificial Sequence: Synthetic oligonucleotide
  Sense strand starting at position 395 of SEQ ID NO: 1886720
cuuccugauccuggaaucu

SEQ ID NO: 2422883 - RNA, 19 nt, Artificial Sequence
  Description of Artificial Sequence: Synthetic oligonucleotide
  Antisense strand to SEQ ID NO: 2422882
agauuccaggaucaggaag

SEQ ID NO: 2422884 - RNA, 19 nt, Artificial Sequence
  Description of Artificial Sequence: Synthetic oligonucleotide
  Sense strand starting at position 415 of SEQ ID NO: 1886720
ugauguaaggauugugaga

SEQ ID NO: 2422885 - RNA, 19 nt, Artificial Sequence
  Description of Artificial Sequence: Synthetic oligonucleotide
  Antisense strand to SEQ ID NO: 2422884
ucucacaauccuuacauca

SEQ ID NO: 2422886 - RNA, 19 nt, Artificial Sequence
  Description of Artificial Sequence: Synthetic oligonucleotide
  Sense strand starting at position 437 of SEQ ID NO: 1886720
ggagguuaucuuggguugu

SEQ ID NO: 2422887 - RNA, 19 nt, Artificial Sequence
  Description of Artificial Sequence: Synthetic oligonucleotide
  Antisense strand to SEQ ID NO: 2422886
acaacccaagauaaccucc

SEQ ID NO: 2422888 - RNA, 19 nt, Artificial Sequence
  Description of Artificial Sequence: Synthetic oligonucleotide
  Sense strand starting at position 443 of SEQ ID NO: 1886720
uaucuuggguuguccagaa

SEQ ID NO: 2422889 - RNA, 19 nt, Artificial Sequence
  Description of Artificial Sequence: Synthetic oligonucleotide
  Antisense strand to SEQ ID NO: 2422888
uucuggacaacccaagaua

SEQ ID NO: 2422890 - RNA, 19 nt, Artificial Sequence
  Description of Artificial Sequence: Synthetic oligonucleotide
  Sense strand starting at position 447 of SEQ ID NO: 1886720
uuggguuguccagaaaguc

SEQ ID NO: 2422891 - RNA, 19 nt, Artificial Sequence
  Description of Artificial Sequence: Synthetic oligonucleotide
  Antisense strand to SEQ ID NO: 2422890
gacuuucuggacaacccaa

SEQ ID NO: 2422892 - RNA, 19 nt, Artificial Sequence
  Description of Artificial Sequence: Synthetic oligonucleotide
  Sense strand starting at position 459 of SEQ ID NO: 1886720
gaaagucccucagugcaau

SEQ ID NO: 2422893 - RNA, 19 nt, Artificial Sequence
  Description of Artificial Sequence: Synthetic oligonucleotide
  Antisense strand to SEQ ID NO: 2422892
auugcacugagggacuuuc

SEQ ID NO: 2422894 - RNA, 19 nt, Artificial Sequence
  Description of Artificial Sequence: Synthetic oligonucleotide
  Sense strand starting at position 835 of SEQ ID NO: 1886720
cuuggcaucuuugugacuu

SEQ ID NO: 2422895 - RNA, 19 nt, Artificial Sequence
  Description of Artificial Sequence: Synthetic oligonucleotide
  Antisense strand to SEQ ID NO: 2422894
aagucacaaagaugccaag

SEQ ID NO: 2422896 - RNA, 19 nt, Artificial Sequence
  Description of Artificial Sequence: Synthetic oligonucleotide
  Sense strand starting at position 839 of SEQ ID NO: 1886720
gcaucuuugugacuuaauu

SEQ ID NO: 2422897 - RNA, 19 nt, Artificial Sequence
  Description of Artificial Sequence: Synthetic oligonucleotide
  Antisense strand to SEQ ID NO: 2422896
aauuaagucacaaagaugc

SEQ ID NO: 2422898 - RNA, 19 nt, Artificial Sequence
  Description of Artificial Sequence: Synthetic oligonucleotide
  Sense strand starting at position 933 of SEQ ID NO: 1886720
agacuaauguggccuuuga

SEQ ID NO: 2422899 - RNA, 19 nt, Artificial Sequence
  Description of Artificial Sequence: Synthetic oligonucleotide
  Antisense strand to SEQ ID NO: 2422898
ucaaaggccacauuagucu

SEQ ID NO: 2422900 - RNA, 19 nt, Artificial Sequence
  Description of Artificial Sequence: Synthetic oligonucleotide
  Sense strand starting at position 1017 of SEQ ID NO: 1886720
ucuccuagguguccugaga

SEQ ID NO: 2422901 - RNA, 19 nt, Artificial Sequence
  Description of Artificial Sequence: Synthetic oligonucleotide
  Antisense strand to SEQ ID NO: 2422900
ucucaggacaccuaggaga

SEQ ID NO: 2422902 - RNA, 19 nt, Artificial Sequence
  Description of Artificial Sequence: Synthetic oligonucleotide
  Sense strand starting at position 1121 of SEQ ID NO: 1886720
gugugauucgugcaaagaa

SEQ ID NO: 2422903 - RNA, 19 nt, Artificial Sequence
  Description of Artificial Sequence: Synthetic oligonucleotide
  Antisense strand to SEQ ID NO: 2422902
uucuuugcacgaaucacac

SEQ ID NO: 2422904 - RNA, 19 nt, Artificial Sequence
  Description of Artificial Sequence: Synthetic oligonucleotide
  Sense strand starting at position 1169 of SEQ ID NO: 1886720
agcuuuauugggcagguga

SEQ ID NO: 2422905 - RNA, 19 nt, Artificial Sequence
  Description of Artificial Sequence: Synthetic oligonucleotide
  Antisense strand to SEQ ID NO: 2422904
ucaccugcccaauaaagcu

SEQ ID NO: 2422906 - RNA, 19 nt, Artificial Sequence
  Description of Artificial Sequence: Synthetic oligonucleotide
  Sense strand starting at position 1280 of SEQ ID NO: 1886720
guguuucuugggcagguga

SEQ ID NO: 2422907 - RNA, 19 nt, Artificial Sequence
  Description of Artificial Sequence: Synthetic oligonucleotide
  Antisense strand to SEQ ID NO: 2422906
ucaccugcccaagaaacac

SEQ ID NO: 2422908 - RNA, 19 nt, Artificial Sequence
  Description of Artificial Sequence: Synthetic oligonucleotide
  Sense strand starting at position 1291 of SEQ ID NO: 1886720
gcaggugacuuucucuuaa

SEQ ID NO: 2422909 - RNA, 19 nt, Artificial Sequence
  Description of Artificial Sequence: Synthetic oligonucleotide
  Antisense strand to SEQ ID NO: 2422908
uuaagagaaagucaccugc

SEQ ID NO: 2422910 - RNA, 19 nt, Artificial Sequence
  Description of Artificial Sequence: Synthetic oligonucleotide
  Sense strand starting at position 1293 of SEQ ID NO: 1886720
aggugacuuucucuuaacu

SEQ ID NO: 2422911 - RNA, 19 nt, Artificial Sequence
  Description of Artificial Sequence: Synthetic oligonucleotide
  Antisense strand to SEQ ID NO: 2422910
aguuaagagaaagucaccu

SEQ ID NO: 2422912 - RNA, 19 nt, Artificial Sequence
  Description of Artificial Sequence: Synthetic oligonucleotide
  Sense strand starting at position 1417 of SEQ ID NO: 1886720
agcuuagugccuucugcau

SEQ ID NO: 2422913 - RNA, 19 nt, Artificial Sequence
  Description of Artificial Sequence: Synthetic oligonucleotide
  Antisense strand to SEQ ID NO: 2422912
augcagaaggcacuaagcu

SEQ ID NO: 2422914 - RNA, 19 nt, Artificial Sequence
  Description of Artificial Sequence: Synthetic oligonucleotide
  Sense strand starting at position 1885 of SEQ ID NO: 1886720
gaccaugguguugggagau

SEQ ID NO: 2422915 - RNA, 19 nt, Artificial Sequence
  Description of Artificial Sequence: Synthetic oligonucleotide
  Antisense strand to SEQ ID NO: 2422914
aucucccaacaccaugguc

SEQ ID NO: 2422916 - RNA, 19 nt, Artificial Sequence
  Description of Artificial Sequence: Synthetic oligonucleotide
  Sense strand starting at position 2280 of SEQ ID NO: 1886720
cgcacauugucauuuggaa

SEQ ID NO: 2422917 - RNA, 19 nt, Artificial Sequence
  Description of Artificial Sequence: Synthetic oligonucleotide
  Antisense strand to SEQ ID NO: 2422916
uuccaaaugacaaugugcg

SEQ ID NO: 2422918 - RNA, 19 nt, Artificial Sequence
  Description of Artificial Sequence: Synthetic oligonucleotide
  Sense strand starting at position 2284 of SEQ ID NO: 1886720
cauugucauuuggaagcuu

SEQ ID NO: 2422919 - RNA, 19 nt, Artificial Sequence
  Description of Artificial Sequence: Synthetic oligonucleotide
  Antisense strand to SEQ ID NO: 2422918
aagcuuccaaaugacaaug

SEQ ID NO: 2422920 - RNA, 19 nt, Artificial Sequence
  Description of Artificial Sequence: Synthetic oligonucleotide
  Sense strand starting at position 2293 of SEQ ID NO: 1886720
uuggaagcuuccuugccaa

SEQ ID NO: 2422921 - RNA, 19 nt, Artificial Sequence
  Description of Artificial Sequence: Synthetic oligonucleotide
  Antisense strand to SEQ ID NO: 2422920
uuggcaaggaagcuuccaa

SEQ ID NO: 2422922 - RNA, 19 nt, Artificial Sequence
  Description of Artificial Sequence: Synthetic oligonucleotide
  Sense strand starting at position 2546 of SEQ ID NO: 1886720
uugugcaaucauggaucau

SEQ ID NO: 2422923 - RNA, 19 nt, Artificial Sequence
  Description of Artificial Sequence: Synthetic oligonucleotide
  Antisense strand to SEQ ID NO: 2422922
augauccaugauugcacaa

SEQ ID NO: 2422924 - RNA, 19 nt, Artificial Sequence
  Description of Artificial Sequence: Synthetic oligonucleotide
  Sense strand starting at position 2550 of SEQ ID NO: 1886720
gcaaucauggaucauagca

SEQ ID NO: 2422925 - RNA, 19 nt, Artificial Sequence
  Description of Artificial Sequence: Synthetic oligonucleotide
  Antisense strand to SEQ ID NO: 2422924
ugcuaugauccaugauugc

SEQ ID NO: 2422926 - RNA, 19 nt, Artificial Sequence
  Description of Artificial Sequence: Synthetic oligonucleotide
  Sense strand starting at position 2833 of SEQ ID NO: 1886720
gcaugaagaaguugaguug

SEQ ID NO: 2422927 - RNA, 19 nt, Artificial Sequence
  Description of Artificial Sequence: Synthetic oligonucleotide
  Antisense strand to SEQ ID NO: 2422926
caacucaacuucuucaugc

SEQ ID NO: 2422928 - RNA, 19 nt, Artificial Sequence
  Description of Artificial Sequence: Synthetic oligonucleotide
  Sense strand starting at position 3021 of SEQ ID NO: 1886720
cucauugaacuuugaugau

SEQ ID NO: 2422929 - RNA, 19 nt, Artificial Sequence
  Description of Artificial Sequence: Synthetic oligonucleotide
  Antisense strand to SEQ ID NO: 2422928
aucaucaaaguucaaugag

SEQ ID NO: 2422930 - RNA, 19 nt, Artificial Sequence
  Description of Artificial Sequence: Synthetic oligonucleotide
  Sense strand starting at position 3154 of SEQ ID NO: 1886720
cagagaucaucccagauga

SEQ ID NO: 2422931 - RNA, 19 nt, Artificial Sequence
  Description of Artificial Sequence: Synthetic oligonucleotide
  Antisense strand to SEQ ID NO: 2422930
ucaucugggaugaucucug

SEQ ID NO: 2422932 - RNA, 19 nt, Artificial Sequence
  Description of Artificial Sequence: Synthetic oligonucleotide
  Sense strand starting at position 3193 of SEQ ID NO: 1886720
ucacgaggguccuuagaag

SEQ ID NO: 2422933 - RNA, 19 nt, Artificial Sequence
  Description of Artificial Sequence: Synthetic oligonucleotide
  Antisense strand to SEQ ID NO: 2422932
cuucuaaggacccucguga

SEQ ID NO: 2422934 - RNA, 19 nt, Artificial Sequence
  Description of Artificial Sequence: Synthetic oligonucleotide
  Sense strand starting at position 3421 of SEQ ID NO: 1886720
ucagaauucugaccugcag

SEQ ID NO: 2422935 - RNA, 19 nt, Artificial Sequence
  Description of Artificial Sequence: Synthetic oligonucleotide
  Antisense strand to SEQ ID NO: 2422934
cugcaggucagaauucuga

SEQ ID NO: 2422936 - RNA, 19 nt, Artificial Sequence
  Description of Artificial Sequence: Synthetic oligonucleotide
  Sense strand starting at position 3433 of SEQ ID NO: 1886720
ccugcagaccuguaagaua

SEQ ID NO: 2422937 - RNA, 19 nt, Artificial Sequence
  Description of Artificial Sequence: Synthetic oligonucleotide
  Antisense strand to SEQ ID NO: 2422936
uaucuuacaggucugcagg

SEQ ID NO: 2422938 - RNA, 19 nt, Artificial Sequence
  Description of Artificial Sequence: Synthetic oligonucleotide
  Sense strand starting at position 3454 of SEQ ID NO: 1886720
gcauuuauguuguuuaaag

SEQ ID NO: 2422939 - RNA, 19 nt, Artificial Sequence
  Description of Artificial Sequence: Synthetic oligonucleotide
  Antisense strand to SEQ ID NO: 2422938
cuuuaaacaacauaaaugc

SEQ ID NO: 2422940 - RNA, 19 nt, Artificial Sequence
  Description of Artificial Sequence: Synthetic oligonucleotide
  Sense strand starting at position 3482 of SEQ ID NO: 1886720
uugugaugaucugucacag

SEQ ID NO: 2422941 - RNA, 19 nt, Artificial Sequence
  Description of Artificial Sequence: Synthetic oligonucleotide
  Antisense strand to SEQ ID NO: 2422940
cugugacagaucaucacaa

SEQ ID NO: 2422942 - RNA, 19 nt, Artificial Sequence
  Description of Artificial Sequence: Synthetic oligonucleotide
  Sense strand starting at position 3547 of SEQ ID NO: 1886720
aggaggugaugggugauau

SEQ ID NO: 2422943 - RNA, 19 nt, Artificial Sequence
  Description of Artificial Sequence: Synthetic oligonucleotide
  Antisense strand to SEQ ID NO: 2422942
auaucacccaucaccuccu

SEQ ID NO: 2422944 - RNA, 19 nt, Artificial Sequence
  Description of Artificial Sequence: Synthetic oligonucleotide
  Sense strand starting at position 3548 of SEQ ID NO: 1886720
ggaggugaugggugauauu

SEQ ID NO: 2422945 - RNA, 19 nt, Artificial Sequence
  Description of Artificial Sequence: Synthetic oligonucleotide
  Antisense strand to SEQ ID NO: 2422944
aauaucacccaucaccucc

SEQ ID NO: 2422946 - RNA, 19 nt, Artificial Sequence
  Description of Artificial Sequence: Synthetic oligonucleotide
  Sense strand starting at position 3589 of SEQ ID NO: 1886720
gcugccucucuuuagggau

SEQ ID NO: 2422947 - RNA, 19 nt, Artificial Sequence
  Description of Artificial Sequence: Synthetic oligonucleotide
  Antisense strand to SEQ ID NO: 2422946
aucccuaaagagaggcagc

SEQ ID NO: 2422948 - RNA, 19 nt, Artificial Sequence
  Description of Artificial Sequence: Synthetic oligonucleotide
  Sense strand starting at position 3606 of SEQ ID NO: 1886720
auaagaagguccuuuauga

SEQ ID NO: 2422949 - RNA, 19 nt, Artificial Sequence
  Description of Artificial Sequence: Synthetic oligonucleotide
  Antisense strand to SEQ ID NO: 2422948
ucauaaaggaccuucuuau

SEQ ID NO: 2422950 - RNA, 19 nt, Artificial Sequence
  Description of Artificial Sequence: Synthetic oligonucleotide
  Sense strand starting at position 3616 of SEQ ID NO: 1886720
ccuuuaugauggcccucaa

SEQ ID NO: 2422951 - RNA, 19 nt, Artificial Sequence
  Description of Artificial Sequence: Synthetic oligonucleotide
  Antisense strand to SEQ ID NO: 2422950
uugagggccaucauaaagg

SEQ ID NO: 2422952 - RNA, 19 nt, Artificial Sequence
  Description of Artificial Sequence: Synthetic oligonucleotide
  Sense strand starting at position 3695 of SEQ ID NO: 1886720
gucaaaucuccauggccaa

SEQ ID NO: 2422953 - RNA, 19 nt, Artificial Sequence
  Description of Artificial Sequence: Synthetic oligonucleotide
  Antisense strand to SEQ ID NO: 2422952
uuggccauggagauuugac

SEQ ID NO: 2422954 - RNA, 19 nt, Artificial Sequence
  Description of Artificial Sequence: Synthetic oligonucleotide
  Sense strand starting at position 30 of SEQ ID NO: 1886721
gggagagaacuggguguuu

SEQ ID NO: 2422955 - RNA, 19 nt, Artificial Sequence
  Description of Artificial Sequence: Synthetic oligonucleotide
  Antisense strand to SEQ ID NO: 2422954
aaacacccaguucucuccc

SEQ ID NO: 2422956 - RNA, 19 nt, Artificial Sequence
  Description of Artificial Sequence: Synthetic oligonucleotide
  Sense strand starting at position 121 of SEQ ID NO: 1886721
gggcuauugugccuaugca

SEQ ID NO: 2422957 - RNA, 19 nt, Artificial Sequence
  Description of Artificial Sequence: Synthetic oligonucleotide
  Antisense strand to SEQ ID NO: 2422956
ugcauaggcacaauagccc

SEQ ID NO: 2422958 - RNA, 19 nt, Artificial Sequence
  Description of Artificial Sequence: Synthetic oligonucleotide
  Sense strand starting at position 477 of SEQ ID NO: 1886721
ggucacuauagcuggcaga

SEQ ID NO: 2422959 - RNA, 19 nt, Artificial Sequence
  Description of Artificial Sequence: Synthetic oligonucleotide
  Antisense strand to SEQ ID NO: 2422958
ucugccagcuauagugacc

SEQ ID NO: 2422960 - RNA, 19 nt, Artificial Sequence
  Description of Artificial Sequence: Synthetic oligonucleotide
  Sense strand starting at position 478 of SEQ ID NO: 1886721
gucacuauagcuggcagaa

SEQ ID NO: 2422961 - RNA, 19 nt, Artificial Sequence
  Description of Artificial Sequence: Synthetic oligonucleotide
  Antisense strand to SEQ ID NO: 2422960
uucugccagcuauagugac

SEQ ID NO: 2422962 - RNA, 19 nt, Artificial Sequence
  Description of Artificial Sequence: Synthetic oligonucleotide
  Sense strand starting at position 480 of SEQ ID NO: 1886721
cacuauagcuggcagaaga

SEQ ID NO: 2422963 - RNA, 19 nt, Artificial Sequence
  Description of Artificial Sequence: Synthetic oligonucleotide
  Antisense strand to SEQ ID NO: 2422962
ucuucugccagcuauagug

SEQ ID NO: 2422964 - RNA, 19 nt, Artificial Sequence
  Description of Artificial Sequence: Synthetic oligonucleotide
  Sense strand starting at position 892 of SEQ ID NO: 1886721
gugggauggucagugguga

SEQ ID NO: 2422965 - RNA, 19 nt, Artificial Sequence
  Description of Artificial Sequence: Synthetic oligonucleotide
  Antisense strand to SEQ ID NO: 2422964
ucaccacugaccaucccac

SEQ ID NO: 2422966 - RNA, 19 nt, Artificial Sequence
  Description of Artificial Sequence: Synthetic oligonucleotide
  Sense strand starting at position 893 of SEQ ID NO: 1886721
ugggauggucaguggugaa

SEQ ID NO: 2422967 - RNA, 19 nt, Artificial Sequence
  Description of Artificial Sequence: Synthetic oligonucleotide
  Antisense strand to SEQ ID NO: 2422966
uucaccacugaccauccca

SEQ ID NO: 2422968 - RNA, 19 nt, Artificial Sequence
  Description of Artificial Sequence: Synthetic oligonucleotide
  Sense strand starting at position 896 of SEQ ID NO: 1886721
gauggucaguggugaacuu

SEQ ID NO: 2422969 - RNA, 19 nt, Artificial Sequence
  Description of Artificial Sequence: Synthetic oligonucleotide
  Antisense strand to SEQ ID NO: 2422968
aaguucaccacugaccauc

SEQ ID NO: 2422970 - RNA, 19 nt, Artificial Sequence
  Description of Artificial Sequence: Synthetic oligonucleotide
  Sense strand starting at position 905 of SEQ ID NO: 1886721
uggugaacuuuggguugaa

SEQ ID NO: 2422971 - RNA, 19 nt, Artificial Sequence
  Description of Artificial Sequence: Synthetic oligonucleotide
  Antisense strand to SEQ ID NO: 2422970
uucaacccaaaguucacca

SEQ ID NO: 2422972 - RNA, 19 nt, Artificial Sequence
  Description of Artificial Sequence: Synthetic oligonucleotide
  Sense strand starting at position 906 of SEQ ID NO: 1886721
ggugaacuuuggguugaaa

SEQ ID NO: 2422973 - RNA, 19 nt, Artificial Sequence
  Description of Artificial Sequence: Synthetic oligonucleotide
  Antisense strand to SEQ ID NO: 2422972
uuucaacccaaaguucacc

SEQ ID NO: 2422974 - RNA, 19 nt, Artificial Sequence
  Description of Artificial Sequence: Synthetic oligonucleotide
  Sense strand starting at position 953 of SEQ ID NO: 1886721
guggaaauguucuggaaga

SEQ ID NO: 2422975 - RNA, 19 nt, Artificial Sequence
  Description of Artificial Sequence: Synthetic oligonucleotide
  Antisense strand to SEQ ID NO: 2422974
ucuuccagaacauuuccac

SEQ ID NO: 2422976 - RNA, 19 nt, Artificial Sequence
  Description of Artificial Sequence: Synthetic oligonucleotide
  Sense strand starting at position 954 of SEQ ID NO: 1886721
uggaaauguucuggaagaa

SEQ ID NO: 2422977 - RNA, 19 nt, Artificial Sequence
  Description of Artificial Sequence: Synthetic oligonucleotide
  Antisense strand to SEQ ID NO: 2422976
uucuuccagaacauuucca

SEQ ID NO: 2422978 - RNA, 19 nt, Artificial Sequence
  Description of Artificial Sequence: Synthetic oligonucleotide
  Sense strand starting at position 1099 of SEQ ID NO: 1886721
gcccaagucuggcaucaga

SEQ ID NO: 2422979 - RNA, 19 nt, Artificial Sequence
  Description of Artificial Sequence: Synthetic oligonucleotide
  Antisense strand to SEQ ID NO: 2422978
ucugaugccagacuugggc

SEQ ID NO: 2422980 - RNA, 19 nt, Artificial Sequence
  Description of Artificial Sequence: Synthetic oligonucleotide
  Sense strand starting at position 1121 of SEQ ID NO: 1886721
gagguaaaguucgguggca

SEQ ID NO: 2422981 - RNA, 19 nt, Artificial Sequence
  Description of Artificial Sequence: Synthetic oligonucleotide
  Antisense strand to SEQ ID NO: 2422980
ugccaccgaacuuuaccuc

SEQ ID NO: 2422982 - RNA, 19 nt, Artificial Sequence
  Description of Artificial Sequence: Synthetic oligonucleotide
  Sense strand starting at position 1123 of SEQ ID NO: 1886721
gguaaaguucgguggcacu

SEQ ID NO: 2422983 - RNA, 19 nt, Artificial Sequence
  Description of Artificial Sequence: Synthetic oligonucleotide
  Antisense strand to SEQ ID NO: 2422982
agugccaccgaacuuuacc

SEQ ID NO: 2422984 - RNA, 19 nt, Artificial Sequence
  Description of Artificial Sequence: Synthetic oligonucleotide
  Sense strand starting at position 3143 of SEQ ID NO: 1886721
cacaguagcugacaugaaa

SEQ ID NO: 2422985 - RNA, 19 nt, Artificial Sequence
  Description of Artificial Sequence: Synthetic oligonucleotide
  Antisense strand to SEQ ID NO: 2422984
uuucaugucagcuacugug

SEQ ID NO: 2422986 - RNA, 19 nt, Artificial Sequence
  Description of Artificial Sequence: Synthetic oligonucleotide
  Sense strand starting at position 3245 of SEQ ID NO: 1886721
acuugaaacuugggaauag

SEQ ID NO: 2422987 - RNA, 19 nt, Artificial Sequence
  Description of Artificial Sequence: Synthetic oligonucleotide
  Antisense strand to SEQ ID NO: 2422986
cuauucccaaguuucaagu

SEQ ID NO: 2422988 - RNA, 19 nt, Artificial Sequence
  Description of Artificial Sequence: Synthetic oligonucleotide
  Sense strand starting at position 3249 of SEQ ID NO: 1886721
gaaacuugggaauagcgua

SEQ ID NO: 2422989 - RNA, 19 nt, Artificial Sequence
  Description of Artificial Sequence: Synthetic oligonucleotide
  Antisense strand to SEQ ID NO: 2422988
uacgcuauucccaaguuuc

SEQ ID NO: 2422990 - RNA, 19 nt, Artificial Sequence
  Description of Artificial Sequence: Synthetic oligonucleotide
  Sense strand starting at position 3254 of SEQ ID NO: 1886721
uugggaauagcguauucua

SEQ ID NO: 2422991 - RNA, 19 nt, Artificial Sequence
  Description of Artificial Sequence: Synthetic oligonucleotide
  Antisense strand to SEQ ID NO: 2422990
uagaauacgcuauucccaa

SEQ ID NO: 2422992 - RNA, 19 nt, Artificial Sequence
  Description of Artificial Sequence: Synthetic oligonucleotide
  Sense strand starting at position 3285 of SEQ ID NO: 1886721
gcacuaguggaagguuaau

SEQ ID NO: 2422993 - RNA, 19 nt, Artificial Sequence
  Description of Artificial Sequence: Synthetic oligonucleotide
  Antisense strand to SEQ ID NO: 2422992
auuaaccuuccacuagugc

SEQ ID NO: 2422994 - RNA, 19 nt, Artificial Sequence
  Description of Artificial Sequence: Synthetic oligonucleotide
  Sense strand starting at position 3328 of SEQ ID NO: 1886721
gugguuaggcguucugguu

SEQ ID NO: 2422995 - RNA, 19 nt, Artificial Sequence
  Description of Artificial Sequence: Synthetic oligonucleotide
  Antisense strand to SEQ ID NO: 2422994
aaccagaacgccuaaccac

SEQ ID NO: 2422996 - RNA, 19 nt, Artificial Sequence
  Description of Artificial Sequence: Synthetic oligonucleotide
  Sense strand starting at position 3627 of SEQ ID NO: 1886721
guuccugagucccagggau

SEQ ID NO: 2422997 - RNA, 19 nt, Artificial Sequence
  Description of Artificial Sequence: Synthetic oligonucleotide
  Antisense strand to SEQ ID NO: 2422996
aucccugggacucaggaac

SEQ ID NO: 2422998 - RNA, 19 nt, Artificial Sequence
  Description of Artificial Sequence: Synthetic oligonucleotide
  Sense strand starting at position 3701 of SEQ ID NO: 1886721
gccaguccuacccggagau

SEQ ID NO: 2422999 - RNA, 19 nt, Artificial Sequence
  Description of Artificial Sequence: Synthetic oligonucleotide
  Antisense strand to SEQ ID NO: 2422998
aucuccggguaggacuggc

SEQ ID NO: 2423000 - RNA, 19 nt, Artificial Sequence
  Description of Artificial Sequence: Synthetic oligonucleotide
  Sense strand starting at position 3933 of SEQ ID NO: 1886721
cccgacuccugacacauaa

SEQ ID NO: 2423001 - RNA, 19 nt, Artificial Sequence
  Description of Artificial Sequence: Synthetic oligonucleotide
  Antisense strand to SEQ ID NO: 2423000
uuaugugucaggagucggg

SEQ ID NO: 2423002 - RNA, 19 nt, Artificial Sequence
  Description of Artificial Sequence: Synthetic oligonucleotide
  Sense strand starting at position 571 of SEQ ID NO: 1886722
ccgcauucugcagagggau

SEQ ID NO: 2423003 - RNA, 19 nt, Artificial Sequence
  Description of Artificial Sequence: Synthetic oligonucleotide
  Antisense strand to SEQ ID NO: 2423002
aucccucugcagaaugcgg

SEQ ID NO: 2423004 - RNA, 19 nt, Artificial Sequence
  Description of Artificial Sequence: Synthetic oligonucleotide
  Sense strand starting at position 702 of SEQ ID NO: 1886722
gcccuugauguccagggau

SEQ ID NO: 2423005 - RNA, 19 nt, Artificial Sequence
  Description of Artificial Sequence: Synthetic oligonucleotide
  Antisense strand to SEQ ID NO: 2423004
aucccuggacaucaagggc

SEQ ID NO: 2423006 - RNA, 19 nt, Artificial Sequence
  Description of Artificial Sequence: Synthetic oligonucleotide
  Sense strand starting at position 704 of SEQ ID NO: 1886722
ccuugauguccagggauga

SEQ ID NO: 2423007 - RNA, 19 nt, Artificial Sequence
  Description of Artificial Sequence: Synthetic oligonucleotide
  Antisense strand to SEQ ID NO: 2423006
ucaucccuggacaucaagg

SEQ ID NO: 2423008 - RNA, 19 nt, Artificial Sequence
  Description of Artificial Sequence: Synthetic oligonucleotide
  Sense strand starting at position 705 of SEQ ID NO: 1886722
cuugauguccagggaugag

SEQ ID NO: 2423009 - RNA, 19 nt, Artificial Sequence
  Description of Artificial Sequence: Synthetic oligonucleotide
  Antisense strand to SEQ ID NO: 2423008
cucaucccuggacaucaag

SEQ ID NO: 2423010 - RNA, 19 nt, Artificial Sequence
  Description of Artificial Sequence: Synthetic oligonucleotide
  Sense strand starting at position 787 of SEQ ID NO: 1886722
gcuguuugagugcagggau

SEQ ID NO: 2423011 - RNA, 19 nt, Artificial Sequence
  Description of Artificial Sequence: Synthetic oligonucleotide
  Antisense strand to SEQ ID NO: 2423010
aucccugcacucaaacagc

SEQ ID NO: 2423012 - RNA, 19 nt, Artificial Sequence
  Description of Artificial Sequence: Synthetic oligonucleotide
  Sense strand starting at position 801 of SEQ ID NO: 1886722
gggaugagaugucuacggu

SEQ ID NO: 2423013 - RNA, 19 nt, Artificial Sequence
  Description of Artificial Sequence: Synthetic oligonucleotide
  Antisense strand to SEQ ID NO: 2423012
accguagacaucucauccc

SEQ ID NO: 2423014 - RNA, 19 nt, Artificial Sequence
  Description of Artificial Sequence: Synthetic oligonucleotide
  Sense strand starting at position 802 of SEQ ID NO: 1886722
ggaugagaugucuacggua

SEQ ID NO: 2423015 - RNA, 19 nt, Artificial Sequence
  Description of Artificial Sequence: Synthetic oligonucleotide
  Antisense strand to SEQ ID NO: 2423014
uaccguagacaucucaucc

SEQ ID NO: 2423016 - RNA, 19 nt, Artificial Sequence
  Description of Artificial Sequence: Synthetic oligonucleotide
  Sense strand starting at position 981 of SEQ ID NO: 1886722
ggcuccucuucccuacaga

SEQ ID NO: 2423017 - RNA, 19 nt, Artificial Sequence
  Description of Artificial Sequence: Synthetic oligonucleotide
  Antisense strand to SEQ ID NO: 2423016
ucuguagggaagaggagcc

SEQ ID NO: 2423018 - RNA, 19 nt, Artificial Sequence
  Description of Artificial Sequence: Synthetic oligonucleotide
  Sense strand starting at position 1060 of SEQ ID NO: 1886722
gucauuaaccaguggcaau

SEQ ID NO: 2423019 - RNA, 19 nt, Artificial Sequence
  Description of Artificial Sequence: Synthetic oligonucleotide
  Antisense strand to SEQ ID NO: 2423018
auugccacugguuaaugac

SEQ ID NO: 2423020 - RNA, 19 nt, Artificial Sequence
  Description of Artificial Sequence: Synthetic oligonucleotide
  Sense strand starting at position 1378 of SEQ ID NO: 1886722
gugugaugucuccacacag

SEQ ID NO: 2423021 - RNA, 19 nt, Artificial Sequence
  Description of Artificial Sequence: Synthetic oligonucleotide
  Antisense strand to SEQ ID NO: 2423020
cuguguggagacaucacac

SEQ ID NO: 2423022 - RNA, 19 nt, Artificial Sequence
  Description of Artificial Sequence: Synthetic oligonucleotide
  Sense strand starting at position 1516 of SEQ ID NO: 1886722
uucguugcuaugggaacaa

SEQ ID NO: 2423023 - RNA, 19 nt, Artificial Sequence
  Description of Artificial Sequence: Synthetic oligonucleotide
  Antisense strand to SEQ ID NO: 2423022
uuguucccauagcaacgaa

SEQ ID NO: 2423024 - RNA, 19 nt, Artificial Sequence
  Description of Artificial Sequence: Synthetic oligonucleotide
  Sense strand starting at position 1954 of SEQ ID NO: 1886722
gcgcucuuccggagguuga

SEQ ID NO: 2423025 - RNA, 19 nt, Artificial Sequence
  Description of Artificial Sequence: Synthetic oligonucleotide
  Antisense strand to SEQ ID NO: 2423024
ucaaccuccggaagagcgc

SEQ ID NO: 2423026 - RNA, 19 nt, Artificial Sequence
  Description of Artificial Sequence: Synthetic oligonucleotide
  Sense strand starting at position 2015 of SEQ ID NO: 1886722
ggcggacuuccugugcgau

SEQ ID NO: 2423027 - RNA, 19 nt, Artificial Sequence
  Description of Artificial Sequence: Synthetic oligonucleotide
  Antisense strand to SEQ ID NO: 2423026
aucgcacaggaaguccgcc

SEQ ID NO: 2423028 - RNA, 19 nt, Artificial Sequence
  Description of Artificial Sequence: Synthetic oligonucleotide
  Sense strand starting at position 2048 of SEQ ID NO: 1886722
gucaguaugcgaguccugu

SEQ ID NO: 2423029 - RNA, 19 nt, Artificial Sequence
  Description of Artificial Sequence: Synthetic oligonucleotide
  Antisense strand to SEQ ID NO: 2423028
acaggacucgcauacugac

SEQ ID NO: 2423030 - RNA, 19 nt, Artificial Sequence
  Description of Artificial Sequence: Synthetic oligonucleotide
  Sense strand starting at position 2176 of SEQ ID NO: 1886722
gcaucacugugggcaauaa

SEQ ID NO: 2423031 - RNA, 19 nt, Artificial Sequence
  Description of Artificial Sequence: Synthetic oligonucleotide
  Antisense strand to SEQ ID NO: 2423030
uuauugcccacagugaugc

SEQ ID NO: 2423032 - RNA, 19 nt, Artificial Sequence
  Description of Artificial Sequence: Synthetic oligonucleotide
  Sense strand starting at position 2186 of SEQ ID NO: 1886722
gggcaauaacuuggaguga

SEQ ID NO: 2423033 - RNA, 19 nt, Artificial Sequence
  Description of Artificial Sequence: Synthetic oligonucleotide
  Antisense strand to SEQ ID NO: 2423032
ucacuccaaguuauugccc

SEQ ID NO: 2423034 - RNA, 19 nt, Artificial Sequence
  Description of Artificial Sequence: Synthetic oligonucleotide
  Sense strand starting at position 2696 of SEQ ID NO: 1886722
aggaauuucugcuaauaaa

SEQ ID NO: 2423035 - RNA, 19 nt, Artificial Sequence
  Description of Artificial Sequence: Synthetic oligonucleotide
  Antisense strand to SEQ ID NO: 2423034
uuuauuagcagaaauuccu

SEQ ID NO: 2423036 - RNA, 19 nt, Artificial Sequence
  Description of Artificial Sequence: Synthetic oligonucleotide
  Sense strand starting at position 2719 of SEQ ID NO: 1886722
acaggaauaucaccauguu

SEQ ID NO: 2423037 - RNA, 19 nt, Artificial Sequence
  Description of Artificial Sequence: Synthetic oligonucleotide
  Antisense strand to SEQ ID NO: 2423036
aacauggugauauuccugu

SEQ ID NO: 2423038 - RNA, 19 nt, Artificial Sequence
  Description of Artificial Sequence: Synthetic oligonucleotide
  Sense strand starting at position 2722 of SEQ ID NO: 1886722
ggaauaucaccauguugca

SEQ ID NO: 2423039 - RNA, 19 nt, Artificial Sequence
  Description of Artificial Sequence: Synthetic oligonucleotide
  Antisense strand to SEQ ID NO: 2423038
ugcaacauggugauauucc

SEQ ID NO: 2423040 - RNA, 19 nt, Artificial Sequence
  Description of Artificial Sequence: Synthetic oligonucleotide
  Sense strand starting at position 2751 of SEQ ID NO: 1886722
cuaauuggucuagggaaua

SEQ ID NO: 2423041 - RNA, 19 nt, Artificial Sequence
  Description of Artificial Sequence: Synthetic oligonucleotide
  Antisense strand to SEQ ID NO: 2423040
uauucccuagaccaauuag

SEQ ID NO: 2423042 - RNA, 19 nt, Artificial Sequence
  Description of Artificial Sequence: Synthetic oligonucleotide
  Sense strand starting at position 2781 of SEQ ID NO: 1886722
cuagcucaucacuacgaga

SEQ ID NO: 2423043 - RNA, 19 nt, Artificial Sequence
  Description of Artificial Sequence: Synthetic oligonucleotide
  Antisense strand to SEQ ID NO: 2423042
ucucguagugaugagcuag

SEQ ID NO: 2423044 - RNA, 19 nt, Artificial Sequence
  Description of Artificial Sequence: Synthetic oligonucleotide
  Sense strand starting at position 2783 of SEQ ID NO: 1886722
agcucaucacuacgagaca

SEQ ID NO: 2423045 - RNA, 19 nt, Artificial Sequence
  Description of Artificial Sequence: Synthetic oligonucleotide
  Antisense strand to SEQ ID NO: 2423044
ugucucguagugaugagcu

SEQ ID NO: 2423046 - RNA, 19 nt, Artificial Sequence
  Description of Artificial Sequence: Synthetic oligonucleotide
  Sense strand starting at position 2965 of SEQ ID NO: 1886722
ccgacuuuaacaugguaga

SEQ ID NO: 2423047 - RNA, 19 nt, Artificial Sequence
  Description of Artificial Sequence: Synthetic oligonucleotide
  Antisense strand to SEQ ID NO: 2423046
ucuaccauguuaaagucgg

SEQ ID NO: 2423048 - RNA, 19 nt, Artificial Sequence
  Description of Artificial Sequence: Synthetic oligonucleotide
  Sense strand starting at position 2966 of SEQ ID NO: 1886722
cgacuuuaacaugguagag

SEQ ID NO: 2423049 - RNA, 19 nt, Artificial Sequence
  Description of Artificial Sequence: Synthetic oligonucleotide
  Antisense strand to SEQ ID NO: 2423048
cucuaccauguuaaagucg

SEQ ID NO: 2423050 - RNA, 19 nt, Artificial Sequence
  Description of Artificial Sequence: Synthetic oligonucleotide
  Sense strand starting at position 3127 of SEQ ID NO: 1886722
gccugaagaguccacaaau

SEQ ID NO: 2423051 - RNA, 19 nt, Artificial Sequence
  Description of Artificial Sequence: Synthetic oligonucleotide
  Antisense strand to SEQ ID NO: 2423050
auuuguggacucuucaggc

SEQ ID NO: 2423052 - RNA, 19 nt, Artificial Sequence
  Description of Artificial Sequence: Synthetic oligonucleotide
  Sense strand starting at position 3179 of SEQ ID NO: 1886722
agaggaauauguuagagac

SEQ ID NO: 2423053 - RNA, 19 nt, Artificial Sequence
  Description of Artificial Sequence: Synthetic oligonucleotide
  Antisense strand to SEQ ID NO: 2423052
gucucuaacauauuccucu

SEQ ID NO: 2423054 - RNA, 19 nt, Artificial Sequence
  Description of Artificial Sequence: Synthetic oligonucleotide
  Sense strand starting at position 3241 of SEQ ID NO: 1886722
gacaaaugaucaguuauug

SEQ ID NO: 2423055 - RNA, 19 nt, Artificial Sequence
  Description of Artificial Sequence: Synthetic oligonucleotide
  Antisense strand to SEQ ID NO: 2423054
caauaacugaucauuuguc

SEQ ID NO: 2423056 - RNA, 19 nt, Artificial Sequence
  Description of Artificial Sequence: Synthetic oligonucleotide
  Sense strand starting at position 3245 of SEQ ID NO: 1886722
aaugaucaguuauuggaca

SEQ ID NO: 2423057 - RNA, 19 nt, Artificial Sequence
  Description of Artificial Sequence: Synthetic oligonucleotide
  Antisense strand to SEQ ID NO: 2423056
uguccaauaacugaucauu

SEQ ID NO: 2423058 - RNA, 19 nt, Artificial Sequence
  Description of Artificial Sequence: Synthetic oligonucleotide
  Sense strand starting at position 3247 of SEQ ID NO: 1886722
ugaucaguuauuggacagu

SEQ ID NO: 2423059 - RNA, 19 nt, Artificial Sequence
  Description of Artificial Sequence: Synthetic oligonucleotide
  Antisense strand to SEQ ID NO: 2423058
acuguccaauaacugauca

SEQ ID NO: 2423060 - RNA, 19 nt, Artificial Sequence
  Description of Artificial Sequence: Synthetic oligonucleotide
  Sense strand starting at position 3253 of SEQ ID NO: 1886722
guuauuggacagugacaaa

SEQ ID NO: 2423061 - RNA, 19 nt, Artificial Sequence
  Description of Artificial Sequence: Synthetic oligonucleotide
  Antisense strand to SEQ ID NO: 2423060
uuugucacuguccaauaac

SEQ ID NO: 2423062 - RNA, 19 nt, Artificial Sequence
  Description of Artificial Sequence: Synthetic oligonucleotide
  Sense strand starting at position 3313 of SEQ ID NO: 1886722
acuuaagacguauagcaau

SEQ ID NO: 2423063 - RNA, 19 nt, Artificial Sequence
  Description of Artificial Sequence: Synthetic oligonucleotide
  Antisense strand to SEQ ID NO: 2423062
auugcuauacgucuuaagu

SEQ ID NO: 2423064 - RNA, 19 nt, Artificial Sequence
  Description of Artificial Sequence: Synthetic oligonucleotide
  Sense strand starting at position 3498 of SEQ ID NO: 1886722
guagauaacugauaggaau

SEQ ID NO: 2423065 - RNA, 19 nt, Artificial Sequence
  Description of Artificial Sequence: Synthetic oligonucleotide
  Antisense strand to SEQ ID NO: 2423064
auuccuaucaguuaucuac

SEQ ID NO: 2423066 - RNA, 19 nt, Artificial Sequence
  Description of Artificial Sequence: Synthetic oligonucleotide
  Sense strand starting at position 3514 of SEQ ID NO: 1886722
aaugcagauuguucuugua

SEQ ID NO: 2423067 - RNA, 19 nt, Artificial Sequence
  Description of Artificial Sequence: Synthetic oligonucleotide
  Antisense strand to SEQ ID NO: 2423066
uacaagaacaaucugcauu

SEQ ID NO: 2423068 - RNA, 19 nt, Artificial Sequence
  Description of Artificial Sequence: Synthetic oligonucleotide
  Sense strand starting at position 3559 of SEQ ID NO: 1886722
cauugcugauguguuaaau

SEQ ID NO: 2423069 - RNA, 19 nt, Artificial Sequence
  Description of Artificial Sequence: Synthetic oligonucleotide
  Antisense strand to SEQ ID NO: 2423068
auuuaacacaucagcaaug

SEQ ID NO: 2423070 - RNA, 19 nt, Artificial Sequence
  Description of Artificial Sequence: Synthetic oligonucleotide
  Sense strand starting at position 3568 of SEQ ID NO: 1886722
uguguuaaauauguuccua

SEQ ID NO: 2423071 - RNA, 19 nt, Artificial Sequence
  Description of Artificial Sequence: Synthetic oligonucleotide
  Antisense strand to SEQ ID NO: 2423070
uaggaacauauuuaacaca

SEQ ID NO: 2423072 - RNA, 19 nt, Artificial Sequence
  Description of Artificial Sequence: Synthetic oligonucleotide
  Sense strand starting at position 3570 of SEQ ID NO: 1886722
uguuaaauauguuccuacu

SEQ ID NO: 2423073 - RNA, 19 nt, Artificial Sequence
  Description of Artificial Sequence: Synthetic oligonucleotide
  Antisense strand to SEQ ID NO: 2423072
aguaggaacauauuuaaca

SEQ ID NO: 2423074 - RNA, 19 nt, Artificial Sequence
  Description of Artificial Sequence: Synthetic oligonucleotide
  Sense strand starting at position 3619 of SEQ ID NO: 1886722
cucacugauucugucauua

SEQ ID NO: 2423075 - RNA, 19 nt, Artificial Sequence
  Description of Artificial Sequence: Synthetic oligonucleotide
  Antisense strand to SEQ ID NO: 2423074
uaaugacagaaucagugag

SEQ ID NO: 2423076 - RNA, 19 nt, Artificial Sequence
  Description of Artificial Sequence: Synthetic oligonucleotide
  Sense strand starting at position 3623 of SEQ ID NO: 1886722
cugauucugucauuaauug

SEQ ID NO: 2423077 - RNA, 19 nt, Artificial Sequence
  Description of Artificial Sequence: Synthetic oligonucleotide
  Antisense strand to SEQ ID NO: 2423076
caauuaaugacagaaucag

SEQ ID NO: 2423078 - RNA, 19 nt, Artificial Sequence
  Description of Artificial Sequence: Synthetic oligonucleotide
  Sense strand starting at position 3627 of SEQ ID NO: 1886722
uucugucauuaauugaguu

SEQ ID NO: 2423079 - RNA, 19 nt, Artificial Sequence
  Description of Artificial Sequence: Synthetic oligonucleotide
  Antisense strand to SEQ ID NO: 2423078
aacucaauuaaugacagaa

SEQ ID NO: 2423080 - RNA, 19 nt, Artificial Sequence
  Description of Artificial Sequence: Synthetic oligonucleotide
  Sense strand starting at position 3705 of SEQ ID NO: 1886722
cugagaaggugggaugaua

SEQ ID NO: 2423081 - RNA, 19 nt, Artificial Sequence
  Description of Artificial Sequence: Synthetic oligonucleotide
  Antisense strand to SEQ ID NO: 2423080
uaucaucccaccuucucag

SEQ ID NO: 2423082 - RNA, 19 nt, Artificial Sequence
  Description of Artificial Sequence: Synthetic oligonucleotide
  Sense strand starting at position 15 of SEQ ID NO: 1886723
ccuaauguguuccagauac

SEQ ID NO: 2423083 - RNA, 19 nt, Artificial Sequence
  Description of Artificial Sequence: Synthetic oligonucleotide
  Antisense strand to SEQ ID NO: 2423082
guaucuggaacacauuagg

SEQ ID NO: 2423084 - RNA, 19 nt, Artificial Sequence
  Description of Artificial Sequence: Synthetic oligonucleotide
  Sense strand starting at position 199 of SEQ ID NO: 1886723
agguacauucuugacgcua

SEQ ID NO: 2423085 - RNA, 19 nt, Artificial Sequence
  Description of Artificial Sequence: Synthetic oligonucleotide
  Antisense strand to SEQ ID NO: 2423084
uagcgucaagaauguaccu

SEQ ID NO: 2423086 - RNA, 19 nt, Artificial Sequence
  Description of Artificial Sequence: Synthetic oligonucleotide
  Sense strand starting at position 204 of SEQ ID NO: 1886723
cauucuugacgcuaggaau

SEQ ID NO: 2423087 - RNA, 19 nt, Artificial Sequence
  Description of Artificial Sequence: Synthetic oligonucleotide
  Antisense strand to SEQ ID NO: 2423086
auuccuagcgucaagaaug

SEQ ID NO: 2423088 - RNA, 19 nt, Artificial Sequence
  Description of Artificial Sequence: Synthetic oligonucleotide
  Sense strand starting at position 243 of SEQ ID NO: 1886723
uaaggucuccgaugcucau

SEQ ID NO: 2423089 - RNA, 19 nt, Artificial Sequence
  Description of Artificial Sequence: Synthetic oligonucleotide
  Antisense strand to SEQ ID NO: 2423088
augagcaucggagaccuua

SEQ ID NO: 2423090 - RNA, 19 nt, Artificial Sequence
  Description of Artificial Sequence: Synthetic oligonucleotide
  Sense strand starting at position 284 of SEQ ID NO: 1886723
augaauguccaauaagcau

SEQ ID NO: 2423091 - RNA, 19 nt, Artificial Sequence
  Description of Artificial Sequence: Synthetic oligonucleotide
  Antisense strand to SEQ ID NO: 2423090
augcuuauuggacauucau

SEQ ID NO: 2423092 - RNA, 19 nt, Artificial Sequence
  Description of Artificial Sequence: Synthetic oligonucleotide
  Sense strand starting at position 311 of SEQ ID NO: 1886723
auaauaugucagggucgua

SEQ ID NO: 2423093 - RNA, 19 nt, Artificial Sequence
  Description of Artificial Sequence: Synthetic oligonucleotide
  Antisense strand to SEQ ID NO: 2423092
uacgacccugacauauuau

SEQ ID NO: 2423094 - RNA, 19 nt, Artificial Sequence
  Description of Artificial Sequence: Synthetic oligonucleotide
  Sense strand starting at position 314 of SEQ ID NO: 1886723
auaugucagggucguauga

SEQ ID NO: 2423095 - RNA, 19 nt, Artificial Sequence
  Description of Artificial Sequence: Synthetic oligonucleotide
  Antisense strand to SEQ ID NO: 2423094
ucauacgacccugacauau

SEQ ID NO: 2423096 - RNA, 19 nt, Artificial Sequence
  Description of Artificial Sequence: Synthetic oligonucleotide
  Sense strand starting at position 316 of SEQ ID NO: 1886723
augucagggucguaugacu

SEQ ID NO: 2423097 - RNA, 19 nt, Artificial Sequence
  Description of Artificial Sequence: Synthetic oligonucleotide
  Antisense strand to SEQ ID NO: 2423096
agucauacgacccugacau

SEQ ID NO: 2423098 - RNA, 19 nt, Artificial Sequence
  Description of Artificial Sequence: Synthetic oligonucleotide
  Sense strand starting at position 324 of SEQ ID NO: 1886723
gucguaugacuacaaggaa

SEQ ID NO: 2423099 - RNA, 19 nt, Artificial Sequence
  Description of Artificial Sequence: Synthetic oligonucleotide
  Antisense strand to SEQ ID NO: 2423098
uuccuuguagucauacgac

SEQ ID NO: 2423100 - RNA, 19 nt, Artificial Sequence
  Description of Artificial Sequence: Synthetic oligonucleotide
  Sense strand starting at position 1656 of SEQ ID NO: 1886723
gggaucacuuggcccauau

SEQ ID NO: 2423101 - RNA, 19 nt, Artificial Sequence
  Description of Artificial Sequence: Synthetic oligonucleotide
  Antisense strand to SEQ ID NO: 2423100
auaugggccaagugauccc

SEQ ID NO: 2423102 - RNA, 19 nt, Artificial Sequence
  Description of Artificial Sequence: Synthetic oligonucleotide
  Sense strand starting at position 2074 of SEQ ID NO: 1886723
gcgcuuaucgcgaggguca

SEQ ID NO: 2423103 - RNA, 19 nt, Artificial Sequence
  Description of Artificial Sequence: Synthetic oligonucleotide
  Antisense strand to SEQ ID NO: 2423102
ugacccucgcgauaagcgc

SEQ ID NO: 2423104 - RNA, 19 nt, Artificial Sequence
  Description of Artificial Sequence: Synthetic oligonucleotide
  Sense strand starting at position 2124 of SEQ ID NO: 1886723
cgggaagguccugacggau

SEQ ID NO: 2423105 - RNA, 19 nt, Artificial Sequence
  Description of Artificial Sequence: Synthetic oligonucleotide
  Antisense strand to SEQ ID NO: 2423104
auccgucaggaccuucccg

SEQ ID NO: 2423106 - RNA, 19 nt, Artificial Sequence
  Description of Artificial Sequence: Synthetic oligonucleotide
  Sense strand starting at position 2526 of SEQ ID NO: 1886723
cugguaucgccauggaaua

SEQ ID NO: 2423107 - RNA, 19 nt, Artificial Sequence
  Description of Artificial Sequence: Synthetic oligonucleotide
  Antisense strand to SEQ ID NO: 2423106
uauuccauggcgauaccag

SEQ ID NO: 2423108 - RNA, 19 nt, Artificial Sequence
  Description of Artificial Sequence: Synthetic oligonucleotide
  Sense strand starting at position 2527 of SEQ ID NO: 1886723
ugguaucgccauggaauau

SEQ ID NO: 2423109 - RNA, 19 nt, Artificial Sequence
  Description of Artificial Sequence: Synthetic oligonucleotide
  Antisense strand to SEQ ID NO: 2423108
auauuccauggcgauacca

SEQ ID NO: 2423110 - RNA, 19 nt, Artificial Sequence
  Description of Artificial Sequence: Synthetic oligonucleotide
  Sense strand starting at position 2588 of SEQ ID NO: 1886723
agggucuaaccuuaccauu

SEQ ID NO: 2423111 - RNA, 19 nt, Artificial Sequence
  Description of Artificial Sequence: Synthetic oligonucleotide
  Antisense strand to SEQ ID NO: 2423110
aaugguaagguuagacccu

SEQ ID NO: 2423112 - RNA, 19 nt, Artificial Sequence
  Description of Artificial Sequence: Synthetic oligonucleotide
  Sense strand starting at position 2967 of SEQ ID NO: 1886723
caggaaaugaguugugugu

SEQ ID NO: 2423113 - RNA, 19 nt, Artificial Sequence
  Description of Artificial Sequence: Synthetic oligonucleotide
  Antisense strand to SEQ ID NO: 2423112
acacacaacucauuuccug

SEQ ID NO: 2423114 - RNA, 19 nt, Artificial Sequence
  Description of Artificial Sequence: Synthetic oligonucleotide
  Sense strand starting at position 3016 of SEQ ID NO: 1886723
uuuggaggguuauuacuua

SEQ ID NO: 2423115 - RNA, 19 nt, Artificial Sequence
  Description of Artificial Sequence: Synthetic oligonucleotide
  Antisense strand to SEQ ID NO: 2423114
uaaguaauaacccuccaaa

SEQ ID NO: 2423116 - RNA, 19 nt, Artificial Sequence
  Description of Artificial Sequence: Synthetic oligonucleotide
  Sense strand starting at position 3479 of SEQ ID NO: 1886723
ggcucagccagucaaguaa

SEQ ID NO: 2423117 - RNA, 19 nt, Artificial Sequence
  Description of Artificial Sequence: Synthetic oligonucleotide
  Antisense strand to SEQ ID NO: 2423116
uuacuugacuggcugagcc

SEQ ID NO: 2423118 - RNA, 19 nt, Artificial Sequence
  Description of Artificial Sequence: Synthetic oligonucleotide
  Sense strand starting at position 3714 of SEQ ID NO: 1886723
caggaaacuugaggucuuu

SEQ ID NO: 2423119 - RNA, 19 nt, Artificial Sequence
  Description of Artificial Sequence: Synthetic oligonucleotide
  Antisense strand to SEQ ID NO: 2423118
aaagaccucaaguuuccug

SEQ ID NO: 2423120 - RNA, 19 nt, Artificial Sequence
  Description of Artificial Sequence: Synthetic oligonucleotide
  Sense strand starting at position 3752 of SEQ ID NO: 1886723
gcaggaaucuagggcuacu

SEQ ID NO: 2423121 - RNA, 19 nt, Artificial Sequence
  Description of Artificial Sequence: Synthetic oligonucleotide
  Antisense strand to SEQ ID NO: 2423120
aguagcccuagauuccugc

SEQ ID NO: 2423122 - RNA, 19 nt, Artificial Sequence
  Description of Artificial Sequence: Synthetic oligonucleotide
  Sense strand starting at position 3761 of SEQ ID NO: 1886723
uagggcuacuuccuaagua

SEQ ID NO: 2423123 - RNA, 19 nt, Artificial Sequence
  Description of Artificial Sequence: Synthetic oligonucleotide
  Antisense strand to SEQ ID NO: 2423122
uacuuaggaaguagcccua

SEQ ID NO: 2423124 - RNA, 19 nt, Artificial Sequence
  Description of Artificial Sequence: Synthetic oligonucleotide
  Sense strand starting at position 3972 of SEQ ID NO: 1886723
gcuccaagagccugagaaa

SEQ ID NO: 2423125 - RNA, 19 nt, Artificial Sequence
  Description of Artificial Sequence: Synthetic oligonucleotide
  Antisense strand to SEQ ID NO: 2423124
uuucucaggcucuuggagc

SEQ ID NO: 2423126 - RNA, 19 nt, Artificial Sequence
  Description of Artificial Sequence: Synthetic oligonucleotide
  Sense strand starting at position 25 of SEQ ID NO: 1886724
uggguuugauuugagguuu

SEQ ID NO: 2423127 - RNA, 19 nt, Artificial Sequence
  Description of Artificial Sequence: Synthetic oligonucleotide
  Antisense strand to SEQ ID NO: 2423126
aaaccucaaaucaaaccca

SEQ ID NO: 2423128 - RNA, 19 nt, Artificial Sequence
  Description of Artificial Sequence: Synthetic oligonucleotide
  Sense strand starting at position 124 of SEQ ID NO: 1886724
uauaguuacccagggcauu

SEQ ID NO: 2423129 - RNA, 19 nt, Artificial Sequence
  Description of Artificial Sequence: Synthetic oligonucleotide
  Antisense strand to SEQ ID NO: 2423128
aaugcccuggguaacuaua

SEQ ID NO: 2423130 - RNA, 19 nt, Artificial Sequence
  Description of Artificial Sequence: Synthetic oligonucleotide
  Sense strand starting at position 125 of SEQ ID NO: 1886724
auaguuacccagggcauua

SEQ ID NO: 2423131 - RNA, 19 nt, Artificial Sequence
  Description of Artificial Sequence: Synthetic oligonucleotide
  Antisense strand to SEQ ID NO: 2423130
uaaugcccuggguaacuau

SEQ ID NO: 2423132 - RNA, 19 nt, Artificial Sequence
  Description of Artificial Sequence: Synthetic oligonucleotide
  Sense strand starting at position 155 of SEQ ID NO: 1886724
gauaaauguuaggagcaag

SEQ ID NO: 2423133 - RNA, 19 nt, Artificial Sequence
  Description of Artificial Sequence: Synthetic oligonucleotide
  Antisense strand to SEQ ID NO: 2423132
cuugcuccuaacauuuauc

SEQ ID NO: 2423134 - RNA, 19 nt, Artificial Sequence
  Description of Artificial Sequence: Synthetic oligonucleotide
  Sense strand starting at position 165 of SEQ ID NO: 1886724
aggagcaagaguuguaucu

SEQ ID NO: 2423135 - RNA, 19 nt, Artificial Sequence
  Description of Artificial Sequence: Synthetic oligonucleotide
  Antisense strand to SEQ ID NO: 2423134
agauacaacucuugcuccu

SEQ ID NO: 2423136 - RNA, 19 nt, Artificial Sequence
  Description of Artificial Sequence: Synthetic oligonucleotide
  Sense strand starting at position 333 of SEQ ID NO: 1886724
accugaaauuccuuaguag

SEQ ID NO: 2423137 - RNA, 19 nt, Artificial Sequence
  Description of Artificial Sequence: Synthetic oligonucleotide
  Antisense strand to SEQ ID NO: 2423136
cuacuaaggaauuucaggu

SEQ ID NO: 2423138 - RNA, 19 nt, Artificial Sequence
  Description of Artificial Sequence: Synthetic oligonucleotide
  Sense strand starting at position 334 of SEQ ID NO: 1886724
ccugaaauuccuuaguagc

SEQ ID NO: 2423139 - RNA, 19 nt, Artificial Sequence
  Description of Artificial Sequence: Synthetic oligonucleotide
  Antisense strand to SEQ ID NO: 2423138
gcuacuaaggaauuucagg

SEQ ID NO: 2423140 - RNA, 19 nt, Artificial Sequence
  Description of Artificial Sequence: Synthetic oligonucleotide
  Sense strand starting at position 336 of SEQ ID NO: 1886724
ugaaauuccuuaguagcca

SEQ ID NO: 2423141 - RNA, 19 nt, Artificial Sequence
  Description of Artificial Sequence: Synthetic oligonucleotide
  Antisense strand to SEQ ID NO: 2423140
uggcuacuaaggaauuuca

SEQ ID NO: 2423142 - RNA, 19 nt, Artificial Sequence
  Description of Artificial Sequence: Synthetic oligonucleotide
  Sense strand starting at position 495 of SEQ ID NO: 1886724
cagucuugauuagcuguau

SEQ ID NO: 2423143 - RNA, 19 nt, Artificial Sequence
  Description of Artificial Sequence: Synthetic oligonucleotide
  Antisense strand to SEQ ID NO: 2423142
auacagcuaaucaagacug

SEQ ID NO: 2423144 - RNA, 19 nt, Artificial Sequence
  Description of Artificial Sequence: Synthetic oligonucleotide
  Sense strand starting at position 496 of SEQ ID NO: 1886724
agucuugauuagcuguauu

SEQ ID NO: 2423145 - RNA, 19 nt, Artificial Sequence
  Description of Artificial Sequence: Synthetic oligonucleotide
  Antisense strand to SEQ ID NO: 2423144
aauacagcuaaucaagacu

SEQ ID NO: 2423146 - RNA, 19 nt, Artificial Sequence
  Description of Artificial Sequence: Synthetic oligonucleotide
  Sense strand starting at position 615 of SEQ ID NO: 1886724
gaacuaagaucugcccgaa

SEQ ID NO: 2423147 - RNA, 19 nt, Artificial Sequence
  Description of Artificial Sequence: Synthetic oligonucleotide
  Antisense strand to SEQ ID NO: 2423146
uucgggcagaucuuaguuc

SEQ ID NO: 2423148 - RNA, 19 nt, Artificial Sequence
  Description of Artificial Sequence: Synthetic oligonucleotide
  Sense strand starting at position 618 of SEQ ID NO: 1886724
cuaagaucugcccgaaugu

SEQ ID NO: 2423149 - RNA, 19 nt, Artificial Sequence
  Description of Artificial Sequence: Synthetic oligonucleotide
  Antisense strand to SEQ ID NO: 2423148
acauucgggcagaucuuag

SEQ ID NO: 2423150 - RNA, 19 nt, Artificial Sequence
  Description of Artificial Sequence: Synthetic oligonucleotide
  Sense strand starting at position 619 of SEQ ID NO: 1886724
uaagaucugcccgaaugua

SEQ ID NO: 2423151 - RNA, 19 nt, Artificial Sequence
  Description of Artificial Sequence: Synthetic oligonucleotide
  Antisense strand to SEQ ID NO: 2423150
uacauucgggcagaucuua

SEQ ID NO: 2423152 - RNA, 19 nt, Artificial Sequence
  Description of Artificial Sequence: Synthetic oligonucleotide
  Sense strand starting at position 627 of SEQ ID NO: 1886724
gcccgaauguacuugguga

SEQ ID NO: 2423153 - RNA, 19 nt, Artificial Sequence
  Description of Artificial Sequence: Synthetic oligonucleotide
  Antisense strand to SEQ ID NO: 2423152
ucaccaaguacauucgggc

SEQ ID NO: 2423154 - RNA, 19 nt, Artificial Sequence
  Description of Artificial Sequence: Synthetic oligonucleotide
  Sense strand starting at position 628 of SEQ ID NO: 1886724
cccgaauguacuuggugaa

SEQ ID NO: 2423155 - RNA, 19 nt, Artificial Sequence
  Description of Artificial Sequence: Synthetic oligonucleotide
  Antisense strand to SEQ ID NO: 2423154
uucaccaaguacauucggg

SEQ ID NO: 2423156 - RNA, 19 nt, Artificial Sequence
  Description of Artificial Sequence: Synthetic oligonucleotide
  Sense strand starting at position 629 of SEQ ID NO: 1886724
ccgaauguacuuggugaaa

SEQ ID NO: 2423157 - RNA, 19 nt, Artificial Sequence
  Description of Artificial Sequence: Synthetic oligonucleotide
  Antisense strand to SEQ ID NO: 2423156
uuucaccaaguacauucgg

SEQ ID NO: 2423158 - RNA, 19 nt, Artificial Sequence
  Description of Artificial Sequence: Synthetic oligonucleotide
  Sense strand starting at position 722 of SEQ ID NO: 1886724
ggucgagugcuagaaagca

SEQ ID NO: 2423159 - RNA, 19 nt, Artificial Sequence
  Description of Artificial Sequence: Synthetic oligonucleotide
  Antisense strand to SEQ ID NO: 2423158
ugcuuucuagcacucgacc

SEQ ID NO: 2423160 - RNA, 19 nt, Artificial Sequence
  Description of Artificial Sequence: Synthetic oligonucleotide
  Sense strand starting at position 855 of SEQ ID NO: 1886724
guuaaaucucgaggagagg

SEQ ID NO: 2423161 - RNA, 19 nt, Artificial Sequence
  Description of Artificial Sequence: Synthetic oligonucleotide
  Antisense strand to SEQ ID NO: 2423160
ccucuccucgagauuuaac

SEQ ID NO: 2423162 - RNA, 19 nt, Artificial Sequence
  Description of Artificial Sequence: Synthetic oligonucleotide
  Sense strand starting at position 873 of SEQ ID NO: 1886724
ggcguuucggcacaaaucu

SEQ ID NO: 2423163 - RNA, 19 nt, Artificial Sequence
  Description of Artificial Sequence: Synthetic oligonucleotide
  Antisense strand to SEQ ID NO: 2423162
agauuugugccgaaacgcc

SEQ ID NO: 2423164 - RNA, 19 nt, Artificial Sequence
  Description of Artificial Sequence: Synthetic oligonucleotide
  Sense strand starting at position 1081 of SEQ ID NO: 1886724
ccgauaauugcacacggga

SEQ ID NO: 2423165 - RNA, 19 nt, Artificial Sequence
  Description of Artificial Sequence: Synthetic oligonucleotide
  Antisense strand to SEQ ID NO: 2423164
ucccgugugcaauuaucgg

SEQ ID NO: 2423166 - RNA, 19 nt, Artificial Sequence
  Description of Artificial Sequence: Synthetic oligonucleotide
  Sense strand starting at position 1083 of SEQ ID NO: 1886724
gauaauugcacacgggagu

SEQ ID NO: 2423167 - RNA, 19 nt, Artificial Sequence
  Description of Artificial Sequence: Synthetic oligonucleotide
  Antisense strand to SEQ ID NO: 2423166
acucccgugugcaauuauc

SEQ ID NO: 2423168 - RNA, 19 nt, Artificial Sequence
  Description of Artificial Sequence: Synthetic oligonucleotide
  Sense strand starting at position 1117 of SEQ ID NO: 1886724
ggaguacacguuugaauua

SEQ ID NO: 2423169 - RNA, 19 nt, Artificial Sequence
  Description of Artificial Sequence: Synthetic oligonucleotide
  Antisense strand to SEQ ID NO: 2423168
uaauucaaacguguacucc

SEQ ID NO: 2423170 - RNA, 19 nt, Artificial Sequence
  Description of Artificial Sequence: Synthetic oligonucleotide
  Sense strand starting at position 1128 of SEQ ID NO: 1886724
uugaauuaaugacuccgaa

SEQ ID NO: 2423171 - RNA, 19 nt, Artificial Sequence
  Description of Artificial Sequence: Synthetic oligonucleotide
  Antisense strand to SEQ ID NO: 2423170
uucggagucauuaauucaa

SEQ ID NO: 2423172 - RNA, 19 nt, Artificial Sequence
  Description of Artificial Sequence: Synthetic oligonucleotide
  Sense strand starting at position 1695 of SEQ ID NO: 1886724
gccgcucugacgucagagu

SEQ ID NO: 2423173 - RNA, 19 nt, Artificial Sequence
  Description of Artificial Sequence: Synthetic oligonucleotide
  Antisense strand to SEQ ID NO: 2423172
acucugacgucagagcggc

SEQ ID NO: 2423174 - RNA, 19 nt, Artificial Sequence
  Description of Artificial Sequence: Synthetic oligonucleotide
  Sense strand starting at position 1786 of SEQ ID NO: 1886724
ggaagcguuaaagagucaa

SEQ ID NO: 2423175 - RNA, 19 nt, Artificial Sequence
  Description of Artificial Sequence: Synthetic oligonucleotide
  Antisense strand to SEQ ID NO: 2423174
uugacucuuuaacgcuucc

SEQ ID NO: 2423176 - RNA, 19 nt, Artificial Sequence
  Description of Artificial Sequence: Synthetic oligonucleotide
  Sense strand starting at position 1790 of SEQ ID NO: 1886724
gcguuaaagagucaaggca

SEQ ID NO: 2423177 - RNA, 19 nt, Artificial Sequence
  Description of Artificial Sequence: Synthetic oligonucleotide
  Antisense strand to SEQ ID NO: 2423176
ugccuugacucuuuaacgc

SEQ ID NO: 2423178 - RNA, 19 nt, Artificial Sequence
  Description of Artificial Sequence: Synthetic oligonucleotide
  Sense strand starting at position 1852 of SEQ ID NO: 1886724
cgguaaagucccugggacu

SEQ ID NO: 2423179 - RNA, 19 nt, Artificial Sequence
  Description of Artificial Sequence: Synthetic oligonucleotide
  Antisense strand to SEQ ID NO: 2423178
agucccagggacuuuaccg

SEQ ID NO: 2423180 - RNA, 19 nt, Artificial Sequence
  Description of Artificial Sequence: Synthetic oligonucleotide
  Sense strand starting at position 3064 of SEQ ID NO: 1886724
agucguugcccugugguua

SEQ ID NO: 2423181 - RNA, 19 nt, Artificial Sequence
  Description of Artificial Sequence: Synthetic oligonucleotide
  Antisense strand to SEQ ID NO: 2423180
uaaccacagggcaacgacu

SEQ ID NO: 2423182 - RNA, 19 nt, Artificial Sequence
  Description of Artificial Sequence: Synthetic oligonucleotide
  Sense strand starting at position 3078 of SEQ ID NO: 1886724
gguuauuuguggagggauu

SEQ ID NO: 2423183 - RNA, 19 nt, Artificial Sequence
  Description of Artificial Sequence: Synthetic oligonucleotide
  Antisense strand to SEQ ID NO: 2423182
aaucccuccacaaauaacc

SEQ ID NO: 2423184 - RNA, 19 nt, Artificial Sequence
  Description of Artificial Sequence: Synthetic oligonucleotide
  Sense strand starting at position 3113 of SEQ ID NO: 1886724
ucagacuuugucugaacag

SEQ ID NO: 2423185 - RNA, 19 nt, Artificial Sequence
  Description of Artificial Sequence: Synthetic oligonucleotide
  Antisense strand to SEQ ID NO: 2423184
cuguucagacaaagucuga

SEQ ID NO: 2423186 - RNA, 19 nt, Artificial Sequence
  Description of Artificial Sequence: Synthetic oligonucleotide
  Sense strand starting at position 3193 of SEQ ID NO: 1886724
ccagcaugacuuggagacu

SEQ ID NO: 2423187 - RNA, 19 nt, Artificial Sequence
  Description of Artificial Sequence: Synthetic oligonucleotide
  Antisense strand to SEQ ID NO: 2423186
agucuccaagucaugcugg

SEQ ID NO: 2423188 - RNA, 19 nt, Artificial Sequence
  Description of Artificial Sequence: Synthetic oligonucleotide
  Sense strand starting at position 3542 of SEQ ID NO: 1886724
uuggguacccguuggauuu

SEQ ID NO: 2423189 - RNA, 19 nt, Artificial Sequence
  Description of Artificial Sequence: Synthetic oligonucleotide
  Antisense strand to SEQ ID NO: 2423188
aaauccaacggguacccaa

SEQ ID NO: 2423190 - RNA, 19 nt, Artificial Sequence
  Description of Artificial Sequence: Synthetic oligonucleotide
  Sense strand starting at position 3569 of SEQ ID NO: 1886724
ugacauguaaagugaguua

SEQ ID NO: 2423191 - RNA, 19 nt, Artificial Sequence
  Description of Artificial Sequence: Synthetic oligonucleotide
  Antisense strand to SEQ ID NO: 2423190
uaacucacuuuacauguca

SEQ ID NO: 2423192 - RNA, 19 nt, Artificial Sequence
  Description of Artificial Sequence: Synthetic oligonucleotide
  Sense strand starting at position 3582 of SEQ ID NO: 1886724
gaguuagagucucugcauu

SEQ ID NO: 2423193 - RNA, 19 nt, Artificial Sequence
  Description of Artificial Sequence: Synthetic oligonucleotide
  Antisense strand to SEQ ID NO: 2423192
aaugcagagacucuaacuc

SEQ ID NO: 2423194 - RNA, 19 nt, Artificial Sequence
  Description of Artificial Sequence: Synthetic oligonucleotide
  Sense strand starting at position 3584 of SEQ ID NO: 1886724
guuagagucucugcauuac

SEQ ID NO: 2423195 - RNA, 19 nt, Artificial Sequence
  Description of Artificial Sequence: Synthetic oligonucleotide
  Antisense strand to SEQ ID NO: 2423194
guaaugcagagacucuaac

SEQ ID NO: 2423196 - RNA, 19 nt, Artificial Sequence
  Description of Artificial Sequence: Synthetic oligonucleotide
  Sense strand starting at position 3725 of SEQ ID NO: 1886724
ggcggaauucucugaggug

SEQ ID NO: 2423197 - RNA, 19 nt, Artificial Sequence
  Description of Artificial Sequence: Synthetic oligonucleotide
  Antisense strand to SEQ ID NO: 2423196
caccucagagaauuccgcc

SEQ ID NO: 2423198 - RNA, 19 nt, Artificial Sequence
  Description of Artificial Sequence: Synthetic oligonucleotide
  Sense strand starting at position 3756 of SEQ ID NO: 1886724
aguggucagaggugcuaaa

SEQ ID NO: 2423199 - RNA, 19 nt, Artificial Sequence
  Description of Artificial Sequence: Synthetic oligonucleotide
  Antisense strand to SEQ ID NO: 2423198
uuuagcaccucugaccacu

SEQ ID NO: 2423200 - RNA, 19 nt, Artificial Sequence
  Description of Artificial Sequence: Synthetic oligonucleotide
  Sense strand starting at position 3907 of SEQ ID NO: 1886724
uuuaaugcucugcaguaau

SEQ ID NO: 2423201 - RNA, 19 nt, Artificial Sequence
  Description of Artificial Sequence: Synthetic oligonucleotide
  Antisense strand to SEQ ID NO: 2423200
auuacugcagagcauuaaa

SEQ ID NO: 2423202 - RNA, 19 nt, Artificial Sequence
  Description of Artificial Sequence: Synthetic oligonucleotide
  Sense strand starting at position 3925 of SEQ ID NO: 1886724
ugucauuuggccugcgaau

SEQ ID NO: 2423203 - RNA, 19 nt, Artificial Sequence
  Description of Artificial Sequence: Synthetic oligonucleotide
  Antisense strand to SEQ ID NO: 2423202
auucgcaggccaaaugaca

SEQ ID NO: 2423204 - RNA, 19 nt, Artificial Sequence
  Description of Artificial Sequence: Synthetic oligonucleotide
  Sense strand starting at position 3927 of SEQ ID NO: 1886724
ucauuuggccugcgaauaa

SEQ ID NO: 2423205 - RNA, 19 nt, Artificial Sequence
  Description of Artificial Sequence: Synthetic oligonucleotide
  Antisense strand to SEQ ID NO: 2423204
uuauucgcaggccaaauga

SEQ ID NO: 2423206 - RNA, 19 nt, Artificial Sequence
  Description of Artificial Sequence: Synthetic oligonucleotide
  Sense strand starting at position 29 of SEQ ID NO: 1886725
uugcaagagcaguaacauu

SEQ ID NO: 2423207 - RNA, 19 nt, Artificial Sequence
  Description of Artificial Sequence: Synthetic oligonucleotide
  Antisense strand to SEQ ID NO: 2423206
aauguuacugcucuugcaa

SEQ ID NO: 2423208 - RNA, 19 nt, Artificial Sequence
  Description of Artificial Sequence: Synthetic oligonucleotide
  Sense strand starting at position 140 of SEQ ID NO: 1886725
guacuuauagaucagucua

SEQ ID NO: 2423209 - RNA, 19 nt, Artificial Sequence
  Description of Artificial Sequence: Synthetic oligonucleotide
  Antisense strand to SEQ ID NO: 2423208
uagacugaucuauaaguac

SEQ ID NO: 2423210 - RNA, 19 nt, Artificial Sequence
  Description of Artificial Sequence: Synthetic oligonucleotide
  Sense strand starting at position 197 of SEQ ID NO: 1886725
gguagaauaguaggugaug

SEQ ID NO: 2423211 - RNA, 19 nt, Artificial Sequence
  Description of Artificial Sequence: Synthetic oligonucleotide
  Antisense strand to SEQ ID NO: 2423210
caucaccuacuauucuacc

SEQ ID NO: 2423212 - RNA, 19 nt, Artificial Sequence
  Description of Artificial Sequence: Synthetic oligonucleotide
  Sense strand starting at position 365 of SEQ ID NO: 1886725
uagagagcuugagucaaga

SEQ ID NO: 2423213 - RNA, 19 nt, Artificial Sequence
  Description of Artificial Sequence: Synthetic oligonucleotide
  Antisense strand to SEQ ID NO: 2423212
ucuugacucaagcucucua

SEQ ID NO: 2423214 - RNA, 19 nt, Artificial Sequence
  Description of Artificial Sequence: Synthetic oligonucleotide
  Sense strand starting at position 482 of SEQ ID NO: 1886725
uguugaucccaaugggaca

SEQ ID NO: 2423215 - RNA, 19 nt, Artificial Sequence
  Description of Artificial Sequence: Synthetic oligonucleotide
  Antisense strand to SEQ ID NO: 2423214
ugucccauugggaucaaca

SEQ ID NO: 2423216 - RNA, 19 nt, Artificial Sequence
  Description of Artificial Sequence: Synthetic oligonucleotide
  Sense strand starting at position 555 of SEQ ID NO: 1886725
acagaaacuuggcauuuaa

SEQ ID NO: 2423217 - RNA, 19 nt, Artificial Sequence
  Description of Artificial Sequence: Synthetic oligonucleotide
  Antisense strand to SEQ ID NO: 2423216
uuaaaugccaaguuucugu

SEQ ID NO: 2423218 - RNA, 19 nt, Artificial Sequence
  Description of Artificial Sequence: Synthetic oligonucleotide
  Sense strand starting at position 628 of SEQ ID NO: 1886725
ggauccuacuuucuggaga

SEQ ID NO: 2423219 - RNA, 19 nt, Artificial Sequence
  Description of Artificial Sequence: Synthetic oligonucleotide
  Antisense strand to SEQ ID NO: 2423218
ucuccagaaaguaggaucc

SEQ ID NO: 2423220 - RNA, 19 nt, Artificial Sequence
  Description of Artificial Sequence: Synthetic oligonucleotide
  Sense strand starting at position 764 of SEQ ID NO: 1886725
cugaucugugggcagcaau

SEQ ID NO: 2423221 - RNA, 19 nt, Artificial Sequence
  Description of Artificial Sequence: Synthetic oligonucleotide
  Antisense strand to SEQ ID NO: 2423220
auugcugcccacagaucag

SEQ ID NO: 2423222 - RNA, 19 nt, Artificial Sequence
  Description of Artificial Sequence: Synthetic oligonucleotide
  Sense strand starting at position 849 of SEQ ID NO: 1886725
guacuuguucgguaggaaa

SEQ ID NO: 2423223 - RNA, 19 nt, Artificial Sequence
  Description of Artificial Sequence: Synthetic oligonucleotide
  Antisense strand to SEQ ID NO: 2423222
uuuccuaccgaacaaguac

SEQ ID NO: 2423224 - RNA, 19 nt, Artificial Sequence
  Description of Artificial Sequence: Synthetic oligonucleotide
  Sense strand starting at position 894 of SEQ ID NO: 1886725
uuauguuaauaagugagga

SEQ ID NO: 2423225 - RNA, 19 nt, Artificial Sequence
  Description of Artificial Sequence: Synthetic oligonucleotide
  Antisense strand to SEQ ID NO: 2423224
uccucacuuauuaacauaa

SEQ ID NO: 2423226 - RNA, 19 nt, Artificial Sequence
  Description of Artificial Sequence: Synthetic oligonucleotide
  Sense strand starting at position 940 of SEQ ID NO: 1886725
cccaaauucuuaccuggga

SEQ ID NO: 2423227 - RNA, 19 nt, Artificial Sequence
  Description of Artificial Sequence: Synthetic oligonucleotide
  Antisense strand to SEQ ID NO: 2423226
ucccagguaagaauuuggg

SEQ ID NO: 2423228 - RNA, 19 nt, Artificial Sequence
  Description of Artificial Sequence: Synthetic oligonucleotide
  Sense strand starting at position 966 of SEQ ID NO: 1886725
agagucaugcccuaggaac

SEQ ID NO: 2423229 - RNA, 19 nt, Artificial Sequence
  Description of Artificial Sequence: Synthetic oligonucleotide
  Antisense strand to SEQ ID NO: 2423228
guuccuagggcaugacucu

SEQ ID NO: 2423230 - RNA, 19 nt, Artificial Sequence
  Description of Artificial Sequence: Synthetic oligonucleotide
  Sense strand starting at position 991 of SEQ ID NO: 1886725
aucucaucagauggguuau

SEQ ID NO: 2423231 - RNA, 19 nt, Artificial Sequence
  Description of Artificial Sequence: Synthetic oligonucleotide
  Antisense strand to SEQ ID NO: 2423230
auaacccaucugaugagau

SEQ ID NO: 2423232 - RNA, 19 nt, Artificial Sequence
  Description of Artificial Sequence: Synthetic oligonucleotide
  Sense strand starting at position 1161 of SEQ ID NO: 1886725
aaaguugcaucuguaaaga

SEQ ID NO: 2423233 - RNA, 19 nt, Artificial Sequence
  Description of Artificial Sequence: Synthetic oligonucleotide
  Antisense strand to SEQ ID NO: 2423232
ucuuuacagaugcaacuuu

SEQ ID NO: 2423234 - RNA, 19 nt, Artificial Sequence
  Description of Artificial Sequence: Synthetic oligonucleotide
  Sense strand starting at position 1304 of SEQ ID NO: 1886725
ggaguugcucaugagacuu

SEQ ID NO: 2423235 - RNA, 19 nt, Artificial Sequence
  Description of Artificial Sequence: Synthetic oligonucleotide
  Antisense strand to SEQ ID NO: 2423234
aagucucaugagcaacucc

SEQ ID NO: 2423236 - RNA, 19 nt, Artificial Sequence
  Description of Artificial Sequence: Synthetic oligonucleotide
  Sense strand starting at position 1989 of SEQ ID NO: 1886725
cgaagugagcacgagacuu

SEQ ID NO: 2423237 - RNA, 19 nt, Artificial Sequence
  Description of Artificial Sequence: Synthetic oligonucleotide
  Antisense strand to SEQ ID NO: 2423236
aagucucgugcucacuucg

SEQ ID NO: 2423238 - RNA, 19 nt, Artificial Sequence
  Description of Artificial Sequence: Synthetic oligonucleotide
  Sense strand starting at position 1991 of SEQ ID NO: 1886725
aagugagcacgagacuuua

SEQ ID NO: 2423239 - RNA, 19 nt, Artificial Sequence
  Description of Artificial Sequence: Synthetic oligonucleotide
  Antisense strand to SEQ ID NO: 2423238
uaaagucucgugcucacuu

SEQ ID NO: 2423240 - RNA, 19 nt, Artificial Sequence
  Description of Artificial Sequence: Synthetic oligonucleotide
  Sense strand starting at position 2389 of SEQ ID NO: 1886725
uccucucagguuuagaauu

SEQ ID NO: 2423241 - RNA, 19 nt, Artificial Sequence
  Description of Artificial Sequence: Synthetic oligonucleotide
  Antisense strand to SEQ ID NO: 2423240
aauucuaaaccugagagga

SEQ ID NO: 2423242 - RNA, 19 nt, Artificial Sequence
  Description of Artificial Sequence: Synthetic oligonucleotide
  Sense strand starting at position 2581 of SEQ ID NO: 1886725
uagugagucugacuugaga

SEQ ID NO: 2423243 - RNA, 19 nt, Artificial Sequence
  Description of Artificial Sequence: Synthetic oligonucleotide
  Antisense strand to SEQ ID NO: 2423242
ucucaagucagacucacua

SEQ ID NO: 2423244 - RNA, 19 nt, Artificial Sequence
  Description of Artificial Sequence: Synthetic oligonucleotide
  Sense strand starting at position 2583 of SEQ ID NO: 1886725
gugagucugacuugagauc

SEQ ID NO: 2423245 - RNA, 19 nt, Artificial Sequence
  Description of Artificial Sequence: Synthetic oligonucleotide
  Antisense strand to SEQ ID NO: 2423244
gaucucaagucagacucac

SEQ ID NO: 2423246 - RNA, 19 nt, Artificial Sequence
  Description of Artificial Sequence: Synthetic oligonucleotide
  Sense strand starting at position 2709 of SEQ ID NO: 1886725
gcaagaggcaaauauguga

SEQ ID NO: 2423247 - RNA, 19 nt, Artificial Sequence
  Description of Artificial Sequence: Synthetic oligonucleotide
  Antisense strand to SEQ ID NO: 2423246
ucacauauuugccucuugc

SEQ ID NO: 2423248 - RNA, 19 nt, Artificial Sequence
  Description of Artificial Sequence: Synthetic oligonucleotide
  Sense strand starting at position 2713 of SEQ ID NO: 1886725
gaggcaaauaugugauugu

SEQ ID NO: 2423249 - RNA, 19 nt, Artificial Sequence
  Description of Artificial Sequence: Synthetic oligonucleotide
  Antisense strand to SEQ ID NO: 2423248
acaaucacauauuugccuc

SEQ ID NO: 2423250 - RNA, 19 nt, Artificial Sequence
  Description of Artificial Sequence: Synthetic oligonucleotide
  Sense strand starting at position 2749 of SEQ ID NO: 1886725
uugaaaugucaaugcauug

SEQ ID NO: 2423251 - RNA, 19 nt, Artificial Sequence
  Description of Artificial Sequence: Synthetic oligonucleotide
  Antisense strand to SEQ ID NO: 2423250
caaugcauugacauuucaa

SEQ ID NO: 2423252 - RNA, 19 nt, Artificial Sequence
  Description of Artificial Sequence: Synthetic oligonucleotide
  Sense strand starting at position 2754 of SEQ ID NO: 1886725
augucaaugcauuguauuu

SEQ ID NO: 2423253 - RNA, 19 nt, Artificial Sequence
  Description of Artificial Sequence: Synthetic oligonucleotide
  Antisense strand to SEQ ID NO: 2423252
aaauacaaugcauugacau

SEQ ID NO: 2423254 - RNA, 19 nt, Artificial Sequence
  Description of Artificial Sequence: Synthetic oligonucleotide
  Sense strand starting at position 2824 of SEQ ID NO: 1886725
cagugacauugucuauuga

SEQ ID NO: 2423255 - RNA, 19 nt, Artificial Sequence
  Description of Artificial Sequence: Synthetic oligonucleotide
  Antisense strand to SEQ ID NO: 2423254
ucaauagacaaugucacug

SEQ ID NO: 2423256 - RNA, 19 nt, Artificial Sequence
  Description of Artificial Sequence: Synthetic oligonucleotide
  Sense strand starting at position 2825 of SEQ ID NO: 1886725
agugacauugucuauugau

SEQ ID NO: 2423257 - RNA, 19 nt, Artificial Sequence
  Description of Artificial Sequence: Synthetic oligonucleotide
  Antisense strand to SEQ ID NO: 2423256
aucaauagacaaugucacu

SEQ ID NO: 2423258 - RNA, 19 nt, Artificial Sequence
  Description of Artificial Sequence: Synthetic oligonucleotide
  Sense strand starting at position 3215 of SEQ ID NO: 1886725
aagagaccuguucgaucua

SEQ ID NO: 2423259 - RNA, 19 nt, Artificial Sequence
  Description of Artificial Sequence: Synthetic oligonucleotide
  Antisense strand to SEQ ID NO: 2423258
uagaucgaacaggucucuu

SEQ ID NO: 2423260 - RNA, 19 nt, Artificial Sequence
  Description of Artificial Sequence: Synthetic oligonucleotide
  Sense strand starting at position 3329 of SEQ ID NO: 1886725
cauuguugacagcagaguu

SEQ ID NO: 2423261 - RNA, 19 nt, Artificial Sequence
  Description of Artificial Sequence: Synthetic oligonucleotide
  Antisense strand to SEQ ID NO: 2423260
aacucugcugucaacaaug

SEQ ID NO: 2423262 - RNA, 19 nt, Artificial Sequence
  Description of Artificial Sequence: Synthetic oligonucleotide
  Sense strand starting at position 3564 of SEQ ID NO: 1886725
uagauauuuguaugcaugu

SEQ ID NO: 2423263 - RNA, 19 nt, Artificial Sequence
  Description of Artificial Sequence: Synthetic oligonucleotide
  Antisense strand to SEQ ID NO: 2423262
acaugcauacaaauaucua

SEQ ID NO: 2423264 - RNA, 19 nt, Artificial Sequence
  Description of Artificial Sequence: Synthetic oligonucleotide
  Sense strand starting at position 3570 of SEQ ID NO: 1886725
uuuguaugcauguauggau

SEQ ID NO: 2423265 - RNA, 19 nt, Artificial Sequence
  Description of Artificial Sequence: Synthetic oligonucleotide
  Antisense strand to SEQ ID NO: 2423264
auccauacaugcauacaaa

SEQ ID NO: 2423266 - RNA, 19 nt, Artificial Sequence
  Description of Artificial Sequence: Synthetic oligonucleotide
  Sense strand starting at position 3582 of SEQ ID NO: 1886725
uauggauuuguguguuuac

SEQ ID NO: 2423267 - RNA, 19 nt, Artificial Sequence
  Description of Artificial Sequence: Synthetic oligonucleotide
  Antisense strand to SEQ ID NO: 2423266
guaaacacacaaauccaua

SEQ ID NO: 2423268 - RNA, 19 nt, Artificial Sequence
  Description of Artificial Sequence: Synthetic oligonucleotide
  Sense strand starting at position 3585 of SEQ ID NO: 1886725
ggauuuguguguuuacacg

SEQ ID NO: 2423269 - RNA, 19 nt, Artificial Sequence
  Description of Artificial Sequence: Synthetic oligonucleotide
  Antisense strand to SEQ ID NO: 2423268
cguguaaacacacaaaucc

SEQ ID NO: 2423270 - RNA, 19 nt, Artificial Sequence
  Description of Artificial Sequence: Synthetic oligonucleotide
  Sense strand starting at position 3591 of SEQ ID NO: 1886725
guguguuuacacgucugua

SEQ ID NO: 2423271 - RNA, 19 nt, Artificial Sequence
  Description of Artificial Sequence: Synthetic oligonucleotide
  Antisense strand to SEQ ID NO: 2423270
uacagacguguaaacacac

SEQ ID NO: 2423272 - RNA, 19 nt, Artificial Sequence
  Description of Artificial Sequence: Synthetic oligonucleotide
  Sense strand starting at position 3592 of SEQ ID NO: 1886725
uguguuuacacgucuguau

SEQ ID NO: 2423273 - RNA, 19 nt, Artificial Sequence
  Description of Artificial Sequence: Synthetic oligonucleotide
  Antisense strand to SEQ ID NO: 2423272
auacagacguguaaacaca

SEQ ID NO: 2423274 - RNA, 19 nt, Artificial Sequence
  Description of Artificial Sequence: Synthetic oligonucleotide
  Sense strand starting at position 3684 of SEQ ID NO: 1886725
gagcaauuugacggcgcaa

SEQ ID NO: 2423275 - RNA, 19 nt, Artificial Sequence
  Description of Artificial Sequence: Synthetic oligonucleotide
  Antisense strand to SEQ ID NO: 2423274
uugcgccgucaaauugcuc

SEQ ID NO: 2423276 - RNA, 19 nt, Artificial Sequence
  Description of Artificial Sequence: Synthetic oligonucleotide
  Sense strand starting at position 3686 of SEQ ID NO: 1886725
gcaauuugacggcgcaaua

SEQ ID NO: 2423277 - RNA, 19 nt, Artificial Sequence
  Description of Artificial Sequence: Synthetic oligonucleotide
  Antisense strand to SEQ ID NO: 2423276
uauugcgccgucaaauugc

SEQ ID NO: 2423278 - RNA, 19 nt, Artificial Sequence
  Description of Artificial Sequence: Synthetic oligonucleotide
  Sense strand starting at position 3759 of SEQ ID NO: 1886725
ggauauuagagcuggaaug

SEQ ID NO: 2423279 - RNA, 19 nt, Artificial Sequence
  Description of Artificial Sequence: Synthetic oligonucleotide
  Antisense strand to SEQ ID NO: 2423278
cauuccagcucuaauaucc

SEQ ID NO: 2423280 - RNA, 19 nt, Artificial Sequence
  Description of Artificial Sequence: Synthetic oligonucleotide
  Sense strand starting at position 3807 of SEQ ID NO: 1886725
caauuuguauaugagaaga

SEQ ID NO: 2423281 - RNA, 19 nt, Artificial Sequence
  Description of Artificial Sequence: Synthetic oligonucleotide
  Antisense strand to SEQ ID NO: 2423280
ucuucucauauacaaauug

SEQ ID NO: 2423282 - RNA, 19 nt, Artificial Sequence
  Description of Artificial Sequence: Synthetic oligonucleotide
  Sense strand starting at position 3809 of SEQ ID NO: 1886725
auuuguauaugagaagacu

SEQ ID NO: 2423283 - RNA, 19 nt, Artificial Sequence
  Description of Artificial Sequence: Synthetic oligonucleotide
  Antisense strand to SEQ ID NO: 2423282
agucuucucauauacaaau

SEQ ID NO: 2423284 - RNA, 19 nt, Artificial Sequence
  Description of Artificial Sequence: Synthetic oligonucleotide
  Sense strand starting at position 3955 of SEQ ID NO: 1886725
aguuaugauuuacauacca

SEQ ID NO: 2423285 - RNA, 19 nt, Artificial Sequence
  Description of Artificial Sequence: Synthetic oligonucleotide
  Antisense strand to SEQ ID NO: 2423284
ugguauguaaaucauaacu

SEQ ID NO: 2423286 - RNA, 19 nt, Artificial Sequence
  Description of Artificial Sequence: Synthetic oligonucleotide
  Sense strand starting at position 118 of SEQ ID NO: 1886726
gcuaauaggaaaugugcaa

SEQ ID NO: 2423287 - RNA, 19 nt, Artificial Sequence
  Description of Artificial Sequence: Synthetic oligonucleotide
  Antisense strand to SEQ ID NO: 2423286
uugcacauuuccuauuagc

SEQ ID NO: 2423288 - RNA, 19 nt, Artificial Sequence
  Description of Artificial Sequence: Synthetic oligonucleotide
  Sense strand starting at position 151 of SEQ ID NO: 1886726
uccucuugugaccagcaua

SEQ ID NO: 2423289 - RNA, 19 nt, Artificial Sequence
  Description of Artificial Sequence: Synthetic oligonucleotide
  Antisense strand to SEQ ID NO: 2423288
uaugcuggucacaagagga

SEQ ID NO: 2423290 - RNA, 19 nt, Artificial Sequence
  Description of Artificial Sequence: Synthetic oligonucleotide
  Sense strand starting at position 156 of SEQ ID NO: 1886726
uugugaccagcauauucua

SEQ ID NO: 2423291 - RNA, 19 nt, Artificial Sequence
  Description of Artificial Sequence: Synthetic oligonucleotide
  Antisense strand to SEQ ID NO: 2423290
uagaauaugcuggucacaa

SEQ ID NO: 2423292 - RNA, 19 nt, Artificial Sequence
  Description of Artificial Sequence: Synthetic oligonucleotide
  Sense strand starting at position 232 of SEQ ID NO: 1886726
cuuuguaaagcuggauaau

SEQ ID NO: 2423293 - RNA, 19 nt, Artificial Sequence
  Description of Artificial Sequence: Synthetic oligonucleotide
  Antisense strand to SEQ ID NO: 2423292
auuauccagcuuuacaaag

SEQ ID NO: 2423294 - RNA, 19 nt, Artificial Sequence
  Description of Artificial Sequence: Synthetic oligonucleotide
  Sense strand starting at position 233 of SEQ ID NO: 1886726
uuuguaaagcuggauaaua

SEQ ID NO: 2423295 - RNA, 19 nt, Artificial Sequence
  Description of Artificial Sequence: Synthetic oligonucleotide
  Antisense strand to SEQ ID NO: 2423294
uauuauccagcuuuacaaa

SEQ ID NO: 2423296 - RNA, 19 nt, Artificial Sequence
  Description of Artificial Sequence: Synthetic oligonucleotide
  Sense strand starting at position 235 of SEQ ID NO: 1886726
uguaaagcuggauaauacu

SEQ ID NO: 2423297 - RNA, 19 nt, Artificial Sequence
  Description of Artificial Sequence: Synthetic oligonucleotide
  Antisense strand to SEQ ID NO: 2423296
aguauuauccagcuuuaca

SEQ ID NO: 2423298 - RNA, 19 nt, Artificial Sequence
  Description of Artificial Sequence: Synthetic oligonucleotide
  Sense strand starting at position 384 of SEQ ID NO: 1886726
ucaauuguguugucuauuu

SEQ ID NO: 2423299 - RNA, 19 nt, Artificial Sequence
  Description of Artificial Sequence: Synthetic oligonucleotide
  Antisense strand to SEQ ID NO: 2423298
aaauagacaacacaauuga

SEQ ID NO: 2423300 - RNA, 19 nt, Artificial Sequence
  Description of Artificial Sequence: Synthetic oligonucleotide
  Sense strand starting at position 450 of SEQ ID NO: 1886726
auaauccagguuugaggua

SEQ ID NO: 2423301 - RNA, 19 nt, Artificial Sequence
  Description of Artificial Sequence: Synthetic oligonucleotide
  Antisense strand to SEQ ID NO: 2423300
uaccucaaaccuggauuau

SEQ ID NO: 2423302 - RNA, 19 nt, Artificial Sequence
  Description of Artificial Sequence: Synthetic oligonucleotide
  Sense strand starting at position 455 of SEQ ID NO: 1886726
ccagguuugagguauaggu

SEQ ID NO: 2423303 - RNA, 19 nt, Artificial Sequence
  Description of Artificial Sequence: Synthetic oligonucleotide
  Antisense strand to SEQ ID NO: 2423302
accuauaccucaaaccugg

SEQ ID NO: 2423304 - RNA, 19 nt, Artificial Sequence
  Description of Artificial Sequence: Synthetic oligonucleotide
  Sense strand starting at position 457 of SEQ ID NO: 1886726
agguuugagguauagguau

SEQ ID NO: 2423305 - RNA, 19 nt, Artificial Sequence
  Description of Artificial Sequence: Synthetic oligonucleotide
  Antisense strand to SEQ ID NO: 2423304
auaccuauaccucaaaccu

SEQ ID NO: 2423306 - RNA, 19 nt, Artificial Sequence
  Description of Artificial Sequence: Synthetic oligonucleotide
  Sense strand starting at position 480 of SEQ ID NO: 1886726
acaacaagguugguuaaau

SEQ ID NO: 2423307 - RNA, 19 nt, Artificial Sequence
  Description of Artificial Sequence: Synthetic oligonucleotide
  Antisense strand to SEQ ID NO: 2423306
auuuaaccaaccuuguugu

SEQ ID NO: 2423308 - RNA, 19 nt, Artificial Sequence
  Description of Artificial Sequence: Synthetic oligonucleotide
  Sense strand starting at position 481 of SEQ ID NO: 1886726
caacaagguugguuaaauu

SEQ ID NO: 2423309 - RNA, 19 nt, Artificial Sequence
  Description of Artificial Sequence: Synthetic oligonucleotide
  Antisense strand to SEQ ID NO: 2423308
aauuuaaccaaccuuguug

SEQ ID NO: 2423310 - RNA, 19 nt, Artificial Sequence
  Description of Artificial Sequence: Synthetic oligonucleotide
  Sense strand starting at position 787 of SEQ ID NO: 1886726
acgagacucuaucuccaaa

SEQ ID NO: 2423311 - RNA, 19 nt, Artificial Sequence
  Description of Artificial Sequence: Synthetic oligonucleotide
  Antisense strand to SEQ ID NO: 2423310
uuuggagauagagucucgu

SEQ ID NO: 2423312 - RNA, 19 nt, Artificial Sequence
  Description of Artificial Sequence: Synthetic oligonucleotide
  Sense strand starting at position 836 of SEQ ID NO: 1886726
guuucucuggguuaauuaa

SEQ ID NO: 2423313 - RNA, 19 nt, Artificial Sequence
  Description of Artificial Sequence: Synthetic oligonucleotide
  Antisense strand to SEQ ID NO: 2423312
uuaauuaacccagagaaac

SEQ ID NO: 2423314 - RNA, 19 nt, Artificial Sequence
  Description of Artificial Sequence: Synthetic oligonucleotide
  Sense strand starting at position 1100 of SEQ ID NO: 1886726
gcucauaaucuuuauugga

SEQ ID NO: 2423315 - RNA, 19 nt, Artificial Sequence
  Description of Artificial Sequence: Synthetic oligonucleotide
  Antisense strand to SEQ ID NO: 2423314
uccaauaaagauuaugagc

SEQ ID NO: 2423316 - RNA, 19 nt, Artificial Sequence
  Description of Artificial Sequence: Synthetic oligonucleotide
  Sense strand starting at position 1174 of SEQ ID NO: 1886726
ugaauacauuaucuuggua

SEQ ID NO: 2423317 - RNA, 19 nt, Artificial Sequence
  Description of Artificial Sequence: Synthetic oligonucleotide
  Antisense strand to SEQ ID NO: 2423316
uaccaagauaauguauuca

SEQ ID NO: 2423318 - RNA, 19 nt, Artificial Sequence
  Description of Artificial Sequence: Synthetic oligonucleotide
  Sense strand starting at position 1177 of SEQ ID NO: 1886726
auacauuaucuugguagau

SEQ ID NO: 2423319 - RNA, 19 nt, Artificial Sequence
  Description of Artificial Sequence: Synthetic oligonucleotide
  Antisense strand to SEQ ID NO: 2423318
aucuaccaagauaauguau

SEQ ID NO: 2423320 - RNA, 19 nt, Artificial Sequence
  Description of Artificial Sequence: Synthetic oligonucleotide
  Sense strand starting at position 1178 of SEQ ID NO: 1886726
uacauuaucuugguagaug

SEQ ID NO: 2423321 - RNA, 19 nt, Artificial Sequence
  Description of Artificial Sequence: Synthetic oligonucleotide
  Antisense strand to SEQ ID NO: 2423320
caucuaccaagauaaugua

SEQ ID NO: 2423322 - RNA, 19 nt, Artificial Sequence
  Description of Artificial Sequence: Synthetic oligonucleotide
  Sense strand starting at position 1199 of SEQ ID NO: 1886726
uuagaauugcuagacuuau

SEQ ID NO: 2423323 - RNA, 19 nt, Artificial Sequence
  Description of Artificial Sequence: Synthetic oligonucleotide
  Antisense strand to SEQ ID NO: 2423322
auaagucuagcaauucuaa

SEQ ID NO: 2423324 - RNA, 19 nt, Artificial Sequence
  Description of Artificial Sequence: Synthetic oligonucleotide
  Sense strand starting at position 1220 of SEQ ID NO: 1886726
uaaggcuuucugugagaua

SEQ ID NO: 2423325 - RNA, 19 nt, Artificial Sequence
  Description of Artificial Sequence: Synthetic oligonucleotide
  Antisense strand to SEQ ID NO: 2423324
uaucucacagaaagccuua

SEQ ID NO: 2423326 - RNA, 19 nt, Artificial Sequence
  Description of Artificial Sequence: Synthetic oligonucleotide
  Sense strand starting at position 1250 of SEQ ID NO: 1886726
ggaagugguguggaucacu

SEQ ID NO: 2423327 - RNA, 19 nt, Artificial Sequence
  Description of Artificial Sequence: Synthetic oligonucleotide
  Antisense strand to SEQ ID NO: 2423326
agugauccacaccacuucc

SEQ ID NO: 2423328 - RNA, 19 nt, Artificial Sequence
  Description of Artificial Sequence: Synthetic oligonucleotide
  Sense strand starting at position 1386 of SEQ ID NO: 1886726
uaugguaaucuugggacaa

SEQ ID NO: 2423329 - RNA, 19 nt, Artificial Sequence
  Description of Artificial Sequence: Synthetic oligonucleotide
  Antisense strand to SEQ ID NO: 2423328
uugucccaagauuaccaua

SEQ ID NO: 2423330 - RNA, 19 nt, Artificial Sequence
  Description of Artificial Sequence: Synthetic oligonucleotide
  Sense strand starting at position 1482 of SEQ ID NO: 1886726
uccaaagacggauguaaua

SEQ ID NO: 2423331 - RNA, 19 nt, Artificial Sequence
  Description of Artificial Sequence: Synthetic oligonucleotide
  Antisense strand to SEQ ID NO: 2423330
uauuacauccgucuuugga

SEQ ID NO: 2423332 - RNA, 19 nt, Artificial Sequence
  Description of Artificial Sequence: Synthetic oligonucleotide
  Sense strand starting at position 1495 of SEQ ID NO: 1886726
guaauaaaucuguagccaa

SEQ ID NO: 2423333 - RNA, 19 nt, Artificial Sequence
  Description of Artificial Sequence: Synthetic oligonucleotide
  Antisense strand to SEQ ID NO: 2423332
uuggcuacagauuuauuac

SEQ ID NO: 2423334 - RNA, 19 nt, Artificial Sequence
  Description of Artificial Sequence: Synthetic oligonucleotide
  Sense strand starting at position 1498 of SEQ ID NO: 1886726
auaaaucuguagccaaaga

SEQ ID NO: 2423335 - RNA, 19 nt, Artificial Sequence
  Description of Artificial Sequence: Synthetic oligonucleotide
  Antisense strand to SEQ ID NO: 2423334
ucuuuggcuacagauuuau

SEQ ID NO: 2423336 - RNA, 19 nt, Artificial Sequence
  Description of Artificial Sequence: Synthetic oligonucleotide
  Sense strand starting at position 1508 of SEQ ID NO: 1886726
agccaaagacuugauccuu

SEQ ID NO: 2423337 - RNA, 19 nt, Artificial Sequence
  Description of Artificial Sequence: Synthetic oligonucleotide
  Antisense strand to SEQ ID NO: 2423336
aaggaucaagucuuuggcu

SEQ ID NO: 2423338 - RNA, 19 nt, Artificial Sequence
  Description of Artificial Sequence: Synthetic oligonucleotide
  Sense strand starting at position 2017 of SEQ ID NO: 1886726
ugaagagcaccauacuguu

SEQ ID NO: 2423339 - RNA, 19 nt, Artificial Sequence
  Description of Artificial Sequence: Synthetic oligonucleotide
  Antisense strand to SEQ ID NO: 2423338
aacaguauggugcucuuca

SEQ ID NO: 2423340 - RNA, 19 nt, Artificial Sequence
  Description of Artificial Sequence: Synthetic oligonucleotide
  Sense strand starting at position 2947 of SEQ ID NO: 1886726
cuugauaacuaucuuggca

SEQ ID NO: 2423341 - RNA, 19 nt, Artificial Sequence
  Description of Artificial Sequence: Synthetic oligonucleotide
  Antisense strand to SEQ ID NO: 2423340
ugccaagauaguuaucaag

SEQ ID NO: 2423342 - RNA, 19 nt, Artificial Sequence
  Description of Artificial Sequence: Synthetic oligonucleotide
  Sense strand starting at position 2951 of SEQ ID NO: 1886726
auaacuaucuuggcaagag

SEQ ID NO: 2423343 - RNA, 19 nt, Artificial Sequence
  Description of Artificial Sequence: Synthetic oligonucleotide
  Antisense strand to SEQ ID NO: 2423342
cucuugccaagauaguuau

SEQ ID NO: 2423344 - RNA, 19 nt, Artificial Sequence
  Description of Artificial Sequence: Synthetic oligonucleotide
  Sense strand starting at position 2989 of SEQ ID NO: 1886726
cugcuaguguaacuggaaa

SEQ ID NO: 2423345 - RNA, 19 nt, Artificial Sequence
  Description of Artificial Sequence: Synthetic oligonucleotide
  Antisense strand to SEQ ID NO: 2423344
uuuccaguuacacuagcag

SEQ ID NO: 2423346 - RNA, 19 nt, Artificial Sequence
  Description of Artificial Sequence: Synthetic oligonucleotide
  Sense strand starting at position 3311 of SEQ ID NO: 1886726
ccauaucagccagacugau

SEQ ID NO: 2423347 - RNA, 19 nt, Artificial Sequence
  Description of Artificial Sequence: Synthetic oligonucleotide
  Antisense strand to SEQ ID NO: 2423346
aucagucuggcugauaugg

SEQ ID NO: 2423348 - RNA, 19 nt, Artificial Sequence
  Description of Artificial Sequence: Synthetic oligonucleotide
  Sense strand starting at position 3317 of SEQ ID NO: 1886726
cagccagacugaucuggaa

SEQ ID NO: 2423349 - RNA, 19 nt, Artificial Sequence
  Description of Artificial Sequence: Synthetic oligonucleotide
  Antisense strand to SEQ ID NO: 2423348
uuccagaucagucuggcug

SEQ ID NO: 2423350 - RNA, 19 nt, Artificial Sequence
  Description of Artificial Sequence: Synthetic oligonucleotide
  Sense strand starting at position 3529 of SEQ ID NO: 1886726
uaggaagucgcuuacacaa

SEQ ID NO: 2423351 - RNA, 19 nt, Artificial Sequence
  Description of Artificial Sequence: Synthetic oligonucleotide
  Antisense strand to SEQ ID NO: 2423350
uuguguaagcgacuuccua

SEQ ID NO: 2423352 - RNA, 19 nt, Artificial Sequence
  Description of Artificial Sequence: Synthetic oligonucleotide
  Sense strand starting at position 3722 of SEQ ID NO: 1886726
ggcaguaggucauuuguuu

SEQ ID NO: 2423353 - RNA, 19 nt, Artificial Sequence
  Description of Artificial Sequence: Synthetic oligonucleotide
  Antisense strand to SEQ ID NO: 2423352
aaacaaaugaccuacugcc

SEQ ID NO: 2423354 - RNA, 19 nt, Artificial Sequence
  Description of Artificial Sequence: Synthetic oligonucleotide
  Sense strand starting at position 3750 of SEQ ID NO: 1886726
gaguuuggaugccuacauu

SEQ ID NO: 2423355 - RNA, 19 nt, Artificial Sequence
  Description of Artificial Sequence: Synthetic oligonucleotide
  Antisense strand to SEQ ID NO: 2423354
aauguaggcauccaaacuc

SEQ ID NO: 2423356 - RNA, 19 nt, Artificial Sequence
  Description of Artificial Sequence: Synthetic oligonucleotide
  Sense strand starting at position 3753 of SEQ ID NO: 1886726
uuuggaugccuacauugua

SEQ ID NO: 2423357 - RNA, 19 nt, Artificial Sequence
  Description of Artificial Sequence: Synthetic oligonucleotide
  Antisense strand to SEQ ID NO: 2423356
uacaauguaggcauccaaa

SEQ ID NO: 2423358 - RNA, 19 nt, Artificial Sequence
  Description of Artificial Sequence: Synthetic oligonucleotide
  Sense strand starting at position 3756 of SEQ ID NO: 1886726
ggaugccuacauuguauua

SEQ ID NO: 2423359 - RNA, 19 nt, Artificial Sequence
  Description of Artificial Sequence: Synthetic oligonucleotide
  Antisense strand to SEQ ID NO: 2423358
uaauacaauguaggcaucc

SEQ ID NO: 2423360 - RNA, 19 nt, Artificial Sequence
  Description of Artificial Sequence: Synthetic oligonucleotide
  Sense strand starting at position 3796 of SEQ ID NO: 1886726
ugugcauuagcucaugaaa

SEQ ID NO: 2423361 - RNA, 19 nt, Artificial Sequence
  Description of Artificial Sequence: Synthetic oligonucleotide
  Antisense strand to SEQ ID NO: 2423360
uuucaugagcuaaugcaca

SEQ ID NO: 2423362 - RNA, 19 nt, Artificial Sequence
  Description of Artificial Sequence: Synthetic oligonucleotide
  Sense strand starting at position 3860 of SEQ ID NO: 1886726
uaaggaaguugggcucaaa

SEQ ID NO: 2423363 - RNA, 19 nt, Artificial Sequence
  Description of Artificial Sequence: Synthetic oligonucleotide
  Antisense strand to SEQ ID NO: 2423362
uuugagcccaacuuccuua

SEQ ID NO: 2423364 - RNA, 19 nt, Artificial Sequence
  Description of Artificial Sequence: Synthetic oligonucleotide
  Sense strand starting at position 3891 of SEQ ID NO: 1886726
cuugcucgcacgguuagaa

SEQ ID NO: 2423365 - RNA, 19 nt, Artificial Sequence
  Description of Artificial Sequence: Synthetic oligonucleotide
  Antisense strand to SEQ ID NO: 2423364
uucuaaccgugcgagcaag

SEQ ID NO: 2423366 - RNA, 19 nt, Artificial Sequence
  Description of Artificial Sequence: Synthetic oligonucleotide
  Sense strand starting at position 162 of SEQ ID NO: 1886727
gugugaggguugcugucau

SEQ ID NO: 2423367 - RNA, 19 nt, Artificial Sequence
  Description of Artificial Sequence: Synthetic oligonucleotide
  Antisense strand to SEQ ID NO: 2423366
augacagcaacccucacac

SEQ ID NO: 2423368 - RNA, 19 nt, Artificial Sequence
  Description of Artificial Sequence: Synthetic oligonucleotide
  Sense strand starting at position 361 of SEQ ID NO: 1886727
ccuggucugugcuguaaca

SEQ ID NO: 2423369 - RNA, 19 nt, Artificial Sequence
  Description of Artificial Sequence: Synthetic oligonucleotide
  Antisense strand to SEQ ID NO: 2423368
uguuacagcacagaccagg

SEQ ID NO: 2423370 - RNA, 19 nt, Artificial Sequence
  Description of Artificial Sequence: Synthetic oligonucleotide
  Sense strand starting at position 363 of SEQ ID NO: 1886727
uggucugugcuguaacaug

SEQ ID NO: 2423371 - RNA, 19 nt, Artificial Sequence
  Description of Artificial Sequence: Synthetic oligonucleotide
  Antisense strand to SEQ ID NO: 2423370
cauguuacagcacagacca

SEQ ID NO: 2423372 - RNA, 19 nt, Artificial Sequence
  Description of Artificial Sequence: Synthetic oligonucleotide
  Sense strand starting at position 373 of SEQ ID NO: 1886727
uguaacauguggcgucaga

SEQ ID NO: 2423373 - RNA, 19 nt, Artificial Sequence
  Description of Artificial Sequence: Synthetic oligonucleotide
  Antisense strand to SEQ ID NO: 2423372
ucugacgccacauguuaca

SEQ ID NO: 2423374 - RNA, 19 nt, Artificial Sequence
  Description of Artificial Sequence: Synthetic oligonucleotide
  Sense strand starting at position 566 of SEQ ID NO: 1886727
ggaugaaguucucuugcuu

SEQ ID NO: 2423375 - RNA, 19 nt, Artificial Sequence
  Description of Artificial Sequence: Synthetic oligonucleotide
  Antisense strand to SEQ ID NO: 2423374
aagcaagagaacuucaucc

SEQ ID NO: 2423376 - RNA, 19 nt, Artificial Sequence
  Description of Artificial Sequence: Synthetic oligonucleotide
  Sense strand starting at position 813 of SEQ ID NO: 1886727
gagcccgaucucugcuuau

SEQ ID NO: 2423377 - RNA, 19 nt, Artificial Sequence
  Description of Artificial Sequence: Synthetic oligonucleotide
  Antisense strand to SEQ ID NO: 2423376
auaagcagagaucgggcuc

SEQ ID NO: 2423378 - RNA, 19 nt, Artificial Sequence
  Description of Artificial Sequence: Synthetic oligonucleotide
  Sense strand starting at position 817 of SEQ ID NO: 1886727
ccgaucucugcuuauacca

SEQ ID NO: 2423379 - RNA, 19 nt, Artificial Sequence
  Description of Artificial Sequence: Synthetic oligonucleotide
  Antisense strand to SEQ ID NO: 2423378
ugguauaagcagagaucgg

SEQ ID NO: 2423380 - RNA, 19 nt, Artificial Sequence
  Description of Artificial Sequence: Synthetic oligonucleotide
  Sense strand starting at position 939 of SEQ ID NO: 1886727
ggaacaaggcaguaguuau

SEQ ID NO: 2423381 - RNA, 19 nt, Artificial Sequence
  Description of Artificial Sequence: Synthetic oligonucleotide
  Antisense strand to SEQ ID NO: 2423380
auaacuacugccuuguucc

SEQ ID NO: 2423382 - RNA, 19 nt, Artificial Sequence
  Description of Artificial Sequence: Synthetic oligonucleotide
  Sense strand starting at position 943 of SEQ ID NO: 1886727
caaggcaguaguuauggua

SEQ ID NO: 2423383 - RNA, 19 nt, Artificial Sequence
  Description of Artificial Sequence: Synthetic oligonucleotide
  Antisense strand to SEQ ID NO: 2423382
uaccauaacuacugccuug

SEQ ID NO: 2423384 - RNA, 19 nt, Artificial Sequence
  Description of Artificial Sequence: Synthetic oligonucleotide
  Sense strand starting at position 994 of SEQ ID NO: 1886727
ccgguuacuucugugagcu

SEQ ID NO: 2423385 - RNA, 19 nt, Artificial Sequence
  Description of Artificial Sequence: Synthetic oligonucleotide
  Antisense strand to SEQ ID NO: 2423384
agcucacagaaguaaccgg

SEQ ID NO: 2423386 - RNA, 19 nt, Artificial Sequence
  Description of Artificial Sequence: Synthetic oligonucleotide
  Sense strand starting at position 995 of SEQ ID NO: 1886727
cgguuacuucugugagcug

SEQ ID NO: 2423387 - RNA, 19 nt, Artificial Sequence
  Description of Artificial Sequence: Synthetic oligonucleotide
  Antisense strand to SEQ ID NO: 2423386
cagcucacagaaguaaccg

SEQ ID NO: 2423388 - RNA, 19 nt, Artificial Sequence
  Description of Artificial Sequence: Synthetic oligonucleotide
  Sense strand starting at position 1006 of SEQ ID NO: 1886727
gugagcugccuggcucauu

SEQ ID NO: 2423389 - RNA, 19 nt, Artificial Sequence
  Description of Artificial Sequence: Synthetic oligonucleotide
  Antisense strand to SEQ ID NO: 2423388
aaugagccaggcagcucac

SEQ ID NO: 2423390 - RNA, 19 nt, Artificial Sequence
  Description of Artificial Sequence: Synthetic oligonucleotide
  Sense strand starting at position 1254 of SEQ ID NO: 1886727
gcacacagguacuuauaua

SEQ ID NO: 2423391 - RNA, 19 nt, Artificial Sequence
  Description of Artificial Sequence: Synthetic oligonucleotide
  Antisense strand to SEQ ID NO: 2423390
uauauaaguaccugugugc

SEQ ID NO: 2423392 - RNA, 19 nt, Artificial Sequence
  Description of Artificial Sequence: Synthetic oligonucleotide
  Sense strand starting at position 1423 of SEQ ID NO: 1886727
ggucguuaccuugaggaug

SEQ ID NO: 2423393 - RNA, 19 nt, Artificial Sequence
  Description of Artificial Sequence: Synthetic oligonucleotide
  Antisense strand to SEQ ID NO: 2423392
cauccucaagguaacgacc

SEQ ID NO: 2423394 - RNA, 19 nt, Artificial Sequence
  Description of Artificial Sequence: Synthetic oligonucleotide
  Sense strand starting at position 2248 of SEQ ID NO: 1886727
acagcuguguuaccaagaa

SEQ ID NO: 2423395 - RNA, 19 nt, Artificial Sequence
  Description of Artificial Sequence: Synthetic oligonucleotide
  Antisense strand to SEQ ID NO: 2423394
uucuugguaacacagcugu

SEQ ID NO: 2423396 - RNA, 19 nt, Artificial Sequence
  Description of Artificial Sequence: Synthetic oligonucleotide
  Sense strand starting at position 2252 of SEQ ID NO: 1886727
cuguguuaccaagaagugu

SEQ ID NO: 2423397 - RNA, 19 nt, Artificial Sequence
  Description of Artificial Sequence: Synthetic oligonucleotide
  Antisense strand to SEQ ID NO: 2423396
acacuucuugguaacacag

SEQ ID NO: 2423398 - RNA, 19 nt, Artificial Sequence
  Description of Artificial Sequence: Synthetic oligonucleotide
  Sense strand starting at position 2775 of SEQ ID NO: 1886727
aguuucuaaucucugaaag

SEQ ID NO: 2423399 - RNA, 19 nt, Artificial Sequence
  Description of Artificial Sequence: Synthetic oligonucleotide
  Antisense strand to SEQ ID NO: 2423398
cuuucagagauuagaaacu

SEQ ID NO: 2423400 - RNA, 19 nt, Artificial Sequence
  Description of Artificial Sequence: Synthetic oligonucleotide
  Sense strand starting at position 2776 of SEQ ID NO: 1886727
guuucuaaucucugaaagg

SEQ ID NO: 2423401 - RNA, 19 nt, Artificial Sequence
  Description of Artificial Sequence: Synthetic oligonucleotide
  Antisense strand to SEQ ID NO: 2423400
ccuuucagagauuagaaac

SEQ ID NO: 2423402 - RNA, 19 nt, Artificial Sequence
  Description of Artificial Sequence: Synthetic oligonucleotide
  Sense strand starting at position 2873 of SEQ ID NO: 1886727
uggccuuccuucugcaaau

SEQ ID NO: 2423403 - RNA, 19 nt, Artificial Sequence
  Description of Artificial Sequence: Synthetic oligonucleotide
  Antisense strand to SEQ ID NO: 2423402
auuugcagaaggaaggcca

SEQ ID NO: 2423404 - RNA, 19 nt, Artificial Sequence
  Description of Artificial Sequence: Synthetic oligonucleotide
  Sense strand starting at position 2874 of SEQ ID NO: 1886727
ggccuuccuucugcaaauu

SEQ ID NO: 2423405 - RNA, 19 nt, Artificial Sequence
  Description of Artificial Sequence: Synthetic oligonucleotide
  Antisense strand to SEQ ID NO: 2423404
aauuugcagaaggaaggcc

SEQ ID NO: 2423406 - RNA, 19 nt, Artificial Sequence
  Description of Artificial Sequence: Synthetic oligonucleotide
  Sense strand starting at position 2932 of SEQ ID NO: 1886727
acugacaucccuuggguaa

SEQ ID NO: 2423407 - RNA, 19 nt, Artificial Sequence
  Description of Artificial Sequence: Synthetic oligonucleotide
  Antisense strand to SEQ ID NO: 2423406
uuacccaagggaugucagu

SEQ ID NO: 2423408 - RNA, 19 nt, Artificial Sequence
  Description of Artificial Sequence: Synthetic oligonucleotide
  Sense strand starting at position 2934 of SEQ ID NO: 1886727
ugacaucccuuggguaacu

SEQ ID NO: 2423409 - RNA, 19 nt, Artificial Sequence
  Description of Artificial Sequence: Synthetic oligonucleotide
  Antisense strand to SEQ ID NO: 2423408
aguuacccaagggauguca

SEQ ID NO: 2423410 - RNA, 19 nt, Artificial Sequence
  Description of Artificial Sequence: Synthetic oligonucleotide
  Sense strand starting at position 3116 of SEQ ID NO: 1886727
ccaugaugcuggcuggagu

SEQ ID NO: 2423411 - RNA, 19 nt, Artificial Sequence
  Description of Artificial Sequence: Synthetic oligonucleotide
  Antisense strand to SEQ ID NO: 2423410
acuccagccagcaucaugg

SEQ ID NO: 2423412 - RNA, 19 nt, Artificial Sequence
  Description of Artificial Sequence: Synthetic oligonucleotide
  Sense strand starting at position 3138 of SEQ ID NO: 1886727
gacacucguuuccguauca

SEQ ID NO: 2423413 - RNA, 19 nt, Artificial Sequence
  Description of Artificial Sequence: Synthetic oligonucleotide
  Antisense strand to SEQ ID NO: 2423412
ugauacggaaacgaguguc

SEQ ID NO: 2423414 - RNA, 19 nt, Artificial Sequence
  Description of Artificial Sequence: Synthetic oligonucleotide
  Sense strand starting at position 3139 of SEQ ID NO: 1886727
acacucguuuccguaucaa

SEQ ID NO: 2423415 - RNA, 19 nt, Artificial Sequence
  Description of Artificial Sequence: Synthetic oligonucleotide
  Antisense strand to SEQ ID NO: 2423414
uugauacggaaacgagugu

SEQ ID NO: 2423416 - RNA, 19 nt, Artificial Sequence
  Description of Artificial Sequence: Synthetic oligonucleotide
  Sense strand starting at position 3167 of SEQ ID NO: 1886727
cuaagaaaugcucaucguu

SEQ ID NO: 2423417 - RNA, 19 nt, Artificial Sequence
  Description of Artificial Sequence: Synthetic oligonucleotide
  Antisense strand to SEQ ID NO: 2423416
aacgaugagcauuucuuag

SEQ ID NO: 2423418 - RNA, 19 nt, Artificial Sequence
  Description of Artificial Sequence: Synthetic oligonucleotide
  Sense strand starting at position 3363 of SEQ ID NO: 1886727
ugaagagucuguggccuaa

SEQ ID NO: 2423419 - RNA, 19 nt, Artificial Sequence
  Description of Artificial Sequence: Synthetic oligonucleotide
  Antisense strand to SEQ ID NO: 2423418
uuaggccacagacucuuca

SEQ ID NO: 2423420 - RNA, 19 nt, Artificial Sequence
  Description of Artificial Sequence: Synthetic oligonucleotide
  Sense strand starting at position 3686 of SEQ ID NO: 1886727
gacgcuuagacgugaacau

SEQ ID NO: 2423421 - RNA, 19 nt, Artificial Sequence
  Description of Artificial Sequence: Synthetic oligonucleotide
  Antisense strand to SEQ ID NO: 2423420
auguucacgucuaagcguc

SEQ ID NO: 2423422 - RNA, 19 nt, Artificial Sequence
  Description of Artificial Sequence: Synthetic oligonucleotide
  Sense strand starting at position 3785 of SEQ ID NO: 1886727
ggccucuccuuguagggaa

SEQ ID NO: 2423423 - RNA, 19 nt, Artificial Sequence
  Description of Artificial Sequence: Synthetic oligonucleotide
  Antisense strand to SEQ ID NO: 2423422
uucccuacaaggagaggcc

SEQ ID NO: 2423424 - RNA, 19 nt, Artificial Sequence
  Description of Artificial Sequence: Synthetic oligonucleotide
  Sense strand starting at position 3916 of SEQ ID NO: 1886727
aagacaagcucggaagaaa

SEQ ID NO: 2423425 - RNA, 19 nt, Artificial Sequence
  Description of Artificial Sequence: Synthetic oligonucleotide
  Antisense strand to SEQ ID NO: 2423424
uuucuuccgagcuugucuu

SEQ ID NO: 2423426 - RNA, 19 nt, Artificial Sequence
  Description of Artificial Sequence: Synthetic oligonucleotide
  Sense strand starting at position 189 of SEQ ID NO: 1886728
gagagcaaguucugcagaa

SEQ ID NO: 2423427 - RNA, 19 nt, Artificial Sequence
  Description of Artificial Sequence: Synthetic oligonucleotide
  Antisense strand to SEQ ID NO: 2423426
uucugcagaacuugcucuc

SEQ ID NO: 2423428 - RNA, 19 nt, Artificial Sequence
  Description of Artificial Sequence: Synthetic oligonucleotide
  Sense strand starting at position 190 of SEQ ID NO: 1886728
agagcaaguucugcagaac

SEQ ID NO: 2423429 - RNA, 19 nt, Artificial Sequence
  Description of Artificial Sequence: Synthetic oligonucleotide
  Antisense strand to SEQ ID NO: 2423428
guucugcagaacuugcucu

SEQ ID NO: 2423430 - RNA, 19 nt, Artificial Sequence
  Description of Artificial Sequence: Synthetic oligonucleotide
  Sense strand starting at position 191 of SEQ ID NO: 1886728
gagcaaguucugcagaaca

SEQ ID NO: 2423431 - RNA, 19 nt, Artificial Sequence
  Description of Artificial Sequence: Synthetic oligonucleotide
  Antisense strand to SEQ ID NO: 2423430
uguucugcagaacuugcuc

SEQ ID NO: 2423432 - RNA, 19 nt, Artificial Sequence
  Description of Artificial Sequence: Synthetic oligonucleotide
  Sense strand starting at position 193 of SEQ ID NO: 1886728
gcaaguucugcagaacaga

SEQ ID NO: 2423433 - RNA, 19 nt, Artificial Sequence
  Description of Artificial Sequence: Synthetic oligonucleotide
  Antisense strand to SEQ ID NO: 2423432
ucuguucugcagaacuugc

SEQ ID NO: 2423434 - RNA, 19 nt, Artificial Sequence
  Description of Artificial Sequence: Synthetic oligonucleotide
  Sense strand starting at position 226 of SEQ ID NO: 1886728
gcaaacuaugucuguauaa

SEQ ID NO: 2423435 - RNA, 19 nt, Artificial Sequence
  Description of Artificial Sequence: Synthetic oligonucleotide
  Antisense strand to SEQ ID NO: 2423434
uuauacagacauaguuugc

SEQ ID NO: 2423436 - RNA, 19 nt, Artificial Sequence
  Description of Artificial Sequence: Synthetic oligonucleotide
  Sense strand starting at position 238 of SEQ ID NO: 1886728
uguauaaaguggcaauaau

SEQ ID NO: 2423437 - RNA, 19 nt, Artificial Sequence
  Description of Artificial Sequence: Synthetic oligonucleotide
  Antisense strand to SEQ ID NO: 2423436
auuauugccacuuuauaca

SEQ ID NO: 2423438 - RNA, 19 nt, Artificial Sequence
  Description of Artificial Sequence: Synthetic oligonucleotide
  Sense strand starting at position 742 of SEQ ID NO: 1886728
cccucuacugcugagauau

SEQ ID NO: 2423439 - RNA, 19 nt, Artificial Sequence
  Description of Artificial Sequence: Synthetic oligonucleotide
  Antisense strand to SEQ ID NO: 2423438
auaucucagcaguagaggg

SEQ ID NO: 2423440 - RNA, 19 nt, Artificial Sequence
  Description of Artificial Sequence: Synthetic oligonucleotide
  Sense strand starting at position 812 of SEQ ID NO: 1886728
ccgguuuacugucccaaag

SEQ ID NO: 2423441 - RNA, 19 nt, Artificial Sequence
  Description of Artificial Sequence: Synthetic oligonucleotide
  Antisense strand to SEQ ID NO: 2423440
cuuugggacaguaaaccgg

SEQ ID NO: 2423442 - RNA, 19 nt, Artificial Sequence
  Description of Artificial Sequence: Synthetic oligonucleotide
  Sense strand starting at position 1191 of SEQ ID NO: 1886728
ucuagcacuugcuaaaguu

SEQ ID NO: 2423443 - RNA, 19 nt, Artificial Sequence
  Description of Artificial Sequence: Synthetic oligonucleotide
  Antisense strand to SEQ ID NO: 2423442
aacuuuagcaagugcuaga

SEQ ID NO: 2423444 - RNA, 19 nt, Artificial Sequence
  Description of Artificial Sequence: Synthetic oligonucleotide
  Sense strand starting at position 2166 of SEQ ID NO: 1886728
agacgagguuucgcauguu

SEQ ID NO: 2423445 - RNA, 19 nt, Artificial Sequence
  Description of Artificial Sequence: Synthetic oligonucleotide
  Antisense strand to SEQ ID NO: 2423444
aacaugcgaaaccucgucu

SEQ ID NO: 2423446 - RNA, 19 nt, Artificial Sequence
  Description of Artificial Sequence: Synthetic oligonucleotide
  Sense strand starting at position 2307 of SEQ ID NO: 1886728
gcugaaaugacagaugucu

SEQ ID NO: 2423447 - RNA, 19 nt, Artificial Sequence
  Description of Artificial Sequence: Synthetic oligonucleotide
  Antisense strand to SEQ ID NO: 2423446
agacaucugucauuucagc

SEQ ID NO: 2423448 - RNA, 19 nt, Artificial Sequence
  Description of Artificial Sequence: Synthetic oligonucleotide
  Sense strand starting at position 2411 of SEQ ID NO: 1886728
uauuuauuggccuguguac

SEQ ID NO: 2423449 - RNA, 19 nt, Artificial Sequence
  Description of Artificial Sequence: Synthetic oligonucleotide
  Antisense strand to SEQ ID NO: 2423448
guacacaggccaauaaaua

SEQ ID NO: 2423450 - RNA, 19 nt, Artificial Sequence
  Description of Artificial Sequence: Synthetic oligonucleotide
  Sense strand starting at position 2517 of SEQ ID NO: 1886728
uaagcaggagcucgauaaa

SEQ ID NO: 2423451 - RNA, 19 nt, Artificial Sequence
  Description of Artificial Sequence: Synthetic oligonucleotide
  Antisense strand to SEQ ID NO: 2423450
uuuaucgagcuccugcuua

SEQ ID NO: 2423452 - RNA, 19 nt, Artificial Sequence
  Description of Artificial Sequence: Synthetic oligonucleotide
  Sense strand starting at position 2520 of SEQ ID NO: 1886728
gcaggagcucgauaaauau

SEQ ID NO: 2423453 - RNA, 19 nt, Artificial Sequence
  Description of Artificial Sequence: Synthetic oligonucleotide
  Antisense strand to SEQ ID NO: 2423452
auauuuaucgagcuccugc

SEQ ID NO: 2423454 - RNA, 19 nt, Artificial Sequence
  Description of Artificial Sequence: Synthetic oligonucleotide
  Sense strand starting at position 2527 of SEQ ID NO: 1886728
cucgauaaauauuaggaau

SEQ ID NO: 2423455 - RNA, 19 nt, Artificial Sequence
  Description of Artificial Sequence: Synthetic oligonucleotide
  Antisense strand to SEQ ID NO: 2423454
auuccuaauauuuaucgag

SEQ ID NO: 2423456 - RNA, 19 nt, Artificial Sequence
  Description of Artificial Sequence: Synthetic oligonucleotide
  Sense strand starting at position 2529 of SEQ ID NO: 1886728
cgauaaauauuaggaauca

SEQ ID NO: 2423457 - RNA, 19 nt, Artificial Sequence
  Description of Artificial Sequence: Synthetic oligonucleotide
  Antisense strand to SEQ ID NO: 2423456
ugauuccuaauauuuaucg

SEQ ID NO: 2423458 - RNA, 19 nt, Artificial Sequence
  Description of Artificial Sequence: Synthetic oligonucleotide
  Sense strand starting at position 2541 of SEQ ID NO: 1886728
ggaaucauauuacgcuaau

SEQ ID NO: 2423459 - RNA, 19 nt, Artificial Sequence
  Description of Artificial Sequence: Synthetic oligonucleotide
  Antisense strand to SEQ ID NO: 2423458
auuagcguaauaugauucc

SEQ ID NO: 2423460 - RNA, 19 nt, Artificial Sequence
  Description of Artificial Sequence: Synthetic oligonucleotide
  Sense strand starting at position 2758 of SEQ ID NO: 1886728
gugacaacguucggcugau

SEQ ID NO: 2423461 - RNA, 19 nt, Artificial Sequence
  Description of Artificial Sequence: Synthetic oligonucleotide
  Antisense strand to SEQ ID NO: 2423460
aucagccgaacguugucac

SEQ ID NO: 2423462 - RNA, 19 nt, Artificial Sequence
  Description of Artificial Sequence: Synthetic oligonucleotide
  Sense strand starting at position 2759 of SEQ ID NO: 1886728
ugacaacguucggcugaua

SEQ ID NO: 2423463 - RNA, 19 nt, Artificial Sequence
  Description of Artificial Sequence: Synthetic oligonucleotide
  Antisense strand to SEQ ID NO: 2423462
uaucagccgaacguuguca

SEQ ID NO: 2423464 - RNA, 19 nt, Artificial Sequence
  Description of Artificial Sequence: Synthetic oligonucleotide
  Sense strand starting at position 3025 of SEQ ID NO: 1886728
ccauuagcuuugucccaca

SEQ ID NO: 2423465 - RNA, 19 nt, Artificial Sequence
  Description of Artificial Sequence: Synthetic oligonucleotide
  Antisense strand to SEQ ID NO: 2423464
ugugggacaaagcuaaugg

SEQ ID NO: 2423466 - RNA, 19 nt, Artificial Sequence
  Description of Artificial Sequence: Synthetic oligonucleotide
  Sense strand starting at position 3165 of SEQ ID NO: 1886728
ggccgcaucucccgacaaa

SEQ ID NO: 2423467 - RNA, 19 nt, Artificial Sequence
  Description of Artificial Sequence: Synthetic oligonucleotide
  Antisense strand to SEQ ID NO: 2423466
uuugucgggagaugcggcc

SEQ ID NO: 2423468 - RNA, 19 nt, Artificial Sequence
  Description of Artificial Sequence: Synthetic oligonucleotide
  Sense strand starting at position 3168 of SEQ ID NO: 1886728
cgcaucucccgacaaacaa

SEQ ID NO: 2423469 - RNA, 19 nt, Artificial Sequence
  Description of Artificial Sequence: Synthetic oligonucleotide
  Antisense strand to SEQ ID NO: 2423468
uuguuugucgggagaugcg

SEQ ID NO: 2423470 - RNA, 19 nt, Artificial Sequence
  Description of Artificial Sequence: Synthetic oligonucleotide
  Sense strand starting at position 3379 of SEQ ID NO: 1886728
cuucguucuacuuggagga

SEQ ID NO: 2423471 - RNA, 19 nt, Artificial Sequence
  Description of Artificial Sequence: Synthetic oligonucleotide
  Antisense strand to SEQ ID NO: 2423470
uccuccaaguagaacgaag

SEQ ID NO: 2423472 - RNA, 19 nt, Artificial Sequence
  Description of Artificial Sequence: Synthetic oligonucleotide
  Sense strand starting at position 3735 of SEQ ID NO: 1886728
gccucaaggcugugaugau

SEQ ID NO: 2423473 - RNA, 19 nt, Artificial Sequence
  Description of Artificial Sequence: Synthetic oligonucleotide
  Antisense strand to SEQ ID NO: 2423472
aucaucacagccuugaggc

SEQ ID NO: 2423474 - RNA, 19 nt, Artificial Sequence
  Description of Artificial Sequence: Synthetic oligonucleotide
  Sense strand starting at position 3774 of SEQ ID NO: 1886728
gagaguuaccaagaggugu

SEQ ID NO: 2423475 - RNA, 19 nt, Artificial Sequence
  Description of Artificial Sequence: Synthetic oligonucleotide
  Antisense strand to SEQ ID NO: 2423474
acaccucuugguaacucuc

SEQ ID NO: 2423476 - RNA, 19 nt, Artificial Sequence
  Description of Artificial Sequence: Synthetic oligonucleotide
  Sense strand starting at position 3776 of SEQ ID NO: 1886728
gaguuaccaagagguguua

SEQ ID NO: 2423477 - RNA, 19 nt, Artificial Sequence
  Description of Artificial Sequence: Synthetic oligonucleotide
  Antisense strand to SEQ ID NO: 2423476
uaacaccucuugguaacuc

SEQ ID NO: 2423478 - RNA, 19 nt, Artificial Sequence
  Description of Artificial Sequence: Synthetic oligonucleotide
  Sense strand starting at position 2 of SEQ ID NO: 1886729
uucuauuggucuuuaguau

SEQ ID NO: 2423479 - RNA, 19 nt, Artificial Sequence
  Description of Artificial Sequence: Synthetic oligonucleotide
  Antisense strand to SEQ ID NO: 2423478
auacuaaagaccaauagaa

SEQ ID NO: 2423480 - RNA, 19 nt, Artificial Sequence
  Description of Artificial Sequence: Synthetic oligonucleotide
  Sense strand starting at position 3 of SEQ ID NO: 1886729
ucuauuggucuuuaguaua

SEQ ID NO: 2423481 - RNA, 19 nt, Artificial Sequence
  Description of Artificial Sequence: Synthetic oligonucleotide
  Antisense strand to SEQ ID NO: 2423480
uauacuaaagaccaauaga

SEQ ID NO: 2423482 - RNA, 19 nt, Artificial Sequence
  Description of Artificial Sequence: Synthetic oligonucleotide
  Sense strand starting at position 14 of SEQ ID NO: 1886729
uuaguauaacagcaauagu

SEQ ID NO: 2423483 - RNA, 19 nt, Artificial Sequence
  Description of Artificial Sequence: Synthetic oligonucleotide
  Antisense strand to SEQ ID NO: 2423482
acuauugcuguuauacuaa

SEQ ID NO: 2423484 - RNA, 19 nt, Artificial Sequence
  Description of Artificial Sequence: Synthetic oligonucleotide
  Sense strand starting at position 179 of SEQ ID NO: 1886729
uuugaaauccuguggaacc

SEQ ID NO: 2423485 - RNA, 19 nt, Artificial Sequence
  Description of Artificial Sequence: Synthetic oligonucleotide
  Antisense strand to SEQ ID NO: 2423484
gguuccacaggauuucaaa

SEQ ID NO: 2423486 - RNA, 19 nt, Artificial Sequence
  Description of Artificial Sequence: Synthetic oligonucleotide
  Sense strand starting at position 398 of SEQ ID NO: 1886729
caguguggucuuuaagauc

SEQ ID NO: 2423487 - RNA, 19 nt, Artificial Sequence
  Description of Artificial Sequence: Synthetic oligonucleotide
  Antisense strand to SEQ ID NO: 2423486
gaucuuaaagaccacacug

SEQ ID NO: 2423488 - RNA, 19 nt, Artificial Sequence
  Description of Artificial Sequence: Synthetic oligonucleotide
  Sense strand starting at position 767 of SEQ ID NO: 1886729
agacgagguuucgcauguu

SEQ ID NO: 2423489 - RNA, 19 nt, Artificial Sequence
  Description of Artificial Sequence: Synthetic oligonucleotide
  Antisense strand to SEQ ID NO: 2423488
aacaugcgaaaccucgucu

SEQ ID NO: 2423490 - RNA, 19 nt, Artificial Sequence
  Description of Artificial Sequence: Synthetic oligonucleotide
  Sense strand starting at position 917 of SEQ ID NO: 1886729
acagaugucuucccaauga

SEQ ID NO: 2423491 - RNA, 19 nt, Artificial Sequence
  Description of Artificial Sequence: Synthetic oligonucleotide
  Antisense strand to SEQ ID NO: 2423490
ucauugggaagacaucugu

SEQ ID NO: 2423492 - RNA, 19 nt, Artificial Sequence
  Description of Artificial Sequence: Synthetic oligonucleotide
  Sense strand starting at position 921 of SEQ ID NO: 1886729
augucuucccaaugagaaa

SEQ ID NO: 2423493 - RNA, 19 nt, Artificial Sequence
  Description of Artificial Sequence: Synthetic oligonucleotide
  Antisense strand to SEQ ID NO: 2423492
uuucucauugggaagacau

SEQ ID NO: 2423494 - RNA, 19 nt, Artificial Sequence
  Description of Artificial Sequence: Synthetic oligonucleotide
  Sense strand starting at position 972 of SEQ ID NO: 1886729
cccauuaccuuguuguaua

SEQ ID NO: 2423495 - RNA, 19 nt, Artificial Sequence
  Description of Artificial Sequence: Synthetic oligonucleotide
  Antisense strand to SEQ ID NO: 2423494
uauacaacaagguaauggg

SEQ ID NO: 2423496 - RNA, 19 nt, Artificial Sequence
  Description of Artificial Sequence: Synthetic oligonucleotide
  Sense strand starting at position 980 of SEQ ID NO: 1886729
cuuguuguauaacugaaau

SEQ ID NO: 2423497 - RNA, 19 nt, Artificial Sequence
  Description of Artificial Sequence: Synthetic oligonucleotide
  Antisense strand to SEQ ID NO: 2423496
auuucaguuauacaacaag

SEQ ID NO: 2423498 - RNA, 19 nt, Artificial Sequence
  Description of Artificial Sequence: Synthetic oligonucleotide
  Sense strand starting at position 990 of SEQ ID NO: 1886729
aacugaaaucaucguguuc

SEQ ID NO: 2423499 - RNA, 19 nt, Artificial Sequence
  Description of Artificial Sequence: Synthetic oligonucleotide
  Antisense strand to SEQ ID NO: 2423498
gaacacgaugauuucaguu

SEQ ID NO: 2423500 - RNA, 19 nt, Artificial Sequence
  Description of Artificial Sequence: Synthetic oligonucleotide
  Sense strand starting at position 995 of SEQ ID NO: 1886729
aaaucaucguguucguuua

SEQ ID NO: 2423501 - RNA, 19 nt, Artificial Sequence
  Description of Artificial Sequence: Synthetic oligonucleotide
  Antisense strand to SEQ ID NO: 2423500
uaaacgaacacgaugauuu

SEQ ID NO: 2423502 - RNA, 19 nt, Artificial Sequence
  Description of Artificial Sequence: Synthetic oligonucleotide
  Sense strand starting at position 1049 of SEQ ID NO: 1886729
cuguaagcucuguagaaag

SEQ ID NO: 2423503 - RNA, 19 nt, Artificial Sequence
  Description of Artificial Sequence: Synthetic oligonucleotide
  Antisense strand to SEQ ID NO: 2423502
cuuucuacagagcuuacag

SEQ ID NO: 2423504 - RNA, 19 nt, Artificial Sequence
  Description of Artificial Sequence: Synthetic oligonucleotide
  Sense strand starting at position 1051 of SEQ ID NO: 1886729
guaagcucuguagaaagca

SEQ ID NO: 2423505 - RNA, 19 nt, Artificial Sequence
  Description of Artificial Sequence: Synthetic oligonucleotide
  Antisense strand to SEQ ID NO: 2423504
ugcuuucuacagagcuuac

SEQ ID NO: 2423506 - RNA, 19 nt, Artificial Sequence
  Description of Artificial Sequence: Synthetic oligonucleotide
  Sense strand starting at position 1071 of SEQ ID NO: 1886729
ggacauuagugucuuugga

SEQ ID NO: 2423507 - RNA, 19 nt, Artificial Sequence
  Description of Artificial Sequence: Synthetic oligonucleotide
  Antisense strand to SEQ ID NO: 2423506
uccaaagacacuaaugucc

SEQ ID NO: 2423508 - RNA, 19 nt, Artificial Sequence
  Description of Artificial Sequence: Synthetic oligonucleotide
  Sense strand starting at position 1078 of SEQ ID NO: 1886729
agugucuuuggauaaacca

SEQ ID NO: 2423509 - RNA, 19 nt, Artificial Sequence
  Description of Artificial Sequence: Synthetic oligonucleotide
  Antisense strand to SEQ ID NO: 2423508
ugguuuauccaaagacacu

SEQ ID NO: 2423510 - RNA, 19 nt, Artificial Sequence
  Description of Artificial Sequence: Synthetic oligonucleotide
  Sense strand starting at position 1099 of SEQ ID NO: 1886729
gucgccaguguuuaacaca

SEQ ID NO: 2423511 - RNA, 19 nt, Artificial Sequence
  Description of Artificial Sequence: Synthetic oligonucleotide
  Antisense strand to SEQ ID NO: 2423510
uguguuaaacacuggcgac

SEQ ID NO: 2423512 - RNA, 19 nt, Artificial Sequence
  Description of Artificial Sequence: Synthetic oligonucleotide
  Sense strand starting at position 1119 of SEQ ID NO: 1886729
uaagcaggagcucgauaaa

SEQ ID NO: 2423513 - RNA, 19 nt, Artificial Sequence
  Description of Artificial Sequence: Synthetic oligonucleotide
  Antisense strand to SEQ ID NO: 2423512
uuuaucgagcuccugcuua

SEQ ID NO: 2423514 - RNA, 19 nt, Artificial Sequence
  Description of Artificial Sequence: Synthetic oligonucleotide
  Sense strand starting at position 1122 of SEQ ID NO: 1886729
gcaggagcucgauaaacau

SEQ ID NO: 2423515 - RNA, 19 nt, Artificial Sequence
  Description of Artificial Sequence: Synthetic oligonucleotide
  Antisense strand to SEQ ID NO: 2423514
auguuuaucgagcuccugc

SEQ ID NO: 2423516 - RNA, 19 nt, Artificial Sequence
  Description of Artificial Sequence: Synthetic oligonucleotide
  Sense strand starting at position 1146 of SEQ ID NO: 1886729
aucauauuacgcuaauugu

SEQ ID NO: 2423517 - RNA, 19 nt, Artificial Sequence
  Description of Artificial Sequence: Synthetic oligonucleotide
  Antisense strand to SEQ ID NO: 2423516
acaauuagcguaauaugau

SEQ ID NO: 2423518 - RNA, 19 nt, Artificial Sequence
  Description of Artificial Sequence: Synthetic oligonucleotide
  Sense strand starting at position 1217 of SEQ ID NO: 1886729
uccuaaugacucugaaagu

SEQ ID NO: 2423519 - RNA, 19 nt, Artificial Sequence
  Description of Artificial Sequence: Synthetic oligonucleotide
  Antisense strand to SEQ ID NO: 2423518
acuuucagagucauuagga

SEQ ID NO: 2423520 - RNA, 19 nt, Artificial Sequence
  Description of Artificial Sequence: Synthetic oligonucleotide
  Sense strand starting at position 1231 of SEQ ID NO: 1886729
aaaguuaaacgccaagagu

SEQ ID NO: 2423521 - RNA, 19 nt, Artificial Sequence
  Description of Artificial Sequence: Synthetic oligonucleotide
  Antisense strand to SEQ ID NO: 2423520
acucuuggcguuuaacuuu

SEQ ID NO: 2423522 - RNA, 19 nt, Artificial Sequence
  Description of Artificial Sequence: Synthetic oligonucleotide
  Sense strand starting at position 1297 of SEQ ID NO: 1886729
aacaaauacgugugucgaa

SEQ ID NO: 2423523 - RNA, 19 nt, Artificial Sequence
  Description of Artificial Sequence: Synthetic oligonucleotide
  Antisense strand to SEQ ID NO: 2423522
uucgacacacguauuuguu

SEQ ID NO: 2423524 - RNA, 19 nt, Artificial Sequence
  Description of Artificial Sequence: Synthetic oligonucleotide
  Sense strand starting at position 1298 of SEQ ID NO: 1886729
acaaauacgugugucgaaa

SEQ ID NO: 2423525 - RNA, 19 nt, Artificial Sequence
  Description of Artificial Sequence: Synthetic oligonucleotide
  Antisense strand to SEQ ID NO: 2423524
uuucgacacacguauuugu

SEQ ID NO: 2423526 - RNA, 19 nt, Artificial Sequence
  Description of Artificial Sequence: Synthetic oligonucleotide
  Sense strand starting at position 1360 of SEQ ID NO: 1886729
ugacaacguucggcugaua

SEQ ID NO: 2423527 - RNA, 19 nt, Artificial Sequence
  Description of Artificial Sequence: Synthetic oligonucleotide
  Antisense strand to SEQ ID NO: 2423526
uaucagccgaacguuguca

SEQ ID NO: 2423528 - RNA, 19 nt, Artificial Sequence
  Description of Artificial Sequence: Synthetic oligonucleotide
  Sense strand starting at position 1381 of SEQ ID NO: 1886729
ccacauagcccagggaaau

SEQ ID NO: 2423529 - RNA, 19 nt, Artificial Sequence
  Description of Artificial Sequence: Synthetic oligonucleotide
  Antisense strand to SEQ ID NO: 2423528
auuucccugggcuaugugg

SEQ ID NO: 2423530 - RNA, 19 nt, Artificial Sequence
  Description of Artificial Sequence: Synthetic oligonucleotide
  Sense strand starting at position 1573 of SEQ ID NO: 1886729
agcucauuucugugaacgu

SEQ ID NO: 2423531 - RNA, 19 nt, Artificial Sequence
  Description of Artificial Sequence: Synthetic oligonucleotide
  Antisense strand to SEQ ID NO: 2423530
acguucacagaaaugagcu

SEQ ID NO: 2423532 - RNA, 19 nt, Artificial Sequence
  Description of Artificial Sequence: Synthetic oligonucleotide
  Sense strand starting at position 1580 of SEQ ID NO: 1886729
uucugugaacgugagauga

SEQ ID NO: 2423533 - RNA, 19 nt, Artificial Sequence
  Description of Artificial Sequence: Synthetic oligonucleotide
  Antisense strand to SEQ ID NO: 2423532
ucaucucacguucacagaa

SEQ ID NO: 2423534 - RNA, 19 nt, Artificial Sequence
  Description of Artificial Sequence: Synthetic oligonucleotide
  Sense strand starting at position 2002 of SEQ ID NO: 1886729
ugguguuccaagcauagga

SEQ ID NO: 2423535 - RNA, 19 nt, Artificial Sequence
  Description of Artificial Sequence: Synthetic oligonucleotide
  Antisense strand to SEQ ID NO: 2423534
uccuaugcuuggaacacca

SEQ ID NO: 2423536 - RNA, 19 nt, Artificial Sequence
  Description of Artificial Sequence: Synthetic oligonucleotide
  Sense strand starting at position 2004 of SEQ ID NO: 1886729
guguuccaagcauaggaaa

SEQ ID NO: 2423537 - RNA, 19 nt, Artificial Sequence
  Description of Artificial Sequence: Synthetic oligonucleotide
  Antisense strand to SEQ ID NO: 2423536
uuuccuaugcuuggaacac

SEQ ID NO: 2423538 - RNA, 19 nt, Artificial Sequence
  Description of Artificial Sequence: Synthetic oligonucleotide
  Sense strand starting at position 2124 of SEQ ID NO: 1886729
acuguacaggccuaucaaa

SEQ ID NO: 2423539 - RNA, 19 nt, Artificial Sequence
  Description of Artificial Sequence: Synthetic oligonucleotide
  Antisense strand to SEQ ID NO: 2423538
uuugauaggccuguacagu

SEQ ID NO: 2423540 - RNA, 19 nt, Artificial Sequence
  Description of Artificial Sequence: Synthetic oligonucleotide
  Sense strand starting at position 2755 of SEQ ID NO: 1886729
gcaacauaugauggugcau

SEQ ID NO: 2423541 - RNA, 19 nt, Artificial Sequence
  Description of Artificial Sequence: Synthetic oligonucleotide
  Antisense strand to SEQ ID NO: 2423540
augcaccaucauauguugc

SEQ ID NO: 2423542 - RNA, 19 nt, Artificial Sequence
  Description of Artificial Sequence: Synthetic oligonucleotide
  Sense strand starting at position 3228 of SEQ ID NO: 1886729
gccagcaguuuguuaaaca

SEQ ID NO: 2423543 - RNA, 19 nt, Artificial Sequence
  Description of Artificial Sequence: Synthetic oligonucleotide
  Antisense strand to SEQ ID NO: 2423542
uguuuaacaaacugcuggc

SEQ ID NO: 2423544 - RNA, 19 nt, Artificial Sequence
  Description of Artificial Sequence: Synthetic oligonucleotide
  Sense strand starting at position 3283 of SEQ ID NO: 1886729
guaacugucuuuccugagu

SEQ ID NO: 2423545 - RNA, 19 nt, Artificial Sequence
  Description of Artificial Sequence: Synthetic oligonucleotide
  Antisense strand to SEQ ID NO: 2423544
acucaggaaagacaguuac

SEQ ID NO: 2423546 - RNA, 19 nt, Artificial Sequence
  Description of Artificial Sequence: Synthetic oligonucleotide
  Sense strand starting at position 3316 of SEQ ID NO: 1886729
uacugaguuccuugggaau

SEQ ID NO: 2423547 - RNA, 19 nt, Artificial Sequence
  Description of Artificial Sequence: Synthetic oligonucleotide
  Antisense strand to SEQ ID NO: 2423546
auucccaaggaacucagua

SEQ ID NO: 2423548 - RNA, 19 nt, Artificial Sequence
  Description of Artificial Sequence: Synthetic oligonucleotide
  Sense strand starting at position 3322 of SEQ ID NO: 1886729
guuccuugggaauguugga

SEQ ID NO: 2423549 - RNA, 19 nt, Artificial Sequence
  Description of Artificial Sequence: Synthetic oligonucleotide
  Antisense strand to SEQ ID NO: 2423548
uccaacauucccaaggaac

SEQ ID NO: 2423550 - RNA, 19 nt, Artificial Sequence
  Description of Artificial Sequence: Synthetic oligonucleotide
  Sense strand starting at position 3342 of SEQ ID NO: 1886729
aggaaucaucugugucuca

SEQ ID NO: 2423551 - RNA, 19 nt, Artificial Sequence
  Description of Artificial Sequence: Synthetic oligonucleotide
  Antisense strand to SEQ ID NO: 2423550
ugagacacagaugauuccu

SEQ ID NO: 2423552 - RNA, 19 nt, Artificial Sequence
  Description of Artificial Sequence: Synthetic oligonucleotide
  Sense strand starting at position 3343 of SEQ ID NO: 1886729
ggaaucaucugugucucaa

SEQ ID NO: 2423553 - RNA, 19 nt, Artificial Sequence
  Description of Artificial Sequence: Synthetic oligonucleotide
  Antisense strand to SEQ ID NO: 2423552
uugagacacagaugauucc

SEQ ID NO: 2423554 - RNA, 19 nt, Artificial Sequence
  Description of Artificial Sequence: Synthetic oligonucleotide
  Sense strand starting at position 3534 of SEQ ID NO: 1886729
acaggaucucauugucuag

SEQ ID NO: 2423555 - RNA, 19 nt, Artificial Sequence
  Description of Artificial Sequence: Synthetic oligonucleotide
  Antisense strand to SEQ ID NO: 2423554
cuagacaaugagauccugu

SEQ ID NO: 2423556 - RNA, 19 nt, Artificial Sequence
  Description of Artificial Sequence: Synthetic oligonucleotide
  Sense strand starting at position 3678 of SEQ ID NO: 1886729
ugguaaauacgaggucuca

SEQ ID NO: 2423557 - RNA, 19 nt, Artificial Sequence
  Description of Artificial Sequence: Synthetic oligonucleotide
  Antisense strand to SEQ ID NO: 2423556
ugagaccucguauuuacca

SEQ ID NO: 2423558 - RNA, 19 nt, Artificial Sequence
  Description of Artificial Sequence: Synthetic oligonucleotide
  Sense strand starting at position 1167 of SEQ ID NO: 1886730
gugcuuuccgggaagcguu

SEQ ID NO: 2423559 - RNA, 19 nt, Artificial Sequence
  Description of Artificial Sequence: Synthetic oligonucleotide
  Antisense strand to SEQ ID NO: 2423558
aacgcuucccggaaagcac

SEQ ID NO: 2423560 - RNA, 19 nt, Artificial Sequence
  Description of Artificial Sequence: Synthetic oligonucleotide
  Sense strand starting at position 2280 of SEQ ID NO: 1886730
uggagcgugagaugagauu

SEQ ID NO: 2423561 - RNA, 19 nt, Artificial Sequence
  Description of Artificial Sequence: Synthetic oligonucleotide
  Antisense strand to SEQ ID NO: 2423560
aaucucaucucacgcucca

SEQ ID NO: 2423562 - RNA, 19 nt, Artificial Sequence
  Description of Artificial Sequence: Synthetic oligonucleotide
  Sense strand starting at position 2286 of SEQ ID NO: 1886730
gugagaugagauuguguga

SEQ ID NO: 2423563 - RNA, 19 nt, Artificial Sequence
  Description of Artificial Sequence: Synthetic oligonucleotide
  Antisense strand to SEQ ID NO: 2423562
ucacacaaucucaucucac

SEQ ID NO: 2423564 - RNA, 19 nt, Artificial Sequence
  Description of Artificial Sequence: Synthetic oligonucleotide
  Sense strand starting at position 2306 of SEQ ID NO: 1886730
uguugaugggaucgaccua

SEQ ID NO: 2423565 - RNA, 19 nt, Artificial Sequence
  Description of Artificial Sequence: Synthetic oligonucleotide
  Antisense strand to SEQ ID NO: 2423564
uaggucgaucccaucaaca

SEQ ID NO: 2423566 - RNA, 19 nt, Artificial Sequence
  Description of Artificial Sequence: Synthetic oligonucleotide
  Sense strand starting at position 2327 of SEQ ID NO: 1886730
cuggucuugggcgauggaa

SEQ ID NO: 2423567 - RNA, 19 nt, Artificial Sequence
  Description of Artificial Sequence: Synthetic oligonucleotide
  Antisense strand to SEQ ID NO: 2423566
uuccaucgcccaagaccag

SEQ ID NO: 2423568 - RNA, 19 nt, Artificial Sequence
  Description of Artificial Sequence: Synthetic oligonucleotide
  Sense strand starting at position 2564 of SEQ ID NO: 1886730
ggcagcugugccuaauuua

SEQ ID NO: 2423569 - RNA, 19 nt, Artificial Sequence
  Description of Artificial Sequence: Synthetic oligonucleotide
  Antisense strand to SEQ ID NO: 2423568
uaaauuaggcacagcugcc

SEQ ID NO: 2423570 - RNA, 19 nt, Artificial Sequence
  Description of Artificial Sequence: Synthetic oligonucleotide
  Sense strand starting at position 2567 of SEQ ID NO: 1886730
agcugugccuaauuuagga

SEQ ID NO: 2423571 - RNA, 19 nt, Artificial Sequence
  Description of Artificial Sequence: Synthetic oligonucleotide
  Antisense strand to SEQ ID NO: 2423570
uccuaaauuaggcacagcu

SEQ ID NO: 2423572 - RNA, 19 nt, Artificial Sequence
  Description of Artificial Sequence: Synthetic oligonucleotide
  Sense strand starting at position 2715 of SEQ ID NO: 1886730
ccuacuuuggagcacaauu

SEQ ID NO: 2423573 - RNA, 19 nt, Artificial Sequence
  Description of Artificial Sequence: Synthetic oligonucleotide
  Antisense strand to SEQ ID NO: 2423572
aauugugcuccaaaguagg

SEQ ID NO: 2423574 - RNA, 19 nt, Artificial Sequence
  Description of Artificial Sequence: Synthetic oligonucleotide
  Sense strand starting at position 2735 of SEQ ID NO: 1886730
uauuauaauuguccggaaa

SEQ ID NO: 2423575 - RNA, 19 nt, Artificial Sequence
  Description of Artificial Sequence: Synthetic oligonucleotide
  Antisense strand to SEQ ID NO: 2423574
uuuccggacaauuauaaua

SEQ ID NO: 2423576 - RNA, 19 nt, Artificial Sequence
  Description of Artificial Sequence: Synthetic oligonucleotide
  Sense strand starting at position 2736 of SEQ ID NO: 1886730
auuauaauuguccggaaac

SEQ ID NO: 2423577 - RNA, 19 nt, Artificial Sequence
  Description of Artificial Sequence: Synthetic oligonucleotide
  Antisense strand to SEQ ID NO: 2423576
guuuccggacaauuauaau

SEQ ID NO: 2423578 - RNA, 19 nt, Artificial Sequence
  Description of Artificial Sequence: Synthetic oligonucleotide
  Sense strand starting at position 2738 of SEQ ID NO: 1886730
uauaauuguccggaaacug

SEQ ID NO: 2423579 - RNA, 19 nt, Artificial Sequence
  Description of Artificial Sequence: Synthetic oligonucleotide
  Antisense strand to SEQ ID NO: 2423578
caguuuccggacaauuaua

SEQ ID NO: 2423580 - RNA, 19 nt, Artificial Sequence
  Description of Artificial Sequence: Synthetic oligonucleotide
  Sense strand starting at position 2746 of SEQ ID NO: 1886730
uccggaaacuggccagaua

SEQ ID NO: 2423581 - RNA, 19 nt, Artificial Sequence
  Description of Artificial Sequence: Synthetic oligonucleotide
  Antisense strand to SEQ ID NO: 2423580
uaucuggccaguuuccgga

SEQ ID NO: 2423582 - RNA, 19 nt, Artificial Sequence
  Description of Artificial Sequence: Synthetic oligonucleotide
  Sense strand starting at position 2815 of SEQ ID NO: 1886730
auguaauuccagcaguauu

SEQ ID NO: 2423583 - RNA, 19 nt, Artificial Sequence
  Description of Artificial Sequence: Synthetic oligonucleotide
  Antisense strand to SEQ ID NO: 2423582
aauacugcuggaauuacau

SEQ ID NO: 2423584 - RNA, 19 nt, Artificial Sequence
  Description of Artificial Sequence: Synthetic oligonucleotide
  Sense strand starting at position 2854 of SEQ ID NO: 1886730
guuagaauguaacauuuga

SEQ ID NO: 2423585 - RNA, 19 nt, Artificial Sequence
  Description of Artificial Sequence: Synthetic oligonucleotide
  Antisense strand to SEQ ID NO: 2423584
ucaaauguuacauucuaac

SEQ ID NO: 2423586 - RNA, 19 nt, Artificial Sequence
  Description of Artificial Sequence: Synthetic oligonucleotide
  Sense strand starting at position 2868 of SEQ ID NO: 1886730
uuugaagacuuguuagaaa

SEQ ID NO: 2423587 - RNA, 19 nt, Artificial Sequence
  Description of Artificial Sequence: Synthetic oligonucleotide
  Antisense strand to SEQ ID NO: 2423586
uuucuaacaagucuucaaa

SEQ ID NO: 2423588 - RNA, 19 nt, Artificial Sequence
  Description of Artificial Sequence: Synthetic oligonucleotide
  Sense strand starting at position 2966 of SEQ ID NO: 1886730
uguugagaauugguguaua

SEQ ID NO: 2423589 - RNA, 19 nt, Artificial Sequence
  Description of Artificial Sequence: Synthetic oligonucleotide
  Antisense strand to SEQ ID NO: 2423588
uauacaccaauucucaaca

SEQ ID NO: 2423590 - RNA, 19 nt, Artificial Sequence
  Description of Artificial Sequence: Synthetic oligonucleotide
  Sense strand starting at position 3002 of SEQ ID NO: 1886730
uaauuagugccugagucua

SEQ ID NO: 2423591 - RNA, 19 nt, Artificial Sequence
  Description of Artificial Sequence: Synthetic oligonucleotide
  Antisense strand to SEQ ID NO: 2423590
uagacucaggcacuaauua

SEQ ID NO: 2423592 - RNA, 19 nt, Artificial Sequence
  Description of Artificial Sequence: Synthetic oligonucleotide
  Sense strand starting at position 3007 of SEQ ID NO: 1886730
agugccugagucuagaauu

SEQ ID NO: 2423593 - RNA, 19 nt, Artificial Sequence
  Description of Artificial Sequence: Synthetic oligonucleotide
  Antisense strand to SEQ ID NO: 2423592
aauucuagacucaggcacu

SEQ ID NO: 2423594 - RNA, 19 nt, Artificial Sequence
  Description of Artificial Sequence: Synthetic oligonucleotide
  Sense strand starting at position 3018 of SEQ ID NO: 1886730
cuagaauugagauguuuag

SEQ ID NO: 2423595 - RNA, 19 nt, Artificial Sequence
  Description of Artificial Sequence: Synthetic oligonucleotide
  Antisense strand to SEQ ID NO: 2423594
cuaaacaucucaauucuag

SEQ ID NO: 2423596 - RNA, 19 nt, Artificial Sequence
  Description of Artificial Sequence: Synthetic oligonucleotide
  Sense strand starting at position 3022 of SEQ ID NO: 1886730
aauugagauguuuagucgu

SEQ ID NO: 2423597 - RNA, 19 nt, Artificial Sequence
  Description of Artificial Sequence: Synthetic oligonucleotide
  Antisense strand to SEQ ID NO: 2423596
acgacuaaacaucucaauu

SEQ ID NO: 2423598 - RNA, 19 nt, Artificial Sequence
  Description of Artificial Sequence: Synthetic oligonucleotide
  Sense strand starting at position 3096 of SEQ ID NO: 1886730
uugugagugcuuuaaauaa

SEQ ID NO: 2423599 - RNA, 19 nt, Artificial Sequence
  Description of Artificial Sequence: Synthetic oligonucleotide
  Antisense strand to SEQ ID NO: 2423598
uuauuuaaagcacucacaa

SEQ ID NO: 2423600 - RNA, 19 nt, Artificial Sequence
  Description of Artificial Sequence: Synthetic oligonucleotide
  Sense strand starting at position 3206 of SEQ ID NO: 1886730
aacaaauuaggugguaaau

SEQ ID NO: 2423601 - RNA, 19 nt, Artificial Sequence
  Description of Artificial Sequence: Synthetic oligonucleotide
  Antisense strand to SEQ ID NO: 2423600
auuuaccaccuaauuuguu

SEQ ID NO: 2423602 - RNA, 19 nt, Artificial Sequence
  Description of Artificial Sequence: Synthetic oligonucleotide
  Sense strand starting at position 3212 of SEQ ID NO: 1886730
uuaggugguaaaugaauga

SEQ ID NO: 2423603 - RNA, 19 nt, Artificial Sequence
  Description of Artificial Sequence: Synthetic oligonucleotide
  Antisense strand to SEQ ID NO: 2423602
ucauucauuuaccaccuaa

SEQ ID NO: 2423604 - RNA, 19 nt, Artificial Sequence
  Description of Artificial Sequence: Synthetic oligonucleotide
  Sense strand starting at position 3216 of SEQ ID NO: 1886730
gugguaaaugaaugacaau

SEQ ID NO: 2423605 - RNA, 19 nt, Artificial Sequence
  Description of Artificial Sequence: Synthetic oligonucleotide
  Antisense strand to SEQ ID NO: 2423604
auugucauucauuuaccac

SEQ ID NO: 2423606 - RNA, 19 nt, Artificial Sequence
  Description of Artificial Sequence: Synthetic oligonucleotide
  Sense strand starting at position 3253 of SEQ ID NO: 1886730
caguauugugaucaguaua

SEQ ID NO: 2423607 - RNA, 19 nt, Artificial Sequence
  Description of Artificial Sequence: Synthetic oligonucleotide
  Antisense strand to SEQ ID NO: 2423606
uauacugaucacaauacug

SEQ ID NO: 2423608 - RNA, 19 nt, Artificial Sequence
  Description of Artificial Sequence: Synthetic oligonucleotide
  Sense strand starting at position 3256 of SEQ ID NO: 1886730
uauugugaucaguauaagu

SEQ ID NO: 2423609 - RNA, 19 nt, Artificial Sequence
  Description of Artificial Sequence: Synthetic oligonucleotide
  Antisense strand to SEQ ID NO: 2423608
acuuauacugaucacaaua

SEQ ID NO: 2423610 - RNA, 19 nt, Artificial Sequence
  Description of Artificial Sequence: Synthetic oligonucleotide
  Sense strand starting at position 3258 of SEQ ID NO: 1886730
uugugaucaguauaaguau

SEQ ID NO: 2423611 - RNA, 19 nt, Artificial Sequence
  Description of Artificial Sequence: Synthetic oligonucleotide
  Antisense strand to SEQ ID NO: 2423610
auacuuauacugaucacaa

SEQ ID NO: 2423612 - RNA, 19 nt, Artificial Sequence
  Description of Artificial Sequence: Synthetic oligonucleotide
  Sense strand starting at position 3436 of SEQ ID NO: 1886730
agccaaauggcuuauguag

SEQ ID NO: 2423613 - RNA, 19 nt, Artificial Sequence
  Description of Artificial Sequence: Synthetic oligonucleotide
  Antisense strand to SEQ ID NO: 2423612
cuacauaagccauuuggcu

SEQ ID NO: 2423614 - RNA, 19 nt, Artificial Sequence
  Description of Artificial Sequence: Synthetic oligonucleotide
  Sense strand starting at position 3444 of SEQ ID NO: 1886730
ggcuuauguaguuauggaa

SEQ ID NO: 2423615 - RNA, 19 nt, Artificial Sequence
  Description of Artificial Sequence: Synthetic oligonucleotide
  Antisense strand to SEQ ID NO: 2423614
uuccauaacuacauaagcc

SEQ ID NO: 2423616 - RNA, 19 nt, Artificial Sequence
  Description of Artificial Sequence: Synthetic oligonucleotide
  Sense strand starting at position 3451 of SEQ ID NO: 1886730
guaguuauggaauauguac

SEQ ID NO: 2423617 - RNA, 19 nt, Artificial Sequence
  Description of Artificial Sequence: Synthetic oligonucleotide
  Antisense strand to SEQ ID NO: 2423616
guacauauuccauaacuac

SEQ ID NO: 2423618 - RNA, 19 nt, Artificial Sequence
  Description of Artificial Sequence: Synthetic oligonucleotide
  Sense strand starting at position 3459 of SEQ ID NO: 1886730
ggaauauguacaugagcua

SEQ ID NO: 2423619 - RNA, 19 nt, Artificial Sequence
  Description of Artificial Sequence: Synthetic oligonucleotide
  Antisense strand to SEQ ID NO: 2423618
uagcucauguacauauucc

SEQ ID NO: 2423620 - RNA, 19 nt, Artificial Sequence
  Description of Artificial Sequence: Synthetic oligonucleotide
  Sense strand starting at position 3460 of SEQ ID NO: 1886730
gaauauguacaugagcuau

SEQ ID NO: 2423621 - RNA, 19 nt, Artificial Sequence
  Description of Artificial Sequence: Synthetic oligonucleotide
  Antisense strand to SEQ ID NO: 2423620
auagcucauguacauauuc

SEQ ID NO: 2423622 - RNA, 19 nt, Artificial Sequence
  Description of Artificial Sequence: Synthetic oligonucleotide
  Sense strand starting at position 3462 of SEQ ID NO: 1886730
auauguacaugagcuauua

SEQ ID NO: 2423623 - RNA, 19 nt, Artificial Sequence
  Description of Artificial Sequence: Synthetic oligonucleotide
  Antisense strand to SEQ ID NO: 2423622
uaauagcucauguacauau

SEQ ID NO: 2423624 - RNA, 19 nt, Artificial Sequence
  Description of Artificial Sequence: Synthetic oligonucleotide
  Sense strand starting at position 3663 of SEQ ID NO: 1886730
aguaacaguuuguuaggau

SEQ ID NO: 2423625 - RNA, 19 nt, Artificial Sequence
  Description of Artificial Sequence: Synthetic oligonucleotide
  Antisense strand to SEQ ID NO: 2423624
auccuaacaaacuguuacu

SEQ ID NO: 2423626 - RNA, 19 nt, Artificial Sequence
  Description of Artificial Sequence: Synthetic oligonucleotide
  Sense strand starting at position 3702 of SEQ ID NO: 1886730
uccuguuguagagggaaca

SEQ ID NO: 2423627 - RNA, 19 nt, Artificial Sequence
  Description of Artificial Sequence: Synthetic oligonucleotide
  Antisense strand to SEQ ID NO: 2423626
uguucccucuacaacagga

SEQ ID NO: 2423628 - RNA, 19 nt, Artificial Sequence
  Description of Artificial Sequence: Synthetic oligonucleotide
  Sense strand starting at position 3769 of SEQ ID NO: 1886730
ugucauagcugauuuguua

SEQ ID NO: 2423629 - RNA, 19 nt, Artificial Sequence
  Description of Artificial Sequence: Synthetic oligonucleotide
  Antisense strand to SEQ ID NO: 2423628
uaacaaaucagcuaugaca

SEQ ID NO: 2423630 - RNA, 19 nt, Artificial Sequence
  Description of Artificial Sequence: Synthetic oligonucleotide
  Sense strand starting at position 3773 of SEQ ID NO: 1886730
auagcugauuuguuaguca

SEQ ID NO: 2423631 - RNA, 19 nt, Artificial Sequence
  Description of Artificial Sequence: Synthetic oligonucleotide
  Antisense strand to SEQ ID NO: 2423630
ugacuaacaaaucagcuau

SEQ ID NO: 2423632 - RNA, 19 nt, Artificial Sequence
  Description of Artificial Sequence: Synthetic oligonucleotide
  Sense strand starting at position 3776 of SEQ ID NO: 1886730
gcugauuuguuagucaaua

SEQ ID NO: 2423633 - RNA, 19 nt, Artificial Sequence
  Description of Artificial Sequence: Synthetic oligonucleotide
  Antisense strand to SEQ ID NO: 2423632
uauugacuaacaaaucagc

SEQ ID NO: 2423634 - RNA, 19 nt, Artificial Sequence
  Description of Artificial Sequence: Synthetic oligonucleotide
  Sense strand starting at position 3832 of SEQ ID NO: 1886730
uuaguuaaauuugagguga

SEQ ID NO: 2423635 - RNA, 19 nt, Artificial Sequence
  Description of Artificial Sequence: Synthetic oligonucleotide
  Antisense strand to SEQ ID NO: 2423634
ucaccucaaauuuaacuaa

SEQ ID NO: 2423636 - RNA, 19 nt, Artificial Sequence
  Description of Artificial Sequence: Synthetic oligonucleotide
  Sense strand starting at position 3911 of SEQ ID NO: 1886730
uugcuucuugcuuaaauga

SEQ ID NO: 2423637 - RNA, 19 nt, Artificial Sequence
  Description of Artificial Sequence: Synthetic oligonucleotide
  Antisense strand to SEQ ID NO: 2423636
ucauuuaagcaagaagcaa

SEQ ID NO: 2423638 - RNA, 19 nt, Artificial Sequence
  Description of Artificial Sequence: Synthetic oligonucleotide
  Sense strand starting at position 47 of SEQ ID NO: 1886731
uuucuaguagccugaggua

SEQ ID NO: 2423639 - RNA, 19 nt, Artificial Sequence
  Description of Artificial Sequence: Synthetic oligonucleotide
  Antisense strand to SEQ ID NO: 2423638
uaccucaggcuacuagaaa

SEQ ID NO: 2423640 - RNA, 19 nt, Artificial Sequence
  Description of Artificial Sequence: Synthetic oligonucleotide
  Sense strand starting at position 59 of SEQ ID NO: 1886731
ugagguaguguuggagaca

SEQ ID NO: 2423641 - RNA, 19 nt, Artificial Sequence
  Description of Artificial Sequence: Synthetic oligonucleotide
  Antisense strand to SEQ ID NO: 2423640
ugucuccaacacuaccuca

SEQ ID NO: 2423642 - RNA, 19 nt, Artificial Sequence
  Description of Artificial Sequence: Synthetic oligonucleotide
  Sense strand starting at position 62 of SEQ ID NO: 1886731
gguaguguuggagacaguu

SEQ ID NO: 2423643 - RNA, 19 nt, Artificial Sequence
  Description of Artificial Sequence: Synthetic oligonucleotide
  Antisense strand to SEQ ID NO: 2423642
aacugucuccaacacuacc

SEQ ID NO: 2423644 - RNA, 19 nt, Artificial Sequence
  Description of Artificial Sequence: Synthetic oligonucleotide
  Sense strand starting at position 143 of SEQ ID NO: 1886731
acaguaauaguaggaccua

SEQ ID NO: 2423645 - RNA, 19 nt, Artificial Sequence
  Description of Artificial Sequence: Synthetic oligonucleotide
  Antisense strand to SEQ ID NO: 2423644
uagguccuacuauuacugu

SEQ ID NO: 2423646 - RNA, 19 nt, Artificial Sequence
  Description of Artificial Sequence: Synthetic oligonucleotide
  Sense strand starting at position 421 of SEQ ID NO: 1886731
gcugcucaccuuugaacaa

SEQ ID NO: 2423647 - RNA, 19 nt, Artificial Sequence
  Description of Artificial Sequence: Synthetic oligonucleotide
  Antisense strand to SEQ ID NO: 2423646
uuguucaaaggugagcagc

SEQ ID NO: 2423648 - RNA, 19 nt, Artificial Sequence
  Description of Artificial Sequence: Synthetic oligonucleotide
  Sense strand starting at position 722 of SEQ ID NO: 1886731
cuggguucaguguguugaa

SEQ ID NO: 2423649 - RNA, 19 nt, Artificial Sequence
  Description of Artificial Sequence: Synthetic oligonucleotide
  Antisense strand to SEQ ID NO: 2423648
uucaacacacugaacccag

SEQ ID NO: 2423650 - RNA, 19 nt, Artificial Sequence
  Description of Artificial Sequence: Synthetic oligonucleotide
  Sense strand starting at position 725 of SEQ ID NO: 1886731
gguucaguguguugaagag

SEQ ID NO: 2423651 - RNA, 19 nt, Artificial Sequence
  Description of Artificial Sequence: Synthetic oligonucleotide
  Antisense strand to SEQ ID NO: 2423650
cucuucaacacacugaacc

SEQ ID NO: 2423652 - RNA, 19 nt, Artificial Sequence
  Description of Artificial Sequence: Synthetic oligonucleotide
  Sense strand starting at position 731 of SEQ ID NO: 1886731
guguguugaagaggugcua

SEQ ID NO: 2423653 - RNA, 19 nt, Artificial Sequence
  Description of Artificial Sequence: Synthetic oligonucleotide
  Antisense strand to SEQ ID NO: 2423652
uagcaccucuucaacacac

SEQ ID NO: 2423654 - RNA, 19 nt, Artificial Sequence
  Description of Artificial Sequence: Synthetic oligonucleotide
  Sense strand starting at position 836 of SEQ ID NO: 1886731
gggugauggccauggagga

SEQ ID NO: 2423655 - RNA, 19 nt, Artificial Sequence
  Description of Artificial Sequence: Synthetic oligonucleotide
  Antisense strand to SEQ ID NO: 2423654
uccuccauggccaucaccc

SEQ ID NO: 2423656 - RNA, 19 nt, Artificial Sequence
  Description of Artificial Sequence: Synthetic oligonucleotide
  Sense strand starting at position 1150 of SEQ ID NO: 1886731
ucaggcucuacaggagaua

SEQ ID NO: 2423657 - RNA, 19 nt, Artificial Sequence
  Description of Artificial Sequence: Synthetic oligonucleotide
  Antisense strand to SEQ ID NO: 2423656
uaucuccuguagagccuga

SEQ ID NO: 2423658 - RNA, 19 nt, Artificial Sequence
  Description of Artificial Sequence: Synthetic oligonucleotide
  Sense strand starting at position 1353 of SEQ ID NO: 1886731
ucuccuaacuuugggcaaa

SEQ ID NO: 2423659 - RNA, 19 nt, Artificial Sequence
  Description of Artificial Sequence: Synthetic oligonucleotide
  Antisense strand to SEQ ID NO: 2423658
uuugcccaaaguuaggaga

SEQ ID NO: 2423660 - RNA, 19 nt, Artificial Sequence
  Description of Artificial Sequence: Synthetic oligonucleotide
  Sense strand starting at position 1466 of SEQ ID NO: 1886731
ugcccaucgcucuugcuaa

SEQ ID NO: 2423661 - RNA, 19 nt, Artificial Sequence
  Description of Artificial Sequence: Synthetic oligonucleotide
  Antisense strand to SEQ ID NO: 2423660
uuagcaagagcgaugggca

SEQ ID NO: 2423662 - RNA, 19 nt, Artificial Sequence
  Description of Artificial Sequence: Synthetic oligonucleotide
  Sense strand starting at position 1580 of SEQ ID NO: 1886731
ucagguacccaguguucca

SEQ ID NO: 2423663 - RNA, 19 nt, Artificial Sequence
  Description of Artificial Sequence: Synthetic oligonucleotide
  Antisense strand to SEQ ID NO: 2423662
uggaacacuggguaccuga

SEQ ID NO: 2423664 - RNA, 19 nt, Artificial Sequence
  Description of Artificial Sequence: Synthetic oligonucleotide
  Sense strand starting at position 1759 of SEQ ID NO: 1886731
gcuccuuaccucgaggaga

SEQ ID NO: 2423665 - RNA, 19 nt, Artificial Sequence
  Description of Artificial Sequence: Synthetic oligonucleotide
  Antisense strand to SEQ ID NO: 2423664
ucuccucgagguaaggagc

SEQ ID NO: 2423666 - RNA, 19 nt, Artificial Sequence
  Description of Artificial Sequence: Synthetic oligonucleotide
  Sense strand starting at position 2096 of SEQ ID NO: 1886731
ccgccauucuuguagcaca

SEQ ID NO: 2423667 - RNA, 19 nt, Artificial Sequence
  Description of Artificial Sequence: Synthetic oligonucleotide
  Antisense strand to SEQ ID NO: 2423666
ugugcuacaagaauggcgg

SEQ ID NO: 2423668 - RNA, 19 nt, Artificial Sequence
  Description of Artificial Sequence: Synthetic oligonucleotide
  Sense strand starting at position 2556 of SEQ ID NO: 1886731
ccacgaagcacuugaaagu

SEQ ID NO: 2423669 - RNA, 19 nt, Artificial Sequence
  Description of Artificial Sequence: Synthetic oligonucleotide
  Antisense strand to SEQ ID NO: 2423668
acuuucaagugcuucgugg

SEQ ID NO: 2423670 - RNA, 19 nt, Artificial Sequence
  Description of Artificial Sequence: Synthetic oligonucleotide
  Sense strand starting at position 2578 of SEQ ID NO: 1886731
ccugaagaaucuccugugu

SEQ ID NO: 2423671 - RNA, 19 nt, Artificial Sequence
  Description of Artificial Sequence: Synthetic oligonucleotide
  Antisense strand to SEQ ID NO: 2423670
acacaggagauucuucagg

SEQ ID NO: 2423672 - RNA, 19 nt, Artificial Sequence
  Description of Artificial Sequence: Synthetic oligonucleotide
  Sense strand starting at position 2580 of SEQ ID NO: 1886731
ugaagaaucuccugugugu

SEQ ID NO: 2423673 - RNA, 19 nt, Artificial Sequence
  Description of Artificial Sequence: Synthetic oligonucleotide
  Antisense strand to SEQ ID NO: 2423672
acacacaggagauucuuca

SEQ ID NO: 2423674 - RNA, 19 nt, Artificial Sequence
  Description of Artificial Sequence: Synthetic oligonucleotide
  Sense strand starting at position 2582 of SEQ ID NO: 1886731
aagaaucuccuguguguca

SEQ ID NO: 2423675 - RNA, 19 nt, Artificial Sequence
  Description of Artificial Sequence: Synthetic oligonucleotide
  Antisense strand to SEQ ID NO: 2423674
ugacacacaggagauucuu

SEQ ID NO: 2423676 - RNA, 19 nt, Artificial Sequence
  Description of Artificial Sequence: Synthetic oligonucleotide
  Sense strand starting at position 3490 of SEQ ID NO: 1886731
cugccugacugaugagcaa

SEQ ID NO: 2423677 - RNA, 19 nt, Artificial Sequence
  Description of Artificial Sequence: Synthetic oligonucleotide
  Antisense strand to SEQ ID NO: 2423676
uugcucaucagucaggcag

SEQ ID NO: 2423678 - RNA, 19 nt, Artificial Sequence
  Description of Artificial Sequence: Synthetic oligonucleotide
  Sense strand starting at position 3513 of SEQ ID NO: 1886731
ccacuuugucaccaaggca

SEQ ID NO: 2423679 - RNA, 19 nt, Artificial Sequence
  Description of Artificial Sequence: Synthetic oligonucleotide
  Antisense strand to SEQ ID NO: 2423678
ugccuuggugacaaagugg

SEQ ID NO: 2423680 - RNA, 19 nt, Artificial Sequence
  Description of Artificial Sequence: Synthetic oligonucleotide
  Sense strand starting at position 3795 of SEQ ID NO: 1886731
cugagcagcuugguuagaa

SEQ ID NO: 2423681 - RNA, 19 nt, Artificial Sequence
  Description of Artificial Sequence: Synthetic oligonucleotide
  Antisense strand to SEQ ID NO: 2423680
uucuaaccaagcugcucag

SEQ ID NO: 2423682 - RNA, 19 nt, Artificial Sequence
  Description of Artificial Sequence: Synthetic oligonucleotide
  Sense strand starting at position 3796 of SEQ ID NO: 1886731
ugagcagcuugguuagaau

SEQ ID NO: 2423683 - RNA, 19 nt, Artificial Sequence
  Description of Artificial Sequence: Synthetic oligonucleotide
  Antisense strand to SEQ ID NO: 2423682
auucuaaccaagcugcuca

SEQ ID NO: 2423684 - RNA, 19 nt, Artificial Sequence
  Description of Artificial Sequence: Synthetic oligonucleotide
  Sense strand starting at position 3913 of SEQ ID NO: 1886731
ugaucugaucguggacacu

SEQ ID NO: 2423685 - RNA, 19 nt, Artificial Sequence
  Description of Artificial Sequence: Synthetic oligonucleotide
  Antisense strand to SEQ ID NO: 2423684
aguguccacgaucagauca

SEQ ID NO: 2423686 - RNA, 19 nt, Artificial Sequence
  Description of Artificial Sequence: Synthetic oligonucleotide
  Sense strand starting at position 3944 of SEQ ID NO: 1886731
uggcucaucccguuaagcu

SEQ ID NO: 2423687 - RNA, 19 nt, Artificial Sequence
  Description of Artificial Sequence: Synthetic oligonucleotide
  Antisense strand to SEQ ID NO: 2423686
agcuuaacgggaugagcca

SEQ ID NO: 2423688 - RNA, 19 nt, Artificial Sequence
  Description of Artificial Sequence: Synthetic oligonucleotide
  Sense strand starting at position 3945 of SEQ ID NO: 1886731
ggcucaucccguuaagcua

SEQ ID NO: 2423689 - RNA, 19 nt, Artificial Sequence
  Description of Artificial Sequence: Synthetic oligonucleotide
  Antisense strand to SEQ ID NO: 2423688
uagcuuaacgggaugagcc

SEQ ID NO: 2423690 - RNA, 19 nt, Artificial Sequence
  Description of Artificial Sequence: Synthetic oligonucleotide
  Sense strand starting at position 286 of SEQ ID NO: 1886732
ugguaucugguacaaguga

SEQ ID NO: 2423691 - RNA, 19 nt, Artificial Sequence
  Description of Artificial Sequence: Synthetic oligonucleotide
  Antisense strand to SEQ ID NO: 2423690
ucacuuguaccagauacca

SEQ ID NO: 2423692 - RNA, 19 nt, Artificial Sequence
  Description of Artificial Sequence: Synthetic oligonucleotide
  Sense strand starting at position 1201 of SEQ ID NO: 1886732
aguguaaacgaaugaauga

SEQ ID NO: 2423693 - RNA, 19 nt, Artificial Sequence
  Description of Artificial Sequence: Synthetic oligonucleotide
  Antisense strand to SEQ ID NO: 2423692
ucauucauucguuuacacu

SEQ ID NO: 2423694 - RNA, 19 nt, Artificial Sequence
  Description of Artificial Sequence: Synthetic oligonucleotide
  Sense strand starting at position 1761 of SEQ ID NO: 1886732
cguugaguagcgugauguu

SEQ ID NO: 2423695 - RNA, 19 nt, Artificial Sequence
  Description of Artificial Sequence: Synthetic oligonucleotide
  Antisense strand to SEQ ID NO: 2423694
aacaucacgcuacucaacg

SEQ ID NO: 2423696 - RNA, 19 nt, Artificial Sequence
  Description of Artificial Sequence: Synthetic oligonucleotide
  Sense strand starting at position 3061 of SEQ ID NO: 1886732
uaacgaguccuuggaagcu

SEQ ID NO: 2423697 - RNA, 19 nt, Artificial Sequence
  Description of Artificial Sequence: Synthetic oligonucleotide
  Antisense strand to SEQ ID NO: 2423696
agcuuccaaggacucguua

SEQ ID NO: 2423698 - RNA, 19 nt, Artificial Sequence
  Description of Artificial Sequence: Synthetic oligonucleotide
  Sense strand starting at position 3243 of SEQ ID NO: 1886732
gggucagaaucccugucau

SEQ ID NO: 2423699 - RNA, 19 nt, Artificial Sequence
  Description of Artificial Sequence: Synthetic oligonucleotide
  Antisense strand to SEQ ID NO: 2423698
augacagggauucugaccc

SEQ ID NO: 2423700 - RNA, 19 nt, Artificial Sequence
  Description of Artificial Sequence: Synthetic oligonucleotide
  Sense strand starting at position 3372 of SEQ ID NO: 1886732
gggcauuccucugcaguga

SEQ ID NO: 2423701 - RNA, 19 nt, Artificial Sequence
  Description of Artificial Sequence: Synthetic oligonucleotide
  Antisense strand to SEQ ID NO: 2423700
ucacugcagaggaaugccc

SEQ ID NO: 2423702 - RNA, 19 nt, Artificial Sequence
  Description of Artificial Sequence: Synthetic oligonucleotide
  Sense strand starting at position 3654 of SEQ ID NO: 1886732
uagagauuguagggccaga

SEQ ID NO: 2423703 - RNA, 19 nt, Artificial Sequence
  Description of Artificial Sequence: Synthetic oligonucleotide
  Antisense strand to SEQ ID NO: 2423702
ucuggcccuacaaucucua

SEQ ID NO: 2423704 - RNA, 19 nt, Artificial Sequence
  Description of Artificial Sequence: Synthetic oligonucleotide
  Sense strand starting at position 1228 of SEQ ID NO: 1886733
cuugguuucugggaccaau

SEQ ID NO: 2423705 - RNA, 19 nt, Artificial Sequence
  Description of Artificial Sequence: Synthetic oligonucleotide
  Antisense strand to SEQ ID NO: 2423704
auuggucccagaaaccaag

SEQ ID NO: 2423706 - RNA, 19 nt, Artificial Sequence
  Description of Artificial Sequence: Synthetic oligonucleotide
  Sense strand starting at position 1759 of SEQ ID NO: 1886733
ccuugaguagcgugauguu

SEQ ID NO: 2423707 - RNA, 19 nt, Artificial Sequence
  Description of Artificial Sequence: Synthetic oligonucleotide
  Antisense strand to SEQ ID NO: 2423706
aacaucacgcuacucaagg

SEQ ID NO: 2423708 - RNA, 19 nt, Artificial Sequence
  Description of Artificial Sequence: Synthetic oligonucleotide
  Sense strand starting at position 2774 of SEQ ID NO: 1886733
ccaaaucuagcugggaaau

SEQ ID NO: 2423709 - RNA, 19 nt, Artificial Sequence
  Description of Artificial Sequence: Synthetic oligonucleotide
  Antisense strand to SEQ ID NO: 2423708
auuucccagcuagauuugg

SEQ ID NO: 2423710 - RNA, 19 nt, Artificial Sequence
  Description of Artificial Sequence: Synthetic oligonucleotide
  Sense strand starting at position 3058 of SEQ ID NO: 1886733
guguguccuaacgaguacu

SEQ ID NO: 2423711 - RNA, 19 nt, Artificial Sequence
  Description of Artificial Sequence: Synthetic oligonucleotide
  Antisense strand to SEQ ID NO: 2423710
aguacucguuaggacacac

SEQ ID NO: 2423712 - RNA, 19 nt, Artificial Sequence
  Description of Artificial Sequence: Synthetic oligonucleotide
  Sense strand starting at position 3377 of SEQ ID NO: 1886733
aggcauuccucugcaguga

SEQ ID NO: 2423713 - RNA, 19 nt, Artificial Sequence
  Description of Artificial Sequence: Synthetic oligonucleotide
  Antisense strand to SEQ ID NO: 2423712
ucacugcagaggaaugccu

SEQ ID NO: 2423714 - RNA, 19 nt, Artificial Sequence
  Description of Artificial Sequence: Synthetic oligonucleotide
  Sense strand starting at position 3447 of SEQ ID NO: 1886733
ggaggucgcacagauacua

SEQ ID NO: 2423715 - RNA, 19 nt, Artificial Sequence
  Description of Artificial Sequence: Synthetic oligonucleotide
  Antisense strand to SEQ ID NO: 2423714
uaguaucugugcgaccucc

SEQ ID NO: 2423716 - RNA, 19 nt, Artificial Sequence
  Description of Artificial Sequence: Synthetic oligonucleotide
  Sense strand starting at position 3649 of SEQ ID NO: 1886733
ggagcaagguuagagauua

SEQ ID NO: 2423717 - RNA, 19 nt, Artificial Sequence
  Description of Artificial Sequence: Synthetic oligonucleotide
  Antisense strand to SEQ ID NO: 2423716
uaaucucuaaccuugcucc

SEQ ID NO: 2423718 - RNA, 19 nt, Artificial Sequence
  Description of Artificial Sequence: Synthetic oligonucleotide
  Sense strand starting at position 3659 of SEQ ID NO: 1886733
uagagauuauagggccaga

SEQ ID NO: 2423719 - RNA, 19 nt, Artificial Sequence
  Description of Artificial Sequence: Synthetic oligonucleotide
  Antisense strand to SEQ ID NO: 2423718
ucuggcccuauaaucucua

SEQ ID NO: 2423720 - RNA, 19 nt, Artificial Sequence
  Description of Artificial Sequence: Synthetic oligonucleotide
  Sense strand starting at position 140 of SEQ ID NO: 1886738
gcaugucaaucauaggaaa

SEQ ID NO: 2423721 - RNA, 19 nt, Artificial Sequence
  Description of Artificial Sequence: Synthetic oligonucleotide
  Antisense strand to SEQ ID NO: 2423720
uuuccuaugauugacaugc

SEQ ID NO: 2423722 - RNA, 19 nt, Artificial Sequence
  Description of Artificial Sequence: Synthetic oligonucleotide
  Sense strand starting at position 199 of SEQ ID NO: 1886738
acucuuaagugguacaaga

SEQ ID NO: 2423723 - RNA, 19 nt, Artificial Sequence
  Description of Artificial Sequence: Synthetic oligonucleotide
  Antisense strand to SEQ ID NO: 2423722
ucuuguaccacuuaagagu

SEQ ID NO: 2423724 - RNA, 19 nt, Artificial Sequence
  Description of Artificial Sequence: Synthetic oligonucleotide
  Sense strand starting at position 217 of SEQ ID NO: 1886738
acaagucaacgcuguuuau

SEQ ID NO: 2423725 - RNA, 19 nt, Artificial Sequence
  Description of Artificial Sequence: Synthetic oligonucleotide
  Antisense strand to SEQ ID NO: 2423724
auaaacagcguugacuugu

SEQ ID NO: 2423726 - RNA, 19 nt, Artificial Sequence
  Description of Artificial Sequence: Synthetic oligonucleotide
  Sense strand starting at position 223 of SEQ ID NO: 1886738
caacgcuguuuaucgaaca

SEQ ID NO: 2423727 - RNA, 19 nt, Artificial Sequence
  Description of Artificial Sequence: Synthetic oligonucleotide
  Antisense strand to SEQ ID NO: 2423726
uguucgauaaacagcguug

SEQ ID NO: 2423728 - RNA, 19 nt, Artificial Sequence
  Description of Artificial Sequence: Synthetic oligonucleotide
  Sense strand starting at position 224 of SEQ ID NO: 1886738
aacgcuguuuaucgaacaa

SEQ ID NO: 2423729 - RNA, 19 nt, Artificial Sequence
  Description of Artificial Sequence: Synthetic oligonucleotide
  Antisense strand to SEQ ID NO: 2423728
uuguucgauaaacagcguu

SEQ ID NO: 2423730 - RNA, 19 nt, Artificial Sequence
  Description of Artificial Sequence: Synthetic oligonucleotide
  Sense strand starting at position 228 of SEQ ID NO: 1886738
cuguuuaucgaacaauauu

SEQ ID NO: 2423731 - RNA, 19 nt, Artificial Sequence
  Description of Artificial Sequence: Synthetic oligonucleotide
  Antisense strand to SEQ ID NO: 2423730
aauauuguucgauaaacag

SEQ ID NO: 2423732 - RNA, 19 nt, Artificial Sequence
  Description of Artificial Sequence: Synthetic oligonucleotide
  Sense strand starting at position 457 of SEQ ID NO: 1886738
uccaaauacugcuggaauu

SEQ ID NO: 2423733 - RNA, 19 nt, Artificial Sequence
  Description of Artificial Sequence: Synthetic oligonucleotide
  Antisense strand to SEQ ID NO: 2423732
aauuccagcaguauuugga

SEQ ID NO: 2423734 - RNA, 19 nt, Artificial Sequence
  Description of Artificial Sequence: Synthetic oligonucleotide
  Sense strand starting at position 458 of SEQ ID NO: 1886738
ccaaauacugcuggaauua

SEQ ID NO: 2423735 - RNA, 19 nt, Artificial Sequence
  Description of Artificial Sequence: Synthetic oligonucleotide
  Antisense strand to SEQ ID NO: 2423734
uaauuccagcaguauuugg

SEQ ID NO: 2423736 - RNA, 19 nt, Artificial Sequence
  Description of Artificial Sequence: Synthetic oligonucleotide
  Sense strand starting at position 508 of SEQ ID NO: 1886738
caacaacuugugcguucua

SEQ ID NO: 2423737 - RNA, 19 nt, Artificial Sequence
  Description of Artificial Sequence: Synthetic oligonucleotide
  Antisense strand to SEQ ID NO: 2423736
uagaacgcacaaguuguug

SEQ ID NO: 2423738 - RNA, 19 nt, Artificial Sequence
  Description of Artificial Sequence: Synthetic oligonucleotide
  Sense strand starting at position 513 of SEQ ID NO: 1886738
acuugugcguucuacauua

SEQ ID NO: 2423739 - RNA, 19 nt, Artificial Sequence
  Description of Artificial Sequence: Synthetic oligonucleotide
  Antisense strand to SEQ ID NO: 2423738
uaauguagaacgcacaagu

SEQ ID NO: 2423740 - RNA, 19 nt, Artificial Sequence
  Description of Artificial Sequence: Synthetic oligonucleotide
  Sense strand starting at position 534 of SEQ ID NO: 1886738
uggccaguuuccggacaau

SEQ ID NO: 2423741 - RNA, 19 nt, Artificial Sequence
  Description of Artificial Sequence: Synthetic oligonucleotide
  Antisense strand to SEQ ID NO: 2423740
auuguccggaaacuggcca

SEQ ID NO: 2423742 - RNA, 19 nt, Artificial Sequence
  Description of Artificial Sequence: Synthetic oligonucleotide
  Sense strand starting at position 537 of SEQ ID NO: 1886738
ccaguuuccggacaauuau

SEQ ID NO: 2423743 - RNA, 19 nt, Artificial Sequence
  Description of Artificial Sequence: Synthetic oligonucleotide
  Antisense strand to SEQ ID NO: 2423742
auaauuguccggaaacugg

SEQ ID NO: 2423744 - RNA, 19 nt, Artificial Sequence
  Description of Artificial Sequence: Synthetic oligonucleotide
  Sense strand starting at position 557 of SEQ ID NO: 1886738
auacaauugugcuccaaag

SEQ ID NO: 2423745 - RNA, 19 nt, Artificial Sequence
  Description of Artificial Sequence: Synthetic oligonucleotide
  Antisense strand to SEQ ID NO: 2423744
cuuuggagcacaauuguau

SEQ ID NO: 2423746 - RNA, 19 nt, Artificial Sequence
  Description of Artificial Sequence: Synthetic oligonucleotide
  Sense strand starting at position 575 of SEQ ID NO: 1886738
guaggagaguuccaugaau

SEQ ID NO: 2423747 - RNA, 19 nt, Artificial Sequence
  Description of Artificial Sequence: Synthetic oligonucleotide
  Antisense strand to SEQ ID NO: 2423746
auucauggaacucuccuac

SEQ ID NO: 2423748 - RNA, 19 nt, Artificial Sequence
  Description of Artificial Sequence: Synthetic oligonucleotide
  Sense strand starting at position 630 of SEQ ID NO: 1886738
aguucuaagcauuggguua

SEQ ID NO: 2423749 - RNA, 19 nt, Artificial Sequence
  Description of Artificial Sequence: Synthetic oligonucleotide
  Antisense strand to SEQ ID NO: 2423748
uaacccaaugcuuagaacu

SEQ ID NO: 2423750 - RNA, 19 nt, Artificial Sequence
  Description of Artificial Sequence: Synthetic oligonucleotide
  Sense strand starting at position 631 of SEQ ID NO: 1886738
guucuaagcauuggguuaa

SEQ ID NO: 2423751 - RNA, 19 nt, Artificial Sequence
  Description of Artificial Sequence: Synthetic oligonucleotide
  Antisense strand to SEQ ID NO: 2423750
uuaacccaaugcuuagaac

SEQ ID NO: 2423752 - RNA, 19 nt, Artificial Sequence
  Description of Artificial Sequence: Synthetic oligonucleotide
  Sense strand starting at position 632 of SEQ ID NO: 1886738
uucuaagcauuggguuaaa

SEQ ID NO: 2423753 - RNA, 19 nt, Artificial Sequence
  Description of Artificial Sequence: Synthetic oligonucleotide
  Antisense strand to SEQ ID NO: 2423752
uuuaacccaaugcuuagaa

SEQ ID NO: 2423754 - RNA, 19 nt, Artificial Sequence
  Description of Artificial Sequence: Synthetic oligonucleotide
  Sense strand starting at position 635 of SEQ ID NO: 1886738
uaagcauuggguuaaauuc

SEQ ID NO: 2423755 - RNA, 19 nt, Artificial Sequence
  Description of Artificial Sequence: Synthetic oligonucleotide
  Antisense strand to SEQ ID NO: 2423754
gaauuuaacccaaugcuua

SEQ ID NO: 2423756 - RNA, 19 nt, Artificial Sequence
  Description of Artificial Sequence: Synthetic oligonucleotide
  Sense strand starting at position 677 of SEQ ID NO: 1886738
uuuauuuaguaagagaggu

SEQ ID NO: 2423757 - RNA, 19 nt, Artificial Sequence
  Description of Artificial Sequence: Synthetic oligonucleotide
  Antisense strand to SEQ ID NO: 2423756
accucucuuacuaaauaaa

SEQ ID NO: 2423758 - RNA, 19 nt, Artificial Sequence
  Description of Artificial Sequence: Synthetic oligonucleotide
  Sense strand starting at position 681 of SEQ ID NO: 1886738
uuuaguaagagagguuaga

SEQ ID NO: 2423759 - RNA, 19 nt, Artificial Sequence
  Description of Artificial Sequence: Synthetic oligonucleotide
  Antisense strand to SEQ ID NO: 2423758
ucuaaccucucuuacuaaa

SEQ ID NO: 2423760 - RNA, 19 nt, Artificial Sequence
  Description of Artificial Sequence: Synthetic oligonucleotide
  Sense strand starting at position 885 of SEQ ID NO: 1886738
cacucaaguguccagguau

SEQ ID NO: 2423761 - RNA, 19 nt, Artificial Sequence
  Description of Artificial Sequence: Synthetic oligonucleotide
  Antisense strand to SEQ ID NO: 2423760
auaccuggacacuugagug

SEQ ID NO: 2423762 - RNA, 19 nt, Artificial Sequence
  Description of Artificial Sequence: Synthetic oligonucleotide
  Sense strand starting at position 891 of SEQ ID NO: 1886738
aguguccagguaugaauua

SEQ ID NO: 2423763 - RNA, 19 nt, Artificial Sequence
  Description of Artificial Sequence: Synthetic oligonucleotide
  Antisense strand to SEQ ID NO: 2423762
uaauucauaccuggacacu

SEQ ID NO: 2423764 - RNA, 19 nt, Artificial Sequence
  Description of Artificial Sequence: Synthetic oligonucleotide
  Sense strand starting at position 896 of SEQ ID NO: 1886738
ccagguaugaauuacgauu

SEQ ID NO: 2423765 - RNA, 19 nt, Artificial Sequence
  Description of Artificial Sequence: Synthetic oligonucleotide
  Antisense strand to SEQ ID NO: 2423764
aaucguaauucauaccugg

SEQ ID NO: 2423766 - RNA, 19 nt, Artificial Sequence
  Description of Artificial Sequence: Synthetic oligonucleotide
  Sense strand starting at position 972 of SEQ ID NO: 1886738
ggucgaucccaucaacagu

SEQ ID NO: 2423767 - RNA, 19 nt, Artificial Sequence
  Description of Artificial Sequence: Synthetic oligonucleotide
  Antisense strand to SEQ ID NO: 2423766
acuguugaugggaucgacc

SEQ ID NO: 2423768 - RNA, 19 nt, Artificial Sequence
  Description of Artificial Sequence: Synthetic oligonucleotide
  Sense strand starting at position 1020 of SEQ ID NO: 1886738
gaauguucugccuaaaguc

SEQ ID NO: 2423769 - RNA, 19 nt, Artificial Sequence
  Description of Artificial Sequence: Synthetic oligonucleotide
  Antisense strand to SEQ ID NO: 2423768
gacuuuaggcagaacauuc

SEQ ID NO: 2423770 - RNA, 19 nt, Artificial Sequence
  Description of Artificial Sequence: Synthetic oligonucleotide
  Sense strand starting at position 1028 of SEQ ID NO: 1886738
ugccuaaagucagagcaau

SEQ ID NO: 2423771 - RNA, 19 nt, Artificial Sequence
  Description of Artificial Sequence: Synthetic oligonucleotide
  Antisense strand to SEQ ID NO: 2423770
auugcucugacuuuaggca

SEQ ID NO: 2423772 - RNA, 19 nt, Artificial Sequence
  Description of Artificial Sequence: Synthetic oligonucleotide
  Sense strand starting at position 1034 of SEQ ID NO: 1886738
aagucagagcaaugccuua

SEQ ID NO: 2423773 - RNA, 19 nt, Artificial Sequence
  Description of Artificial Sequence: Synthetic oligonucleotide
  Antisense strand to SEQ ID NO: 2423772
uaaggcauugcucugacuu

SEQ ID NO: 2423774 - RNA, 19 nt, Artificial Sequence
  Description of Artificial Sequence: Synthetic oligonucleotide
  Sense strand starting at position 1155 of SEQ ID NO: 1886738
cgagaaagugaaugaguaa

SEQ ID NO: 2423775 - RNA, 19 nt, Artificial Sequence
  Description of Artificial Sequence: Synthetic oligonucleotide
  Antisense strand to SEQ ID NO: 2423774
uuacucauucacuuucucg

SEQ ID NO: 2423776 - RNA, 19 nt, Artificial Sequence
  Description of Artificial Sequence: Synthetic oligonucleotide
  Sense strand starting at position 2108 of SEQ ID NO: 1886738
gaacgcuucccggaaagca

SEQ ID NO: 2423777 - RNA, 19 nt, Artificial Sequence
  Description of Artificial Sequence: Synthetic oligonucleotide
  Antisense strand to SEQ ID NO: 2423776
ugcuuuccgggaagcguuc

SEQ ID NO: 2423778 - RNA, 19 nt, Artificial Sequence
  Description of Artificial Sequence: Synthetic oligonucleotide
  Sense strand starting at position 2422 of SEQ ID NO: 1886738
gcuguacguuaguccguau

SEQ ID NO: 2423779 - RNA, 19 nt, Artificial Sequence
  Description of Artificial Sequence: Synthetic oligonucleotide
  Antisense strand to SEQ ID NO: 2423778
auacggacuaacguacagc

SEQ ID NO: 2423780 - RNA, 19 nt, Artificial Sequence
  Description of Artificial Sequence: Synthetic oligonucleotide
  Sense strand starting at position 2425 of SEQ ID NO: 1886738
guacguuaguccguauuuc

SEQ ID NO: 2423781 - RNA, 19 nt, Artificial Sequence
  Description of Artificial Sequence: Synthetic oligonucleotide
  Antisense strand to SEQ ID NO: 2423780
gaaauacggacuaacguac

SEQ ID NO: 2423782 - RNA, 19 nt, Artificial Sequence
  Description of Artificial Sequence: Synthetic oligonucleotide
  Sense strand starting at position 2426 of SEQ ID NO: 1886738
uacguuaguccguauuucu

SEQ ID NO: 2423783 - RNA, 19 nt, Artificial Sequence
  Description of Artificial Sequence: Synthetic oligonucleotide
  Antisense strand to SEQ ID NO: 2423782
agaaauacggacuaacgua

SEQ ID NO: 2423784 - RNA, 19 nt, Artificial Sequence
  Description of Artificial Sequence: Synthetic oligonucleotide
  Sense strand starting at position 3063 of SEQ ID NO: 1886738
aaaugaagcgcaugagaua

SEQ ID NO: 2423785 - RNA, 19 nt, Artificial Sequence
  Description of Artificial Sequence: Synthetic oligonucleotide
  Antisense strand to SEQ ID NO: 2423784
uaucucaugcgcuucauuu

SEQ ID NO: 2423786 - RNA, 19 nt, Artificial Sequence
  Description of Artificial Sequence: Synthetic oligonucleotide
  Sense strand starting at position 3444 of SEQ ID NO: 1886738
auuccuacucuguguaaga

SEQ ID NO: 2423787 - RNA, 19 nt, Artificial Sequence
  Description of Artificial Sequence: Synthetic oligonucleotide
  Antisense strand to SEQ ID NO: 2423786
ucuuacacagaguaggaau

SEQ ID NO: 2423788 - RNA, 19 nt, Artificial Sequence
  Description of Artificial Sequence: Synthetic oligonucleotide
  Sense strand starting at position 3445 of SEQ ID NO: 1886738
uuccuacucuguguaagau

SEQ ID NO: 2423789 - RNA, 19 nt, Artificial Sequence
  Description of Artificial Sequence: Synthetic oligonucleotide
  Antisense strand to SEQ ID NO: 2423788
aucuuacacagaguaggaa

SEQ ID NO: 2423790 - RNA, 19 nt, Artificial Sequence
  Description of Artificial Sequence: Synthetic oligonucleotide
  Sense strand starting at position 3449 of SEQ ID NO: 1886738
uacucuguguaagauguuu

SEQ ID NO: 2423791 - RNA, 19 nt, Artificial Sequence
  Description of Artificial Sequence: Synthetic oligonucleotide
  Antisense strand to SEQ ID NO: 2423790
aaacaucuuacacagagua

SEQ ID NO: 2423792 - RNA, 19 nt, Artificial Sequence
  Description of Artificial Sequence: Synthetic oligonucleotide
  Sense strand starting at position 3451 of SEQ ID NO: 1886738
cucuguguaagauguuuau

SEQ ID NO: 2423793 - RNA, 19 nt, Artificial Sequence
  Description of Artificial Sequence: Synthetic oligonucleotide
  Antisense strand to SEQ ID NO: 2423792
auaaacaucuuacacagag

SEQ ID NO: 2423794 - RNA, 19 nt, Artificial Sequence
  Description of Artificial Sequence: Synthetic oligonucleotide
  Sense strand starting at position 1122 of SEQ ID NO: 1886739
ccagacuuacccugugauu

SEQ ID NO: 2423795 - RNA, 19 nt, Artificial Sequence
  Description of Artificial Sequence: Synthetic oligonucleotide
  Antisense strand to SEQ ID NO: 2423794
aaucacaggguaagucugg

SEQ ID NO: 2423796 - RNA, 19 nt, Artificial Sequence
  Description of Artificial Sequence: Synthetic oligonucleotide
  Sense strand starting at position 3313 of SEQ ID NO: 1886739
gguacaagucauuacuuac

SEQ ID NO: 2423797 - RNA, 19 nt, Artificial Sequence
  Description of Artificial Sequence: Synthetic oligonucleotide
  Antisense strand to SEQ ID NO: 2423796
guaaguaaugacuuguacc

SEQ ID NO: 2423798 - RNA, 19 nt, Artificial Sequence
  Description of Artificial Sequence: Synthetic oligonucleotide
  Sense strand starting at position 3319 of SEQ ID NO: 1886739
agucauuacuuacaaagga

SEQ ID NO: 2423799 - RNA, 19 nt, Artificial Sequence
  Description of Artificial Sequence: Synthetic oligonucleotide
  Antisense strand to SEQ ID NO: 2423798
uccuuuguaaguaaugacu

SEQ ID NO: 2423800 - RNA, 19 nt, Artificial Sequence
  Description of Artificial Sequence: Synthetic oligonucleotide
  Sense strand starting at position 3399 of SEQ ID NO: 1886739
aggaguaccuucuaauauu

SEQ ID NO: 2423801 - RNA, 19 nt, Artificial Sequence
  Description of Artificial Sequence: Synthetic oligonucleotide
  Antisense strand to SEQ ID NO: 2423800
aauauuagaagguacuccu

SEQ ID NO: 2423802 - RNA, 19 nt, Artificial Sequence
  Description of Artificial Sequence: Synthetic oligonucleotide
  Sense strand starting at position 985 of SEQ ID NO: 1886741
aagucagagcaaugccuua

SEQ ID NO: 2423803 - RNA, 19 nt, Artificial Sequence
  Description of Artificial Sequence: Synthetic oligonucleotide
  Antisense strand to SEQ ID NO: 2423802
uaaggcauugcucugacuu

SEQ ID NO: 2423804 - RNA, 19 nt, Artificial Sequence
  Description of Artificial Sequence: Synthetic oligonucleotide
  Sense strand starting at position 2195 of SEQ ID NO: 1886741
cccaaaugcuucccggaaa

SEQ ID NO: 2423805 - RNA, 19 nt, Artificial Sequence
  Description of Artificial Sequence: Synthetic oligonucleotide
  Antisense strand to SEQ ID NO: 2423804
uuuccgggaagcauuuggg

SEQ ID NO: 2423806 - RNA, 19 nt, Artificial Sequence
  Description of Artificial Sequence: Synthetic oligonucleotide
  Sense strand starting at position 2196 of SEQ ID NO: 1886741
ccaaaugcuucccggaaag

SEQ ID NO: 2423807 - RNA, 19 nt, Artificial Sequence
  Description of Artificial Sequence: Synthetic oligonucleotide
  Antisense strand to SEQ ID NO: 2423806
cuuuccgggaagcauuugg

SEQ ID NO: 2423808 - RNA, 19 nt, Artificial Sequence
  Description of Artificial Sequence: Synthetic oligonucleotide
  Sense strand starting at position 2198 of SEQ ID NO: 1886741
aaaugcuucccggaaagca

SEQ ID NO: 2423809 - RNA, 19 nt, Artificial Sequence
  Description of Artificial Sequence: Synthetic oligonucleotide
  Antisense strand to SEQ ID NO: 2423808
ugcuuuccgggaagcauuu

SEQ ID NO: 2423810 - RNA, 19 nt, Artificial Sequence
  Description of Artificial Sequence: Synthetic oligonucleotide
  Sense strand starting at position 2226 of SEQ ID NO: 1886741
caggcagucagguguaaac

SEQ ID NO: 2423811 - RNA, 19 nt, Artificial Sequence
  Description of Artificial Sequence: Synthetic oligonucleotide
  Antisense strand to SEQ ID NO: 2423810
guuuacaccugacugccug

SEQ ID NO: 2423812 - RNA, 19 nt, Artificial Sequence
  Description of Artificial Sequence: Synthetic oligonucleotide
  Sense strand starting at position 2388 of SEQ ID NO: 1886741
gucagaucgacagguggau

SEQ ID NO: 2423813 - RNA, 19 nt, Artificial Sequence
  Description of Artificial Sequence: Synthetic oligonucleotide
  Antisense strand to SEQ ID NO: 2423812
auccaccugucgaucugac

SEQ ID NO: 2423814 - RNA, 19 nt, Artificial Sequence
  Description of Artificial Sequence: Synthetic oligonucleotide
  Sense strand starting at position 3673 of SEQ ID NO: 1886741
ggaggaucuugccaguucu

SEQ ID NO: 2423815 - RNA, 19 nt, Artificial Sequence
  Description of Artificial Sequence: Synthetic oligonucleotide
  Antisense strand to SEQ ID NO: 2423814
agaacuggcaagauccucc

SEQ ID NO: 2423816 - RNA, 19 nt, Artificial Sequence
  Description of Artificial Sequence: Synthetic oligonucleotide
  Sense strand starting at position 3679 of SEQ ID NO: 1886741
ucuugccaguucuaaauga

SEQ ID NO: 2423817 - RNA, 19 nt, Artificial Sequence
  Description of Artificial Sequence: Synthetic oligonucleotide
  Antisense strand to SEQ ID NO: 2423816
ucauuuagaacuggcaaga

SEQ ID NO: 2423818 - RNA, 19 nt, Artificial Sequence
  Description of Artificial Sequence: Synthetic oligonucleotide
  Sense strand starting at position 616 of SEQ ID NO: 1886742
acaauugugcuccaaagca

SEQ ID NO: 2423819 - RNA, 19 nt, Artificial Sequence
  Description of Artificial Sequence: Synthetic oligonucleotide
  Antisense strand to SEQ ID NO: 2423818
ugcuuuggagcacaauugu

SEQ ID NO: 2423820 - RNA, 19 nt, Artificial Sequence
  Description of Artificial Sequence: Synthetic oligonucleotide
  Sense strand starting at position 632 of SEQ ID NO: 1886742
gcaggagaguuccaugaau

SEQ ID NO: 2423821 - RNA, 19 nt, Artificial Sequence
  Description of Artificial Sequence: Synthetic oligonucleotide
  Antisense strand to SEQ ID NO: 2423820
auucauggaacucuccugc

SEQ ID NO: 2423822 - RNA, 19 nt, Artificial Sequence
  Description of Artificial Sequence: Synthetic oligonucleotide
  Sense strand starting at position 2359 of SEQ ID NO: 1886742
cguuaauguuuaugccaag

SEQ ID NO: 2423823 - RNA, 19 nt, Artificial Sequence
  Description of Artificial Sequence: Synthetic oligonucleotide
  Antisense strand to SEQ ID NO: 2423822
cuuggcauaaacauuaacg

SEQ ID NO: 2423824 - RNA, 19 nt, Artificial Sequence
  Description of Artificial Sequence: Synthetic oligonucleotide
  Sense strand starting at position 2360 of SEQ ID NO: 1886742
guuaauguuuaugccaaga

SEQ ID NO: 2423825 - RNA, 19 nt, Artificial Sequence
  Description of Artificial Sequence: Synthetic oligonucleotide
  Antisense strand to SEQ ID NO: 2423824
ucuuggcauaaacauuaac

SEQ ID NO: 2423826 - RNA, 19 nt, Artificial Sequence
  Description of Artificial Sequence: Synthetic oligonucleotide
  Sense strand starting at position 2467 of SEQ ID NO: 1886742
aagcaaggacucugugacu

SEQ ID NO: 2423827 - RNA, 19 nt, Artificial Sequence
  Description of Artificial Sequence: Synthetic oligonucleotide
  Antisense strand to SEQ ID NO: 2423826
agucacagaguccuugcuu

SEQ ID NO: 2423828 - RNA, 19 nt, Artificial Sequence
  Description of Artificial Sequence: Synthetic oligonucleotide
  Sense strand starting at position 2767 of SEQ ID NO: 1886742
gcagacuugugcuccuguu

SEQ ID NO: 2423829 - RNA, 19 nt, Artificial Sequence
  Description of Artificial Sequence: Synthetic oligonucleotide
  Antisense strand to SEQ ID NO: 2423828
aacaggagcacaagucugc

SEQ ID NO: 2423830 - RNA, 19 nt, Artificial Sequence
  Description of Artificial Sequence: Synthetic oligonucleotide
  Sense strand starting at position 2777 of SEQ ID NO: 1886742
gcuccuguuugccagauca

SEQ ID NO: 2423831 - RNA, 19 nt, Artificial Sequence
  Description of Artificial Sequence: Synthetic oligonucleotide
  Antisense strand to SEQ ID NO: 2423830
ugaucuggcaaacaggagc

SEQ ID NO: 2423832 - RNA, 19 nt, Artificial Sequence
  Description of Artificial Sequence: Synthetic oligonucleotide
  Sense strand starting at position 2779 of SEQ ID NO: 1886742
uccuguuugccagaucaaa

SEQ ID NO: 2423833 - RNA, 19 nt, Artificial Sequence
  Description of Artificial Sequence: Synthetic oligonucleotide
  Antisense strand to SEQ ID NO: 2423832
uuugaucuggcaaacagga

SEQ ID NO: 2423834 - RNA, 19 nt, Artificial Sequence
  Description of Artificial Sequence: Synthetic oligonucleotide
  Sense strand starting at position 2896 of SEQ ID NO: 1886742
cagggauugggaugaguuu

SEQ ID NO: 2423835 - RNA, 19 nt, Artificial Sequence
  Description of Artificial Sequence: Synthetic oligonucleotide
  Antisense strand to SEQ ID NO: 2423834
aaacucaucccaaucccug

SEQ ID NO: 2423836 - RNA, 19 nt, Artificial Sequence
  Description of Artificial Sequence: Synthetic oligonucleotide
  Sense strand starting at position 2903 of SEQ ID NO: 1886742
ugggaugaguuucuacaaa

SEQ ID NO: 2423837 - RNA, 19 nt, Artificial Sequence
  Description of Artificial Sequence: Synthetic oligonucleotide
  Antisense strand to SEQ ID NO: 2423836
uuuguagaaacucauccca

SEQ ID NO: 2423838 - RNA, 19 nt, Artificial Sequence
  Description of Artificial Sequence: Synthetic oligonucleotide
  Sense strand starting at position 2944 of SEQ ID NO: 1886742
cacagugguccugaucaaa

SEQ ID NO: 2423839 - RNA, 19 nt, Artificial Sequence
  Description of Artificial Sequence: Synthetic oligonucleotide
  Antisense strand to SEQ ID NO: 2423838
uuugaucaggaccacugug

SEQ ID NO: 2423840 - RNA, 19 nt, Artificial Sequence
  Description of Artificial Sequence: Synthetic oligonucleotide
  Sense strand starting at position 2955 of SEQ ID NO: 1886742
ugaucaaagugagaacaga

SEQ ID NO: 2423841 - RNA, 19 nt, Artificial Sequence
  Description of Artificial Sequence: Synthetic oligonucleotide
  Antisense strand to SEQ ID NO: 2423840
ucuguucucacuuugauca

SEQ ID NO: 2423842 - RNA, 19 nt, Artificial Sequence
  Description of Artificial Sequence: Synthetic oligonucleotide
  Sense strand starting at position 3054 of SEQ ID NO: 1886742
cagcuuucuccuggguuga

SEQ ID NO: 2423843 - RNA, 19 nt, Artificial Sequence
  Description of Artificial Sequence: Synthetic oligonucleotide
  Antisense strand to SEQ ID NO: 2423842
ucaacccaggagaaagcug

SEQ ID NO: 2423844 - RNA, 19 nt, Artificial Sequence
  Description of Artificial Sequence: Synthetic oligonucleotide
  Sense strand starting at position 3198 of SEQ ID NO: 1886742
ggauccuugucuuagcuga

SEQ ID NO: 2423845 - RNA, 19 nt, Artificial Sequence
  Description of Artificial Sequence: Synthetic oligonucleotide
  Antisense strand to SEQ ID NO: 2423844
ucagcuaagacaaggaucc

SEQ ID NO: 2423846 - RNA, 19 nt, Artificial Sequence
  Description of Artificial Sequence: Synthetic oligonucleotide
  Sense strand starting at position 3898 of SEQ ID NO: 1886742
ucuuguauuuggugaccuu

SEQ ID NO: 2423847 - RNA, 19 nt, Artificial Sequence
  Description of Artificial Sequence: Synthetic oligonucleotide
  Antisense strand to SEQ ID NO: 2423846
aaggucaccaaauacaaga

SEQ ID NO: 2423848 - RNA, 19 nt, Artificial Sequence
  Description of Artificial Sequence: Synthetic oligonucleotide
  Sense strand starting at position 3905 of SEQ ID NO: 1886742
uuuggugaccuugggugaa

SEQ ID NO: 2423849 - RNA, 19 nt, Artificial Sequence
  Description of Artificial Sequence: Synthetic oligonucleotide
  Antisense strand to SEQ ID NO: 2423848
uucacccaaggucaccaaa

SEQ ID NO: 2423850 - RNA, 19 nt, Artificial Sequence
  Description of Artificial Sequence: Synthetic oligonucleotide
  Sense strand starting at position 3917 of SEQ ID NO: 1886742
gggugaaucguuuagccuc

SEQ ID NO: 2423851 - RNA, 19 nt, Artificial Sequence
  Description of Artificial Sequence: Synthetic oligonucleotide
  Antisense strand to SEQ ID NO: 2423850
gaggcuaaacgauucaccc

SEQ ID NO: 2423852 - RNA, 19 nt, Artificial Sequence
  Description of Artificial Sequence: Synthetic oligonucleotide
  Sense strand starting at position 103 of SEQ ID NO: 1886743
guguacuaaugaugugcaa

SEQ ID NO: 2423853 - RNA, 19 nt, Artificial Sequence
  Description of Artificial Sequence: Synthetic oligonucleotide
  Antisense strand to SEQ ID NO: 2423852
uugcacaucauuaguacac

SEQ ID NO: 2423854 - RNA, 19 nt, Artificial Sequence
  Description of Artificial Sequence: Synthetic oligonucleotide
  Sense strand starting at position 116 of SEQ ID NO: 1886743
gugcaaaucucucaagcuu

SEQ ID NO: 2423855 - RNA, 19 nt, Artificial Sequence
  Description of Artificial Sequence: Synthetic oligonucleotide
  Antisense strand to SEQ ID NO: 2423854
aagcuugagagauuugcac

SEQ ID NO: 2423856 - RNA, 19 nt, Artificial Sequence
  Description of Artificial Sequence: Synthetic oligonucleotide
  Sense strand starting at position 1435 of SEQ ID NO: 1886743
cguggaaaccguggaaaga

SEQ ID NO: 2423857 - RNA, 19 nt, Artificial Sequence
  Description of Artificial Sequence: Synthetic oligonucleotide
  Antisense strand to SEQ ID NO: 2423856
ucuuuccacgguuuccacg

SEQ ID NO: 2423858 - RNA, 19 nt, Artificial Sequence
  Description of Artificial Sequence: Synthetic oligonucleotide
  Sense strand starting at position 1889 of SEQ ID NO: 1886743
uguuuaaggugcuccuaaa

SEQ ID NO: 2423859 - RNA, 19 nt, Artificial Sequence
  Description of Artificial Sequence: Synthetic oligonucleotide
  Antisense strand to SEQ ID NO: 2423858
uuuaggagcaccuuaaaca

SEQ ID NO: 2423860 - RNA, 19 nt, Artificial Sequence
  Description of Artificial Sequence: Synthetic oligonucleotide
  Sense strand starting at position 2152 of SEQ ID NO: 1886743
cugccugggucauaguaua

SEQ ID NO: 2423861 - RNA, 19 nt, Artificial Sequence
  Description of Artificial Sequence: Synthetic oligonucleotide
  Antisense strand to SEQ ID NO: 2423860
uauacuaugacccaggcag

SEQ ID NO: 2423862 - RNA, 19 nt, Artificial Sequence
  Description of Artificial Sequence: Synthetic oligonucleotide
  Sense strand starting at position 2162 of SEQ ID NO: 1886743
cauaguauaugcucaguga

SEQ ID NO: 2423863 - RNA, 19 nt, Artificial Sequence
  Description of Artificial Sequence: Synthetic oligonucleotide
  Antisense strand to SEQ ID NO: 2423862
ucacugagcauauacuaug

SEQ ID NO: 2423864 - RNA, 19 nt, Artificial Sequence
  Description of Artificial Sequence: Synthetic oligonucleotide
  Sense strand starting at position 2163 of SEQ ID NO: 1886743
auaguauaugcucagugaa

SEQ ID NO: 2423865 - RNA, 19 nt, Artificial Sequence
  Description of Artificial Sequence: Synthetic oligonucleotide
  Antisense strand to SEQ ID NO: 2423864
uucacugagcauauacuau

SEQ ID NO: 2423866 - RNA, 19 nt, Artificial Sequence
  Description of Artificial Sequence: Synthetic oligonucleotide
  Sense strand starting at position 2165 of SEQ ID NO: 1886743
aguauaugcucagugaagc

SEQ ID NO: 2423867 - RNA, 19 nt, Artificial Sequence
  Description of Artificial Sequence: Synthetic oligonucleotide
  Antisense strand to SEQ ID NO: 2423866
gcuucacugagcauauacu

SEQ ID NO: 2423868 - RNA, 19 nt, Artificial Sequence
  Description of Artificial Sequence: Synthetic oligonucleotide
  Sense strand starting at position 2166 of SEQ ID NO: 1886743
guauaugcucagugaagca

SEQ ID NO: 2423869 - RNA, 19 nt, Artificial Sequence
  Description of Artificial Sequence: Synthetic oligonucleotide
  Antisense strand to SEQ ID NO: 2423868
ugcuucacugagcauauac

SEQ ID NO: 2423870 - RNA, 19 nt, Artificial Sequence
  Description of Artificial Sequence: Synthetic oligonucleotide
  Sense strand starting at position 2792 of SEQ ID NO: 1886743
ucaagucauggauagcauu

SEQ ID NO: 2423871 - RNA, 19 nt, Artificial Sequence
  Description of Artificial Sequence: Synthetic oligonucleotide
  Antisense strand to SEQ ID NO: 2423870
aaugcuauccaugacuuga

SEQ ID NO: 2423872 - RNA, 19 nt, Artificial Sequence
  Description of Artificial Sequence: Synthetic oligonucleotide
  Sense strand starting at position 2800 of SEQ ID NO: 1886743
uggauagcauucugccauu

SEQ ID NO: 2423873 - RNA, 19 nt, Artificial Sequence
  Description of Artificial Sequence: Synthetic oligonucleotide
  Antisense strand to SEQ ID NO: 2423872
aauggcagaaugcuaucca

SEQ ID NO: 2423874 - RNA, 19 nt, Artificial Sequence
  Description of Artificial Sequence: Synthetic oligonucleotide
  Sense strand starting at position 3139 of SEQ ID NO: 1886743
gcaccaauuugucaaagcu

SEQ ID NO: 2423875 - RNA, 19 nt, Artificial Sequence
  Description of Artificial Sequence: Synthetic oligonucleotide
  Antisense strand to SEQ ID NO: 2423874
agcuuugacaaauuggugc

SEQ ID NO: 2423876 - RNA, 19 nt, Artificial Sequence
  Description of Artificial Sequence: Synthetic oligonucleotide
  Sense strand starting at position 26 of SEQ ID NO: 1886744
cgcagagagaccugaguaa

SEQ ID NO: 2423877 - RNA, 19 nt, Artificial Sequence
  Description of Artificial Sequence: Synthetic oligonucleotide
  Antisense strand to SEQ ID NO: 2423876
uuacucaggucucucugcg

SEQ ID NO: 2423878 - RNA, 19 nt, Artificial Sequence
  Description of Artificial Sequence: Synthetic oligonucleotide
  Sense strand starting at position 33 of SEQ ID NO: 1886744
agaccugaguaaucaauug

SEQ ID NO: 2423879 - RNA, 19 nt, Artificial Sequence
  Description of Artificial Sequence: Synthetic oligonucleotide
  Antisense strand to SEQ ID NO: 2423878
caauugauuacucaggucu

SEQ ID NO: 2423880 - RNA, 19 nt, Artificial Sequence
  Description of Artificial Sequence: Synthetic oligonucleotide
  Sense strand starting at position 65 of SEQ ID NO: 1886744
gcgacuugccaacagcuau

SEQ ID NO: 2423881 - RNA, 19 nt, Artificial Sequence
  Description of Artificial Sequence: Synthetic oligonucleotide
  Antisense strand to SEQ ID NO: 2423880
auagcuguuggcaagucgc

SEQ ID NO: 2423882 - RNA, 19 nt, Artificial Sequence
  Description of Artificial Sequence: Synthetic oligonucleotide
  Sense strand starting at position 168 of SEQ ID NO: 1886744
guaggaaagcacuguuuau

SEQ ID NO: 2423883 - RNA, 19 nt, Artificial Sequence
  Description of Artificial Sequence: Synthetic oligonucleotide
  Antisense strand to SEQ ID NO: 2423882
auaaacagugcuuuccuac

SEQ ID NO: 2423884 - RNA, 19 nt, Artificial Sequence
  Description of Artificial Sequence: Synthetic oligonucleotide
  Sense strand starting at position 243 of SEQ ID NO: 1886744
uuuacuaaauugggaugau

SEQ ID NO: 2423885 - RNA, 19 nt, Artificial Sequence
  Description of Artificial Sequence: Synthetic oligonucleotide
  Antisense strand to SEQ ID NO: 2423884
aucaucccaauuuaguaaa

SEQ ID NO: 2423886 - RNA, 19 nt, Artificial Sequence
  Description of Artificial Sequence: Synthetic oligonucleotide
  Sense strand starting at position 244 of SEQ ID NO: 1886744
uuacuaaauugggaugauc

SEQ ID NO: 2423887 - RNA, 19 nt, Artificial Sequence
  Description of Artificial Sequence: Synthetic oligonucleotide
  Antisense strand to SEQ ID NO: 2423886
gaucaucccaauuuaguaa

SEQ ID NO: 2423888 - RNA, 19 nt, Artificial Sequence
  Description of Artificial Sequence: Synthetic oligonucleotide
  Sense strand starting at position 303 of SEQ ID NO: 1886744
acgcuaugugcuuguacua

SEQ ID NO: 2423889 - RNA, 19 nt, Artificial Sequence
  Description of Artificial Sequence: Synthetic oligonucleotide
  Antisense strand to SEQ ID NO: 2423888
uaguacaagcacauagcgu

SEQ ID NO: 2423890 - RNA, 19 nt, Artificial Sequence
  Description of Artificial Sequence: Synthetic oligonucleotide
  Sense strand starting at position 304 of SEQ ID NO: 1886744
cgcuaugugcuuguacuau

SEQ ID NO: 2423891 - RNA, 19 nt, Artificial Sequence
  Description of Artificial Sequence: Synthetic oligonucleotide
  Antisense strand to SEQ ID NO: 2423890
auaguacaagcacauagcg

SEQ ID NO: 2423892 - RNA, 19 nt, Artificial Sequence
  Description of Artificial Sequence: Synthetic oligonucleotide
  Sense strand starting at position 314 of SEQ ID NO: 1886744
uuguacuaugcacgucaau

SEQ ID NO: 2423893 - RNA, 19 nt, Artificial Sequence
  Description of Artificial Sequence: Synthetic oligonucleotide
  Antisense strand to SEQ ID NO: 2423892
auugacgugcauaguacaa

SEQ ID NO: 2423894 - RNA, 19 nt, Artificial Sequence
  Description of Artificial Sequence: Synthetic oligonucleotide
  Sense strand starting at position 317 of SEQ ID NO: 1886744
uacuaugcacgucaaugaa

SEQ ID NO: 2423895 - RNA, 19 nt, Artificial Sequence
  Description of Artificial Sequence: Synthetic oligonucleotide
  Antisense strand to SEQ ID NO: 2423894
uucauugacgugcauagua

SEQ ID NO: 2423896 - RNA, 19 nt, Artificial Sequence
  Description of Artificial Sequence: Synthetic oligonucleotide
  Sense strand starting at position 587 of SEQ ID NO: 1886744
uggagcuuugaucguacca

SEQ ID NO: 2423897 - RNA, 19 nt, Artificial Sequence
  Description of Artificial Sequence: Synthetic oligonucleotide
  Antisense strand to SEQ ID NO: 2423896
ugguacgaucaaagcucca

SEQ ID NO: 2423898 - RNA, 19 nt, Artificial Sequence
  Description of Artificial Sequence: Synthetic oligonucleotide
  Sense strand starting at position 1233 of SEQ ID NO: 1886744
acgcuuaaauguuccugua

SEQ ID NO: 2423899 - RNA, 19 nt, Artificial Sequence
  Description of Artificial Sequence: Synthetic oligonucleotide
  Antisense strand to SEQ ID NO: 2423898
uacaggaacauuuaagcgu

SEQ ID NO: 2423900 - RNA, 19 nt, Artificial Sequence
  Description of Artificial Sequence: Synthetic oligonucleotide
  Sense strand starting at position 1496 of SEQ ID NO: 1886744
aagaguggaucccgggaua

SEQ ID NO: 2423901 - RNA, 19 nt, Artificial Sequence
  Description of Artificial Sequence: Synthetic oligonucleotide
  Antisense strand to SEQ ID NO: 2423900
uaucccgggauccacucuu

SEQ ID NO: 2423902 - RNA, 19 nt, Artificial Sequence
  Description of Artificial Sequence: Synthetic oligonucleotide
  Sense strand starting at position 1499 of SEQ ID NO: 1886744
aguggaucccgggauacau

SEQ ID NO: 2423903 - RNA, 19 nt, Artificial Sequence
  Description of Artificial Sequence: Synthetic oligonucleotide
  Antisense strand to SEQ ID NO: 2423902
auguaucccgggauccacu

SEQ ID NO: 2423904 - RNA, 19 nt, Artificial Sequence
  Description of Artificial Sequence: Synthetic oligonucleotide
  Sense strand starting at position 2119 of SEQ ID NO: 1886744
cguccauuggcugagaggu

SEQ ID NO: 2423905 - RNA, 19 nt, Artificial Sequence
  Description of Artificial Sequence: Synthetic oligonucleotide
  Antisense strand to SEQ ID NO: 2423904
accucucagccaauggacg

SEQ ID NO: 2423906 - RNA, 19 nt, Artificial Sequence
  Description of Artificial Sequence: Synthetic oligonucleotide
  Sense strand starting at position 2121 of SEQ ID NO: 1886744
uccauuggcugagagguaa

SEQ ID NO: 2423907 - RNA, 19 nt, Artificial Sequence
  Description of Artificial Sequence: Synthetic oligonucleotide
  Antisense strand to SEQ ID NO: 2423906
uuaccucucagccaaugga

SEQ ID NO: 2423908 - RNA, 19 nt, Artificial Sequence
  Description of Artificial Sequence: Synthetic oligonucleotide
  Sense strand starting at position 2289 of SEQ ID NO: 1886744
ggaccauggccucggagaa

SEQ ID NO: 2423909 - RNA, 19 nt, Artificial Sequence
  Description of Artificial Sequence: Synthetic oligonucleotide
  Antisense strand to SEQ ID NO: 2423908
uucuccgaggccauggucc

SEQ ID NO: 2423910 - RNA, 19 nt, Artificial Sequence
  Description of Artificial Sequence: Synthetic oligonucleotide
  Sense strand starting at position 2315 of SEQ ID NO: 1886744
gcggcagucacuuguacag

SEQ ID NO: 2423911 - RNA, 19 nt, Artificial Sequence
  Description of Artificial Sequence: Synthetic oligonucleotide
  Antisense strand to SEQ ID NO: 2423910
cuguacaagugacugccgc

SEQ ID NO: 2423912 - RNA, 19 nt, Artificial Sequence
  Description of Artificial Sequence: Synthetic oligonucleotide
  Sense strand starting at position 2530 of SEQ ID NO: 1886744
gcgcuccuucgcgugacaa

SEQ ID NO: 2423913 - RNA, 19 nt, Artificial Sequence
  Description of Artificial Sequence: Synthetic oligonucleotide
  Antisense strand to SEQ ID NO: 2423912
uugucacgcgaaggagcgc

SEQ ID NO: 2423914 - RNA, 19 nt, Artificial Sequence
  Description of Artificial Sequence: Synthetic oligonucleotide
  Sense strand starting at position 2609 of SEQ ID NO: 1886744
cccauuagcgauuaccgaa

SEQ ID NO: 2423915 - RNA, 19 nt, Artificial Sequence
  Description of Artificial Sequence: Synthetic oligonucleotide
  Antisense strand to SEQ ID NO: 2423914
uucgguaaucgcuaauggg

SEQ ID NO: 2423916 - RNA, 19 nt, Artificial Sequence
  Description of Artificial Sequence: Synthetic oligonucleotide
  Sense strand starting at position 2617 of SEQ ID NO: 1886744
cgauuaccgaacuaucgaa

SEQ ID NO: 2423917 - RNA, 19 nt, Artificial Sequence
  Description of Artificial Sequence: Synthetic oligonucleotide
  Antisense strand to SEQ ID NO: 2423916
uucgauaguucgguaaucg

SEQ ID NO: 2423918 - RNA, 19 nt, Artificial Sequence
  Description of Artificial Sequence: Synthetic oligonucleotide
  Sense strand starting at position 2643 of SEQ ID NO: 1886744
aucaucgauucccaugaau

SEQ ID NO: 2423919 - RNA, 19 nt, Artificial Sequence
  Description of Artificial Sequence: Synthetic oligonucleotide
  Antisense strand to SEQ ID NO: 2423918
auucaugggaaucgaugau

SEQ ID NO: 2423920 - RNA, 19 nt, Artificial Sequence
  Description of Artificial Sequence: Synthetic oligonucleotide
  Sense strand starting at position 2645 of SEQ ID NO: 1886744
caucgauucccaugaaucg

SEQ ID NO: 2423921 - RNA, 19 nt, Artificial Sequence
  Description of Artificial Sequence: Synthetic oligonucleotide
  Antisense strand to SEQ ID NO: 2423920
cgauucaugggaaucgaug

SEQ ID NO: 2423922 - RNA, 19 nt, Artificial Sequence
  Description of Artificial Sequence: Synthetic oligonucleotide
  Sense strand starting at position 2652 of SEQ ID NO: 1886744
ucccaugaaucguaagaau

SEQ ID NO: 2423923 - RNA, 19 nt, Artificial Sequence
  Description of Artificial Sequence: Synthetic oligonucleotide
  Antisense strand to SEQ ID NO: 2423922
auucuuacgauucauggga

SEQ ID NO: 2423924 - RNA, 19 nt, Artificial Sequence
  Description of Artificial Sequence: Synthetic oligonucleotide
  Sense strand starting at position 2663 of SEQ ID NO: 1886744
guaagaauccgccguggug

SEQ ID NO: 2423925 - RNA, 19 nt, Artificial Sequence
  Description of Artificial Sequence: Synthetic oligonucleotide
  Antisense strand to SEQ ID NO: 2423924
caccacggcggauucuuac

SEQ ID NO: 2423926 - RNA, 19 nt, Artificial Sequence
  Description of Artificial Sequence: Synthetic oligonucleotide
  Sense strand starting at position 2686 of SEQ ID NO: 1886744
gcguuuguggcuccagcua

SEQ ID NO: 2423927 - RNA, 19 nt, Artificial Sequence
  Description of Artificial Sequence: Synthetic oligonucleotide
  Antisense strand to SEQ ID NO: 2423926
uagcuggagccacaaacgc

SEQ ID NO: 2423928 - RNA, 19 nt, Artificial Sequence
  Description of Artificial Sequence: Synthetic oligonucleotide
  Sense strand starting at position 2815 of SEQ ID NO: 1886744
ccguuucucccagcgguaa

SEQ ID NO: 2423929 - RNA, 19 nt, Artificial Sequence
  Description of Artificial Sequence: Synthetic oligonucleotide
  Antisense strand to SEQ ID NO: 2423928
uuaccgcugggagaaacgg

SEQ ID NO: 2423930 - RNA, 19 nt, Artificial Sequence
  Description of Artificial Sequence: Synthetic oligonucleotide
  Sense strand starting at position 2955 of SEQ ID NO: 1886744
ccacucauuucuguaacgu

SEQ ID NO: 2423931 - RNA, 19 nt, Artificial Sequence
  Description of Artificial Sequence: Synthetic oligonucleotide
  Antisense strand to SEQ ID NO: 2423930
acguuacagaaaugagugg

SEQ ID NO: 2423932 - RNA, 19 nt, Artificial Sequence
  Description of Artificial Sequence: Synthetic oligonucleotide
  Sense strand starting at position 3074 of SEQ ID NO: 1886744
gggauuguaucagugcuuu

SEQ ID NO: 2423933 - RNA, 19 nt, Artificial Sequence
  Description of Artificial Sequence: Synthetic oligonucleotide
  Antisense strand to SEQ ID NO: 2423932
aaagcacugauacaauccc

SEQ ID NO: 2423934 - RNA, 19 nt, Artificial Sequence
  Description of Artificial Sequence: Synthetic oligonucleotide
  Sense strand starting at position 3235 of SEQ ID NO: 1886744
uuguguuucccuuaccaau

SEQ ID NO: 2423935 - RNA, 19 nt, Artificial Sequence
  Description of Artificial Sequence: Synthetic oligonucleotide
  Antisense strand to SEQ ID NO: 2423934
auugguaagggaaacacaa

SEQ ID NO: 2423936 - RNA, 19 nt, Artificial Sequence
  Description of Artificial Sequence: Synthetic oligonucleotide
  Sense strand starting at position 3237 of SEQ ID NO: 1886744
guguuucccuuaccaauaa

SEQ ID NO: 2423937 - RNA, 19 nt, Artificial Sequence
  Description of Artificial Sequence: Synthetic oligonucleotide
  Antisense strand to SEQ ID NO: 2423936
uuauugguaagggaaacac

SEQ ID NO: 2423938 - RNA, 19 nt, Artificial Sequence
  Description of Artificial Sequence: Synthetic oligonucleotide
  Sense strand starting at position 3301 of SEQ ID NO: 1886744
uuccauucuucugggauaa

SEQ ID NO: 2423939 - RNA, 19 nt, Artificial Sequence
  Description of Artificial Sequence: Synthetic oligonucleotide
  Antisense strand to SEQ ID NO: 2423938
uuaucccagaagaauggaa

SEQ ID NO: 2423940 - RNA, 19 nt, Artificial Sequence
  Description of Artificial Sequence: Synthetic oligonucleotide
  Sense strand starting at position 3302 of SEQ ID NO: 1886744
uccauucuucugggauaaa

SEQ ID NO: 2423941 - RNA, 19 nt, Artificial Sequence
  Description of Artificial Sequence: Synthetic oligonucleotide
  Antisense strand to SEQ ID NO: 2423940
uuuaucccagaagaaugga

SEQ ID NO: 2423942 - RNA, 19 nt, Artificial Sequence
  Description of Artificial Sequence: Synthetic oligonucleotide
  Sense strand starting at position 3303 of SEQ ID NO: 1886744
ccauucuucugggauaaau

SEQ ID NO: 2423943 - RNA, 19 nt, Artificial Sequence
  Description of Artificial Sequence: Synthetic oligonucleotide
  Antisense strand to SEQ ID NO: 2423942
auuuaucccagaagaaugg

SEQ ID NO: 2423944 - RNA, 19 nt, Artificial Sequence
  Description of Artificial Sequence: Synthetic oligonucleotide
  Sense strand starting at position 3330 of SEQ ID NO: 1886744
gugcgguugcugggucaga

SEQ ID NO: 2423945 - RNA, 19 nt, Artificial Sequence
  Description of Artificial Sequence: Synthetic oligonucleotide
  Antisense strand to SEQ ID NO: 2423944
ucugacccagcaaccgcac

SEQ ID NO: 2423946 - RNA, 19 nt, Artificial Sequence
  Description of Artificial Sequence: Synthetic oligonucleotide
  Sense strand starting at position 3331 of SEQ ID NO: 1886744
ugcgguugcugggucagau

SEQ ID NO: 2423947 - RNA, 19 nt, Artificial Sequence
  Description of Artificial Sequence: Synthetic oligonucleotide
  Antisense strand to SEQ ID NO: 2423946
aucugacccagcaaccgca

SEQ ID NO: 2423948 - RNA, 19 nt, Artificial Sequence
  Description of Artificial Sequence: Synthetic oligonucleotide
  Sense strand starting at position 3340 of SEQ ID NO: 1886744
ugggucagaugguagauau

SEQ ID NO: 2423949 - RNA, 19 nt, Artificial Sequence
  Description of Artificial Sequence: Synthetic oligonucleotide
  Antisense strand to SEQ ID NO: 2423948
auaucuaccaucugaccca

SEQ ID NO: 2423950 - RNA, 19 nt, Artificial Sequence
  Description of Artificial Sequence: Synthetic oligonucleotide
  Sense strand starting at position 3468 of SEQ ID NO: 1886744
ccuauauagauguaugugu

SEQ ID NO: 2423951 - RNA, 19 nt, Artificial Sequence
  Description of Artificial Sequence: Synthetic oligonucleotide
  Antisense strand to SEQ ID NO: 2423950
acacauacaucuauauagg

SEQ ID NO: 2423952 - RNA, 19 nt, Artificial Sequence
  Description of Artificial Sequence: Synthetic oligonucleotide
  Sense strand starting at position 3720 of SEQ ID NO: 1886744
gcaucuuucuuugugcuua

SEQ ID NO: 2423953 - RNA, 19 nt, Artificial Sequence
  Description of Artificial Sequence: Synthetic oligonucleotide
  Antisense strand to SEQ ID NO: 2423952
uaagcacaaagaaagaugc

SEQ ID NO: 2423954 - RNA, 19 nt, Artificial Sequence
  Description of Artificial Sequence: Synthetic oligonucleotide
  Sense strand starting at position 3818 of SEQ ID NO: 1886744
acuauaaguuuggagaguu

SEQ ID NO: 2423955 - RNA, 19 nt, Artificial Sequence
  Description of Artificial Sequence: Synthetic oligonucleotide
  Antisense strand to SEQ ID NO: 2423954
aacucuccaaacuuauagu

SEQ ID NO: 2423956 - RNA, 19 nt, Artificial Sequence
  Description of Artificial Sequence: Synthetic oligonucleotide
  Sense strand starting at position 32 of SEQ ID NO: 1886745
ggucgaucccuggacaacu

SEQ ID NO: 2423957 - RNA, 19 nt, Artificial Sequence
  Description of Artificial Sequence: Synthetic oligonucleotide
  Antisense strand to SEQ ID NO: 2423956
aguuguccagggaucgacc

SEQ ID NO: 2423958 - RNA, 19 nt, Artificial Sequence
  Description of Artificial Sequence: Synthetic oligonucleotide
  Sense strand starting at position 50 of SEQ ID NO: 1886745
ugggcagguuucuggaguu

SEQ ID NO: 2423959 - RNA, 19 nt, Artificial Sequence
  Description of Artificial Sequence: Synthetic oligonucleotide
  Antisense strand to SEQ ID NO: 2423958
aacuccagaaaccugccca

SEQ ID NO: 2423960 - RNA, 19 nt, Artificial Sequence
  Description of Artificial Sequence: Synthetic oligonucleotide
  Sense strand starting at position 181 of SEQ ID NO: 1886745
gugggcugacaucacaaua

SEQ ID NO: 2423961 - RNA, 19 nt, Artificial Sequence
  Description of Artificial Sequence: Synthetic oligonucleotide
  Antisense strand to SEQ ID NO: 2423960
uauugugaugucagcccac

SEQ ID NO: 2423962 - RNA, 19 nt, Artificial Sequence
  Description of Artificial Sequence: Synthetic oligonucleotide
  Sense strand starting at position 748 of SEQ ID NO: 1886745
ugaccugagauaggucuau

SEQ ID NO: 2423963 - RNA, 19 nt, Artificial Sequence
  Description of Artificial Sequence: Synthetic oligonucleotide
  Antisense strand to SEQ ID NO: 2423962
auagaccuaucucagguca

SEQ ID NO: 2423964 - RNA, 19 nt, Artificial Sequence
  Description of Artificial Sequence: Synthetic oligonucleotide
  Sense strand starting at position 857 of SEQ ID NO: 1886745
gggcuucagugggaucaca

SEQ ID NO: 2423965 - RNA, 19 nt, Artificial Sequence
  Description of Artificial Sequence: Synthetic oligonucleotide
  Antisense strand to SEQ ID NO: 2423964
ugugaucccacugaagccc

SEQ ID NO: 2423966 - RNA, 19 nt, Artificial Sequence
  Description of Artificial Sequence: Synthetic oligonucleotide
  Sense strand starting at position 977 of SEQ ID NO: 1886745
aucugauacucaggugcua

SEQ ID NO: 2423967 - RNA, 19 nt, Artificial Sequence
  Description of Artificial Sequence: Synthetic oligonucleotide
  Antisense strand to SEQ ID NO: 2423966
uagcaccugaguaucagau

SEQ ID NO: 2423968 - RNA, 19 nt, Artificial Sequence
  Description of Artificial Sequence: Synthetic oligonucleotide
  Sense strand starting at position 1118 of SEQ ID NO: 1886745
aggccuaguuggucaaauc

SEQ ID NO: 2423969 - RNA, 19 nt, Artificial Sequence
  Description of Artificial Sequence: Synthetic oligonucleotide
  Antisense strand to SEQ ID NO: 2423968
gauuugaccaacuaggccu

SEQ ID NO: 2423970 - RNA, 19 nt, Artificial Sequence
  Description of Artificial Sequence: Synthetic oligonucleotide
  Sense strand starting at position 1170 of SEQ ID NO: 1886745
acuggaagccucugagcuu

SEQ ID NO: 2423971 - RNA, 19 nt, Artificial Sequence
  Description of Artificial Sequence: Synthetic oligonucleotide
  Antisense strand to SEQ ID NO: 2423970
aagcucagaggcuuccagu

SEQ ID NO: 2423972 - RNA, 19 nt, Artificial Sequence
  Description of Artificial Sequence: Synthetic oligonucleotide
  Sense strand starting at position 1281 of SEQ ID NO: 1886745
ccacaagacuguucguagu

SEQ ID NO: 2423973 - RNA, 19 nt, Artificial Sequence
  Description of Artificial Sequence: Synthetic oligonucleotide
  Antisense strand to SEQ ID NO: 2423972
acuacgaacagucuugugg

SEQ ID NO: 2423974 - RNA, 19 nt, Artificial Sequence
  Description of Artificial Sequence: Synthetic oligonucleotide
  Sense strand starting at position 1283 of SEQ ID NO: 1886745
acaagacuguucguagucu

SEQ ID NO: 2423975 - RNA, 19 nt, Artificial Sequence
  Description of Artificial Sequence: Synthetic oligonucleotide
  Antisense strand to SEQ ID NO: 2423974
agacuacgaacagucuugu

SEQ ID NO: 2423976 - RNA, 19 nt, Artificial Sequence
  Description of Artificial Sequence: Synthetic oligonucleotide
  Sense strand starting at position 1391 of SEQ ID NO: 1886745
gaggcaucucgcuaggguu

SEQ ID NO: 2423977 - RNA, 19 nt, Artificial Sequence
  Description of Artificial Sequence: Synthetic oligonucleotide
  Antisense strand to SEQ ID NO: 2423976
aacccuagcgagaugccuc

SEQ ID NO: 2423978 - RNA, 19 nt, Artificial Sequence
  Description of Artificial Sequence: Synthetic oligonucleotide
  Sense strand starting at position 1477 of SEQ ID NO: 1886745
acccgcaugcagugaguua

SEQ ID NO: 2423979 - RNA, 19 nt, Artificial Sequence
  Description of Artificial Sequence: Synthetic oligonucleotide
  Antisense strand to SEQ ID NO: 2423978
uaacucacugcaugcgggu

SEQ ID NO: 2423980 - RNA, 19 nt, Artificial Sequence
  Description of Artificial Sequence: Synthetic oligonucleotide
  Sense strand starting at position 1583 of SEQ ID NO: 1886745
accaguguccugcggagaa

SEQ ID NO: 2423981 - RNA, 19 nt, Artificial Sequence
  Description of Artificial Sequence: Synthetic oligonucleotide
  Antisense strand to SEQ ID NO: 2423980
uucuccgcaggacacuggu

SEQ ID NO: 2423982 - RNA, 19 nt, Artificial Sequence
  Description of Artificial Sequence: Synthetic oligonucleotide
  Sense strand starting at position 1587 of SEQ ID NO: 1886745
guguccugcggagaaagaa

SEQ ID NO: 2423983 - RNA, 19 nt, Artificial Sequence
  Description of Artificial Sequence: Synthetic oligonucleotide
  Antisense strand to SEQ ID NO: 2423982
uucuuucuccgcaggacac

SEQ ID NO: 2423984 - RNA, 19 nt, Artificial Sequence
  Description of Artificial Sequence: Synthetic oligonucleotide
  Sense strand starting at position 2060 of SEQ ID NO: 1886745
ccaaucacagguugucuua

SEQ ID NO: 2423985 - RNA, 19 nt, Artificial Sequence
  Description of Artificial Sequence: Synthetic oligonucleotide
  Antisense strand to SEQ ID NO: 2423984
uaagacaaccugugauugg

SEQ ID NO: 2423986 - RNA, 19 nt, Artificial Sequence
  Description of Artificial Sequence: Synthetic oligonucleotide
  Sense strand starting at position 2115 of SEQ ID NO: 1886745
cggagaucucgcggcgcuu

SEQ ID NO: 2423987 - RNA, 19 nt, Artificial Sequence
  Description of Artificial Sequence: Synthetic oligonucleotide
  Antisense strand to SEQ ID NO: 2423986
aagcgccgcgagaucuccg

SEQ ID NO: 2423988 - RNA, 19 nt, Artificial Sequence
  Description of Artificial Sequence: Synthetic oligonucleotide
  Sense strand starting at position 2126 of SEQ ID NO: 1886745
cggcgcuuggcgugcuaua

SEQ ID NO: 2423989 - RNA, 19 nt, Artificial Sequence
  Description of Artificial Sequence: Synthetic oligonucleotide
  Antisense strand to SEQ ID NO: 2423988
uauagcacgccaagcgccg

SEQ ID NO: 2423990 - RNA, 19 nt, Artificial Sequence
  Description of Artificial Sequence: Synthetic oligonucleotide
  Sense strand starting at position 2127 of SEQ ID NO: 1886745
ggcgcuuggcgugcuauaa

SEQ ID NO: 2423991 - RNA, 19 nt, Artificial Sequence
  Description of Artificial Sequence: Synthetic oligonucleotide
  Antisense strand to SEQ ID NO: 2423990
uuauagcacgccaagcgcc

SEQ ID NO: 2423992 - RNA, 19 nt, Artificial Sequence
  Description of Artificial Sequence: Synthetic oligonucleotide
  Sense strand starting at position 2128 of SEQ ID NO: 1886745
gcgcuuggcgugcuauaaa

SEQ ID NO: 2423993 - RNA, 19 nt, Artificial Sequence
  Description of Artificial Sequence: Synthetic oligonucleotide
  Antisense strand to SEQ ID NO: 2423992
uuuauagcacgccaagcgc

SEQ ID NO: 2423994 - RNA, 19 nt, Artificial Sequence
  Description of Artificial Sequence: Synthetic oligonucleotide
  Sense strand starting at position 2187 of SEQ ID NO: 1886745
acacgugaguccuguuggu

SEQ ID NO: 2423995 - RNA, 19 nt, Artificial Sequence
  Description of Artificial Sequence: Synthetic oligonucleotide
  Antisense strand to SEQ ID NO: 2423994
accaacaggacucacgugu

SEQ ID NO: 2423996 - RNA, 19 nt, Artificial Sequence
  Description of Artificial Sequence: Synthetic oligonucleotide
  Sense strand starting at position 2798 of SEQ ID NO: 1886745
gccauugacucgcauuaaa

SEQ ID NO: 2423997 - RNA, 19 nt, Artificial Sequence
  Description of Artificial Sequence: Synthetic oligonucleotide
  Antisense strand to SEQ ID NO: 2423996
uuuaaugcgagucaauggc

SEQ ID NO: 2423998 - RNA, 19 nt, Artificial Sequence
  Description of Artificial Sequence: Synthetic oligonucleotide
  Sense strand starting at position 2824 of SEQ ID NO: 1886745
gcgucucgcgugagagguu

SEQ ID NO: 2423999 - RNA, 19 nt, Artificial Sequence
  Description of Artificial Sequence: Synthetic oligonucleotide
  Antisense strand to SEQ ID NO: 2423998
aaccucucacgcgagacgc

SEQ ID NO: 2424000 - RNA, 19 nt, Artificial Sequence
  Description of Artificial Sequence: Synthetic oligonucleotide
  Sense strand starting at position 3006 of SEQ ID NO: 1886745
ccgagaggaugaugaaguu

SEQ ID NO: 2424001 - RNA, 19 nt, Artificial Sequence
  Description of Artificial Sequence: Synthetic oligonucleotide
  Antisense strand to SEQ ID NO: 2424000
aacuucaucauccucucgg

SEQ ID NO: 2424002 - RNA, 19 nt, Artificial Sequence
  Description of Artificial Sequence: Synthetic oligonucleotide
  Sense strand starting at position 3040 of SEQ ID NO: 1886745
cacuguaaggguuagcaaa

SEQ ID NO: 2424003 - RNA, 19 nt, Artificial Sequence
  Description of Artificial Sequence: Synthetic oligonucleotide
  Antisense strand to SEQ ID NO: 2424002
uuugcuaacccuuacagug

SEQ ID NO: 2424004 - RNA, 19 nt, Artificial Sequence
  Description of Artificial Sequence: Synthetic oligonucleotide
  Sense strand starting at position 3048 of SEQ ID NO: 1886745
ggguuagcaaacugucaua

SEQ ID NO: 2424005 - RNA, 19 nt, Artificial Sequence
  Description of Artificial Sequence: Synthetic oligonucleotide
  Antisense strand to SEQ ID NO: 2424004
uaugacaguuugcuaaccc

SEQ ID NO: 2424006 - RNA, 19 nt, Artificial Sequence
  Description of Artificial Sequence: Synthetic oligonucleotide
  Sense strand starting at position 3059 of SEQ ID NO: 1886745
cugucauaguccgcgugua

SEQ ID NO: 2424007 - RNA, 19 nt, Artificial Sequence
  Description of Artificial Sequence: Synthetic oligonucleotide
  Antisense strand to SEQ ID NO: 2424006
uacacgcggacuaugacag

SEQ ID NO: 2424008 - RNA, 19 nt, Artificial Sequence
  Description of Artificial Sequence: Synthetic oligonucleotide
  Sense strand starting at position 3126 of SEQ ID NO: 1886745
uggcauauuugucauguga

SEQ ID NO: 2424009 - RNA, 19 nt, Artificial Sequence
  Description of Artificial Sequence: Synthetic oligonucleotide
  Antisense strand to SEQ ID NO: 2424008
ucacaugacaaauaugcca

SEQ ID NO: 2424010 - RNA, 19 nt, Artificial Sequence
  Description of Artificial Sequence: Synthetic oligonucleotide
  Sense strand starting at position 3128 of SEQ ID NO: 1886745
gcauauuugucaugugagc

SEQ ID NO: 2424011 - RNA, 19 nt, Artificial Sequence
  Description of Artificial Sequence: Synthetic oligonucleotide
  Antisense strand to SEQ ID NO: 2424010
gcucacaugacaaauaugc

SEQ ID NO: 2424012 - RNA, 19 nt, Artificial Sequence
  Description of Artificial Sequence: Synthetic oligonucleotide
  Sense strand starting at position 3130 of SEQ ID NO: 1886745
auauuugucaugugagcgu

SEQ ID NO: 2424013 - RNA, 19 nt, Artificial Sequence
  Description of Artificial Sequence: Synthetic oligonucleotide
  Antisense strand to SEQ ID NO: 2424012
acgcucacaugacaaauau

SEQ ID NO: 2424014 - RNA, 19 nt, Artificial Sequence
  Description of Artificial Sequence: Synthetic oligonucleotide
  Sense strand starting at position 3143 of SEQ ID NO: 1886745
gagcguucgcccuagcaag

SEQ ID NO: 2424015 - RNA, 19 nt, Artificial Sequence
  Description of Artificial Sequence: Synthetic oligonucleotide
  Antisense strand to SEQ ID NO: 2424014
cuugcuagggcgaacgcuc

SEQ ID NO: 2424016 - RNA, 19 nt, Artificial Sequence
  Description of Artificial Sequence: Synthetic oligonucleotide
  Sense strand starting at position 3168 of SEQ ID NO: 1886745
uggucauggcuaggccaaa

SEQ ID NO: 2424017 - RNA, 19 nt, Artificial Sequence
  Description of Artificial Sequence: Synthetic oligonucleotide
  Antisense strand to SEQ ID NO: 2424016
uuuggccuagccaugacca

SEQ ID NO: 2424018 - RNA, 19 nt, Artificial Sequence
  Description of Artificial Sequence: Synthetic oligonucleotide
  Sense strand starting at position 3282 of SEQ ID NO: 1886745
aggguaaccuuacauacaa

SEQ ID NO: 2424019 - RNA, 19 nt, Artificial Sequence
  Description of Artificial Sequence: Synthetic oligonucleotide
  Antisense strand to SEQ ID NO: 2424018
uuguauguaagguuacccu

SEQ ID NO: 2424020 - RNA, 19 nt, Artificial Sequence
  Description of Artificial Sequence: Synthetic oligonucleotide
  Sense strand starting at position 3535 of SEQ ID NO: 1886745
uugugucuuuaauagaggu

SEQ ID NO: 2424021 - RNA, 19 nt, Artificial Sequence
  Description of Artificial Sequence: Synthetic oligonucleotide
  Antisense strand to SEQ ID NO: 2424020
accucuauuaaagacacaa

SEQ ID NO: 2424022 - RNA, 19 nt, Artificial Sequence
  Description of Artificial Sequence: Synthetic oligonucleotide
  Sense strand starting at position 3660 of SEQ ID NO: 1886745
ccgugacuuugguucuuga

SEQ ID NO: 2424023 - RNA, 19 nt, Artificial Sequence
  Description of Artificial Sequence: Synthetic oligonucleotide
  Antisense strand to SEQ ID NO: 2424022
ucaagaaccaaagucacgg

SEQ ID NO: 2424024 - RNA, 19 nt, Artificial Sequence
  Description of Artificial Sequence: Synthetic oligonucleotide
  Sense strand starting at position 3663 of SEQ ID NO: 1886745
ugacuuugguucuugaaua

SEQ ID NO: 2424025 - RNA, 19 nt, Artificial Sequence
  Description of Artificial Sequence: Synthetic oligonucleotide
  Antisense strand to SEQ ID NO: 2424024
uauucaagaaccaaaguca

SEQ ID NO: 2424026 - RNA, 19 nt, Artificial Sequence
  Description of Artificial Sequence: Synthetic oligonucleotide
  Sense strand starting at position 3664 of SEQ ID NO: 1886745
gacuuugguucuugaauau

SEQ ID NO: 2424027 - RNA, 19 nt, Artificial Sequence
  Description of Artificial Sequence: Synthetic oligonucleotide
  Antisense strand to SEQ ID NO: 2424026
auauucaagaaccaaaguc

SEQ ID NO: 2424028 - RNA, 19 nt, Artificial Sequence
  Description of Artificial Sequence: Synthetic oligonucleotide
  Sense strand starting at position 3668 of SEQ ID NO: 1886745
uugguucuugaauaucaua

SEQ ID NO: 2424029 - RNA, 19 nt, Artificial Sequence
  Description of Artificial Sequence: Synthetic oligonucleotide
  Antisense strand to SEQ ID NO: 2424028
uaugauauucaagaaccaa

SEQ ID NO: 2424030 - RNA, 19 nt, Artificial Sequence
  Description of Artificial Sequence: Synthetic oligonucleotide
  Sense strand starting at position 3671 of SEQ ID NO: 1886745
guucuugaauaucauaaug

SEQ ID NO: 2424031 - RNA, 19 nt, Artificial Sequence
  Description of Artificial Sequence: Synthetic oligonucleotide
  Antisense strand to SEQ ID NO: 2424030
cauuaugauauucaagaac

SEQ ID NO: 2424032 - RNA, 19 nt, Artificial Sequence
  Description of Artificial Sequence: Synthetic oligonucleotide
  Sense strand starting at position 3673 of SEQ ID NO: 1886745
ucuugaauaucauaauggu

SEQ ID NO: 2424033 - RNA, 19 nt, Artificial Sequence
  Description of Artificial Sequence: Synthetic oligonucleotide
  Antisense strand to SEQ ID NO: 2424032
accauuaugauauucaaga

SEQ ID NO: 2424034 - RNA, 19 nt, Artificial Sequence
  Description of Artificial Sequence: Synthetic oligonucleotide
  Sense strand starting at position 3918 of SEQ ID NO: 1886745
uggcuucacccgugugacu

SEQ ID NO: 2424035 - RNA, 19 nt, Artificial Sequence
  Description of Artificial Sequence: Synthetic oligonucleotide
  Antisense strand to SEQ ID NO: 2424034
agucacacgggugaagcca

SEQ ID NO: 2424036 - RNA, 19 nt, Artificial Sequence
  Description of Artificial Sequence: Synthetic oligonucleotide
  Sense strand starting at position 95 of SEQ ID NO: 1886746
ucuggugguucuuccguaa

SEQ ID NO: 2424037 - RNA, 19 nt, Artificial Sequence
  Description of Artificial Sequence: Synthetic oligonucleotide
  Antisense strand to SEQ ID NO: 2424036
uuacggaagaaccaccaga

SEQ ID NO: 2424038 - RNA, 19 nt, Artificial Sequence
  Description of Artificial Sequence: Synthetic oligonucleotide
  Sense strand starting at position 98 of SEQ ID NO: 1886746
ggugguucuuccguaagag

SEQ ID NO: 2424039 - RNA, 19 nt, Artificial Sequence
  Description of Artificial Sequence: Synthetic oligonucleotide
  Antisense strand to SEQ ID NO: 2424038
cucuuacggaagaaccacc

SEQ ID NO: 2424040 - RNA, 19 nt, Artificial Sequence
  Description of Artificial Sequence: Synthetic oligonucleotide
  Sense strand starting at position 99 of SEQ ID NO: 1886746
gugguucuuccguaagagg

SEQ ID NO: 2424041 - RNA, 19 nt, Artificial Sequence
  Description of Artificial Sequence: Synthetic oligonucleotide
  Antisense strand to SEQ ID NO: 2424040
ccucuuacggaagaaccac

SEQ ID NO: 2424042 - RNA, 19 nt, Artificial Sequence
  Description of Artificial Sequence: Synthetic oligonucleotide
  Sense strand starting at position 101 of SEQ ID NO: 1886746
gguucuuccguaagagggu

SEQ ID NO: 2424043 - RNA, 19 nt, Artificial Sequence
  Description of Artificial Sequence: Synthetic oligonucleotide
  Antisense strand to SEQ ID NO: 2424042
acccucuuacggaagaacc

SEQ ID NO: 2424044 - RNA, 19 nt, Artificial Sequence
  Description of Artificial Sequence: Synthetic oligonucleotide
  Sense strand starting at position 198 of SEQ ID NO: 1886746
uagagcaugucuguccuau

SEQ ID NO: 2424045 - RNA, 19 nt, Artificial Sequence
  Description of Artificial Sequence: Synthetic oligonucleotide
  Antisense strand to SEQ ID NO: 2424044
auaggacagacaugcucua

SEQ ID NO: 2424046 - RNA, 19 nt, Artificial Sequence
  Description of Artificial Sequence: Synthetic oligonucleotide
  Sense strand starting at position 200 of SEQ ID NO: 1886746
gagcaugucuguccuaugu

SEQ ID NO: 2424047 - RNA, 19 nt, Artificial Sequence
  Description of Artificial Sequence: Synthetic oligonucleotide
  Antisense strand to SEQ ID NO: 2424046
acauaggacagacaugcuc

SEQ ID NO: 2424048 - RNA, 19 nt, Artificial Sequence
  Description of Artificial Sequence: Synthetic oligonucleotide
  Sense strand starting at position 210 of SEQ ID NO: 1886746
guccuaugugucuggaugu

SEQ ID NO: 2424049 - RNA, 19 nt, Artificial Sequence
  Description of Artificial Sequence: Synthetic oligonucleotide
  Antisense strand to SEQ ID NO: 2424048
acauccagacacauaggac

SEQ ID NO: 2424050 - RNA, 19 nt, Artificial Sequence
  Description of Artificial Sequence: Synthetic oligonucleotide
  Sense strand starting at position 286 of SEQ ID NO: 1886746
guaaguucugcuugcugga

SEQ ID NO: 2424051 - RNA, 19 nt, Artificial Sequence
  Description of Artificial Sequence: Synthetic oligonucleotide
  Antisense strand to SEQ ID NO: 2424050
uccagcaagcagaacuuac

SEQ ID NO: 2424052 - RNA, 19 nt, Artificial Sequence
  Description of Artificial Sequence: Synthetic oligonucleotide
  Sense strand starting at position 386 of SEQ ID NO: 1886746
guccuugccaucugugaga

SEQ ID NO: 2424053 - RNA, 19 nt, Artificial Sequence
  Description of Artificial Sequence: Synthetic oligonucleotide
  Antisense strand to SEQ ID NO: 2424052
ucucacagauggcaaggac

SEQ ID NO: 2424054 - RNA, 19 nt, Artificial Sequence
  Description of Artificial Sequence: Synthetic oligonucleotide
  Sense strand starting at position 388 of SEQ ID NO: 1886746
ccuugccaucugugagaag

SEQ ID NO: 2424055 - RNA, 19 nt, Artificial Sequence
  Description of Artificial Sequence: Synthetic oligonucleotide
  Antisense strand to SEQ ID NO: 2424054
cuucucacagauggcaagg

SEQ ID NO: 2424056 - RNA, 19 nt, Artificial Sequence
  Description of Artificial Sequence: Synthetic oligonucleotide
  Sense strand starting at position 439 of SEQ ID NO: 1886746
uaagguaaugcauguggaa

SEQ ID NO: 2424057 - RNA, 19 nt, Artificial Sequence
  Description of Artificial Sequence: Synthetic oligonucleotide
  Antisense strand to SEQ ID NO: 2424056
uuccacaugcauuaccuua

SEQ ID NO: 2424058 - RNA, 19 nt, Artificial Sequence
  Description of Artificial Sequence: Synthetic oligonucleotide
  Sense strand starting at position 441 of SEQ ID NO: 1886746
agguaaugcauguggaacu

SEQ ID NO: 2424059 - RNA, 19 nt, Artificial Sequence
  Description of Artificial Sequence: Synthetic oligonucleotide
  Antisense strand to SEQ ID NO: 2424058
aguuccacaugcauuaccu

SEQ ID NO: 2424060 - RNA, 19 nt, Artificial Sequence
  Description of Artificial Sequence: Synthetic oligonucleotide
  Sense strand starting at position 452 of SEQ ID NO: 1886746
guggaacucugaggaugau

SEQ ID NO: 2424061 - RNA, 19 nt, Artificial Sequence
  Description of Artificial Sequence: Synthetic oligonucleotide
  Antisense strand to SEQ ID NO: 2424060
aucauccucagaguuccac

SEQ ID NO: 2424062 - RNA, 19 nt, Artificial Sequence
  Description of Artificial Sequence: Synthetic oligonucleotide
  Sense strand starting at position 462 of SEQ ID NO: 1886746
gaggaugaugccugguacu

SEQ ID NO: 2424063 - RNA, 19 nt, Artificial Sequence
  Description of Artificial Sequence: Synthetic oligonucleotide
  Antisense strand to SEQ ID NO: 2424062
aguaccaggcaucauccuc

SEQ ID NO: 2424064 - RNA, 19 nt, Artificial Sequence
  Description of Artificial Sequence: Synthetic oligonucleotide
  Sense strand starting at position 572 of SEQ ID NO: 1886746
cuggaacacucaggaaguu

SEQ ID NO: 2424065 - RNA, 19 nt, Artificial Sequence
  Description of Artificial Sequence: Synthetic oligonucleotide
  Antisense strand to SEQ ID NO: 2424064
aacuuccugaguguuccag

SEQ ID NO: 2424066 - RNA, 19 nt, Artificial Sequence
  Description of Artificial Sequence: Synthetic oligonucleotide
  Sense strand starting at position 608 of SEQ ID NO: 1886746
aagggcuuaugagaaauaa

SEQ ID NO: 2424067 - RNA, 19 nt, Artificial Sequence
  Description of Artificial Sequence: Synthetic oligonucleotide
  Antisense strand to SEQ ID NO: 2424066
uuauuucucauaagcccuu

SEQ ID NO: 2424068 - RNA, 19 nt, Artificial Sequence
  Description of Artificial Sequence: Synthetic oligonucleotide
  Sense strand starting at position 650 of SEQ ID NO: 1886746
cgaugaggcauuugagucu

SEQ ID NO: 2424069 - RNA, 19 nt, Artificial Sequence
  Description of Artificial Sequence: Synthetic oligonucleotide
  Antisense strand to SEQ ID NO: 2424068
agacucaaaugccucaucg

SEQ ID NO: 2424070 - RNA, 19 nt, Artificial Sequence
  Description of Artificial Sequence: Synthetic oligonucleotide
  Sense strand starting at position 669 of SEQ ID NO: 1886746
guggcuuugucuuugcaga

SEQ ID NO: 2424071 - RNA, 19 nt, Artificial Sequence
  Description of Artificial Sequence: Synthetic oligonucleotide
  Antisense strand to SEQ ID NO: 2424070
ucugcaaagacaaagccac

SEQ ID NO: 2424072 - RNA, 19 nt, Artificial Sequence
  Description of Artificial Sequence: Synthetic oligonucleotide
  Sense strand starting at position 670 of SEQ ID NO: 1886746
uggcuuugucuuugcagaa

SEQ ID NO: 2424073 - RNA, 19 nt, Artificial Sequence
  Description of Artificial Sequence: Synthetic oligonucleotide
  Antisense strand to SEQ ID NO: 2424072
uucugcaaagacaaagcca

SEQ ID NO: 2424074 - RNA, 19 nt, Artificial Sequence
  Description of Artificial Sequence: Synthetic oligonucleotide
  Sense strand starting at position 671 of SEQ ID NO: 1886746
ggcuuugucuuugcagaau

SEQ ID NO: 2424075 - RNA, 19 nt, Artificial Sequence
  Description of Artificial Sequence: Synthetic oligonucleotide
  Antisense strand to SEQ ID NO: 2424074
auucugcaaagacaaagcc

SEQ ID NO: 2424076 - RNA, 19 nt, Artificial Sequence
  Description of Artificial Sequence: Synthetic oligonucleotide
  Sense strand starting at position 819 of SEQ ID NO: 1886746
gggacuaguacgugagcca

SEQ ID NO: 2424077 - RNA, 19 nt, Artificial Sequence
  Description of Artificial Sequence: Synthetic oligonucleotide
  Antisense strand to SEQ ID NO: 2424076
uggcucacguacuaguccc

SEQ ID NO: 2424078 - RNA, 19 nt, Artificial Sequence
  Description of Artificial Sequence: Synthetic oligonucleotide
  Sense strand starting at position 820 of SEQ ID NO: 1886746
ggacuaguacgugagccau

SEQ ID NO: 2424079 - RNA, 19 nt, Artificial Sequence
  Description of Artificial Sequence: Synthetic oligonucleotide
  Antisense strand to SEQ ID NO: 2424078
auggcucacguacuagucc

SEQ ID NO: 2424080 - RNA, 19 nt, Artificial Sequence
  Description of Artificial Sequence: Synthetic oligonucleotide
  Sense strand starting at position 874 of SEQ ID NO: 1886746
ggacacuagucccugggau

SEQ ID NO: 2424081 - RNA, 19 nt, Artificial Sequence
  Description of Artificial Sequence: Synthetic oligonucleotide
  Antisense strand to SEQ ID NO: 2424080
aucccagggacuagugucc

SEQ ID NO: 2424082 - RNA, 19 nt, Artificial Sequence
  Description of Artificial Sequence: Synthetic oligonucleotide
  Sense strand starting at position 875 of SEQ ID NO: 1886746
gacacuagucccugggaug

SEQ ID NO: 2424083 - RNA, 19 nt, Artificial Sequence
  Description of Artificial Sequence: Synthetic oligonucleotide
  Antisense strand to SEQ ID NO: 2424082
caucccagggacuaguguc

SEQ ID NO: 2424084 - RNA, 19 nt, Artificial Sequence
  Description of Artificial Sequence: Synthetic oligonucleotide
  Sense strand starting at position 989 of SEQ ID NO: 1886746
gauuccuugugauuagccu

SEQ ID NO: 2424085 - RNA, 19 nt, Artificial Sequence
  Description of Artificial Sequence: Synthetic oligonucleotide
  Antisense strand to SEQ ID NO: 2424084
aggcuaaucacaaggaauc

SEQ ID NO: 2424086 - RNA, 19 nt, Artificial Sequence
  Description of Artificial Sequence: Synthetic oligonucleotide
  Sense strand starting at position 1513 of SEQ ID NO: 1886746
gugugucuggugugaucua

SEQ ID NO: 2424087 - RNA, 19 nt, Artificial Sequence
  Description of Artificial Sequence: Synthetic oligonucleotide
  Antisense strand to SEQ ID NO: 2424086
uagaucacaccagacacac

SEQ ID NO: 2424088 - RNA, 19 nt, Artificial Sequence
  Description of Artificial Sequence: Synthetic oligonucleotide
  Sense strand starting at position 1834 of SEQ ID NO: 1886746
aguggugugcuugaggcaa

SEQ ID NO: 2424089 - RNA, 19 nt, Artificial Sequence
  Description of Artificial Sequence: Synthetic oligonucleotide
  Antisense strand to SEQ ID NO: 2424088
uugccucaagcacaccacu

SEQ ID NO: 2424090 - RNA, 19 nt, Artificial Sequence
  Description of Artificial Sequence: Synthetic oligonucleotide
  Sense strand starting at position 1966 of SEQ ID NO: 1886746
acuggacccgugugguuaa

SEQ ID NO: 2424091 - RNA, 19 nt, Artificial Sequence
  Description of Artificial Sequence: Synthetic oligonucleotide
  Antisense strand to SEQ ID NO: 2424090
uuaaccacacggguccagu

SEQ ID NO: 2424092 - RNA, 19 nt, Artificial Sequence
  Description of Artificial Sequence: Synthetic oligonucleotide
  Sense strand starting at position 2433 of SEQ ID NO: 1886746
gcaacaaaugccugcgaaa

SEQ ID NO: 2424093 - RNA, 19 nt, Artificial Sequence
  Description of Artificial Sequence: Synthetic oligonucleotide
  Antisense strand to SEQ ID NO: 2424092
uuucgcaggcauuuguugc

SEQ ID NO: 2424094 - RNA, 19 nt, Artificial Sequence
  Description of Artificial Sequence: Synthetic oligonucleotide
  Sense strand starting at position 3225 of SEQ ID NO: 1886746
ggaagcuuguauguaaggu

SEQ ID NO: 2424095 - RNA, 19 nt, Artificial Sequence
  Description of Artificial Sequence: Synthetic oligonucleotide
  Antisense strand to SEQ ID NO: 2424094
accuuacauacaagcuucc

SEQ ID NO: 2424096 - RNA, 19 nt, Artificial Sequence
  Description of Artificial Sequence: Synthetic oligonucleotide
  Sense strand starting at position 3226 of SEQ ID NO: 1886746
gaagcuuguauguaagguu

SEQ ID NO: 2424097 - RNA, 19 nt, Artificial Sequence
  Description of Artificial Sequence: Synthetic oligonucleotide
  Antisense strand to SEQ ID NO: 2424096
aaccuuacauacaagcuuc

SEQ ID NO: 2424098 - RNA, 19 nt, Artificial Sequence
  Description of Artificial Sequence: Synthetic oligonucleotide
  Sense strand starting at position 3288 of SEQ ID NO: 1886746
uucucuuguuuggugagau

SEQ ID NO: 2424099 - RNA, 19 nt, Artificial Sequence
  Description of Artificial Sequence: Synthetic oligonucleotide
  Antisense strand to SEQ ID NO: 2424098
aucucaccaaacaagagaa

SEQ ID NO: 2424100 - RNA, 19 nt, Artificial Sequence
  Description of Artificial Sequence: Synthetic oligonucleotide
  Sense strand starting at position 3566 of SEQ ID NO: 1886746
aaaugaauucgcugcgaau

SEQ ID NO: 2424101 - RNA, 19 nt, Artificial Sequence
  Description of Artificial Sequence: Synthetic oligonucleotide
  Antisense strand to SEQ ID NO: 2424100
auucgcagcgaauucauuu

SEQ ID NO: 2424102 - RNA, 19 nt, Artificial Sequence
  Description of Artificial Sequence: Synthetic oligonucleotide
  Sense strand starting at position 3568 of SEQ ID NO: 1886746
augaauucgcugcgaaugu

SEQ ID NO: 2424103 - RNA, 19 nt, Artificial Sequence
  Description of Artificial Sequence: Synthetic oligonucleotide
  Antisense strand to SEQ ID NO: 2424102
acauucgcagcgaauucau

SEQ ID NO: 2424104 - RNA, 19 nt, Artificial Sequence
  Description of Artificial Sequence: Synthetic oligonucleotide
  Sense strand starting at position 3585 of SEQ ID NO: 1886746
gugggaagaugcgcugaaa

SEQ ID NO: 2424105 - RNA, 19 nt, Artificial Sequence
  Description of Artificial Sequence: Synthetic oligonucleotide
  Antisense strand to SEQ ID NO: 2424104
uuucagcgcaucuucccac

SEQ ID NO: 2424106 - RNA, 19 nt, Artificial Sequence
  Description of Artificial Sequence: Synthetic oligonucleotide
  Sense strand starting at position 3617 of SEQ ID NO: 1886746
ucuggcuucgcucagguau

SEQ ID NO: 2424107 - RNA, 19 nt, Artificial Sequence
  Description of Artificial Sequence: Synthetic oligonucleotide
  Antisense strand to SEQ ID NO: 2424106
auaccugagcgaagccaga

SEQ ID NO: 2424108 - RNA, 19 nt, Artificial Sequence
  Description of Artificial Sequence: Synthetic oligonucleotide
  Sense strand starting at position 3710 of SEQ ID NO: 1886746
ggcccuuuaaugcgaguca

SEQ ID NO: 2424109 - RNA, 19 nt, Artificial Sequence
  Description of Artificial Sequence: Synthetic oligonucleotide
  Antisense strand to SEQ ID NO: 2424108
ugacucgcauuaaagggcc

SEQ ID NO: 2424110 - RNA, 19 nt, Artificial Sequence
  Description of Artificial Sequence: Synthetic oligonucleotide
  Sense strand starting at position 3719 of SEQ ID NO: 1886746
augcgagucaauggcagau

SEQ ID NO: 2424111 - RNA, 19 nt, Artificial Sequence
  Description of Artificial Sequence: Synthetic oligonucleotide
  Antisense strand to SEQ ID NO: 2424110
aucugccauugacucgcau

SEQ ID NO: 2424112 - RNA, 19 nt, Artificial Sequence
  Description of Artificial Sequence: Synthetic oligonucleotide
  Sense strand starting at position 3723 of SEQ ID NO: 1886746
gagucaauggcagaugcua

SEQ ID NO: 2424113 - RNA, 19 nt, Artificial Sequence
  Description of Artificial Sequence: Synthetic oligonucleotide
  Antisense strand to SEQ ID NO: 2424112
uagcaucugccauugacuc

SEQ ID NO: 2424114 - RNA, 19 nt, Artificial Sequence
  Description of Artificial Sequence: Synthetic oligonucleotide
  Sense strand starting at position 3725 of SEQ ID NO: 1886746
gucaauggcagaugcuaau

SEQ ID NO: 2424115 - RNA, 19 nt, Artificial Sequence
  Description of Artificial Sequence: Synthetic oligonucleotide
  Antisense strand to SEQ ID NO: 2424114
auuagcaucugccauugac

SEQ ID NO: 2424116 - RNA, 19 nt, Artificial Sequence
  Description of Artificial Sequence: Synthetic oligonucleotide
  Sense strand starting at position 266 of SEQ ID NO: 1886747
ggcgucuuuaccugucaga

SEQ ID NO: 2424117 - RNA, 19 nt, Artificial Sequence
  Description of Artificial Sequence: Synthetic oligonucleotide
  Antisense strand to SEQ ID NO: 2424116
ucugacagguaaagacgcc

SEQ ID NO: 2424118 - RNA, 19 nt, Artificial Sequence
  Description of Artificial Sequence: Synthetic oligonucleotide
  Sense strand starting at position 269 of SEQ ID NO: 1886747
gucuuuaccugucagagag

SEQ ID NO: 2424119 - RNA, 19 nt, Artificial Sequence
  Description of Artificial Sequence: Synthetic oligonucleotide
  Antisense strand to SEQ ID NO: 2424118
cucucugacagguaaagac

SEQ ID NO: 2424120 - RNA, 19 nt, Artificial Sequence
  Description of Artificial Sequence: Synthetic oligonucleotide
  Sense strand starting at position 720 of SEQ ID NO: 1886747
aggcuuacugcucaucaua

SEQ ID NO: 2424121 - RNA, 19 nt, Artificial Sequence
  Description of Artificial Sequence: Synthetic oligonucleotide
  Antisense strand to SEQ ID NO: 2424120
uaugaugagcaguaagccu

SEQ ID NO: 2424122 - RNA, 19 nt, Artificial Sequence
  Description of Artificial Sequence: Synthetic oligonucleotide
  Sense strand starting at position 955 of SEQ ID NO: 1886747
auggaaagcucaccuggaa

SEQ ID NO: 2424123 - RNA, 19 nt, Artificial Sequence
  Description of Artificial Sequence: Synthetic oligonucleotide
  Antisense strand to SEQ ID NO: 2424122
uuccaggugagcuuuccau

SEQ ID NO: 2424124 - RNA, 19 nt, Artificial Sequence
  Description of Artificial Sequence: Synthetic oligonucleotide
  Sense strand starting at position 1043 of SEQ ID NO: 1886747
uuaccuaggucucuguaga

SEQ ID NO: 2424125 - RNA, 19 nt, Artificial Sequence
  Description of Artificial Sequence: Synthetic oligonucleotide
  Antisense strand to SEQ ID NO: 2424124
ucuacagagaccuagguaa

SEQ ID NO: 2424126 - RNA, 19 nt, Artificial Sequence
  Description of Artificial Sequence: Synthetic oligonucleotide
  Sense strand starting at position 1044 of SEQ ID NO: 1886747
uaccuaggucucuguagau

SEQ ID NO: 2424127 - RNA, 19 nt, Artificial Sequence
  Description of Artificial Sequence: Synthetic oligonucleotide
  Antisense strand to SEQ ID NO: 2424126
aucuacagagaccuaggua

SEQ ID NO: 2424128 - RNA, 19 nt, Artificial Sequence
  Description of Artificial Sequence: Synthetic oligonucleotide
  Sense strand starting at position 1202 of SEQ ID NO: 1886747
gucaaaugcugucaguauc

SEQ ID NO: 2424129 - RNA, 19 nt, Artificial Sequence
  Description of Artificial Sequence: Synthetic oligonucleotide
  Antisense strand to SEQ ID NO: 2424128
gauacugacagcauuugac

SEQ ID NO: 2424130 - RNA, 19 nt, Artificial Sequence
  Description of Artificial Sequence: Synthetic oligonucleotide
  Sense strand starting at position 1298 of SEQ ID NO: 1886747
acuuaucauuacugguuua

SEQ ID NO: 2424131 - RNA, 19 nt, Artificial Sequence
  Description of Artificial Sequence: Synthetic oligonucleotide
  Antisense strand to SEQ ID NO: 2424130
uaaaccaguaaugauaagu

SEQ ID NO: 2424132 - RNA, 19 nt, Artificial Sequence
  Description of Artificial Sequence: Synthetic oligonucleotide
  Sense strand starting at position 1311 of SEQ ID NO: 1886747
gguuuacaagucugucuua

SEQ ID NO: 2424133 - RNA, 19 nt, Artificial Sequence
  Description of Artificial Sequence: Synthetic oligonucleotide
  Antisense strand to SEQ ID NO: 2424132
uaagacagacuuguaaacc

SEQ ID NO: 2424134 - RNA, 19 nt, Artificial Sequence
  Description of Artificial Sequence: Synthetic oligonucleotide
  Sense strand starting at position 1316 of SEQ ID NO: 1886747
acaagucugucuuagucau

SEQ ID NO: 2424135 - RNA, 19 nt, Artificial Sequence
  Description of Artificial Sequence: Synthetic oligonucleotide
  Antisense strand to SEQ ID NO: 2424134
augacuaagacagacuugu

SEQ ID NO: 2424136 - RNA, 19 nt, Artificial Sequence
  Description of Artificial Sequence: Synthetic oligonucleotide
  Sense strand starting at position 1320 of SEQ ID NO: 1886747
gucugucuuagucauuaga

SEQ ID NO: 2424137 - RNA, 19 nt, Artificial Sequence
  Description of Artificial Sequence: Synthetic oligonucleotide
  Antisense strand to SEQ ID NO: 2424136
ucuaaugacuaagacagac

SEQ ID NO: 2424138 - RNA, 19 nt, Artificial Sequence
  Description of Artificial Sequence: Synthetic oligonucleotide
  Sense strand starting at position 1322 of SEQ ID NO: 1886747
cugucuuagucauuagaca

SEQ ID NO: 2424139 - RNA, 19 nt, Artificial Sequence
  Description of Artificial Sequence: Synthetic oligonucleotide
  Antisense strand to SEQ ID NO: 2424138
ugucuaaugacuaagacag

SEQ ID NO: 2424140 - RNA, 19 nt, Artificial Sequence
  Description of Artificial Sequence: Synthetic oligonucleotide
  Sense strand starting at position 1323 of SEQ ID NO: 1886747
ugucuuagucauuagacau

SEQ ID NO: 2424141 - RNA, 19 nt, Artificial Sequence
  Description of Artificial Sequence: Synthetic oligonucleotide
  Antisense strand to SEQ ID NO: 2424140
augucuaaugacuaagaca

SEQ ID NO: 2424142 - RNA, 19 nt, Artificial Sequence
  Description of Artificial Sequence: Synthetic oligonucleotide
  Sense strand starting at position 1330 of SEQ ID NO: 1886747
gucauuagacauggaauuc

SEQ ID NO: 2424143 - RNA, 19 nt, Artificial Sequence
  Description of Artificial Sequence: Synthetic oligonucleotide
  Antisense strand to SEQ ID NO: 2424142
gaauuccaugucuaaugac

SEQ ID NO: 2424144 - RNA, 19 nt, Artificial Sequence
  Description of Artificial Sequence: Synthetic oligonucleotide
  Sense strand starting at position 1342 of SEQ ID NO: 1886747
ggaauuccuccagggugga

SEQ ID NO: 2424145 - RNA, 19 nt, Artificial Sequence
  Description of Artificial Sequence: Synthetic oligonucleotide
  Antisense strand to SEQ ID NO: 2424144
uccacccuggaggaauucc

SEQ ID NO: 2424146 - RNA, 19 nt, Artificial Sequence
  Description of Artificial Sequence: Synthetic oligonucleotide
  Sense strand starting at position 1343 of SEQ ID NO: 1886747
gaauuccuccaggguggau

SEQ ID NO: 2424147 - RNA, 19 nt, Artificial Sequence
  Description of Artificial Sequence: Synthetic oligonucleotide
  Antisense strand to SEQ ID NO: 2424146
auccacccuggaggaauuc

SEQ ID NO: 2424148 - RNA, 19 nt, Artificial Sequence
  Description of Artificial Sequence: Synthetic oligonucleotide
  Sense strand starting at position 1412 of SEQ ID NO: 1886747
ccaaguggaugcuuaguaa

SEQ ID NO: 2424149 - RNA, 19 nt, Artificial Sequence
  Description of Artificial Sequence: Synthetic oligonucleotide
  Antisense strand to SEQ ID NO: 2424148
uuacuaagcauccacuugg

SEQ ID NO: 2424150 - RNA, 19 nt, Artificial Sequence
  Description of Artificial Sequence: Synthetic oligonucleotide
  Sense strand starting at position 1555 of SEQ ID NO: 1886747
aagcaagauuaauagggau

SEQ ID NO: 2424151 - RNA, 19 nt, Artificial Sequence
  Description of Artificial Sequence: Synthetic oligonucleotide
  Antisense strand to SEQ ID NO: 2424150
aucccuauuaaucuugcuu

SEQ ID NO: 2424152 - RNA, 19 nt, Artificial Sequence
  Description of Artificial Sequence: Synthetic oligonucleotide
  Sense strand starting at position 1558 of SEQ ID NO: 1886747
caagauuaauagggauaga

SEQ ID NO: 2424153 - RNA, 19 nt, Artificial Sequence
  Description of Artificial Sequence: Synthetic oligonucleotide
  Antisense strand to SEQ ID NO: 2424152
ucuaucccuauuaaucuug

SEQ ID NO: 2424154 - RNA, 19 nt, Artificial Sequence
  Description of Artificial Sequence: Synthetic oligonucleotide
  Sense strand starting at position 1776 of SEQ ID NO: 1886747
gggcuuuaucuguauggca

SEQ ID NO: 2424155 - RNA, 19 nt, Artificial Sequence
  Description of Artificial Sequence: Synthetic oligonucleotide
  Antisense strand to SEQ ID NO: 2424154
ugccauacagauaaagccc

SEQ ID NO: 2424156 - RNA, 19 nt, Artificial Sequence
  Description of Artificial Sequence: Synthetic oligonucleotide
  Sense strand starting at position 1778 of SEQ ID NO: 1886747
gcuuuaucuguauggcaaa

SEQ ID NO: 2424157 - RNA, 19 nt, Artificial Sequence
  Description of Artificial Sequence: Synthetic oligonucleotide
  Antisense strand to SEQ ID NO: 2424156
uuugccauacagauaaagc

SEQ ID NO: 2424158 - RNA, 19 nt, Artificial Sequence
  Description of Artificial Sequence: Synthetic oligonucleotide
  Sense strand starting at position 1806 of SEQ ID NO: 1886747
agggaagggucuaagguua

SEQ ID NO: 2424159 - RNA, 19 nt, Artificial Sequence
  Description of Artificial Sequence: Synthetic oligonucleotide
  Antisense strand to SEQ ID NO: 2424158
uaaccuuagacccuucccu

SEQ ID NO: 2424160 - RNA, 19 nt, Artificial Sequence
  Description of Artificial Sequence: Synthetic oligonucleotide
  Sense strand starting at position 1821 of SEQ ID NO: 1886747
guuacaguagcagaagaau

SEQ ID NO: 2424161 - RNA, 19 nt, Artificial Sequence
  Description of Artificial Sequence: Synthetic oligonucleotide
  Antisense strand to SEQ ID NO: 2424160
auucuucugcuacuguaac

SEQ ID NO: 2424162 - RNA, 19 nt, Artificial Sequence
  Description of Artificial Sequence: Synthetic oligonucleotide
  Sense strand starting at position 1987 of SEQ ID NO: 1886747
cugugaaagugccagguaa

SEQ ID NO: 2424163 - RNA, 19 nt, Artificial Sequence
  Description of Artificial Sequence: Synthetic oligonucleotide
  Antisense strand to SEQ ID NO: 2424162
uuaccuggcacuuucacag

SEQ ID NO: 2424164 - RNA, 19 nt, Artificial Sequence
  Description of Artificial Sequence: Synthetic oligonucleotide
  Sense strand starting at position 1989 of SEQ ID NO: 1886747
gugaaagugccagguaaca

SEQ ID NO: 2424165 - RNA, 19 nt, Artificial Sequence
  Description of Artificial Sequence: Synthetic oligonucleotide
  Antisense strand to SEQ ID NO: 2424164
uguuaccuggcacuuucac

SEQ ID NO: 2424166 - RNA, 19 nt, Artificial Sequence
  Description of Artificial Sequence: Synthetic oligonucleotide
  Sense strand starting at position 2030 of SEQ ID NO: 1886747
ccaugcacuugagacauau

SEQ ID NO: 2424167 - RNA, 19 nt, Artificial Sequence
  Description of Artificial Sequence: Synthetic oligonucleotide
  Antisense strand to SEQ ID NO: 2424166
auaugucucaagugcaugg

SEQ ID NO: 2424168 - RNA, 19 nt, Artificial Sequence
  Description of Artificial Sequence: Synthetic oligonucleotide
  Sense strand starting at position 2115 of SEQ ID NO: 1886747
agggcauguucagagaagu

SEQ ID NO: 2424169 - RNA, 19 nt, Artificial Sequence
  Description of Artificial Sequence: Synthetic oligonucleotide
  Antisense strand to SEQ ID NO: 2424168
acuucucugaacaugcccu

SEQ ID NO: 2424170 - RNA, 19 nt, Artificial Sequence
  Description of Artificial Sequence: Synthetic oligonucleotide
  Sense strand starting at position 2135 of SEQ ID NO: 1886747
gcaaguaacggucagagga

SEQ ID NO: 2424171 - RNA, 19 nt, Artificial Sequence
  Description of Artificial Sequence: Synthetic oligonucleotide
  Antisense strand to SEQ ID NO: 2424170
uccucugaccguuacuugc

SEQ ID NO: 2424172 - RNA, 19 nt, Artificial Sequence
  Description of Artificial Sequence: Synthetic oligonucleotide
  Sense strand starting at position 2195 of SEQ ID NO: 1886747
gcaauacgcucuuccacua

SEQ ID NO: 2424173 - RNA, 19 nt, Artificial Sequence
  Description of Artificial Sequence: Synthetic oligonucleotide
  Antisense strand to SEQ ID NO: 2424172
uaguggaagagcguauugc

SEQ ID NO: 2424174 - RNA, 19 nt, Artificial Sequence
  Description of Artificial Sequence: Synthetic oligonucleotide
  Sense strand starting at position 2293 of SEQ ID NO: 1886747
guccauuacuagcagaacu

SEQ ID NO: 2424175 - RNA, 19 nt, Artificial Sequence
  Description of Artificial Sequence: Synthetic oligonucleotide
  Antisense strand to SEQ ID NO: 2424174
aguucugcuaguaauggac

SEQ ID NO: 2424176 - RNA, 19 nt, Artificial Sequence
  Description of Artificial Sequence: Synthetic oligonucleotide
  Sense strand starting at position 3042 of SEQ ID NO: 1886747
agggacugcucaccaagau

SEQ ID NO: 2424177 - RNA, 19 nt, Artificial Sequence
  Description of Artificial Sequence: Synthetic oligonucleotide
  Antisense strand to SEQ ID NO: 2424176
aucuuggugagcagucccu

SEQ ID NO: 2424178 - RNA, 19 nt, Artificial Sequence
  Description of Artificial Sequence: Synthetic oligonucleotide
  Sense strand starting at position 3096 of SEQ ID NO: 1886747
gggagaccuucuuuaacca

SEQ ID NO: 2424179 - RNA, 19 nt, Artificial Sequence
  Description of Artificial Sequence: Synthetic oligonucleotide
  Antisense strand to SEQ ID NO: 2424178
ugguuaaagaaggucuccc

SEQ ID NO: 2424180 - RNA, 19 nt, Artificial Sequence
  Description of Artificial Sequence: Synthetic oligonucleotide
  Sense strand starting at position 3124 of SEQ ID NO: 1886747
cuggccucuuaggaaagua

SEQ ID NO: 2424181 - RNA, 19 nt, Artificial Sequence
  Description of Artificial Sequence: Synthetic oligonucleotide
  Antisense strand to SEQ ID NO: 2424180
uacuuuccuaagaggccag

SEQ ID NO: 2424182 - RNA, 19 nt, Artificial Sequence
  Description of Artificial Sequence: Synthetic oligonucleotide
  Sense strand starting at position 3161 of SEQ ID NO: 1886747
ggcucacuauggucuaaag

SEQ ID NO: 2424183 - RNA, 19 nt, Artificial Sequence
  Description of Artificial Sequence: Synthetic oligonucleotide
  Antisense strand to SEQ ID NO: 2424182
cuuuagaccauagugagcc

SEQ ID NO: 2424184 - RNA, 19 nt, Artificial Sequence
  Description of Artificial Sequence: Synthetic oligonucleotide
  Sense strand starting at position 3229 of SEQ ID NO: 1886747
gagggaagguuugcaaucu

SEQ ID NO: 2424185 - RNA, 19 nt, Artificial Sequence
  Description of Artificial Sequence: Synthetic oligonucleotide
  Antisense strand to SEQ ID NO: 2424184
agauugcaaaccuucccuc

SEQ ID NO: 2424186 - RNA, 19 nt, Artificial Sequence
  Description of Artificial Sequence: Synthetic oligonucleotide
  Sense strand starting at position 3295 of SEQ ID NO: 1886747
uggccagacuagugucaaa

SEQ ID NO: 2424187 - RNA, 19 nt, Artificial Sequence
  Description of Artificial Sequence: Synthetic oligonucleotide
  Antisense strand to SEQ ID NO: 2424186
uuugacacuagucuggcca

SEQ ID NO: 2424188 - RNA, 19 nt, Artificial Sequence
  Description of Artificial Sequence: Synthetic oligonucleotide
  Sense strand starting at position 3788 of SEQ ID NO: 1886747
ucaagaucagcuugguaug

SEQ ID NO: 2424189 - RNA, 19 nt, Artificial Sequence
  Description of Artificial Sequence: Synthetic oligonucleotide
  Antisense strand to SEQ ID NO: 2424188
cauaccaagcugaucuuga

SEQ ID NO: 2424190 - RNA, 19 nt, Artificial Sequence
  Description of Artificial Sequence: Synthetic oligonucleotide
  Sense strand starting at position 3790 of SEQ ID NO: 1886747
aagaucagcuugguaugua

SEQ ID NO: 2424191 - RNA, 19 nt, Artificial Sequence
  Description of Artificial Sequence: Synthetic oligonucleotide
  Antisense strand to SEQ ID NO: 2424190
uacauaccaagcugaucuu

SEQ ID NO: 2424192 - RNA, 19 nt, Artificial Sequence
  Description of Artificial Sequence: Synthetic oligonucleotide
  Sense strand starting at position 3791 of SEQ ID NO: 1886747
agaucagcuugguauguaa

SEQ ID NO: 2424193 - RNA, 19 nt, Artificial Sequence
  Description of Artificial Sequence: Synthetic oligonucleotide
  Antisense strand to SEQ ID NO: 2424192
uuacauaccaagcugaucu

SEQ ID NO: 2424194 - RNA, 19 nt, Artificial Sequence
  Description of Artificial Sequence: Synthetic oligonucleotide
  Sense strand starting at position 3793 of SEQ ID NO: 1886747
aucagcuugguauguaaca

SEQ ID NO: 2424195 - RNA, 19 nt, Artificial Sequence
  Description of Artificial Sequence: Synthetic oligonucleotide
  Antisense strand to SEQ ID NO: 2424194
uguuacauaccaagcugau

SEQ ID NO: 2424196 - RNA, 19 nt, Artificial Sequence
  Description of Artificial Sequence: Synthetic oligonucleotide
  Sense strand starting at position 27 of SEQ ID NO: 1886748
gcaguaaauuaccuuuaag

SEQ ID NO: 2424197 - RNA, 19 nt, Artificial Sequence
  Description of Artificial Sequence: Synthetic oligonucleotide
  Antisense strand to SEQ ID NO: 2424196
cuuaaagguaauuuacugc

SEQ ID NO: 2424198 - RNA, 19 nt, Artificial Sequence
  Description of Artificial Sequence: Synthetic oligonucleotide
  Sense strand starting at position 30 of SEQ ID NO: 1886748
guaaauuaccuuuaaguca

SEQ ID NO: 2424199 - RNA, 19 nt, Artificial Sequence
  Description of Artificial Sequence: Synthetic oligonucleotide
  Antisense strand to SEQ ID NO: 2424198
ugacuuaaagguaauuuac

SEQ ID NO: 2424200 - RNA, 19 nt, Artificial Sequence
  Description of Artificial Sequence: Synthetic oligonucleotide
  Sense strand starting at position 53 of SEQ ID NO: 1886748
ccugauguagcucagcuaa

SEQ ID NO: 2424201 - RNA, 19 nt, Artificial Sequence
  Description of Artificial Sequence: Synthetic oligonucleotide
  Antisense strand to SEQ ID NO: 2424200
uuagcugagcuacaucagg

SEQ ID NO: 2424202 - RNA, 19 nt, Artificial Sequence
  Description of Artificial Sequence: Synthetic oligonucleotide
  Sense strand starting at position 557 of SEQ ID NO: 1886748
cuacgaaugcuagauucua

SEQ ID NO: 2424203 - RNA, 19 nt, Artificial Sequence
  Description of Artificial Sequence: Synthetic oligonucleotide
  Antisense strand to SEQ ID NO: 2424202
uagaaucuagcauucguag

SEQ ID NO: 2424204 - RNA, 19 nt, Artificial Sequence
  Description of Artificial Sequence: Synthetic oligonucleotide
  Sense strand starting at position 570 of SEQ ID NO: 1886748
auucuaagacuuuggcaac

SEQ ID NO: 2424205 - RNA, 19 nt, Artificial Sequence
  Description of Artificial Sequence: Synthetic oligonucleotide
  Antisense strand to SEQ ID NO: 2424204
guugccaaagucuuagaau

SEQ ID NO: 2424206 - RNA, 19 nt, Artificial Sequence
  Description of Artificial Sequence: Synthetic oligonucleotide
  Sense strand starting at position 612 of SEQ ID NO: 1886748
cuuguuguccuuuaacaua

SEQ ID NO: 2424207 - RNA, 19 nt, Artificial Sequence
  Description of Artificial Sequence: Synthetic oligonucleotide
  Antisense strand to SEQ ID NO: 2424206
uauguuaaaggacaacaag

SEQ ID NO: 2424208 - RNA, 19 nt, Artificial Sequence
  Description of Artificial Sequence: Synthetic oligonucleotide
  Sense strand starting at position 883 of SEQ ID NO: 1886748
ucauaaugugcugaagauu

SEQ ID NO: 2424209 - RNA, 19 nt, Artificial Sequence
  Description of Artificial Sequence: Synthetic oligonucleotide
  Antisense strand to SEQ ID NO: 2424208
aaucuucagcacauuauga

SEQ ID NO: 2424210 - RNA, 19 nt, Artificial Sequence
  Description of Artificial Sequence: Synthetic oligonucleotide
  Sense strand starting at position 923 of SEQ ID NO: 1886748
ugaaacucacaguguguaa

SEQ ID NO: 2424211 - RNA, 19 nt, Artificial Sequence
  Description of Artificial Sequence: Synthetic oligonucleotide
  Antisense strand to SEQ ID NO: 2424210
uuacacacugugaguuuca

SEQ ID NO: 2424212 - RNA, 19 nt, Artificial Sequence
  Description of Artificial Sequence: Synthetic oligonucleotide
  Sense strand starting at position 926 of SEQ ID NO: 1886748
aacucacaguguguaagau

SEQ ID NO: 2424213 - RNA, 19 nt, Artificial Sequence
  Description of Artificial Sequence: Synthetic oligonucleotide
  Antisense strand to SEQ ID NO: 2424212
aucuuacacacugugaguu

SEQ ID NO: 2424214 - RNA, 19 nt, Artificial Sequence
  Description of Artificial Sequence: Synthetic oligonucleotide
  Sense strand starting at position 957 of SEQ ID NO: 1886748
agcuaaugugaucauuccu

SEQ ID NO: 2424215 - RNA, 19 nt, Artificial Sequence
  Description of Artificial Sequence: Synthetic oligonucleotide
  Antisense strand to SEQ ID NO: 2424214
aggaaugaucacauuagcu

SEQ ID NO: 2424216 - RNA, 19 nt, Artificial Sequence
  Description of Artificial Sequence: Synthetic oligonucleotide
  Sense strand starting at position 962 of SEQ ID NO: 1886748
augugaucauuccuagcca

SEQ ID NO: 2424217 - RNA, 19 nt, Artificial Sequence
  Description of Artificial Sequence: Synthetic oligonucleotide
  Antisense strand to SEQ ID NO: 2424216
uggcuaggaaugaucacau

SEQ ID NO: 2424218 - RNA, 19 nt, Artificial Sequence
  Description of Artificial Sequence: Synthetic oligonucleotide
  Sense strand starting at position 1175 of SEQ ID NO: 1886748
guagaauuacucuguauau

SEQ ID NO: 2424219 - RNA, 19 nt, Artificial Sequence
  Description of Artificial Sequence: Synthetic oligonucleotide
  Antisense strand to SEQ ID NO: 2424218
auauacagaguaauucuac

SEQ ID NO: 2424220 - RNA, 19 nt, Artificial Sequence
  Description of Artificial Sequence: Synthetic oligonucleotide
  Sense strand starting at position 1437 of SEQ ID NO: 1886748
ggaugauagccaugcuuaa

SEQ ID NO: 2424221 - RNA, 19 nt, Artificial Sequence
  Description of Artificial Sequence: Synthetic oligonucleotide
  Antisense strand to SEQ ID NO: 2424220
uuaagcauggcuaucaucc

SEQ ID NO: 2424222 - RNA, 19 nt, Artificial Sequence
  Description of Artificial Sequence: Synthetic oligonucleotide
  Sense strand starting at position 1516 of SEQ ID NO: 1886748
ucaguauacccaggucauu

SEQ ID NO: 2424223 - RNA, 19 nt, Artificial Sequence
  Description of Artificial Sequence: Synthetic oligonucleotide
  Antisense strand to SEQ ID NO: 2424222
aaugaccuggguauacuga

SEQ ID NO: 2424224 - RNA, 19 nt, Artificial Sequence
  Description of Artificial Sequence: Synthetic oligonucleotide
  Sense strand starting at position 1629 of SEQ ID NO: 1886748
uuaacugauucuccgguua

SEQ ID NO: 2424225 - RNA, 19 nt, Artificial Sequence
  Description of Artificial Sequence: Synthetic oligonucleotide
  Antisense strand to SEQ ID NO: 2424224
uaaccggagaaucaguuaa

SEQ ID NO: 2424226 - RNA, 19 nt, Artificial Sequence
  Description of Artificial Sequence: Synthetic oligonucleotide
  Sense strand starting at position 1718 of SEQ ID NO: 1886748
acccaucuacucuguggua

SEQ ID NO: 2424227 - RNA, 19 nt, Artificial Sequence
  Description of Artificial Sequence: Synthetic oligonucleotide
  Antisense strand to SEQ ID NO: 2424226
uaccacagaguagaugggu

SEQ ID NO: 2424228 - RNA, 19 nt, Artificial Sequence
  Description of Artificial Sequence: Synthetic oligonucleotide
  Sense strand starting at position 1784 of SEQ ID NO: 1886748
cuugaaacuuugcuacaga

SEQ ID NO: 2424229 - RNA, 19 nt, Artificial Sequence
  Description of Artificial Sequence: Synthetic oligonucleotide
  Antisense strand to SEQ ID NO: 2424228
ucuguagcaaaguuucaag

SEQ ID NO: 2424230 - RNA, 19 nt, Artificial Sequence
  Description of Artificial Sequence: Synthetic oligonucleotide
  Sense strand starting at position 1787 of SEQ ID NO: 1886748
gaaacuuugcuacagagua

SEQ ID NO: 2424231 - RNA, 19 nt, Artificial Sequence
  Description of Artificial Sequence: Synthetic oligonucleotide
  Antisense strand to SEQ ID NO: 2424230
uacucuguagcaaaguuuc

SEQ ID NO: 2424232 - RNA, 19 nt, Artificial Sequence
  Description of Artificial Sequence: Synthetic oligonucleotide
  Sense strand starting at position 1795 of SEQ ID NO: 1886748
gcuacagaguauguggaaa

SEQ ID NO: 2424233 - RNA, 19 nt, Artificial Sequence
  Description of Artificial Sequence: Synthetic oligonucleotide
  Antisense strand to SEQ ID NO: 2424232
uuuccacauacucuguagc

SEQ ID NO: 2424234 - RNA, 19 nt, Artificial Sequence
  Description of Artificial Sequence: Synthetic oligonucleotide
  Sense strand starting at position 1857 of SEQ ID NO: 1886748
gaaauagagccauguuccu

SEQ ID NO: 2424235 - RNA, 19 nt, Artificial Sequence
  Description of Artificial Sequence: Synthetic oligonucleotide
  Antisense strand to SEQ ID NO: 2424234
aggaacauggcucuauuuc

SEQ ID NO: 2424236 - RNA, 19 nt, Artificial Sequence
  Description of Artificial Sequence: Synthetic oligonucleotide
  Sense strand starting at position 1862 of SEQ ID NO: 1886748
agagccauguuccuuaacu

SEQ ID NO: 2424237 - RNA, 19 nt, Artificial Sequence
  Description of Artificial Sequence: Synthetic oligonucleotide
  Antisense strand to SEQ ID NO: 2424236
aguuaaggaacauggcucu

SEQ ID NO: 2424238 - RNA, 19 nt, Artificial Sequence
  Description of Artificial Sequence: Synthetic oligonucleotide
  Sense strand starting at position 2019 of SEQ ID NO: 1886748
ccaaguuauugagcaaaga

SEQ ID NO: 2424239 - RNA, 19 nt, Artificial Sequence
  Description of Artificial Sequence: Synthetic oligonucleotide
  Antisense strand to SEQ ID NO: 2424238
ucuuugcucaauaacuugg

SEQ ID NO: 2424240 - RNA, 19 nt, Artificial Sequence
  Description of Artificial Sequence: Synthetic oligonucleotide
  Sense strand starting at position 2122 of SEQ ID NO: 1886748
uugaauaagccucagcuca

SEQ ID NO: 2424241 - RNA, 19 nt, Artificial Sequence
  Description of Artificial Sequence: Synthetic oligonucleotide
  Antisense strand to SEQ ID NO: 2424240
ugagcugaggcuuauucaa

SEQ ID NO: 2424242 - RNA, 19 nt, Artificial Sequence
  Description of Artificial Sequence: Synthetic oligonucleotide
  Sense strand starting at position 2130 of SEQ ID NO: 1886748
gccucagcucaguagaauu

SEQ ID NO: 2424243 - RNA, 19 nt, Artificial Sequence
  Description of Artificial Sequence: Synthetic oligonucleotide
  Antisense strand to SEQ ID NO: 2424242
aauucuacugagcugaggc

SEQ ID NO: 2424244 - RNA, 19 nt, Artificial Sequence
  Description of Artificial Sequence: Synthetic oligonucleotide
  Sense strand starting at position 2138 of SEQ ID NO: 1886748
ucaguagaauuugaccuua

SEQ ID NO: 2424245 - RNA, 19 nt, Artificial Sequence
  Description of Artificial Sequence: Synthetic oligonucleotide
  Antisense strand to SEQ ID NO: 2424244
uaaggucaaauucuacuga

SEQ ID NO: 2424246 - RNA, 19 nt, Artificial Sequence
  Description of Artificial Sequence: Synthetic oligonucleotide
  Sense strand starting at position 2253 of SEQ ID NO: 1886748
ucaggacagcauuguuuau

SEQ ID NO: 2424247 - RNA, 19 nt, Artificial Sequence
  Description of Artificial Sequence: Synthetic oligonucleotide
  Antisense strand to SEQ ID NO: 2424246
auaaacaaugcuguccuga

SEQ ID NO: 2424248 - RNA, 19 nt, Artificial Sequence
  Description of Artificial Sequence: Synthetic oligonucleotide
  Sense strand starting at position 2255 of SEQ ID NO: 1886748
aggacagcauuguuuauaa

SEQ ID NO: 2424249 - RNA, 19 nt, Artificial Sequence
  Description of Artificial Sequence: Synthetic oligonucleotide
  Antisense strand to SEQ ID NO: 2424248
uuauaaacaaugcuguccu

SEQ ID NO: 2424250 - RNA, 19 nt, Artificial Sequence
  Description of Artificial Sequence: Synthetic oligonucleotide
  Sense strand starting at position 2688 of SEQ ID NO: 1886748
agcaaagagcauuaucauu

SEQ ID NO: 2424251 - RNA, 19 nt, Artificial Sequence
  Description of Artificial Sequence: Synthetic oligonucleotide
  Antisense strand to SEQ ID NO: 2424250
aaugauaaugcucuuugcu

SEQ ID NO: 2424252 - RNA, 19 nt, Artificial Sequence
  Description of Artificial Sequence: Synthetic oligonucleotide
  Sense strand starting at position 2812 of SEQ ID NO: 1886748
uauguauaacagugguaaa

SEQ ID NO: 2424253 - RNA, 19 nt, Artificial Sequence
  Description of Artificial Sequence: Synthetic oligonucleotide
  Antisense strand to SEQ ID NO: 2424252
uuuaccacuguuauacaua

SEQ ID NO: 2424254 - RNA, 19 nt, Artificial Sequence
  Description of Artificial Sequence: Synthetic oligonucleotide
  Sense strand starting at position 2840 of SEQ ID NO: 1886748
ucaugcauggcaugacaaa

SEQ ID NO: 2424255 - RNA, 19 nt, Artificial Sequence
  Description of Artificial Sequence: Synthetic oligonucleotide
  Antisense strand to SEQ ID NO: 2424254
uuugucaugccaugcauga

SEQ ID NO: 2424256 - RNA, 19 nt, Artificial Sequence
  Description of Artificial Sequence: Synthetic oligonucleotide
  Sense strand starting at position 2865 of SEQ ID NO: 1886748
ucauaauagugguuacuuu

SEQ ID NO: 2424257 - RNA, 19 nt, Artificial Sequence
  Description of Artificial Sequence: Synthetic oligonucleotide
  Antisense strand to SEQ ID NO: 2424256
aaaguaaccacuauuauga

SEQ ID NO: 2424258 - RNA, 19 nt, Artificial Sequence
  Description of Artificial Sequence: Synthetic oligonucleotide
  Sense strand starting at position 3142 of SEQ ID NO: 1886748
gcgugucaaggaaguuuga

SEQ ID NO: 2424259 - RNA, 19 nt, Artificial Sequence
  Description of Artificial Sequence: Synthetic oligonucleotide
  Antisense strand to SEQ ID NO: 2424258
ucaaacuuccuugacacgc

SEQ ID NO: 2424260 - RNA, 19 nt, Artificial Sequence
  Description of Artificial Sequence: Synthetic oligonucleotide
  Sense strand starting at position 3159 of SEQ ID NO: 1886748
gaauacaggcuaugaaagu

SEQ ID NO: 2424261 - RNA, 19 nt, Artificial Sequence
  Description of Artificial Sequence: Synthetic oligonucleotide
  Antisense strand to SEQ ID NO: 2424260
acuuucauagccuguauuc

SEQ ID NO: 2424262 - RNA, 19 nt, Artificial Sequence
  Description of Artificial Sequence: Synthetic oligonucleotide
  Sense strand starting at position 3169 of SEQ ID NO: 1886748
uaugaaaguuuggcucaau

SEQ ID NO: 2424263 - RNA, 19 nt, Artificial Sequence
  Description of Artificial Sequence: Synthetic oligonucleotide
  Antisense strand to SEQ ID NO: 2424262
auugagccaaacuuucaua

SEQ ID NO: 2424264 - RNA, 19 nt, Artificial Sequence
  Description of Artificial Sequence: Synthetic oligonucleotide
  Sense strand starting at position 3170 of SEQ ID NO: 1886748
augaaaguuuggcucaaua

SEQ ID NO: 2424265 - RNA, 19 nt, Artificial Sequence
  Description of Artificial Sequence: Synthetic oligonucleotide
  Antisense strand to SEQ ID NO: 2424264
uauugagccaaacuuucau

SEQ ID NO: 2424266 - RNA, 19 nt, Artificial Sequence
  Description of Artificial Sequence: Synthetic oligonucleotide
  Sense strand starting at position 3172 of SEQ ID NO: 1886748
gaaaguuuggcucaauacu

SEQ ID NO: 2424267 - RNA, 19 nt, Artificial Sequence
  Description of Artificial Sequence: Synthetic oligonucleotide
  Antisense strand to SEQ ID NO: 2424266
aguauugagccaaacuuuc

SEQ ID NO: 2424268 - RNA, 19 nt, Artificial Sequence
  Description of Artificial Sequence: Synthetic oligonucleotide
  Sense strand starting at position 3463 of SEQ ID NO: 1886748
cgugauugggacugaaaca

SEQ ID NO: 2424269 - RNA, 19 nt, Artificial Sequence
  Description of Artificial Sequence: Synthetic oligonucleotide
  Antisense strand to SEQ ID NO: 2424268
uguuucagucccaaucacg

SEQ ID NO: 2424270 - RNA, 19 nt, Artificial Sequence
  Description of Artificial Sequence: Synthetic oligonucleotide
  Sense strand starting at position 3474 of SEQ ID NO: 1886748
cugaaacaucuauggcuau

SEQ ID NO: 2424271 - RNA, 19 nt, Artificial Sequence
  Description of Artificial Sequence: Synthetic oligonucleotide
  Antisense strand to SEQ ID NO: 2424270
auagccauagauguuucag

SEQ ID NO: 2424272 - RNA, 19 nt, Artificial Sequence
  Description of Artificial Sequence: Synthetic oligonucleotide
  Sense strand starting at position 3942 of SEQ ID NO: 1886748
gcauauaagauagguguua

SEQ ID NO: 2424273 - RNA, 19 nt, Artificial Sequence
  Description of Artificial Sequence: Synthetic oligonucleotide
  Antisense strand to SEQ ID NO: 2424272
uaacaccuaucuuauaugc

SEQ ID NO: 2424274 - RNA, 19 nt, Artificial Sequence
  Description of Artificial Sequence: Synthetic oligonucleotide
  Sense strand starting at position 3943 of SEQ ID NO: 1886748
cauauaagauagguguuaa

SEQ ID NO: 2424275 - RNA, 19 nt, Artificial Sequence
  Description of Artificial Sequence: Synthetic oligonucleotide
  Antisense strand to SEQ ID NO: 2424274
uuaacaccuaucuuauaug

SEQ ID NO: 2424276 - RNA, 19 nt, Artificial Sequence
  Description of Artificial Sequence: Synthetic oligonucleotide
  Sense strand starting at position 10 of SEQ ID NO: 1886749
cgaugaggcauuugagucu

SEQ ID NO: 2424277 - RNA, 19 nt, Artificial Sequence
  Description of Artificial Sequence: Synthetic oligonucleotide
  Antisense strand to SEQ ID NO: 2424276
agacucaaaugccucaucg

SEQ ID NO: 2424278 - RNA, 19 nt, Artificial Sequence
  Description of Artificial Sequence: Synthetic oligonucleotide
  Sense strand starting at position 29 of SEQ ID NO: 1886749
guggcuuugucuuugcaga

SEQ ID NO: 2424279 - RNA, 19 nt, Artificial Sequence
  Description of Artificial Sequence: Synthetic oligonucleotide
  Antisense strand to SEQ ID NO: 2424278
ucugcaaagacaaagccac

SEQ ID NO: 2424280 - RNA, 19 nt, Artificial Sequence
  Description of Artificial Sequence: Synthetic oligonucleotide
  Sense strand starting at position 30 of SEQ ID NO: 1886749
uggcuuugucuuugcagaa

SEQ ID NO: 2424281 - RNA, 19 nt, Artificial Sequence
  Description of Artificial Sequence: Synthetic oligonucleotide
  Antisense strand to SEQ ID NO: 2424280
uucugcaaagacaaagcca

SEQ ID NO: 2424282 - RNA, 19 nt, Artificial Sequence
  Description of Artificial Sequence: Synthetic oligonucleotide
  Sense strand starting at position 31 of SEQ ID NO: 1886749
ggcuuugucuuugcagaau

SEQ ID NO: 2424283 - RNA, 19 nt, Artificial Sequence
  Description of Artificial Sequence: Synthetic oligonucleotide
  Antisense strand to SEQ ID NO: 2424282
auucugcaaagacaaagcc

SEQ ID NO: 2424284 - RNA, 19 nt, Artificial Sequence
  Description of Artificial Sequence: Synthetic oligonucleotide
  Sense strand starting at position 179 of SEQ ID NO: 1886749
gggacuaguacgugagcca

SEQ ID NO: 2424285 - RNA, 19 nt, Artificial Sequence
  Description of Artificial Sequence: Synthetic oligonucleotide
  Antisense strand to SEQ ID NO: 2424284
uggcucacguacuaguccc

SEQ ID NO: 2424286 - RNA, 19 nt, Artificial Sequence
  Description of Artificial Sequence: Synthetic oligonucleotide
  Sense strand starting at position 180 of SEQ ID NO: 1886749
ggacuaguacgugagccau

SEQ ID NO: 2424287 - RNA, 19 nt, Artificial Sequence
  Description of Artificial Sequence: Synthetic oligonucleotide
  Antisense strand to SEQ ID NO: 2424286
auggcucacguacuagucc

SEQ ID NO: 2424288 - RNA, 19 nt, Artificial Sequence
  Description of Artificial Sequence: Synthetic oligonucleotide
  Sense strand starting at position 234 of SEQ ID NO: 1886749
ggacacuagucccugggau

SEQ ID NO: 2424289 - RNA, 19 nt, Artificial Sequence
  Description of Artificial Sequence: Synthetic oligonucleotide
  Antisense strand to SEQ ID NO: 2424288
aucccagggacuagugucc

SEQ ID NO: 2424290 - RNA, 19 nt, Artificial Sequence
  Description of Artificial Sequence: Synthetic oligonucleotide
  Sense strand starting at position 235 of SEQ ID NO: 1886749
gacacuagucccugggaug

SEQ ID NO: 2424291 - RNA, 19 nt, Artificial Sequence
  Description of Artificial Sequence: Synthetic oligonucleotide
  Antisense strand to SEQ ID NO: 2424290
caucccagggacuaguguc

SEQ ID NO: 2424292 - RNA, 19 nt, Artificial Sequence
  Description of Artificial Sequence: Synthetic oligonucleotide
  Sense strand starting at position 346 of SEQ ID NO: 1886749
aaggauuccuugugauuag

SEQ ID NO: 2424293 - RNA, 19 nt, Artificial Sequence
  Description of Artificial Sequence: Synthetic oligonucleotide
  Antisense strand to SEQ ID NO: 2424292
cuaaucacaaggaauccuu

SEQ ID NO: 2424294 - RNA, 19 nt, Artificial Sequence
  Description of Artificial Sequence: Synthetic oligonucleotide
  Sense strand starting at position 349 of SEQ ID NO: 1886749
gauuccuugugauuagccu

SEQ ID NO: 2424295 - RNA, 19 nt, Artificial Sequence
  Description of Artificial Sequence: Synthetic oligonucleotide
  Antisense strand to SEQ ID NO: 2424294
aggcuaaucacaaggaauc

SEQ ID NO: 2424296 - RNA, 19 nt, Artificial Sequence
  Description of Artificial Sequence: Synthetic oligonucleotide
  Sense strand starting at position 869 of SEQ ID NO: 1886749
gccugugugucugguguga

SEQ ID NO: 2424297 - RNA, 19 nt, Artificial Sequence
  Description of Artificial Sequence: Synthetic oligonucleotide
  Antisense strand to SEQ ID NO: 2424296
ucacaccagacacacaggc

SEQ ID NO: 2424298 - RNA, 19 nt, Artificial Sequence
  Description of Artificial Sequence: Synthetic oligonucleotide
  Sense strand starting at position 871 of SEQ ID NO: 1886749
cugugugucuggugugauc

SEQ ID NO: 2424299 - RNA, 19 nt, Artificial Sequence
  Description of Artificial Sequence: Synthetic oligonucleotide
  Antisense strand to SEQ ID NO: 2424298
gaucacaccagacacacag

SEQ ID NO: 2424300 - RNA, 19 nt, Artificial Sequence
  Description of Artificial Sequence: Synthetic oligonucleotide
  Sense strand starting at position 873 of SEQ ID NO: 1886749
gugugucuggugugaucua

SEQ ID NO: 2424301 - RNA, 19 nt, Artificial Sequence
  Description of Artificial Sequence: Synthetic oligonucleotide
  Antisense strand to SEQ ID NO: 2424300
uagaucacaccagacacac

SEQ ID NO: 2424302 - RNA, 19 nt, Artificial Sequence
  Description of Artificial Sequence: Synthetic oligonucleotide
  Sense strand starting at position 874 of SEQ ID NO: 1886749
ugugucuggugugaucuau

SEQ ID NO: 2424303 - RNA, 19 nt, Artificial Sequence
  Description of Artificial Sequence: Synthetic oligonucleotide
  Antisense strand to SEQ ID NO: 2424302
auagaucacaccagacaca

SEQ ID NO: 2424304 - RNA, 19 nt, Artificial Sequence
  Description of Artificial Sequence: Synthetic oligonucleotide
  Sense strand starting at position 1194 of SEQ ID NO: 1886749
aguggugugcuugaggcaa

SEQ ID NO: 2424305 - RNA, 19 nt, Artificial Sequence
  Description of Artificial Sequence: Synthetic oligonucleotide
  Antisense strand to SEQ ID NO: 2424304
uugccucaagcacaccacu

SEQ ID NO: 2424306 - RNA, 19 nt, Artificial Sequence
  Description of Artificial Sequence: Synthetic oligonucleotide
  Sense strand starting at position 1265 of SEQ ID NO: 1886749
gcgggucugucgugcauua

SEQ ID NO: 2424307 - RNA, 19 nt, Artificial Sequence
  Description of Artificial Sequence: Synthetic oligonucleotide
  Antisense strand to SEQ ID NO: 2424306
uaaugcacgacagacccgc

SEQ ID NO: 2424308 - RNA, 19 nt, Artificial Sequence
  Description of Artificial Sequence: Synthetic oligonucleotide
  Sense strand starting at position 1326 of SEQ ID NO: 1886749
acuggacccgugugguuaa

SEQ ID NO: 2424309 - RNA, 19 nt, Artificial Sequence
  Description of Artificial Sequence: Synthetic oligonucleotide
  Antisense strand to SEQ ID NO: 2424308
uuaaccacacggguccagu

SEQ ID NO: 2424310 - RNA, 19 nt, Artificial Sequence
  Description of Artificial Sequence: Synthetic oligonucleotide
  Sense strand starting at position 1793 of SEQ ID NO: 1886749
gcaacaaaugccugcgaaa

SEQ ID NO: 2424311 - RNA, 19 nt, Artificial Sequence
  Description of Artificial Sequence: Synthetic oligonucleotide
  Antisense strand to SEQ ID NO: 2424310
uuucgcaggcauuuguugc

SEQ ID NO: 2424312 - RNA, 19 nt, Artificial Sequence
  Description of Artificial Sequence: Synthetic oligonucleotide
  Sense strand starting at position 2582 of SEQ ID NO: 1886749
uuuggaagcuuguauguaa

SEQ ID NO: 2424313 - RNA, 19 nt, Artificial Sequence
  Description of Artificial Sequence: Synthetic oligonucleotide
  Antisense strand to SEQ ID NO: 2424312
uuacauacaagcuuccaaa

SEQ ID NO: 2424314 - RNA, 19 nt, Artificial Sequence
  Description of Artificial Sequence: Synthetic oligonucleotide
  Sense strand starting at position 2585 of SEQ ID NO: 1886749
ggaagcuuguauguaaggu

SEQ ID NO: 2424315 - RNA, 19 nt, Artificial Sequence
  Description of Artificial Sequence: Synthetic oligonucleotide
  Antisense strand to SEQ ID NO: 2424314
accuuacauacaagcuucc

SEQ ID NO: 2424316 - RNA, 19 nt, Artificial Sequence
  Description of Artificial Sequence: Synthetic oligonucleotide
  Sense strand starting at position 2586 of SEQ ID NO: 1886749
gaagcuuguauguaagguu

SEQ ID NO: 2424317 - RNA, 19 nt, Artificial Sequence
  Description of Artificial Sequence: Synthetic oligonucleotide
  Antisense strand to SEQ ID NO: 2424316
aaccuuacauacaagcuuc

SEQ ID NO: 2424318 - RNA, 19 nt, Artificial Sequence
  Description of Artificial Sequence: Synthetic oligonucleotide
  Sense strand starting at position 2647 of SEQ ID NO: 1886749
uuucucuuguuuggugaga

SEQ ID NO: 2424319 - RNA, 19 nt, Artificial Sequence
  Description of Artificial Sequence: Synthetic oligonucleotide
  Antisense strand to SEQ ID NO: 2424318
ucucaccaaacaagagaaa

SEQ ID NO: 2424320 - RNA, 19 nt, Artificial Sequence
  Description of Artificial Sequence: Synthetic oligonucleotide
  Sense strand starting at position 2648 of SEQ ID NO: 1886749
uucucuuguuuggugagau

SEQ ID NO: 2424321 - RNA, 19 nt, Artificial Sequence
  Description of Artificial Sequence: Synthetic oligonucleotide
  Antisense strand to SEQ ID NO: 2424320
aucucaccaaacaagagaa

SEQ ID NO: 2424322 - RNA, 19 nt, Artificial Sequence
  Description of Artificial Sequence: Synthetic oligonucleotide
  Sense strand starting at position 2649 of SEQ ID NO: 1886749
ucucuuguuuggugagaug

SEQ ID NO: 2424323 - RNA, 19 nt, Artificial Sequence
  Description of Artificial Sequence: Synthetic oligonucleotide
  Antisense strand to SEQ ID NO: 2424322
caucucaccaaacaagaga

SEQ ID NO: 2424324 - RNA, 19 nt, Artificial Sequence
  Description of Artificial Sequence: Synthetic oligonucleotide
  Sense strand starting at position 2743 of SEQ ID NO: 1886749
acgcucacaugacaaauau

SEQ ID NO: 2424325 - RNA, 19 nt, Artificial Sequence
  Description of Artificial Sequence: Synthetic oligonucleotide
  Antisense strand to SEQ ID NO: 2424324
auauuugucaugugagcgu

SEQ ID NO: 2424326 - RNA, 19 nt, Artificial Sequence
  Description of Artificial Sequence: Synthetic oligonucleotide
  Sense strand starting at position 2926 of SEQ ID NO: 1886749
aaaugaauucgcugcgaau

SEQ ID NO: 2424327 - RNA, 19 nt, Artificial Sequence
  Description of Artificial Sequence: Synthetic oligonucleotide
  Antisense strand to SEQ ID NO: 2424326
auucgcagcgaauucauuu

SEQ ID NO: 2424328 - RNA, 19 nt, Artificial Sequence
  Description of Artificial Sequence: Synthetic oligonucleotide
  Sense strand starting at position 2928 of SEQ ID NO: 1886749
augaauucgcugcgaaugu

SEQ ID NO: 2424329 - RNA, 19 nt, Artificial Sequence
  Description of Artificial Sequence: Synthetic oligonucleotide
  Antisense strand to SEQ ID NO: 2424328
acauucgcagcgaauucau

SEQ ID NO: 2424330 - RNA, 19 nt, Artificial Sequence
  Description of Artificial Sequence: Synthetic oligonucleotide
  Sense strand starting at position 2945 of SEQ ID NO: 1886749
gugggaagaugcgcugaaa

SEQ ID NO: 2424331 - RNA, 19 nt, Artificial Sequence
  Description of Artificial Sequence: Synthetic oligonucleotide
  Antisense strand to SEQ ID NO: 2424330
uuucagcgcaucuucccac

SEQ ID NO: 2424332 - RNA, 19 nt, Artificial Sequence
  Description of Artificial Sequence: Synthetic oligonucleotide
  Sense strand starting at position 2977 of SEQ ID NO: 1886749
ucuggcuucgcucagguau

SEQ ID NO: 2424333 - RNA, 19 nt, Artificial Sequence
  Description of Artificial Sequence: Synthetic oligonucleotide
  Antisense strand to SEQ ID NO: 2424332
auaccugagcgaagccaga

SEQ ID NO: 2424334 - RNA, 19 nt, Artificial Sequence
  Description of Artificial Sequence: Synthetic oligonucleotide
  Sense strand starting at position 3070 of SEQ ID NO: 1886749
ggcccuuuaaugcgaguca

SEQ ID NO: 2424335 - RNA, 19 nt, Artificial Sequence
  Description of Artificial Sequence: Synthetic oligonucleotide
  Antisense strand to SEQ ID NO: 2424334
ugacucgcauuaaagggcc

SEQ ID NO: 2424336 - RNA, 19 nt, Artificial Sequence
  Description of Artificial Sequence: Synthetic oligonucleotide
  Sense strand starting at position 3071 of SEQ ID NO: 1886749
gcccuuuaaugcgagucaa

SEQ ID NO: 2424337 - RNA, 19 nt, Artificial Sequence
  Description of Artificial Sequence: Synthetic oligonucleotide
  Antisense strand to SEQ ID NO: 2424336
uugacucgcauuaaagggc

SEQ ID NO: 2424338 - RNA, 19 nt, Artificial Sequence
  Description of Artificial Sequence: Synthetic oligonucleotide
  Sense strand starting at position 3079 of SEQ ID NO: 1886749
augcgagucaauggcagau

SEQ ID NO: 2424339 - RNA, 19 nt, Artificial Sequence
  Description of Artificial Sequence: Synthetic oligonucleotide
  Antisense strand to SEQ ID NO: 2424338
aucugccauugacucgcau

SEQ ID NO: 2424340 - RNA, 19 nt, Artificial Sequence
  Description of Artificial Sequence: Synthetic oligonucleotide
  Sense strand starting at position 3083 of SEQ ID NO: 1886749
gagucaauggcagaugcua

SEQ ID NO: 2424341 - RNA, 19 nt, Artificial Sequence
  Description of Artificial Sequence: Synthetic oligonucleotide
  Antisense strand to SEQ ID NO: 2424340
uagcaucugccauugacuc

SEQ ID NO: 2424342 - RNA, 19 nt, Artificial Sequence
  Description of Artificial Sequence: Synthetic oligonucleotide
  Sense strand starting at position 3085 of SEQ ID NO: 1886749
gucaauggcagaugcuaau

SEQ ID NO: 2424343 - RNA, 19 nt, Artificial Sequence
  Description of Artificial Sequence: Synthetic oligonucleotide
  Antisense strand to SEQ ID NO: 2424342
auuagcaucugccauugac

SEQ ID NO: 2424344 - RNA, 19 nt, Artificial Sequence
  Description of Artificial Sequence: Synthetic oligonucleotide
  Sense strand starting at position 3512 of SEQ ID NO: 1886749
uccgccauuugcugggaaa

SEQ ID NO: 2424345 - RNA, 19 nt, Artificial Sequence
  Description of Artificial Sequence: Synthetic oligonucleotide
  Antisense strand to SEQ ID NO: 2424344
uuucccagcaaauggcgga

SEQ ID NO: 2424346 - RNA, 19 nt, Artificial Sequence
  Description of Artificial Sequence: Synthetic oligonucleotide
  Sense strand starting at position 51 of SEQ ID NO: 1886750
uuugccacuuucguauaua

SEQ ID NO: 2424347 - RNA, 19 nt, Artificial Sequence
  Description of Artificial Sequence: Synthetic oligonucleotide
  Antisense strand to SEQ ID NO: 2424346
uauauacgaaaguggcaaa

SEQ ID NO: 2424348 - RNA, 19 nt, Artificial Sequence
  Description of Artificial Sequence: Synthetic oligonucleotide
  Sense strand starting at position 52 of SEQ ID NO: 1886750
uugccacuuucguauauau

SEQ ID NO: 2424349 - RNA, 19 nt, Artificial Sequence
  Description of Artificial Sequence: Synthetic oligonucleotide
  Antisense strand to SEQ ID NO: 2424348
auauauacgaaaguggcaa

SEQ ID NO: 2424350 - RNA, 19 nt, Artificial Sequence
  Description of Artificial Sequence: Synthetic oligonucleotide
  Sense strand starting at position 59 of SEQ ID NO: 1886750
uuucguauauauccuguau

SEQ ID NO: 2424351 - RNA, 19 nt, Artificial Sequence
  Description of Artificial Sequence: Synthetic oligonucleotide
  Antisense strand to SEQ ID NO: 2424350
auacaggauauauacgaaa

SEQ ID NO: 2424352 - RNA, 19 nt, Artificial Sequence
  Description of Artificial Sequence: Synthetic oligonucleotide
  Sense strand starting at position 61 of SEQ ID NO: 1886750
ucguauauauccuguauua

SEQ ID NO: 2424353 - RNA, 19 nt, Artificial Sequence
  Description of Artificial Sequence: Synthetic oligonucleotide
  Antisense strand to SEQ ID NO: 2424352
uaauacaggauauauacga

SEQ ID NO: 2424354 - RNA, 19 nt, Artificial Sequence
  Description of Artificial Sequence: Synthetic oligonucleotide
  Sense strand starting at position 63 of SEQ ID NO: 1886750
guauauauccuguauuaac

SEQ ID NO: 2424355 - RNA, 19 nt, Artificial Sequence
  Description of Artificial Sequence: Synthetic oligonucleotide
  Antisense strand to SEQ ID NO: 2424354
guuaauacaggauauauac

SEQ ID NO: 2424356 - RNA, 19 nt, Artificial Sequence
  Description of Artificial Sequence: Synthetic oligonucleotide
  Sense strand starting at position 73 of SEQ ID NO: 1886750
uguauuaacuauggcugua

SEQ ID NO: 2424357 - RNA, 19 nt, Artificial Sequence
  Description of Artificial Sequence: Synthetic oligonucleotide
  Antisense strand to SEQ ID NO: 2424356
uacagccauaguuaauaca

SEQ ID NO: 2424358 - RNA, 19 nt, Artificial Sequence
  Description of Artificial Sequence: Synthetic oligonucleotide
  Sense strand starting at position 78 of SEQ ID NO: 1886750
uaacuauggcuguagcaaa

SEQ ID NO: 2424359 - RNA, 19 nt, Artificial Sequence
  Description of Artificial Sequence: Synthetic oligonucleotide
  Antisense strand to SEQ ID NO: 2424358
uuugcuacagccauaguua

SEQ ID NO: 2424360 - RNA, 19 nt, Artificial Sequence
  Description of Artificial Sequence: Synthetic oligonucleotide
  Sense strand starting at position 377 of SEQ ID NO: 1886750
ggagaacuguuugaaucuu

SEQ ID NO: 2424361 - RNA, 19 nt, Artificial Sequence
  Description of Artificial Sequence: Synthetic oligonucleotide
  Antisense strand to SEQ ID NO: 2424360
aagauucaaacaguucucc

SEQ ID NO: 2424362 - RNA, 19 nt, Artificial Sequence
  Description of Artificial Sequence: Synthetic oligonucleotide
  Sense strand starting at position 383 of SEQ ID NO: 1886750
cuguuugaaucuuugagag

SEQ ID NO: 2424363 - RNA, 19 nt, Artificial Sequence
  Description of Artificial Sequence: Synthetic oligonucleotide
  Antisense strand to SEQ ID NO: 2424362
cucucaaagauucaaacag

SEQ ID NO: 2424364 - RNA, 19 nt, Artificial Sequence
  Description of Artificial Sequence: Synthetic oligonucleotide
  Sense strand starting at position 740 of SEQ ID NO: 1886750
gcuguagcuaggcaguuau

SEQ ID NO: 2424365 - RNA, 19 nt, Artificial Sequence
  Description of Artificial Sequence: Synthetic oligonucleotide
  Antisense strand to SEQ ID NO: 2424364
auaacugccuagcuacagc

SEQ ID NO: 2424366 - RNA, 19 nt, Artificial Sequence
  Description of Artificial Sequence: Synthetic oligonucleotide
  Sense strand starting at position 874 of SEQ ID NO: 1886750
auggaaauauacgauguaa

SEQ ID NO: 2424367 - RNA, 19 nt, Artificial Sequence
  Description of Artificial Sequence: Synthetic oligonucleotide
  Antisense strand to SEQ ID NO: 2424366
uuacaucguauauuuccau

SEQ ID NO: 2424368 - RNA, 19 nt, Artificial Sequence
  Description of Artificial Sequence: Synthetic oligonucleotide
  Sense strand starting at position 876 of SEQ ID NO: 1886750
ggaaauauacgauguaauu

SEQ ID NO: 2424369 - RNA, 19 nt, Artificial Sequence
  Description of Artificial Sequence: Synthetic oligonucleotide
  Antisense strand to SEQ ID NO: 2424368
aauuacaucguauauuucc

SEQ ID NO: 2424370 - RNA, 19 nt, Artificial Sequence
  Description of Artificial Sequence: Synthetic oligonucleotide
  Sense strand starting at position 906 of SEQ ID NO: 1886750
ggcuucugauguuuguauu

SEQ ID NO: 2424371 - RNA, 19 nt, Artificial Sequence
  Description of Artificial Sequence: Synthetic oligonucleotide
  Antisense strand to SEQ ID NO: 2424370
aauacaaacaucagaagcc

SEQ ID NO: 2424372 - RNA, 19 nt, Artificial Sequence
  Description of Artificial Sequence: Synthetic oligonucleotide
  Sense strand starting at position 907 of SEQ ID NO: 1886750
gcuucugauguuuguauuu

SEQ ID NO: 2424373 - RNA, 19 nt, Artificial Sequence
  Description of Artificial Sequence: Synthetic oligonucleotide
  Antisense strand to SEQ ID NO: 2424372
aaauacaaacaucagaagc

SEQ ID NO: 2424374 - RNA, 19 nt, Artificial Sequence
  Description of Artificial Sequence: Synthetic oligonucleotide
  Sense strand starting at position 916 of SEQ ID NO: 1886750
guuuguauuuaugcucuuu

SEQ ID NO: 2424375 - RNA, 19 nt, Artificial Sequence
  Description of Artificial Sequence: Synthetic oligonucleotide
  Antisense strand to SEQ ID NO: 2424374
aaagagcauaaauacaaac

SEQ ID NO: 2424376 - RNA, 19 nt, Artificial Sequence
  Description of Artificial Sequence: Synthetic oligonucleotide
  Sense strand starting at position 949 of SEQ ID NO: 1886750
uaaacaauaugugcagaga

SEQ ID NO: 2424377 - RNA, 19 nt, Artificial Sequence
  Description of Artificial Sequence: Synthetic oligonucleotide
  Antisense strand to SEQ ID NO: 2424376
ucucugcacauauuguuua

SEQ ID NO: 2424378 - RNA, 19 nt, Artificial Sequence
  Description of Artificial Sequence: Synthetic oligonucleotide
  Sense strand starting at position 1082 of SEQ ID NO: 1886750
aaauaagagguuugcucuu

SEQ ID NO: 2424379 - RNA, 19 nt, Artificial Sequence
  Description of Artificial Sequence: Synthetic oligonucleotide
  Antisense strand to SEQ ID NO: 2424378
aagagcaaaccucuuauuu

SEQ ID NO: 2424380 - RNA, 19 nt, Artificial Sequence
  Description of Artificial Sequence: Synthetic oligonucleotide
  Sense strand starting at position 1444 of SEQ ID NO: 1886750
cccagaaaguaggauuuau

SEQ ID NO: 2424381 - RNA, 19 nt, Artificial Sequence
  Description of Artificial Sequence: Synthetic oligonucleotide
  Antisense strand to SEQ ID NO: 2424380
auaaauccuacuuucuggg

SEQ ID NO: 2424382 - RNA, 19 nt, Artificial Sequence
  Description of Artificial Sequence: Synthetic oligonucleotide
  Sense strand starting at position 1454 of SEQ ID NO: 1886750
aggauuuauuggugagcau

SEQ ID NO: 2424383 - RNA, 19 nt, Artificial Sequence
  Description of Artificial Sequence: Synthetic oligonucleotide
  Antisense strand to SEQ ID NO: 2424382
augcucaccaauaaauccu

SEQ ID NO: 2424384 - RNA, 19 nt, Artificial Sequence
  Description of Artificial Sequence: Synthetic oligonucleotide
  Sense strand starting at position 1458 of SEQ ID NO: 1886750
uuuauuggugagcauuaag

SEQ ID NO: 2424385 - RNA, 19 nt, Artificial Sequence
  Description of Artificial Sequence: Synthetic oligonucleotide
  Antisense strand to SEQ ID NO: 2424384
cuuaaugcucaccaauaaa

SEQ ID NO: 2424386 - RNA, 19 nt, Artificial Sequence
  Description of Artificial Sequence: Synthetic oligonucleotide
  Sense strand starting at position 1634 of SEQ ID NO: 1886750
acuucuuagagauguggga

SEQ ID NO: 2424387 - RNA, 19 nt, Artificial Sequence
  Description of Artificial Sequence: Synthetic oligonucleotide
  Antisense strand to SEQ ID NO: 2424386
ucccacaucucuaagaagu

SEQ ID NO: 2424388 - RNA, 19 nt, Artificial Sequence
  Description of Artificial Sequence: Synthetic oligonucleotide
  Sense strand starting at position 1636 of SEQ ID NO: 1886750
uucuuagagaugugggauc

SEQ ID NO: 2424389 - RNA, 19 nt, Artificial Sequence
  Description of Artificial Sequence: Synthetic oligonucleotide
  Antisense strand to SEQ ID NO: 2424388
gaucccacaucucuaagaa

SEQ ID NO: 2424390 - RNA, 19 nt, Artificial Sequence
  Description of Artificial Sequence: Synthetic oligonucleotide
  Sense strand starting at position 1638 of SEQ ID NO: 1886750
cuuagagaugugggaucuu

SEQ ID NO: 2424391 - RNA, 19 nt, Artificial Sequence
  Description of Artificial Sequence: Synthetic oligonucleotide
  Antisense strand to SEQ ID NO: 2424390
aagaucccacaucucuaag

SEQ ID NO: 2424392 - RNA, 19 nt, Artificial Sequence
  Description of Artificial Sequence: Synthetic oligonucleotide
  Sense strand starting at position 1701 of SEQ ID NO: 1886750
ucaugugcuccuuguuaug

SEQ ID NO: 2424393 - RNA, 19 nt, Artificial Sequence
  Description of Artificial Sequence: Synthetic oligonucleotide
  Antisense strand to SEQ ID NO: 2424392
cauaacaaggagcacauga

SEQ ID NO: 2424394 - RNA, 19 nt, Artificial Sequence
  Description of Artificial Sequence: Synthetic oligonucleotide
  Sense strand starting at position 1703 of SEQ ID NO: 1886750
augugcuccuuguuaugca

SEQ ID NO: 2424395 - RNA, 19 nt, Artificial Sequence
  Description of Artificial Sequence: Synthetic oligonucleotide
  Antisense strand to SEQ ID NO: 2424394
ugcauaacaaggagcacau

SEQ ID NO: 2424396 - RNA, 19 nt, Artificial Sequence
  Description of Artificial Sequence: Synthetic oligonucleotide
  Sense strand starting at position 1830 of SEQ ID NO: 1886750
agcacaaagucagagacau

SEQ ID NO: 2424397 - RNA, 19 nt, Artificial Sequence
  Description of Artificial Sequence: Synthetic oligonucleotide
  Antisense strand to SEQ ID NO: 2424396
augucucugacuuugugcu

SEQ ID NO: 2424398 - RNA, 19 nt, Artificial Sequence
  Description of Artificial Sequence: Synthetic oligonucleotide
  Sense strand starting at position 1983 of SEQ ID NO: 1886750
uggcuuaacugucugcaga

SEQ ID NO: 2424399 - RNA, 19 nt, Artificial Sequence
  Description of Artificial Sequence: Synthetic oligonucleotide
  Antisense strand to SEQ ID NO: 2424398
ucugcagacaguuaagcca

SEQ ID NO: 2424400 - RNA, 19 nt, Artificial Sequence
  Description of Artificial Sequence: Synthetic oligonucleotide
  Sense strand starting at position 1984 of SEQ ID NO: 1886750
ggcuuaacugucugcagag

SEQ ID NO: 2424401 - RNA, 19 nt, Artificial Sequence
  Description of Artificial Sequence: Synthetic oligonucleotide
  Antisense strand to SEQ ID NO: 2424400
cucugcagacaguuaagcc

SEQ ID NO: 2424402 - RNA, 19 nt, Artificial Sequence
  Description of Artificial Sequence: Synthetic oligonucleotide
  Sense strand starting at position 2050 of SEQ ID NO: 1886750
acuugacuuuagugaaaug

SEQ ID NO: 2424403 - RNA, 19 nt, Artificial Sequence
  Description of Artificial Sequence: Synthetic oligonucleotide
  Antisense strand to SEQ ID NO: 2424402
cauuucacuaaagucaagu

SEQ ID NO: 2424404 - RNA, 19 nt, Artificial Sequence
  Description of Artificial Sequence: Synthetic oligonucleotide
  Sense strand starting at position 2060 of SEQ ID NO: 1886750
agugaaauguuaucuccac

SEQ ID NO: 2424405 - RNA, 19 nt, Artificial Sequence
  Description of Artificial Sequence: Synthetic oligonucleotide
  Antisense strand to SEQ ID NO: 2424404
guggagauaacauuucacu

SEQ ID NO: 2424406 - RNA, 19 nt, Artificial Sequence
  Description of Artificial Sequence: Synthetic oligonucleotide
  Sense strand starting at position 2061 of SEQ ID NO: 1886750
gugaaauguuaucuccaca

SEQ ID NO: 2424407 - RNA, 19 nt, Artificial Sequence
  Description of Artificial Sequence: Synthetic oligonucleotide
  Antisense strand to SEQ ID NO: 2424406
uguggagauaacauuucac

SEQ ID NO: 2424408 - RNA, 19 nt, Artificial Sequence
  Description of Artificial Sequence: Synthetic oligonucleotide
  Sense strand starting at position 2248 of SEQ ID NO: 1886750
ccuuaugaccuuggcuuua

SEQ ID NO: 2424409 - RNA, 19 nt, Artificial Sequence
  Description of Artificial Sequence: Synthetic oligonucleotide
  Antisense strand to SEQ ID NO: 2424408
uaaagccaaggucauaagg

SEQ ID NO: 2424410 - RNA, 19 nt, Artificial Sequence
  Description of Artificial Sequence: Synthetic oligonucleotide
  Sense strand starting at position 2250 of SEQ ID NO: 1886750
uuaugaccuuggcuuuauu

SEQ ID NO: 2424411 - RNA, 19 nt, Artificial Sequence
  Description of Artificial Sequence: Synthetic oligonucleotide
  Antisense strand to SEQ ID NO: 2424410
aauaaagccaaggucauaa

SEQ ID NO: 2424412 - RNA, 19 nt, Artificial Sequence
  Description of Artificial Sequence: Synthetic oligonucleotide
  Sense strand starting at position 2253 of SEQ ID NO: 1886750
ugaccuuggcuuuauuaac

SEQ ID NO: 2424413 - RNA, 19 nt, Artificial Sequence
  Description of Artificial Sequence: Synthetic oligonucleotide
  Antisense strand to SEQ ID NO: 2424412
guuaauaaagccaagguca

SEQ ID NO: 2424414 - RNA, 19 nt, Artificial Sequence
  Description of Artificial Sequence: Synthetic oligonucleotide
  Sense strand starting at position 2591 of SEQ ID NO: 1886750
ccugaaugguucuuucuga

SEQ ID NO: 2424415 - RNA, 19 nt, Artificial Sequence
  Description of Artificial Sequence: Synthetic oligonucleotide
  Antisense strand to SEQ ID NO: 2424414
ucagaaagaaccauucagg

SEQ ID NO: 2424416 - RNA, 19 nt, Artificial Sequence
  Description of Artificial Sequence: Synthetic oligonucleotide
  Sense strand starting at position 2598 of SEQ ID NO: 1886750
gguucuuucugagugucuu

SEQ ID NO: 2424417 - RNA, 19 nt, Artificial Sequence
  Description of Artificial Sequence: Synthetic oligonucleotide
  Antisense strand to SEQ ID NO: 2424416
aagacacucagaaagaacc

SEQ ID NO: 2424418 - RNA, 19 nt, Artificial Sequence
  Description of Artificial Sequence: Synthetic oligonucleotide
  Sense strand starting at position 3035 of SEQ ID NO: 1886750
cacauugccgucugcagau

SEQ ID NO: 2424419 - RNA, 19 nt, Artificial Sequence
  Description of Artificial Sequence: Synthetic oligonucleotide
  Antisense strand to SEQ ID NO: 2424418
aucugcagacggcaaugug

SEQ ID NO: 2424420 - RNA, 19 nt, Artificial Sequence
  Description of Artificial Sequence: Synthetic oligonucleotide
  Sense strand starting at position 3041 of SEQ ID NO: 1886750
gccgucugcagaugagaga

SEQ ID NO: 2424421 - RNA, 19 nt, Artificial Sequence
  Description of Artificial Sequence: Synthetic oligonucleotide
  Antisense strand to SEQ ID NO: 2424420
ucucucaucugcagacggc

SEQ ID NO: 2424422 - RNA, 19 nt, Artificial Sequence
  Description of Artificial Sequence: Synthetic oligonucleotide
  Sense strand starting at position 3787 of SEQ ID NO: 1886750
uauaguaugggcuguguuu

SEQ ID NO: 2424423 - RNA, 19 nt, Artificial Sequence
  Description of Artificial Sequence: Synthetic oligonucleotide
  Antisense strand to SEQ ID NO: 2424422
aaacacagcccauacuaua

SEQ ID NO: 2424424 - RNA, 19 nt, Artificial Sequence
  Description of Artificial Sequence: Synthetic oligonucleotide
  Sense strand starting at position 3799 of SEQ ID NO: 1886750
uguguuuagugacucauuu

SEQ ID NO: 2424425 - RNA, 19 nt, Artificial Sequence
  Description of Artificial Sequence: Synthetic oligonucleotide
  Antisense strand to SEQ ID NO: 2424424
aaaugagucacuaaacaca

SEQ ID NO: 2424426 - RNA, 19 nt, Artificial Sequence
  Description of Artificial Sequence: Synthetic oligonucleotide
  Sense strand starting at position 133 of SEQ ID NO: 1886751
ggugaaaugcaauaaggca

SEQ ID NO: 2424427 - RNA, 19 nt, Artificial Sequence
  Description of Artificial Sequence: Synthetic oligonucleotide
  Antisense strand to SEQ ID NO: 2424426
ugccuuauugcauuucacc

SEQ ID NO: 2424428 - RNA, 19 nt, Artificial Sequence
  Description of Artificial Sequence: Synthetic oligonucleotide
  Sense strand starting at position 155 of SEQ ID NO: 1886751
agaacauaugccugaaccu

SEQ ID NO: 2424429 - RNA, 19 nt, Artificial Sequence
  Description of Artificial Sequence: Synthetic oligonucleotide
  Antisense strand to SEQ ID NO: 2424428
agguucaggcauauguucu

SEQ ID NO: 2424430 - RNA, 19 nt, Artificial Sequence
  Description of Artificial Sequence: Synthetic oligonucleotide
  Sense strand starting at position 167 of SEQ ID NO: 1886751
ugaaccugauagguacaau

SEQ ID NO: 2424431 - RNA, 19 nt, Artificial Sequence
  Description of Artificial Sequence: Synthetic oligonucleotide
  Antisense strand to SEQ ID NO: 2424430
auuguaccuaucagguuca

SEQ ID NO: 2424432 - RNA, 19 nt, Artificial Sequence
  Description of Artificial Sequence: Synthetic oligonucleotide
  Sense strand starting at position 179 of SEQ ID NO: 1886751
guacaauaguuucuaccuu

SEQ ID NO: 2424433 - RNA, 19 nt, Artificial Sequence
  Description of Artificial Sequence: Synthetic oligonucleotide
  Antisense strand to SEQ ID NO: 2424432
aagguagaaacuauuguac

SEQ ID NO: 2424434 - RNA, 19 nt, Artificial Sequence
  Description of Artificial Sequence: Synthetic oligonucleotide
  Sense strand starting at position 237 of SEQ ID NO: 1886751
aucuaagcccuuuagaaug

SEQ ID NO: 2424435 - RNA, 19 nt, Artificial Sequence
  Description of Artificial Sequence: Synthetic oligonucleotide
  Antisense strand to SEQ ID NO: 2424434
cauucuaaagggcuuagau

SEQ ID NO: 2424436 - RNA, 19 nt, Artificial Sequence
  Description of Artificial Sequence: Synthetic oligonucleotide
  Sense strand starting at position 251 of SEQ ID NO: 1886751
gaaugugaugcacauacau

SEQ ID NO: 2424437 - RNA, 19 nt, Artificial Sequence
  Description of Artificial Sequence: Synthetic oligonucleotide
  Antisense strand to SEQ ID NO: 2424436
auguaugugcaucacauuc

SEQ ID NO: 2424438 - RNA, 19 nt, Artificial Sequence
  Description of Artificial Sequence: Synthetic oligonucleotide
  Sense strand starting at position 552 of SEQ ID NO: 1886751
ugaugaaaguccuccaaua

SEQ ID NO: 2424439 - RNA, 19 nt, Artificial Sequence
  Description of Artificial Sequence: Synthetic oligonucleotide
  Antisense strand to SEQ ID NO: 2424438
uauuggaggacuuucauca

SEQ ID NO: 2424440 - RNA, 19 nt, Artificial Sequence
  Description of Artificial Sequence: Synthetic oligonucleotide
  Sense strand starting at position 858 of SEQ ID NO: 1886751
acucaaucacgaugauacu

SEQ ID NO: 2424441 - RNA, 19 nt, Artificial Sequence
  Description of Artificial Sequence: Synthetic oligonucleotide
  Antisense strand to SEQ ID NO: 2424440
aguaucaucgugauugagu

SEQ ID NO: 2424442 - RNA, 19 nt, Artificial Sequence
  Description of Artificial Sequence: Synthetic oligonucleotide
  Sense strand starting at position 864 of SEQ ID NO: 1886751
ucacgaugauacuuaaauc

SEQ ID NO: 2424443 - RNA, 19 nt, Artificial Sequence
  Description of Artificial Sequence: Synthetic oligonucleotide
  Antisense strand to SEQ ID NO: 2424442
gauuuaaguaucaucguga

SEQ ID NO: 2424444 - RNA, 19 nt, Artificial Sequence
  Description of Artificial Sequence: Synthetic oligonucleotide
  Sense strand starting at position 943 of SEQ ID NO: 1886751
uaaagaguuugccuuugac

SEQ ID NO: 2424445 - RNA, 19 nt, Artificial Sequence
  Description of Artificial Sequence: Synthetic oligonucleotide
  Antisense strand to SEQ ID NO: 2424444
gucaaaggcaaacucuuua

SEQ ID NO: 2424446 - RNA, 19 nt, Artificial Sequence
  Description of Artificial Sequence: Synthetic oligonucleotide
  Sense strand starting at position 1217 of SEQ ID NO: 1886751
guagcaucagaucagguau

SEQ ID NO: 2424447 - RNA, 19 nt, Artificial Sequence
  Description of Artificial Sequence: Synthetic oligonucleotide
  Antisense strand to SEQ ID NO: 2424446
auaccugaucugaugcuac

SEQ ID NO: 2424448 - RNA, 19 nt, Artificial Sequence
  Description of Artificial Sequence: Synthetic oligonucleotide
  Sense strand starting at position 1223 of SEQ ID NO: 1886751
ucagaucagguauggaauu

SEQ ID NO: 2424449 - RNA, 19 nt, Artificial Sequence
  Description of Artificial Sequence: Synthetic oligonucleotide
  Antisense strand to SEQ ID NO: 2424448
aauuccauaccugaucuga

SEQ ID NO: 2424450 - RNA, 19 nt, Artificial Sequence
  Description of Artificial Sequence: Synthetic oligonucleotide
  Sense strand starting at position 1224 of SEQ ID NO: 1886751
cagaucagguauggaauuu

SEQ ID NO: 2424451 - RNA, 19 nt, Artificial Sequence
  Description of Artificial Sequence: Synthetic oligonucleotide
  Antisense strand to SEQ ID NO: 2424450
aaauuccauaccugaucug

SEQ ID NO: 2424452 - RNA, 19 nt, Artificial Sequence
  Description of Artificial Sequence: Synthetic oligonucleotide
  Sense strand starting at position 1392 of SEQ ID NO: 1886751
aacauuuaguagugacaug

SEQ ID NO: 2424453 - RNA, 19 nt, Artificial Sequence
  Description of Artificial Sequence: Synthetic oligonucleotide
  Antisense strand to SEQ ID NO: 2424452
caugucacuacuaaauguu

SEQ ID NO: 2424454 - RNA, 19 nt, Artificial Sequence
  Description of Artificial Sequence: Synthetic oligonucleotide
  Sense strand starting at position 1397 of SEQ ID NO: 1886751
uuaguagugacaugggaca

SEQ ID NO: 2424455 - RNA, 19 nt, Artificial Sequence
  Description of Artificial Sequence: Synthetic oligonucleotide
  Antisense strand to SEQ ID NO: 2424454
ugucccaugucacuacuaa

SEQ ID NO: 2424456 - RNA, 19 nt, Artificial Sequence
  Description of Artificial Sequence: Synthetic oligonucleotide
  Sense strand starting at position 1729 of SEQ ID NO: 1886751
ggaaguagccacugaauca

SEQ ID NO: 2424457 - RNA, 19 nt, Artificial Sequence
  Description of Artificial Sequence: Synthetic oligonucleotide
  Antisense strand to SEQ ID NO: 2424456
ugauucaguggcuacuucc

SEQ ID NO: 2424458 - RNA, 19 nt, Artificial Sequence
  Description of Artificial Sequence: Synthetic oligonucleotide
  Sense strand starting at position 1843 of SEQ ID NO: 1886751
gguugaugucagggaguaa

SEQ ID NO: 2424459 - RNA, 19 nt, Artificial Sequence
  Description of Artificial Sequence: Synthetic oligonucleotide
  Antisense strand to SEQ ID NO: 2424458
uuacucccugacaucaacc

SEQ ID NO: 2424460 - RNA, 19 nt, Artificial Sequence
  Description of Artificial Sequence: Synthetic oligonucleotide
  Sense strand starting at position 1844 of SEQ ID NO: 1886751
guugaugucagggaguaac

SEQ ID NO: 2424461 - RNA, 19 nt, Artificial Sequence
  Description of Artificial Sequence: Synthetic oligonucleotide
  Antisense strand to SEQ ID NO: 2424460
guuacucccugacaucaac

SEQ ID NO: 2424462 - RNA, 19 nt, Artificial Sequence
  Description of Artificial Sequence: Synthetic oligonucleotide
  Sense strand starting at position 1917 of SEQ ID NO: 1886751
guuauaacaagucguuaug

SEQ ID NO: 2424463 - RNA, 19 nt, Artificial Sequence
  Description of Artificial Sequence: Synthetic oligonucleotide
  Antisense strand to SEQ ID NO: 2424462
cauaacgacuuguuauaac

SEQ ID NO: 2424464 - RNA, 19 nt, Artificial Sequence
  Description of Artificial Sequence: Synthetic oligonucleotide
  Sense strand starting at position 1993 of SEQ ID NO: 1886751
cagugcuuaugucucaaga

SEQ ID NO: 2424465 - RNA, 19 nt, Artificial Sequence
  Description of Artificial Sequence: Synthetic oligonucleotide
  Antisense strand to SEQ ID NO: 2424464
ucuugagacauaagcacug

SEQ ID NO: 2424466 - RNA, 19 nt, Artificial Sequence
  Description of Artificial Sequence: Synthetic oligonucleotide
  Sense strand starting at position 2003 of SEQ ID NO: 1886751
gucucaagagucuacguaa

SEQ ID NO: 2424467 - RNA, 19 nt, Artificial Sequence
  Description of Artificial Sequence: Synthetic oligonucleotide
  Antisense strand to SEQ ID NO: 2424466
uuacguagacucuugagac

SEQ ID NO: 2424468 - RNA, 19 nt, Artificial Sequence
  Description of Artificial Sequence: Synthetic oligonucleotide
  Sense strand starting at position 2006 of SEQ ID NO: 1886751
ucaagagucuacguaauuc

SEQ ID NO: 2424469 - RNA, 19 nt, Artificial Sequence
  Description of Artificial Sequence: Synthetic oligonucleotide
  Antisense strand to SEQ ID NO: 2424468
gaauuacguagacucuuga

SEQ ID NO: 2424470 - RNA, 19 nt, Artificial Sequence
  Description of Artificial Sequence: Synthetic oligonucleotide
  Sense strand starting at position 2066 of SEQ ID NO: 1886751
gucuguauauuuccucuua

SEQ ID NO: 2424471 - RNA, 19 nt, Artificial Sequence
  Description of Artificial Sequence: Synthetic oligonucleotide
  Antisense strand to SEQ ID NO: 2424470
uaagaggaaauauacagac

SEQ ID NO: 2424472 - RNA, 19 nt, Artificial Sequence
  Description of Artificial Sequence: Synthetic oligonucleotide
  Sense strand starting at position 2089 of SEQ ID NO: 1886751
cacguucuauuugaugaua

SEQ ID NO: 2424473 - RNA, 19 nt, Artificial Sequence
  Description of Artificial Sequence: Synthetic oligonucleotide
  Antisense strand to SEQ ID NO: 2424472
uaucaucaaauagaacgug

SEQ ID NO: 2424474 - RNA, 19 nt, Artificial Sequence
  Description of Artificial Sequence: Synthetic oligonucleotide
  Sense strand starting at position 2244 of SEQ ID NO: 1886751
ggcaaaugaagauguauca

SEQ ID NO: 2424475 - RNA, 19 nt, Artificial Sequence
  Description of Artificial Sequence: Synthetic oligonucleotide
  Antisense strand to SEQ ID NO: 2424474
ugauacaucuucauuugcc

SEQ ID NO: 2424476 - RNA, 19 nt, Artificial Sequence
  Description of Artificial Sequence: Synthetic oligonucleotide
  Sense strand starting at position 2394 of SEQ ID NO: 1886751
uggugaggauaguuucuga

SEQ ID NO: 2424477 - RNA, 19 nt, Artificial Sequence
  Description of Artificial Sequence: Synthetic oligonucleotide
  Antisense strand to SEQ ID NO: 2424476
ucagaaacuauccucacca

SEQ ID NO: 2424478 - RNA, 19 nt, Artificial Sequence
  Description of Artificial Sequence: Synthetic oligonucleotide
  Sense strand starting at position 2397 of SEQ ID NO: 1886751
ugaggauaguuucugauag

SEQ ID NO: 2424479 - RNA, 19 nt, Artificial Sequence
  Description of Artificial Sequence: Synthetic oligonucleotide
  Antisense strand to SEQ ID NO: 2424478
cuaucagaaacuauccuca

SEQ ID NO: 2424480 - RNA, 19 nt, Artificial Sequence
  Description of Artificial Sequence: Synthetic oligonucleotide
  Sense strand starting at position 2464 of SEQ ID NO: 1886751
guuccuauucucuagcaca

SEQ ID NO: 2424481 - RNA, 19 nt, Artificial Sequence
  Description of Artificial Sequence: Synthetic oligonucleotide
  Antisense strand to SEQ ID NO: 2424480
ugugcuagagaauaggaac

SEQ ID NO: 2424482 - RNA, 19 nt, Artificial Sequence
  Description of Artificial Sequence: Synthetic oligonucleotide
  Sense strand starting at position 2555 of SEQ ID NO: 1886751
gcaguagcacgauaucaau

SEQ ID NO: 2424483 - RNA, 19 nt, Artificial Sequence
  Description of Artificial Sequence: Synthetic oligonucleotide
  Antisense strand to SEQ ID NO: 2424482
auugauaucgugcuacugc

SEQ ID NO: 2424484 - RNA, 19 nt, Artificial Sequence
  Description of Artificial Sequence: Synthetic oligonucleotide
  Sense strand starting at position 3268 of SEQ ID NO: 1886751
uggagcauguagcuaaauu

SEQ ID NO: 2424485 - RNA, 19 nt, Artificial Sequence
  Description of Artificial Sequence: Synthetic oligonucleotide
  Antisense strand to SEQ ID NO: 2424484
aauuuagcuacaugcucca

SEQ ID NO: 2424486 - RNA, 19 nt, Artificial Sequence
  Description of Artificial Sequence: Synthetic oligonucleotide
  Sense strand starting at position 3343 of SEQ ID NO: 1886751
uggcuuucucuugaaacua

SEQ ID NO: 2424487 - RNA, 19 nt, Artificial Sequence
  Description of Artificial Sequence: Synthetic oligonucleotide
  Antisense strand to SEQ ID NO: 2424486
uaguuucaagagaaagcca

SEQ ID NO: 2424488 - RNA, 19 nt, Artificial Sequence
  Description of Artificial Sequence: Synthetic oligonucleotide
  Sense strand starting at position 3362 of SEQ ID NO: 1886751
auuugcaccucugaaauga

SEQ ID NO: 2424489 - RNA, 19 nt, Artificial Sequence
  Description of Artificial Sequence: Synthetic oligonucleotide
  Antisense strand to SEQ ID NO: 2424488
ucauuucagaggugcaaau

SEQ ID NO: 2424490 - RNA, 19 nt, Artificial Sequence
  Description of Artificial Sequence: Synthetic oligonucleotide
  Sense strand starting at position 3589 of SEQ ID NO: 1886751
agcagugacugaccucuaa

SEQ ID NO: 2424491 - RNA, 19 nt, Artificial Sequence
  Description of Artificial Sequence: Synthetic oligonucleotide
  Antisense strand to SEQ ID NO: 2424490
uuagaggucagucacugcu

SEQ ID NO: 2424492 - RNA, 19 nt, Artificial Sequence
  Description of Artificial Sequence: Synthetic oligonucleotide
  Sense strand starting at position 3611 of SEQ ID NO: 1886751
aaaugucaaguaggguaaa

SEQ ID NO: 2424493 - RNA, 19 nt, Artificial Sequence
  Description of Artificial Sequence: Synthetic oligonucleotide
  Antisense strand to SEQ ID NO: 2424492
uuuacccuacuugacauuu

SEQ ID NO: 2424494 - RNA, 19 nt, Artificial Sequence
  Description of Artificial Sequence: Synthetic oligonucleotide
  Sense strand starting at position 3614 of SEQ ID NO: 1886751
ugucaaguaggguaaaugu

SEQ ID NO: 2424495 - RNA, 19 nt, Artificial Sequence
  Description of Artificial Sequence: Synthetic oligonucleotide
  Antisense strand to SEQ ID NO: 2424494
acauuuacccuacuugaca

SEQ ID NO: 2424496 - RNA, 19 nt, Artificial Sequence
  Description of Artificial Sequence: Synthetic oligonucleotide
  Sense strand starting at position 3624 of SEQ ID NO: 1886751
gguaaauguuuacuugaca

SEQ ID NO: 2424497 - RNA, 19 nt, Artificial Sequence
  Description of Artificial Sequence: Synthetic oligonucleotide
  Antisense strand to SEQ ID NO: 2424496
ugucaaguaaacauuuacc

SEQ ID NO: 2424498 - RNA, 19 nt, Artificial Sequence
  Description of Artificial Sequence: Synthetic oligonucleotide
  Sense strand starting at position 3625 of SEQ ID NO: 1886751
guaaauguuuacuugacaa

SEQ ID NO: 2424499 - RNA, 19 nt, Artificial Sequence
  Description of Artificial Sequence: Synthetic oligonucleotide
  Antisense strand to SEQ ID NO: 2424498
uugucaaguaaacauuuac

SEQ ID NO: 2424500 - RNA, 19 nt, Artificial Sequence
  Description of Artificial Sequence: Synthetic oligonucleotide
  Sense strand starting at position 3655 of SEQ ID NO: 1886751
uuccuaucuuagguugcua

SEQ ID NO: 2424501 - RNA, 19 nt, Artificial Sequence
  Description of Artificial Sequence: Synthetic oligonucleotide
  Antisense strand to SEQ ID NO: 2424500
uagcaaccuaagauaggaa

SEQ ID NO: 2424502 - RNA, 19 nt, Artificial Sequence
  Description of Artificial Sequence: Synthetic oligonucleotide
  Sense strand starting at position 3736 of SEQ ID NO: 1886751
uuugaaugccaauguuuaa

SEQ ID NO: 2424503 - RNA, 19 nt, Artificial Sequence
  Description of Artificial Sequence: Synthetic oligonucleotide
  Antisense strand to SEQ ID NO: 2424502
uuaaacauuggcauucaaa

SEQ ID NO: 2424504 - RNA, 19 nt, Artificial Sequence
  Description of Artificial Sequence: Synthetic oligonucleotide
  Sense strand starting at position 3802 of SEQ ID NO: 1886751
gguguauauuaagcaagua

SEQ ID NO: 2424505 - RNA, 19 nt, Artificial Sequence
  Description of Artificial Sequence: Synthetic oligonucleotide
  Antisense strand to SEQ ID NO: 2424504
uacuugcuuaauauacacc

SEQ ID NO: 2424506 - RNA, 19 nt, Artificial Sequence
  Description of Artificial Sequence: Synthetic oligonucleotide
  Sense strand starting at position 94 of SEQ ID NO: 1886752
cuacuaaucucuggcugga

SEQ ID NO: 2424507 - RNA, 19 nt, Artificial Sequence
  Description of Artificial Sequence: Synthetic oligonucleotide
  Antisense strand to SEQ ID NO: 2424506
uccagccagagauuaguag

SEQ ID NO: 2424508 - RNA, 19 nt, Artificial Sequence
  Description of Artificial Sequence: Synthetic oligonucleotide
  Sense strand starting at position 96 of SEQ ID NO: 1886752
acuaaucucuggcuggaga

SEQ ID NO: 2424509 - RNA, 19 nt, Artificial Sequence
  Description of Artificial Sequence: Synthetic oligonucleotide
  Antisense strand to SEQ ID NO: 2424508
ucuccagccagagauuagu

SEQ ID NO: 2424510 - RNA, 19 nt, Artificial Sequence
  Description of Artificial Sequence: Synthetic oligonucleotide
  Sense strand starting at position 118 of SEQ ID NO: 1886752
gggccuuagccuggaauua

SEQ ID NO: 2424511 - RNA, 19 nt, Artificial Sequence
  Description of Artificial Sequence: Synthetic oligonucleotide
  Antisense strand to SEQ ID NO: 2424510
uaauuccaggcuaaggccc

SEQ ID NO: 2424512 - RNA, 19 nt, Artificial Sequence
  Description of Artificial Sequence: Synthetic oligonucleotide
  Sense strand starting at position 153 of SEQ ID NO: 1886752
uccagaagguuuccuugua

SEQ ID NO: 2424513 - RNA, 19 nt, Artificial Sequence
  Description of Artificial Sequence: Synthetic oligonucleotide
  Antisense strand to SEQ ID NO: 2424512
uacaaggaaaccuucugga

SEQ ID NO: 2424514 - RNA, 19 nt, Artificial Sequence
  Description of Artificial Sequence: Synthetic oligonucleotide
  Sense strand starting at position 220 of SEQ ID NO: 1886752
ggucgaucccuggacaacu

SEQ ID NO: 2424515 - RNA, 19 nt, Artificial Sequence
  Description of Artificial Sequence: Synthetic oligonucleotide
  Antisense strand to SEQ ID NO: 2424514
aguuguccagggaucgacc

SEQ ID NO: 2424516 - RNA, 19 nt, Artificial Sequence
  Description of Artificial Sequence: Synthetic oligonucleotide
  Sense strand starting at position 369 of SEQ ID NO: 1886752
gugggcugacaucacaaua

SEQ ID NO: 2424517 - RNA, 19 nt, Artificial Sequence
  Description of Artificial Sequence: Synthetic oligonucleotide
  Antisense strand to SEQ ID NO: 2424516
uauugugaugucagcccac

SEQ ID NO: 2424518 - RNA, 19 nt, Artificial Sequence
  Description of Artificial Sequence: Synthetic oligonucleotide
  Sense strand starting at position 936 of SEQ ID NO: 1886752
ugaccugagauaggucuau

SEQ ID NO: 2424519 - RNA, 19 nt, Artificial Sequence
  Description of Artificial Sequence: Synthetic oligonucleotide
  Antisense strand to SEQ ID NO: 2424518
auagaccuaucucagguca

SEQ ID NO: 2424520 - RNA, 19 nt, Artificial Sequence
  Description of Artificial Sequence: Synthetic oligonucleotide
  Sense strand starting at position 1045 of SEQ ID NO: 1886752
gggcuucagugggaucaca

SEQ ID NO: 2424521 - RNA, 19 nt, Artificial Sequence
  Description of Artificial Sequence: Synthetic oligonucleotide
  Antisense strand to SEQ ID NO: 2424520
ugugaucccacugaagccc

SEQ ID NO: 2424522 - RNA, 19 nt, Artificial Sequence
  Description of Artificial Sequence: Synthetic oligonucleotide
  Sense strand starting at position 1165 of SEQ ID NO: 1886752
aucugauacucaggugcua

SEQ ID NO: 2424523 - RNA, 19 nt, Artificial Sequence
  Description of Artificial Sequence: Synthetic oligonucleotide
  Antisense strand to SEQ ID NO: 2424522
uagcaccugaguaucagau

SEQ ID NO: 2424524 - RNA, 19 nt, Artificial Sequence
  Description of Artificial Sequence: Synthetic oligonucleotide
  Sense strand starting at position 1306 of SEQ ID NO: 1886752
aggccuaguuggucaaauc

SEQ ID NO: 2424525 - RNA, 19 nt, Artificial Sequence
  Description of Artificial Sequence: Synthetic oligonucleotide
  Antisense strand to SEQ ID NO: 2424524
gauuugaccaacuaggccu

SEQ ID NO: 2424526 - RNA, 19 nt, Artificial Sequence
  Description of Artificial Sequence: Synthetic oligonucleotide
  Sense strand starting at position 1358 of SEQ ID NO: 1886752
acuggaagccucugagcuu

SEQ ID NO: 2424527 - RNA, 19 nt, Artificial Sequence
  Description of Artificial Sequence: Synthetic oligonucleotide
  Antisense strand to SEQ ID NO: 2424526
aagcucagaggcuuccagu

SEQ ID NO: 2424528 - RNA, 19 nt, Artificial Sequence
  Description of Artificial Sequence: Synthetic oligonucleotide
  Sense strand starting at position 1469 of SEQ ID NO: 1886752
ccacaagacuguucguagu

SEQ ID NO: 2424529 - RNA, 19 nt, Artificial Sequence
  Description of Artificial Sequence: Synthetic oligonucleotide
  Antisense strand to SEQ ID NO: 2424528
acuacgaacagucuugugg

SEQ ID NO: 2424530 - RNA, 19 nt, Artificial Sequence
  Description of Artificial Sequence: Synthetic oligonucleotide
  Sense strand starting at position 1471 of SEQ ID NO: 1886752
acaagacuguucguagucu

SEQ ID NO: 2424531 - RNA, 19 nt, Artificial Sequence
  Description of Artificial Sequence: Synthetic oligonucleotide
  Antisense strand to SEQ ID NO: 2424530
agacuacgaacagucuugu

SEQ ID NO: 2424532 - RNA, 19 nt, Artificial Sequence
  Description of Artificial Sequence: Synthetic oligonucleotide
  Sense strand starting at position 1579 of SEQ ID NO: 1886752
gaggcaucucgcuaggguu

SEQ ID NO: 2424533 - RNA, 19 nt, Artificial Sequence
  Description of Artificial Sequence: Synthetic oligonucleotide
  Antisense strand to SEQ ID NO: 2424532
aacccuagcgagaugccuc

SEQ ID NO: 2424534 - RNA, 19 nt, Artificial Sequence
  Description of Artificial Sequence: Synthetic oligonucleotide
  Sense strand starting at position 1665 of SEQ ID NO: 1886752
acccgcaugcagugaguua

SEQ ID NO: 2424535 - RNA, 19 nt, Artificial Sequence
  Description of Artificial Sequence: Synthetic oligonucleotide
  Antisense strand to SEQ ID NO: 2424534
uaacucacugcaugcgggu

SEQ ID NO: 2424536 - RNA, 19 nt, Artificial Sequence
  Description of Artificial Sequence: Synthetic oligonucleotide
  Sense strand starting at position 1771 of SEQ ID NO: 1886752
accaguguccugcggagaa

SEQ ID NO: 2424537 - RNA, 19 nt, Artificial Sequence
  Description of Artificial Sequence: Synthetic oligonucleotide
  Antisense strand to SEQ ID NO: 2424536
uucuccgcaggacacuggu

SEQ ID NO: 2424538 - RNA, 19 nt, Artificial Sequence
  Description of Artificial Sequence: Synthetic oligonucleotide
  Sense strand starting at position 1775 of SEQ ID NO: 1886752
guguccugcggagaaagaa

SEQ ID NO: 2424539 - RNA, 19 nt, Artificial Sequence
  Description of Artificial Sequence: Synthetic oligonucleotide
  Antisense strand to SEQ ID NO: 2424538
uucuuucuccgcaggacac

SEQ ID NO: 2424540 - RNA, 19 nt, Artificial Sequence
  Description of Artificial Sequence: Synthetic oligonucleotide
  Sense strand starting at position 2248 of SEQ ID NO: 1886752
ccaaucacagguugucuua

SEQ ID NO: 2424541 - RNA, 19 nt, Artificial Sequence
  Description of Artificial Sequence: Synthetic oligonucleotide
  Antisense strand to SEQ ID NO: 2424540
uaagacaaccugugauugg

SEQ ID NO: 2424542 - RNA, 19 nt, Artificial Sequence
  Description of Artificial Sequence: Synthetic oligonucleotide
  Sense strand starting at position 2303 of SEQ ID NO: 1886752
cggagaucucgcggcgcuu

SEQ ID NO: 2424543 - RNA, 19 nt, Artificial Sequence
  Description of Artificial Sequence: Synthetic oligonucleotide
  Antisense strand to SEQ ID NO: 2424542
aagcgccgcgagaucuccg

SEQ ID NO: 2424544 - RNA, 19 nt, Artificial Sequence
  Description of Artificial Sequence: Synthetic oligonucleotide
  Sense strand starting at position 2315 of SEQ ID NO: 1886752
ggcgcuuggcgugcuauaa

SEQ ID NO: 2424545 - RNA, 19 nt, Artificial Sequence
  Description of Artificial Sequence: Synthetic oligonucleotide
  Antisense strand to SEQ ID NO: 2424544
uuauagcacgccaagcgcc

SEQ ID NO: 2424546 - RNA, 19 nt, Artificial Sequence
  Description of Artificial Sequence: Synthetic oligonucleotide
  Sense strand starting at position 2316 of SEQ ID NO: 1886752
gcgcuuggcgugcuauaaa

SEQ ID NO: 2424547 - RNA, 19 nt, Artificial Sequence
  Description of Artificial Sequence: Synthetic oligonucleotide
  Antisense strand to SEQ ID NO: 2424546
uuuauagcacgccaagcgc

SEQ ID NO: 2424548 - RNA, 19 nt, Artificial Sequence
  Description of Artificial Sequence: Synthetic oligonucleotide
  Sense strand starting at position 2986 of SEQ ID NO: 1886752
gccauugacucgcauuaaa

SEQ ID NO: 2424549 - RNA, 19 nt, Artificial Sequence
  Description of Artificial Sequence: Synthetic oligonucleotide
  Antisense strand to SEQ ID NO: 2424548
uuuaaugcgagucaauggc

SEQ ID NO: 2424550 - RNA, 19 nt, Artificial Sequence
  Description of Artificial Sequence: Synthetic oligonucleotide
  Sense strand starting at position 3012 of SEQ ID NO: 1886752
gcgucucgcgugagagguu

SEQ ID NO: 2424551 - RNA, 19 nt, Artificial Sequence
  Description of Artificial Sequence: Synthetic oligonucleotide
  Antisense strand to SEQ ID NO: 2424550
aaccucucacgcgagacgc

SEQ ID NO: 2424552 - RNA, 19 nt, Artificial Sequence
  Description of Artificial Sequence: Synthetic oligonucleotide
  Sense strand starting at position 3194 of SEQ ID NO: 1886752
ccgagaggaugaugaaguu

SEQ ID NO: 2424553 - RNA, 19 nt, Artificial Sequence
  Description of Artificial Sequence: Synthetic oligonucleotide
  Antisense strand to SEQ ID NO: 2424552
aacuucaucauccucucgg

SEQ ID NO: 2424554 - RNA, 19 nt, Artificial Sequence
  Description of Artificial Sequence: Synthetic oligonucleotide
  Sense strand starting at position 3228 of SEQ ID NO: 1886752
cacuguaaggguuagcaaa

SEQ ID NO: 2424555 - RNA, 19 nt, Artificial Sequence
  Description of Artificial Sequence: Synthetic oligonucleotide
  Antisense strand to SEQ ID NO: 2424554
uuugcuaacccuuacagug

SEQ ID NO: 2424556 - RNA, 19 nt, Artificial Sequence
  Description of Artificial Sequence: Synthetic oligonucleotide
  Sense strand starting at position 3236 of SEQ ID NO: 1886752
ggguuagcaaacugucaua

SEQ ID NO: 2424557 - RNA, 19 nt, Artificial Sequence
  Description of Artificial Sequence: Synthetic oligonucleotide
  Antisense strand to SEQ ID NO: 2424556
uaugacaguuugcuaaccc

SEQ ID NO: 2424558 - RNA, 19 nt, Artificial Sequence
  Description of Artificial Sequence: Synthetic oligonucleotide
  Sense strand starting at position 3247 of SEQ ID NO: 1886752
cugucauaguccgcgugua

SEQ ID NO: 2424559 - RNA, 19 nt, Artificial Sequence
  Description of Artificial Sequence: Synthetic oligonucleotide
  Antisense strand to SEQ ID NO: 2424558
uacacgcggacuaugacag

SEQ ID NO: 2424560 - RNA, 19 nt, Artificial Sequence
  Description of Artificial Sequence: Synthetic oligonucleotide
  Sense strand starting at position 3314 of SEQ ID NO: 1886752
uggcauauuugucauguga

SEQ ID NO: 2424561 - RNA, 19 nt, Artificial Sequence
  Description of Artificial Sequence: Synthetic oligonucleotide
  Antisense strand to SEQ ID NO: 2424560
ucacaugacaaauaugcca

SEQ ID NO: 2424562 - RNA, 19 nt, Artificial Sequence
  Description of Artificial Sequence: Synthetic oligonucleotide
  Sense strand starting at position 3316 of SEQ ID NO: 1886752
gcauauuugucaugugagc

SEQ ID NO: 2424563 - RNA, 19 nt, Artificial Sequence
  Description of Artificial Sequence: Synthetic oligonucleotide
  Antisense strand to SEQ ID NO: 2424562
gcucacaugacaaauaugc

SEQ ID NO: 2424564 - RNA, 19 nt, Artificial Sequence
  Description of Artificial Sequence: Synthetic oligonucleotide
  Sense strand starting at position 3318 of SEQ ID NO: 1886752
auauuugucaugugagcgu

SEQ ID NO: 2424565 - RNA, 19 nt, Artificial Sequence
  Description of Artificial Sequence: Synthetic oligonucleotide
  Antisense strand to SEQ ID NO: 2424564
acgcucacaugacaaauau

SEQ ID NO: 2424566 - RNA, 19 nt, Artificial Sequence
  Description of Artificial Sequence: Synthetic oligonucleotide
  Sense strand starting at position 3331 of SEQ ID NO: 1886752
gagcguucgcccuagcaag

SEQ ID NO: 2424567 - RNA, 19 nt, Artificial Sequence
  Description of Artificial Sequence: Synthetic oligonucleotide
  Antisense strand to SEQ ID NO: 2424566
cuugcuagggcgaacgcuc

SEQ ID NO: 2424568 - RNA, 19 nt, Artificial Sequence
  Description of Artificial Sequence: Synthetic oligonucleotide
  Sense strand starting at position 3356 of SEQ ID NO: 1886752
uggucauggcuaggccaaa

SEQ ID NO: 2424569 - RNA, 19 nt, Artificial Sequence
  Description of Artificial Sequence: Synthetic oligonucleotide
  Antisense strand to SEQ ID NO: 2424568
uuuggccuagccaugacca

SEQ ID NO: 2424570 - RNA, 19 nt, Artificial Sequence
  Description of Artificial Sequence: Synthetic oligonucleotide
  Sense strand starting at position 3470 of SEQ ID NO: 1886752
aggguaaccuuacauacaa

SEQ ID NO: 2424571 - RNA, 19 nt, Artificial Sequence
  Description of Artificial Sequence: Synthetic oligonucleotide
  Antisense strand to SEQ ID NO: 2424570
uuguauguaagguuacccu

SEQ ID NO: 2424572 - RNA, 19 nt, Artificial Sequence
  Description of Artificial Sequence: Synthetic oligonucleotide
  Sense strand starting at position 3723 of SEQ ID NO: 1886752
uugugucuuuaauagaggu

SEQ ID NO: 2424573 - RNA, 19 nt, Artificial Sequence
  Description of Artificial Sequence: Synthetic oligonucleotide
  Antisense strand to SEQ ID NO: 2424572
accucuauuaaagacacaa

SEQ ID NO: 2424574 - RNA, 19 nt, Artificial Sequence
  Description of Artificial Sequence: Synthetic oligonucleotide
  Sense strand starting at position 3848 of SEQ ID NO: 1886752
ccgugacuuugguucuuga

SEQ ID NO: 2424575 - RNA, 19 nt, Artificial Sequence
  Description of Artificial Sequence: Synthetic oligonucleotide
  Antisense strand to SEQ ID NO: 2424574
ucaagaaccaaagucacgg

SEQ ID NO: 2424576 - RNA, 19 nt, Artificial Sequence
  Description of Artificial Sequence: Synthetic oligonucleotide
  Sense strand starting at position 3851 of SEQ ID NO: 1886752
ugacuuugguucuugaaua

SEQ ID NO: 2424577 - RNA, 19 nt, Artificial Sequence
  Description of Artificial Sequence: Synthetic oligonucleotide
  Antisense strand to SEQ ID NO: 2424576
uauucaagaaccaaaguca

SEQ ID NO: 2424578 - RNA, 19 nt, Artificial Sequence
  Description of Artificial Sequence: Synthetic oligonucleotide
  Sense strand starting at position 3852 of SEQ ID NO: 1886752
gacuuugguucuugaauau

SEQ ID NO: 2424579 - RNA, 19 nt, Artificial Sequence
  Description of Artificial Sequence: Synthetic oligonucleotide
  Antisense strand to SEQ ID NO: 2424578
auauucaagaaccaaaguc

SEQ ID NO: 2424580 - RNA, 19 nt, Artificial Sequence
  Description of Artificial Sequence: Synthetic oligonucleotide
  Sense strand starting at position 3856 of SEQ ID NO: 1886752
uugguucuugaauaucaua

SEQ ID NO: 2424581 - RNA, 19 nt, Artificial Sequence
  Description of Artificial Sequence: Synthetic oligonucleotide
  Antisense strand to SEQ ID NO: 2424580
uaugauauucaagaaccaa

SEQ ID NO: 2424582 - RNA, 19 nt, Artificial Sequence
  Description of Artificial Sequence: Synthetic oligonucleotide
  Sense strand starting at position 3859 of SEQ ID NO: 1886752
guucuugaauaucauaaug

SEQ ID NO: 2424583 - RNA, 19 nt, Artificial Sequence
  Description of Artificial Sequence: Synthetic oligonucleotide
  Antisense strand to SEQ ID NO: 2424582
cauuaugauauucaagaac

SEQ ID NO: 2424584 - RNA, 19 nt, Artificial Sequence
  Description of Artificial Sequence: Synthetic oligonucleotide
  Sense strand starting at position 3861 of SEQ ID NO: 1886752
ucuugaauaucauaauggu

SEQ ID NO: 2424585 - RNA, 19 nt, Artificial Sequence
  Description of Artificial Sequence: Synthetic oligonucleotide
  Antisense strand to SEQ ID NO: 2424584
accauuaugauauucaaga

SEQ ID NO: 2424586 - RNA, 19 nt, Artificial Sequence
  Description of Artificial Sequence: Synthetic oligonucleotide
  Sense strand starting at position 277 of SEQ ID NO: 1886753
aaagauaguucuggagaua

SEQ ID NO: 2424587 - RNA, 19 nt, Artificial Sequence
  Description of Artificial Sequence: Synthetic oligonucleotide
  Antisense strand to SEQ ID NO: 2424586
uaucuccagaacuaucuuu

SEQ ID NO: 2424588 - RNA, 19 nt, Artificial Sequence
  Description of Artificial Sequence: Synthetic oligonucleotide
  Sense strand starting at position 786 of SEQ ID NO: 1886753
aaggauuacucacugguuu

SEQ ID NO: 2424589 - RNA, 19 nt, Artificial Sequence
  Description of Artificial Sequence: Synthetic oligonucleotide
  Antisense strand to SEQ ID NO: 2424588
aaaccagugaguaauccuu

SEQ ID NO: 2424590 - RNA, 19 nt, Artificial Sequence
  Description of Artificial Sequence: Synthetic oligonucleotide
  Sense strand starting at position 1084 of SEQ ID NO: 1886753
ggcagaguugaguaauuga

SEQ ID NO: 2424591 - RNA, 19 nt, Artificial Sequence
  Description of Artificial Sequence: Synthetic oligonucleotide
  Antisense strand to SEQ ID NO: 2424590
ucaauuacucaacucugcc

SEQ ID NO: 2424592 - RNA, 19 nt, Artificial Sequence
  Description of Artificial Sequence: Synthetic oligonucleotide
  Sense strand starting at position 1087 of SEQ ID NO: 1886753
agaguugaguaauugagac

SEQ ID NO: 2424593 - RNA, 19 nt, Artificial Sequence
  Description of Artificial Sequence: Synthetic oligonucleotide
  Antisense strand to SEQ ID NO: 2424592
gucucaauuacucaacucu

SEQ ID NO: 2424594 - RNA, 19 nt, Artificial Sequence
  Description of Artificial Sequence: Synthetic oligonucleotide
  Sense strand starting at position 1093 of SEQ ID NO: 1886753
gaguaauugagacggagac

SEQ ID NO: 2424595 - RNA, 19 nt, Artificial Sequence
  Description of Artificial Sequence: Synthetic oligonucleotide
  Antisense strand to SEQ ID NO: 2424594
gucuccgucucaauuacuc

SEQ ID NO: 2424596 - RNA, 19 nt, Artificial Sequence
  Description of Artificial Sequence: Synthetic oligonucleotide
  Sense strand starting at position 1094 of SEQ ID NO: 1886753
aguaauugagacggagacu

SEQ ID NO: 2424597 - RNA, 19 nt, Artificial Sequence
  Description of Artificial Sequence: Synthetic oligonucleotide
  Antisense strand to SEQ ID NO: 2424596
agucuccgucucaauuacu

SEQ ID NO: 2424598 - RNA, 19 nt, Artificial Sequence
  Description of Artificial Sequence: Synthetic oligonucleotide
  Sense strand starting at position 1186 of SEQ ID NO: 1886753
acagcuaucuaagaaauug

SEQ ID NO: 2424599 - RNA, 19 nt, Artificial Sequence
  Description of Artificial Sequence: Synthetic oligonucleotide
  Antisense strand to SEQ ID NO: 2424598
caauuucuuagauagcugu

SEQ ID NO: 2424600 - RNA, 19 nt, Artificial Sequence
  Description of Artificial Sequence: Synthetic oligonucleotide
  Sense strand starting at position 1218 of SEQ ID NO: 1886753
agagcucguccauaggaua

SEQ ID NO: 2424601 - RNA, 19 nt, Artificial Sequence
  Description of Artificial Sequence: Synthetic oligonucleotide
  Antisense strand to SEQ ID NO: 2424600
uauccuauggacgagcucu

SEQ ID NO: 2424602 - RNA, 19 nt, Artificial Sequence
  Description of Artificial Sequence: Synthetic oligonucleotide
  Sense strand starting at position 1251 of SEQ ID NO: 1886753
ucauguuuauuaccaguuu

SEQ ID NO: 2424603 - RNA, 19 nt, Artificial Sequence
  Description of Artificial Sequence: Synthetic oligonucleotide
  Antisense strand to SEQ ID NO: 2424602
aaacugguaauaaacauga

SEQ ID NO: 2424604 - RNA, 19 nt, Artificial Sequence
  Description of Artificial Sequence: Synthetic oligonucleotide
  Sense strand starting at position 1348 of SEQ ID NO: 1886753
guggcauugccgcucuuau

SEQ ID NO: 2424605 - RNA, 19 nt, Artificial Sequence
  Description of Artificial Sequence: Synthetic oligonucleotide
  Antisense strand to SEQ ID NO: 2424604
auaagagcggcaaugccac

SEQ ID NO: 2424606 - RNA, 19 nt, Artificial Sequence
  Description of Artificial Sequence: Synthetic oligonucleotide
  Sense strand starting at position 1349 of SEQ ID NO: 1886753
uggcauugccgcucuuaua

SEQ ID NO: 2424607 - RNA, 19 nt, Artificial Sequence
  Description of Artificial Sequence: Synthetic oligonucleotide
  Antisense strand to SEQ ID NO: 2424606
uauaagagcggcaaugcca

SEQ ID NO: 2424608 - RNA, 19 nt, Artificial Sequence
  Description of Artificial Sequence: Synthetic oligonucleotide
  Sense strand starting at position 1350 of SEQ ID NO: 1886753
ggcauugccgcucuuauau

SEQ ID NO: 2424609 - RNA, 19 nt, Artificial Sequence
  Description of Artificial Sequence: Synthetic oligonucleotide
  Antisense strand to SEQ ID NO: 2424608
auauaagagcggcaaugcc

SEQ ID NO: 2424610 - RNA, 19 nt, Artificial Sequence
  Description of Artificial Sequence: Synthetic oligonucleotide
  Sense strand starting at position 1372 of SEQ ID NO: 1886753
auguaagauuacuagacca

SEQ ID NO: 2424611 - RNA, 19 nt, Artificial Sequence
  Description of Artificial Sequence: Synthetic oligonucleotide
  Antisense strand to SEQ ID NO: 2424610
uggucuaguaaucuuacau

SEQ ID NO: 2424612 - RNA, 19 nt, Artificial Sequence
  Description of Artificial Sequence: Synthetic oligonucleotide
  Sense strand starting at position 1440 of SEQ ID NO: 1886753
ggcaacuacuuucuaaguu

SEQ ID NO: 2424613 - RNA, 19 nt, Artificial Sequence
  Description of Artificial Sequence: Synthetic oligonucleotide
  Antisense strand to SEQ ID NO: 2424612
aacuuagaaaguaguugcc

SEQ ID NO: 2424614 - RNA, 19 nt, Artificial Sequence
  Description of Artificial Sequence: Synthetic oligonucleotide
  Sense strand starting at position 1505 of SEQ ID NO: 1886753
cucauagaguagcuauacu

SEQ ID NO: 2424615 - RNA, 19 nt, Artificial Sequence
  Description of Artificial Sequence: Synthetic oligonucleotide
  Antisense strand to SEQ ID NO: 2424614
aguauagcuacucuaugag

SEQ ID NO: 2424616 - RNA, 19 nt, Artificial Sequence
  Description of Artificial Sequence: Synthetic oligonucleotide
  Sense strand starting at position 1516 of SEQ ID NO: 1886753
gcuauacugguccauccau

SEQ ID NO: 2424617 - RNA, 19 nt, Artificial Sequence
  Description of Artificial Sequence: Synthetic oligonucleotide
  Antisense strand to SEQ ID NO: 2424616
auggauggaccaguauagc

SEQ ID NO: 2424618 - RNA, 19 nt, Artificial Sequence
  Description of Artificial Sequence: Synthetic oligonucleotide
  Sense strand starting at position 1709 of SEQ ID NO: 1886753
ugucuuagaaauggguacu

SEQ ID NO: 2424619 - RNA, 19 nt, Artificial Sequence
  Description of Artificial Sequence: Synthetic oligonucleotide
  Antisense strand to SEQ ID NO: 2424618
aguacccauuucuaagaca

SEQ ID NO: 2424620 - RNA, 19 nt, Artificial Sequence
  Description of Artificial Sequence: Synthetic oligonucleotide
  Sense strand starting at position 1710 of SEQ ID NO: 1886753
gucuuagaaauggguacuu

SEQ ID NO: 2424621 - RNA, 19 nt, Artificial Sequence
  Description of Artificial Sequence: Synthetic oligonucleotide
  Antisense strand to SEQ ID NO: 2424620
aaguacccauuucuaagac

SEQ ID NO: 2424622 - RNA, 19 nt, Artificial Sequence
  Description of Artificial Sequence: Synthetic oligonucleotide
  Sense strand starting at position 1722 of SEQ ID NO: 1886753
gguacuucuuaguucugga

SEQ ID NO: 2424623 - RNA, 19 nt, Artificial Sequence
  Description of Artificial Sequence: Synthetic oligonucleotide
  Antisense strand to SEQ ID NO: 2424622
uccagaacuaagaaguacc

SEQ ID NO: 2424624 - RNA, 19 nt, Artificial Sequence
  Description of Artificial Sequence: Synthetic oligonucleotide
  Sense strand starting at position 1902 of SEQ ID NO: 1886753
acucuacagccugaucaga

SEQ ID NO: 2424625 - RNA, 19 nt, Artificial Sequence
  Description of Artificial Sequence: Synthetic oligonucleotide
  Antisense strand to SEQ ID NO: 2424624
ucugaucaggcuguagagu

SEQ ID NO: 2424626 - RNA, 19 nt, Artificial Sequence
  Description of Artificial Sequence: Synthetic oligonucleotide
  Sense strand starting at position 1904 of SEQ ID NO: 1886753
ucuacagccugaucagauu

SEQ ID NO: 2424627 - RNA, 19 nt, Artificial Sequence
  Description of Artificial Sequence: Synthetic oligonucleotide
  Antisense strand to SEQ ID NO: 2424626
aaucugaucaggcuguaga

SEQ ID NO: 2424628 - RNA, 19 nt, Artificial Sequence
  Description of Artificial Sequence: Synthetic oligonucleotide
  Sense strand starting at position 2057 of SEQ ID NO: 1886753
aaggcaccuccuuagguau

SEQ ID NO: 2424629 - RNA, 19 nt, Artificial Sequence
  Description of Artificial Sequence: Synthetic oligonucleotide
  Antisense strand to SEQ ID NO: 2424628
auaccuaaggaggugccuu

SEQ ID NO: 2424630 - RNA, 19 nt, Artificial Sequence
  Description of Artificial Sequence: Synthetic oligonucleotide
  Sense strand starting at position 2263 of SEQ ID NO: 1886753
ucugcucugcaagaaguuu

SEQ ID NO: 2424631 - RNA, 19 nt, Artificial Sequence
  Description of Artificial Sequence: Synthetic oligonucleotide
  Antisense strand to SEQ ID NO: 2424630
aaacuucuugcagagcaga

SEQ ID NO: 2424632 - RNA, 19 nt, Artificial Sequence
  Description of Artificial Sequence: Synthetic oligonucleotide
  Sense strand starting at position 2317 of SEQ ID NO: 1886753
ggcacaguuaggugcucaa

SEQ ID NO: 2424633 - RNA, 19 nt, Artificial Sequence
  Description of Artificial Sequence: Synthetic oligonucleotide
  Antisense strand to SEQ ID NO: 2424632
uugagcaccuaacugugcc

SEQ ID NO: 2424634 - RNA, 19 nt, Artificial Sequence
  Description of Artificial Sequence: Synthetic oligonucleotide
  Sense strand starting at position 2320 of SEQ ID NO: 1886753
acaguuaggugcucaaugu

SEQ ID NO: 2424635 - RNA, 19 nt, Artificial Sequence
  Description of Artificial Sequence: Synthetic oligonucleotide
  Antisense strand to SEQ ID NO: 2424634
acauugagcaccuaacugu

SEQ ID NO: 2424636 - RNA, 19 nt, Artificial Sequence
  Description of Artificial Sequence: Synthetic oligonucleotide
  Sense strand starting at position 2324 of SEQ ID NO: 1886753
uuaggugcucaaugucuaa

SEQ ID NO: 2424637 - RNA, 19 nt, Artificial Sequence
  Description of Artificial Sequence: Synthetic oligonucleotide
  Antisense strand to SEQ ID NO: 2424636
uuagacauugagcaccuaa

SEQ ID NO: 2424638 - RNA, 19 nt, Artificial Sequence
  Description of Artificial Sequence: Synthetic oligonucleotide
  Sense strand starting at position 2327 of SEQ ID NO: 1886753
ggugcucaaugucuaauca

SEQ ID NO: 2424639 - RNA, 19 nt, Artificial Sequence
  Description of Artificial Sequence: Synthetic oligonucleotide
  Antisense strand to SEQ ID NO: 2424638
ugauuagacauugagcacc

SEQ ID NO: 2424640 - RNA, 19 nt, Artificial Sequence
  Description of Artificial Sequence: Synthetic oligonucleotide
  Sense strand starting at position 2328 of SEQ ID NO: 1886753
gugcucaaugucuaaucaa

SEQ ID NO: 2424641 - RNA, 19 nt, Artificial Sequence
  Description of Artificial Sequence: Synthetic oligonucleotide
  Antisense strand to SEQ ID NO: 2424640
uugauuagacauugagcac

SEQ ID NO: 2424642 - RNA, 19 nt, Artificial Sequence
  Description of Artificial Sequence: Synthetic oligonucleotide
  Sense strand starting at position 2763 of SEQ ID NO: 1886753
acacacaaugugugacaua

SEQ ID NO: 2424643 - RNA, 19 nt, Artificial Sequence
  Description of Artificial Sequence: Synthetic oligonucleotide
  Antisense strand to SEQ ID NO: 2424642
uaugucacacauugugugu

SEQ ID NO: 2424644 - RNA, 19 nt, Artificial Sequence
  Description of Artificial Sequence: Synthetic oligonucleotide
  Sense strand starting at position 2768 of SEQ ID NO: 1886753
caaugugugacauagugga

SEQ ID NO: 2424645 - RNA, 19 nt, Artificial Sequence
  Description of Artificial Sequence: Synthetic oligonucleotide
  Antisense strand to SEQ ID NO: 2424644
uccacuaugucacacauug

SEQ ID NO: 2424646 - RNA, 19 nt, Artificial Sequence
  Description of Artificial Sequence: Synthetic oligonucleotide
  Sense strand starting at position 2772 of SEQ ID NO: 1886753
gugugacauaguggagaau

SEQ ID NO: 2424647 - RNA, 19 nt, Artificial Sequence
  Description of Artificial Sequence: Synthetic oligonucleotide
  Antisense strand to SEQ ID NO: 2424646
auucuccacuaugucacac

SEQ ID NO: 2424648 - RNA, 19 nt, Artificial Sequence
  Description of Artificial Sequence: Synthetic oligonucleotide
  Sense strand starting at position 2845 of SEQ ID NO: 1886753
ucaauauaaucaugaggaa

SEQ ID NO: 2424649 - RNA, 19 nt, Artificial Sequence
  Description of Artificial Sequence: Synthetic oligonucleotide
  Antisense strand to SEQ ID NO: 2424648
uuccucaugauuauauuga

SEQ ID NO: 2424650 - RNA, 19 nt, Artificial Sequence
  Description of Artificial Sequence: Synthetic oligonucleotide
  Sense strand starting at position 3287 of SEQ ID NO: 1886753
aggaguuugggacgagaau

SEQ ID NO: 2424651 - RNA, 19 nt, Artificial Sequence
  Description of Artificial Sequence: Synthetic oligonucleotide
  Antisense strand to SEQ ID NO: 2424650
auucucgucccaaacuccu

SEQ ID NO: 2424652 - RNA, 19 nt, Artificial Sequence
  Description of Artificial Sequence: Synthetic oligonucleotide
  Sense strand starting at position 3422 of SEQ ID NO: 1886753
aauugagaucacggugaaa

SEQ ID NO: 2424653 - RNA, 19 nt, Artificial Sequence
  Description of Artificial Sequence: Synthetic oligonucleotide
  Antisense strand to SEQ ID NO: 2424652
uuucaccgugaucucaauu

SEQ ID NO: 2424654 - RNA, 19 nt, Artificial Sequence
  Description of Artificial Sequence: Synthetic oligonucleotide
  Sense strand starting at position 3845 of SEQ ID NO: 1886753
agggaaauauccugaacua

SEQ ID NO: 2424655 - RNA, 19 nt, Artificial Sequence
  Description of Artificial Sequence: Synthetic oligonucleotide
  Antisense strand to SEQ ID NO: 2424654
uaguucaggauauuucccu

SEQ ID NO: 2424656 - RNA, 19 nt, Artificial Sequence
  Description of Artificial Sequence: Synthetic oligonucleotide
  Sense strand starting at position 3877 of SEQ ID NO: 1886753
gccaauuaauuacaaagga

SEQ ID NO: 2424657 - RNA, 19 nt, Artificial Sequence
  Description of Artificial Sequence: Synthetic oligonucleotide
  Antisense strand to SEQ ID NO: 2424656
uccuuuguaauuaauuggc

SEQ ID NO: 2424658 - RNA, 19 nt, Artificial Sequence
  Description of Artificial Sequence: Synthetic oligonucleotide
  Sense strand starting at position 3901 of SEQ ID NO: 1886753
uugggauaaugagagaaau

SEQ ID NO: 2424659 - RNA, 19 nt, Artificial Sequence
  Description of Artificial Sequence: Synthetic oligonucleotide
  Antisense strand to SEQ ID NO: 2424658
auuucucucauuaucccaa

SEQ ID NO: 2424660 - RNA, 19 nt, Artificial Sequence
  Description of Artificial Sequence: Synthetic oligonucleotide
  Sense strand starting at position 3962 of SEQ ID NO: 1886753
guuacaauuucuuggguau

SEQ ID NO: 2424661 - RNA, 19 nt, Artificial Sequence
  Description of Artificial Sequence: Synthetic oligonucleotide
  Antisense strand to SEQ ID NO: 2424660
auacccaagaaauuguaac

SEQ ID NO: 2424662 - RNA, 19 nt, Artificial Sequence
  Description of Artificial Sequence: Synthetic oligonucleotide
  Sense strand starting at position 3964 of SEQ ID NO: 1886753
uacaauuucuuggguauga

SEQ ID NO: 2424663 - RNA, 19 nt, Artificial Sequence
  Description of Artificial Sequence: Synthetic oligonucleotide
  Antisense strand to SEQ ID NO: 2424662
ucauacccaagaaauugua

SEQ ID NO: 2424664 - RNA, 19 nt, Artificial Sequence
  Description of Artificial Sequence: Synthetic oligonucleotide
  Sense strand starting at position 3975 of SEQ ID NO: 1886753
ggguaugauauuggcaauc

SEQ ID NO: 2424665 - RNA, 19 nt, Artificial Sequence
  Description of Artificial Sequence: Synthetic oligonucleotide
  Antisense strand to SEQ ID NO: 2424664
gauugccaauaucauaccc

SEQ ID NO: 2424666 - RNA, 19 nt, Artificial Sequence
  Description of Artificial Sequence: Synthetic oligonucleotide
  Sense strand starting at position 755 of SEQ ID NO: 1886754
ccuguaguugaaggagaua

SEQ ID NO: 2424667 - RNA, 19 nt, Artificial Sequence
  Description of Artificial Sequence: Synthetic oligonucleotide
  Antisense strand to SEQ ID NO: 2424666
uaucuccuucaacuacagg

SEQ ID NO: 2424668 - RNA, 19 nt, Artificial Sequence
  Description of Artificial Sequence: Synthetic oligonucleotide
  Sense strand starting at position 788 of SEQ ID NO: 1886754
cccagauaaugagaagaga

SEQ ID NO: 2424669 - RNA, 19 nt, Artificial Sequence
  Description of Artificial Sequence: Synthetic oligonucleotide
  Antisense strand to SEQ ID NO: 2424668
ucucuucucauuaucuggg

SEQ ID NO: 2424670 - RNA, 19 nt, Artificial Sequence
  Description of Artificial Sequence: Synthetic oligonucleotide
  Sense strand starting at position 818 of SEQ ID NO: 1886754
cagcuagagucacaucaug

SEQ ID NO: 2424671 - RNA, 19 nt, Artificial Sequence
  Description of Artificial Sequence: Synthetic oligonucleotide
  Antisense strand to SEQ ID NO: 2424670
caugaugugacucuagcug

SEQ ID NO: 2424672 - RNA, 19 nt, Artificial Sequence
  Description of Artificial Sequence: Synthetic oligonucleotide
  Sense strand starting at position 861 of SEQ ID NO: 1886754
gcaguaacucuacaaguau

SEQ ID NO: 2424673 - RNA, 19 nt, Artificial Sequence
  Description of Artificial Sequence: Synthetic oligonucleotide
  Antisense strand to SEQ ID NO: 2424672
auacuuguagaguuacugc

SEQ ID NO: 2424674 - RNA, 19 nt, Artificial Sequence
  Description of Artificial Sequence: Synthetic oligonucleotide
  Sense strand starting at position 1147 of SEQ ID NO: 1886754
gugcgaaacucugccucau

SEQ ID NO: 2424675 - RNA, 19 nt, Artificial Sequence
  Description of Artificial Sequence: Synthetic oligonucleotide
  Antisense strand to SEQ ID NO: 2424674
augaggcagaguuucgcac

SEQ ID NO: 2424676 - RNA, 19 nt, Artificial Sequence
  Description of Artificial Sequence: Synthetic oligonucleotide
  Sense strand starting at position 1149 of SEQ ID NO: 1886754
gcgaaacucugccucauuu

SEQ ID NO: 2424677 - RNA, 19 nt, Artificial Sequence
  Description of Artificial Sequence: Synthetic oligonucleotide
  Antisense strand to SEQ ID NO: 2424676
aaaugaggcagaguuucgc

SEQ ID NO: 2424678 - RNA, 19 nt, Artificial Sequence
  Description of Artificial Sequence: Synthetic oligonucleotide
  Sense strand starting at position 1866 of SEQ ID NO: 1886754
gccuuauucucugaaauag

SEQ ID NO: 2424679 - RNA, 19 nt, Artificial Sequence
  Description of Artificial Sequence: Synthetic oligonucleotide
  Antisense strand to SEQ ID NO: 2424678
cuauuucagagaauaaggc

SEQ ID NO: 2424680 - RNA, 19 nt, Artificial Sequence
  Description of Artificial Sequence: Synthetic oligonucleotide
  Sense strand starting at position 1990 of SEQ ID NO: 1886754
ugaugaaagcaacgauauu

SEQ ID NO: 2424681 - RNA, 19 nt, Artificial Sequence
  Description of Artificial Sequence: Synthetic oligonucleotide
  Antisense strand to SEQ ID NO: 2424680
aauaucguugcuuucauca

SEQ ID NO: 2424682 - RNA, 19 nt, Artificial Sequence
  Description of Artificial Sequence: Synthetic oligonucleotide
  Sense strand starting at position 2095 of SEQ ID NO: 1886754
gaaguagaaagguguguua

SEQ ID NO: 2424683 - RNA, 19 nt, Artificial Sequence
  Description of Artificial Sequence: Synthetic oligonucleotide
  Antisense strand to SEQ ID NO: 2424682
uaacacaccuuucuacuuc

SEQ ID NO: 2424684 - RNA, 19 nt, Artificial Sequence
  Description of Artificial Sequence: Synthetic oligonucleotide
  Sense strand starting at position 2097 of SEQ ID NO: 1886754
aguagaaagguguguuaag

SEQ ID NO: 2424685 - RNA, 19 nt, Artificial Sequence
  Description of Artificial Sequence: Synthetic oligonucleotide
  Antisense strand to SEQ ID NO: 2424684
cuuaacacaccuuucuacu

SEQ ID NO: 2424686 - RNA, 19 nt, Artificial Sequence
  Description of Artificial Sequence: Synthetic oligonucleotide
  Sense strand starting at position 2098 of SEQ ID NO: 1886754
guagaaagguguguuaaga

SEQ ID NO: 2424687 - RNA, 19 nt, Artificial Sequence
  Description of Artificial Sequence: Synthetic oligonucleotide
  Antisense strand to SEQ ID NO: 2424686
ucuuaacacaccuuucuac

SEQ ID NO: 2424688 - RNA, 19 nt, Artificial Sequence
  Description of Artificial Sequence: Synthetic oligonucleotide
  Sense strand starting at position 2616 of SEQ ID NO: 1886754
guuguuugguuccuagauc

SEQ ID NO: 2424689 - RNA, 19 nt, Artificial Sequence
  Description of Artificial Sequence: Synthetic oligonucleotide
  Antisense strand to SEQ ID NO: 2424688
gaucuaggaaccaaacaac

SEQ ID NO: 2424690 - RNA, 19 nt, Artificial Sequence
  Description of Artificial Sequence: Synthetic oligonucleotide
  Sense strand starting at position 2617 of SEQ ID NO: 1886754
uuguuugguuccuagauca

SEQ ID NO: 2424691 - RNA, 19 nt, Artificial Sequence
  Description of Artificial Sequence: Synthetic oligonucleotide
  Antisense strand to SEQ ID NO: 2424690
ugaucuaggaaccaaacaa

SEQ ID NO: 2424692 - RNA, 19 nt, Artificial Sequence
  Description of Artificial Sequence: Synthetic oligonucleotide
  Sense strand starting at position 2942 of SEQ ID NO: 1886754
cagagaauguaguggguua

SEQ ID NO: 2424693 - RNA, 19 nt, Artificial Sequence
  Description of Artificial Sequence: Synthetic oligonucleotide
  Antisense strand to SEQ ID NO: 2424692
uaacccacuacauucucug

SEQ ID NO: 2424694 - RNA, 19 nt, Artificial Sequence
  Description of Artificial Sequence: Synthetic oligonucleotide
  Sense strand starting at position 2943 of SEQ ID NO: 1886754
agagaauguaguggguuau

SEQ ID NO: 2424695 - RNA, 19 nt, Artificial Sequence
  Description of Artificial Sequence: Synthetic oligonucleotide
  Antisense strand to SEQ ID NO: 2424694
auaacccacuacauucucu

SEQ ID NO: 2424696 - RNA, 19 nt, Artificial Sequence
  Description of Artificial Sequence: Synthetic oligonucleotide
  Sense strand starting at position 2944 of SEQ ID NO: 1886754
gagaauguaguggguuaua

SEQ ID NO: 2424697 - RNA, 19 nt, Artificial Sequence
  Description of Artificial Sequence: Synthetic oligonucleotide
  Antisense strand to SEQ ID NO: 2424696
uauaacccacuacauucuc

SEQ ID NO: 2424698 - RNA, 19 nt, Artificial Sequence
  Description of Artificial Sequence: Synthetic oligonucleotide
  Sense strand starting at position 2947 of SEQ ID NO: 1886754
aauguaguggguuauaauc

SEQ ID NO: 2424699 - RNA, 19 nt, Artificial Sequence
  Description of Artificial Sequence: Synthetic oligonucleotide
  Antisense strand to SEQ ID NO: 2424698
gauuauaacccacuacauu

SEQ ID NO: 2424700 - RNA, 19 nt, Artificial Sequence
  Description of Artificial Sequence: Synthetic oligonucleotide
  Sense strand starting at position 2955 of SEQ ID NO: 1886754
ggguuauaauccugccauu

SEQ ID NO: 2424701 - RNA, 19 nt, Artificial Sequence
  Description of Artificial Sequence: Synthetic oligonucleotide
  Antisense strand to SEQ ID NO: 2424700
aauggcaggauuauaaccc

SEQ ID NO: 2424702 - RNA, 19 nt, Artificial Sequence
  Description of Artificial Sequence: Synthetic oligonucleotide
  Sense strand starting at position 3139 of SEQ ID NO: 1886754
gggaucccaucucuacuaa

SEQ ID NO: 2424703 - RNA, 19 nt, Artificial Sequence
  Description of Artificial Sequence: Synthetic oligonucleotide
  Antisense strand to SEQ ID NO: 2424702
uuaguagagaugggauccc

SEQ ID NO: 2424704 - RNA, 19 nt, Artificial Sequence
  Description of Artificial Sequence: Synthetic oligonucleotide
  Sense strand starting at position 3827 of SEQ ID NO: 1886754
ugaagucagucacaaaucu

SEQ ID NO: 2424705 - RNA, 19 nt, Artificial Sequence
  Description of Artificial Sequence: Synthetic oligonucleotide
  Antisense strand to SEQ ID NO: 2424704
agauuugugacugacuuca

SEQ ID NO: 2424706 - RNA, 19 nt, Artificial Sequence
  Description of Artificial Sequence: Synthetic oligonucleotide
  Sense strand starting at position 3967 of SEQ ID NO: 1886754
auaugaaugcugugugguc

SEQ ID NO: 2424707 - RNA, 19 nt, Artificial Sequence
  Description of Artificial Sequence: Synthetic oligonucleotide
  Antisense strand to SEQ ID NO: 2424706
gaccacacagcauucauau

SEQ ID NO: 2424708 - RNA, 19 nt, Artificial Sequence
  Description of Artificial Sequence: Synthetic oligonucleotide
  Sense strand starting at position 3968 of SEQ ID NO: 1886754
uaugaaugcugugugguca

SEQ ID NO: 2424709 - RNA, 19 nt, Artificial Sequence
  Description of Artificial Sequence: Synthetic oligonucleotide
  Antisense strand to SEQ ID NO: 2424708
ugaccacacagcauucaua

SEQ ID NO: 2424710 - RNA, 19 nt, Artificial Sequence
  Description of Artificial Sequence: Synthetic oligonucleotide
  Sense strand starting at position 3972 of SEQ ID NO: 1886754
aaugcuguguggucaguua

SEQ ID NO: 2424711 - RNA, 19 nt, Artificial Sequence
  Description of Artificial Sequence: Synthetic oligonucleotide
  Antisense strand to SEQ ID NO: 2424710
uaacugaccacacagcauu

SEQ ID NO: 2424712 - RNA, 19 nt, Artificial Sequence
  Description of Artificial Sequence: Synthetic oligonucleotide
  Sense strand starting at position 114 of SEQ ID NO: 1886755
caaaguaaguccugccagu

SEQ ID NO: 2424713 - RNA, 19 nt, Artificial Sequence
  Description of Artificial Sequence: Synthetic oligonucleotide
  Antisense strand to SEQ ID NO: 2424712
acuggcaggacuuacuuug

SEQ ID NO: 2424714 - RNA, 19 nt, Artificial Sequence
  Description of Artificial Sequence: Synthetic oligonucleotide
  Sense strand starting at position 157 of SEQ ID NO: 1886755
ccugaauccucauuagagu

SEQ ID NO: 2424715 - RNA, 19 nt, Artificial Sequence
  Description of Artificial Sequence: Synthetic oligonucleotide
  Antisense strand to SEQ ID NO: 2424714
acucuaaugaggauucagg

SEQ ID NO: 2424716 - RNA, 19 nt, Artificial Sequence
  Description of Artificial Sequence: Synthetic oligonucleotide
  Sense strand starting at position 158 of SEQ ID NO: 1886755
cugaauccucauuagaguc

SEQ ID NO: 2424717 - RNA, 19 nt, Artificial Sequence
  Description of Artificial Sequence: Synthetic oligonucleotide
  Antisense strand to SEQ ID NO: 2424716
gacucuaaugaggauucag

SEQ ID NO: 2424718 - RNA, 19 nt, Artificial Sequence
  Description of Artificial Sequence: Synthetic oligonucleotide
  Sense strand starting at position 1038 of SEQ ID NO: 1886755
gucugucucaucuguugaa

SEQ ID NO: 2424719 - RNA, 19 nt, Artificial Sequence
  Description of Artificial Sequence: Synthetic oligonucleotide
  Antisense strand to SEQ ID NO: 2424718
uucaacagaugagacagac

SEQ ID NO: 2424720 - RNA, 19 nt, Artificial Sequence
  Description of Artificial Sequence: Synthetic oligonucleotide
  Sense strand starting at position 1039 of SEQ ID NO: 1886755
ucugucucaucuguugaaa

SEQ ID NO: 2424721 - RNA, 19 nt, Artificial Sequence
  Description of Artificial Sequence: Synthetic oligonucleotide
  Antisense strand to SEQ ID NO: 2424720
uuucaacagaugagacaga

SEQ ID NO: 2424722 - RNA, 19 nt, Artificial Sequence
  Description of Artificial Sequence: Synthetic oligonucleotide
  Sense strand starting at position 1074 of SEQ ID NO: 1886755
gcaggaugcuggaguuuga

SEQ ID NO: 2424723 - RNA, 19 nt, Artificial Sequence
  Description of Artificial Sequence: Synthetic oligonucleotide
  Antisense strand to SEQ ID NO: 2424722
ucaaacuccagcauccugc

SEQ ID NO: 2424724 - RNA, 19 nt, Artificial Sequence
  Description of Artificial Sequence: Synthetic oligonucleotide
  Sense strand starting at position 1622 of SEQ ID NO: 1886755
caagauugccuguggauca

SEQ ID NO: 2424725 - RNA, 19 nt, Artificial Sequence
  Description of Artificial Sequence: Synthetic oligonucleotide
  Antisense strand to SEQ ID NO: 2424724
ugauccacaggcaaucuug

SEQ ID NO: 2424726 - RNA, 19 nt, Artificial Sequence
  Description of Artificial Sequence: Synthetic oligonucleotide
  Sense strand starting at position 1769 of SEQ ID NO: 1886755
gauugagguuuacuuaggu

SEQ ID NO: 2424727 - RNA, 19 nt, Artificial Sequence
  Description of Artificial Sequence: Synthetic oligonucleotide
  Antisense strand to SEQ ID NO: 2424726
accuaaguaaaccucaauc

SEQ ID NO: 2424728 - RNA, 19 nt, Artificial Sequence
  Description of Artificial Sequence: Synthetic oligonucleotide
  Sense strand starting at position 1817 of SEQ ID NO: 1886755
ccugaaagucagcgccaaa

SEQ ID NO: 2424729 - RNA, 19 nt, Artificial Sequence
  Description of Artificial Sequence: Synthetic oligonucleotide
  Antisense strand to SEQ ID NO: 2424728
uuuggcgcugacuuucagg

SEQ ID NO: 2424730 - RNA, 19 nt, Artificial Sequence
  Description of Artificial Sequence: Synthetic oligonucleotide
  Sense strand starting at position 1920 of SEQ ID NO: 1886755
gccucagucuugcuaaaua

SEQ ID NO: 2424731 - RNA, 19 nt, Artificial Sequence
  Description of Artificial Sequence: Synthetic oligonucleotide
  Antisense strand to SEQ ID NO: 2424730
uauuuagcaagacugaggc

SEQ ID NO: 2424732 - RNA, 19 nt, Artificial Sequence
  Description of Artificial Sequence: Synthetic oligonucleotide
  Sense strand starting at position 1931 of SEQ ID NO: 1886755
gcuaaauaaucagacugca

SEQ ID NO: 2424733 - RNA, 19 nt, Artificial Sequence
  Description of Artificial Sequence: Synthetic oligonucleotide
  Antisense strand to SEQ ID NO: 2424732
ugcagucugauuauuuagc

SEQ ID NO: 2424734 - RNA, 19 nt, Artificial Sequence
  Description of Artificial Sequence: Synthetic oligonucleotide
  Sense strand starting at position 2054 of SEQ ID NO: 1886755
gccugagauucgggaagaa

SEQ ID NO: 2424735 - RNA, 19 nt, Artificial Sequence
  Description of Artificial Sequence: Synthetic oligonucleotide
  Antisense strand to SEQ ID NO: 2424734
uucuucccgaaucucaggc

SEQ ID NO: 2424736 - RNA, 19 nt, Artificial Sequence
  Description of Artificial Sequence: Synthetic oligonucleotide
  Sense strand starting at position 2073 of SEQ ID NO: 1886755
accuuuaaacgcuaaggga

SEQ ID NO: 2424737 - RNA, 19 nt, Artificial Sequence
  Description of Artificial Sequence: Synthetic oligonucleotide
  Antisense strand to SEQ ID NO: 2424736
ucccuuagcguuuaaaggu

SEQ ID NO: 2424738 - RNA, 19 nt, Artificial Sequence
  Description of Artificial Sequence: Synthetic oligonucleotide
  Sense strand starting at position 2177 of SEQ ID NO: 1886755
cucaguucgucccaagauc

SEQ ID NO: 2424739 - RNA, 19 nt, Artificial Sequence
  Description of Artificial Sequence: Synthetic oligonucleotide
  Antisense strand to SEQ ID NO: 2424738
gaucuugggacgaacugag

SEQ ID NO: 2424740 - RNA, 19 nt, Artificial Sequence
  Description of Artificial Sequence: Synthetic oligonucleotide
  Sense strand starting at position 2199 of SEQ ID NO: 1886755
gcacauggcgaacguauua

SEQ ID NO: 2424741 - RNA, 19 nt, Artificial Sequence
  Description of Artificial Sequence: Synthetic oligonucleotide
  Antisense strand to SEQ ID NO: 2424740
uaauacguucgccaugugc

SEQ ID NO: 2424742 - RNA, 19 nt, Artificial Sequence
  Description of Artificial Sequence: Synthetic oligonucleotide
  Sense strand starting at position 2204 of SEQ ID NO: 1886755
uggcgaacguauuaacaaa

SEQ ID NO: 2424743 - RNA, 19 nt, Artificial Sequence
  Description of Artificial Sequence: Synthetic oligonucleotide
  Antisense strand to SEQ ID NO: 2424742
uuuguuaauacguucgcca

SEQ ID NO: 2424744 - RNA, 19 nt, Artificial Sequence
  Description of Artificial Sequence: Synthetic oligonucleotide
  Sense strand starting at position 2294 of SEQ ID NO: 1886755
caccucugucauugggcua

SEQ ID NO: 2424745 - RNA, 19 nt, Artificial Sequence
  Description of Artificial Sequence: Synthetic oligonucleotide
  Antisense strand to SEQ ID NO: 2424744
uagcccaaugacagaggug

SEQ ID NO: 2424746 - RNA, 19 nt, Artificial Sequence
  Description of Artificial Sequence: Synthetic oligonucleotide
  Sense strand starting at position 2307 of SEQ ID NO: 1886755
gggcuauccuggcggaagu

SEQ ID NO: 2424747 - RNA, 19 nt, Artificial Sequence
  Description of Artificial Sequence: Synthetic oligonucleotide
  Antisense strand to SEQ ID NO: 2424746
acuuccgccaggauagccc

SEQ ID NO: 2424748 - RNA, 19 nt, Artificial Sequence
  Description of Artificial Sequence: Synthetic oligonucleotide
  Sense strand starting at position 2367 of SEQ ID NO: 1886755
cguuguuuccaccaaucgu

SEQ ID NO: 2424749 - RNA, 19 nt, Artificial Sequence
  Description of Artificial Sequence: Synthetic oligonucleotide
  Antisense strand to SEQ ID NO: 2424748
acgauugguggaaacaacg

SEQ ID NO: 2424750 - RNA, 19 nt, Artificial Sequence
  Description of Artificial Sequence: Synthetic oligonucleotide
  Sense strand starting at position 2378 of SEQ ID NO: 1886755
ccaaucguaccguggcauu

SEQ ID NO: 2424751 - RNA, 19 nt, Artificial Sequence
  Description of Artificial Sequence: Synthetic oligonucleotide
  Antisense strand to SEQ ID NO: 2424750
aaugccacgguacgauugg

SEQ ID NO: 2424752 - RNA, 19 nt, Artificial Sequence
  Description of Artificial Sequence: Synthetic oligonucleotide
  Sense strand starting at position 2467 of SEQ ID NO: 1886755
gugagugacggaugaacaa

SEQ ID NO: 2424753 - RNA, 19 nt, Artificial Sequence
  Description of Artificial Sequence: Synthetic oligonucleotide
  Antisense strand to SEQ ID NO: 2424752
uuguucauccgucacucac

SEQ ID NO: 2424754 - RNA, 19 nt, Artificial Sequence
  Description of Artificial Sequence: Synthetic oligonucleotide
  Sense strand starting at position 2494 of SEQ ID NO: 1886755
agacuucgaucugcaacau

SEQ ID NO: 2424755 - RNA, 19 nt, Artificial Sequence
  Description of Artificial Sequence: Synthetic oligonucleotide
  Antisense strand to SEQ ID NO: 2424754
auguugcagaucgaagucu

SEQ ID NO: 2424756 - RNA, 19 nt, Artificial Sequence
  Description of Artificial Sequence: Synthetic oligonucleotide
  Sense strand starting at position 2512 of SEQ ID NO: 1886755
uagagugauucugaagcug

SEQ ID NO: 2424757 - RNA, 19 nt, Artificial Sequence
  Description of Artificial Sequence: Synthetic oligonucleotide
  Antisense strand to SEQ ID NO: 2424756
cagcuucagaaucacucua

SEQ ID NO: 2424758 - RNA, 19 nt, Artificial Sequence
  Description of Artificial Sequence: Synthetic oligonucleotide
  Sense strand starting at position 2979 of SEQ ID NO: 1886755
ucgcgcaguucuuuacuca

SEQ ID NO: 2424759 - RNA, 19 nt, Artificial Sequence
  Description of Artificial Sequence: Synthetic oligonucleotide
  Antisense strand to SEQ ID NO: 2424758
ugaguaaagaacugcgcga

SEQ ID NO: 2424760 - RNA, 19 nt, Artificial Sequence
  Description of Artificial Sequence: Synthetic oligonucleotide
  Sense strand starting at position 2980 of SEQ ID NO: 1886755
cgcgcaguucuuuacucau

SEQ ID NO: 2424761 - RNA, 19 nt, Artificial Sequence
  Description of Artificial Sequence: Synthetic oligonucleotide
  Antisense strand to SEQ ID NO: 2424760
augaguaaagaacugcgcg

SEQ ID NO: 2424762 - RNA, 19 nt, Artificial Sequence
  Description of Artificial Sequence: Synthetic oligonucleotide
  Sense strand starting at position 3175 of SEQ ID NO: 1886755
uacauuguaggauguggaa

SEQ ID NO: 2424763 - RNA, 19 nt, Artificial Sequence
  Description of Artificial Sequence: Synthetic oligonucleotide
  Antisense strand to SEQ ID NO: 2424762
uuccacauccuacaaugua

SEQ ID NO: 2424764 - RNA, 19 nt, Artificial Sequence
  Description of Artificial Sequence: Synthetic oligonucleotide
  Sense strand starting at position 3212 of SEQ ID NO: 1886755
gccgcuagauaccaguaaa

SEQ ID NO: 2424765 - RNA, 19 nt, Artificial Sequence
  Description of Artificial Sequence: Synthetic oligonucleotide
  Antisense strand to SEQ ID NO: 2424764
uuuacugguaucuagcggc

SEQ ID NO: 2424766 - RNA, 19 nt, Artificial Sequence
  Description of Artificial Sequence: Synthetic oligonucleotide
  Sense strand starting at position 3215 of SEQ ID NO: 1886755
gcuagauaccaguaaacac

SEQ ID NO: 2424767 - RNA, 19 nt, Artificial Sequence
  Description of Artificial Sequence: Synthetic oligonucleotide
  Antisense strand to SEQ ID NO: 2424766
guguuuacugguaucuagc

SEQ ID NO: 2424768 - RNA, 19 nt, Artificial Sequence
  Description of Artificial Sequence: Synthetic oligonucleotide
  Sense strand starting at position 3240 of SEQ ID NO: 1886755
uuccucaauugcgauaaca

SEQ ID NO: 2424769 - RNA, 19 nt, Artificial Sequence
  Description of Artificial Sequence: Synthetic oligonucleotide
  Antisense strand to SEQ ID NO: 2424768
uguuaucgcaauugaggaa

SEQ ID NO: 2424770 - RNA, 19 nt, Artificial Sequence
  Description of Artificial Sequence: Synthetic oligonucleotide
  Sense strand starting at position 3242 of SEQ ID NO: 1886755
ccucaauugcgauaacaaa

SEQ ID NO: 2424771 - RNA, 19 nt, Artificial Sequence
  Description of Artificial Sequence: Synthetic oligonucleotide
  Antisense strand to SEQ ID NO: 2424770
uuuguuaucgcaauugagg

SEQ ID NO: 2424772 - RNA, 19 nt, Artificial Sequence
  Description of Artificial Sequence: Synthetic oligonucleotide
  Sense strand starting at position 3262 of SEQ ID NO: 1886755
gucuccaugcauuggcaaa

SEQ ID NO: 2424773 - RNA, 19 nt, Artificial Sequence
  Description of Artificial Sequence: Synthetic oligonucleotide
  Antisense strand to SEQ ID NO: 2424772
uuugccaaugcauggagac

SEQ ID NO: 2424774 - RNA, 19 nt, Artificial Sequence
  Description of Artificial Sequence: Synthetic oligonucleotide
  Sense strand starting at position 3326 of SEQ ID NO: 1886755
ggguggugggauugacaau

SEQ ID NO: 2424775 - RNA, 19 nt, Artificial Sequence
  Description of Artificial Sequence: Synthetic oligonucleotide
  Antisense strand to SEQ ID NO: 2424774
auugucaaucccaccaccc

SEQ ID NO: 2424776 - RNA, 19 nt, Artificial Sequence
  Description of Artificial Sequence: Synthetic oligonucleotide
  Sense strand starting at position 3335 of SEQ ID NO: 1886755
gauugacaauagguaguua

SEQ ID NO: 2424777 - RNA, 19 nt, Artificial Sequence
  Description of Artificial Sequence: Synthetic oligonucleotide
  Antisense strand to SEQ ID NO: 2424776
uaacuaccuauugucaauc

SEQ ID NO: 2424778 - RNA, 19 nt, Artificial Sequence
  Description of Artificial Sequence: Synthetic oligonucleotide
  Sense strand starting at position 3369 of SEQ ID NO: 1886755
gcgguaugugcugugaaag

SEQ ID NO: 2424779 - RNA, 19 nt, Artificial Sequence
  Description of Artificial Sequence: Synthetic oligonucleotide
  Antisense strand to SEQ ID NO: 2424778
cuuucacagcacauaccgc

SEQ ID NO: 2424780 - RNA, 19 nt, Artificial Sequence
  Description of Artificial Sequence: Synthetic oligonucleotide
  Sense strand starting at position 3370 of SEQ ID NO: 1886755
cgguaugugcugugaaaga

SEQ ID NO: 2424781 - RNA, 19 nt, Artificial Sequence
  Description of Artificial Sequence: Synthetic oligonucleotide
  Antisense strand to SEQ ID NO: 2424780
ucuuucacagcacauaccg

SEQ ID NO: 2424782 - RNA, 19 nt, Artificial Sequence
  Description of Artificial Sequence: Synthetic oligonucleotide
  Sense strand starting at position 3639 of SEQ ID NO: 1886755
ggguuauuaugcuggcaaa

SEQ ID NO: 2424783 - RNA, 19 nt, Artificial Sequence
  Description of Artificial Sequence: Synthetic oligonucleotide
  Antisense strand to SEQ ID NO: 2424782
uuugccagcauaauaaccc

SEQ ID NO: 2424784 - RNA, 19 nt, Artificial Sequence
  Description of Artificial Sequence: Synthetic oligonucleotide
  Sense strand starting at position 3692 of SEQ ID NO: 1886755
ccgaucuagguccaguaaa

SEQ ID NO: 2424785 - RNA, 19 nt, Artificial Sequence
  Description of Artificial Sequence: Synthetic oligonucleotide
  Antisense strand to SEQ ID NO: 2424784
uuuacuggaccuagaucgg

SEQ ID NO: 2424786 - RNA, 19 nt, Artificial Sequence
  Description of Artificial Sequence: Synthetic oligonucleotide
  Sense strand starting at position 3804 of SEQ ID NO: 1886755
ggguccugcugucaagaua

SEQ ID NO: 2424787 - RNA, 19 nt, Artificial Sequence
  Description of Artificial Sequence: Synthetic oligonucleotide
  Antisense strand to SEQ ID NO: 2424786
uaucuugacagcaggaccc

SEQ ID NO: 2424788 - RNA, 19 nt, Artificial Sequence
  Description of Artificial Sequence: Synthetic oligonucleotide
  Sense strand starting at position 3815 of SEQ ID NO: 1886755
ucaagauacgguugucuug

SEQ ID NO: 2424789 - RNA, 19 nt, Artificial Sequence
  Description of Artificial Sequence: Synthetic oligonucleotide
  Antisense strand to SEQ ID NO: 2424788
caagacaaccguaucuuga

SEQ ID NO: 2424790 - RNA, 19 nt, Artificial Sequence
  Description of Artificial Sequence: Synthetic oligonucleotide
  Sense strand starting at position 3925 of SEQ ID NO: 1886755
cuggcuugcucaggaauuu

SEQ ID NO: 2424791 - RNA, 19 nt, Artificial Sequence
  Description of Artificial Sequence: Synthetic oligonucleotide
  Antisense strand to SEQ ID NO: 2424790
aaauuccugagcaagccag

SEQ ID NO: 2424792 - RNA, 19 nt, Artificial Sequence
  Description of Artificial Sequence: Synthetic oligonucleotide
  Sense strand starting at position 860 of SEQ ID NO: 1886756
uggcuucaugguugcaaga

SEQ ID NO: 2424793 - RNA, 19 nt, Artificial Sequence
  Description of Artificial Sequence: Synthetic oligonucleotide
  Antisense strand to SEQ ID NO: 2424792
ucuugcaaccaugaagcca

SEQ ID NO: 2424794 - RNA, 19 nt, Artificial Sequence
  Description of Artificial Sequence: Synthetic oligonucleotide
  Sense strand starting at position 1003 of SEQ ID NO: 1886756
ucgucugaagccuggauuu

SEQ ID NO: 2424795 - RNA, 19 nt, Artificial Sequence
  Description of Artificial Sequence: Synthetic oligonucleotide
  Antisense strand to SEQ ID NO: 2424794
aaauccaggcuucagacga

SEQ ID NO: 2424796 - RNA, 19 nt, Artificial Sequence
  Description of Artificial Sequence: Synthetic oligonucleotide
  Sense strand starting at position 1092 of SEQ ID NO: 1886756
ucagccuguuggugaauga

SEQ ID NO: 2424797 - RNA, 19 nt, Artificial Sequence
  Description of Artificial Sequence: Synthetic oligonucleotide
  Antisense strand to SEQ ID NO: 2424796
ucauucaccaacaggcuga

SEQ ID NO: 2424798 - RNA, 19 nt, Artificial Sequence
  Description of Artificial Sequence: Synthetic oligonucleotide
  Sense strand starting at position 1096 of SEQ ID NO: 1886756
ccuguuggugaaugagaag

SEQ ID NO: 2424799 - RNA, 19 nt, Artificial Sequence
  Description of Artificial Sequence: Synthetic oligonucleotide
  Antisense strand to SEQ ID NO: 2424798
cuucucauucaccaacagg

SEQ ID NO: 2424800 - RNA, 19 nt, Artificial Sequence
  Description of Artificial Sequence: Synthetic oligonucleotide
  Sense strand starting at position 1099 of SEQ ID NO: 1886756
guuggugaaugagaagagu

SEQ ID NO: 2424801 - RNA, 19 nt, Artificial Sequence
  Description of Artificial Sequence: Synthetic oligonucleotide
  Antisense strand to SEQ ID NO: 2424800
acucuucucauucaccaac

SEQ ID NO: 2424802 - RNA, 19 nt, Artificial Sequence
  Description of Artificial Sequence: Synthetic oligonucleotide
  Sense strand starting at position 1252 of SEQ ID NO: 1886756
guccuuauuaguuagguga

SEQ ID NO: 2424803 - RNA, 19 nt, Artificial Sequence
  Description of Artificial Sequence: Synthetic oligonucleotide
  Antisense strand to SEQ ID NO: 2424802
ucaccuaacuaauaaggac

SEQ ID NO: 2424804 - RNA, 19 nt, Artificial Sequence
  Description of Artificial Sequence: Synthetic oligonucleotide
  Sense strand starting at position 1254 of SEQ ID NO: 1886756
ccuuauuaguuaggugacu

SEQ ID NO: 2424805 - RNA, 19 nt, Artificial Sequence
  Description of Artificial Sequence: Synthetic oligonucleotide
  Antisense strand to SEQ ID NO: 2424804
agucaccuaacuaauaagg

SEQ ID NO: 2424806 - RNA, 19 nt, Artificial Sequence
  Description of Artificial Sequence: Synthetic oligonucleotide
  Sense strand starting at position 1255 of SEQ ID NO: 1886756
cuuauuaguuaggugacua

SEQ ID NO: 2424807 - RNA, 19 nt, Artificial Sequence
  Description of Artificial Sequence: Synthetic oligonucleotide
  Antisense strand to SEQ ID NO: 2424806
uagucaccuaacuaauaag

SEQ ID NO: 2424808 - RNA, 19 nt, Artificial Sequence
  Description of Artificial Sequence: Synthetic oligonucleotide
  Sense strand starting at position 1259 of SEQ ID NO: 1886756
uuaguuaggugacuauauc

SEQ ID NO: 2424809 - RNA, 19 nt, Artificial Sequence
  Description of Artificial Sequence: Synthetic oligonucleotide
  Antisense strand to SEQ ID NO: 2424808
gauauagucaccuaacuaa

SEQ ID NO: 2424810 - RNA, 19 nt, Artificial Sequence
  Description of Artificial Sequence: Synthetic oligonucleotide
  Sense strand starting at position 1260 of SEQ ID NO: 1886756
uaguuaggugacuauaucu

SEQ ID NO: 2424811 - RNA, 19 nt, Artificial Sequence
  Description of Artificial Sequence: Synthetic oligonucleotide
  Antisense strand to SEQ ID NO: 2424810
agauauagucaccuaacua

SEQ ID NO: 2424812 - RNA, 19 nt, Artificial Sequence
  Description of Artificial Sequence: Synthetic oligonucleotide
  Sense strand starting at position 1267 of SEQ ID NO: 1886756
gugacuauaucuuacugag

SEQ ID NO: 2424813 - RNA, 19 nt, Artificial Sequence
  Description of Artificial Sequence: Synthetic oligonucleotide
  Antisense strand to SEQ ID NO: 2424812
cucaguaagauauagucac

SEQ ID NO: 2424814 - RNA, 19 nt, Artificial Sequence
  Description of Artificial Sequence: Synthetic oligonucleotide
  Sense strand starting at position 1270 of SEQ ID NO: 1886756
acuauaucuuacugaguug

SEQ ID NO: 2424815 - RNA, 19 nt, Artificial Sequence
  Description of Artificial Sequence: Synthetic oligonucleotide
  Antisense strand to SEQ ID NO: 2424814
caacucaguaagauauagu

SEQ ID NO: 2424816 - RNA, 19 nt, Artificial Sequence
  Description of Artificial Sequence: Synthetic oligonucleotide
  Sense strand starting at position 1298 of SEQ ID NO: 1886756
gcacgagacaguuaucuac

SEQ ID NO: 2424817 - RNA, 19 nt, Artificial Sequence
  Description of Artificial Sequence: Synthetic oligonucleotide
  Antisense strand to SEQ ID NO: 2424816
guagauaacugucucgugc

SEQ ID NO: 2424818 - RNA, 19 nt, Artificial Sequence
  Description of Artificial Sequence: Synthetic oligonucleotide
  Sense strand starting at position 1300 of SEQ ID NO: 1886756
acgagacaguuaucuaccu

SEQ ID NO: 2424819 - RNA, 19 nt, Artificial Sequence
  Description of Artificial Sequence: Synthetic oligonucleotide
  Antisense strand to SEQ ID NO: 2424818
agguagauaacugucucgu

SEQ ID NO: 2424820 - RNA, 19 nt, Artificial Sequence
  Description of Artificial Sequence: Synthetic oligonucleotide
  Sense strand starting at position 1305 of SEQ ID NO: 1886756
acaguuaucuaccugugaa

SEQ ID NO: 2424821 - RNA, 19 nt, Artificial Sequence
  Description of Artificial Sequence: Synthetic oligonucleotide
  Antisense strand to SEQ ID NO: 2424820
uucacagguagauaacugu

SEQ ID NO: 2424822 - RNA, 19 nt, Artificial Sequence
  Description of Artificial Sequence: Synthetic oligonucleotide
  Sense strand starting at position 1308 of SEQ ID NO: 1886756
guuaucuaccugugaacca

SEQ ID NO: 2424823 - RNA, 19 nt, Artificial Sequence
  Description of Artificial Sequence: Synthetic oligonucleotide
  Antisense strand to SEQ ID NO: 2424822
ugguucacagguagauaac

SEQ ID NO: 2424824 - RNA, 19 nt, Artificial Sequence
  Description of Artificial Sequence: Synthetic oligonucleotide
  Sense strand starting at position 1402 of SEQ ID NO: 1886756
ccuacaaggucuuucuaga

SEQ ID NO: 2424825 - RNA, 19 nt, Artificial Sequence
  Description of Artificial Sequence: Synthetic oligonucleotide
  Antisense strand to SEQ ID NO: 2424824
ucuagaaagaccuuguagg

SEQ ID NO: 2424826 - RNA, 19 nt, Artificial Sequence
  Description of Artificial Sequence: Synthetic oligonucleotide
  Sense strand starting at position 1494 of SEQ ID NO: 1886756
ugccauguccauuaagguu

SEQ ID NO: 2424827 - RNA, 19 nt, Artificial Sequence
  Description of Artificial Sequence: Synthetic oligonucleotide
  Antisense strand to SEQ ID NO: 2424826
aaccuuaauggacauggca

SEQ ID NO: 2424828 - RNA, 19 nt, Artificial Sequence
  Description of Artificial Sequence: Synthetic oligonucleotide
  Sense strand starting at position 1506 of SEQ ID NO: 1886756
uaagguuaucucugcggaa

SEQ ID NO: 2424829 - RNA, 19 nt, Artificial Sequence
  Description of Artificial Sequence: Synthetic oligonucleotide
  Antisense strand to SEQ ID NO: 2424828
uuccgcagagauaaccuua

SEQ ID NO: 2424830 - RNA, 19 nt, Artificial Sequence
  Description of Artificial Sequence: Synthetic oligonucleotide
  Sense strand starting at position 1507 of SEQ ID NO: 1886756
aagguuaucucugcggaaa

SEQ ID NO: 2424831 - RNA, 19 nt, Artificial Sequence
  Description of Artificial Sequence: Synthetic oligonucleotide
  Antisense strand to SEQ ID NO: 2424830
uuuccgcagagauaaccuu

SEQ ID NO: 2424832 - RNA, 19 nt, Artificial Sequence
  Description of Artificial Sequence: Synthetic oligonucleotide
  Sense strand starting at position 1508 of SEQ ID NO: 1886756
agguuaucucugcggaaac

SEQ ID NO: 2424833 - RNA, 19 nt, Artificial Sequence
  Description of Artificial Sequence: Synthetic oligonucleotide
  Antisense strand to SEQ ID NO: 2424832
guuuccgcagagauaaccu

SEQ ID NO: 2424834 - RNA, 19 nt, Artificial Sequence
  Description of Artificial Sequence: Synthetic oligonucleotide
  Sense strand starting at position 1606 of SEQ ID NO: 1886756
accggugucacugauaaag

SEQ ID NO: 2424835 - RNA, 19 nt, Artificial Sequence
  Description of Artificial Sequence: Synthetic oligonucleotide
  Antisense strand to SEQ ID NO: 2424834
cuuuaucagugacaccggu

SEQ ID NO: 2424836 - RNA, 19 nt, Artificial Sequence
  Description of Artificial Sequence: Synthetic oligonucleotide
  Sense strand starting at position 1608 of SEQ ID NO: 1886756
cggugucacugauaaagga

SEQ ID NO: 2424837 - RNA, 19 nt, Artificial Sequence
  Description of Artificial Sequence: Synthetic oligonucleotide
  Antisense strand to SEQ ID NO: 2424836
uccuuuaucagugacaccg

SEQ ID NO: 2424838 - RNA, 19 nt, Artificial Sequence
  Description of Artificial Sequence: Synthetic oligonucleotide
  Sense strand starting at position 1669 of SEQ ID NO: 1886756
cguguacucacagaacugu

SEQ ID NO: 2424839 - RNA, 19 nt, Artificial Sequence
  Description of Artificial Sequence: Synthetic oligonucleotide
  Antisense strand to SEQ ID NO: 2424838
acaguucugugaguacacg

SEQ ID NO: 2424840 - RNA, 19 nt, Artificial Sequence
  Description of Artificial Sequence: Synthetic oligonucleotide
  Sense strand starting at position 1984 of SEQ ID NO: 1886756
ggagaaugucaucacgcga

SEQ ID NO: 2424841 - RNA, 19 nt, Artificial Sequence
  Description of Artificial Sequence: Synthetic oligonucleotide
  Antisense strand to SEQ ID NO: 2424840
ucgcgugaugacauucucc

SEQ ID NO: 2424842 - RNA, 19 nt, Artificial Sequence
  Description of Artificial Sequence: Synthetic oligonucleotide
  Sense strand starting at position 2199 of SEQ ID NO: 1886756
uuacgucugguggagagaa

SEQ ID NO: 2424843 - RNA, 19 nt, Artificial Sequence
  Description of Artificial Sequence: Synthetic oligonucleotide
  Antisense strand to SEQ ID NO: 2424842
uucucuccaccagacguaa

SEQ ID NO: 2424844 - RNA, 19 nt, Artificial Sequence
  Description of Artificial Sequence: Synthetic oligonucleotide
  Sense strand starting at position 2762 of SEQ ID NO: 1886756
caaugcacucugggaugau

SEQ ID NO: 2424845 - RNA, 19 nt, Artificial Sequence
  Description of Artificial Sequence: Synthetic oligonucleotide
  Antisense strand to SEQ ID NO: 2424844
aucaucccagagugcauug

SEQ ID NO: 2424846 - RNA, 19 nt, Artificial Sequence
  Description of Artificial Sequence: Synthetic oligonucleotide
  Sense strand starting at position 2763 of SEQ ID NO: 1886756
aaugcacucugggaugaua

SEQ ID NO: 2424847 - RNA, 19 nt, Artificial Sequence
  Description of Artificial Sequence: Synthetic oligonucleotide
  Antisense strand to SEQ ID NO: 2424846
uaucaucccagagugcauu

SEQ ID NO: 2424848 - RNA, 19 nt, Artificial Sequence
  Description of Artificial Sequence: Synthetic oligonucleotide
  Sense strand starting at position 2890 of SEQ ID NO: 1886756
acauguugccgcugagaau

SEQ ID NO: 2424849 - RNA, 19 nt, Artificial Sequence
  Description of Artificial Sequence: Synthetic oligonucleotide
  Antisense strand to SEQ ID NO: 2424848
auucucagcggcaacaugu

SEQ ID NO: 2424850 - RNA, 19 nt, Artificial Sequence
  Description of Artificial Sequence: Synthetic oligonucleotide
  Sense strand starting at position 2926 of SEQ ID NO: 1886756
auuccugggcccugaguaa

SEQ ID NO: 2424851 - RNA, 19 nt, Artificial Sequence
  Description of Artificial Sequence: Synthetic oligonucleotide
  Antisense strand to SEQ ID NO: 2424850
uuacucagggcccaggaau

SEQ ID NO: 2424852 - RNA, 19 nt, Artificial Sequence
  Description of Artificial Sequence: Synthetic oligonucleotide
  Sense strand starting at position 3071 of SEQ ID NO: 1886756
gggcgacgcccgaggaauu

SEQ ID NO: 2424853 - RNA, 19 nt, Artificial Sequence
  Description of Artificial Sequence: Synthetic oligonucleotide
  Antisense strand to SEQ ID NO: 2424852
aauuccucgggcgucgccc

SEQ ID NO: 2424854 - RNA, 19 nt, Artificial Sequence
  Description of Artificial Sequence: Synthetic oligonucleotide
  Sense strand starting at position 3182 of SEQ ID NO: 1886756
ugucguuccagcguuuauu

SEQ ID NO: 2424855 - RNA, 19 nt, Artificial Sequence
  Description of Artificial Sequence: Synthetic oligonucleotide
  Antisense strand to SEQ ID NO: 2424854
aauaaacgcuggaacgaca

SEQ ID NO: 2424856 - RNA, 19 nt, Artificial Sequence
  Description of Artificial Sequence: Synthetic oligonucleotide
  Sense strand starting at position 3193 of SEQ ID NO: 1886756
cguuuauucuccucccauc

SEQ ID NO: 2424857 - RNA, 19 nt, Artificial Sequence
  Description of Artificial Sequence: Synthetic oligonucleotide
  Antisense strand to SEQ ID NO: 2424856
gaugggaggagaauaaacg

SEQ ID NO: 2424858 - RNA, 19 nt, Artificial Sequence
  Description of Artificial Sequence: Synthetic oligonucleotide
  Sense strand starting at position 3464 of SEQ ID NO: 1886756
aggugacuucucuaagguc

SEQ ID NO: 2424859 - RNA, 19 nt, Artificial Sequence
  Description of Artificial Sequence: Synthetic oligonucleotide
  Antisense strand to SEQ ID NO: 2424858
gaccuuagagaagucaccu

SEQ ID NO: 2424860 - RNA, 19 nt, Artificial Sequence
  Description of Artificial Sequence: Synthetic oligonucleotide
  Sense strand starting at position 3562 of SEQ ID NO: 1886756
agccaucucuucucuagua

SEQ ID NO: 2424861 - RNA, 19 nt, Artificial Sequence
  Description of Artificial Sequence: Synthetic oligonucleotide
  Antisense strand to SEQ ID NO: 2424860
uacuagagaagagauggcu

SEQ ID NO: 2424862 - RNA, 19 nt, Artificial Sequence
  Description of Artificial Sequence: Synthetic oligonucleotide
  Sense strand starting at position 3563 of SEQ ID NO: 1886756
gccaucucuucucuaguau

SEQ ID NO: 2424863 - RNA, 19 nt, Artificial Sequence
  Description of Artificial Sequence: Synthetic oligonucleotide
  Antisense strand to SEQ ID NO: 2424862
auacuagagaagagauggc

SEQ ID NO: 2424864 - RNA, 19 nt, Artificial Sequence
  Description of Artificial Sequence: Synthetic oligonucleotide
  Sense strand starting at position 3567 of SEQ ID NO: 1886756
ucucuucucuaguauaagu

SEQ ID NO: 2424865 - RNA, 19 nt, Artificial Sequence
  Description of Artificial Sequence: Synthetic oligonucleotide
  Antisense strand to SEQ ID NO: 2424864
acuuauacuagagaagaga

SEQ ID NO: 2424866 - RNA, 19 nt, Artificial Sequence
  Description of Artificial Sequence: Synthetic oligonucleotide
  Sense strand starting at position 3575 of SEQ ID NO: 1886756
cuaguauaagucugugaag

SEQ ID NO: 2424867 - RNA, 19 nt, Artificial Sequence
  Description of Artificial Sequence: Synthetic oligonucleotide
  Antisense strand to SEQ ID NO: 2424866
cuucacagacuuauacuag

SEQ ID NO: 2424868 - RNA, 19 nt, Artificial Sequence
  Description of Artificial Sequence: Synthetic oligonucleotide
  Sense strand starting at position 3578 of SEQ ID NO: 1886756
guauaagucugugaaggca

SEQ ID NO: 2424869 - RNA, 19 nt, Artificial Sequence
  Description of Artificial Sequence: Synthetic oligonucleotide
  Antisense strand to SEQ ID NO: 2424868
ugccuucacagacuuauac

SEQ ID NO: 2424870 - RNA, 19 nt, Artificial Sequence
  Description of Artificial Sequence: Synthetic oligonucleotide
  Sense strand starting at position 3604 of SEQ ID NO: 1886756
ucuuacugcuaccuggaaa

SEQ ID NO: 2424871 - RNA, 19 nt, Artificial Sequence
  Description of Artificial Sequence: Synthetic oligonucleotide
  Antisense strand to SEQ ID NO: 2424870
uuuccagguagcaguaaga

SEQ ID NO: 2424872 - RNA, 19 nt, Artificial Sequence
  Description of Artificial Sequence: Synthetic oligonucleotide
  Sense strand starting at position 58 of SEQ ID NO: 1886757
gugacauguuaagucacca

SEQ ID NO: 2424873 - RNA, 19 nt, Artificial Sequence
  Description of Artificial Sequence: Synthetic oligonucleotide
  Antisense strand to SEQ ID NO: 2424872
uggugacuuaacaugucac

SEQ ID NO: 2424874 - RNA, 19 nt, Artificial Sequence
  Description of Artificial Sequence: Synthetic oligonucleotide
  Sense strand starting at position 63 of SEQ ID NO: 1886757
auguuaagucaccauauuc

SEQ ID NO: 2424875 - RNA, 19 nt, Artificial Sequence
  Description of Artificial Sequence: Synthetic oligonucleotide
  Antisense strand to SEQ ID NO: 2424874
gaauauggugacuuaacau

SEQ ID NO: 2424876 - RNA, 19 nt, Artificial Sequence
  Description of Artificial Sequence: Synthetic oligonucleotide
  Sense strand starting at position 102 of SEQ ID NO: 1886757
cuguccaaacaugauguaa

SEQ ID NO: 2424877 - RNA, 19 nt, Artificial Sequence
  Description of Artificial Sequence: Synthetic oligonucleotide
  Antisense strand to SEQ ID NO: 2424876
uuacaucauguuuggacag

SEQ ID NO: 2424878 - RNA, 19 nt, Artificial Sequence
  Description of Artificial Sequence: Synthetic oligonucleotide
  Sense strand starting at position 594 of SEQ ID NO: 1886757
gcuguaagguugcuauaug

SEQ ID NO: 2424879 - RNA, 19 nt, Artificial Sequence
  Description of Artificial Sequence: Synthetic oligonucleotide
  Antisense strand to SEQ ID NO: 2424878
cauauagcaaccuuacagc

SEQ ID NO: 2424880 - RNA, 19 nt, Artificial Sequence
  Description of Artificial Sequence: Synthetic oligonucleotide
  Sense strand starting at position 646 of SEQ ID NO: 1886757
cuauauguacacugacuuu

SEQ ID NO: 2424881 - RNA, 19 nt, Artificial Sequence
  Description of Artificial Sequence: Synthetic oligonucleotide
  Antisense strand to SEQ ID NO: 2424880
aaagucaguguacauauag

SEQ ID NO: 2424882 - RNA, 19 nt, Artificial Sequence
  Description of Artificial Sequence: Synthetic oligonucleotide
  Sense strand starting at position 1050 of SEQ ID NO: 1886757
uuuauagggugcuuaugua

SEQ ID NO: 2424883 - RNA, 19 nt, Artificial Sequence
  Description of Artificial Sequence: Synthetic oligonucleotide
  Antisense strand to SEQ ID NO: 2424882
uacauaagcacccuauaaa

SEQ ID NO: 2424884 - RNA, 19 nt, Artificial Sequence
  Description of Artificial Sequence: Synthetic oligonucleotide
  Sense strand starting at position 1054 of SEQ ID NO: 1886757
uagggugcuuauguaauuu

SEQ ID NO: 2424885 - RNA, 19 nt, Artificial Sequence
  Description of Artificial Sequence: Synthetic oligonucleotide
  Antisense strand to SEQ ID NO: 2424884
aaauuacauaagcacccua

SEQ ID NO: 2424886 - RNA, 19 nt, Artificial Sequence
  Description of Artificial Sequence: Synthetic oligonucleotide
  Sense strand starting at position 1058 of SEQ ID NO: 1886757
gugcuuauguaauuuacau

SEQ ID NO: 2424887 - RNA, 19 nt, Artificial Sequence
  Description of Artificial Sequence: Synthetic oligonucleotide
  Antisense strand to SEQ ID NO: 2424886
auguaaauuacauaagcac

SEQ ID NO: 2424888 - RNA, 19 nt, Artificial Sequence
  Description of Artificial Sequence: Synthetic oligonucleotide
  Sense strand starting at position 1094 of SEQ ID NO: 1886757
ccugcauaacccuaugaag

SEQ ID NO: 2424889 - RNA, 19 nt, Artificial Sequence
  Description of Artificial Sequence: Synthetic oligonucleotide
  Antisense strand to SEQ ID NO: 2424888
cuucauaggguuaugcagg

SEQ ID NO: 2424890 - RNA, 19 nt, Artificial Sequence
  Description of Artificial Sequence: Synthetic oligonucleotide
  Sense strand starting at position 1096 of SEQ ID NO: 1886757
ugcauaacccuaugaagug

SEQ ID NO: 2424891 - RNA, 19 nt, Artificial Sequence
  Description of Artificial Sequence: Synthetic oligonucleotide
  Antisense strand to SEQ ID NO: 2424890
cacuucauaggguuaugca

SEQ ID NO: 2424892 - RNA, 19 nt, Artificial Sequence
  Description of Artificial Sequence: Synthetic oligonucleotide
  Sense strand starting at position 1108 of SEQ ID NO: 1886757
ugaagugguugcccuucua

SEQ ID NO: 2424893 - RNA, 19 nt, Artificial Sequence
  Description of Artificial Sequence: Synthetic oligonucleotide
  Antisense strand to SEQ ID NO: 2424892
uagaagggcaaccacuuca

SEQ ID NO: 2424894 - RNA, 19 nt, Artificial Sequence
  Description of Artificial Sequence: Synthetic oligonucleotide
  Sense strand starting at position 1381 of SEQ ID NO: 1886757
uaagguuuagguuaaguca

SEQ ID NO: 2424895 - RNA, 19 nt, Artificial Sequence
  Description of Artificial Sequence: Synthetic oligonucleotide
  Antisense strand to SEQ ID NO: 2424894
ugacuuaaccuaaaccuua

SEQ ID NO: 2424896 - RNA, 19 nt, Artificial Sequence
  Description of Artificial Sequence: Synthetic oligonucleotide
  Sense strand starting at position 1412 of SEQ ID NO: 1886757
gggacugaauuguaacuaa

SEQ ID NO: 2424897 - RNA, 19 nt, Artificial Sequence
  Description of Artificial Sequence: Synthetic oligonucleotide
  Antisense strand to SEQ ID NO: 2424896
uuaguuacaauucaguccc

SEQ ID NO: 2424898 - RNA, 19 nt, Artificial Sequence
  Description of Artificial Sequence: Synthetic oligonucleotide
  Sense strand starting at position 1427 of SEQ ID NO: 1886757
cuaaucuguuaauuaggga

SEQ ID NO: 2424899 - RNA, 19 nt, Artificial Sequence
  Description of Artificial Sequence: Synthetic oligonucleotide
  Antisense strand to SEQ ID NO: 2424898
ucccuaauuaacagauuag

SEQ ID NO: 2424900 - RNA, 19 nt, Artificial Sequence
  Description of Artificial Sequence: Synthetic oligonucleotide
  Sense strand starting at position 1555 of SEQ ID NO: 1886757
aggucuuaucuuuagauug

SEQ ID NO: 2424901 - RNA, 19 nt, Artificial Sequence
  Description of Artificial Sequence: Synthetic oligonucleotide
  Antisense strand to SEQ ID NO: 2424900
caaucuaaagauaagaccu

SEQ ID NO: 2424902 - RNA, 19 nt, Artificial Sequence
  Description of Artificial Sequence: Synthetic oligonucleotide
  Sense strand starting at position 1563 of SEQ ID NO: 1886757
ucuuuagauugcucaagca

SEQ ID NO: 2424903 - RNA, 19 nt, Artificial Sequence
  Description of Artificial Sequence: Synthetic oligonucleotide
  Antisense strand to SEQ ID NO: 2424902
ugcuugagcaaucuaaaga

SEQ ID NO: 2424904 - RNA, 19 nt, Artificial Sequence
  Description of Artificial Sequence: Synthetic oligonucleotide
  Sense strand starting at position 1598 of SEQ ID NO: 1886757
uguaccuguucugugcaaa

SEQ ID NO: 2424905 - RNA, 19 nt, Artificial Sequence
  Description of Artificial Sequence: Synthetic oligonucleotide
  Antisense strand to SEQ ID NO: 2424904
uuugcacagaacagguaca

SEQ ID NO: 2424906 - RNA, 19 nt, Artificial Sequence
  Description of Artificial Sequence: Synthetic oligonucleotide
  Sense strand starting at position 1601 of SEQ ID NO: 1886757
accuguucugugcaaauca

SEQ ID NO: 2424907 - RNA, 19 nt, Artificial Sequence
  Description of Artificial Sequence: Synthetic oligonucleotide
  Antisense strand to SEQ ID NO: 2424906
ugauuugcacagaacaggu

SEQ ID NO: 2424908 - RNA, 19 nt, Artificial Sequence
  Description of Artificial Sequence: Synthetic oligonucleotide
  Sense strand starting at position 1685 of SEQ ID NO: 1886757
uguucuagauuugaacaua

SEQ ID NO: 2424909 - RNA, 19 nt, Artificial Sequence
  Description of Artificial Sequence: Synthetic oligonucleotide
  Antisense strand to SEQ ID NO: 2424908
uauguucaaaucuagaaca

SEQ ID NO: 2424910 - RNA, 19 nt, Artificial Sequence
  Description of Artificial Sequence: Synthetic oligonucleotide
  Sense strand starting at position 1720 of SEQ ID NO: 1886757
ggccaacuuuagcuaaguu

SEQ ID NO: 2424911 - RNA, 19 nt, Artificial Sequence
  Description of Artificial Sequence: Synthetic oligonucleotide
  Antisense strand to SEQ ID NO: 2424910
aacuuagcuaaaguuggcc

SEQ ID NO: 2424912 - RNA, 19 nt, Artificial Sequence
  Description of Artificial Sequence: Synthetic oligonucleotide
  Sense strand starting at position 1755 of SEQ ID NO: 1886757
caucuagaguucuaagaag

SEQ ID NO: 2424913 - RNA, 19 nt, Artificial Sequence
  Description of Artificial Sequence: Synthetic oligonucleotide
  Antisense strand to SEQ ID NO: 2424912
cuucuuagaacucuagaug

SEQ ID NO: 2424914 - RNA, 19 nt, Artificial Sequence
  Description of Artificial Sequence: Synthetic oligonucleotide
  Sense strand starting at position 1914 of SEQ ID NO: 1886757
acgugugcugucagcaguu

SEQ ID NO: 2424915 - RNA, 19 nt, Artificial Sequence
  Description of Artificial Sequence: Synthetic oligonucleotide
  Antisense strand to SEQ ID NO: 2424914
aacugcugacagcacacgu

SEQ ID NO: 2424916 - RNA, 19 nt, Artificial Sequence
  Description of Artificial Sequence: Synthetic oligonucleotide
  Sense strand starting at position 1919 of SEQ ID NO: 1886757
ugcugucagcaguuugagu

SEQ ID NO: 2424917 - RNA, 19 nt, Artificial Sequence
  Description of Artificial Sequence: Synthetic oligonucleotide
  Antisense strand to SEQ ID NO: 2424916
acucaaacugcugacagca

SEQ ID NO: 2424918 - RNA, 19 nt, Artificial Sequence
  Description of Artificial Sequence: Synthetic oligonucleotide
  Sense strand starting at position 1934 of SEQ ID NO: 1886757
gagugucagcauugugaca

SEQ ID NO: 2424919 - RNA, 19 nt, Artificial Sequence
  Description of Artificial Sequence: Synthetic oligonucleotide
  Antisense strand to SEQ ID NO: 2424918
ugucacaaugcugacacuc

SEQ ID NO: 2424920 - RNA, 19 nt, Artificial Sequence
  Description of Artificial Sequence: Synthetic oligonucleotide
  Sense strand starting at position 1953 of SEQ ID NO: 1886757
agacacuuagccgauggau

SEQ ID NO: 2424921 - RNA, 19 nt, Artificial Sequence
  Description of Artificial Sequence: Synthetic oligonucleotide
  Antisense strand to SEQ ID NO: 2424920
auccaucggcuaagugucu

SEQ ID NO: 2424922 - RNA, 19 nt, Artificial Sequence
  Description of Artificial Sequence: Synthetic oligonucleotide
  Sense strand starting at position 1955 of SEQ ID NO: 1886757
acacuuagccgauggauca

SEQ ID NO: 2424923 - RNA, 19 nt, Artificial Sequence
  Description of Artificial Sequence: Synthetic oligonucleotide
  Antisense strand to SEQ ID NO: 2424922
ugauccaucggcuaagugu

SEQ ID NO: 2424924 - RNA, 19 nt, Artificial Sequence
  Description of Artificial Sequence: Synthetic oligonucleotide
  Sense strand starting at position 1965 of SEQ ID NO: 1886757
gauggaucacuccguacuu

SEQ ID NO: 2424925 - RNA, 19 nt, Artificial Sequence
  Description of Artificial Sequence: Synthetic oligonucleotide
  Antisense strand to SEQ ID NO: 2424924
aaguacggagugauccauc

SEQ ID NO: 2424926 - RNA, 19 nt, Artificial Sequence
  Description of Artificial Sequence: Synthetic oligonucleotide
  Sense strand starting at position 2038 of SEQ ID NO: 1886757
uuaucugugccuguuguau

SEQ ID NO: 2424927 - RNA, 19 nt, Artificial Sequence
  Description of Artificial Sequence: Synthetic oligonucleotide
  Antisense strand to SEQ ID NO: 2424926
auacaacaggcacagauaa

SEQ ID NO: 2424928 - RNA, 19 nt, Artificial Sequence
  Description of Artificial Sequence: Synthetic oligonucleotide
  Sense strand starting at position 2049 of SEQ ID NO: 1886757
uguuguauuuaucaaagag

SEQ ID NO: 2424929 - RNA, 19 nt, Artificial Sequence
  Description of Artificial Sequence: Synthetic oligonucleotide
  Antisense strand to SEQ ID NO: 2424928
cucuuugauaaauacaaca

SEQ ID NO: 2424930 - RNA, 19 nt, Artificial Sequence
  Description of Artificial Sequence: Synthetic oligonucleotide
  Sense strand starting at position 2154 of SEQ ID NO: 1886757
aggauucacugagcagagu

SEQ ID NO: 2424931 - RNA, 19 nt, Artificial Sequence
  Description of Artificial Sequence: Synthetic oligonucleotide
  Antisense strand to SEQ ID NO: 2424930
acucugcucagugaauccu

SEQ ID NO: 2424932 - RNA, 19 nt, Artificial Sequence
  Description of Artificial Sequence: Synthetic oligonucleotide
  Sense strand starting at position 2167 of SEQ ID NO: 1886757
cagaguccaucugugaaca

SEQ ID NO: 2424933 - RNA, 19 nt, Artificial Sequence
  Description of Artificial Sequence: Synthetic oligonucleotide
  Antisense strand to SEQ ID NO: 2424932
uguucacagauggacucug

SEQ ID NO: 2424934 - RNA, 19 nt, Artificial Sequence
  Description of Artificial Sequence: Synthetic oligonucleotide
  Sense strand starting at position 2245 of SEQ ID NO: 1886757
gcggcauagagcuaucaau

SEQ ID NO: 2424935 - RNA, 19 nt, Artificial Sequence
  Description of Artificial Sequence: Synthetic oligonucleotide
  Antisense strand to SEQ ID NO: 2424934
auugauagcucuaugccgc

SEQ ID NO: 2424936 - RNA, 19 nt, Artificial Sequence
  Description of Artificial Sequence: Synthetic oligonucleotide
  Sense strand starting at position 2384 of SEQ ID NO: 1886757
gcauuaugaucugucugua

SEQ ID NO: 2424937 - RNA, 19 nt, Artificial Sequence
  Description of Artificial Sequence: Synthetic oligonucleotide
  Antisense strand to SEQ ID NO: 2424936
uacagacagaucauaaugc

SEQ ID NO: 2424938 - RNA, 19 nt, Artificial Sequence
  Description of Artificial Sequence: Synthetic oligonucleotide
  Sense strand starting at position 2387 of SEQ ID NO: 1886757
uuaugaucugucuguacag

SEQ ID NO: 2424939 - RNA, 19 nt, Artificial Sequence
  Description of Artificial Sequence: Synthetic oligonucleotide
  Antisense strand to SEQ ID NO: 2424938
cuguacagacagaucauaa

SEQ ID NO: 2424940 - RNA, 19 nt, Artificial Sequence
  Description of Artificial Sequence: Synthetic oligonucleotide
  Sense strand starting at position 2388 of SEQ ID NO: 1886757
uaugaucugucuguacagu

SEQ ID NO: 2424941 - RNA, 19 nt, Artificial Sequence
  Description of Artificial Sequence: Synthetic oligonucleotide
  Antisense strand to SEQ ID NO: 2424940
acuguacagacagaucaua

SEQ ID NO: 2424942 - RNA, 19 nt, Artificial Sequence
  Description of Artificial Sequence: Synthetic oligonucleotide
  Sense strand starting at position 2590 of SEQ ID NO: 1886757
agguauaagcgauaccaua

SEQ ID NO: 2424943 - RNA, 19 nt, Artificial Sequence
  Description of Artificial Sequence: Synthetic oligonucleotide
  Antisense strand to SEQ ID NO: 2424942
uaugguaucgcuuauaccu

SEQ ID NO: 2424944 - RNA, 19 nt, Artificial Sequence
  Description of Artificial Sequence: Synthetic oligonucleotide
  Sense strand starting at position 3325 of SEQ ID NO: 1886757
agaagugacugacucaauu

SEQ ID NO: 2424945 - RNA, 19 nt, Artificial Sequence
  Description of Artificial Sequence: Synthetic oligonucleotide
  Antisense strand to SEQ ID NO: 2424944
aauugagucagucacuucu

SEQ ID NO: 2424946 - RNA, 19 nt, Artificial Sequence
  Description of Artificial Sequence: Synthetic oligonucleotide
  Sense strand starting at position 3683 of SEQ ID NO: 1886757
auccaaguguucuuuagaa

SEQ ID NO: 2424947 - RNA, 19 nt, Artificial Sequence
  Description of Artificial Sequence: Synthetic oligonucleotide
  Antisense strand to SEQ ID NO: 2424946
uucuaaagaacacuuggau

SEQ ID NO: 2424948 - RNA, 19 nt, Artificial Sequence
  Description of Artificial Sequence: Synthetic oligonucleotide
  Sense strand starting at position 3685 of SEQ ID NO: 1886757
ccaaguguucuuuagaagg

SEQ ID NO: 2424949 - RNA, 19 nt, Artificial Sequence
  Description of Artificial Sequence: Synthetic oligonucleotide
  Antisense strand to SEQ ID NO: 2424948
ccuucuaaagaacacuugg

SEQ ID NO: 2424950 - RNA, 19 nt, Artificial Sequence
  Description of Artificial Sequence: Synthetic oligonucleotide
  Sense strand starting at position 3921 of SEQ ID NO: 1886757
gguggcguucgccuguaaa

SEQ ID NO: 2424951 - RNA, 19 nt, Artificial Sequence
  Description of Artificial Sequence: Synthetic oligonucleotide
  Antisense strand to SEQ ID NO: 2424950
uuuacaggcgaacgccacc

SEQ ID NO: 2424952 - RNA, 19 nt, Artificial Sequence
  Description of Artificial Sequence: Synthetic oligonucleotide
  Sense strand starting at position 580 of SEQ ID NO: 1886758
uccaucugaccauauguuu

SEQ ID NO: 2424953 - RNA, 19 nt, Artificial Sequence
  Description of Artificial Sequence: Synthetic oligonucleotide
  Antisense strand to SEQ ID NO: 2424952
aaacauauggucagaugga

SEQ ID NO: 2424954 - RNA, 19 nt, Artificial Sequence
  Description of Artificial Sequence: Synthetic oligonucleotide
  Sense strand starting at position 588 of SEQ ID NO: 1886758
accauauguuucuuaguga

SEQ ID NO: 2424955 - RNA, 19 nt, Artificial Sequence
  Description of Artificial Sequence: Synthetic oligonucleotide
  Antisense strand to SEQ ID NO: 2424954
ucacuaagaaacauauggu

SEQ ID NO: 2424956 - RNA, 19 nt, Artificial Sequence
  Description of Artificial Sequence: Synthetic oligonucleotide
  Sense strand starting at position 589 of SEQ ID NO: 1886758
ccauauguuucuuagugac

SEQ ID NO: 2424957 - RNA, 19 nt, Artificial Sequence
  Description of Artificial Sequence: Synthetic oligonucleotide
  Antisense strand to SEQ ID NO: 2424956
gucacuaagaaacauaugg

SEQ ID NO: 2424958 - RNA, 19 nt, Artificial Sequence
  Description of Artificial Sequence: Synthetic oligonucleotide
  Sense strand starting at position 591 of SEQ ID NO: 1886758
auauguuucuuagugaccu

SEQ ID NO: 2424959 - RNA, 19 nt, Artificial Sequence
  Description of Artificial Sequence: Synthetic oligonucleotide
  Antisense strand to SEQ ID NO: 2424958
aggucacuaagaaacauau

SEQ ID NO: 2424960 - RNA, 19 nt, Artificial Sequence
  Description of Artificial Sequence: Synthetic oligonucleotide
  Sense strand starting at position 822 of SEQ ID NO: 1886758
gcaugcauguguccacagu

SEQ ID NO: 2424961 - RNA, 19 nt, Artificial Sequence
  Description of Artificial Sequence: Synthetic oligonucleotide
  Antisense strand to SEQ ID NO: 2424960
acuguggacacaugcaugc

SEQ ID NO: 2424962 - RNA, 19 nt, Artificial Sequence
  Description of Artificial Sequence: Synthetic oligonucleotide
  Sense strand starting at position 1041 of SEQ ID NO: 1886758
cugagaucuucguagcgau

SEQ ID NO: 2424963 - RNA, 19 nt, Artificial Sequence
  Description of Artificial Sequence: Synthetic oligonucleotide
  Antisense strand to SEQ ID NO: 2424962
aucgcuacgaagaucucag

SEQ ID NO: 2424964 - RNA, 19 nt, Artificial Sequence
  Description of Artificial Sequence: Synthetic oligonucleotide
  Sense strand starting at position 1044 of SEQ ID NO: 1886758
agaucuucguagcgauaca

SEQ ID NO: 2424965 - RNA, 19 nt, Artificial Sequence
  Description of Artificial Sequence: Synthetic oligonucleotide
  Antisense strand to SEQ ID NO: 2424964
uguaucgcuacgaagaucu

SEQ ID NO: 2424966 - RNA, 19 nt, Artificial Sequence
  Description of Artificial Sequence: Synthetic oligonucleotide
  Sense strand starting at position 1404 of SEQ ID NO: 1886758
cugagacaaucacagacau

SEQ ID NO: 2424967 - RNA, 19 nt, Artificial Sequence
  Description of Artificial Sequence: Synthetic oligonucleotide
  Antisense strand to SEQ ID NO: 2424966
augucugugauugucucag

SEQ ID NO: 2424968 - RNA, 19 nt, Artificial Sequence
  Description of Artificial Sequence: Synthetic oligonucleotide
  Sense strand starting at position 2380 of SEQ ID NO: 1886758
ugcuacuacccagaagagu

SEQ ID NO: 2424969 - RNA, 19 nt, Artificial Sequence
  Description of Artificial Sequence: Synthetic oligonucleotide
  Antisense strand to SEQ ID NO: 2424968
acucuucuggguaguagca

SEQ ID NO: 2424970 - RNA, 19 nt, Artificial Sequence
  Description of Artificial Sequence: Synthetic oligonucleotide
  Sense strand starting at position 2956 of SEQ ID NO: 1886758
cgaaauggaucuuaaacuc

SEQ ID NO: 2424971 - RNA, 19 nt, Artificial Sequence
  Description of Artificial Sequence: Synthetic oligonucleotide
  Antisense strand to SEQ ID NO: 2424970
gaguuuaagauccauuucg

SEQ ID NO: 2424972 - RNA, 19 nt, Artificial Sequence
  Description of Artificial Sequence: Synthetic oligonucleotide
  Sense strand starting at position 3352 of SEQ ID NO: 1886758
ggcgaugucuaguggugca

SEQ ID NO: 2424973 - RNA, 19 nt, Artificial Sequence
  Description of Artificial Sequence: Synthetic oligonucleotide
  Antisense strand to SEQ ID NO: 2424972
ugcaccacuagacaucgcc

SEQ ID NO: 2424974 - RNA, 19 nt, Artificial Sequence
  Description of Artificial Sequence: Synthetic oligonucleotide
  Sense strand starting at position 3357 of SEQ ID NO: 1886758
ugucuaguggugcauguaa

SEQ ID NO: 2424975 - RNA, 19 nt, Artificial Sequence
  Description of Artificial Sequence: Synthetic oligonucleotide
  Antisense strand to SEQ ID NO: 2424974
uuacaugcaccacuagaca

SEQ ID NO: 2424976 - RNA, 19 nt, Artificial Sequence
  Description of Artificial Sequence: Synthetic oligonucleotide
  Sense strand starting at position 3720 of SEQ ID NO: 1886758
gagaaauauuuccgaugcu

SEQ ID NO: 2424977 - RNA, 19 nt, Artificial Sequence
  Description of Artificial Sequence: Synthetic oligonucleotide
  Antisense strand to SEQ ID NO: 2424976
agcaucggaaauauuucuc

SEQ ID NO: 2424978 - RNA, 19 nt, Artificial Sequence
  Description of Artificial Sequence: Synthetic oligonucleotide
  Sense strand starting at position 3721 of SEQ ID NO: 1886758
agaaauauuuccgaugcuu

SEQ ID NO: 2424979 - RNA, 19 nt, Artificial Sequence
  Description of Artificial Sequence: Synthetic oligonucleotide
  Antisense strand to SEQ ID NO: 2424978
aagcaucggaaauauuucu

SEQ ID NO: 2424980 - RNA, 19 nt, Artificial Sequence
  Description of Artificial Sequence: Synthetic oligonucleotide
  Sense strand starting at position 44 of SEQ ID NO: 1886759
uguguaggaucagucacau

SEQ ID NO: 2424981 - RNA, 19 nt, Artificial Sequence
  Description of Artificial Sequence: Synthetic oligonucleotide
  Antisense strand to SEQ ID NO: 2424980
augugacugauccuacaca

SEQ ID NO: 2424982 - RNA, 19 nt, Artificial Sequence
  Description of Artificial Sequence: Synthetic oligonucleotide
  Sense strand starting at position 483 of SEQ ID NO: 1886759
gcacuaacucgugcauggu

SEQ ID NO: 2424983 - RNA, 19 nt, Artificial Sequence
  Description of Artificial Sequence: Synthetic oligonucleotide
  Antisense strand to SEQ ID NO: 2424982
accaugcacgaguuagugc

SEQ ID NO: 2424984 - RNA, 19 nt, Artificial Sequence
  Description of Artificial Sequence: Synthetic oligonucleotide
  Sense strand starting at position 484 of SEQ ID NO: 1886759
cacuaacucgugcauggua

SEQ ID NO: 2424985 - RNA, 19 nt, Artificial Sequence
  Description of Artificial Sequence: Synthetic oligonucleotide
  Antisense strand to SEQ ID NO: 2424984
uaccaugcacgaguuagug

SEQ ID NO: 2424986 - RNA, 19 nt, Artificial Sequence
  Description of Artificial Sequence: Synthetic oligonucleotide
  Sense strand starting at position 540 of SEQ ID NO: 1886759
caccgacaucaguacagua

SEQ ID NO: 2424987 - RNA, 19 nt, Artificial Sequence
  Description of Artificial Sequence: Synthetic oligonucleotide
  Antisense strand to SEQ ID NO: 2424986
uacuguacugaugucggug

SEQ ID NO: 2424988 - RNA, 19 nt, Artificial Sequence
  Description of Artificial Sequence: Synthetic oligonucleotide
  Sense strand starting at position 1084 of SEQ ID NO: 1886759
ucuacaugguaccgaugaa

SEQ ID NO: 2424989 - RNA, 19 nt, Artificial Sequence
  Description of Artificial Sequence: Synthetic oligonucleotide
  Antisense strand to SEQ ID NO: 2424988
uucaucgguaccauguaga

SEQ ID NO: 2424990 - RNA, 19 nt, Artificial Sequence
  Description of Artificial Sequence: Synthetic oligonucleotide
  Sense strand starting at position 1230 of SEQ ID NO: 1886759
caagcaucggugugguaca

SEQ ID NO: 2424991 - RNA, 19 nt, Artificial Sequence
  Description of Artificial Sequence: Synthetic oligonucleotide
  Antisense strand to SEQ ID NO: 2424990
uguaccacaccgaugcuug

SEQ ID NO: 2424992 - RNA, 19 nt, Artificial Sequence
  Description of Artificial Sequence: Synthetic oligonucleotide
  Sense strand starting at position 1249 of SEQ ID NO: 1886759
gcacuaaacugugcaaggu

SEQ ID NO: 2424993 - RNA, 19 nt, Artificial Sequence
  Description of Artificial Sequence: Synthetic oligonucleotide
  Antisense strand to SEQ ID NO: 2424992
accuugcacaguuuagugc

SEQ ID NO: 2424994 - RNA, 19 nt, Artificial Sequence
  Description of Artificial Sequence: Synthetic oligonucleotide
  Sense strand starting at position 1250 of SEQ ID NO: 1886759
cacuaaacugugcaaggua

SEQ ID NO: 2424995 - RNA, 19 nt, Artificial Sequence
  Description of Artificial Sequence: Synthetic oligonucleotide
  Antisense strand to SEQ ID NO: 2424994
uaccuugcacaguuuagug

SEQ ID NO: 2424996 - RNA, 19 nt, Artificial Sequence
  Description of Artificial Sequence: Synthetic oligonucleotide
  Sense strand starting at position 1543 of SEQ ID NO: 1886759
gaccgagugucagugugau

SEQ ID NO: 2424997 - RNA, 19 nt, Artificial Sequence
  Description of Artificial Sequence: Synthetic oligonucleotide
  Antisense strand to SEQ ID NO: 2424996
aucacacugacacucgguc

SEQ ID NO: 2424998 - RNA, 19 nt, Artificial Sequence
  Description of Artificial Sequence: Synthetic oligonucleotide
  Sense strand starting at position 1714 of SEQ ID NO: 1886759
gcacuaacugugcauggua

SEQ ID NO: 2424999 - RNA, 19 nt, Artificial Sequence
  Description of Artificial Sequence: Synthetic oligonucleotide
  Antisense strand to SEQ ID NO: 2424998
uaccaugcacaguuagugc

SEQ ID NO: 2425000 - RNA, 19 nt, Artificial Sequence
  Description of Artificial Sequence: Synthetic oligonucleotide
  Sense strand starting at position 1775 of SEQ ID NO: 1886759
cugugauuccaguacuaac

SEQ ID NO: 2425001 - RNA, 19 nt, Artificial Sequence
  Description of Artificial Sequence: Synthetic oligonucleotide
  Antisense strand to SEQ ID NO: 2425000
guuaguacuggaaucacag

SEQ ID NO: 2425002 - RNA, 19 nt, Artificial Sequence
  Description of Artificial Sequence: Synthetic oligonucleotide
  Sense strand starting at position 2122 of SEQ ID NO: 1886759
gauggcacuugucugaaau

SEQ ID NO: 2425003 - RNA, 19 nt, Artificial Sequence
  Description of Artificial Sequence: Synthetic oligonucleotide
  Antisense strand to SEQ ID NO: 2425002
auuucagacaagugccauc

SEQ ID NO: 2425004 - RNA, 19 nt, Artificial Sequence
  Description of Artificial Sequence: Synthetic oligonucleotide
  Sense strand starting at position 2123 of SEQ ID NO: 1886759
auggcacuugucugaaaug

SEQ ID NO: 2425005 - RNA, 19 nt, Artificial Sequence
  Description of Artificial Sequence: Synthetic oligonucleotide
  Antisense strand to SEQ ID NO: 2425004
cauuucagacaagugccau

SEQ ID NO: 2425006 - RNA, 19 nt, Artificial Sequence
  Description of Artificial Sequence: Synthetic oligonucleotide
  Sense strand starting at position 3375 of SEQ ID NO: 1886759
gcauuugugcccuaucuuu

SEQ ID NO: 2425007 - RNA, 19 nt, Artificial Sequence
  Description of Artificial Sequence: Synthetic oligonucleotide
  Antisense strand to SEQ ID NO: 2425006
aaagauagggcacaaaugc

SEQ ID NO: 2425008 - RNA, 19 nt, Artificial Sequence
  Description of Artificial Sequence: Synthetic oligonucleotide
  Sense strand starting at position 3523 of SEQ ID NO: 1886759
gaguguccaagcggguaua

SEQ ID NO: 2425009 - RNA, 19 nt, Artificial Sequence
  Description of Artificial Sequence: Synthetic oligonucleotide
  Antisense strand to SEQ ID NO: 2425008
uauacccgcuuggacacuc

SEQ ID NO: 2425010 - RNA, 19 nt, Artificial Sequence
  Description of Artificial Sequence: Synthetic oligonucleotide
  Sense strand starting at position 3534 of SEQ ID NO: 1886759
cggguauacgcuguuugua

SEQ ID NO: 2425011 - RNA, 19 nt, Artificial Sequence
  Description of Artificial Sequence: Synthetic oligonucleotide
  Antisense strand to SEQ ID NO: 2425010
uacaaacagcguauacccg

SEQ ID NO: 2425012 - RNA, 19 nt, Artificial Sequence
  Description of Artificial Sequence: Synthetic oligonucleotide
  Sense strand starting at position 3536 of SEQ ID NO: 1886759
gguauacgcuguuuguaaa

SEQ ID NO: 2425013 - RNA, 19 nt, Artificial Sequence
  Description of Artificial Sequence: Synthetic oligonucleotide
  Antisense strand to SEQ ID NO: 2425012
uuuacaaacagcguauacc

SEQ ID NO: 2425014 - RNA, 19 nt, Artificial Sequence
  Description of Artificial Sequence: Synthetic oligonucleotide
  Sense strand starting at position 3597 of SEQ ID NO: 1886759
aauguuugccaguguccau

SEQ ID NO: 2425015 - RNA, 19 nt, Artificial Sequence
  Description of Artificial Sequence: Synthetic oligonucleotide
  Antisense strand to SEQ ID NO: 2425014
auggacacuggcaaacauu

SEQ ID NO: 2425016 - RNA, 19 nt, Artificial Sequence
  Description of Artificial Sequence: Synthetic oligonucleotide
  Sense strand starting at position 3607 of SEQ ID NO: 1886759
aguguccaucugugaacca

SEQ ID NO: 2425017 - RNA, 19 nt, Artificial Sequence
  Description of Artificial Sequence: Synthetic oligonucleotide
  Antisense strand to SEQ ID NO: 2425016
ugguucacagauggacacu

SEQ ID NO: 2425018 - RNA, 19 nt, Artificial Sequence
  Description of Artificial Sequence: Synthetic oligonucleotide
  Sense strand starting at position 3608 of SEQ ID NO: 1886759
guguccaucugugaaccau

SEQ ID NO: 2425019 - RNA, 19 nt, Artificial Sequence
  Description of Artificial Sequence: Synthetic oligonucleotide
  Antisense strand to SEQ ID NO: 2425018
augguucacagauggacac

SEQ ID NO: 2425020 - RNA, 19 nt, Artificial Sequence
  Description of Artificial Sequence: Synthetic oligonucleotide
  Sense strand starting at position 3651 of SEQ ID NO: 1886759
ggauccuauggccaugagu

SEQ ID NO: 2425021 - RNA, 19 nt, Artificial Sequence
  Description of Artificial Sequence: Synthetic oligonucleotide
  Antisense strand to SEQ ID NO: 2425020
acucauggccauaggaucc

SEQ ID NO: 2425022 - RNA, 19 nt, Artificial Sequence
  Description of Artificial Sequence: Synthetic oligonucleotide
  Sense strand starting at position 3653 of SEQ ID NO: 1886759
auccuauggccaugaguga

SEQ ID NO: 2425023 - RNA, 19 nt, Artificial Sequence
  Description of Artificial Sequence: Synthetic oligonucleotide
  Antisense strand to SEQ ID NO: 2425022
ucacucauggccauaggau

SEQ ID NO: 2425024 - RNA, 19 nt, Artificial Sequence
  Description of Artificial Sequence: Synthetic oligonucleotide
  Sense strand starting at position 3697 of SEQ ID NO: 1886759
ccaugaagcuauggugaac

SEQ ID NO: 2425025 - RNA, 19 nt, Artificial Sequence
  Description of Artificial Sequence: Synthetic oligonucleotide
  Antisense strand to SEQ ID NO: 2425024
guucaccauagcuucaugg

SEQ ID NO: 2425026 - RNA, 19 nt, Artificial Sequence
  Description of Artificial Sequence: Synthetic oligonucleotide
  Sense strand starting at position 3700 of SEQ ID NO: 1886759
ugaagcuauggugaacgaa

SEQ ID NO: 2425027 - RNA, 19 nt, Artificial Sequence
  Description of Artificial Sequence: Synthetic oligonucleotide
  Antisense strand to SEQ ID NO: 2425026
uucguucaccauagcuuca

SEQ ID NO: 2425028 - RNA, 19 nt, Artificial Sequence
  Description of Artificial Sequence: Synthetic oligonucleotide
  Sense strand starting at position 3713 of SEQ ID NO: 1886759
aacgaaguguccuuuacuc

SEQ ID NO: 2425029 - RNA, 19 nt, Artificial Sequence
  Description of Artificial Sequence: Synthetic oligonucleotide
  Antisense strand to SEQ ID NO: 2425028
gaguaaaggacacuucguu

SEQ ID NO: 2425030 - RNA, 19 nt, Artificial Sequence
  Description of Artificial Sequence: Synthetic oligonucleotide
  Sense strand starting at position 3715 of SEQ ID NO: 1886759
cgaaguguccuuuacucua

SEQ ID NO: 2425031 - RNA, 19 nt, Artificial Sequence
  Description of Artificial Sequence: Synthetic oligonucleotide
  Antisense strand to SEQ ID NO: 2425030
uagaguaaaggacacuucg

SEQ ID NO: 2425032 - RNA, 19 nt, Artificial Sequence
  Description of Artificial Sequence: Synthetic oligonucleotide
  Sense strand starting at position 3745 of SEQ ID NO: 1886759
gcagaauuggacugaauuc

SEQ ID NO: 2425033 - RNA, 19 nt, Artificial Sequence
  Description of Artificial Sequence: Synthetic oligonucleotide
  Antisense strand to SEQ ID NO: 2425032
gaauucaguccaauucugc

SEQ ID NO: 2425034 - RNA, 19 nt, Artificial Sequence
  Description of Artificial Sequence: Synthetic oligonucleotide
  Sense strand starting at position 3752 of SEQ ID NO: 1886759
uggacugaauucuguaguu

SEQ ID NO: 2425035 - RNA, 19 nt, Artificial Sequence
  Description of Artificial Sequence: Synthetic oligonucleotide
  Antisense strand to SEQ ID NO: 2425034
aacuacagaauucagucca

SEQ ID NO: 2425036 - RNA, 19 nt, Artificial Sequence
  Description of Artificial Sequence: Synthetic oligonucleotide
  Sense strand starting at position 3947 of SEQ ID NO: 1886759
guggacugaucuguuguga

SEQ ID NO: 2425037 - RNA, 19 nt, Artificial Sequence
  Description of Artificial Sequence: Synthetic oligonucleotide
  Antisense strand to SEQ ID NO: 2425036
ucacaacagaucaguccac

SEQ ID NO: 2425038 - RNA, 19 nt, Artificial Sequence
  Description of Artificial Sequence: Synthetic oligonucleotide
  Sense strand starting at position 3951 of SEQ ID NO: 1886759
acugaucuguugugaaacu

SEQ ID NO: 2425039 - RNA, 19 nt, Artificial Sequence
  Description of Artificial Sequence: Synthetic oligonucleotide
  Antisense strand to SEQ ID NO: 2425038
aguuucacaacagaucagu

SEQ ID NO: 2425040 - RNA, 19 nt, Artificial Sequence
  Description of Artificial Sequence: Synthetic oligonucleotide
  Sense strand starting at position 3963 of SEQ ID NO: 1886759
ugaaacuucuauuggugca

SEQ ID NO: 2425041 - RNA, 19 nt, Artificial Sequence
  Description of Artificial Sequence: Synthetic oligonucleotide
  Antisense strand to SEQ ID NO: 2425040
ugcaccaauagaaguuuca

SEQ ID NO: 2425042 - RNA, 19 nt, Artificial Sequence
  Description of Artificial Sequence: Synthetic oligonucleotide
  Sense strand starting at position 83 of SEQ ID NO: 1886760
ccgagugguucucuccuua

SEQ ID NO: 2425043 - RNA, 19 nt, Artificial Sequence
  Description of Artificial Sequence: Synthetic oligonucleotide
  Antisense strand to SEQ ID NO: 2425042
uaaggagagaaccacucgg

SEQ ID NO: 2425044 - RNA, 19 nt, Artificial Sequence
  Description of Artificial Sequence: Synthetic oligonucleotide
  Sense strand starting at position 87 of SEQ ID NO: 1886760
gugguucucuccuuauuau

SEQ ID NO: 2425045 - RNA, 19 nt, Artificial Sequence
  Description of Artificial Sequence: Synthetic oligonucleotide
  Antisense strand to SEQ ID NO: 2425044
auaauaaggagagaaccac

SEQ ID NO: 2425046 - RNA, 19 nt, Artificial Sequence
  Description of Artificial Sequence: Synthetic oligonucleotide
  Sense strand starting at position 88 of SEQ ID NO: 1886760
ugguucucuccuuauuauu

SEQ ID NO: 2425047 - RNA, 19 nt, Artificial Sequence
  Description of Artificial Sequence: Synthetic oligonucleotide
  Antisense strand to SEQ ID NO: 2425046
aauaauaaggagagaacca

SEQ ID NO: 2425048 - RNA, 19 nt, Artificial Sequence
  Description of Artificial Sequence: Synthetic oligonucleotide
  Sense strand starting at position 201 of SEQ ID NO: 1886760
gguucaagguucgagcaau

SEQ ID NO: 2425049 - RNA, 19 nt, Artificial Sequence
  Description of Artificial Sequence: Synthetic oligonucleotide
  Antisense strand to SEQ ID NO: 2425048
auugcucgaaccuugaacc

SEQ ID NO: 2425050 - RNA, 19 nt, Artificial Sequence
  Description of Artificial Sequence: Synthetic oligonucleotide
  Sense strand starting at position 410 of SEQ ID NO: 1886760
agccgagugguucauucuu

SEQ ID NO: 2425051 - RNA, 19 nt, Artificial Sequence
  Description of Artificial Sequence: Synthetic oligonucleotide
  Antisense strand to SEQ ID NO: 2425050
aagaaugaaccacucggcu

SEQ ID NO: 2425052 - RNA, 19 nt, Artificial Sequence
  Description of Artificial Sequence: Synthetic oligonucleotide
  Sense strand starting at position 412 of SEQ ID NO: 1886760
ccgagugguucauucuugu

SEQ ID NO: 2425053 - RNA, 19 nt, Artificial Sequence
  Description of Artificial Sequence: Synthetic oligonucleotide
  Antisense strand to SEQ ID NO: 2425052
acaagaaugaaccacucgg

SEQ ID NO: 2425054 - RNA, 19 nt, Artificial Sequence
  Description of Artificial Sequence: Synthetic oligonucleotide
  Sense strand starting at position 416 of SEQ ID NO: 1886760
gugguucauucuugugaug

SEQ ID NO: 2425055 - RNA, 19 nt, Artificial Sequence
  Description of Artificial Sequence: Synthetic oligonucleotide
  Antisense strand to SEQ ID NO: 2425054
caucacaagaaugaaccac

SEQ ID NO: 2425056 - RNA, 19 nt, Artificial Sequence
  Description of Artificial Sequence: Synthetic oligonucleotide
  Sense strand starting at position 421 of SEQ ID NO: 1886760
ucauucuugugaugaaacu

SEQ ID NO: 2425057 - RNA, 19 nt, Artificial Sequence
  Description of Artificial Sequence: Synthetic oligonucleotide
  Antisense strand to SEQ ID NO: 2425056
aguuucaucacaagaauga

SEQ ID NO: 2425058 - RNA, 19 nt, Artificial Sequence
  Description of Artificial Sequence: Synthetic oligonucleotide
  Sense strand starting at position 492 of SEQ ID NO: 1886760
gcggguucucccugccuga

SEQ ID NO: 2425059 - RNA, 19 nt, Artificial Sequence
  Description of Artificial Sequence: Synthetic oligonucleotide
  Antisense strand to SEQ ID NO: 2425058
ucaggcagggagaacccgc

SEQ ID NO: 2425060 - RNA, 19 nt, Artificial Sequence
  Description of Artificial Sequence: Synthetic oligonucleotide
  Sense strand starting at position 505 of SEQ ID NO: 1886760
gccugacccuucugcaauu

SEQ ID NO: 2425061 - RNA, 19 nt, Artificial Sequence
  Description of Artificial Sequence: Synthetic oligonucleotide
  Antisense strand to SEQ ID NO: 2425060
aauugcagaagggucaggc

SEQ ID NO: 2425062 - RNA, 19 nt, Artificial Sequence
  Description of Artificial Sequence: Synthetic oligonucleotide
  Sense strand starting at position 743 of SEQ ID NO: 1886760
ccaaauaacugggaggaca

SEQ ID NO: 2425063 - RNA, 19 nt, Artificial Sequence
  Description of Artificial Sequence: Synthetic oligonucleotide
  Antisense strand to SEQ ID NO: 2425062
uguccucccaguuauuugg

SEQ ID NO: 2425064 - RNA, 19 nt, Artificial Sequence
  Description of Artificial Sequence: Synthetic oligonucleotide
  Sense strand starting at position 754 of SEQ ID NO: 1886760
ggaggacaggugugaacua

SEQ ID NO: 2425065 - RNA, 19 nt, Artificial Sequence
  Description of Artificial Sequence: Synthetic oligonucleotide
  Antisense strand to SEQ ID NO: 2425064
uaguucacaccuguccucc

SEQ ID NO: 2425066 - RNA, 19 nt, Artificial Sequence
  Description of Artificial Sequence: Synthetic oligonucleotide
  Sense strand starting at position 782 of SEQ ID NO: 1886760
gcagcaccuccguuguuua

SEQ ID NO: 2425067 - RNA, 19 nt, Artificial Sequence
  Description of Artificial Sequence: Synthetic oligonucleotide
  Antisense strand to SEQ ID NO: 2425066
uaaacaacggaggugcugc

SEQ ID NO: 2425068 - RNA, 19 nt, Artificial Sequence
  Description of Artificial Sequence: Synthetic oligonucleotide
  Sense strand starting at position 783 of SEQ ID NO: 1886760
cagcaccuccguuguuuaa

SEQ ID NO: 2425069 - RNA, 19 nt, Artificial Sequence
  Description of Artificial Sequence: Synthetic oligonucleotide
  Antisense strand to SEQ ID NO: 2425068
uuaaacaacggaggugcug

SEQ ID NO: 2425070 - RNA, 19 nt, Artificial Sequence
  Description of Artificial Sequence: Synthetic oligonucleotide
  Sense strand starting at position 815 of SEQ ID NO: 1886760
uccagcuccacgugguaaa

SEQ ID NO: 2425071 - RNA, 19 nt, Artificial Sequence
  Description of Artificial Sequence: Synthetic oligonucleotide
  Antisense strand to SEQ ID NO: 2425070
uuuaccacguggagcugga

SEQ ID NO: 2425072 - RNA, 19 nt, Artificial Sequence
  Description of Artificial Sequence: Synthetic oligonucleotide
  Sense strand starting at position 910 of SEQ ID NO: 1886760
gccacacuaggcuguuaua

SEQ ID NO: 2425073 - RNA, 19 nt, Artificial Sequence
  Description of Artificial Sequence: Synthetic oligonucleotide
  Antisense strand to SEQ ID NO: 2425072
uauaacagccuaguguggc

SEQ ID NO: 2425074 - RNA, 19 nt, Artificial Sequence
  Description of Artificial Sequence: Synthetic oligonucleotide
  Sense strand starting at position 1098 of SEQ ID NO: 1886760
aggagaaccucaggugaga

SEQ ID NO: 2425075 - RNA, 19 nt, Artificial Sequence
  Description of Artificial Sequence: Synthetic oligonucleotide
  Antisense strand to SEQ ID NO: 2425074
ucucaccugagguucuccu

SEQ ID NO: 2425076 - RNA, 19 nt, Artificial Sequence
  Description of Artificial Sequence: Synthetic oligonucleotide
  Sense strand starting at position 1155 of SEQ ID NO: 1886760
gcacuuaucacucgggaac

SEQ ID NO: 2425077 - RNA, 19 nt, Artificial Sequence
  Description of Artificial Sequence: Synthetic oligonucleotide
  Antisense strand to SEQ ID NO: 2425076
guucccgagugauaagugc

SEQ ID NO: 2425078 - RNA, 19 nt, Artificial Sequence
  Description of Artificial Sequence: Synthetic oligonucleotide
  Sense strand starting at position 1296 of SEQ ID NO: 1886760
ccgguagggucuuacagua

SEQ ID NO: 2425079 - RNA, 19 nt, Artificial Sequence
  Description of Artificial Sequence: Synthetic oligonucleotide
  Antisense strand to SEQ ID NO: 2425078
uacuguaagacccuaccgg

SEQ ID NO: 2425080 - RNA, 19 nt, Artificial Sequence
  Description of Artificial Sequence: Synthetic oligonucleotide
  Sense strand starting at position 2190 of SEQ ID NO: 1886760
ccgagugcugcuccuguca

SEQ ID NO: 2425081 - RNA, 19 nt, Artificial Sequence
  Description of Artificial Sequence: Synthetic oligonucleotide
  Antisense strand to SEQ ID NO: 2425080
ugacaggagcagcacucgg

SEQ ID NO: 2425082 - RNA, 19 nt, Artificial Sequence
  Description of Artificial Sequence: Synthetic oligonucleotide
  Sense strand starting at position 2192 of SEQ ID NO: 1886760
gagugcugcuccugucauu

SEQ ID NO: 2425083 - RNA, 19 nt, Artificial Sequence
  Description of Artificial Sequence: Synthetic oligonucleotide
  Antisense strand to SEQ ID NO: 2425082
aaugacaggagcagcacuc

SEQ ID NO: 2425084 - RNA, 19 nt, Artificial Sequence
  Description of Artificial Sequence: Synthetic oligonucleotide
  Sense strand starting at position 2203 of SEQ ID NO: 1886760
cugucauuguggccaugga

SEQ ID NO: 2425085 - RNA, 19 nt, Artificial Sequence
  Description of Artificial Sequence: Synthetic oligonucleotide
  Antisense strand to SEQ ID NO: 2425084
uccauggccacaaugacag

SEQ ID NO: 2425086 - RNA, 19 nt, Artificial Sequence
  Description of Artificial Sequence: Synthetic oligonucleotide
  Sense strand starting at position 3009 of SEQ ID NO: 1886760
cuuggaaugucgggucaga

SEQ ID NO: 2425087 - RNA, 19 nt, Artificial Sequence
  Description of Artificial Sequence: Synthetic oligonucleotide
  Antisense strand to SEQ ID NO: 2425086
ucugacccgacauuccaag

SEQ ID NO: 2425088 - RNA, 19 nt, Artificial Sequence
  Description of Artificial Sequence: Synthetic oligonucleotide
  Sense strand starting at position 3193 of SEQ ID NO: 1886760
aagcguuucugugcucaau

SEQ ID NO: 2425089 - RNA, 19 nt, Artificial Sequence
  Description of Artificial Sequence: Synthetic oligonucleotide
  Antisense strand to SEQ ID NO: 2425088
auugagcacagaaacgcuu

SEQ ID NO: 2425090 - RNA, 19 nt, Artificial Sequence
  Description of Artificial Sequence: Synthetic oligonucleotide
  Sense strand starting at position 3206 of SEQ ID NO: 1886760
cucaaugggucgcccuaau

SEQ ID NO: 2425091 - RNA, 19 nt, Artificial Sequence
  Description of Artificial Sequence: Synthetic oligonucleotide
  Antisense strand to SEQ ID NO: 2425090
auuagggcgacccauugag

SEQ ID NO: 2425092 - RNA, 19 nt, Artificial Sequence
  Description of Artificial Sequence: Synthetic oligonucleotide
  Sense strand starting at position 3251 of SEQ ID NO: 1886760
cggcugugugcucagggau

SEQ ID NO: 2425093 - RNA, 19 nt, Artificial Sequence
  Description of Artificial Sequence: Synthetic oligonucleotide
  Antisense strand to SEQ ID NO: 2425092
aucccugagcacacagccg

SEQ ID NO: 2425094 - RNA, 19 nt, Artificial Sequence
  Description of Artificial Sequence: Synthetic oligonucleotide
  Sense strand starting at position 3252 of SEQ ID NO: 1886760
ggcugugugcucagggaua

SEQ ID NO: 2425095 - RNA, 19 nt, Artificial Sequence
  Description of Artificial Sequence: Synthetic oligonucleotide
  Antisense strand to SEQ ID NO: 2425094
uaucccugagcacacagcc

SEQ ID NO: 2425096 - RNA, 19 nt, Artificial Sequence
  Description of Artificial Sequence: Synthetic oligonucleotide
  Sense strand starting at position 3257 of SEQ ID NO: 1886760
ugugcucagggauaccaaa

SEQ ID NO: 2425097 - RNA, 19 nt, Artificial Sequence
  Description of Artificial Sequence: Synthetic oligonucleotide
  Antisense strand to SEQ ID NO: 2425096
uuugguaucccugagcaca

SEQ ID NO: 2425098 - RNA, 19 nt, Artificial Sequence
  Description of Artificial Sequence: Synthetic oligonucleotide
  Sense strand starting at position 3300 of SEQ ID NO: 1886760
aaguccuauguuugcugaa

SEQ ID NO: 2425099 - RNA, 19 nt, Artificial Sequence
  Description of Artificial Sequence: Synthetic oligonucleotide
  Antisense strand to SEQ ID NO: 2425098
uucagcaaacauaggacuu

SEQ ID NO: 2425100 - RNA, 19 nt, Artificial Sequence
  Description of Artificial Sequence: Synthetic oligonucleotide
  Sense strand starting at position 3301 of SEQ ID NO: 1886760
aguccuauguuugcugaaa

SEQ ID NO: 2425101 - RNA, 19 nt, Artificial Sequence
  Description of Artificial Sequence: Synthetic oligonucleotide
  Antisense strand to SEQ ID NO: 2425100
uuucagcaaacauaggacu

SEQ ID NO: 2425102 - RNA, 19 nt, Artificial Sequence
  Description of Artificial Sequence: Synthetic oligonucleotide
  Sense strand starting at position 3302 of SEQ ID NO: 1886760
guccuauguuugcugaaac

SEQ ID NO: 2425103 - RNA, 19 nt, Artificial Sequence
  Description of Artificial Sequence: Synthetic oligonucleotide
  Antisense strand to SEQ ID NO: 2425102
guuucagcaaacauaggac

SEQ ID NO: 2425104 - RNA, 19 nt, Artificial Sequence
  Description of Artificial Sequence: Synthetic oligonucleotide
  Sense strand starting at position 3303 of SEQ ID NO: 1886760
uccuauguuugcugaaaca

SEQ ID NO: 2425105 - RNA, 19 nt, Artificial Sequence
  Description of Artificial Sequence: Synthetic oligonucleotide
  Antisense strand to SEQ ID NO: 2425104
uguuucagcaaacauagga

SEQ ID NO: 2425106 - RNA, 19 nt, Artificial Sequence
  Description of Artificial Sequence: Synthetic oligonucleotide
  Sense strand starting at position 3313 of SEQ ID NO: 1886760
gcugaaacaucguugggcu

SEQ ID NO: 2425107 - RNA, 19 nt, Artificial Sequence
  Description of Artificial Sequence: Synthetic oligonucleotide
  Antisense strand to SEQ ID NO: 2425106
agcccaacgauguuucagc

SEQ ID NO: 2425108 - RNA, 19 nt, Artificial Sequence
  Description of Artificial Sequence: Synthetic oligonucleotide
  Sense strand starting at position 3663 of SEQ ID NO: 1886760
uuuaguuagaagugugaaa

SEQ ID NO: 2425109 - RNA, 19 nt, Artificial Sequence
  Description of Artificial Sequence: Synthetic oligonucleotide
  Antisense strand to SEQ ID NO: 2425108
uuucacacuucuaacuaaa

SEQ ID NO: 2425110 - RNA, 19 nt, Artificial Sequence
  Description of Artificial Sequence: Synthetic oligonucleotide
  Sense strand starting at position 3695 of SEQ ID NO: 1886760
ccgugucaucaucaugaag

SEQ ID NO: 2425111 - RNA, 19 nt, Artificial Sequence
  Description of Artificial Sequence: Synthetic oligonucleotide
  Antisense strand to SEQ ID NO: 2425110
cuucaugaugaugacacgg

SEQ ID NO: 2425112 - RNA, 19 nt, Artificial Sequence
  Description of Artificial Sequence: Synthetic oligonucleotide
  Sense strand starting at position 3697 of SEQ ID NO: 1886760
gugucaucaucaugaagga

SEQ ID NO: 2425113 - RNA, 19 nt, Artificial Sequence
  Description of Artificial Sequence: Synthetic oligonucleotide
  Antisense strand to SEQ ID NO: 2425112
uccuucaugaugaugacac

SEQ ID NO: 2425114 - RNA, 19 nt, Artificial Sequence
  Description of Artificial Sequence: Synthetic oligonucleotide
  Sense strand starting at position 43 of SEQ ID NO: 1886761
gugacagacagguagcauu

SEQ ID NO: 2425115 - RNA, 19 nt, Artificial Sequence
  Description of Artificial Sequence: Synthetic oligonucleotide
  Antisense strand to SEQ ID NO: 2425114
aaugcuaccugucugucac

SEQ ID NO: 2425116 - RNA, 19 nt, Artificial Sequence
  Description of Artificial Sequence: Synthetic oligonucleotide
  Sense strand starting at position 74 of SEQ ID NO: 1886761
acccaagggugaugcuauu

SEQ ID NO: 2425117 - RNA, 19 nt, Artificial Sequence
  Description of Artificial Sequence: Synthetic oligonucleotide
  Antisense strand to SEQ ID NO: 2425116
aauagcaucacccuugggu

SEQ ID NO: 2425118 - RNA, 19 nt, Artificial Sequence
  Description of Artificial Sequence: Synthetic oligonucleotide
  Sense strand starting at position 80 of SEQ ID NO: 1886761
gggugaugcuauuccugca

SEQ ID NO: 2425119 - RNA, 19 nt, Artificial Sequence
  Description of Artificial Sequence: Synthetic oligonucleotide
  Antisense strand to SEQ ID NO: 2425118
ugcaggaauagcaucaccc

SEQ ID NO: 2425120 - RNA, 19 nt, Artificial Sequence
  Description of Artificial Sequence: Synthetic oligonucleotide
  Sense strand starting at position 85 of SEQ ID NO: 1886761
augcuauuccugcaggguu

SEQ ID NO: 2425121 - RNA, 19 nt, Artificial Sequence
  Description of Artificial Sequence: Synthetic oligonucleotide
  Antisense strand to SEQ ID NO: 2425120
aacccugcaggaauagcau

SEQ ID NO: 2425122 - RNA, 19 nt, Artificial Sequence
  Description of Artificial Sequence: Synthetic oligonucleotide
  Sense strand starting at position 154 of SEQ ID NO: 1886761
gugggagguuccaaaguug

SEQ ID NO: 2425123 - RNA, 19 nt, Artificial Sequence
  Description of Artificial Sequence: Synthetic oligonucleotide
  Antisense strand to SEQ ID NO: 2425122
caacuuuggaaccucccac

SEQ ID NO: 2425124 - RNA, 19 nt, Artificial Sequence
  Description of Artificial Sequence: Synthetic oligonucleotide
  Sense strand starting at position 184 of SEQ ID NO: 1886761
ccaagucuuucuuccaagu

SEQ ID NO: 2425125 - RNA, 19 nt, Artificial Sequence
  Description of Artificial Sequence: Synthetic oligonucleotide
  Antisense strand to SEQ ID NO: 2425124
acuuggaagaaagacuugg

SEQ ID NO: 2425126 - RNA, 19 nt, Artificial Sequence
  Description of Artificial Sequence: Synthetic oligonucleotide
  Sense strand starting at position 241 of SEQ ID NO: 1886761
acaagcgugucagugugaa

SEQ ID NO: 2425127 - RNA, 19 nt, Artificial Sequence
  Description of Artificial Sequence: Synthetic oligonucleotide
  Antisense strand to SEQ ID NO: 2425126
uucacacugacacgcuugu

SEQ ID NO: 2425128 - RNA, 19 nt, Artificial Sequence
  Description of Artificial Sequence: Synthetic oligonucleotide
  Sense strand starting at position 326 of SEQ ID NO: 1886761
ccgagugguucucuccuua

SEQ ID NO: 2425129 - RNA, 19 nt, Artificial Sequence
  Description of Artificial Sequence: Synthetic oligonucleotide
  Antisense strand to SEQ ID NO: 2425128
uaaggagagaaccacucgg

SEQ ID NO: 2425130 - RNA, 19 nt, Artificial Sequence
  Description of Artificial Sequence: Synthetic oligonucleotide
  Sense strand starting at position 330 of SEQ ID NO: 1886761
gugguucucuccuuauuau

SEQ ID NO: 2425131 - RNA, 19 nt, Artificial Sequence
  Description of Artificial Sequence: Synthetic oligonucleotide
  Antisense strand to SEQ ID NO: 2425130
auaauaaggagagaaccac

SEQ ID NO: 2425132 - RNA, 19 nt, Artificial Sequence
  Description of Artificial Sequence: Synthetic oligonucleotide
  Sense strand starting at position 331 of SEQ ID NO: 1886761
ugguucucuccuuauuauu

SEQ ID NO: 2425133 - RNA, 19 nt, Artificial Sequence
  Description of Artificial Sequence: Synthetic oligonucleotide
  Antisense strand to SEQ ID NO: 2425132
aauaauaaggagagaacca

SEQ ID NO: 2425134 - RNA, 19 nt, Artificial Sequence
  Description of Artificial Sequence: Synthetic oligonucleotide
  Sense strand starting at position 444 of SEQ ID NO: 1886761
gguucaagguucgagcaau

SEQ ID NO: 2425135 - RNA, 19 nt, Artificial Sequence
  Description of Artificial Sequence: Synthetic oligonucleotide
  Antisense strand to SEQ ID NO: 2425134
auugcucgaaccuugaacc

SEQ ID NO: 2425136 - RNA, 19 nt, Artificial Sequence
  Description of Artificial Sequence: Synthetic oligonucleotide
  Sense strand starting at position 653 of SEQ ID NO: 1886761
agccgagugguucauucuu

SEQ ID NO: 2425137 - RNA, 19 nt, Artificial Sequence
  Description of Artificial Sequence: Synthetic oligonucleotide
  Antisense strand to SEQ ID NO: 2425136
aagaaugaaccacucggcu

SEQ ID NO: 2425138 - RNA, 19 nt, Artificial Sequence
  Description of Artificial Sequence: Synthetic oligonucleotide
  Sense strand starting at position 655 of SEQ ID NO: 1886761
ccgagugguucauucuugu

SEQ ID NO: 2425139 - RNA, 19 nt, Artificial Sequence
  Description of Artificial Sequence: Synthetic oligonucleotide
  Antisense strand to SEQ ID NO: 2425138
acaagaaugaaccacucgg

SEQ ID NO: 2425140 - RNA, 19 nt, Artificial Sequence
  Description of Artificial Sequence: Synthetic oligonucleotide
  Sense strand starting at position 664 of SEQ ID NO: 1886761
ucauucuugugaugaaacu

SEQ ID NO: 2425141 - RNA, 19 nt, Artificial Sequence
  Description of Artificial Sequence: Synthetic oligonucleotide
  Antisense strand to SEQ ID NO: 2425140
aguuucaucacaagaauga

SEQ ID NO: 2425142 - RNA, 19 nt, Artificial Sequence
  Description of Artificial Sequence: Synthetic oligonucleotide
  Sense strand starting at position 735 of SEQ ID NO: 1886761
gcggguucucccugccuga

SEQ ID NO: 2425143 - RNA, 19 nt, Artificial Sequence
  Description of Artificial Sequence: Synthetic oligonucleotide
  Antisense strand to SEQ ID NO: 2425142
ucaggcagggagaacccgc

SEQ ID NO: 2425144 - RNA, 19 nt, Artificial Sequence
  Description of Artificial Sequence: Synthetic oligonucleotide
  Sense strand starting at position 986 of SEQ ID NO: 1886761
ccaaauaacugggaggaca

SEQ ID NO: 2425145 - RNA, 19 nt, Artificial Sequence
  Description of Artificial Sequence: Synthetic oligonucleotide
  Antisense strand to SEQ ID NO: 2425144
uguccucccaguuauuugg

SEQ ID NO: 2425146 - RNA, 19 nt, Artificial Sequence
  Description of Artificial Sequence: Synthetic oligonucleotide
  Sense strand starting at position 997 of SEQ ID NO: 1886761
ggaggacaggugugaacua

SEQ ID NO: 2425147 - RNA, 19 nt, Artificial Sequence
  Description of Artificial Sequence: Synthetic oligonucleotide
  Antisense strand to SEQ ID NO: 2425146
uaguucacaccuguccucc

SEQ ID NO: 2425148 - RNA, 19 nt, Artificial Sequence
  Description of Artificial Sequence: Synthetic oligonucleotide
  Sense strand starting at position 1025 of SEQ ID NO: 1886761
gcagcaccuccguuguuua

SEQ ID NO: 2425149 - RNA, 19 nt, Artificial Sequence
  Description of Artificial Sequence: Synthetic oligonucleotide
  Antisense strand to SEQ ID NO: 2425148
uaaacaacggaggugcugc

SEQ ID NO: 2425150 - RNA, 19 nt, Artificial Sequence
  Description of Artificial Sequence: Synthetic oligonucleotide
  Sense strand starting at position 1026 of SEQ ID NO: 1886761
cagcaccuccguuguuuaa

SEQ ID NO: 2425151 - RNA, 19 nt, Artificial Sequence
  Description of Artificial Sequence: Synthetic oligonucleotide
  Antisense strand to SEQ ID NO: 2425150
uuaaacaacggaggugcug

SEQ ID NO: 2425152 - RNA, 19 nt, Artificial Sequence
  Description of Artificial Sequence: Synthetic oligonucleotide
  Sense strand starting at position 1058 of SEQ ID NO: 1886761
uccagcuccacgugguaaa

SEQ ID NO: 2425153 - RNA, 19 nt, Artificial Sequence
  Description of Artificial Sequence: Synthetic oligonucleotide
  Antisense strand to SEQ ID NO: 2425152
uuuaccacguggagcugga

SEQ ID NO: 2425154 - RNA, 19 nt, Artificial Sequence
  Description of Artificial Sequence: Synthetic oligonucleotide
  Sense strand starting at position 1153 of SEQ ID NO: 1886761
gccacacuaggcuguuaua

SEQ ID NO: 2425155 - RNA, 19 nt, Artificial Sequence
  Description of Artificial Sequence: Synthetic oligonucleotide
  Antisense strand to SEQ ID NO: 2425154
uauaacagccuaguguggc

SEQ ID NO: 2425156 - RNA, 19 nt, Artificial Sequence
  Description of Artificial Sequence: Synthetic oligonucleotide
  Sense strand starting at position 1341 of SEQ ID NO: 1886761
aggagaaccucaggugaga

SEQ ID NO: 2425157 - RNA, 19 nt, Artificial Sequence
  Description of Artificial Sequence: Synthetic oligonucleotide
  Antisense strand to SEQ ID NO: 2425156
ucucaccugagguucuccu

SEQ ID NO: 2425158 - RNA, 19 nt, Artificial Sequence
  Description of Artificial Sequence: Synthetic oligonucleotide
  Sense strand starting at position 1398 of SEQ ID NO: 1886761
gcacuuaucacucgggaac

SEQ ID NO: 2425159 - RNA, 19 nt, Artificial Sequence
  Description of Artificial Sequence: Synthetic oligonucleotide
  Antisense strand to SEQ ID NO: 2425158
guucccgagugauaagugc

SEQ ID NO: 2425160 - RNA, 19 nt, Artificial Sequence
  Description of Artificial Sequence: Synthetic oligonucleotide
  Sense strand starting at position 1539 of SEQ ID NO: 1886761
ccgguagggucuuacagua

SEQ ID NO: 2425161 - RNA, 19 nt, Artificial Sequence
  Description of Artificial Sequence: Synthetic oligonucleotide
  Antisense strand to SEQ ID NO: 2425160
uacuguaagacccuaccgg

SEQ ID NO: 2425162 - RNA, 19 nt, Artificial Sequence
  Description of Artificial Sequence: Synthetic oligonucleotide
  Sense strand starting at position 2433 of SEQ ID NO: 1886761
ccgagugcugcuccuguca

SEQ ID NO: 2425163 - RNA, 19 nt, Artificial Sequence
  Description of Artificial Sequence: Synthetic oligonucleotide
  Antisense strand to SEQ ID NO: 2425162
ugacaggagcagcacucgg

SEQ ID NO: 2425164 - RNA, 19 nt, Artificial Sequence
  Description of Artificial Sequence: Synthetic oligonucleotide
  Sense strand starting at position 2446 of SEQ ID NO: 1886761
cugucauuguggccaugga

SEQ ID NO: 2425165 - RNA, 19 nt, Artificial Sequence
  Description of Artificial Sequence: Synthetic oligonucleotide
  Antisense strand to SEQ ID NO: 2425164
uccauggccacaaugacag

SEQ ID NO: 2425166 - RNA, 19 nt, Artificial Sequence
  Description of Artificial Sequence: Synthetic oligonucleotide
  Sense strand starting at position 3252 of SEQ ID NO: 1886761
cuuggaaugucgggucaga

SEQ ID NO: 2425167 - RNA, 19 nt, Artificial Sequence
  Description of Artificial Sequence: Synthetic oligonucleotide
  Antisense strand to SEQ ID NO: 2425166
ucugacccgacauuccaag

SEQ ID NO: 2425168 - RNA, 19 nt, Artificial Sequence
  Description of Artificial Sequence: Synthetic oligonucleotide
  Sense strand starting at position 3436 of SEQ ID NO: 1886761
aagcguuucugugcucaau

SEQ ID NO: 2425169 - RNA, 19 nt, Artificial Sequence
  Description of Artificial Sequence: Synthetic oligonucleotide
  Antisense strand to SEQ ID NO: 2425168
auugagcacagaaacgcuu

SEQ ID NO: 2425170 - RNA, 19 nt, Artificial Sequence
  Description of Artificial Sequence: Synthetic oligonucleotide
  Sense strand starting at position 3449 of SEQ ID NO: 1886761
cucaaugggucgcccuaau

SEQ ID NO: 2425171 - RNA, 19 nt, Artificial Sequence
  Description of Artificial Sequence: Synthetic oligonucleotide
  Antisense strand to SEQ ID NO: 2425170
auuagggcgacccauugag

SEQ ID NO: 2425172 - RNA, 19 nt, Artificial Sequence
  Description of Artificial Sequence: Synthetic oligonucleotide
  Sense strand starting at position 3494 of SEQ ID NO: 1886761
cggcugugugcucagggau

SEQ ID NO: 2425173 - RNA, 19 nt, Artificial Sequence
  Description of Artificial Sequence: Synthetic oligonucleotide
  Antisense strand to SEQ ID NO: 2425172
aucccugagcacacagccg

SEQ ID NO: 2425174 - RNA, 19 nt, Artificial Sequence
  Description of Artificial Sequence: Synthetic oligonucleotide
  Sense strand starting at position 3495 of SEQ ID NO: 1886761
ggcugugugcucagggaua

SEQ ID NO: 2425175 - RNA, 19 nt, Artificial Sequence
  Description of Artificial Sequence: Synthetic oligonucleotide
  Antisense strand to SEQ ID NO: 2425174
uaucccugagcacacagcc

SEQ ID NO: 2425176 - RNA, 19 nt, Artificial Sequence
  Description of Artificial Sequence: Synthetic oligonucleotide
  Sense strand starting at position 3500 of SEQ ID NO: 1886761
ugugcucagggauaccaaa

SEQ ID NO: 2425177 - RNA, 19 nt, Artificial Sequence
  Description of Artificial Sequence: Synthetic oligonucleotide
  Antisense strand to SEQ ID NO: 2425176
uuugguaucccugagcaca

SEQ ID NO: 2425178 - RNA, 19 nt, Artificial Sequence
  Description of Artificial Sequence: Synthetic oligonucleotide
  Sense strand starting at position 3543 of SEQ ID NO: 1886761
aaguccuauguuugcugaa

SEQ ID NO: 2425179 - RNA, 19 nt, Artificial Sequence
  Description of Artificial Sequence: Synthetic oligonucleotide
  Antisense strand to SEQ ID NO: 2425178
uucagcaaacauaggacuu

SEQ ID NO: 2425180 - RNA, 19 nt, Artificial Sequence
  Description of Artificial Sequence: Synthetic oligonucleotide
  Sense strand starting at position 3544 of SEQ ID NO: 1886761
aguccuauguuugcugaaa

SEQ ID NO: 2425181 - RNA, 19 nt, Artificial Sequence
  Description of Artificial Sequence: Synthetic oligonucleotide
  Antisense strand to SEQ ID NO: 2425180
uuucagcaaacauaggacu

SEQ ID NO: 2425182 - RNA, 19 nt, Artificial Sequence
  Description of Artificial Sequence: Synthetic oligonucleotide
  Sense strand starting at position 3545 of SEQ ID NO: 1886761
guccuauguuugcugaaac

SEQ ID NO: 2425183 - RNA, 19 nt, Artificial Sequence
  Description of Artificial Sequence: Synthetic oligonucleotide
  Antisense strand to SEQ ID NO: 2425182
guuucagcaaacauaggac

SEQ ID NO: 2425184 - RNA, 19 nt, Artificial Sequence
  Description of Artificial Sequence: Synthetic oligonucleotide
  Sense strand starting at position 3546 of SEQ ID NO: 1886761
uccuauguuugcugaaaca

SEQ ID NO: 2425185 - RNA, 19 nt, Artificial Sequence
  Description of Artificial Sequence: Synthetic oligonucleotide
  Antisense strand to SEQ ID NO: 2425184
uguuucagcaaacauagga

SEQ ID NO: 2425186 - RNA, 19 nt, Artificial Sequence
  Description of Artificial Sequence: Synthetic oligonucleotide
  Sense strand starting at position 3556 of SEQ ID NO: 1886761
gcugaaacaucguugggcu

SEQ ID NO: 2425187 - RNA, 19 nt, Artificial Sequence
  Description of Artificial Sequence: Synthetic oligonucleotide
  Antisense strand to SEQ ID NO: 2425186
agcccaacgauguuucagc

SEQ ID NO: 2425188 - RNA, 19 nt, Artificial Sequence
  Description of Artificial Sequence: Synthetic oligonucleotide
  Sense strand starting at position 3906 of SEQ ID NO: 1886761
uuuaguuagaagugugaaa

SEQ ID NO: 2425189 - RNA, 19 nt, Artificial Sequence
  Description of Artificial Sequence: Synthetic oligonucleotide
  Antisense strand to SEQ ID NO: 2425188
uuucacacuucuaacuaaa

SEQ ID NO: 2425190 - RNA, 19 nt, Artificial Sequence
  Description of Artificial Sequence: Synthetic oligonucleotide
  Sense strand starting at position 3938 of SEQ ID NO: 1886761
ccgugucaucaucaugaag

SEQ ID NO: 2425191 - RNA, 19 nt, Artificial Sequence
  Description of Artificial Sequence: Synthetic oligonucleotide
  Antisense strand to SEQ ID NO: 2425190
cuucaugaugaugacacgg

SEQ ID NO: 2425192 - RNA, 19 nt, Artificial Sequence
  Description of Artificial Sequence: Synthetic oligonucleotide
  Sense strand starting at position 3940 of SEQ ID NO: 1886761
gugucaucaucaugaagga

SEQ ID NO: 2425193 - RNA, 19 nt, Artificial Sequence
  Description of Artificial Sequence: Synthetic oligonucleotide
  Antisense strand to SEQ ID NO: 2425192
uccuucaugaugaugacac

SEQ ID NO: 2425194 - RNA, 19 nt, Artificial Sequence
  Description of Artificial Sequence: Synthetic oligonucleotide
  Sense strand starting at position 158 of SEQ ID NO: 1886762
gcguugucuguguuggaga

SEQ ID NO: 2425195 - RNA, 19 nt, Artificial Sequence
  Description of Artificial Sequence: Synthetic oligonucleotide
  Antisense strand to SEQ ID NO: 2425194
ucuccaacacagacaacgc

SEQ ID NO: 2425196 - RNA, 19 nt, Artificial Sequence
  Description of Artificial Sequence: Synthetic oligonucleotide
  Sense strand starting at position 163 of SEQ ID NO: 1886762
gucuguguuggagaucauc

SEQ ID NO: 2425197 - RNA, 19 nt, Artificial Sequence
  Description of Artificial Sequence: Synthetic oligonucleotide
  Antisense strand to SEQ ID NO: 2425196
gaugaucuccaacacagac

SEQ ID NO: 2425198 - RNA, 19 nt, Artificial Sequence
  Description of Artificial Sequence: Synthetic oligonucleotide
  Sense strand starting at position 255 of SEQ ID NO: 1886762
acuguaagugugcagcuua

SEQ ID NO: 2425199 - RNA, 19 nt, Artificial Sequence
  Description of Artificial Sequence: Synthetic oligonucleotide
  Antisense strand to SEQ ID NO: 2425198
uaagcugcacacuuacagu

SEQ ID NO: 2425200 - RNA, 19 nt, Artificial Sequence
  Description of Artificial Sequence: Synthetic oligonucleotide
  Sense strand starting at position 262 of SEQ ID NO: 1886762
gugugcagcuuauuuagga

SEQ ID NO: 2425201 - RNA, 19 nt, Artificial Sequence
  Description of Artificial Sequence: Synthetic oligonucleotide
  Antisense strand to SEQ ID NO: 2425200
uccuaaauaagcugcacac

SEQ ID NO: 2425202 - RNA, 19 nt, Artificial Sequence
  Description of Artificial Sequence: Synthetic oligonucleotide
  Sense strand starting at position 336 of SEQ ID NO: 1886762
ugcuucuccaggcaaggau

SEQ ID NO: 2425203 - RNA, 19 nt, Artificial Sequence
  Description of Artificial Sequence: Synthetic oligonucleotide
  Antisense strand to SEQ ID NO: 2425202
auccuugccuggagaagca

SEQ ID NO: 2425204 - RNA, 19 nt, Artificial Sequence
  Description of Artificial Sequence: Synthetic oligonucleotide
  Sense strand starting at position 532 of SEQ ID NO: 1886762
ggaucugcuccucggagga

SEQ ID NO: 2425205 - RNA, 19 nt, Artificial Sequence
  Description of Artificial Sequence: Synthetic oligonucleotide
  Antisense strand to SEQ ID NO: 2425204
uccuccgaggagcagaucc

SEQ ID NO: 2425206 - RNA, 19 nt, Artificial Sequence
  Description of Artificial Sequence: Synthetic oligonucleotide
  Sense strand starting at position 565 of SEQ ID NO: 1886762
ccacccugcuagucugaaa

SEQ ID NO: 2425207 - RNA, 19 nt, Artificial Sequence
  Description of Artificial Sequence: Synthetic oligonucleotide
  Antisense strand to SEQ ID NO: 2425206
uuucagacuagcagggugg

SEQ ID NO: 2425208 - RNA, 19 nt, Artificial Sequence
  Description of Artificial Sequence: Synthetic oligonucleotide
  Sense strand starting at position 715 of SEQ ID NO: 1886762
ucuggagaguguuuggaaa

SEQ ID NO: 2425209 - RNA, 19 nt, Artificial Sequence
  Description of Artificial Sequence: Synthetic oligonucleotide
  Antisense strand to SEQ ID NO: 2425208
uuuccaaacacucuccaga

SEQ ID NO: 2425210 - RNA, 19 nt, Artificial Sequence
  Description of Artificial Sequence: Synthetic oligonucleotide
  Sense strand starting at position 834 of SEQ ID NO: 1886762
auuccuuucugguuuggga

SEQ ID NO: 2425211 - RNA, 19 nt, Artificial Sequence
  Description of Artificial Sequence: Synthetic oligonucleotide
  Antisense strand to SEQ ID NO: 2425210
ucccaaaccagaaaggaau

SEQ ID NO: 2425212 - RNA, 19 nt, Artificial Sequence
  Description of Artificial Sequence: Synthetic oligonucleotide
  Sense strand starting at position 935 of SEQ ID NO: 1886762
caacaaacaucguugguaa

SEQ ID NO: 2425213 - RNA, 19 nt, Artificial Sequence
  Description of Artificial Sequence: Synthetic oligonucleotide
  Antisense strand to SEQ ID NO: 2425212
uuaccaacgauguuuguug

SEQ ID NO: 2425214 - RNA, 19 nt, Artificial Sequence
  Description of Artificial Sequence: Synthetic oligonucleotide
  Sense strand starting at position 936 of SEQ ID NO: 1886762
aacaaacaucguugguaaa

SEQ ID NO: 2425215 - RNA, 19 nt, Artificial Sequence
  Description of Artificial Sequence: Synthetic oligonucleotide
  Antisense strand to SEQ ID NO: 2425214
uuuaccaacgauguuuguu

SEQ ID NO: 2425216 - RNA, 19 nt, Artificial Sequence
  Description of Artificial Sequence: Synthetic oligonucleotide
  Sense strand starting at position 937 of SEQ ID NO: 1886762
acaaacaucguugguaaag

SEQ ID NO: 2425217 - RNA, 19 nt, Artificial Sequence
  Description of Artificial Sequence: Synthetic oligonucleotide
  Antisense strand to SEQ ID NO: 2425216
cuuuaccaacgauguuugu

SEQ ID NO: 2425218 - RNA, 19 nt, Artificial Sequence
  Description of Artificial Sequence: Synthetic oligonucleotide
  Sense strand starting at position 938 of SEQ ID NO: 1886762
caaacaucguugguaaagu

SEQ ID NO: 2425219 - RNA, 19 nt, Artificial Sequence
  Description of Artificial Sequence: Synthetic oligonucleotide
  Antisense strand to SEQ ID NO: 2425218
acuuuaccaacgauguuug

SEQ ID NO: 2425220 - RNA, 19 nt, Artificial Sequence
  Description of Artificial Sequence: Synthetic oligonucleotide
  Sense strand starting at position 1010 of SEQ ID NO: 1886762
agacccaguuuccuggaua

SEQ ID NO: 2425221 - RNA, 19 nt, Artificial Sequence
  Description of Artificial Sequence: Synthetic oligonucleotide
  Antisense strand to SEQ ID NO: 2425220
uauccaggaaacugggucu

SEQ ID NO: 2425222 - RNA, 19 nt, Artificial Sequence
  Description of Artificial Sequence: Synthetic oligonucleotide
  Sense strand starting at position 1023 of SEQ ID NO: 1886762
uggauauuugcaggcgucu

SEQ ID NO: 2425223 - RNA, 19 nt, Artificial Sequence
  Description of Artificial Sequence: Synthetic oligonucleotide
  Antisense strand to SEQ ID NO: 2425222
agacgccugcaaauaucca

SEQ ID NO: 2425224 - RNA, 19 nt, Artificial Sequence
  Description of Artificial Sequence: Synthetic oligonucleotide
  Sense strand starting at position 1084 of SEQ ID NO: 1886762
agugaagggaccugugauu

SEQ ID NO: 2425225 - RNA, 19 nt, Artificial Sequence
  Description of Artificial Sequence: Synthetic oligonucleotide
  Antisense strand to SEQ ID NO: 2425224
aaucacaggucccuucacu

SEQ ID NO: 2425226 - RNA, 19 nt, Artificial Sequence
  Description of Artificial Sequence: Synthetic oligonucleotide
  Sense strand starting at position 1093 of SEQ ID NO: 1886762
accugugauuccuuuguga

SEQ ID NO: 2425227 - RNA, 19 nt, Artificial Sequence
  Description of Artificial Sequence: Synthetic oligonucleotide
  Antisense strand to SEQ ID NO: 2425226
ucacaaaggaaucacaggu

SEQ ID NO: 2425228 - RNA, 19 nt, Artificial Sequence
  Description of Artificial Sequence: Synthetic oligonucleotide
  Sense strand starting at position 1095 of SEQ ID NO: 1886762
cugugauuccuuugugaac

SEQ ID NO: 2425229 - RNA, 19 nt, Artificial Sequence
  Description of Artificial Sequence: Synthetic oligonucleotide
  Antisense strand to SEQ ID NO: 2425228
guucacaaaggaaucacag

SEQ ID NO: 2425230 - RNA, 19 nt, Artificial Sequence
  Description of Artificial Sequence: Synthetic oligonucleotide
  Sense strand starting at position 1096 of SEQ ID NO: 1886762
ugugauuccuuugugaaca

SEQ ID NO: 2425231 - RNA, 19 nt, Artificial Sequence
  Description of Artificial Sequence: Synthetic oligonucleotide
  Antisense strand to SEQ ID NO: 2425230
uguucacaaaggaaucaca

SEQ ID NO: 2425232 - RNA, 19 nt, Artificial Sequence
  Description of Artificial Sequence: Synthetic oligonucleotide
  Sense strand starting at position 1214 of SEQ ID NO: 1886762
ucacaagggucuugaaaug

SEQ ID NO: 2425233 - RNA, 19 nt, Artificial Sequence
  Description of Artificial Sequence: Synthetic oligonucleotide
  Antisense strand to SEQ ID NO: 2425232
cauuucaagacccuuguga

SEQ ID NO: 2425234 - RNA, 19 nt, Artificial Sequence
  Description of Artificial Sequence: Synthetic oligonucleotide
  Sense strand starting at position 1219 of SEQ ID NO: 1886762
agggucuugaaaugugcaa

SEQ ID NO: 2425235 - RNA, 19 nt, Artificial Sequence
  Description of Artificial Sequence: Synthetic oligonucleotide
  Antisense strand to SEQ ID NO: 2425234
uugcacauuucaagacccu

SEQ ID NO: 2425236 - RNA, 19 nt, Artificial Sequence
  Description of Artificial Sequence: Synthetic oligonucleotide
  Sense strand starting at position 1311 of SEQ ID NO: 1886762
ggaggcagcuaugagauaa

SEQ ID NO: 2425237 - RNA, 19 nt, Artificial Sequence
  Description of Artificial Sequence: Synthetic oligonucleotide
  Antisense strand to SEQ ID NO: 2425236
uuaucucauagcugccucc

SEQ ID NO: 2425238 - RNA, 19 nt, Artificial Sequence
  Description of Artificial Sequence: Synthetic oligonucleotide
  Sense strand starting at position 1315 of SEQ ID NO: 1886762
gcagcuaugagauaagggu

SEQ ID NO: 2425239 - RNA, 19 nt, Artificial Sequence
  Description of Artificial Sequence: Synthetic oligonucleotide
  Antisense strand to SEQ ID NO: 2425238
acccuuaucucauagcugc

SEQ ID NO: 2425240 - RNA, 19 nt, Artificial Sequence
  Description of Artificial Sequence: Synthetic oligonucleotide
  Sense strand starting at position 1591 of SEQ ID NO: 1886762
agaggauccucagucucau

SEQ ID NO: 2425241 - RNA, 19 nt, Artificial Sequence
  Description of Artificial Sequence: Synthetic oligonucleotide
  Antisense strand to SEQ ID NO: 2425240
augagacugaggauccucu

SEQ ID NO: 2425242 - RNA, 19 nt, Artificial Sequence
  Description of Artificial Sequence: Synthetic oligonucleotide
  Sense strand starting at position 2074 of SEQ ID NO: 1886762
gcauuuaugcugugacaga

SEQ ID NO: 2425243 - RNA, 19 nt, Artificial Sequence
  Description of Artificial Sequence: Synthetic oligonucleotide
  Antisense strand to SEQ ID NO: 2425242
ucugucacagcauaaaugc

SEQ ID NO: 2425244 - RNA, 19 nt, Artificial Sequence
  Description of Artificial Sequence: Synthetic oligonucleotide
  Sense strand starting at position 2075 of SEQ ID NO: 1886762
cauuuaugcugugacagag

SEQ ID NO: 2425245 - RNA, 19 nt, Artificial Sequence
  Description of Artificial Sequence: Synthetic oligonucleotide
  Antisense strand to SEQ ID NO: 2425244
cucugucacagcauaaaug

SEQ ID NO: 2425246 - RNA, 19 nt, Artificial Sequence
  Description of Artificial Sequence: Synthetic oligonucleotide
  Sense strand starting at position 2305 of SEQ ID NO: 1886762
ggagucgcucuguauugga

SEQ ID NO: 2425247 - RNA, 19 nt, Artificial Sequence
  Description of Artificial Sequence: Synthetic oligonucleotide
  Antisense strand to SEQ ID NO: 2425246
uccaauacagagcgacucc

SEQ ID NO: 2425248 - RNA, 19 nt, Artificial Sequence
  Description of Artificial Sequence: Synthetic oligonucleotide
  Sense strand starting at position 2349 of SEQ ID NO: 1886762
cuggucugccaucaaguaa

SEQ ID NO: 2425249 - RNA, 19 nt, Artificial Sequence
  Description of Artificial Sequence: Synthetic oligonucleotide
  Antisense strand to SEQ ID NO: 2425248
uuacuugauggcagaccag

SEQ ID NO: 2425250 - RNA, 19 nt, Artificial Sequence
  Description of Artificial Sequence: Synthetic oligonucleotide
  Sense strand starting at position 2526 of SEQ ID NO: 1886762
gggaauugcggcuguguau

SEQ ID NO: 2425251 - RNA, 19 nt, Artificial Sequence
  Description of Artificial Sequence: Synthetic oligonucleotide
  Antisense strand to SEQ ID NO: 2425250
auacacagccgcaauuccc

SEQ ID NO: 2425252 - RNA, 19 nt, Artificial Sequence
  Description of Artificial Sequence: Synthetic oligonucleotide
  Sense strand starting at position 2899 of SEQ ID NO: 1886762
uugaguggugcugggcaua

SEQ ID NO: 2425253 - RNA, 19 nt, Artificial Sequence
  Description of Artificial Sequence: Synthetic oligonucleotide
  Antisense strand to SEQ ID NO: 2425252
uaugcccagcaccacucaa

SEQ ID NO: 2425254 - RNA, 19 nt, Artificial Sequence
  Description of Artificial Sequence: Synthetic oligonucleotide
  Sense strand starting at position 3024 of SEQ ID NO: 1886762
gugcuugucacuugcagaa

SEQ ID NO: 2425255 - RNA, 19 nt, Artificial Sequence
  Description of Artificial Sequence: Synthetic oligonucleotide
  Antisense strand to SEQ ID NO: 2425254
uucugcaagugacaagcac

SEQ ID NO: 2425256 - RNA, 19 nt, Artificial Sequence
  Description of Artificial Sequence: Synthetic oligonucleotide
  Sense strand starting at position 3101 of SEQ ID NO: 1886762
auuuguguguugggaccau

SEQ ID NO: 2425257 - RNA, 19 nt, Artificial Sequence
  Description of Artificial Sequence: Synthetic oligonucleotide
  Antisense strand to SEQ ID NO: 2425256
auggucccaacacacaaau

SEQ ID NO: 2425258 - RNA, 19 nt, Artificial Sequence
  Description of Artificial Sequence: Synthetic oligonucleotide
  Sense strand starting at position 3386 of SEQ ID NO: 1886762
ccuggaugcugccuggauu

SEQ ID NO: 2425259 - RNA, 19 nt, Artificial Sequence
  Description of Artificial Sequence: Synthetic oligonucleotide
  Antisense strand to SEQ ID NO: 2425258
aauccaggcagcauccagg

SEQ ID NO: 2425260 - RNA, 19 nt, Artificial Sequence
  Description of Artificial Sequence: Synthetic oligonucleotide
  Sense strand starting at position 3387 of SEQ ID NO: 1886762
cuggaugcugccuggauuu

SEQ ID NO: 2425261 - RNA, 19 nt, Artificial Sequence
  Description of Artificial Sequence: Synthetic oligonucleotide
  Antisense strand to SEQ ID NO: 2425260
aaauccaggcagcauccag

SEQ ID NO: 2425262 - RNA, 19 nt, Artificial Sequence
  Description of Artificial Sequence: Synthetic oligonucleotide
  Sense strand starting at position 3400 of SEQ ID NO: 1886762
ggauuugucugccaccuac

SEQ ID NO: 2425263 - RNA, 19 nt, Artificial Sequence
  Description of Artificial Sequence: Synthetic oligonucleotide
  Antisense strand to SEQ ID NO: 2425262
guagguggcagacaaaucc

SEQ ID NO: 2425264 - RNA, 19 nt, Artificial Sequence
  Description of Artificial Sequence: Synthetic oligonucleotide
  Sense strand starting at position 3441 of SEQ ID NO: 1886762
accuacuagccugaugaca

SEQ ID NO: 2425265 - RNA, 19 nt, Artificial Sequence
  Description of Artificial Sequence: Synthetic oligonucleotide
  Antisense strand to SEQ ID NO: 2425264
ugucaucaggcuaguaggu

SEQ ID NO: 2425266 - RNA, 19 nt, Artificial Sequence
  Description of Artificial Sequence: Synthetic oligonucleotide
  Sense strand starting at position 3454 of SEQ ID NO: 1886762
augacaauguugccugaca

SEQ ID NO: 2425267 - RNA, 19 nt, Artificial Sequence
  Description of Artificial Sequence: Synthetic oligonucleotide
  Antisense strand to SEQ ID NO: 2425266
ugucaggcaacauugucau

SEQ ID NO: 2425268 - RNA, 19 nt, Artificial Sequence
  Description of Artificial Sequence: Synthetic oligonucleotide
  Sense strand starting at position 3455 of SEQ ID NO: 1886762
ugacaauguugccugacau

SEQ ID NO: 2425269 - RNA, 19 nt, Artificial Sequence
  Description of Artificial Sequence: Synthetic oligonucleotide
  Antisense strand to SEQ ID NO: 2425268
augucaggcaacauuguca

SEQ ID NO: 2425270 - RNA, 19 nt, Artificial Sequence
  Description of Artificial Sequence: Synthetic oligonucleotide
  Sense strand starting at position 3456 of SEQ ID NO: 1886762
gacaauguugccugacaug

SEQ ID NO: 2425271 - RNA, 19 nt, Artificial Sequence
  Description of Artificial Sequence: Synthetic oligonucleotide
  Antisense strand to SEQ ID NO: 2425270
caugucaggcaacauuguc

SEQ ID NO: 2425272 - RNA, 19 nt, Artificial Sequence
  Description of Artificial Sequence: Synthetic oligonucleotide
  Sense strand starting at position 3806 of SEQ ID NO: 1886762
gucgcagagcuccucuuua

SEQ ID NO: 2425273 - RNA, 19 nt, Artificial Sequence
  Description of Artificial Sequence: Synthetic oligonucleotide
  Antisense strand to SEQ ID NO: 2425272
uaaagaggagcucugcgac

SEQ ID NO: 2425274 - RNA, 19 nt, Artificial Sequence
  Description of Artificial Sequence: Synthetic oligonucleotide
  Sense strand starting at position 47 of SEQ ID NO: 1886763
aauuguagugcguggagau

SEQ ID NO: 2425275 - RNA, 19 nt, Artificial Sequence
  Description of Artificial Sequence: Synthetic oligonucleotide
  Antisense strand to SEQ ID NO: 2425274
aucuccacgcacuacaauu

SEQ ID NO: 2425276 - RNA, 19 nt, Artificial Sequence
  Description of Artificial Sequence: Synthetic oligonucleotide
  Sense strand starting at position 246 of SEQ ID NO: 1886763
ggcauuaaaugugcugacu

SEQ ID NO: 2425277 - RNA, 19 nt, Artificial Sequence
  Description of Artificial Sequence: Synthetic oligonucleotide
  Antisense strand to SEQ ID NO: 2425276
agucagcacauuuaaugcc

SEQ ID NO: 2425278 - RNA, 19 nt, Artificial Sequence
  Description of Artificial Sequence: Synthetic oligonucleotide
  Sense strand starting at position 400 of SEQ ID NO: 1886763
agaagcaccguccauagau

SEQ ID NO: 2425279 - RNA, 19 nt, Artificial Sequence
  Description of Artificial Sequence: Synthetic oligonucleotide
  Antisense strand to SEQ ID NO: 2425278
aucuauggacggugcuucu

SEQ ID NO: 2425280 - RNA, 19 nt, Artificial Sequence
  Description of Artificial Sequence: Synthetic oligonucleotide
  Sense strand starting at position 408 of SEQ ID NO: 1886763
cguccauagaugcagaguu

SEQ ID NO: 2425281 - RNA, 19 nt, Artificial Sequence
  Description of Artificial Sequence: Synthetic oligonucleotide
  Antisense strand to SEQ ID NO: 2425280
aacucugcaucuauggacg

SEQ ID NO: 2425282 - RNA, 19 nt, Artificial Sequence
  Description of Artificial Sequence: Synthetic oligonucleotide
  Sense strand starting at position 492 of SEQ ID NO: 1886763
ggcucuagcaucugagaua

SEQ ID NO: 2425283 - RNA, 19 nt, Artificial Sequence
  Description of Artificial Sequence: Synthetic oligonucleotide
  Antisense strand to SEQ ID NO: 2425282
uaucucagaugcuagagcc

SEQ ID NO: 2425284 - RNA, 19 nt, Artificial Sequence
  Description of Artificial Sequence: Synthetic oligonucleotide
  Sense strand starting at position 495 of SEQ ID NO: 1886763
ucuagcaucugagauaagu

SEQ ID NO: 2425285 - RNA, 19 nt, Artificial Sequence
  Description of Artificial Sequence: Synthetic oligonucleotide
  Antisense strand to SEQ ID NO: 2425284
acuuaucucagaugcuaga

SEQ ID NO: 2425286 - RNA, 19 nt, Artificial Sequence
  Description of Artificial Sequence: Synthetic oligonucleotide
  Sense strand starting at position 1079 of SEQ ID NO: 1886763
accugaguugguuaggaca

SEQ ID NO: 2425287 - RNA, 19 nt, Artificial Sequence
  Description of Artificial Sequence: Synthetic oligonucleotide
  Antisense strand to SEQ ID NO: 2425286
uguccuaaccaacucaggu

SEQ ID NO: 2425288 - RNA, 19 nt, Artificial Sequence
  Description of Artificial Sequence: Synthetic oligonucleotide
  Sense strand starting at position 1127 of SEQ ID NO: 1886763
agcggugggucuagauaug

SEQ ID NO: 2425289 - RNA, 19 nt, Artificial Sequence
  Description of Artificial Sequence: Synthetic oligonucleotide
  Antisense strand to SEQ ID NO: 2425288
cauaucuagacccaccgcu

SEQ ID NO: 2425290 - RNA, 19 nt, Artificial Sequence
  Description of Artificial Sequence: Synthetic oligonucleotide
  Sense strand starting at position 1128 of SEQ ID NO: 1886763
gcggugggucuagauauga

SEQ ID NO: 2425291 - RNA, 19 nt, Artificial Sequence
  Description of Artificial Sequence: Synthetic oligonucleotide
  Antisense strand to SEQ ID NO: 2425290
ucauaucuagacccaccgc

SEQ ID NO: 2425292 - RNA, 19 nt, Artificial Sequence
  Description of Artificial Sequence: Synthetic oligonucleotide
  Sense strand starting at position 1132 of SEQ ID NO: 1886763
ugggucuagauaugaacuu

SEQ ID NO: 2425293 - RNA, 19 nt, Artificial Sequence
  Description of Artificial Sequence: Synthetic oligonucleotide
  Antisense strand to SEQ ID NO: 2425292
aaguucauaucuagaccca

SEQ ID NO: 2425294 - RNA, 19 nt, Artificial Sequence
  Description of Artificial Sequence: Synthetic oligonucleotide
  Sense strand starting at position 1266 of SEQ ID NO: 1886763
acuuuaaggugcuuauuau

SEQ ID NO: 2425295 - RNA, 19 nt, Artificial Sequence
  Description of Artificial Sequence: Synthetic oligonucleotide
  Antisense strand to SEQ ID NO: 2425294
auaauaagcaccuuaaagu

SEQ ID NO: 2425296 - RNA, 19 nt, Artificial Sequence
  Description of Artificial Sequence: Synthetic oligonucleotide
  Sense strand starting at position 1267 of SEQ ID NO: 1886763
cuuuaaggugcuuauuauu

SEQ ID NO: 2425297 - RNA, 19 nt, Artificial Sequence
  Description of Artificial Sequence: Synthetic oligonucleotide
  Antisense strand to SEQ ID NO: 2425296
aauaauaagcaccuuaaag

SEQ ID NO: 2425298 - RNA, 19 nt, Artificial Sequence
  Description of Artificial Sequence: Synthetic oligonucleotide
  Sense strand starting at position 1633 of SEQ ID NO: 1886763
gggauaucgucucccaaca

SEQ ID NO: 2425299 - RNA, 19 nt, Artificial Sequence
  Description of Artificial Sequence: Synthetic oligonucleotide
  Antisense strand to SEQ ID NO: 2425298
uguugggagacgauauccc

SEQ ID NO: 2425300 - RNA, 19 nt, Artificial Sequence
  Description of Artificial Sequence: Synthetic oligonucleotide
  Sense strand starting at position 1724 of SEQ ID NO: 1886763
cucccagaaugcucugcau

SEQ ID NO: 2425301 - RNA, 19 nt, Artificial Sequence
  Description of Artificial Sequence: Synthetic oligonucleotide
  Antisense strand to SEQ ID NO: 2425300
augcagagcauucugggag

SEQ ID NO: 2425302 - RNA, 19 nt, Artificial Sequence
  Description of Artificial Sequence: Synthetic oligonucleotide
  Sense strand starting at position 1727 of SEQ ID NO: 1886763
ccagaaugcucugcaucga

SEQ ID NO: 2425303 - RNA, 19 nt, Artificial Sequence
  Description of Artificial Sequence: Synthetic oligonucleotide
  Antisense strand to SEQ ID NO: 2425302
ucgaugcagagcauucugg

SEQ ID NO: 2425304 - RNA, 19 nt, Artificial Sequence
  Description of Artificial Sequence: Synthetic oligonucleotide
  Sense strand starting at position 2797 of SEQ ID NO: 1886763
cuucgugggccggauuuaa

SEQ ID NO: 2425305 - RNA, 19 nt, Artificial Sequence
  Description of Artificial Sequence: Synthetic oligonucleotide
  Antisense strand to SEQ ID NO: 2425304
uuaaauccggcccacgaag

SEQ ID NO: 2425306 - RNA, 19 nt, Artificial Sequence
  Description of Artificial Sequence: Synthetic oligonucleotide
  Sense strand starting at position 2836 of SEQ ID NO: 1886763
aucagccuuugaguuguua

SEQ ID NO: 2425307 - RNA, 19 nt, Artificial Sequence
  Description of Artificial Sequence: Synthetic oligonucleotide
  Antisense strand to SEQ ID NO: 2425306
uaacaacucaaaggcugau

SEQ ID NO: 2425308 - RNA, 19 nt, Artificial Sequence
  Description of Artificial Sequence: Synthetic oligonucleotide
  Sense strand starting at position 2895 of SEQ ID NO: 1886763
agugaacguguucaguuua

SEQ ID NO: 2425309 - RNA, 19 nt, Artificial Sequence
  Description of Artificial Sequence: Synthetic oligonucleotide
  Antisense strand to SEQ ID NO: 2425308
uaaacugaacacguucacu

SEQ ID NO: 2425310 - RNA, 19 nt, Artificial Sequence
  Description of Artificial Sequence: Synthetic oligonucleotide
  Sense strand starting at position 2908 of SEQ ID NO: 1886763
aguuuacauuuguaaggua

SEQ ID NO: 2425311 - RNA, 19 nt, Artificial Sequence
  Description of Artificial Sequence: Synthetic oligonucleotide
  Antisense strand to SEQ ID NO: 2425310
uaccuuacaaauguaaacu

SEQ ID NO: 2425312 - RNA, 19 nt, Artificial Sequence
  Description of Artificial Sequence: Synthetic oligonucleotide
  Sense strand starting at position 2911 of SEQ ID NO: 1886763
uuacauuuguaagguagac

SEQ ID NO: 2425313 - RNA, 19 nt, Artificial Sequence
  Description of Artificial Sequence: Synthetic oligonucleotide
  Antisense strand to SEQ ID NO: 2425312
gucuaccuuacaaauguaa

SEQ ID NO: 2425314 - RNA, 19 nt, Artificial Sequence
  Description of Artificial Sequence: Synthetic oligonucleotide
  Sense strand starting at position 2962 of SEQ ID NO: 1886763
ucccgagaauucguguuca

SEQ ID NO: 2425315 - RNA, 19 nt, Artificial Sequence
  Description of Artificial Sequence: Synthetic oligonucleotide
  Antisense strand to SEQ ID NO: 2425314
ugaacacgaauucucggga

SEQ ID NO: 2425316 - RNA, 19 nt, Artificial Sequence
  Description of Artificial Sequence: Synthetic oligonucleotide
  Sense strand starting at position 2996 of SEQ ID NO: 1886763
uggagaccuucguugggaa

SEQ ID NO: 2425317 - RNA, 19 nt, Artificial Sequence
  Description of Artificial Sequence: Synthetic oligonucleotide
  Antisense strand to SEQ ID NO: 2425316
uucccaacgaaggucucca

SEQ ID NO: 2425318 - RNA, 19 nt, Artificial Sequence
  Description of Artificial Sequence: Synthetic oligonucleotide
  Sense strand starting at position 2998 of SEQ ID NO: 1886763
gagaccuucguugggaaga

SEQ ID NO: 2425319 - RNA, 19 nt, Artificial Sequence
  Description of Artificial Sequence: Synthetic oligonucleotide
  Antisense strand to SEQ ID NO: 2425318
ucuucccaacgaaggucuc

SEQ ID NO: 2425320 - RNA, 19 nt, Artificial Sequence
  Description of Artificial Sequence: Synthetic oligonucleotide
  Sense strand starting at position 3000 of SEQ ID NO: 1886763
gaccuucguugggaagaaa

SEQ ID NO: 2425321 - RNA, 19 nt, Artificial Sequence
  Description of Artificial Sequence: Synthetic oligonucleotide
  Antisense strand to SEQ ID NO: 2425320
uuucuucccaacgaagguc

SEQ ID NO: 2425322 - RNA, 19 nt, Artificial Sequence
  Description of Artificial Sequence: Synthetic oligonucleotide
  Sense strand starting at position 3019 of SEQ ID NO: 1886763
acgccagacucauauauaa

SEQ ID NO: 2425323 - RNA, 19 nt, Artificial Sequence
  Description of Artificial Sequence: Synthetic oligonucleotide
  Antisense strand to SEQ ID NO: 2425322
uuauauaugagucuggcgu

SEQ ID NO: 2425324 - RNA, 19 nt, Artificial Sequence
  Description of Artificial Sequence: Synthetic oligonucleotide
  Sense strand starting at position 3055 of SEQ ID NO: 1886763
aggcguucuuuggcacaca

SEQ ID NO: 2425325 - RNA, 19 nt, Artificial Sequence
  Description of Artificial Sequence: Synthetic oligonucleotide
  Antisense strand to SEQ ID NO: 2425324
ugugugccaaagaacgccu

SEQ ID NO: 2425326 - RNA, 19 nt, Artificial Sequence
  Description of Artificial Sequence: Synthetic oligonucleotide
  Sense strand starting at position 3133 of SEQ ID NO: 1886763
cagaguguuguguugucuu

SEQ ID NO: 2425327 - RNA, 19 nt, Artificial Sequence
  Description of Artificial Sequence: Synthetic oligonucleotide
  Antisense strand to SEQ ID NO: 2425326
aagacaacacaacacucug

SEQ ID NO: 2425328 - RNA, 19 nt, Artificial Sequence
  Description of Artificial Sequence: Synthetic oligonucleotide
  Sense strand starting at position 3207 of SEQ ID NO: 1886763
gguucuuuguguccacuca

SEQ ID NO: 2425329 - RNA, 19 nt, Artificial Sequence
  Description of Artificial Sequence: Synthetic oligonucleotide
  Antisense strand to SEQ ID NO: 2425328
ugaguggacacaaagaacc

SEQ ID NO: 2425330 - RNA, 19 nt, Artificial Sequence
  Description of Artificial Sequence: Synthetic oligonucleotide
  Sense strand starting at position 3381 of SEQ ID NO: 1886763
agcuuaccacucggauaau

SEQ ID NO: 2425331 - RNA, 19 nt, Artificial Sequence
  Description of Artificial Sequence: Synthetic oligonucleotide
  Antisense strand to SEQ ID NO: 2425330
auuauccgagugguaagcu

SEQ ID NO: 2425332 - RNA, 19 nt, Artificial Sequence
  Description of Artificial Sequence: Synthetic oligonucleotide
  Sense strand starting at position 3392 of SEQ ID NO: 1886763
cggauaauuucccaacaga

SEQ ID NO: 2425333 - RNA, 19 nt, Artificial Sequence
  Description of Artificial Sequence: Synthetic oligonucleotide
  Antisense strand to SEQ ID NO: 2425332
ucuguugggaaauuauccg

SEQ ID NO: 2425334 - RNA, 19 nt, Artificial Sequence
  Description of Artificial Sequence: Synthetic oligonucleotide
  Sense strand starting at position 3470 of SEQ ID NO: 1886763
uugcauauccacugucuau

SEQ ID NO: 2425335 - RNA, 19 nt, Artificial Sequence
  Description of Artificial Sequence: Synthetic oligonucleotide
  Antisense strand to SEQ ID NO: 2425334
auagacaguggauaugcaa

SEQ ID NO: 2425336 - RNA, 19 nt, Artificial Sequence
  Description of Artificial Sequence: Synthetic oligonucleotide
  Sense strand starting at position 3507 of SEQ ID NO: 1886763
uuuguaauaucguuugguu

SEQ ID NO: 2425337 - RNA, 19 nt, Artificial Sequence
  Description of Artificial Sequence: Synthetic oligonucleotide
  Antisense strand to SEQ ID NO: 2425336
aaccaaacgauauuacaaa

SEQ ID NO: 2425338 - RNA, 19 nt, Artificial Sequence
  Description of Artificial Sequence: Synthetic oligonucleotide
  Sense strand starting at position 3509 of SEQ ID NO: 1886763
uguaauaucguuugguuug

SEQ ID NO: 2425339 - RNA, 19 nt, Artificial Sequence
  Description of Artificial Sequence: Synthetic oligonucleotide
  Antisense strand to SEQ ID NO: 2425338
caaaccaaacgauauuaca

SEQ ID NO: 2425340 - RNA, 19 nt, Artificial Sequence
  Description of Artificial Sequence: Synthetic oligonucleotide
  Sense strand starting at position 3514 of SEQ ID NO: 1886763
uaucguuugguuuggugau

SEQ ID NO: 2425341 - RNA, 19 nt, Artificial Sequence
  Description of Artificial Sequence: Synthetic oligonucleotide
  Antisense strand to SEQ ID NO: 2425340
aucaccaaaccaaacgaua

SEQ ID NO: 2425342 - RNA, 19 nt, Artificial Sequence
  Description of Artificial Sequence: Synthetic oligonucleotide
  Sense strand starting at position 3516 of SEQ ID NO: 1886763
ucguuugguuuggugauuu

SEQ ID NO: 2425343 - RNA, 19 nt, Artificial Sequence
  Description of Artificial Sequence: Synthetic oligonucleotide
  Antisense strand to SEQ ID NO: 2425342
aaaucaccaaaccaaacga

SEQ ID NO: 2425344 - RNA, 19 nt, Artificial Sequence
  Description of Artificial Sequence: Synthetic oligonucleotide
  Sense strand starting at position 3540 of SEQ ID NO: 1886763
ugguguugaucuuccuacu

SEQ ID NO: 2425345 - RNA, 19 nt, Artificial Sequence
  Description of Artificial Sequence: Synthetic oligonucleotide
  Antisense strand to SEQ ID NO: 2425344
aguaggaagaucaacacca

SEQ ID NO: 2425346 - RNA, 19 nt, Artificial Sequence
  Description of Artificial Sequence: Synthetic oligonucleotide
  Sense strand starting at position 3552 of SEQ ID NO: 1886763
uccuacuuucugugucuua

SEQ ID NO: 2425347 - RNA, 19 nt, Artificial Sequence
  Description of Artificial Sequence: Synthetic oligonucleotide
  Antisense strand to SEQ ID NO: 2425346
uaagacacagaaaguagga

SEQ ID NO: 2425348 - RNA, 19 nt, Artificial Sequence
  Description of Artificial Sequence: Synthetic oligonucleotide
  Sense strand starting at position 3647 of SEQ ID NO: 1886763
ccgaaacauugugaccuaa

SEQ ID NO: 2425349 - RNA, 19 nt, Artificial Sequence
  Description of Artificial Sequence: Synthetic oligonucleotide
  Antisense strand to SEQ ID NO: 2425348
uuaggucacaauguuucgg

SEQ ID NO: 2425350 - RNA, 19 nt, Artificial Sequence
  Description of Artificial Sequence: Synthetic oligonucleotide
  Sense strand starting at position 3815 of SEQ ID NO: 1886763
ucuggaguugcugagauua

SEQ ID NO: 2425351 - RNA, 19 nt, Artificial Sequence
  Description of Artificial Sequence: Synthetic oligonucleotide
  Antisense strand to SEQ ID NO: 2425350
uaaucucagcaacuccaga

SEQ ID NO: 2425352 - RNA, 19 nt, Artificial Sequence
  Description of Artificial Sequence: Synthetic oligonucleotide
  Sense strand starting at position 3817 of SEQ ID NO: 1886763
uggaguugcugagauuaca

SEQ ID NO: 2425353 - RNA, 19 nt, Artificial Sequence
  Description of Artificial Sequence: Synthetic oligonucleotide
  Antisense strand to SEQ ID NO: 2425352
uguaaucucagcaacucca

SEQ ID NO: 2425354 - RNA, 19 nt, Artificial Sequence
  Description of Artificial Sequence: Synthetic oligonucleotide
  Sense strand starting at position 157 of SEQ ID NO: 1886764
guaccuguuugcucguuau

SEQ ID NO: 2425355 - RNA, 19 nt, Artificial Sequence
  Description of Artificial Sequence: Synthetic oligonucleotide
  Antisense strand to SEQ ID NO: 2425354
auaacgagcaaacagguac

SEQ ID NO: 2425356 - RNA, 19 nt, Artificial Sequence
  Description of Artificial Sequence: Synthetic oligonucleotide
  Sense strand starting at position 178 of SEQ ID NO: 1886764
uuaucucccugagauggau

SEQ ID NO: 2425357 - RNA, 19 nt, Artificial Sequence
  Description of Artificial Sequence: Synthetic oligonucleotide
  Antisense strand to SEQ ID NO: 2425356
auccaucucagggagauaa

SEQ ID NO: 2425358 - RNA, 19 nt, Artificial Sequence
  Description of Artificial Sequence: Synthetic oligonucleotide
  Sense strand starting at position 230 of SEQ ID NO: 1886764
ucguauuucuuaguguguu

SEQ ID NO: 2425359 - RNA, 19 nt, Artificial Sequence
  Description of Artificial Sequence: Synthetic oligonucleotide
  Antisense strand to SEQ ID NO: 2425358
aacacacuaagaaauacga

SEQ ID NO: 2425360 - RNA, 19 nt, Artificial Sequence
  Description of Artificial Sequence: Synthetic oligonucleotide
  Sense strand starting at position 231 of SEQ ID NO: 1886764
cguauuucuuaguguguuu

SEQ ID NO: 2425361 - RNA, 19 nt, Artificial Sequence
  Description of Artificial Sequence: Synthetic oligonucleotide
  Antisense strand to SEQ ID NO: 2425360
aaacacacuaagaaauacg

SEQ ID NO: 2425362 - RNA, 19 nt, Artificial Sequence
  Description of Artificial Sequence: Synthetic oligonucleotide
  Sense strand starting at position 242 of SEQ ID NO: 1886764
guguguuugggccaugcga

SEQ ID NO: 2425363 - RNA, 19 nt, Artificial Sequence
  Description of Artificial Sequence: Synthetic oligonucleotide
  Antisense strand to SEQ ID NO: 2425362
ucgcauggcccaaacacac

SEQ ID NO: 2425364 - RNA, 19 nt, Artificial Sequence
  Description of Artificial Sequence: Synthetic oligonucleotide
  Sense strand starting at position 268 of SEQ ID NO: 1886764
gauguugauuucuagguuu

SEQ ID NO: 2425365 - RNA, 19 nt, Artificial Sequence
  Description of Artificial Sequence: Synthetic oligonucleotide
  Antisense strand to SEQ ID NO: 2425364
aaaccuagaaaucaacauc

SEQ ID NO: 2425366 - RNA, 19 nt, Artificial Sequence
  Description of Artificial Sequence: Synthetic oligonucleotide
  Sense strand starting at position 271 of SEQ ID NO: 1886764
guugauuucuagguuuguu

SEQ ID NO: 2425367 - RNA, 19 nt, Artificial Sequence
  Description of Artificial Sequence: Synthetic oligonucleotide
  Antisense strand to SEQ ID NO: 2425366
aacaaaccuagaaaucaac

SEQ ID NO: 2425368 - RNA, 19 nt, Artificial Sequence
  Description of Artificial Sequence: Synthetic oligonucleotide
  Sense strand starting at position 358 of SEQ ID NO: 1886764
uuccuugucuaccagauuu

SEQ ID NO: 2425369 - RNA, 19 nt, Artificial Sequence
  Description of Artificial Sequence: Synthetic oligonucleotide
  Antisense strand to SEQ ID NO: 2425368
aaaucugguagacaaggaa

SEQ ID NO: 2425370 - RNA, 19 nt, Artificial Sequence
  Description of Artificial Sequence: Synthetic oligonucleotide
  Sense strand starting at position 1379 of SEQ ID NO: 1886764
gugguuuguguguuugcuu

SEQ ID NO: 2425371 - RNA, 19 nt, Artificial Sequence
  Description of Artificial Sequence: Synthetic oligonucleotide
  Antisense strand to SEQ ID NO: 2425370
aagcaaacacacaaaccac

SEQ ID NO: 2425372 - RNA, 19 nt, Artificial Sequence
  Description of Artificial Sequence: Synthetic oligonucleotide
  Sense strand starting at position 1386 of SEQ ID NO: 1886764
guguguuugcuucucugca

SEQ ID NO: 2425373 - RNA, 19 nt, Artificial Sequence
  Description of Artificial Sequence: Synthetic oligonucleotide
  Antisense strand to SEQ ID NO: 2425372
ugcagagaagcaaacacac

SEQ ID NO: 2425374 - RNA, 19 nt, Artificial Sequence
  Description of Artificial Sequence: Synthetic oligonucleotide
  Sense strand starting at position 1457 of SEQ ID NO: 1886764
uggguuuacagaugucugu

SEQ ID NO: 2425375 - RNA, 19 nt, Artificial Sequence
  Description of Artificial Sequence: Synthetic oligonucleotide
  Antisense strand to SEQ ID NO: 2425374
acagacaucuguaaaccca

SEQ ID NO: 2425376 - RNA, 19 nt, Artificial Sequence
  Description of Artificial Sequence: Synthetic oligonucleotide
  Sense strand starting at position 1460 of SEQ ID NO: 1886764
guuuacagaugucugucau

SEQ ID NO: 2425377 - RNA, 19 nt, Artificial Sequence
  Description of Artificial Sequence: Synthetic oligonucleotide
  Antisense strand to SEQ ID NO: 2425376
augacagacaucuguaaac

SEQ ID NO: 2425378 - RNA, 19 nt, Artificial Sequence
  Description of Artificial Sequence: Synthetic oligonucleotide
  Sense strand starting at position 1461 of SEQ ID NO: 1886764
uuuacagaugucugucauu

SEQ ID NO: 2425379 - RNA, 19 nt, Artificial Sequence
  Description of Artificial Sequence: Synthetic oligonucleotide
  Antisense strand to SEQ ID NO: 2425378
aaugacagacaucuguaaa

SEQ ID NO: 2425380 - RNA, 19 nt, Artificial Sequence
  Description of Artificial Sequence: Synthetic oligonucleotide
  Sense strand starting at position 1464 of SEQ ID NO: 1886764
acagaugucugucauugcu

SEQ ID NO: 2425381 - RNA, 19 nt, Artificial Sequence
  Description of Artificial Sequence: Synthetic oligonucleotide
  Antisense strand to SEQ ID NO: 2425380
agcaaugacagacaucugu

SEQ ID NO: 2425382 - RNA, 19 nt, Artificial Sequence
  Description of Artificial Sequence: Synthetic oligonucleotide
  Sense strand starting at position 1466 of SEQ ID NO: 1886764
agaugucugucauugcugu

SEQ ID NO: 2425383 - RNA, 19 nt, Artificial Sequence
  Description of Artificial Sequence: Synthetic oligonucleotide
  Antisense strand to SEQ ID NO: 2425382
acagcaaugacagacaucu

SEQ ID NO: 2425384 - RNA, 19 nt, Artificial Sequence
  Description of Artificial Sequence: Synthetic oligonucleotide
  Sense strand starting at position 1946 of SEQ ID NO: 1886764
caauuugcuuaacgugauu

SEQ ID NO: 2425385 - RNA, 19 nt, Artificial Sequence
  Description of Artificial Sequence: Synthetic oligonucleotide
  Antisense strand to SEQ ID NO: 2425384
aaucacguuaagcaaauug

SEQ ID NO: 2425386 - RNA, 19 nt, Artificial Sequence
  Description of Artificial Sequence: Synthetic oligonucleotide
  Sense strand starting at position 1955 of SEQ ID NO: 1886764
uaacgugauucccggccaa

SEQ ID NO: 2425387 - RNA, 19 nt, Artificial Sequence
  Description of Artificial Sequence: Synthetic oligonucleotide
  Antisense strand to SEQ ID NO: 2425386
uuggccgggaaucacguua

SEQ ID NO: 2425388 - RNA, 19 nt, Artificial Sequence
  Description of Artificial Sequence: Synthetic oligonucleotide
  Sense strand starting at position 1977 of SEQ ID NO: 1886764
aaacaugacuaaucguguu

SEQ ID NO: 2425389 - RNA, 19 nt, Artificial Sequence
  Description of Artificial Sequence: Synthetic oligonucleotide
  Antisense strand to SEQ ID NO: 2425388
aacacgauuagucauguuu

SEQ ID NO: 2425390 - RNA, 19 nt, Artificial Sequence
  Description of Artificial Sequence: Synthetic oligonucleotide
  Sense strand starting at position 1980 of SEQ ID NO: 1886764
caugacuaaucguguuuac

SEQ ID NO: 2425391 - RNA, 19 nt, Artificial Sequence
  Description of Artificial Sequence: Synthetic oligonucleotide
  Antisense strand to SEQ ID NO: 2425390
guaaacacgauuagucaug

SEQ ID NO: 2425392 - RNA, 19 nt, Artificial Sequence
  Description of Artificial Sequence: Synthetic oligonucleotide
  Sense strand starting at position 1989 of SEQ ID NO: 1886764
ucguguuuacccggugauc

SEQ ID NO: 2425393 - RNA, 19 nt, Artificial Sequence
  Description of Artificial Sequence: Synthetic oligonucleotide
  Antisense strand to SEQ ID NO: 2425392
gaucaccggguaaacacga

SEQ ID NO: 2425394 - RNA, 19 nt, Artificial Sequence
  Description of Artificial Sequence: Synthetic oligonucleotide
  Sense strand starting at position 101 of SEQ ID NO: 1886766
ucagguauaccucacuuua

SEQ ID NO: 2425395 - RNA, 19 nt, Artificial Sequence
  Description of Artificial Sequence: Synthetic oligonucleotide
  Antisense strand to SEQ ID NO: 2425394
uaaagugagguauaccuga

SEQ ID NO: 2425396 - RNA, 19 nt, Artificial Sequence
  Description of Artificial Sequence: Synthetic oligonucleotide
  Sense strand starting at position 103 of SEQ ID NO: 1886766
agguauaccucacuuuaca

SEQ ID NO: 2425397 - RNA, 19 nt, Artificial Sequence
  Description of Artificial Sequence: Synthetic oligonucleotide
  Antisense strand to SEQ ID NO: 2425396
uguaaagugagguauaccu

SEQ ID NO: 2425398 - RNA, 19 nt, Artificial Sequence
  Description of Artificial Sequence: Synthetic oligonucleotide
  Sense strand starting at position 262 of SEQ ID NO: 1886766
uccuuuaauugaucgacuu

SEQ ID NO: 2425399 - RNA, 19 nt, Artificial Sequence
  Description of Artificial Sequence: Synthetic oligonucleotide
  Antisense strand to SEQ ID NO: 2425398
aagucgaucaauuaaagga

SEQ ID NO: 2425400 - RNA, 19 nt, Artificial Sequence
  Description of Artificial Sequence: Synthetic oligonucleotide
  Sense strand starting at position 263 of SEQ ID NO: 1886766
ccuuuaauugaucgacuug

SEQ ID NO: 2425401 - RNA, 19 nt, Artificial Sequence
  Description of Artificial Sequence: Synthetic oligonucleotide
  Antisense strand to SEQ ID NO: 2425400
caagucgaucaauuaaagg

SEQ ID NO: 2425402 - RNA, 19 nt, Artificial Sequence
  Description of Artificial Sequence: Synthetic oligonucleotide
  Sense strand starting at position 270 of SEQ ID NO: 1886766
uugaucgacuugccaaauu

SEQ ID NO: 2425403 - RNA, 19 nt, Artificial Sequence
  Description of Artificial Sequence: Synthetic oligonucleotide
  Antisense strand to SEQ ID NO: 2425402
aauuuggcaagucgaucaa

SEQ ID NO: 2425404 - RNA, 19 nt, Artificial Sequence
  Description of Artificial Sequence: Synthetic oligonucleotide
  Sense strand starting at position 285 of SEQ ID NO: 1886766
aauuuagauuugugugcau

SEQ ID NO: 2425405 - RNA, 19 nt, Artificial Sequence
  Description of Artificial Sequence: Synthetic oligonucleotide
  Antisense strand to SEQ ID NO: 2425404
augcacacaaaucuaaauu

SEQ ID NO: 2425406 - RNA, 19 nt, Artificial Sequence
  Description of Artificial Sequence: Synthetic oligonucleotide
  Sense strand starting at position 287 of SEQ ID NO: 1886766
uuuagauuugugugcauca

SEQ ID NO: 2425407 - RNA, 19 nt, Artificial Sequence
  Description of Artificial Sequence: Synthetic oligonucleotide
  Antisense strand to SEQ ID NO: 2425406
ugaugcacacaaaucuaaa

SEQ ID NO: 2425408 - RNA, 19 nt, Artificial Sequence
  Description of Artificial Sequence: Synthetic oligonucleotide
  Sense strand starting at position 288 of SEQ ID NO: 1886766
uuagauuugugugcaucag

SEQ ID NO: 2425409 - RNA, 19 nt, Artificial Sequence
  Description of Artificial Sequence: Synthetic oligonucleotide
  Antisense strand to SEQ ID NO: 2425408
cugaugcacacaaaucuaa

SEQ ID NO: 2425410 - RNA, 19 nt, Artificial Sequence
  Description of Artificial Sequence: Synthetic oligonucleotide
  Sense strand starting at position 661 of SEQ ID NO: 1886766
gcggcaucaggcuuucuua

SEQ ID NO: 2425411 - RNA, 19 nt, Artificial Sequence
  Description of Artificial Sequence: Synthetic oligonucleotide
  Antisense strand to SEQ ID NO: 2425410
uaagaaagccugaugccgc

SEQ ID NO: 2425412 - RNA, 19 nt, Artificial Sequence
  Description of Artificial Sequence: Synthetic oligonucleotide
  Sense strand starting at position 664 of SEQ ID NO: 1886766
gcaucaggcuuucuuaaag

SEQ ID NO: 2425413 - RNA, 19 nt, Artificial Sequence
  Description of Artificial Sequence: Synthetic oligonucleotide
  Antisense strand to SEQ ID NO: 2425412
cuuuaagaaagccugaugc

SEQ ID NO: 2425414 - RNA, 19 nt, Artificial Sequence
  Description of Artificial Sequence: Synthetic oligonucleotide
  Sense strand starting at position 729 of SEQ ID NO: 1886766
gaaauacuacuguguaagg

SEQ ID NO: 2425415 - RNA, 19 nt, Artificial Sequence
  Description of Artificial Sequence: Synthetic oligonucleotide
  Antisense strand to SEQ ID NO: 2425414
ccuuacacaguaguauuuc

SEQ ID NO: 2425416 - RNA, 19 nt, Artificial Sequence
  Description of Artificial Sequence: Synthetic oligonucleotide
  Sense strand starting at position 738 of SEQ ID NO: 1886766
cuguguaagggccagaaau

SEQ ID NO: 2425417 - RNA, 19 nt, Artificial Sequence
  Description of Artificial Sequence: Synthetic oligonucleotide
  Antisense strand to SEQ ID NO: 2425416
auuucuggcccuuacacag

SEQ ID NO: 2425418 - RNA, 19 nt, Artificial Sequence
  Description of Artificial Sequence: Synthetic oligonucleotide
  Sense strand starting at position 740 of SEQ ID NO: 1886766
guguaagggccagaaauau

SEQ ID NO: 2425419 - RNA, 19 nt, Artificial Sequence
  Description of Artificial Sequence: Synthetic oligonucleotide
  Antisense strand to SEQ ID NO: 2425418
auauuucuggcccuuacac

SEQ ID NO: 2425420 - RNA, 19 nt, Artificial Sequence
  Description of Artificial Sequence: Synthetic oligonucleotide
  Sense strand starting at position 882 of SEQ ID NO: 1886766
uugccaagggcauaaauua

SEQ ID NO: 2425421 - RNA, 19 nt, Artificial Sequence
  Description of Artificial Sequence: Synthetic oligonucleotide
  Antisense strand to SEQ ID NO: 2425420
uaauuuaugcccuuggcaa

SEQ ID NO: 2425422 - RNA, 19 nt, Artificial Sequence
  Description of Artificial Sequence: Synthetic oligonucleotide
  Sense strand starting at position 1277 of SEQ ID NO: 1886766
gugaaugagaaguguccua

SEQ ID NO: 2425423 - RNA, 19 nt, Artificial Sequence
  Description of Artificial Sequence: Synthetic oligonucleotide
  Antisense strand to SEQ ID NO: 2425422
uaggacacuucucauucac

SEQ ID NO: 2425424 - RNA, 19 nt, Artificial Sequence
  Description of Artificial Sequence: Synthetic oligonucleotide
  Sense strand starting at position 1284 of SEQ ID NO: 1886766
agaaguguccuagauguuu

SEQ ID NO: 2425425 - RNA, 19 nt, Artificial Sequence
  Description of Artificial Sequence: Synthetic oligonucleotide
  Antisense strand to SEQ ID NO: 2425424
aaacaucuaggacacuucu

SEQ ID NO: 2425426 - RNA, 19 nt, Artificial Sequence
  Description of Artificial Sequence: Synthetic oligonucleotide
  Sense strand starting at position 1338 of SEQ ID NO: 1886766
acaguugccuguuuaauuu

SEQ ID NO: 2425427 - RNA, 19 nt, Artificial Sequence
  Description of Artificial Sequence: Synthetic oligonucleotide
  Antisense strand to SEQ ID NO: 2425426
aaauuaaacaggcaacugu

SEQ ID NO: 2425428 - RNA, 19 nt, Artificial Sequence
  Description of Artificial Sequence: Synthetic oligonucleotide
  Sense strand starting at position 2018 of SEQ ID NO: 1886766
uuaucauuugcuggucaua

SEQ ID NO: 2425429 - RNA, 19 nt, Artificial Sequence
  Description of Artificial Sequence: Synthetic oligonucleotide
  Antisense strand to SEQ ID NO: 2425428
uaugaccagcaaaugauaa

SEQ ID NO: 2425430 - RNA, 19 nt, Artificial Sequence
  Description of Artificial Sequence: Synthetic oligonucleotide
  Sense strand starting at position 2020 of SEQ ID NO: 1886766
aucauuugcuggucauacu

SEQ ID NO: 2425431 - RNA, 19 nt, Artificial Sequence
  Description of Artificial Sequence: Synthetic oligonucleotide
  Antisense strand to SEQ ID NO: 2425430
aguaugaccagcaaaugau

SEQ ID NO: 2425432 - RNA, 19 nt, Artificial Sequence
  Description of Artificial Sequence: Synthetic oligonucleotide
  Sense strand starting at position 2045 of SEQ ID NO: 1886766
uuauacugugccuauguaa

SEQ ID NO: 2425433 - RNA, 19 nt, Artificial Sequence
  Description of Artificial Sequence: Synthetic oligonucleotide
  Antisense strand to SEQ ID NO: 2425432
uuacauaggcacaguauaa

SEQ ID NO: 2425434 - RNA, 19 nt, Artificial Sequence
  Description of Artificial Sequence: Synthetic oligonucleotide
  Sense strand starting at position 2186 of SEQ ID NO: 1886766
uccugagugucucuagaua

SEQ ID NO: 2425435 - RNA, 19 nt, Artificial Sequence
  Description of Artificial Sequence: Synthetic oligonucleotide
  Antisense strand to SEQ ID NO: 2425434
uaucuagagacacucagga

SEQ ID NO: 2425436 - RNA, 19 nt, Artificial Sequence
  Description of Artificial Sequence: Synthetic oligonucleotide
  Sense strand starting at position 2311 of SEQ ID NO: 1886766
gaagaaugcguguaaagau

SEQ ID NO: 2425437 - RNA, 19 nt, Artificial Sequence
  Description of Artificial Sequence: Synthetic oligonucleotide
  Antisense strand to SEQ ID NO: 2425436
aucuuuacacgcauucuuc

SEQ ID NO: 2425438 - RNA, 19 nt, Artificial Sequence
  Description of Artificial Sequence: Synthetic oligonucleotide
  Sense strand starting at position 2919 of SEQ ID NO: 1886766
cggccucugcguucucuua

SEQ ID NO: 2425439 - RNA, 19 nt, Artificial Sequence
  Description of Artificial Sequence: Synthetic oligonucleotide
  Antisense strand to SEQ ID NO: 2425438
uaagagaacgcagaggccg

SEQ ID NO: 2425440 - RNA, 19 nt, Artificial Sequence
  Description of Artificial Sequence: Synthetic oligonucleotide
  Sense strand starting at position 2929 of SEQ ID NO: 1886766
guucucuuaggauguuaca

SEQ ID NO: 2425441 - RNA, 19 nt, Artificial Sequence
  Description of Artificial Sequence: Synthetic oligonucleotide
  Antisense strand to SEQ ID NO: 2425440
uguaacauccuaagagaac

SEQ ID NO: 2425442 - RNA, 19 nt, Artificial Sequence
  Description of Artificial Sequence: Synthetic oligonucleotide
  Sense strand starting at position 3023 of SEQ ID NO: 1886766
ugggcucugacugguggaa

SEQ ID NO: 2425443 - RNA, 19 nt, Artificial Sequence
  Description of Artificial Sequence: Synthetic oligonucleotide
  Antisense strand to SEQ ID NO: 2425442
uuccaccagucagagccca

SEQ ID NO: 2425444 - RNA, 19 nt, Artificial Sequence
  Description of Artificial Sequence: Synthetic oligonucleotide
  Sense strand starting at position 3038 of SEQ ID NO: 1886766
ggaauuguuccaggaaguu

SEQ ID NO: 2425445 - RNA, 19 nt, Artificial Sequence
  Description of Artificial Sequence: Synthetic oligonucleotide
  Antisense strand to SEQ ID NO: 2425444
aacuuccuggaacaauucc

SEQ ID NO: 2425446 - RNA, 19 nt, Artificial Sequence
  Description of Artificial Sequence: Synthetic oligonucleotide
  Sense strand starting at position 3044 of SEQ ID NO: 1886766
guuccaggaaguugacaaa

SEQ ID NO: 2425447 - RNA, 19 nt, Artificial Sequence
  Description of Artificial Sequence: Synthetic oligonucleotide
  Antisense strand to SEQ ID NO: 2425446
uuugucaacuuccuggaac

SEQ ID NO: 2425448 - RNA, 19 nt, Artificial Sequence
  Description of Artificial Sequence: Synthetic oligonucleotide
  Sense strand starting at position 3117 of SEQ ID NO: 1886766
cagcaacuuccaugaguug

SEQ ID NO: 2425449 - RNA, 19 nt, Artificial Sequence
  Description of Artificial Sequence: Synthetic oligonucleotide
  Antisense strand to SEQ ID NO: 2425448
caacucauggaaguugcug

SEQ ID NO: 2425450 - RNA, 19 nt, Artificial Sequence
  Description of Artificial Sequence: Synthetic oligonucleotide
  Sense strand starting at position 3120 of SEQ ID NO: 1886766
caacuuccaugaguuguga

SEQ ID NO: 2425451 - RNA, 19 nt, Artificial Sequence
  Description of Artificial Sequence: Synthetic oligonucleotide
  Antisense strand to SEQ ID NO: 2425450
ucacaacucauggaaguug

SEQ ID NO: 2425452 - RNA, 19 nt, Artificial Sequence
  Description of Artificial Sequence: Synthetic oligonucleotide
  Sense strand starting at position 3308 of SEQ ID NO: 1886766
caguaaagcgguugagaca

SEQ ID NO: 2425453 - RNA, 19 nt, Artificial Sequence
  Description of Artificial Sequence: Synthetic oligonucleotide
  Antisense strand to SEQ ID NO: 2425452
ugucucaaccgcuuuacug

SEQ ID NO: 2425454 - RNA, 19 nt, Artificial Sequence
  Description of Artificial Sequence: Synthetic oligonucleotide
  Sense strand starting at position 3395 of SEQ ID NO: 1886766
guacaaauguuacucagac

SEQ ID NO: 2425455 - RNA, 19 nt, Artificial Sequence
  Description of Artificial Sequence: Synthetic oligonucleotide
  Antisense strand to SEQ ID NO: 2425454
gucugaguaacauuuguac

SEQ ID NO: 2425456 - RNA, 19 nt, Artificial Sequence
  Description of Artificial Sequence: Synthetic oligonucleotide
  Sense strand starting at position 3527 of SEQ ID NO: 1886766
cccaucuggguuuguuaaa

SEQ ID NO: 2425457 - RNA, 19 nt, Artificial Sequence
  Description of Artificial Sequence: Synthetic oligonucleotide
  Antisense strand to SEQ ID NO: 2425456
uuuaacaaacccagauggg

SEQ ID NO: 2425458 - RNA, 19 nt, Artificial Sequence
  Description of Artificial Sequence: Synthetic oligonucleotide
  Sense strand starting at position 3610 of SEQ ID NO: 1886766
agguguuggcuggaacagu

SEQ ID NO: 2425459 - RNA, 19 nt, Artificial Sequence
  Description of Artificial Sequence: Synthetic oligonucleotide
  Antisense strand to SEQ ID NO: 2425458
acuguuccagccaacaccu

SEQ ID NO: 2425460 - RNA, 19 nt, Artificial Sequence
  Description of Artificial Sequence: Synthetic oligonucleotide
  Sense strand starting at position 3624 of SEQ ID NO: 1886766
acaguaaauuccuuuggca

SEQ ID NO: 2425461 - RNA, 19 nt, Artificial Sequence
  Description of Artificial Sequence: Synthetic oligonucleotide
  Antisense strand to SEQ ID NO: 2425460
ugccaaaggaauuuacugu

SEQ ID NO: 2425462 - RNA, 19 nt, Artificial Sequence
  Description of Artificial Sequence: Synthetic oligonucleotide
  Sense strand starting at position 3708 of SEQ ID NO: 1886766
acuguuagagacuguguua

SEQ ID NO: 2425463 - RNA, 19 nt, Artificial Sequence
  Description of Artificial Sequence: Synthetic oligonucleotide
  Antisense strand to SEQ ID NO: 2425462
uaacacagucucuaacagu

SEQ ID NO: 2425464 - RNA, 19 nt, Artificial Sequence
  Description of Artificial Sequence: Synthetic oligonucleotide
  Sense strand starting at position 3711 of SEQ ID NO: 1886766
guuagagacuguguuagag

SEQ ID NO: 2425465 - RNA, 19 nt, Artificial Sequence
  Description of Artificial Sequence: Synthetic oligonucleotide
  Antisense strand to SEQ ID NO: 2425464
cucuaacacagucucuaac

SEQ ID NO: 2425466 - RNA, 19 nt, Artificial Sequence
  Description of Artificial Sequence: Synthetic oligonucleotide
  Sense strand starting at position 3746 of SEQ ID NO: 1886766
ugaggccuaguccacaaau

SEQ ID NO: 2425467 - RNA, 19 nt, Artificial Sequence
  Description of Artificial Sequence: Synthetic oligonucleotide
  Antisense strand to SEQ ID NO: 2425466
auuuguggacuaggccuca

SEQ ID NO: 2425468 - RNA, 19 nt, Artificial Sequence
  Description of Artificial Sequence: Synthetic oligonucleotide
  Sense strand starting at position 3770 of SEQ ID NO: 1886766
agaggaaccuggcuagagu

SEQ ID NO: 2425469 - RNA, 19 nt, Artificial Sequence
  Description of Artificial Sequence: Synthetic oligonucleotide
  Antisense strand to SEQ ID NO: 2425468
acucuagccagguuccucu

SEQ ID NO: 2425470 - RNA, 19 nt, Artificial Sequence
  Description of Artificial Sequence: Synthetic oligonucleotide
  Sense strand starting at position 3771 of SEQ ID NO: 1886766
gaggaaccuggcuagaguu

SEQ ID NO: 2425471 - RNA, 19 nt, Artificial Sequence
  Description of Artificial Sequence: Synthetic oligonucleotide
  Antisense strand to SEQ ID NO: 2425470
aacucuagccagguuccuc

SEQ ID NO: 2425472 - RNA, 19 nt, Artificial Sequence
  Description of Artificial Sequence: Synthetic oligonucleotide
  Sense strand starting at position 3828 of SEQ ID NO: 1886766
cacauuauucugugugagg

SEQ ID NO: 2425473 - RNA, 19 nt, Artificial Sequence
  Description of Artificial Sequence: Synthetic oligonucleotide
  Antisense strand to SEQ ID NO: 2425472
ccucacacagaauaaugug

SEQ ID NO: 2425474 - RNA, 19 nt, Artificial Sequence
  Description of Artificial Sequence: Synthetic oligonucleotide
  Sense strand starting at position 109 of SEQ ID NO: 1886765
uugccaagggcauaaauua

SEQ ID NO: 2425475 - RNA, 19 nt, Artificial Sequence
  Description of Artificial Sequence: Synthetic oligonucleotide
  Antisense strand to SEQ ID NO: 2425474
uaauuuaugcccuuggcaa

SEQ ID NO: 2425476 - RNA, 19 nt, Artificial Sequence
  Description of Artificial Sequence: Synthetic oligonucleotide
  Sense strand starting at position 504 of SEQ ID NO: 1886765
gugaaugagaaguguccua

SEQ ID NO: 2425477 - RNA, 19 nt, Artificial Sequence
  Description of Artificial Sequence: Synthetic oligonucleotide
  Antisense strand to SEQ ID NO: 2425476
uaggacacuucucauucac

SEQ ID NO: 2425478 - RNA, 19 nt, Artificial Sequence
  Description of Artificial Sequence: Synthetic oligonucleotide
  Sense strand starting at position 511 of SEQ ID NO: 1886765
agaaguguccuagauguuu

SEQ ID NO: 2425479 - RNA, 19 nt, Artificial Sequence
  Description of Artificial Sequence: Synthetic oligonucleotide
  Antisense strand to SEQ ID NO: 2425478
aaacaucuaggacacuucu

SEQ ID NO: 2425480 - RNA, 19 nt, Artificial Sequence
  Description of Artificial Sequence: Synthetic oligonucleotide
  Sense strand starting at position 565 of SEQ ID NO: 1886765
acaguugccuguuuaauuu

SEQ ID NO: 2425481 - RNA, 19 nt, Artificial Sequence
  Description of Artificial Sequence: Synthetic oligonucleotide
  Antisense strand to SEQ ID NO: 2425480
aaauuaaacaggcaacugu

SEQ ID NO: 2425482 - RNA, 19 nt, Artificial Sequence
  Description of Artificial Sequence: Synthetic oligonucleotide
  Sense strand starting at position 1245 of SEQ ID NO: 1886765
uuaucauuugcuggucaua

SEQ ID NO: 2425483 - RNA, 19 nt, Artificial Sequence
  Description of Artificial Sequence: Synthetic oligonucleotide
  Antisense strand to SEQ ID NO: 2425482
uaugaccagcaaaugauaa

SEQ ID NO: 2425484 - RNA, 19 nt, Artificial Sequence
  Description of Artificial Sequence: Synthetic oligonucleotide
  Sense strand starting at position 1247 of SEQ ID NO: 1886765
aucauuugcuggucauacu

SEQ ID NO: 2425485 - RNA, 19 nt, Artificial Sequence
  Description of Artificial Sequence: Synthetic oligonucleotide
  Antisense strand to SEQ ID NO: 2425484
aguaugaccagcaaaugau

SEQ ID NO: 2425486 - RNA, 19 nt, Artificial Sequence
  Description of Artificial Sequence: Synthetic oligonucleotide
  Sense strand starting at position 1272 of SEQ ID NO: 1886765
uuauacugugccuauguaa

SEQ ID NO: 2425487 - RNA, 19 nt, Artificial Sequence
  Description of Artificial Sequence: Synthetic oligonucleotide
  Antisense strand to SEQ ID NO: 2425486
uuacauaggcacaguauaa

SEQ ID NO: 2425488 - RNA, 19 nt, Artificial Sequence
  Description of Artificial Sequence: Synthetic oligonucleotide
  Sense strand starting at position 1413 of SEQ ID NO: 1886765
uccugagugucucuagaua

SEQ ID NO: 2425489 - RNA, 19 nt, Artificial Sequence
  Description of Artificial Sequence: Synthetic oligonucleotide
  Antisense strand to SEQ ID NO: 2425488
uaucuagagacacucagga

SEQ ID NO: 2425490 - RNA, 19 nt, Artificial Sequence
  Description of Artificial Sequence: Synthetic oligonucleotide
  Sense strand starting at position 1538 of SEQ ID NO: 1886765
gaagaaugcguguaaagau

SEQ ID NO: 2425491 - RNA, 19 nt, Artificial Sequence
  Description of Artificial Sequence: Synthetic oligonucleotide
  Antisense strand to SEQ ID NO: 2425490
aucuuuacacgcauucuuc

SEQ ID NO: 2425492 - RNA, 19 nt, Artificial Sequence
  Description of Artificial Sequence: Synthetic oligonucleotide
  Sense strand starting at position 2128 of SEQ ID NO: 1886765
aggguuaguuccuuuauuc

SEQ ID NO: 2425493 - RNA, 19 nt, Artificial Sequence
  Description of Artificial Sequence: Synthetic oligonucleotide
  Antisense strand to SEQ ID NO: 2425492
gaauaaaggaacuaacccu

SEQ ID NO: 2425494 - RNA, 19 nt, Artificial Sequence
  Description of Artificial Sequence: Synthetic oligonucleotide
  Sense strand starting at position 2146 of SEQ ID NO: 1886765
cggccucugcguucucuua

SEQ ID NO: 2425495 - RNA, 19 nt, Artificial Sequence
  Description of Artificial Sequence: Synthetic oligonucleotide
  Antisense strand to SEQ ID NO: 2425494
uaagagaacgcagaggccg

SEQ ID NO: 2425496 - RNA, 19 nt, Artificial Sequence
  Description of Artificial Sequence: Synthetic oligonucleotide
  Sense strand starting at position 2156 of SEQ ID NO: 1886765
guucucuuaggauguuaca

SEQ ID NO: 2425497 - RNA, 19 nt, Artificial Sequence
  Description of Artificial Sequence: Synthetic oligonucleotide
  Antisense strand to SEQ ID NO: 2425496
uguaacauccuaagagaac

SEQ ID NO: 2425498 - RNA, 19 nt, Artificial Sequence
  Description of Artificial Sequence: Synthetic oligonucleotide
  Sense strand starting at position 2159 of SEQ ID NO: 1886765
cucuuaggauguuacauuu

SEQ ID NO: 2425499 - RNA, 19 nt, Artificial Sequence
  Description of Artificial Sequence: Synthetic oligonucleotide
  Antisense strand to SEQ ID NO: 2425498
aaauguaacauccuaagag

SEQ ID NO: 2425500 - RNA, 19 nt, Artificial Sequence
  Description of Artificial Sequence: Synthetic oligonucleotide
  Sense strand starting at position 2250 of SEQ ID NO: 1886765
ugggcucugacugguggaa

SEQ ID NO: 2425501 - RNA, 19 nt, Artificial Sequence
  Description of Artificial Sequence: Synthetic oligonucleotide
  Antisense strand to SEQ ID NO: 2425500
uuccaccagucagagccca

SEQ ID NO: 2425502 - RNA, 19 nt, Artificial Sequence
  Description of Artificial Sequence: Synthetic oligonucleotide
  Sense strand starting at position 2265 of SEQ ID NO: 1886765
ggaauuguuccaggaaguu

SEQ ID NO: 2425503 - RNA, 19 nt, Artificial Sequence
  Description of Artificial Sequence: Synthetic oligonucleotide
  Antisense strand to SEQ ID NO: 2425502
aacuuccuggaacaauucc

SEQ ID NO: 2425504 - RNA, 19 nt, Artificial Sequence
  Description of Artificial Sequence: Synthetic oligonucleotide
  Sense strand starting at position 2271 of SEQ ID NO: 1886765
guuccaggaaguugacaaa

SEQ ID NO: 2425505 - RNA, 19 nt, Artificial Sequence
  Description of Artificial Sequence: Synthetic oligonucleotide
  Antisense strand to SEQ ID NO: 2425504
uuugucaacuuccuggaac

SEQ ID NO: 2425506 - RNA, 19 nt, Artificial Sequence
  Description of Artificial Sequence: Synthetic oligonucleotide
  Sense strand starting at position 2344 of SEQ ID NO: 1886765
cagcaacuuccaugaguug

SEQ ID NO: 2425507 - RNA, 19 nt, Artificial Sequence
  Description of Artificial Sequence: Synthetic oligonucleotide
  Antisense strand to SEQ ID NO: 2425506
caacucauggaaguugcug

SEQ ID NO: 2425508 - RNA, 19 nt, Artificial Sequence
  Description of Artificial Sequence: Synthetic oligonucleotide
  Sense strand starting at position 2347 of SEQ ID NO: 1886765
caacuuccaugaguuguga

SEQ ID NO: 2425509 - RNA, 19 nt, Artificial Sequence
  Description of Artificial Sequence: Synthetic oligonucleotide
  Antisense strand to SEQ ID NO: 2425508
ucacaacucauggaaguug

SEQ ID NO: 2425510 - RNA, 19 nt, Artificial Sequence
  Description of Artificial Sequence: Synthetic oligonucleotide
  Sense strand starting at position 2394 of SEQ ID NO: 1886765
guuaguuuccaaugguaua

SEQ ID NO: 2425511 - RNA, 19 nt, Artificial Sequence
  Description of Artificial Sequence: Synthetic oligonucleotide
  Antisense strand to SEQ ID NO: 2425510
uauaccauuggaaacuaac

SEQ ID NO: 2425512 - RNA, 19 nt, Artificial Sequence
  Description of Artificial Sequence: Synthetic oligonucleotide
  Sense strand starting at position 2535 of SEQ ID NO: 1886765
caguaaagcgguugagaca

SEQ ID NO: 2425513 - RNA, 19 nt, Artificial Sequence
  Description of Artificial Sequence: Synthetic oligonucleotide
  Antisense strand to SEQ ID NO: 2425512
ugucucaaccgcuuuacug

SEQ ID NO: 2425514 - RNA, 19 nt, Artificial Sequence
  Description of Artificial Sequence: Synthetic oligonucleotide
  Sense strand starting at position 2622 of SEQ ID NO: 1886765
guacaaauguuacucagac

SEQ ID NO: 2425515 - RNA, 19 nt, Artificial Sequence
  Description of Artificial Sequence: Synthetic oligonucleotide
  Antisense strand to SEQ ID NO: 2425514
gucugaguaacauuuguac

SEQ ID NO: 2425516 - RNA, 19 nt, Artificial Sequence
  Description of Artificial Sequence: Synthetic oligonucleotide
  Sense strand starting at position 2754 of SEQ ID NO: 1886765
cccaucuggguuuguuaaa

SEQ ID NO: 2425517 - RNA, 19 nt, Artificial Sequence
  Description of Artificial Sequence: Synthetic oligonucleotide
  Antisense strand to SEQ ID NO: 2425516
uuuaacaaacccagauggg

SEQ ID NO: 2425518 - RNA, 19 nt, Artificial Sequence
  Description of Artificial Sequence: Synthetic oligonucleotide
  Sense strand starting at position 2773 of SEQ ID NO: 1886765
ggguguuucuggaaguuag

SEQ ID NO: 2425519 - RNA, 19 nt, Artificial Sequence
  Description of Artificial Sequence: Synthetic oligonucleotide
  Antisense strand to SEQ ID NO: 2425518
cuaacuuccagaaacaccc

SEQ ID NO: 2425520 - RNA, 19 nt, Artificial Sequence
  Description of Artificial Sequence: Synthetic oligonucleotide
  Sense strand starting at position 2837 of SEQ ID NO: 1886765
agguguuggcuggaacagu

SEQ ID NO: 2425521 - RNA, 19 nt, Artificial Sequence
  Description of Artificial Sequence: Synthetic oligonucleotide
  Antisense strand to SEQ ID NO: 2425520
acuguuccagccaacaccu

SEQ ID NO: 2425522 - RNA, 19 nt, Artificial Sequence
  Description of Artificial Sequence: Synthetic oligonucleotide
  Sense strand starting at position 2851 of SEQ ID NO: 1886765
acaguaaauuccuuuggca

SEQ ID NO: 2425523 - RNA, 19 nt, Artificial Sequence
  Description of Artificial Sequence: Synthetic oligonucleotide
  Antisense strand to SEQ ID NO: 2425522
ugccaaaggaauuuacugu

SEQ ID NO: 2425524 - RNA, 19 nt, Artificial Sequence
  Description of Artificial Sequence: Synthetic oligonucleotide
  Sense strand starting at position 2935 of SEQ ID NO: 1886765
acuguuagagacuguguua

SEQ ID NO: 2425525 - RNA, 19 nt, Artificial Sequence
  Description of Artificial Sequence: Synthetic oligonucleotide
  Antisense strand to SEQ ID NO: 2425524
uaacacagucucuaacagu

SEQ ID NO: 2425526 - RNA, 19 nt, Artificial Sequence
  Description of Artificial Sequence: Synthetic oligonucleotide
  Sense strand starting at position 2938 of SEQ ID NO: 1886765
guuagagacuguguuagag

SEQ ID NO: 2425527 - RNA, 19 nt, Artificial Sequence
  Description of Artificial Sequence: Synthetic oligonucleotide
  Antisense strand to SEQ ID NO: 2425526
cucuaacacagucucuaac

SEQ ID NO: 2425528 - RNA, 19 nt, Artificial Sequence
  Description of Artificial Sequence: Synthetic oligonucleotide
  Sense strand starting at position 2973 of SEQ ID NO: 1886765
ugaggccuaguccacaaau

SEQ ID NO: 2425529 - RNA, 19 nt, Artificial Sequence
  Description of Artificial Sequence: Synthetic oligonucleotide
  Antisense strand to SEQ ID NO: 2425528
auuuguggacuaggccuca

SEQ ID NO: 2425530 - RNA, 19 nt, Artificial Sequence
  Description of Artificial Sequence: Synthetic oligonucleotide
  Sense strand starting at position 2997 of SEQ ID NO: 1886765
agaggaaccuggcuagagu

SEQ ID NO: 2425531 - RNA, 19 nt, Artificial Sequence
  Description of Artificial Sequence: Synthetic oligonucleotide
  Antisense strand to SEQ ID NO: 2425530
acucuagccagguuccucu

SEQ ID NO: 2425532 - RNA, 19 nt, Artificial Sequence
  Description of Artificial Sequence: Synthetic oligonucleotide
  Sense strand starting at position 2998 of SEQ ID NO: 1886765
gaggaaccuggcuagaguu

SEQ ID NO: 2425533 - RNA, 19 nt, Artificial Sequence
  Description of Artificial Sequence: Synthetic oligonucleotide
  Antisense strand to SEQ ID NO: 2425532
aacucuagccagguuccuc

SEQ ID NO: 2425534 - RNA, 19 nt, Artificial Sequence
  Description of Artificial Sequence: Synthetic oligonucleotide
  Sense strand starting at position 3043 of SEQ ID NO: 1886765
ccgcauauucugcacauua

SEQ ID NO: 2425535 - RNA, 19 nt, Artificial Sequence
  Description of Artificial Sequence: Synthetic oligonucleotide
  Antisense strand to SEQ ID NO: 2425534
uaaugugcagaauaugcgg

SEQ ID NO: 2425536 - RNA, 19 nt, Artificial Sequence
  Description of Artificial Sequence: Synthetic oligonucleotide
  Sense strand starting at position 3055 of SEQ ID NO: 1886765
cacauuauucugugugagg

SEQ ID NO: 2425537 - RNA, 19 nt, Artificial Sequence
  Description of Artificial Sequence: Synthetic oligonucleotide
  Antisense strand to SEQ ID NO: 2425536
ccucacacagaauaaugug

SEQ ID NO: 2425538 - RNA, 19 nt, Artificial Sequence
  Description of Artificial Sequence: Synthetic oligonucleotide
  Sense strand starting at position 3056 of SEQ ID NO: 1886765
acauuauucugugugaggu

SEQ ID NO: 2425539 - RNA, 19 nt, Artificial Sequence
  Description of Artificial Sequence: Synthetic oligonucleotide
  Antisense strand to SEQ ID NO: 2425538
accucacacagaauaaugu

SEQ ID NO: 2425540 - RNA, 19 nt, Artificial Sequence
  Description of Artificial Sequence: Synthetic oligonucleotide
  Sense strand starting at position 3274 of SEQ ID NO: 1886765
ggcagucagucauuugcua

SEQ ID NO: 2425541 - RNA, 19 nt, Artificial Sequence
  Description of Artificial Sequence: Synthetic oligonucleotide
  Antisense strand to SEQ ID NO: 2425540
uagcaaaugacugacugcc

SEQ ID NO: 2425542 - RNA, 19 nt, Artificial Sequence
  Description of Artificial Sequence: Synthetic oligonucleotide
  Sense strand starting at position 3278 of SEQ ID NO: 1886765
gucagucauuugcuaaggu

SEQ ID NO: 2425543 - RNA, 19 nt, Artificial Sequence
  Description of Artificial Sequence: Synthetic oligonucleotide
  Antisense strand to SEQ ID NO: 2425542
accuuagcaaaugacugac

SEQ ID NO: 2425544 - RNA, 19 nt, Artificial Sequence
  Description of Artificial Sequence: Synthetic oligonucleotide
  Sense strand starting at position 3472 of SEQ ID NO: 1886765
aaaguaaagcugugggagu

SEQ ID NO: 2425545 - RNA, 19 nt, Artificial Sequence
  Description of Artificial Sequence: Synthetic oligonucleotide
  Antisense strand to SEQ ID NO: 2425544
acucccacagcuuuacuuu

SEQ ID NO: 2425546 - RNA, 19 nt, Artificial Sequence
  Description of Artificial Sequence: Synthetic oligonucleotide
  Sense strand starting at position 3533 of SEQ ID NO: 1886765
agaagauuagcaugguacu

SEQ ID NO: 2425547 - RNA, 19 nt, Artificial Sequence
  Description of Artificial Sequence: Synthetic oligonucleotide
  Antisense strand to SEQ ID NO: 2425546
aguaccaugcuaaucuucu

SEQ ID NO: 2425548 - RNA, 19 nt, Artificial Sequence
  Description of Artificial Sequence: Synthetic oligonucleotide
  Sense strand starting at position 3534 of SEQ ID NO: 1886765
gaagauuagcaugguacua

SEQ ID NO: 2425549 - RNA, 19 nt, Artificial Sequence
  Description of Artificial Sequence: Synthetic oligonucleotide
  Antisense strand to SEQ ID NO: 2425548
uaguaccaugcuaaucuuc

SEQ ID NO: 2425550 - RNA, 19 nt, Artificial Sequence
  Description of Artificial Sequence: Synthetic oligonucleotide
  Sense strand starting at position 3603 of SEQ ID NO: 1886765
gggauuuauuacugagaug

SEQ ID NO: 2425551 - RNA, 19 nt, Artificial Sequence
  Description of Artificial Sequence: Synthetic oligonucleotide
  Antisense strand to SEQ ID NO: 2425550
caucucaguaauaaauccc

SEQ ID NO: 2425552 - RNA, 19 nt, Artificial Sequence
  Description of Artificial Sequence: Synthetic oligonucleotide
  Sense strand starting at position 3606 of SEQ ID NO: 1886765
auuuauuacugagaugcaa

SEQ ID NO: 2425553 - RNA, 19 nt, Artificial Sequence
  Description of Artificial Sequence: Synthetic oligonucleotide
  Antisense strand to SEQ ID NO: 2425552
uugcaucucaguaauaaau

SEQ ID NO: 2425554 - RNA, 19 nt, Artificial Sequence
  Description of Artificial Sequence: Synthetic oligonucleotide
  Sense strand starting at position 140 of SEQ ID NO: 1886767
ccuaaugguuucucucuga

SEQ ID NO: 2425555 - RNA, 19 nt, Artificial Sequence
  Description of Artificial Sequence: Synthetic oligonucleotide
  Antisense strand to SEQ ID NO: 2425554
ucagagagaaaccauuagg

SEQ ID NO: 2425556 - RNA, 19 nt, Artificial Sequence
  Description of Artificial Sequence: Synthetic oligonucleotide
  Sense strand starting at position 429 of SEQ ID NO: 1886767
cuuccuucucccuggagau

SEQ ID NO: 2425557 - RNA, 19 nt, Artificial Sequence
  Description of Artificial Sequence: Synthetic oligonucleotide
  Antisense strand to SEQ ID NO: 2425556
aucuccagggagaaggaag

SEQ ID NO: 2425558 - RNA, 19 nt, Artificial Sequence
  Description of Artificial Sequence: Synthetic oligonucleotide
  Sense strand starting at position 441 of SEQ ID NO: 1886767
uggagauccucuuguauuu

SEQ ID NO: 2425559 - RNA, 19 nt, Artificial Sequence
  Description of Artificial Sequence: Synthetic oligonucleotide
  Antisense strand to SEQ ID NO: 2425558
aaauacaagaggaucucca

SEQ ID NO: 2425560 - RNA, 19 nt, Artificial Sequence
  Description of Artificial Sequence: Synthetic oligonucleotide
  Sense strand starting at position 525 of SEQ ID NO: 1886767
accaaauuauccuagagag

SEQ ID NO: 2425561 - RNA, 19 nt, Artificial Sequence
  Description of Artificial Sequence: Synthetic oligonucleotide
  Antisense strand to SEQ ID NO: 2425560
cucucuaggauaauuuggu

SEQ ID NO: 2425562 - RNA, 19 nt, Artificial Sequence
  Description of Artificial Sequence: Synthetic oligonucleotide
  Sense strand starting at position 651 of SEQ ID NO: 1886767
gcccuaauuugcuacauga

SEQ ID NO: 2425563 - RNA, 19 nt, Artificial Sequence
  Description of Artificial Sequence: Synthetic oligonucleotide
  Antisense strand to SEQ ID NO: 2425562
ucauguagcaaauuagggc

SEQ ID NO: 2425564 - RNA, 19 nt, Artificial Sequence
  Description of Artificial Sequence: Synthetic oligonucleotide
  Sense strand starting at position 808 of SEQ ID NO: 1886767
cagugugcucgaguucuuu

SEQ ID NO: 2425565 - RNA, 19 nt, Artificial Sequence
  Description of Artificial Sequence: Synthetic oligonucleotide
  Antisense strand to SEQ ID NO: 2425564
aaagaacucgagcacacug

SEQ ID NO: 2425566 - RNA, 19 nt, Artificial Sequence
  Description of Artificial Sequence: Synthetic oligonucleotide
  Sense strand starting at position 1163 of SEQ ID NO: 1886767
accagagugugagcagaau

SEQ ID NO: 2425567 - RNA, 19 nt, Artificial Sequence
  Description of Artificial Sequence: Synthetic oligonucleotide
  Antisense strand to SEQ ID NO: 2425566
auucugcucacacucuggu

SEQ ID NO: 2425568 - RNA, 19 nt, Artificial Sequence
  Description of Artificial Sequence: Synthetic oligonucleotide
  Sense strand starting at position 1171 of SEQ ID NO: 1886767
gugagcagaaucggcuuaa

SEQ ID NO: 2425569 - RNA, 19 nt, Artificial Sequence
  Description of Artificial Sequence: Synthetic oligonucleotide
  Antisense strand to SEQ ID NO: 2425568
uuaagccgauucugcucac

SEQ ID NO: 2425570 - RNA, 19 nt, Artificial Sequence
  Description of Artificial Sequence: Synthetic oligonucleotide
  Sense strand starting at position 1175 of SEQ ID NO: 1886767
gcagaaucggcuuaaggca

SEQ ID NO: 2425571 - RNA, 19 nt, Artificial Sequence
  Description of Artificial Sequence: Synthetic oligonucleotide
  Antisense strand to SEQ ID NO: 2425570
ugccuuaagccgauucugc

SEQ ID NO: 2425572 - RNA, 19 nt, Artificial Sequence
  Description of Artificial Sequence: Synthetic oligonucleotide
  Sense strand starting at position 1256 of SEQ ID NO: 1886767
gaguuugggccggaauguu

SEQ ID NO: 2425573 - RNA, 19 nt, Artificial Sequence
  Description of Artificial Sequence: Synthetic oligonucleotide
  Antisense strand to SEQ ID NO: 2425572
aacauuccggcccaaacuc

SEQ ID NO: 2425574 - RNA, 19 nt, Artificial Sequence
  Description of Artificial Sequence: Synthetic oligonucleotide
  Sense strand starting at position 1910 of SEQ ID NO: 1886767
cagcgacugaaggguuaau

SEQ ID NO: 2425575 - RNA, 19 nt, Artificial Sequence
  Description of Artificial Sequence: Synthetic oligonucleotide
  Antisense strand to SEQ ID NO: 2425574
auuaacccuucagucgcug

SEQ ID NO: 2425576 - RNA, 19 nt, Artificial Sequence
  Description of Artificial Sequence: Synthetic oligonucleotide
  Sense strand starting at position 1921 of SEQ ID NO: 1886767
ggguuaauuaaugauugca

SEQ ID NO: 2425577 - RNA, 19 nt, Artificial Sequence
  Description of Artificial Sequence: Synthetic oligonucleotide
  Antisense strand to SEQ ID NO: 2425576
ugcaaucauuaauuaaccc

SEQ ID NO: 2425578 - RNA, 19 nt, Artificial Sequence
  Description of Artificial Sequence: Synthetic oligonucleotide
  Sense strand starting at position 1923 of SEQ ID NO: 1886767
guuaauuaaugauugcaga

SEQ ID NO: 2425579 - RNA, 19 nt, Artificial Sequence
  Description of Artificial Sequence: Synthetic oligonucleotide
  Antisense strand to SEQ ID NO: 2425578
ucugcaaucauuaauuaac

SEQ ID NO: 2425580 - RNA, 19 nt, Artificial Sequence
  Description of Artificial Sequence: Synthetic oligonucleotide
  Sense strand starting at position 1934 of SEQ ID NO: 1886767
auugcagauuaauugaaca

SEQ ID NO: 2425581 - RNA, 19 nt, Artificial Sequence
  Description of Artificial Sequence: Synthetic oligonucleotide
  Antisense strand to SEQ ID NO: 2425580
uguucaauuaaucugcaau

SEQ ID NO: 2425582 - RNA, 19 nt, Artificial Sequence
  Description of Artificial Sequence: Synthetic oligonucleotide
  Sense strand starting at position 2042 of SEQ ID NO: 1886767
ccgagcuuguccucagaga

SEQ ID NO: 2425583 - RNA, 19 nt, Artificial Sequence
  Description of Artificial Sequence: Synthetic oligonucleotide
  Antisense strand to SEQ ID NO: 2425582
ucucugaggacaagcucgg

SEQ ID NO: 2425584 - RNA, 19 nt, Artificial Sequence
  Description of Artificial Sequence: Synthetic oligonucleotide
  Sense strand starting at position 2043 of SEQ ID NO: 1886767
cgagcuuguccucagagaa

SEQ ID NO: 2425585 - RNA, 19 nt, Artificial Sequence
  Description of Artificial Sequence: Synthetic oligonucleotide
  Antisense strand to SEQ ID NO: 2425584
uucucugaggacaagcucg

SEQ ID NO: 2425586 - RNA, 19 nt, Artificial Sequence
  Description of Artificial Sequence: Synthetic oligonucleotide
  Sense strand starting at position 2861 of SEQ ID NO: 1886767
uggagcucuuuccucugaa

SEQ ID NO: 2425587 - RNA, 19 nt, Artificial Sequence
  Description of Artificial Sequence: Synthetic oligonucleotide
  Antisense strand to SEQ ID NO: 2425586
uucagaggaaagagcucca

SEQ ID NO: 2425588 - RNA, 19 nt, Artificial Sequence
  Description of Artificial Sequence: Synthetic oligonucleotide
  Sense strand starting at position 2862 of SEQ ID NO: 1886767
ggagcucuuuccucugaac

SEQ ID NO: 2425589 - RNA, 19 nt, Artificial Sequence
  Description of Artificial Sequence: Synthetic oligonucleotide
  Antisense strand to SEQ ID NO: 2425588
guucagaggaaagagcucc

SEQ ID NO: 2425590 - RNA, 19 nt, Artificial Sequence
  Description of Artificial Sequence: Synthetic oligonucleotide
  Sense strand starting at position 2871 of SEQ ID NO: 1886767
uccucugaacuuugacagu

SEQ ID NO: 2425591 - RNA, 19 nt, Artificial Sequence
  Description of Artificial Sequence: Synthetic oligonucleotide
  Antisense strand to SEQ ID NO: 2425590
acugucaaaguucagagga

SEQ ID NO: 2425592 - RNA, 19 nt, Artificial Sequence
  Description of Artificial Sequence: Synthetic oligonucleotide
  Sense strand starting at position 2894 of SEQ ID NO: 1886767
gcgucuagacucuaaacgu

SEQ ID NO: 2425593 - RNA, 19 nt, Artificial Sequence
  Description of Artificial Sequence: Synthetic oligonucleotide
  Antisense strand to SEQ ID NO: 2425592
acguuuagagucuagacgc

SEQ ID NO: 2425594 - RNA, 19 nt, Artificial Sequence
  Description of Artificial Sequence: Synthetic oligonucleotide
  Sense strand starting at position 2910 of SEQ ID NO: 1886767
cguacuagaucccuccaga

SEQ ID NO: 2425595 - RNA, 19 nt, Artificial Sequence
  Description of Artificial Sequence: Synthetic oligonucleotide
  Antisense strand to SEQ ID NO: 2425594
ucuggagggaucuaguacg

SEQ ID NO: 2425596 - RNA, 19 nt, Artificial Sequence
  Description of Artificial Sequence: Synthetic oligonucleotide
  Sense strand starting at position 3210 of SEQ ID NO: 1886767
uugugcuuccuguauaucu

SEQ ID NO: 2425597 - RNA, 19 nt, Artificial Sequence
  Description of Artificial Sequence: Synthetic oligonucleotide
  Antisense strand to SEQ ID NO: 2425596
agauauacaggaagcacaa

SEQ ID NO: 2425598 - RNA, 19 nt, Artificial Sequence
  Description of Artificial Sequence: Synthetic oligonucleotide
  Sense strand starting at position 3241 of SEQ ID NO: 1886767
gcaagugugcucuccguaa

SEQ ID NO: 2425599 - RNA, 19 nt, Artificial Sequence
  Description of Artificial Sequence: Synthetic oligonucleotide
  Antisense strand to SEQ ID NO: 2425598
uuacggagagcacacuugc

SEQ ID NO: 2425600 - RNA, 19 nt, Artificial Sequence
  Description of Artificial Sequence: Synthetic oligonucleotide
  Sense strand starting at position 3245 of SEQ ID NO: 1886767
gugugcucuccguaaauaa

SEQ ID NO: 2425601 - RNA, 19 nt, Artificial Sequence
  Description of Artificial Sequence: Synthetic oligonucleotide
  Antisense strand to SEQ ID NO: 2425600
uuauuuacggagagcacac

SEQ ID NO: 2425602 - RNA, 19 nt, Artificial Sequence
  Description of Artificial Sequence: Synthetic oligonucleotide
  Sense strand starting at position 3287 of SEQ ID NO: 1886767
gugagugauuugugaugaa

SEQ ID NO: 2425603 - RNA, 19 nt, Artificial Sequence
  Description of Artificial Sequence: Synthetic oligonucleotide
  Antisense strand to SEQ ID NO: 2425602
uucaucacaaaucacucac

SEQ ID NO: 2425604 - RNA, 19 nt, Artificial Sequence
  Description of Artificial Sequence: Synthetic oligonucleotide
  Sense strand starting at position 3296 of SEQ ID NO: 1886767
uugugaugaagcuguugga

SEQ ID NO: 2425605 - RNA, 19 nt, Artificial Sequence
  Description of Artificial Sequence: Synthetic oligonucleotide
  Antisense strand to SEQ ID NO: 2425604
uccaacagcuucaucacaa

SEQ ID NO: 2425606 - RNA, 19 nt, Artificial Sequence
  Description of Artificial Sequence: Synthetic oligonucleotide
  Sense strand starting at position 3309 of SEQ ID NO: 1886767
guuggagguaacugucgau

SEQ ID NO: 2425607 - RNA, 19 nt, Artificial Sequence
  Description of Artificial Sequence: Synthetic oligonucleotide
  Antisense strand to SEQ ID NO: 2425606
aucgacaguuaccuccaac

SEQ ID NO: 2425608 - RNA, 19 nt, Artificial Sequence
  Description of Artificial Sequence: Synthetic oligonucleotide
  Sense strand starting at position 3313 of SEQ ID NO: 1886767
gagguaacugucgaucaga

SEQ ID NO: 2425609 - RNA, 19 nt, Artificial Sequence
  Description of Artificial Sequence: Synthetic oligonucleotide
  Antisense strand to SEQ ID NO: 2425608
ucugaucgacaguuaccuc

SEQ ID NO: 2425610 - RNA, 19 nt, Artificial Sequence
  Description of Artificial Sequence: Synthetic oligonucleotide
  Sense strand starting at position 3318 of SEQ ID NO: 1886767
aacugucgaucagauuuaa

SEQ ID NO: 2425611 - RNA, 19 nt, Artificial Sequence
  Description of Artificial Sequence: Synthetic oligonucleotide
  Antisense strand to SEQ ID NO: 2425610
uuaaaucugaucgacaguu

SEQ ID NO: 2425612 - RNA, 19 nt, Artificial Sequence
  Description of Artificial Sequence: Synthetic oligonucleotide
  Sense strand starting at position 3373 of SEQ ID NO: 1886767
ccaaacagaucugaaugaa

SEQ ID NO: 2425613 - RNA, 19 nt, Artificial Sequence
  Description of Artificial Sequence: Synthetic oligonucleotide
  Antisense strand to SEQ ID NO: 2425612
uucauucagaucuguuugg

SEQ ID NO: 2425614 - RNA, 19 nt, Artificial Sequence
  Description of Artificial Sequence: Synthetic oligonucleotide
  Sense strand starting at position 3393 of SEQ ID NO: 1886767
uacggugauggccaaauua

SEQ ID NO: 2425615 - RNA, 19 nt, Artificial Sequence
  Description of Artificial Sequence: Synthetic oligonucleotide
  Antisense strand to SEQ ID NO: 2425614
uaauuuggccaucaccgua

SEQ ID NO: 2425616 - RNA, 19 nt, Artificial Sequence
  Description of Artificial Sequence: Synthetic oligonucleotide
  Sense strand starting at position 3401 of SEQ ID NO: 1886767
uggccaaauuauccaagau

SEQ ID NO: 2425617 - RNA, 19 nt, Artificial Sequence
  Description of Artificial Sequence: Synthetic oligonucleotide
  Antisense strand to SEQ ID NO: 2425616
aucuuggauaauuuggcca

SEQ ID NO: 2425618 - RNA, 19 nt, Artificial Sequence
  Description of Artificial Sequence: Synthetic oligonucleotide
  Sense strand starting at position 3523 of SEQ ID NO: 1886767
cauuaaguaucugaaggga

SEQ ID NO: 2425619 - RNA, 19 nt, Artificial Sequence
  Description of Artificial Sequence: Synthetic oligonucleotide
  Antisense strand to SEQ ID NO: 2425618
ucccuucagauacuuaaug

SEQ ID NO: 2425620 - RNA, 19 nt, Artificial Sequence
  Description of Artificial Sequence: Synthetic oligonucleotide
  Sense strand starting at position 3544 of SEQ ID NO: 1886767
caggcuguuccacggaaga

SEQ ID NO: 2425621 - RNA, 19 nt, Artificial Sequence
  Description of Artificial Sequence: Synthetic oligonucleotide
  Antisense strand to SEQ ID NO: 2425620
ucuuccguggaacagccug

SEQ ID NO: 2425622 - RNA, 19 nt, Artificial Sequence
  Description of Artificial Sequence: Synthetic oligonucleotide
  Sense strand starting at position 3546 of SEQ ID NO: 1886767
ggcuguuccacggaagaac

SEQ ID NO: 2425623 - RNA, 19 nt, Artificial Sequence
  Description of Artificial Sequence: Synthetic oligonucleotide
  Antisense strand to SEQ ID NO: 2425622
guucuuccguggaacagcc

SEQ ID NO: 2425624 - RNA, 19 nt, Artificial Sequence
  Description of Artificial Sequence: Synthetic oligonucleotide
  Sense strand starting at position 3756 of SEQ ID NO: 1886767
gcaauaaacgcucagaagu

SEQ ID NO: 2425625 - RNA, 19 nt, Artificial Sequence
  Description of Artificial Sequence: Synthetic oligonucleotide
  Antisense strand to SEQ ID NO: 2425624
acuucugagcguuuauugc

SEQ ID NO: 2425626 - RNA, 19 nt, Artificial Sequence
  Description of Artificial Sequence: Synthetic oligonucleotide
  Sense strand starting at position 3814 of SEQ ID NO: 1886767
ccuuuaaggaggugauauu

SEQ ID NO: 2425627 - RNA, 19 nt, Artificial Sequence
  Description of Artificial Sequence: Synthetic oligonucleotide
  Antisense strand to SEQ ID NO: 2425626
aauaucaccuccuuaaagg

SEQ ID NO: 2425628 - RNA, 19 nt, Artificial Sequence
  Description of Artificial Sequence: Synthetic oligonucleotide
  Sense strand starting at position 3839 of SEQ ID NO: 1886767
gcccaaguuguugggagau

SEQ ID NO: 2425629 - RNA, 19 nt, Artificial Sequence
  Description of Artificial Sequence: Synthetic oligonucleotide
  Antisense strand to SEQ ID NO: 2425628
aucucccaacaacuugggc

SEQ ID NO: 2425630 - RNA, 19 nt, Artificial Sequence
  Description of Artificial Sequence: Synthetic oligonucleotide
  Sense strand starting at position 3941 of SEQ ID NO: 1886767
gcuggagugcugccgucau

SEQ ID NO: 2425631 - RNA, 19 nt, Artificial Sequence
  Description of Artificial Sequence: Synthetic oligonucleotide
  Antisense strand to SEQ ID NO: 2425630
augacggcagcacuccagc

SEQ ID NO: 2425632 - RNA, 19 nt, Artificial Sequence
  Description of Artificial Sequence: Synthetic oligonucleotide
  Sense strand starting at position 3943 of SEQ ID NO: 1886767
uggagugcugccgucauua

SEQ ID NO: 2425633 - RNA, 19 nt, Artificial Sequence
  Description of Artificial Sequence: Synthetic oligonucleotide
  Antisense strand to SEQ ID NO: 2425632
uaaugacggcagcacucca

SEQ ID NO: 2425634 - RNA, 19 nt, Artificial Sequence
  Description of Artificial Sequence: Synthetic oligonucleotide
  Sense strand starting at position 119 of SEQ ID NO: 1886768
ugggaaacauaguaacuau

SEQ ID NO: 2425635 - RNA, 19 nt, Artificial Sequence
  Description of Artificial Sequence: Synthetic oligonucleotide
  Antisense strand to SEQ ID NO: 2425634
auaguuacuauguuuccca

SEQ ID NO: 2425636 - RNA, 19 nt, Artificial Sequence
  Description of Artificial Sequence: Synthetic oligonucleotide
  Sense strand starting at position 130 of SEQ ID NO: 1886768
guaacuauguuuccuauca

SEQ ID NO: 2425637 - RNA, 19 nt, Artificial Sequence
  Description of Artificial Sequence: Synthetic oligonucleotide
  Antisense strand to SEQ ID NO: 2425636
ugauaggaaacauaguuac

SEQ ID NO: 2425638 - RNA, 19 nt, Artificial Sequence
  Description of Artificial Sequence: Synthetic oligonucleotide
  Sense strand starting at position 536 of SEQ ID NO: 1886768
ugggccuccucauuggaaa

SEQ ID NO: 2425639 - RNA, 19 nt, Artificial Sequence
  Description of Artificial Sequence: Synthetic oligonucleotide
  Antisense strand to SEQ ID NO: 2425638
uuuccaaugaggaggccca

SEQ ID NO: 2425640 - RNA, 19 nt, Artificial Sequence
  Description of Artificial Sequence: Synthetic oligonucleotide
  Sense strand starting at position 671 of SEQ ID NO: 1886768
auugaacuguuagguuuau

SEQ ID NO: 2425641 - RNA, 19 nt, Artificial Sequence
  Description of Artificial Sequence: Synthetic oligonucleotide
  Antisense strand to SEQ ID NO: 2425640
auaaaccuaacaguucaau

SEQ ID NO: 2425642 - RNA, 19 nt, Artificial Sequence
  Description of Artificial Sequence: Synthetic oligonucleotide
  Sense strand starting at position 672 of SEQ ID NO: 1886768
uugaacuguuagguuuauu

SEQ ID NO: 2425643 - RNA, 19 nt, Artificial Sequence
  Description of Artificial Sequence: Synthetic oligonucleotide
  Antisense strand to SEQ ID NO: 2425642
aauaaaccuaacaguucaa

SEQ ID NO: 2425644 - RNA, 19 nt, Artificial Sequence
  Description of Artificial Sequence: Synthetic oligonucleotide
  Sense strand starting at position 845 of SEQ ID NO: 1886768
cuaauugccuggcuccaau

SEQ ID NO: 2425645 - RNA, 19 nt, Artificial Sequence
  Description of Artificial Sequence: Synthetic oligonucleotide
  Antisense strand to SEQ ID NO: 2425644
auuggagccaggcaauuag

SEQ ID NO: 2425646 - RNA, 19 nt, Artificial Sequence
  Description of Artificial Sequence: Synthetic oligonucleotide
  Sense strand starting at position 901 of SEQ ID NO: 1886768
cugcaaagcccuuguucua

SEQ ID NO: 2425647 - RNA, 19 nt, Artificial Sequence
  Description of Artificial Sequence: Synthetic oligonucleotide
  Antisense strand to SEQ ID NO: 2425646
uagaacaagggcuuugcag

SEQ ID NO: 2425648 - RNA, 19 nt, Artificial Sequence
  Description of Artificial Sequence: Synthetic oligonucleotide
  Sense strand starting at position 913 of SEQ ID NO: 1886768
uguucuaggcaaugugaau

SEQ ID NO: 2425649 - RNA, 19 nt, Artificial Sequence
  Description of Artificial Sequence: Synthetic oligonucleotide
  Antisense strand to SEQ ID NO: 2425648
auucacauugccuagaaca

SEQ ID NO: 2425650 - RNA, 19 nt, Artificial Sequence
  Description of Artificial Sequence: Synthetic oligonucleotide
  Sense strand starting at position 943 of SEQ ID NO: 1886768
uggcauggaaucuguggaa

SEQ ID NO: 2425651 - RNA, 19 nt, Artificial Sequence
  Description of Artificial Sequence: Synthetic oligonucleotide
  Antisense strand to SEQ ID NO: 2425650
uuccacagauuccaugcca

SEQ ID NO: 2425652 - RNA, 19 nt, Artificial Sequence
  Description of Artificial Sequence: Synthetic oligonucleotide
  Sense strand starting at position 946 of SEQ ID NO: 1886768
cauggaaucuguggaauga

SEQ ID NO: 2425653 - RNA, 19 nt, Artificial Sequence
  Description of Artificial Sequence: Synthetic oligonucleotide
  Antisense strand to SEQ ID NO: 2425652
ucauuccacagauuccaug

SEQ ID NO: 2425654 - RNA, 19 nt, Artificial Sequence
  Description of Artificial Sequence: Synthetic oligonucleotide
  Sense strand starting at position 1104 of SEQ ID NO: 1886768
uggccugugucuuaaccau

SEQ ID NO: 2425655 - RNA, 19 nt, Artificial Sequence
  Description of Artificial Sequence: Synthetic oligonucleotide
  Antisense strand to SEQ ID NO: 2425654
augguuaagacacaggcca

SEQ ID NO: 2425656 - RNA, 19 nt, Artificial Sequence
  Description of Artificial Sequence: Synthetic oligonucleotide
  Sense strand starting at position 1150 of SEQ ID NO: 1886768
uagucaacgugagcugaau

SEQ ID NO: 2425657 - RNA, 19 nt, Artificial Sequence
  Description of Artificial Sequence: Synthetic oligonucleotide
  Antisense strand to SEQ ID NO: 2425656
auucagcucacguugacua

SEQ ID NO: 2425658 - RNA, 19 nt, Artificial Sequence
  Description of Artificial Sequence: Synthetic oligonucleotide
  Sense strand starting at position 1184 of SEQ ID NO: 1886768
aaacguuacagguggauca

SEQ ID NO: 2425659 - RNA, 19 nt, Artificial Sequence
  Description of Artificial Sequence: Synthetic oligonucleotide
  Antisense strand to SEQ ID NO: 2425658
ugauccaccuguaacguuu

SEQ ID NO: 2425660 - RNA, 19 nt, Artificial Sequence
  Description of Artificial Sequence: Synthetic oligonucleotide
  Sense strand starting at position 1364 of SEQ ID NO: 1886768
cccggacucacugagaagu

SEQ ID NO: 2425661 - RNA, 19 nt, Artificial Sequence
  Description of Artificial Sequence: Synthetic oligonucleotide
  Antisense strand to SEQ ID NO: 2425660
acuucucagugaguccggg

SEQ ID NO: 2425662 - RNA, 19 nt, Artificial Sequence
  Description of Artificial Sequence: Synthetic oligonucleotide
  Sense strand starting at position 1467 of SEQ ID NO: 1886768
ggaggaauccaugggugca

SEQ ID NO: 2425663 - RNA, 19 nt, Artificial Sequence
  Description of Artificial Sequence: Synthetic oligonucleotide
  Antisense strand to SEQ ID NO: 2425662
ugcacccauggauuccucc

SEQ ID NO: 2425664 - RNA, 19 nt, Artificial Sequence
  Description of Artificial Sequence: Synthetic oligonucleotide
  Sense strand starting at position 1490 of SEQ ID NO: 1886768
cccggaguucugugcagca

SEQ ID NO: 2425665 - RNA, 19 nt, Artificial Sequence
  Description of Artificial Sequence: Synthetic oligonucleotide
  Antisense strand to SEQ ID NO: 2425664
ugcugcacagaacuccggg

SEQ ID NO: 2425666 - RNA, 19 nt, Artificial Sequence
  Description of Artificial Sequence: Synthetic oligonucleotide
  Sense strand starting at position 1883 of SEQ ID NO: 1886768
gccgcucggugucaaugau

SEQ ID NO: 2425667 - RNA, 19 nt, Artificial Sequence
  Description of Artificial Sequence: Synthetic oligonucleotide
  Antisense strand to SEQ ID NO: 2425666
aucauugacaccgagcggc

SEQ ID NO: 2425668 - RNA, 19 nt, Artificial Sequence
  Description of Artificial Sequence: Synthetic oligonucleotide
  Sense strand starting at position 1887 of SEQ ID NO: 1886768
cucggugucaaugauauac

SEQ ID NO: 2425669 - RNA, 19 nt, Artificial Sequence
  Description of Artificial Sequence: Synthetic oligonucleotide
  Antisense strand to SEQ ID NO: 2425668
guauaucauugacaccgag

SEQ ID NO: 2425670 - RNA, 19 nt, Artificial Sequence
  Description of Artificial Sequence: Synthetic oligonucleotide
  Sense strand starting at position 1889 of SEQ ID NO: 1886768
cggugucaaugauauacca

SEQ ID NO: 2425671 - RNA, 19 nt, Artificial Sequence
  Description of Artificial Sequence: Synthetic oligonucleotide
  Antisense strand to SEQ ID NO: 2425670
ugguauaucauugacaccg

SEQ ID NO: 2425672 - RNA, 19 nt, Artificial Sequence
  Description of Artificial Sequence: Synthetic oligonucleotide
  Sense strand starting at position 1904 of SEQ ID NO: 1886768
accagaaguccgugccgau

SEQ ID NO: 2425673 - RNA, 19 nt, Artificial Sequence
  Description of Artificial Sequence: Synthetic oligonucleotide
  Antisense strand to SEQ ID NO: 2425672
aucggcacggacuucuggu

SEQ ID NO: 2425674 - RNA, 19 nt, Artificial Sequence
  Description of Artificial Sequence: Synthetic oligonucleotide
  Sense strand starting at position 2883 of SEQ ID NO: 1886768
ggcugacuagaaugugaaa

SEQ ID NO: 2425675 - RNA, 19 nt, Artificial Sequence
  Description of Artificial Sequence: Synthetic oligonucleotide
  Antisense strand to SEQ ID NO: 2425674
uuucacauucuagucagcc

SEQ ID NO: 2425676 - RNA, 19 nt, Artificial Sequence
  Description of Artificial Sequence: Synthetic oligonucleotide
  Sense strand starting at position 2927 of SEQ ID NO: 1886768
ucucuaaagcacugaggua

SEQ ID NO: 2425677 - RNA, 19 nt, Artificial Sequence
  Description of Artificial Sequence: Synthetic oligonucleotide
  Antisense strand to SEQ ID NO: 2425676
uaccucagugcuuuagaga

SEQ ID NO: 2425678 - RNA, 19 nt, Artificial Sequence
  Description of Artificial Sequence: Synthetic oligonucleotide
  Sense strand starting at position 2944 of SEQ ID NO: 1886768
uaguccagguccucagaau

SEQ ID NO: 2425679 - RNA, 19 nt, Artificial Sequence
  Description of Artificial Sequence: Synthetic oligonucleotide
  Antisense strand to SEQ ID NO: 2425678
auucugaggaccuggacua

SEQ ID NO: 2425680 - RNA, 19 nt, Artificial Sequence
  Description of Artificial Sequence: Synthetic oligonucleotide
  Sense strand starting at position 304 of SEQ ID NO: 1886769
cagggucuaguaugcaaau

SEQ ID NO: 2425681 - RNA, 19 nt, Artificial Sequence
  Description of Artificial Sequence: Synthetic oligonucleotide
  Antisense strand to SEQ ID NO: 2425680
auuugcauacuagacccug

SEQ ID NO: 2425682 - RNA, 19 nt, Artificial Sequence
  Description of Artificial Sequence: Synthetic oligonucleotide
  Sense strand starting at position 305 of SEQ ID NO: 1886769
agggucuaguaugcaaauu

SEQ ID NO: 2425683 - RNA, 19 nt, Artificial Sequence
  Description of Artificial Sequence: Synthetic oligonucleotide
  Antisense strand to SEQ ID NO: 2425682
aauuugcauacuagacccu

SEQ ID NO: 2425684 - RNA, 19 nt, Artificial Sequence
  Description of Artificial Sequence: Synthetic oligonucleotide
  Sense strand starting at position 306 of SEQ ID NO: 1886769
gggucuaguaugcaaauua

SEQ ID NO: 2425685 - RNA, 19 nt, Artificial Sequence
  Description of Artificial Sequence: Synthetic oligonucleotide
  Antisense strand to SEQ ID NO: 2425684
uaauuugcauacuagaccc

SEQ ID NO: 2425686 - RNA, 19 nt, Artificial Sequence
  Description of Artificial Sequence: Synthetic oligonucleotide
  Sense strand starting at position 882 of SEQ ID NO: 1886769
aacggcuaccucgaaaguu

SEQ ID NO: 2425687 - RNA, 19 nt, Artificial Sequence
  Description of Artificial Sequence: Synthetic oligonucleotide
  Antisense strand to SEQ ID NO: 2425686
aacuuucgagguagccguu

SEQ ID NO: 2425688 - RNA, 19 nt, Artificial Sequence
  Description of Artificial Sequence: Synthetic oligonucleotide
  Sense strand starting at position 1089 of SEQ ID NO: 1886769
acugaauaaugggaacuca

SEQ ID NO: 2425689 - RNA, 19 nt, Artificial Sequence
  Description of Artificial Sequence: Synthetic oligonucleotide
  Antisense strand to SEQ ID NO: 2425688
ugaguucccauuauucagu

SEQ ID NO: 2425690 - RNA, 19 nt, Artificial Sequence
  Description of Artificial Sequence: Synthetic oligonucleotide
  Sense strand starting at position 1112 of SEQ ID NO: 1886769
ggagucgaguacuuaguua

SEQ ID NO: 2425691 - RNA, 19 nt, Artificial Sequence
  Description of Artificial Sequence: Synthetic oligonucleotide
  Antisense strand to SEQ ID NO: 2425690
uaacuaaguacucgacucc

SEQ ID NO: 2425692 - RNA, 19 nt, Artificial Sequence
  Description of Artificial Sequence: Synthetic oligonucleotide
  Sense strand starting at position 1116 of SEQ ID NO: 1886769
ucgaguacuuaguuauuaa

SEQ ID NO: 2425693 - RNA, 19 nt, Artificial Sequence
  Description of Artificial Sequence: Synthetic oligonucleotide
  Antisense strand to SEQ ID NO: 2425692
uuaauaacuaaguacucga

SEQ ID NO: 2425694 - RNA, 19 nt, Artificial Sequence
  Description of Artificial Sequence: Synthetic oligonucleotide
  Sense strand starting at position 1242 of SEQ ID NO: 1886769
ucaauaauccuagggaggu

SEQ ID NO: 2425695 - RNA, 19 nt, Artificial Sequence
  Description of Artificial Sequence: Synthetic oligonucleotide
  Antisense strand to SEQ ID NO: 2425694
accucccuaggauuauuga

SEQ ID NO: 2425696 - RNA, 19 nt, Artificial Sequence
  Description of Artificial Sequence: Synthetic oligonucleotide
  Sense strand starting at position 1911 of SEQ ID NO: 1886769
gagguugacagcugaggaa

SEQ ID NO: 2425697 - RNA, 19 nt, Artificial Sequence
  Description of Artificial Sequence: Synthetic oligonucleotide
  Antisense strand to SEQ ID NO: 2425696
uuccucagcugucaaccuc

SEQ ID NO: 2425698 - RNA, 19 nt, Artificial Sequence
  Description of Artificial Sequence: Synthetic oligonucleotide
  Sense strand starting at position 1962 of SEQ ID NO: 1886769
acuggcuuggagugagaaa

SEQ ID NO: 2425699 - RNA, 19 nt, Artificial Sequence
  Description of Artificial Sequence: Synthetic oligonucleotide
  Antisense strand to SEQ ID NO: 2425698
uuucucacuccaagccagu

SEQ ID NO: 2425700 - RNA, 19 nt, Artificial Sequence
  Description of Artificial Sequence: Synthetic oligonucleotide
  Sense strand starting at position 2151 of SEQ ID NO: 1886769
cucaaaugcgaaugucaua

SEQ ID NO: 2425701 - RNA, 19 nt, Artificial Sequence
  Description of Artificial Sequence: Synthetic oligonucleotide
  Antisense strand to SEQ ID NO: 2425700
uaugacauucgcauuugag

SEQ ID NO: 2425702 - RNA, 19 nt, Artificial Sequence
  Description of Artificial Sequence: Synthetic oligonucleotide
  Sense strand starting at position 2164 of SEQ ID NO: 1886769
gucauaagccagugagauc

SEQ ID NO: 2425703 - RNA, 19 nt, Artificial Sequence
  Description of Artificial Sequence: Synthetic oligonucleotide
  Antisense strand to SEQ ID NO: 2425702
gaucucacuggcuuaugac

SEQ ID NO: 2425704 - RNA, 19 nt, Artificial Sequence
  Description of Artificial Sequence: Synthetic oligonucleotide
  Sense strand starting at position 2262 of SEQ ID NO: 1886769
ucgguuugcauggauccaa

SEQ ID NO: 2425705 - RNA, 19 nt, Artificial Sequence
  Description of Artificial Sequence: Synthetic oligonucleotide
  Antisense strand to SEQ ID NO: 2425704
uuggauccaugcaaaccga

SEQ ID NO: 2425706 - RNA, 19 nt, Artificial Sequence
  Description of Artificial Sequence: Synthetic oligonucleotide
  Sense strand starting at position 2312 of SEQ ID NO: 1886769
ccaaaucugcccuauagag

SEQ ID NO: 2425707 - RNA, 19 nt, Artificial Sequence
  Description of Artificial Sequence: Synthetic oligonucleotide
  Antisense strand to SEQ ID NO: 2425706
cucuauagggcagauuugg

SEQ ID NO: 2425708 - RNA, 19 nt, Artificial Sequence
  Description of Artificial Sequence: Synthetic oligonucleotide
  Sense strand starting at position 2319 of SEQ ID NO: 1886769
ugcccuauagaguaagguu

SEQ ID NO: 2425709 - RNA, 19 nt, Artificial Sequence
  Description of Artificial Sequence: Synthetic oligonucleotide
  Antisense strand to SEQ ID NO: 2425708
aaccuuacucuauagggca

SEQ ID NO: 2425710 - RNA, 19 nt, Artificial Sequence
  Description of Artificial Sequence: Synthetic oligonucleotide
  Sense strand starting at position 2327 of SEQ ID NO: 1886769
agaguaagguuucugaaua

SEQ ID NO: 2425711 - RNA, 19 nt, Artificial Sequence
  Description of Artificial Sequence: Synthetic oligonucleotide
  Antisense strand to SEQ ID NO: 2425710
uauucagaaaccuuacucu

SEQ ID NO: 2425712 - RNA, 19 nt, Artificial Sequence
  Description of Artificial Sequence: Synthetic oligonucleotide
  Sense strand starting at position 2337 of SEQ ID NO: 1886769
uucugaauaguaugcuauu

SEQ ID NO: 2425713 - RNA, 19 nt, Artificial Sequence
  Description of Artificial Sequence: Synthetic oligonucleotide
  Antisense strand to SEQ ID NO: 2425712
aauagcauacuauucagaa

SEQ ID NO: 2425714 - RNA, 19 nt, Artificial Sequence
  Description of Artificial Sequence: Synthetic oligonucleotide
  Sense strand starting at position 2367 of SEQ ID NO: 1886769
cggaauaauucuguuucug

SEQ ID NO: 2425715 - RNA, 19 nt, Artificial Sequence
  Description of Artificial Sequence: Synthetic oligonucleotide
  Antisense strand to SEQ ID NO: 2425714
cagaaacagaauuauuccg

SEQ ID NO: 2425716 - RNA, 19 nt, Artificial Sequence
  Description of Artificial Sequence: Synthetic oligonucleotide
  Sense strand starting at position 2369 of SEQ ID NO: 1886769
gaauaauucuguuucugag

SEQ ID NO: 2425717 - RNA, 19 nt, Artificial Sequence
  Description of Artificial Sequence: Synthetic oligonucleotide
  Antisense strand to SEQ ID NO: 2425716
cucagaaacagaauuauuc

SEQ ID NO: 2425718 - RNA, 19 nt, Artificial Sequence
  Description of Artificial Sequence: Synthetic oligonucleotide
  Sense strand starting at position 2381 of SEQ ID NO: 1886769
uucugagcuguggauugua

SEQ ID NO: 2425719 - RNA, 19 nt, Artificial Sequence
  Description of Artificial Sequence: Synthetic oligonucleotide
  Antisense strand to SEQ ID NO: 2425718
uacaauccacagcucagaa

SEQ ID NO: 2425720 - RNA, 19 nt, Artificial Sequence
  Description of Artificial Sequence: Synthetic oligonucleotide
  Sense strand starting at position 2384 of SEQ ID NO: 1886769
ugagcuguggauuguagaa

SEQ ID NO: 2425721 - RNA, 19 nt, Artificial Sequence
  Description of Artificial Sequence: Synthetic oligonucleotide
  Antisense strand to SEQ ID NO: 2425720
uucuacaauccacagcuca

SEQ ID NO: 2425722 - RNA, 19 nt, Artificial Sequence
  Description of Artificial Sequence: Synthetic oligonucleotide
  Sense strand starting at position 2555 of SEQ ID NO: 1886769
cuuacugugugacuaagua

SEQ ID NO: 2425723 - RNA, 19 nt, Artificial Sequence
  Description of Artificial Sequence: Synthetic oligonucleotide
  Antisense strand to SEQ ID NO: 2425722
uacuuagucacacaguaag

SEQ ID NO: 2425724 - RNA, 19 nt, Artificial Sequence
  Description of Artificial Sequence: Synthetic oligonucleotide
  Sense strand starting at position 3043 of SEQ ID NO: 1886769
aagcaaucacaggguugua

SEQ ID NO: 2425725 - RNA, 19 nt, Artificial Sequence
  Description of Artificial Sequence: Synthetic oligonucleotide
  Antisense strand to SEQ ID NO: 2425724
uacaacccugugauugcuu

SEQ ID NO: 2425726 - RNA, 19 nt, Artificial Sequence
  Description of Artificial Sequence: Synthetic oligonucleotide
  Sense strand starting at position 3063 of SEQ ID NO: 1886769
ugaggacuggugcaauagu

SEQ ID NO: 2425727 - RNA, 19 nt, Artificial Sequence
  Description of Artificial Sequence: Synthetic oligonucleotide
  Antisense strand to SEQ ID NO: 2425726
acuauugcaccaguccuca

SEQ ID NO: 2425728 - RNA, 19 nt, Artificial Sequence
  Description of Artificial Sequence: Synthetic oligonucleotide
  Sense strand starting at position 3087 of SEQ ID NO: 1886769
uguggcugucgagaacuua

SEQ ID NO: 2425729 - RNA, 19 nt, Artificial Sequence
  Description of Artificial Sequence: Synthetic oligonucleotide
  Antisense strand to SEQ ID NO: 2425728
uaaguucucgacagccaca

SEQ ID NO: 2425730 - RNA, 19 nt, Artificial Sequence
  Description of Artificial Sequence: Synthetic oligonucleotide
  Sense strand starting at position 3109 of SEQ ID NO: 1886769
ccuauugaggcacagagua

SEQ ID NO: 2425731 - RNA, 19 nt, Artificial Sequence
  Description of Artificial Sequence: Synthetic oligonucleotide
  Antisense strand to SEQ ID NO: 2425730
uacucugugccucaauagg

SEQ ID NO: 2425732 - RNA, 19 nt, Artificial Sequence
  Description of Artificial Sequence: Synthetic oligonucleotide
  Sense strand starting at position 3139 of SEQ ID NO: 1886769
auauuugcuugggaugaug

SEQ ID NO: 2425733 - RNA, 19 nt, Artificial Sequence
  Description of Artificial Sequence: Synthetic oligonucleotide
  Antisense strand to SEQ ID NO: 2425732
caucaucccaagcaaauau

SEQ ID NO: 2425734 - RNA, 19 nt, Artificial Sequence
  Description of Artificial Sequence: Synthetic oligonucleotide
  Sense strand starting at position 3142 of SEQ ID NO: 1886769
uuugcuugggaugaugauu

SEQ ID NO: 2425735 - RNA, 19 nt, Artificial Sequence
  Description of Artificial Sequence: Synthetic oligonucleotide
  Antisense strand to SEQ ID NO: 2425734
aaucaucaucccaagcaaa

SEQ ID NO: 2425736 - RNA, 19 nt, Artificial Sequence
  Description of Artificial Sequence: Synthetic oligonucleotide
  Sense strand starting at position 3151 of SEQ ID NO: 1886769
gaugaugauuuaugaugau

SEQ ID NO: 2425737 - RNA, 19 nt, Artificial Sequence
  Description of Artificial Sequence: Synthetic oligonucleotide
  Antisense strand to SEQ ID NO: 2425736
aucaucauaaaucaucauc

SEQ ID NO: 2425738 - RNA, 19 nt, Artificial Sequence
  Description of Artificial Sequence: Synthetic oligonucleotide
  Sense strand starting at position 3154 of SEQ ID NO: 1886769
gaugauuuaugaugaugau

SEQ ID NO: 2425739 - RNA, 19 nt, Artificial Sequence
  Description of Artificial Sequence: Synthetic oligonucleotide
  Antisense strand to SEQ ID NO: 2425738
aucaucaucauaaaucauc

SEQ ID NO: 2425740 - RNA, 19 nt, Artificial Sequence
  Description of Artificial Sequence: Synthetic oligonucleotide
  Sense strand starting at position 3157 of SEQ ID NO: 1886769
gauuuaugaugaugaucac

SEQ ID NO: 2425741 - RNA, 19 nt, Artificial Sequence
  Description of Artificial Sequence: Synthetic oligonucleotide
  Antisense strand to SEQ ID NO: 2425740
gugaucaucaucauaaauc

SEQ ID NO: 2425742 - RNA, 19 nt, Artificial Sequence
  Description of Artificial Sequence: Synthetic oligonucleotide
  Sense strand starting at position 3169 of SEQ ID NO: 1886769
ugaucacgacaaugauaug

SEQ ID NO: 2425743 - RNA, 19 nt, Artificial Sequence
  Description of Artificial Sequence: Synthetic oligonucleotide
  Antisense strand to SEQ ID NO: 2425742
cauaucauugucgugauca

SEQ ID NO: 2425744 - RNA, 19 nt, Artificial Sequence
  Description of Artificial Sequence: Synthetic oligonucleotide
  Sense strand starting at position 3205 of SEQ ID NO: 1886769
gcuguaauuccacaauagc

SEQ ID NO: 2425745 - RNA, 19 nt, Artificial Sequence
  Description of Artificial Sequence: Synthetic oligonucleotide
  Antisense strand to SEQ ID NO: 2425744
gcuauuguggaauuacagc

SEQ ID NO: 2425746 - RNA, 19 nt, Artificial Sequence
  Description of Artificial Sequence: Synthetic oligonucleotide
  Sense strand starting at position 3208 of SEQ ID NO: 1886769
guaauuccacaauagcaga

SEQ ID NO: 2425747 - RNA, 19 nt, Artificial Sequence
  Description of Artificial Sequence: Synthetic oligonucleotide
  Antisense strand to SEQ ID NO: 2425746
ucugcuauuguggaauuac

SEQ ID NO: 2425748 - RNA, 19 nt, Artificial Sequence
  Description of Artificial Sequence: Synthetic oligonucleotide
  Sense strand starting at position 3418 of SEQ ID NO: 1886769
aauggaaguugcuuuggaa

SEQ ID NO: 2425749 - RNA, 19 nt, Artificial Sequence
  Description of Artificial Sequence: Synthetic oligonucleotide
  Antisense strand to SEQ ID NO: 2425748
uuccaaagcaacuuccauu

SEQ ID NO: 2425750 - RNA, 19 nt, Artificial Sequence
  Description of Artificial Sequence: Synthetic oligonucleotide
  Sense strand starting at position 3445 of SEQ ID NO: 1886769
uaggguuuccacugggauu

SEQ ID NO: 2425751 - RNA, 19 nt, Artificial Sequence
  Description of Artificial Sequence: Synthetic oligonucleotide
  Antisense strand to SEQ ID NO: 2425750
aaucccaguggaaacccua

SEQ ID NO: 2425752 - RNA, 19 nt, Artificial Sequence
  Description of Artificial Sequence: Synthetic oligonucleotide
  Sense strand starting at position 3558 of SEQ ID NO: 1886769
cuuugugugauagaugcuu

SEQ ID NO: 2425753 - RNA, 19 nt, Artificial Sequence
  Description of Artificial Sequence: Synthetic oligonucleotide
  Antisense strand to SEQ ID NO: 2425752
aagcaucuaucacacaaag

SEQ ID NO: 2425754 - RNA, 19 nt, Artificial Sequence
  Description of Artificial Sequence: Synthetic oligonucleotide
  Sense strand starting at position 3727 of SEQ ID NO: 1886769
cugaaugucuguuccucua

SEQ ID NO: 2425755 - RNA, 19 nt, Artificial Sequence
  Description of Artificial Sequence: Synthetic oligonucleotide
  Antisense strand to SEQ ID NO: 2425754
uagaggaacagacauucag

SEQ ID NO: 2425756 - RNA, 19 nt, Artificial Sequence
  Description of Artificial Sequence: Synthetic oligonucleotide
  Sense strand starting at position 3761 of SEQ ID NO: 1886769
augugaugggauuaggcau

SEQ ID NO: 2425757 - RNA, 19 nt, Artificial Sequence
  Description of Artificial Sequence: Synthetic oligonucleotide
  Antisense strand to SEQ ID NO: 2425756
augccuaaucccaucacau

SEQ ID NO: 2425758 - RNA, 19 nt, Artificial Sequence
  Description of Artificial Sequence: Synthetic oligonucleotide
  Sense strand starting at position 3847 of SEQ ID NO: 1886769
aagagaucccaguggcuca

SEQ ID NO: 2425759 - RNA, 19 nt, Artificial Sequence
  Description of Artificial Sequence: Synthetic oligonucleotide
  Antisense strand to SEQ ID NO: 2425758
ugagccacugggaucucuu

SEQ ID NO: 2425760 - RNA, 19 nt, Artificial Sequence
  Description of Artificial Sequence: Synthetic oligonucleotide
  Sense strand starting at position 361 of SEQ ID NO: 1886770
gcugauuaauaaguauuga

SEQ ID NO: 2425761 - RNA, 19 nt, Artificial Sequence
  Description of Artificial Sequence: Synthetic oligonucleotide
  Antisense strand to SEQ ID NO: 2425760
ucaauacuuauuaaucagc

SEQ ID NO: 2425762 - RNA, 19 nt, Artificial Sequence
  Description of Artificial Sequence: Synthetic oligonucleotide
  Sense strand starting at position 442 of SEQ ID NO: 1886770
uuagaaugagcaugcacuu

SEQ ID NO: 2425763 - RNA, 19 nt, Artificial Sequence
  Description of Artificial Sequence: Synthetic oligonucleotide
  Antisense strand to SEQ ID NO: 2425762
aagugcaugcucauucuaa

SEQ ID NO: 2425764 - RNA, 19 nt, Artificial Sequence
  Description of Artificial Sequence: Synthetic oligonucleotide
  Sense strand starting at position 616 of SEQ ID NO: 1886770
aguuauuuauacgaccaau

SEQ ID NO: 2425765 - RNA, 19 nt, Artificial Sequence
  Description of Artificial Sequence: Synthetic oligonucleotide
  Antisense strand to SEQ ID NO: 2425764
auuggucguauaaauaacu

SEQ ID NO: 2425766 - RNA, 19 nt, Artificial Sequence
  Description of Artificial Sequence: Synthetic oligonucleotide
  Sense strand starting at position 654 of SEQ ID NO: 1886770
uuauuuaguugcugggaac

SEQ ID NO: 2425767 - RNA, 19 nt, Artificial Sequence
  Description of Artificial Sequence: Synthetic oligonucleotide
  Antisense strand to SEQ ID NO: 2425766
guucccagcaacuaaauaa

SEQ ID NO: 2425768 - RNA, 19 nt, Artificial Sequence
  Description of Artificial Sequence: Synthetic oligonucleotide
  Sense strand starting at position 709 of SEQ ID NO: 1886770
uggcuuguagggcaaucau

SEQ ID NO: 2425769 - RNA, 19 nt, Artificial Sequence
  Description of Artificial Sequence: Synthetic oligonucleotide
  Antisense strand to SEQ ID NO: 2425768
augauugcccuacaagcca

SEQ ID NO: 2425770 - RNA, 19 nt, Artificial Sequence
  Description of Artificial Sequence: Synthetic oligonucleotide
  Sense strand starting at position 728 of SEQ ID NO: 1886770
cuuagauaugucugaagag

SEQ ID NO: 2425771 - RNA, 19 nt, Artificial Sequence
  Description of Artificial Sequence: Synthetic oligonucleotide
  Antisense strand to SEQ ID NO: 2425770
cucuucagacauaucuaag

SEQ ID NO: 2425772 - RNA, 19 nt, Artificial Sequence
  Description of Artificial Sequence: Synthetic oligonucleotide
  Sense strand starting at position 729 of SEQ ID NO: 1886770
uuagauaugucugaagaga

SEQ ID NO: 2425773 - RNA, 19 nt, Artificial Sequence
  Description of Artificial Sequence: Synthetic oligonucleotide
  Antisense strand to SEQ ID NO: 2425772
ucucuucagacauaucuaa

SEQ ID NO: 2425774 - RNA, 19 nt, Artificial Sequence
  Description of Artificial Sequence: Synthetic oligonucleotide
  Sense strand starting at position 745 of SEQ ID NO: 1886770
agauucgaauuugaaagaa

SEQ ID NO: 2425775 - RNA, 19 nt, Artificial Sequence
  Description of Artificial Sequence: Synthetic oligonucleotide
  Antisense strand to SEQ ID NO: 2425774
uucuuucaaauucgaaucu

SEQ ID NO: 2425776 - RNA, 19 nt, Artificial Sequence
  Description of Artificial Sequence: Synthetic oligonucleotide
  Sense strand starting at position 838 of SEQ ID NO: 1886770
agcauucgcuuaucucaaa

SEQ ID NO: 2425777 - RNA, 19 nt, Artificial Sequence
  Description of Artificial Sequence: Synthetic oligonucleotide
  Antisense strand to SEQ ID NO: 2425776
uuugagauaagcgaaugcu

SEQ ID NO: 2425778 - RNA, 19 nt, Artificial Sequence
  Description of Artificial Sequence: Synthetic oligonucleotide
  Sense strand starting at position 973 of SEQ ID NO: 1886770
cgcagucuccaaugggaca

SEQ ID NO: 2425779 - RNA, 19 nt, Artificial Sequence
  Description of Artificial Sequence: Synthetic oligonucleotide
  Antisense strand to SEQ ID NO: 2425778
ugucccauuggagacugcg

SEQ ID NO: 2425780 - RNA, 19 nt, Artificial Sequence
  Description of Artificial Sequence: Synthetic oligonucleotide
  Sense strand starting at position 974 of SEQ ID NO: 1886770
gcagucuccaaugggacaa

SEQ ID NO: 2425781 - RNA, 19 nt, Artificial Sequence
  Description of Artificial Sequence: Synthetic oligonucleotide
  Antisense strand to SEQ ID NO: 2425780
uugucccauuggagacugc

SEQ ID NO: 2425782 - RNA, 19 nt, Artificial Sequence
  Description of Artificial Sequence: Synthetic oligonucleotide
  Sense strand starting at position 1102 of SEQ ID NO: 1886770
ccuauaguggugugaugca

SEQ ID NO: 2425783 - RNA, 19 nt, Artificial Sequence
  Description of Artificial Sequence: Synthetic oligonucleotide
  Antisense strand to SEQ ID NO: 2425782
ugcaucacaccacuauagg

SEQ ID NO: 2425784 - RNA, 19 nt, Artificial Sequence
  Description of Artificial Sequence: Synthetic oligonucleotide
  Sense strand starting at position 1107 of SEQ ID NO: 1886770
aguggugugaugcagaaac

SEQ ID NO: 2425785 - RNA, 19 nt, Artificial Sequence
  Description of Artificial Sequence: Synthetic oligonucleotide
  Antisense strand to SEQ ID NO: 2425784
guuucugcaucacaccacu

SEQ ID NO: 2425786 - RNA, 19 nt, Artificial Sequence
  Description of Artificial Sequence: Synthetic oligonucleotide
  Sense strand starting at position 1387 of SEQ ID NO: 1886770
gcggguucgcgaguccuua

SEQ ID NO: 2425787 - RNA, 19 nt, Artificial Sequence
  Description of Artificial Sequence: Synthetic oligonucleotide
  Antisense strand to SEQ ID NO: 2425786
uaaggacucgcgaacccgc

SEQ ID NO: 2425788 - RNA, 19 nt, Artificial Sequence
  Description of Artificial Sequence: Synthetic oligonucleotide
  Sense strand starting at position 2116 of SEQ ID NO: 1886770
agcuguguacguuugcgua

SEQ ID NO: 2425789 - RNA, 19 nt, Artificial Sequence
  Description of Artificial Sequence: Synthetic oligonucleotide
  Antisense strand to SEQ ID NO: 2425788
uacgcaaacguacacagcu

SEQ ID NO: 2425790 - RNA, 19 nt, Artificial Sequence
  Description of Artificial Sequence: Synthetic oligonucleotide
  Sense strand starting at position 2122 of SEQ ID NO: 1886770
guacguuugcguaaaggcu

SEQ ID NO: 2425791 - RNA, 19 nt, Artificial Sequence
  Description of Artificial Sequence: Synthetic oligonucleotide
  Antisense strand to SEQ ID NO: 2425790
agccuuuacgcaaacguac

SEQ ID NO: 2425792 - RNA, 19 nt, Artificial Sequence
  Description of Artificial Sequence: Synthetic oligonucleotide
  Sense strand starting at position 2145 of SEQ ID NO: 1886770
ggcgauagaacguuuccgu

SEQ ID NO: 2425793 - RNA, 19 nt, Artificial Sequence
  Description of Artificial Sequence: Synthetic oligonucleotide
  Antisense strand to SEQ ID NO: 2425792
acggaaacguucuaucgcc

SEQ ID NO: 2425794 - RNA, 19 nt, Artificial Sequence
  Description of Artificial Sequence: Synthetic oligonucleotide
  Sense strand starting at position 2148 of SEQ ID NO: 1886770
gauagaacguuuccgugga

SEQ ID NO: 2425795 - RNA, 19 nt, Artificial Sequence
  Description of Artificial Sequence: Synthetic oligonucleotide
  Antisense strand to SEQ ID NO: 2425794
uccacggaaacguucuauc

SEQ ID NO: 2425796 - RNA, 19 nt, Artificial Sequence
  Description of Artificial Sequence: Synthetic oligonucleotide
  Sense strand starting at position 2153 of SEQ ID NO: 1886770
aacguuuccguggaccaga

SEQ ID NO: 2425797 - RNA, 19 nt, Artificial Sequence
  Description of Artificial Sequence: Synthetic oligonucleotide
  Antisense strand to SEQ ID NO: 2425796
ucugguccacggaaacguu

SEQ ID NO: 2425798 - RNA, 19 nt, Artificial Sequence
  Description of Artificial Sequence: Synthetic oligonucleotide
  Sense strand starting at position 2187 of SEQ ID NO: 1886770
uguguuaacauuuguguaa

SEQ ID NO: 2425799 - RNA, 19 nt, Artificial Sequence
  Description of Artificial Sequence: Synthetic oligonucleotide
  Antisense strand to SEQ ID NO: 2425798
uuacacaaauguuaacaca

SEQ ID NO: 2425800 - RNA, 19 nt, Artificial Sequence
  Description of Artificial Sequence: Synthetic oligonucleotide
  Sense strand starting at position 2188 of SEQ ID NO: 1886770
guguuaacauuuguguaaa

SEQ ID NO: 2425801 - RNA, 19 nt, Artificial Sequence
  Description of Artificial Sequence: Synthetic oligonucleotide
  Antisense strand to SEQ ID NO: 2425800
uuuacacaaauguuaacac

SEQ ID NO: 2425802 - RNA, 19 nt, Artificial Sequence
  Description of Artificial Sequence: Synthetic oligonucleotide
  Sense strand starting at position 2368 of SEQ ID NO: 1886770
agucuacuccuauacguca

SEQ ID NO: 2425803 - RNA, 19 nt, Artificial Sequence
  Description of Artificial Sequence: Synthetic oligonucleotide
  Antisense strand to SEQ ID NO: 2425802
ugacguauaggaguagacu

SEQ ID NO: 2425804 - RNA, 19 nt, Artificial Sequence
  Description of Artificial Sequence: Synthetic oligonucleotide
  Sense strand starting at position 2373 of SEQ ID NO: 1886770
acuccuauacgucaguuau

SEQ ID NO: 2425805 - RNA, 19 nt, Artificial Sequence
  Description of Artificial Sequence: Synthetic oligonucleotide
  Antisense strand to SEQ ID NO: 2425804
auaacugacguauaggagu

SEQ ID NO: 2425806 - RNA, 19 nt, Artificial Sequence
  Description of Artificial Sequence: Synthetic oligonucleotide
  Sense strand starting at position 2375 of SEQ ID NO: 1886770
uccuauacgucaguuauug

SEQ ID NO: 2425807 - RNA, 19 nt, Artificial Sequence
  Description of Artificial Sequence: Synthetic oligonucleotide
  Antisense strand to SEQ ID NO: 2425806
caauaacugacguauagga

SEQ ID NO: 2425808 - RNA, 19 nt, Artificial Sequence
  Description of Artificial Sequence: Synthetic oligonucleotide
  Sense strand starting at position 2758 of SEQ ID NO: 1886770
cuugcuuacccuuaaaggu

SEQ ID NO: 2425809 - RNA, 19 nt, Artificial Sequence
  Description of Artificial Sequence: Synthetic oligonucleotide
  Antisense strand to SEQ ID NO: 2425808
accuuuaaggguaagcaag

SEQ ID NO: 2425810 - RNA, 19 nt, Artificial Sequence
  Description of Artificial Sequence: Synthetic oligonucleotide
  Sense strand starting at position 3014 of SEQ ID NO: 1886770
uggcucuuccacggauaga

SEQ ID NO: 2425811 - RNA, 19 nt, Artificial Sequence
  Description of Artificial Sequence: Synthetic oligonucleotide
  Antisense strand to SEQ ID NO: 2425810
ucuauccguggaagagcca

SEQ ID NO: 2425812 - RNA, 19 nt, Artificial Sequence
  Description of Artificial Sequence: Synthetic oligonucleotide
  Sense strand starting at position 3015 of SEQ ID NO: 1886770
ggcucuuccacggauagag

SEQ ID NO: 2425813 - RNA, 19 nt, Artificial Sequence
  Description of Artificial Sequence: Synthetic oligonucleotide
  Antisense strand to SEQ ID NO: 2425812
cucuauccguggaagagcc

SEQ ID NO: 2425814 - RNA, 19 nt, Artificial Sequence
  Description of Artificial Sequence: Synthetic oligonucleotide
  Sense strand starting at position 3023 of SEQ ID NO: 1886770
cacggauagaguggaauua

SEQ ID NO: 2425815 - RNA, 19 nt, Artificial Sequence
  Description of Artificial Sequence: Synthetic oligonucleotide
  Antisense strand to SEQ ID NO: 2425814
uaauuccacucuauccgug

SEQ ID NO: 2425816 - RNA, 19 nt, Artificial Sequence
  Description of Artificial Sequence: Synthetic oligonucleotide
  Sense strand starting at position 3033 of SEQ ID NO: 1886770
guggaauuacuacaaagcu

SEQ ID NO: 2425817 - RNA, 19 nt, Artificial Sequence
  Description of Artificial Sequence: Synthetic oligonucleotide
  Antisense strand to SEQ ID NO: 2425816
agcuuuguaguaauuccac

SEQ ID NO: 2425818 - RNA, 19 nt, Artificial Sequence
  Description of Artificial Sequence: Synthetic oligonucleotide
  Sense strand starting at position 3041 of SEQ ID NO: 1886770
acuacaaagcucugaugca

SEQ ID NO: 2425819 - RNA, 19 nt, Artificial Sequence
  Description of Artificial Sequence: Synthetic oligonucleotide
  Antisense strand to SEQ ID NO: 2425818
ugcaucagagcuuuguagu

SEQ ID NO: 2425820 - RNA, 19 nt, Artificial Sequence
  Description of Artificial Sequence: Synthetic oligonucleotide
  Sense strand starting at position 3121 of SEQ ID NO: 1886770
cccaaagaucacuggcuua

SEQ ID NO: 2425821 - RNA, 19 nt, Artificial Sequence
  Description of Artificial Sequence: Synthetic oligonucleotide
  Antisense strand to SEQ ID NO: 2425820
uaagccagugaucuuuggg

SEQ ID NO: 2425822 - RNA, 19 nt, Artificial Sequence
  Description of Artificial Sequence: Synthetic oligonucleotide
  Sense strand starting at position 3131 of SEQ ID NO: 1886770
acuggcuuauugcuuaauu

SEQ ID NO: 2425823 - RNA, 19 nt, Artificial Sequence
  Description of Artificial Sequence: Synthetic oligonucleotide
  Antisense strand to SEQ ID NO: 2425822
aauuaagcaauaagccagu

SEQ ID NO: 2425824 - RNA, 19 nt, Artificial Sequence
  Description of Artificial Sequence: Synthetic oligonucleotide
  Sense strand starting at position 3133 of SEQ ID NO: 1886770
uggcuuauugcuuaauuga

SEQ ID NO: 2425825 - RNA, 19 nt, Artificial Sequence
  Description of Artificial Sequence: Synthetic oligonucleotide
  Antisense strand to SEQ ID NO: 2425824
ucaauuaagcaauaagcca

SEQ ID NO: 2425826 - RNA, 19 nt, Artificial Sequence
  Description of Artificial Sequence: Synthetic oligonucleotide
  Sense strand starting at position 3755 of SEQ ID NO: 1886770
uuguuaaagggucaguaaa

SEQ ID NO: 2425827 - RNA, 19 nt, Artificial Sequence
  Description of Artificial Sequence: Synthetic oligonucleotide
  Antisense strand to SEQ ID NO: 2425826
uuuacugacccuuuaacaa

SEQ ID NO: 2425828 - RNA, 19 nt, Artificial Sequence
  Description of Artificial Sequence: Synthetic oligonucleotide
  Sense strand starting at position 3794 of SEQ ID NO: 1886770
caugauaagcuuugugauu

SEQ ID NO: 2425829 - RNA, 19 nt, Artificial Sequence
  Description of Artificial Sequence: Synthetic oligonucleotide
  Antisense strand to SEQ ID NO: 2425828
aaucacaaagcuuaucaug

SEQ ID NO: 2425830 - RNA, 19 nt, Artificial Sequence
  Description of Artificial Sequence: Synthetic oligonucleotide
  Sense strand starting at position 3796 of SEQ ID NO: 1886770
ugauaagcuuugugauuug

SEQ ID NO: 2425831 - RNA, 19 nt, Artificial Sequence
  Description of Artificial Sequence: Synthetic oligonucleotide
  Antisense strand to SEQ ID NO: 2425830
caaaucacaaagcuuauca

SEQ ID NO: 2425832 - RNA, 19 nt, Artificial Sequence
  Description of Artificial Sequence: Synthetic oligonucleotide
  Sense strand starting at position 3831 of SEQ ID NO: 1886770
gacagcaugucaguagugu

SEQ ID NO: 2425833 - RNA, 19 nt, Artificial Sequence
  Description of Artificial Sequence: Synthetic oligonucleotide
  Antisense strand to SEQ ID NO: 2425832
acacuacugacaugcuguc

SEQ ID NO: 2425834 - RNA, 19 nt, Artificial Sequence
  Description of Artificial Sequence: Synthetic oligonucleotide
  Sense strand starting at position 3832 of SEQ ID NO: 1886770
acagcaugucaguagugua

SEQ ID NO: 2425835 - RNA, 19 nt, Artificial Sequence
  Description of Artificial Sequence: Synthetic oligonucleotide
  Antisense strand to SEQ ID NO: 2425834
uacacuacugacaugcugu

SEQ ID NO: 2425836 - RNA, 19 nt, Artificial Sequence
  Description of Artificial Sequence: Synthetic oligonucleotide
  Sense strand starting at position 3872 of SEQ ID NO: 1886770
agucucaaucaacguagaa

SEQ ID NO: 2425837 - RNA, 19 nt, Artificial Sequence
  Description of Artificial Sequence: Synthetic oligonucleotide
  Antisense strand to SEQ ID NO: 2425836
uucuacguugauugagacu

SEQ ID NO: 2425838 - RNA, 19 nt, Artificial Sequence
  Description of Artificial Sequence: Synthetic oligonucleotide
  Sense strand starting at position 3969 of SEQ ID NO: 1886770
gguauaacuugaguuuaua

SEQ ID NO: 2425839 - RNA, 19 nt, Artificial Sequence
  Description of Artificial Sequence: Synthetic oligonucleotide
  Antisense strand to SEQ ID NO: 2425838
uauaaacucaaguuauacc

SEQ ID NO: 2425840 - RNA, 19 nt, Artificial Sequence
  Description of Artificial Sequence: Synthetic oligonucleotide
  Sense strand starting at position 143 of SEQ ID NO: 1886771
uacuauuuguaagaaugga

SEQ ID NO: 2425841 - RNA, 19 nt, Artificial Sequence
  Description of Artificial Sequence: Synthetic oligonucleotide
  Antisense strand to SEQ ID NO: 2425840
uccauucuuacaaauagua

SEQ ID NO: 2425842 - RNA, 19 nt, Artificial Sequence
  Description of Artificial Sequence: Synthetic oligonucleotide
  Sense strand starting at position 159 of SEQ ID NO: 1886771
ggaaauaaguucuuagagu

SEQ ID NO: 2425843 - RNA, 19 nt, Artificial Sequence
  Description of Artificial Sequence: Synthetic oligonucleotide
  Antisense strand to SEQ ID NO: 2425842
acucuaagaacuuauuucc

SEQ ID NO: 2425844 - RNA, 19 nt, Artificial Sequence
  Description of Artificial Sequence: Synthetic oligonucleotide
  Sense strand starting at position 228 of SEQ ID NO: 1886771
gcagaugacuuuccagacu

SEQ ID NO: 2425845 - RNA, 19 nt, Artificial Sequence
  Description of Artificial Sequence: Synthetic oligonucleotide
  Antisense strand to SEQ ID NO: 2425844
agucuggaaagucaucugc

SEQ ID NO: 2425846 - RNA, 19 nt, Artificial Sequence
  Description of Artificial Sequence: Synthetic oligonucleotide
  Sense strand starting at position 231 of SEQ ID NO: 1886771
gaugacuuuccagacuugu

SEQ ID NO: 2425847 - RNA, 19 nt, Artificial Sequence
  Description of Artificial Sequence: Synthetic oligonucleotide
  Antisense strand to SEQ ID NO: 2425846
acaagucuggaaagucauc

SEQ ID NO: 2425848 - RNA, 19 nt, Artificial Sequence
  Description of Artificial Sequence: Synthetic oligonucleotide
  Sense strand starting at position 317 of SEQ ID NO: 1886771
ugaugcuccagagagaugu

SEQ ID NO: 2425849 - RNA, 19 nt, Artificial Sequence
  Description of Artificial Sequence: Synthetic oligonucleotide
  Antisense strand to SEQ ID NO: 2425848
acaucucucuggagcauca

SEQ ID NO: 2425850 - RNA, 19 nt, Artificial Sequence
  Description of Artificial Sequence: Synthetic oligonucleotide
  Sense strand starting at position 415 of SEQ ID NO: 1886771
ugcaguacuuaaccugaaa

SEQ ID NO: 2425851 - RNA, 19 nt, Artificial Sequence
  Description of Artificial Sequence: Synthetic oligonucleotide
  Antisense strand to SEQ ID NO: 2425850
uuucagguuaaguacugca

SEQ ID NO: 2425852 - RNA, 19 nt, Artificial Sequence
  Description of Artificial Sequence: Synthetic oligonucleotide
  Sense strand starting at position 825 of SEQ ID NO: 1886771
cuuuauuacacugguggga

SEQ ID NO: 2425853 - RNA, 19 nt, Artificial Sequence
  Description of Artificial Sequence: Synthetic oligonucleotide
  Antisense strand to SEQ ID NO: 2425852
ucccaccaguguaauaaag

SEQ ID NO: 2425854 - RNA, 19 nt, Artificial Sequence
  Description of Artificial Sequence: Synthetic oligonucleotide
  Sense strand starting at position 839 of SEQ ID NO: 1886771
ugggaaagucuccgugaga

SEQ ID NO: 2425855 - RNA, 19 nt, Artificial Sequence
  Description of Artificial Sequence: Synthetic oligonucleotide
  Antisense strand to SEQ ID NO: 2425854
ucucacggagacuuuccca

SEQ ID NO: 2425856 - RNA, 19 nt, Artificial Sequence
  Description of Artificial Sequence: Synthetic oligonucleotide
  Sense strand starting at position 840 of SEQ ID NO: 1886771
gggaaagucuccgugagag

SEQ ID NO: 2425857 - RNA, 19 nt, Artificial Sequence
  Description of Artificial Sequence: Synthetic oligonucleotide
  Antisense strand to SEQ ID NO: 2425856
cucucacggagacuuuccc

SEQ ID NO: 2425858 - RNA, 19 nt, Artificial Sequence
  Description of Artificial Sequence: Synthetic oligonucleotide
  Sense strand starting at position 841 of SEQ ID NO: 1886771
ggaaagucuccgugagagg

SEQ ID NO: 2425859 - RNA, 19 nt, Artificial Sequence
  Description of Artificial Sequence: Synthetic oligonucleotide
  Antisense strand to SEQ ID NO: 2425858
ccucucacggagacuuucc

SEQ ID NO: 2425860 - RNA, 19 nt, Artificial Sequence
  Description of Artificial Sequence: Synthetic oligonucleotide
  Sense strand starting at position 1276 of SEQ ID NO: 1886771
gcgggagaugggcaagaau

SEQ ID NO: 2425861 - RNA, 19 nt, Artificial Sequence
  Description of Artificial Sequence: Synthetic oligonucleotide
  Antisense strand to SEQ ID NO: 2425860
auucuugcccaucucccgc

SEQ ID NO: 2425862 - RNA, 19 nt, Artificial Sequence
  Description of Artificial Sequence: Synthetic oligonucleotide
  Sense strand starting at position 1649 of SEQ ID NO: 1886771
uuuguugaucugcaaggua

SEQ ID NO: 2425863 - RNA, 19 nt, Artificial Sequence
  Description of Artificial Sequence: Synthetic oligonucleotide
  Antisense strand to SEQ ID NO: 2425862
uaccuugcagaucaacaaa

SEQ ID NO: 2425864 - RNA, 19 nt, Artificial Sequence
  Description of Artificial Sequence: Synthetic oligonucleotide
  Sense strand starting at position 1664 of SEQ ID NO: 1886771
gguaucaaacuucgaacau

SEQ ID NO: 2425865 - RNA, 19 nt, Artificial Sequence
  Description of Artificial Sequence: Synthetic oligonucleotide
  Antisense strand to SEQ ID NO: 2425864
auguucgaaguuugauacc

SEQ ID NO: 2425866 - RNA, 19 nt, Artificial Sequence
  Description of Artificial Sequence: Synthetic oligonucleotide
  Sense strand starting at position 2211 of SEQ ID NO: 1886771
gaggauguguuguugggaa

SEQ ID NO: 2425867 - RNA, 19 nt, Artificial Sequence
  Description of Artificial Sequence: Synthetic oligonucleotide
  Antisense strand to SEQ ID NO: 2425866
uucccaacaacacauccuc

SEQ ID NO: 2425868 - RNA, 19 nt, Artificial Sequence
  Description of Artificial Sequence: Synthetic oligonucleotide
  Sense strand starting at position 2611 of SEQ ID NO: 1886771
ggguaaucacuggguuaca

SEQ ID NO: 2425869 - RNA, 19 nt, Artificial Sequence
  Description of Artificial Sequence: Synthetic oligonucleotide
  Antisense strand to SEQ ID NO: 2425868
uguaacccagugauuaccc

SEQ ID NO: 2425870 - RNA, 19 nt, Artificial Sequence
  Description of Artificial Sequence: Synthetic oligonucleotide
  Sense strand starting at position 2612 of SEQ ID NO: 1886771
gguaaucacuggguuacaa

SEQ ID NO: 2425871 - RNA, 19 nt, Artificial Sequence
  Description of Artificial Sequence: Synthetic oligonucleotide
  Antisense strand to SEQ ID NO: 2425870
uuguaacccagugauuacc

SEQ ID NO: 2425872 - RNA, 19 nt, Artificial Sequence
  Description of Artificial Sequence: Synthetic oligonucleotide
  Sense strand starting at position 2709 of SEQ ID NO: 1886771
ugugcaggccuccaaauau

SEQ ID NO: 2425873 - RNA, 19 nt, Artificial Sequence
  Description of Artificial Sequence: Synthetic oligonucleotide
  Antisense strand to SEQ ID NO: 2425872
auauuuggaggccugcaca

SEQ ID NO: 2425874 - RNA, 19 nt, Artificial Sequence
  Description of Artificial Sequence: Synthetic oligonucleotide
  Sense strand starting at position 2772 of SEQ ID NO: 1886771
uguggcuucguguccacua

SEQ ID NO: 2425875 - RNA, 19 nt, Artificial Sequence
  Description of Artificial Sequence: Synthetic oligonucleotide
  Antisense strand to SEQ ID NO: 2425874
uaguggacacgaagccaca

SEQ ID NO: 2425876 - RNA, 19 nt, Artificial Sequence
  Description of Artificial Sequence: Synthetic oligonucleotide
  Sense strand starting at position 2823 of SEQ ID NO: 1886771
acgauaaccugaucccuca

SEQ ID NO: 2425877 - RNA, 19 nt, Artificial Sequence
  Description of Artificial Sequence: Synthetic oligonucleotide
  Antisense strand to SEQ ID NO: 2425876
ugagggaucagguuaucgu

SEQ ID NO: 2425878 - RNA, 19 nt, Artificial Sequence
  Description of Artificial Sequence: Synthetic oligonucleotide
  Sense strand starting at position 2856 of SEQ ID NO: 1886771
ucuagcuuuguggaaguga

SEQ ID NO: 2425879 - RNA, 19 nt, Artificial Sequence
  Description of Artificial Sequence: Synthetic oligonucleotide
  Antisense strand to SEQ ID NO: 2425878
ucacuuccacaaagcuaga

SEQ ID NO: 2425880 - RNA, 19 nt, Artificial Sequence
  Description of Artificial Sequence: Synthetic oligonucleotide
  Sense strand starting at position 2867 of SEQ ID NO: 1886771
ggaagugaauuucaaggua

SEQ ID NO: 2425881 - RNA, 19 nt, Artificial Sequence
  Description of Artificial Sequence: Synthetic oligonucleotide
  Antisense strand to SEQ ID NO: 2425880
uaccuugaaauucacuucc

SEQ ID NO: 2425882 - RNA, 19 nt, Artificial Sequence
  Description of Artificial Sequence: Synthetic oligonucleotide
  Sense strand starting at position 3080 of SEQ ID NO: 1886771
aguccuauauccuuugauu

SEQ ID NO: 2425883 - RNA, 19 nt, Artificial Sequence
  Description of Artificial Sequence: Synthetic oligonucleotide
  Antisense strand to SEQ ID NO: 2425882
aaucaaaggauauaggacu

SEQ ID NO: 2425884 - RNA, 19 nt, Artificial Sequence
  Description of Artificial Sequence: Synthetic oligonucleotide
  Sense strand starting at position 3091 of SEQ ID NO: 1886771
cuuugauuccuggauggua

SEQ ID NO: 2425885 - RNA, 19 nt, Artificial Sequence
  Description of Artificial Sequence: Synthetic oligonucleotide
  Antisense strand to SEQ ID NO: 2425884
uaccauccaggaaucaaag

SEQ ID NO: 2425886 - RNA, 19 nt, Artificial Sequence
  Description of Artificial Sequence: Synthetic oligonucleotide
  Sense strand starting at position 3099 of SEQ ID NO: 1886771
ccuggaugguaccagauuu

SEQ ID NO: 2425887 - RNA, 19 nt, Artificial Sequence
  Description of Artificial Sequence: Synthetic oligonucleotide
  Antisense strand to SEQ ID NO: 2425886
aaaucugguaccauccagg

SEQ ID NO: 2425888 - RNA, 19 nt, Artificial Sequence
  Description of Artificial Sequence: Synthetic oligonucleotide
  Sense strand starting at position 3149 of SEQ ID NO: 1886771
agcguuaaucuccaugaau

SEQ ID NO: 2425889 - RNA, 19 nt, Artificial Sequence
  Description of Artificial Sequence: Synthetic oligonucleotide
  Antisense strand to SEQ ID NO: 2425888
auucauggagauuaacgcu

SEQ ID NO: 2425890 - RNA, 19 nt, Artificial Sequence
  Description of Artificial Sequence: Synthetic oligonucleotide
  Sense strand starting at position 3151 of SEQ ID NO: 1886771
cguuaaucuccaugaauag

SEQ ID NO: 2425891 - RNA, 19 nt, Artificial Sequence
  Description of Artificial Sequence: Synthetic oligonucleotide
  Antisense strand to SEQ ID NO: 2425890
cuauucauggagauuaacg

SEQ ID NO: 2425892 - RNA, 19 nt, Artificial Sequence
  Description of Artificial Sequence: Synthetic oligonucleotide
  Sense strand starting at position 3213 of SEQ ID NO: 1886771
cuuagauucugagcaggau

SEQ ID NO: 2425893 - RNA, 19 nt, Artificial Sequence
  Description of Artificial Sequence: Synthetic oligonucleotide
  Antisense strand to SEQ ID NO: 2425892
auccugcucagaaucuaag

SEQ ID NO: 2425894 - RNA, 19 nt, Artificial Sequence
  Description of Artificial Sequence: Synthetic oligonucleotide
  Sense strand starting at position 3323 of SEQ ID NO: 1886771
uaauguuaaccaugggauu

SEQ ID NO: 2425895 - RNA, 19 nt, Artificial Sequence
  Description of Artificial Sequence: Synthetic oligonucleotide
  Antisense strand to SEQ ID NO: 2425894
aaucccaugguuaacauua

SEQ ID NO: 2425896 - RNA, 19 nt, Artificial Sequence
  Description of Artificial Sequence: Synthetic oligonucleotide
  Sense strand starting at position 3325 of SEQ ID NO: 1886771
auguuaaccaugggauugu

SEQ ID NO: 2425897 - RNA, 19 nt, Artificial Sequence
  Description of Artificial Sequence: Synthetic oligonucleotide
  Antisense strand to SEQ ID NO: 2425896
acaaucccaugguuaacau

SEQ ID NO: 2425898 - RNA, 19 nt, Artificial Sequence
  Description of Artificial Sequence: Synthetic oligonucleotide
  Sense strand starting at position 3329 of SEQ ID NO: 1886771
uaaccaugggauuguccua

SEQ ID NO: 2425899 - RNA, 19 nt, Artificial Sequence
  Description of Artificial Sequence: Synthetic oligonucleotide
  Antisense strand to SEQ ID NO: 2425898
uaggacaaucccaugguua

SEQ ID NO: 2425900 - RNA, 19 nt, Artificial Sequence
  Description of Artificial Sequence: Synthetic oligonucleotide
  Sense strand starting at position 3336 of SEQ ID NO: 1886771
gggauuguccuauagcuua

SEQ ID NO: 2425901 - RNA, 19 nt, Artificial Sequence
  Description of Artificial Sequence: Synthetic oligonucleotide
  Antisense strand to SEQ ID NO: 2425900
uaagcuauaggacaauccc

SEQ ID NO: 2425902 - RNA, 19 nt, Artificial Sequence
  Description of Artificial Sequence: Synthetic oligonucleotide
  Sense strand starting at position 3341 of SEQ ID NO: 1886771
uguccuauagcuuauaaag

SEQ ID NO: 2425903 - RNA, 19 nt, Artificial Sequence
  Description of Artificial Sequence: Synthetic oligonucleotide
  Antisense strand to SEQ ID NO: 2425902
cuuuauaagcuauaggaca

SEQ ID NO: 2425904 - RNA, 19 nt, Artificial Sequence
  Description of Artificial Sequence: Synthetic oligonucleotide
  Sense strand starting at position 3655 of SEQ ID NO: 1886771
gauauuggccuguaauugu

SEQ ID NO: 2425905 - RNA, 19 nt, Artificial Sequence
  Description of Artificial Sequence: Synthetic oligonucleotide
  Antisense strand to SEQ ID NO: 2425904
acaauuacaggccaauauc

SEQ ID NO: 2425906 - RNA, 19 nt, Artificial Sequence
  Description of Artificial Sequence: Synthetic oligonucleotide
  Sense strand starting at position 3804 of SEQ ID NO: 1886771
gcaacaaagucaucagauc

SEQ ID NO: 2425907 - RNA, 19 nt, Artificial Sequence
  Description of Artificial Sequence: Synthetic oligonucleotide
  Antisense strand to SEQ ID NO: 2425906
gaucugaugacuuuguugc

SEQ ID NO: 2425908 - RNA, 19 nt, Artificial Sequence
  Description of Artificial Sequence: Synthetic oligonucleotide
  Sense strand starting at position 3886 of SEQ ID NO: 1886771
ggugguacuugucuagaaa

SEQ ID NO: 2425909 - RNA, 19 nt, Artificial Sequence
  Description of Artificial Sequence: Synthetic oligonucleotide
  Antisense strand to SEQ ID NO: 2425908
uuucuagacaaguaccacc

SEQ ID NO: 2425910 - RNA, 19 nt, Artificial Sequence
  Description of Artificial Sequence: Synthetic oligonucleotide
  Sense strand starting at position 3887 of SEQ ID NO: 1886771
gugguacuugucuagaaau

SEQ ID NO: 2425911 - RNA, 19 nt, Artificial Sequence
  Description of Artificial Sequence: Synthetic oligonucleotide
  Antisense strand to SEQ ID NO: 2425910
auuucuagacaaguaccac

SEQ ID NO: 2425912 - RNA, 19 nt, Artificial Sequence
  Description of Artificial Sequence: Synthetic oligonucleotide
  Sense strand starting at position 3889 of SEQ ID NO: 1886771
gguacuugucuagaaaugu

SEQ ID NO: 2425913 - RNA, 19 nt, Artificial Sequence
  Description of Artificial Sequence: Synthetic oligonucleotide
  Antisense strand to SEQ ID NO: 2425912
acauuucuagacaaguacc

SEQ ID NO: 2425914 - RNA, 19 nt, Artificial Sequence
  Description of Artificial Sequence: Synthetic oligonucleotide
  Sense strand starting at position 3928 of SEQ ID NO: 1886771
cccauuuggugggauauca

SEQ ID NO: 2425915 - RNA, 19 nt, Artificial Sequence
  Description of Artificial Sequence: Synthetic oligonucleotide
  Antisense strand to SEQ ID NO: 2425914
ugauaucccaccaaauggg

SEQ ID NO: 2425916 - RNA, 19 nt, Artificial Sequence
  Description of Artificial Sequence: Synthetic oligonucleotide
  Sense strand starting at position 3936 of SEQ ID NO: 1886771
gugggauaucauuguacau

SEQ ID NO: 2425917 - RNA, 19 nt, Artificial Sequence
  Description of Artificial Sequence: Synthetic oligonucleotide
  Antisense strand to SEQ ID NO: 2425916
auguacaaugauaucccac

SEQ ID NO: 2425918 - RNA, 19 nt, Artificial Sequence
  Description of Artificial Sequence: Synthetic oligonucleotide
  Sense strand starting at position 3953 of SEQ ID NO: 1886771
auaggagucuguguacaua

SEQ ID NO: 2425919 - RNA, 19 nt, Artificial Sequence
  Description of Artificial Sequence: Synthetic oligonucleotide
  Antisense strand to SEQ ID NO: 2425918
uauguacacagacuccuau

SEQ ID NO: 2425920 - RNA, 19 nt, Artificial Sequence
  Description of Artificial Sequence: Synthetic oligonucleotide
  Sense strand starting at position 143 of SEQ ID NO: 1886776
uacuauuuguaagaaugga

SEQ ID NO: 2425921 - RNA, 19 nt, Artificial Sequence
  Description of Artificial Sequence: Synthetic oligonucleotide
  Antisense strand to SEQ ID NO: 2425920
uccauucuuacaaauagua

SEQ ID NO: 2425922 - RNA, 19 nt, Artificial Sequence
  Description of Artificial Sequence: Synthetic oligonucleotide
  Sense strand starting at position 159 of SEQ ID NO: 1886776
ggaaauaaguucuuagagu

SEQ ID NO: 2425923 - RNA, 19 nt, Artificial Sequence
  Description of Artificial Sequence: Synthetic oligonucleotide
  Antisense strand to SEQ ID NO: 2425922
acucuaagaacuuauuucc

SEQ ID NO: 2425924 - RNA, 19 nt, Artificial Sequence
  Description of Artificial Sequence: Synthetic oligonucleotide
  Sense strand starting at position 228 of SEQ ID NO: 1886776
gcagaugacuuuccagacu

SEQ ID NO: 2425925 - RNA, 19 nt, Artificial Sequence
  Description of Artificial Sequence: Synthetic oligonucleotide
  Antisense strand to SEQ ID NO: 2425924
agucuggaaagucaucugc

SEQ ID NO: 2425926 - RNA, 19 nt, Artificial Sequence
  Description of Artificial Sequence: Synthetic oligonucleotide
  Sense strand starting at position 231 of SEQ ID NO: 1886776
gaugacuuuccagacuugu

SEQ ID NO: 2425927 - RNA, 19 nt, Artificial Sequence
  Description of Artificial Sequence: Synthetic oligonucleotide
  Antisense strand to SEQ ID NO: 2425926
acaagucuggaaagucauc

SEQ ID NO: 2425928 - RNA, 19 nt, Artificial Sequence
  Description of Artificial Sequence: Synthetic oligonucleotide
  Sense strand starting at position 317 of SEQ ID NO: 1886776
ugaugcuccagagagaugu

SEQ ID NO: 2425929 - RNA, 19 nt, Artificial Sequence
  Description of Artificial Sequence: Synthetic oligonucleotide
  Antisense strand to SEQ ID NO: 2425928
acaucucucuggagcauca

SEQ ID NO: 2425930 - RNA, 19 nt, Artificial Sequence
  Description of Artificial Sequence: Synthetic oligonucleotide
  Sense strand starting at position 415 of SEQ ID NO: 1886776
ugcaguacuuaaccugaaa

SEQ ID NO: 2425931 - RNA, 19 nt, Artificial Sequence
  Description of Artificial Sequence: Synthetic oligonucleotide
  Antisense strand to SEQ ID NO: 2425930
uuucagguuaaguacugca

SEQ ID NO: 2425932 - RNA, 19 nt, Artificial Sequence
  Description of Artificial Sequence: Synthetic oligonucleotide
  Sense strand starting at position 825 of SEQ ID NO: 1886776
cuuuauuacacugguggga

SEQ ID NO: 2425933 - RNA, 19 nt, Artificial Sequence
  Description of Artificial Sequence: Synthetic oligonucleotide
  Antisense strand to SEQ ID NO: 2425932
ucccaccaguguaauaaag

SEQ ID NO: 2425934 - RNA, 19 nt, Artificial Sequence
  Description of Artificial Sequence: Synthetic oligonucleotide
  Sense strand starting at position 839 of SEQ ID NO: 1886776
ugggaaagucuccgugaga

SEQ ID NO: 2425935 - RNA, 19 nt, Artificial Sequence
  Description of Artificial Sequence: Synthetic oligonucleotide
  Antisense strand to SEQ ID NO: 2425934
ucucacggagacuuuccca

SEQ ID NO: 2425936 - RNA, 19 nt, Artificial Sequence
  Description of Artificial Sequence: Synthetic oligonucleotide
  Sense strand starting at position 840 of SEQ ID NO: 1886776
gggaaagucuccgugagag

SEQ ID NO: 2425937 - RNA, 19 nt, Artificial Sequence
  Description of Artificial Sequence: Synthetic oligonucleotide
  Antisense strand to SEQ ID NO: 2425936
cucucacggagacuuuccc

SEQ ID NO: 2425938 - RNA, 19 nt, Artificial Sequence
  Description of Artificial Sequence: Synthetic oligonucleotide
  Sense strand starting at position 841 of SEQ ID NO: 1886776
ggaaagucuccgugagagg

SEQ ID NO: 2425939 - RNA, 19 nt, Artificial Sequence
  Description of Artificial Sequence: Synthetic oligonucleotide
  Antisense strand to SEQ ID NO: 2425938
ccucucacggagacuuucc

SEQ ID NO: 2425940 - RNA, 19 nt, Artificial Sequence
  Description of Artificial Sequence: Synthetic oligonucleotide
  Sense strand starting at position 1276 of SEQ ID NO: 1886776
gcgggagaugggcaagaau

SEQ ID NO: 2425941 - RNA, 19 nt, Artificial Sequence
  Description of Artificial Sequence: Synthetic oligonucleotide
  Antisense strand to SEQ ID NO: 2425940
auucuugcccaucucccgc

SEQ ID NO: 2425942 - RNA, 19 nt, Artificial Sequence
  Description of Artificial Sequence: Synthetic oligonucleotide
  Sense strand starting at position 1649 of SEQ ID NO: 1886776
uuuguugaucugcaaggua

SEQ ID NO: 2425943 - RNA, 19 nt, Artificial Sequence
  Description of Artificial Sequence: Synthetic oligonucleotide
  Antisense strand to SEQ ID NO: 2425942
uaccuugcagaucaacaaa

SEQ ID NO: 2425944 - RNA, 19 nt, Artificial Sequence
  Description of Artificial Sequence: Synthetic oligonucleotide
  Sense strand starting at position 1664 of SEQ ID NO: 1886776
gguaucaaacuucgaacau

SEQ ID NO: 2425945 - RNA, 19 nt, Artificial Sequence
  Description of Artificial Sequence: Synthetic oligonucleotide
  Antisense strand to SEQ ID NO: 2425944
auguucgaaguuugauacc

SEQ ID NO: 2425946 - RNA, 19 nt, Artificial Sequence
  Description of Artificial Sequence: Synthetic oligonucleotide
  Sense strand starting at position 2211 of SEQ ID NO: 1886776
gaggauguguuguugggaa

SEQ ID NO: 2425947 - RNA, 19 nt, Artificial Sequence
  Description of Artificial Sequence: Synthetic oligonucleotide
  Antisense strand to SEQ ID NO: 2425946
uucccaacaacacauccuc

SEQ ID NO: 2425948 - RNA, 19 nt, Artificial Sequence
  Description of Artificial Sequence: Synthetic oligonucleotide
  Sense strand starting at position 2611 of SEQ ID NO: 1886776
ggguaaucacuggguuaca

SEQ ID NO: 2425949 - RNA, 19 nt, Artificial Sequence
  Description of Artificial Sequence: Synthetic oligonucleotide
  Antisense strand to SEQ ID NO: 2425948
uguaacccagugauuaccc

SEQ ID NO: 2425950 - RNA, 19 nt, Artificial Sequence
  Description of Artificial Sequence: Synthetic oligonucleotide
  Sense strand starting at position 2612 of SEQ ID NO: 1886776
gguaaucacuggguuacaa

SEQ ID NO: 2425951 - RNA, 19 nt, Artificial Sequence
  Description of Artificial Sequence: Synthetic oligonucleotide
  Antisense strand to SEQ ID NO: 2425950
uuguaacccagugauuacc

SEQ ID NO: 2425952 - RNA, 19 nt, Artificial Sequence
  Description of Artificial Sequence: Synthetic oligonucleotide
  Sense strand starting at position 2709 of SEQ ID NO: 1886776
ugugcaggccuccaaauau

SEQ ID NO: 2425953 - RNA, 19 nt, Artificial Sequence
  Description of Artificial Sequence: Synthetic oligonucleotide
  Antisense strand to SEQ ID NO: 2425952
auauuuggaggccugcaca

SEQ ID NO: 2425954 - RNA, 19 nt, Artificial Sequence
  Description of Artificial Sequence: Synthetic oligonucleotide
  Sense strand starting at position 2772 of SEQ ID NO: 1886776
uguggcuucguguccacua

SEQ ID NO: 2425955 - RNA, 19 nt, Artificial Sequence
  Description of Artificial Sequence: Synthetic oligonucleotide
  Antisense strand to SEQ ID NO: 2425954
uaguggacacgaagccaca

SEQ ID NO: 2425956 - RNA, 19 nt, Artificial Sequence
  Description of Artificial Sequence: Synthetic oligonucleotide
  Sense strand starting at position 2823 of SEQ ID NO: 1886776
acgauaaccugaucccuca

SEQ ID NO: 2425957 - RNA, 19 nt, Artificial Sequence
  Description of Artificial Sequence: Synthetic oligonucleotide
  Antisense strand to SEQ ID NO: 2425956
ugagggaucagguuaucgu

SEQ ID NO: 2425958 - RNA, 19 nt, Artificial Sequence
  Description of Artificial Sequence: Synthetic oligonucleotide
  Sense strand starting at position 2856 of SEQ ID NO: 1886776
ucuagcuuuguggaaguga

SEQ ID NO: 2425959 - RNA, 19 nt, Artificial Sequence
  Description of Artificial Sequence: Synthetic oligonucleotide
  Antisense strand to SEQ ID NO: 2425958
ucacuuccacaaagcuaga

SEQ ID NO: 2425960 - RNA, 19 nt, Artificial Sequence
  Description of Artificial Sequence: Synthetic oligonucleotide
  Sense strand starting at position 2867 of SEQ ID NO: 1886776
ggaagugaauuucaaggua

SEQ ID NO: 2425961 - RNA, 19 nt, Artificial Sequence
  Description of Artificial Sequence: Synthetic oligonucleotide
  Antisense strand to SEQ ID NO: 2425960
uaccuugaaauucacuucc

SEQ ID NO: 2425962 - RNA, 19 nt, Artificial Sequence
  Description of Artificial Sequence: Synthetic oligonucleotide
  Sense strand starting at position 3080 of SEQ ID NO: 1886776
aguccuauauccuuugauu

SEQ ID NO: 2425963 - RNA, 19 nt, Artificial Sequence
  Description of Artificial Sequence: Synthetic oligonucleotide
  Antisense strand to SEQ ID NO: 2425962
aaucaaaggauauaggacu

SEQ ID NO: 2425964 - RNA, 19 nt, Artificial Sequence
  Description of Artificial Sequence: Synthetic oligonucleotide
  Sense strand starting at position 3091 of SEQ ID NO: 1886776
cuuugauuccuggauggua

SEQ ID NO: 2425965 - RNA, 19 nt, Artificial Sequence
  Description of Artificial Sequence: Synthetic oligonucleotide
  Antisense strand to SEQ ID NO: 2425964
uaccauccaggaaucaaag

SEQ ID NO: 2425966 - RNA, 19 nt, Artificial Sequence
  Description of Artificial Sequence: Synthetic oligonucleotide
  Sense strand starting at position 3099 of SEQ ID NO: 1886776
ccuggaugguaccagauuu

SEQ ID NO: 2425967 - RNA, 19 nt, Artificial Sequence
  Description of Artificial Sequence: Synthetic oligonucleotide
  Antisense strand to SEQ ID NO: 2425966
aaaucugguaccauccagg

SEQ ID NO: 2425968 - RNA, 19 nt, Artificial Sequence
  Description of Artificial Sequence: Synthetic oligonucleotide
  Sense strand starting at position 3149 of SEQ ID NO: 1886776
agcguuaaucuccaugaau

SEQ ID NO: 2425969 - RNA, 19 nt, Artificial Sequence
  Description of Artificial Sequence: Synthetic oligonucleotide
  Antisense strand to SEQ ID NO: 2425968
auucauggagauuaacgcu

SEQ ID NO: 2425970 - RNA, 19 nt, Artificial Sequence
  Description of Artificial Sequence: Synthetic oligonucleotide
  Sense strand starting at position 3151 of SEQ ID NO: 1886776
cguuaaucuccaugaauag

SEQ ID NO: 2425971 - RNA, 19 nt, Artificial Sequence
  Description of Artificial Sequence: Synthetic oligonucleotide
  Antisense strand to SEQ ID NO: 2425970
cuauucauggagauuaacg

SEQ ID NO: 2425972 - RNA, 19 nt, Artificial Sequence
  Description of Artificial Sequence: Synthetic oligonucleotide
  Sense strand starting at position 3213 of SEQ ID NO: 1886776
cuuagauucugagcaggau

SEQ ID NO: 2425973 - RNA, 19 nt, Artificial Sequence
  Description of Artificial Sequence: Synthetic oligonucleotide
  Antisense strand to SEQ ID NO: 2425972
auccugcucagaaucuaag

SEQ ID NO: 2425974 - RNA, 19 nt, Artificial Sequence
  Description of Artificial Sequence: Synthetic oligonucleotide
  Sense strand starting at position 3323 of SEQ ID NO: 1886776
uaauguuaaccaugggauu

SEQ ID NO: 2425975 - RNA, 19 nt, Artificial Sequence
  Description of Artificial Sequence: Synthetic oligonucleotide
  Antisense strand to SEQ ID NO: 2425974
aaucccaugguuaacauua

SEQ ID NO: 2425976 - RNA, 19 nt, Artificial Sequence
  Description of Artificial Sequence: Synthetic oligonucleotide
  Sense strand starting at position 3325 of SEQ ID NO: 1886776
auguuaaccaugggauugu

SEQ ID NO: 2425977 - RNA, 19 nt, Artificial Sequence
  Description of Artificial Sequence: Synthetic oligonucleotide
  Antisense strand to SEQ ID NO: 2425976
acaaucccaugguuaacau

SEQ ID NO: 2425978 - RNA, 19 nt, Artificial Sequence
  Description of Artificial Sequence: Synthetic oligonucleotide
  Sense strand starting at position 3329 of SEQ ID NO: 1886776
uaaccaugggauuguccua

SEQ ID NO: 2425979 - RNA, 19 nt, Artificial Sequence
  Description of Artificial Sequence: Synthetic oligonucleotide
  Antisense strand to SEQ ID NO: 2425978
uaggacaaucccaugguua

SEQ ID NO: 2425980 - RNA, 19 nt, Artificial Sequence
  Description of Artificial Sequence: Synthetic oligonucleotide
  Sense strand starting at position 3336 of SEQ ID NO: 1886776
gggauuguccuauagcuua

SEQ ID NO: 2425981 - RNA, 19 nt, Artificial Sequence
  Description of Artificial Sequence: Synthetic oligonucleotide
  Antisense strand to SEQ ID NO: 2425980
uaagcuauaggacaauccc

SEQ ID NO: 2425982 - RNA, 19 nt, Artificial Sequence
  Description of Artificial Sequence: Synthetic oligonucleotide
  Sense strand starting at position 3341 of SEQ ID NO: 1886776
uguccuauagcuuauaaag

SEQ ID NO: 2425983 - RNA, 19 nt, Artificial Sequence
  Description of Artificial Sequence: Synthetic oligonucleotide
  Antisense strand to SEQ ID NO: 2425982
cuuuauaagcuauaggaca

SEQ ID NO: 2425984 - RNA, 19 nt, Artificial Sequence
  Description of Artificial Sequence: Synthetic oligonucleotide
  Sense strand starting at position 3655 of SEQ ID NO: 1886776
gauauuggccuguaauugu

SEQ ID NO: 2425985 - RNA, 19 nt, Artificial Sequence
  Description of Artificial Sequence: Synthetic oligonucleotide
  Antisense strand to SEQ ID NO: 2425984
acaauuacaggccaauauc

SEQ ID NO: 2425986 - RNA, 19 nt, Artificial Sequence
  Description of Artificial Sequence: Synthetic oligonucleotide
  Sense strand starting at position 3804 of SEQ ID NO: 1886776
gcaacaaagucaucagauc

SEQ ID NO: 2425987 - RNA, 19 nt, Artificial Sequence
  Description of Artificial Sequence: Synthetic oligonucleotide
  Antisense strand to SEQ ID NO: 2425986
gaucugaugacuuuguugc

SEQ ID NO: 2425988 - RNA, 19 nt, Artificial Sequence
  Description of Artificial Sequence: Synthetic oligonucleotide
  Sense strand starting at position 3886 of SEQ ID NO: 1886776
ggugguacuugucuagaaa

SEQ ID NO: 2425989 - RNA, 19 nt, Artificial Sequence
  Description of Artificial Sequence: Synthetic oligonucleotide
  Antisense strand to SEQ ID NO: 2425988
uuucuagacaaguaccacc

SEQ ID NO: 2425990 - RNA, 19 nt, Artificial Sequence
  Description of Artificial Sequence: Synthetic oligonucleotide
  Sense strand starting at position 3887 of SEQ ID NO: 1886776
gugguacuugucuagaaau

SEQ ID NO: 2425991 - RNA, 19 nt, Artificial Sequence
  Description of Artificial Sequence: Synthetic oligonucleotide
  Antisense strand to SEQ ID NO: 2425990
auuucuagacaaguaccac

SEQ ID NO: 2425992 - RNA, 19 nt, Artificial Sequence
  Description of Artificial Sequence: Synthetic oligonucleotide
  Sense strand starting at position 3889 of SEQ ID NO: 1886776
gguacuugucuagaaaugu

SEQ ID NO: 2425993 - RNA, 19 nt, Artificial Sequence
  Description of Artificial Sequence: Synthetic oligonucleotide
  Antisense strand to SEQ ID NO: 2425992
acauuucuagacaaguacc

SEQ ID NO: 2425994 - RNA, 19 nt, Artificial Sequence
  Description of Artificial Sequence: Synthetic oligonucleotide
  Sense strand starting at position 3928 of SEQ ID NO: 1886776
cccauuuggugggauauca

SEQ ID NO: 2425995 - RNA, 19 nt, Artificial Sequence
  Description of Artificial Sequence: Synthetic oligonucleotide
  Antisense strand to SEQ ID NO: 2425994
ugauaucccaccaaauggg

SEQ ID NO: 2425996 - RNA, 19 nt, Artificial Sequence
  Description of Artificial Sequence: Synthetic oligonucleotide
  Sense strand starting at position 3936 of SEQ ID NO: 1886776
gugggauaucauuguacau

SEQ ID NO: 2425997 - RNA, 19 nt, Artificial Sequence
  Description of Artificial Sequence: Synthetic oligonucleotide
  Antisense strand to SEQ ID NO: 2425996
auguacaaugauaucccac

SEQ ID NO: 2425998 - RNA, 19 nt, Artificial Sequence
  Description of Artificial Sequence: Synthetic oligonucleotide
  Sense strand starting at position 3953 of SEQ ID NO: 1886776
auaggagucuguguacaua

SEQ ID NO: 2425999 - RNA, 19 nt, Artificial Sequence
  Description of Artificial Sequence: Synthetic oligonucleotide
  Antisense strand to SEQ ID NO: 2425998
uauguacacagacuccuau

SEQ ID NO: 2426000 - RNA, 19 nt, Artificial Sequence
  Description of Artificial Sequence: Synthetic oligonucleotide
  Sense strand starting at position 145 of SEQ ID NO: 1886781
uacuauuuguaagaaugga

SEQ ID NO: 2426001 - RNA, 19 nt, Artificial Sequence
  Description of Artificial Sequence: Synthetic oligonucleotide
  Antisense strand to SEQ ID NO: 2426000
uccauucuuacaaauagua

SEQ ID NO: 2426002 - RNA, 19 nt, Artificial Sequence
  Description of Artificial Sequence: Synthetic oligonucleotide
  Sense strand starting at position 161 of SEQ ID NO: 1886781
ggaaauaaguucuuagagu

SEQ ID NO: 2426003 - RNA, 19 nt, Artificial Sequence
  Description of Artificial Sequence: Synthetic oligonucleotide
  Antisense strand to SEQ ID NO: 2426002
acucuaagaacuuauuucc

SEQ ID NO: 2426004 - RNA, 19 nt, Artificial Sequence
  Description of Artificial Sequence: Synthetic oligonucleotide
  Sense strand starting at position 230 of SEQ ID NO: 1886781
gcagaugacuuuccagacu

SEQ ID NO: 2426005 - RNA, 19 nt, Artificial Sequence
  Description of Artificial Sequence: Synthetic oligonucleotide
  Antisense strand to SEQ ID NO: 2426004
agucuggaaagucaucugc

SEQ ID NO: 2426006 - RNA, 19 nt, Artificial Sequence
  Description of Artificial Sequence: Synthetic oligonucleotide
  Sense strand starting at position 233 of SEQ ID NO: 1886781
gaugacuuuccagacuugu

SEQ ID NO: 2426007 - RNA, 19 nt, Artificial Sequence
  Description of Artificial Sequence: Synthetic oligonucleotide
  Antisense strand to SEQ ID NO: 2426006
acaagucuggaaagucauc

SEQ ID NO: 2426008 - RNA, 19 nt, Artificial Sequence
  Description of Artificial Sequence: Synthetic oligonucleotide
  Sense strand starting at position 319 of SEQ ID NO: 1886781
ugaugcuccagagagaugu

SEQ ID NO: 2426009 - RNA, 19 nt, Artificial Sequence
  Description of Artificial Sequence: Synthetic oligonucleotide
  Antisense strand to SEQ ID NO: 2426008
acaucucucuggagcauca

SEQ ID NO: 2426010 - RNA, 19 nt, Artificial Sequence
  Description of Artificial Sequence: Synthetic oligonucleotide
  Sense strand starting at position 417 of SEQ ID NO: 1886781
ugcaguacuuaaccugaaa

SEQ ID NO: 2426011 - RNA, 19 nt, Artificial Sequence
  Description of Artificial Sequence: Synthetic oligonucleotide
  Antisense strand to SEQ ID NO: 2426010
uuucagguuaaguacugca

SEQ ID NO: 2426012 - RNA, 19 nt, Artificial Sequence
  Description of Artificial Sequence: Synthetic oligonucleotide
  Sense strand starting at position 827 of SEQ ID NO: 1886781
cuuuauuacacugguggga

SEQ ID NO: 2426013 - RNA, 19 nt, Artificial Sequence
  Description of Artificial Sequence: Synthetic oligonucleotide
  Antisense strand to SEQ ID NO: 2426012
ucccaccaguguaauaaag

SEQ ID NO: 2426014 - RNA, 19 nt, Artificial Sequence
  Description of Artificial Sequence: Synthetic oligonucleotide
  Sense strand starting at position 841 of SEQ ID NO: 1886781
ugggaaagucuccgugaga

SEQ ID NO: 2426015 - RNA, 19 nt, Artificial Sequence
  Description of Artificial Sequence: Synthetic oligonucleotide
  Antisense strand to SEQ ID NO: 2426014
ucucacggagacuuuccca

SEQ ID NO: 2426016 - RNA, 19 nt, Artificial Sequence
  Description of Artificial Sequence: Synthetic oligonucleotide
  Sense strand starting at position 842 of SEQ ID NO: 1886781
gggaaagucuccgugagag

SEQ ID NO: 2426017 - RNA, 19 nt, Artificial Sequence
  Description of Artificial Sequence: Synthetic oligonucleotide
  Antisense strand to SEQ ID NO: 2426016
cucucacggagacuuuccc

SEQ ID NO: 2426018 - RNA, 19 nt, Artificial Sequence
  Description of Artificial Sequence: Synthetic oligonucleotide
  Sense strand starting at position 843 of SEQ ID NO: 1886781
ggaaagucuccgugagagg

SEQ ID NO: 2426019 - RNA, 19 nt, Artificial Sequence
  Description of Artificial Sequence: Synthetic oligonucleotide
  Antisense strand to SEQ ID NO: 2426018
ccucucacggagacuuucc

SEQ ID NO: 2426020 - RNA, 19 nt, Artificial Sequence
  Description of Artificial Sequence: Synthetic oligonucleotide
  Sense strand starting at position 1278 of SEQ ID NO: 1886781
gcgggagaugggcaagaau

SEQ ID NO: 2426021 - RNA, 19 nt, Artificial Sequence
  Description of Artificial Sequence: Synthetic oligonucleotide
  Antisense strand to SEQ ID NO: 2426020
auucuugcccaucucccgc

SEQ ID NO: 2426022 - RNA, 19 nt, Artificial Sequence
  Description of Artificial Sequence: Synthetic oligonucleotide
  Sense strand starting at position 1651 of SEQ ID NO: 1886781
uuuguugaucugcaaggua

SEQ ID NO: 2426023 - RNA, 19 nt, Artificial Sequence
  Description of Artificial Sequence: Synthetic oligonucleotide
  Antisense strand to SEQ ID NO: 2426022
uaccuugcagaucaacaaa

SEQ ID NO: 2426024 - RNA, 19 nt, Artificial Sequence
  Description of Artificial Sequence: Synthetic oligonucleotide
  Sense strand starting at position 1666 of SEQ ID NO: 1886781
gguaucaaacuucgaacau

SEQ ID NO: 2426025 - RNA, 19 nt, Artificial Sequence
  Description of Artificial Sequence: Synthetic oligonucleotide
  Antisense strand to SEQ ID NO: 2426024
auguucgaaguuugauacc

SEQ ID NO: 2426026 - RNA, 19 nt, Artificial Sequence
  Description of Artificial Sequence: Synthetic oligonucleotide
  Sense strand starting at position 2213 of SEQ ID NO: 1886781
gaggauguguuguugggaa

SEQ ID NO: 2426027 - RNA, 19 nt, Artificial Sequence
  Description of Artificial Sequence: Synthetic oligonucleotide
  Antisense strand to SEQ ID NO: 2426026
uucccaacaacacauccuc

SEQ ID NO: 2426028 - RNA, 19 nt, Artificial Sequence
  Description of Artificial Sequence: Synthetic oligonucleotide
  Sense strand starting at position 2613 of SEQ ID NO: 1886781
ggguaaucacuggguuaca

SEQ ID NO: 2426029 - RNA, 19 nt, Artificial Sequence
  Description of Artificial Sequence: Synthetic oligonucleotide
  Antisense strand to SEQ ID NO: 2426028
uguaacccagugauuaccc

SEQ ID NO: 2426030 - RNA, 19 nt, Artificial Sequence
  Description of Artificial Sequence: Synthetic oligonucleotide
  Sense strand starting at position 2614 of SEQ ID NO: 1886781
gguaaucacuggguuacaa

SEQ ID NO: 2426031 - RNA, 19 nt, Artificial Sequence
  Description of Artificial Sequence: Synthetic oligonucleotide
  Antisense strand to SEQ ID NO: 2426030
uuguaacccagugauuacc

SEQ ID NO: 2426032 - RNA, 19 nt, Artificial Sequence
  Description of Artificial Sequence: Synthetic oligonucleotide
  Sense strand starting at position 2711 of SEQ ID NO: 1886781
ugugcaggccuccaaauau

SEQ ID NO: 2426033 - RNA, 19 nt, Artificial Sequence
  Description of Artificial Sequence: Synthetic oligonucleotide
  Antisense strand to SEQ ID NO: 2426032
auauuuggaggccugcaca

SEQ ID NO: 2426034 - RNA, 19 nt, Artificial Sequence
  Description of Artificial Sequence: Synthetic oligonucleotide
  Sense strand starting at position 2774 of SEQ ID NO: 1886781
uguggcuucguguccacua

SEQ ID NO: 2426035 - RNA, 19 nt, Artificial Sequence
  Description of Artificial Sequence: Synthetic oligonucleotide
  Antisense strand to SEQ ID NO: 2426034
uaguggacacgaagccaca

SEQ ID NO: 2426036 - RNA, 19 nt, Artificial Sequence
  Description of Artificial Sequence: Synthetic oligonucleotide
  Sense strand starting at position 2825 of SEQ ID NO: 1886781
acgauaaccugaucccuca

SEQ ID NO: 2426037 - RNA, 19 nt, Artificial Sequence
  Description of Artificial Sequence: Synthetic oligonucleotide
  Antisense strand to SEQ ID NO: 2426036
ugagggaucagguuaucgu

SEQ ID NO: 2426038 - RNA, 19 nt, Artificial Sequence
  Description of Artificial Sequence: Synthetic oligonucleotide
  Sense strand starting at position 2858 of SEQ ID NO: 1886781
ucuagcuuuguggaaguga

SEQ ID NO: 2426039 - RNA, 19 nt, Artificial Sequence
  Description of Artificial Sequence: Synthetic oligonucleotide
  Antisense strand to SEQ ID NO: 2426038
ucacuuccacaaagcuaga

SEQ ID NO: 2426040 - RNA, 19 nt, Artificial Sequence
  Description of Artificial Sequence: Synthetic oligonucleotide
  Sense strand starting at position 2869 of SEQ ID NO: 1886781
ggaagugaauuucaaggua

SEQ ID NO: 2426041 - RNA, 19 nt, Artificial Sequence
  Description of Artificial Sequence: Synthetic oligonucleotide
  Antisense strand to SEQ ID NO: 2426040
uaccuugaaauucacuucc

SEQ ID NO: 2426042 - RNA, 19 nt, Artificial Sequence
  Description of Artificial Sequence: Synthetic oligonucleotide
  Sense strand starting at position 3082 of SEQ ID NO: 1886781
aguccuauauccuuugauu

SEQ ID NO: 2426043 - RNA, 19 nt, Artificial Sequence
  Description of Artificial Sequence: Synthetic oligonucleotide
  Antisense strand to SEQ ID NO: 2426042
aaucaaaggauauaggacu

SEQ ID NO: 2426044 - RNA, 19 nt, Artificial Sequence
  Description of Artificial Sequence: Synthetic oligonucleotide
  Sense strand starting at position 3093 of SEQ ID NO: 1886781
cuuugauuccuggauggua

SEQ ID NO: 2426045 - RNA, 19 nt, Artificial Sequence
  Description of Artificial Sequence: Synthetic oligonucleotide
  Antisense strand to SEQ ID NO: 2426044
uaccauccaggaaucaaag

SEQ ID NO: 2426046 - RNA, 19 nt, Artificial Sequence
  Description of Artificial Sequence: Synthetic oligonucleotide
  Sense strand starting at position 3101 of SEQ ID NO: 1886781
ccuggaugguaccagauuu

SEQ ID NO: 2426047 - RNA, 19 nt, Artificial Sequence
  Description of Artificial Sequence: Synthetic oligonucleotide
  Antisense strand to SEQ ID NO: 2426046
aaaucugguaccauccagg

SEQ ID NO: 2426048 - RNA, 19 nt, Artificial Sequence
  Description of Artificial Sequence: Synthetic oligonucleotide
  Sense strand starting at position 3151 of SEQ ID NO: 1886781
agcguuaaucuccaugaau

SEQ ID NO: 2426049 - RNA, 19 nt, Artificial Sequence
  Description of Artificial Sequence: Synthetic oligonucleotide
  Antisense strand to SEQ ID NO: 2426048
auucauggagauuaacgcu

SEQ ID NO: 2426050 - RNA, 19 nt, Artificial Sequence
  Description of Artificial Sequence: Synthetic oligonucleotide
  Sense strand starting at position 3153 of SEQ ID NO: 1886781
cguuaaucuccaugaauag

SEQ ID NO: 2426051 - RNA, 19 nt, Artificial Sequence
  Description of Artificial Sequence: Synthetic oligonucleotide
  Antisense strand to SEQ ID NO: 2426050
cuauucauggagauuaacg

SEQ ID NO: 2426052 - RNA, 19 nt, Artificial Sequence
  Description of Artificial Sequence: Synthetic oligonucleotide
  Sense strand starting at position 3215 of SEQ ID NO: 1886781
cuuagauucugagcaggau

SEQ ID NO: 2426053 - RNA, 19 nt, Artificial Sequence
  Description of Artificial Sequence: Synthetic oligonucleotide
  Antisense strand to SEQ ID NO: 2426052
auccugcucagaaucuaag

SEQ ID NO: 2426054 - RNA, 19 nt, Artificial Sequence
  Description of Artificial Sequence: Synthetic oligonucleotide
  Sense strand starting at position 3325 of SEQ ID NO: 1886781
uaauguuaaccaugggauu

SEQ ID NO: 2426055 - RNA, 19 nt, Artificial Sequence
  Description of Artificial Sequence: Synthetic oligonucleotide
  Antisense strand to SEQ ID NO: 2426054
aaucccaugguuaacauua

SEQ ID NO: 2426056 - RNA, 19 nt, Artificial Sequence
  Description of Artificial Sequence: Synthetic oligonucleotide
  Sense strand starting at position 3327 of SEQ ID NO: 1886781
auguuaaccaugggauugu

SEQ ID NO: 2426057 - RNA, 19 nt, Artificial Sequence
  Description of Artificial Sequence: Synthetic oligonucleotide
  Antisense strand to SEQ ID NO: 2426056
acaaucccaugguuaacau

SEQ ID NO: 2426058 - RNA, 19 nt, Artificial Sequence
  Description of Artificial Sequence: Synthetic oligonucleotide
  Sense strand starting at position 3331 of SEQ ID NO: 1886781
uaaccaugggauuguccua

SEQ ID NO: 2426059 - RNA, 19 nt, Artificial Sequence
  Description of Artificial Sequence: Synthetic oligonucleotide
  Antisense strand to SEQ ID NO: 2426058
uaggacaaucccaugguua

SEQ ID NO: 2426060 - RNA, 19 nt, Artificial Sequence
  Description of Artificial Sequence: Synthetic oligonucleotide
  Sense strand starting at position 3338 of SEQ ID NO: 1886781
gggauuguccuauagcuua

SEQ ID NO: 2426061 - RNA, 19 nt, Artificial Sequence
  Description of Artificial Sequence: Synthetic oligonucleotide
  Antisense strand to SEQ ID NO: 2426060
uaagcuauaggacaauccc

SEQ ID NO: 2426062 - RNA, 19 nt, Artificial Sequence
  Description of Artificial Sequence: Synthetic oligonucleotide
  Sense strand starting at position 3343 of SEQ ID NO: 1886781
uguccuauagcuuauaaag

SEQ ID NO: 2426063 - RNA, 19 nt, Artificial Sequence
  Description of Artificial Sequence: Synthetic oligonucleotide
  Antisense strand to SEQ ID NO: 2426062
cuuuauaagcuauaggaca

SEQ ID NO: 2426064 - RNA, 19 nt, Artificial Sequence
  Description of Artificial Sequence: Synthetic oligonucleotide
  Sense strand starting at position 3657 of SEQ ID NO: 1886781
gauauuggccuguaauugu

SEQ ID NO: 2426065 - RNA, 19 nt, Artificial Sequence
  Description of Artificial Sequence: Synthetic oligonucleotide
  Antisense strand to SEQ ID NO: 2426064
acaauuacaggccaauauc

SEQ ID NO: 2426066 - RNA, 19 nt, Artificial Sequence
  Description of Artificial Sequence: Synthetic oligonucleotide
  Sense strand starting at position 3806 of SEQ ID NO: 1886781
gcaacaaagucaucagauc

SEQ ID NO: 2426067 - RNA, 19 nt, Artificial Sequence
  Description of Artificial Sequence: Synthetic oligonucleotide
  Antisense strand to SEQ ID NO: 2426066
gaucugaugacuuuguugc

SEQ ID NO: 2426068 - RNA, 19 nt, Artificial Sequence
  Description of Artificial Sequence: Synthetic oligonucleotide
  Sense strand starting at position 3888 of SEQ ID NO: 1886781
ggugguacuugucuagaaa

SEQ ID NO: 2426069 - RNA, 19 nt, Artificial Sequence
  Description of Artificial Sequence: Synthetic oligonucleotide
  Antisense strand to SEQ ID NO: 2426068
uuucuagacaaguaccacc

SEQ ID NO: 2426070 - RNA, 19 nt, Artificial Sequence
  Description of Artificial Sequence: Synthetic oligonucleotide
  Sense strand starting at position 3889 of SEQ ID NO: 1886781
gugguacuugucuagaaau

SEQ ID NO: 2426071 - RNA, 19 nt, Artificial Sequence
  Description of Artificial Sequence: Synthetic oligonucleotide
  Antisense strand to SEQ ID NO: 2426070
auuucuagacaaguaccac

SEQ ID NO: 2426072 - RNA, 19 nt, Artificial Sequence
  Description of Artificial Sequence: Synthetic oligonucleotide
  Sense strand starting at position 3891 of SEQ ID NO: 1886781
gguacuugucuagaaaugu

SEQ ID NO: 2426073 - RNA, 19 nt, Artificial Sequence
  Description of Artificial Sequence: Synthetic oligonucleotide
  Antisense strand to SEQ ID NO: 2426072
acauuucuagacaaguacc

SEQ ID NO: 2426074 - RNA, 19 nt, Artificial Sequence
  Description of Artificial Sequence: Synthetic oligonucleotide
  Sense strand starting at position 3930 of SEQ ID NO: 1886781
cccauuuggugggauauca

SEQ ID NO: 2426075 - RNA, 19 nt, Artificial Sequence
  Description of Artificial Sequence: Synthetic oligonucleotide
  Antisense strand to SEQ ID NO: 2426074
ugauaucccaccaaauggg

SEQ ID NO: 2426076 - RNA, 19 nt, Artificial Sequence
  Description of Artificial Sequence: Synthetic oligonucleotide
  Sense strand starting at position 3938 of SEQ ID NO: 1886781
gugggauaucauuguacau

SEQ ID NO: 2426077 - RNA, 19 nt, Artificial Sequence
  Description of Artificial Sequence: Synthetic oligonucleotide
  Antisense strand to SEQ ID NO: 2426076
auguacaaugauaucccac

SEQ ID NO: 2426078 - RNA, 19 nt, Artificial Sequence
  Description of Artificial Sequence: Synthetic oligonucleotide
  Sense strand starting at position 3955 of SEQ ID NO: 1886781
auaggagucuguguacaua

SEQ ID NO: 2426079 - RNA, 19 nt, Artificial Sequence
  Description of Artificial Sequence: Synthetic oligonucleotide
  Antisense strand to SEQ ID NO: 2426078
uauguacacagacuccuau

SEQ ID NO: 2426080 - RNA, 19 nt, Artificial Sequence
  Description of Artificial Sequence: Synthetic oligonucleotide
  Sense strand starting at position 916 of SEQ ID NO: 1886786
gagaauuugugacagccua

SEQ ID NO: 2426081 - RNA, 19 nt, Artificial Sequence
  Description of Artificial Sequence: Synthetic oligonucleotide
  Antisense strand to SEQ ID NO: 2426080
uaggcugucacaaauucuc

SEQ ID NO: 2426082 - RNA, 19 nt, Artificial Sequence
  Description of Artificial Sequence: Synthetic oligonucleotide
  Sense strand starting at position 3102 of SEQ ID NO: 1886786
ccuggaugguaccagauuu

SEQ ID NO: 2426083 - RNA, 19 nt, Artificial Sequence
  Description of Artificial Sequence: Synthetic oligonucleotide
  Antisense strand to SEQ ID NO: 2426082
aaaucugguaccauccagg

SEQ ID NO: 2426084 - RNA, 19 nt, Artificial Sequence
  Description of Artificial Sequence: Synthetic oligonucleotide
  Sense strand starting at position 3892 of SEQ ID NO: 1886786
gguacuugucuagaaauau

SEQ ID NO: 2426085 - RNA, 19 nt, Artificial Sequence
  Description of Artificial Sequence: Synthetic oligonucleotide
  Antisense strand to SEQ ID NO: 2426084
auauuucuagacaaguacc

SEQ ID NO: 2426086 - RNA, 19 nt, Artificial Sequence
  Description of Artificial Sequence: Synthetic oligonucleotide
  Sense strand starting at position 411 of SEQ ID NO: 1886787
uugaaagaaugcucaucau

SEQ ID NO: 2426087 - RNA, 19 nt, Artificial Sequence
  Description of Artificial Sequence: Synthetic oligonucleotide
  Antisense strand to SEQ ID NO: 2426086
augaugagcauucuuucaa

SEQ ID NO: 2426088 - RNA, 19 nt, Artificial Sequence
  Description of Artificial Sequence: Synthetic oligonucleotide
  Sense strand starting at position 1126 of SEQ ID NO: 1886787
aucacaugguguuaauaaa

SEQ ID NO: 2426089 - RNA, 19 nt, Artificial Sequence
  Description of Artificial Sequence: Synthetic oligonucleotide
  Antisense strand to SEQ ID NO: 2426088
uuuauuaacaccaugugau

SEQ ID NO: 2426090 - RNA, 19 nt, Artificial Sequence
  Description of Artificial Sequence: Synthetic oligonucleotide
  Sense strand starting at position 1336 of SEQ ID NO: 1886787
guagccaucccgcauggau

SEQ ID NO: 2426091 - RNA, 19 nt, Artificial Sequence
  Description of Artificial Sequence: Synthetic oligonucleotide
  Antisense strand to SEQ ID NO: 2426090
auccaugcgggauggcuac

SEQ ID NO: 2426092 - RNA, 19 nt, Artificial Sequence
  Description of Artificial Sequence: Synthetic oligonucleotide
  Sense strand starting at position 1433 of SEQ ID NO: 1886787
uugggcuccaaguagagau

SEQ ID NO: 2426093 - RNA, 19 nt, Artificial Sequence
  Description of Artificial Sequence: Synthetic oligonucleotide
  Antisense strand to SEQ ID NO: 2426092
aucucuacuuggagcccaa

SEQ ID NO: 2426094 - RNA, 19 nt, Artificial Sequence
  Description of Artificial Sequence: Synthetic oligonucleotide
  Sense strand starting at position 1494 of SEQ ID NO: 1886787
uccaguucucucugaggau

SEQ ID NO: 2426095 - RNA, 19 nt, Artificial Sequence
  Description of Artificial Sequence: Synthetic oligonucleotide
  Antisense strand to SEQ ID NO: 2426094
auccucagagagaacugga

SEQ ID NO: 2426096 - RNA, 19 nt, Artificial Sequence
  Description of Artificial Sequence: Synthetic oligonucleotide
  Sense strand starting at position 1519 of SEQ ID NO: 1886787
gcagacguugcccucgauu

SEQ ID NO: 2426097 - RNA, 19 nt, Artificial Sequence
  Description of Artificial Sequence: Synthetic oligonucleotide
  Antisense strand to SEQ ID NO: 2426096
aaucgagggcaacgucugc

SEQ ID NO: 2426098 - RNA, 19 nt, Artificial Sequence
  Description of Artificial Sequence: Synthetic oligonucleotide
  Sense strand starting at position 1733 of SEQ ID NO: 1886787
ucguuuauguccuucugga

SEQ ID NO: 2426099 - RNA, 19 nt, Artificial Sequence
  Description of Artificial Sequence: Synthetic oligonucleotide
  Antisense strand to SEQ ID NO: 2426098
uccagaaggacauaaacga

SEQ ID NO: 2426100 - RNA, 19 nt, Artificial Sequence
  Description of Artificial Sequence: Synthetic oligonucleotide
  Sense strand starting at position 2379 of SEQ ID NO: 1886787
ucaagaaccugggcauuaa

SEQ ID NO: 2426101 - RNA, 19 nt, Artificial Sequence
  Description of Artificial Sequence: Synthetic oligonucleotide
  Antisense strand to SEQ ID NO: 2426100
uuaaugcccagguucuuga

SEQ ID NO: 2426102 - RNA, 19 nt, Artificial Sequence
  Description of Artificial Sequence: Synthetic oligonucleotide
  Sense strand starting at position 2433 of SEQ ID NO: 1886787
augaguauugcagauauau

SEQ ID NO: 2426103 - RNA, 19 nt, Artificial Sequence
  Description of Artificial Sequence: Synthetic oligonucleotide
  Antisense strand to SEQ ID NO: 2426102
auauaucugcaauacucau

SEQ ID NO: 2426104 - RNA, 19 nt, Artificial Sequence
  Description of Artificial Sequence: Synthetic oligonucleotide
  Sense strand starting at position 2442 of SEQ ID NO: 1886787
gcagauauauguuaaagac

SEQ ID NO: 2426105 - RNA, 19 nt, Artificial Sequence
  Description of Artificial Sequence: Synthetic oligonucleotide
  Antisense strand to SEQ ID NO: 2426104
gucuuuaacauauaucugc

SEQ ID NO: 2426106 - RNA, 19 nt, Artificial Sequence
  Description of Artificial Sequence: Synthetic oligonucleotide
  Sense strand starting at position 2473 of SEQ ID NO: 1886787
cagacugggucagcuuuau

SEQ ID NO: 2426107 - RNA, 19 nt, Artificial Sequence
  Description of Artificial Sequence: Synthetic oligonucleotide
  Antisense strand to SEQ ID NO: 2426106
auaaagcugacccagucug

SEQ ID NO: 2426108 - RNA, 19 nt, Artificial Sequence
  Description of Artificial Sequence: Synthetic oligonucleotide
  Sense strand starting at position 2808 of SEQ ID NO: 1886787
gcccuuggcucagcuuuau

SEQ ID NO: 2426109 - RNA, 19 nt, Artificial Sequence
  Description of Artificial Sequence: Synthetic oligonucleotide
  Antisense strand to SEQ ID NO: 2426108
auaaagcugagccaagggc

SEQ ID NO: 2426110 - RNA, 19 nt, Artificial Sequence
  Description of Artificial Sequence: Synthetic oligonucleotide
  Sense strand starting at position 2812 of SEQ ID NO: 1886787
uuggcucagcuuuauacuu

SEQ ID NO: 2426111 - RNA, 19 nt, Artificial Sequence
  Description of Artificial Sequence: Synthetic oligonucleotide
  Antisense strand to SEQ ID NO: 2426110
aaguauaaagcugagccaa

SEQ ID NO: 2426112 - RNA, 19 nt, Artificial Sequence
  Description of Artificial Sequence: Synthetic oligonucleotide
  Sense strand starting at position 2819 of SEQ ID NO: 1886787
agcuuuauacuuggucauu

SEQ ID NO: 2426113 - RNA, 19 nt, Artificial Sequence
  Description of Artificial Sequence: Synthetic oligonucleotide
  Antisense strand to SEQ ID NO: 2426112
aaugaccaaguauaaagcu

SEQ ID NO: 2426114 - RNA, 19 nt, Artificial Sequence
  Description of Artificial Sequence: Synthetic oligonucleotide
  Sense strand starting at position 2820 of SEQ ID NO: 1886787
gcuuuauacuuggucauuu

SEQ ID NO: 2426115 - RNA, 19 nt, Artificial Sequence
  Description of Artificial Sequence: Synthetic oligonucleotide
  Antisense strand to SEQ ID NO: 2426114
aaaugaccaaguauaaagc

SEQ ID NO: 2426116 - RNA, 19 nt, Artificial Sequence
  Description of Artificial Sequence: Synthetic oligonucleotide
  Sense strand starting at position 2897 of SEQ ID NO: 1886787
caugcauugugaucauaug

SEQ ID NO: 2426117 - RNA, 19 nt, Artificial Sequence
  Description of Artificial Sequence: Synthetic oligonucleotide
  Antisense strand to SEQ ID NO: 2426116
cauaugaucacaaugcaug

SEQ ID NO: 2426118 - RNA, 19 nt, Artificial Sequence
  Description of Artificial Sequence: Synthetic oligonucleotide
  Sense strand starting at position 2918 of SEQ ID NO: 1886787
acuggugacacguguucuu

SEQ ID NO: 2426119 - RNA, 19 nt, Artificial Sequence
  Description of Artificial Sequence: Synthetic oligonucleotide
  Antisense strand to SEQ ID NO: 2426118
aagaacacgugucaccagu

SEQ ID NO: 2426120 - RNA, 19 nt, Artificial Sequence
  Description of Artificial Sequence: Synthetic oligonucleotide
  Sense strand starting at position 2921 of SEQ ID NO: 1886787
ggugacacguguucuuauu

SEQ ID NO: 2426121 - RNA, 19 nt, Artificial Sequence
  Description of Artificial Sequence: Synthetic oligonucleotide
  Antisense strand to SEQ ID NO: 2426120
aauaagaacacgugucacc

SEQ ID NO: 2426122 - RNA, 19 nt, Artificial Sequence
  Description of Artificial Sequence: Synthetic oligonucleotide
  Sense strand starting at position 3018 of SEQ ID NO: 1886787
ugguuccuauuacaaagau

SEQ ID NO: 2426123 - RNA, 19 nt, Artificial Sequence
  Description of Artificial Sequence: Synthetic oligonucleotide
  Antisense strand to SEQ ID NO: 2426122
aucuuuguaauaggaacca

SEQ ID NO: 2426124 - RNA, 19 nt, Artificial Sequence
  Description of Artificial Sequence: Synthetic oligonucleotide
  Sense strand starting at position 3094 of SEQ ID NO: 1886787
ggugucauguaauuugguu

SEQ ID NO: 2426125 - RNA, 19 nt, Artificial Sequence
  Description of Artificial Sequence: Synthetic oligonucleotide
  Antisense strand to SEQ ID NO: 2426124
aaccaaauuacaugacacc

SEQ ID NO: 2426126 - RNA, 19 nt, Artificial Sequence
  Description of Artificial Sequence: Synthetic oligonucleotide
  Sense strand starting at position 3200 of SEQ ID NO: 1886787
auaaauacaugucaagagu

SEQ ID NO: 2426127 - RNA, 19 nt, Artificial Sequence
  Description of Artificial Sequence: Synthetic oligonucleotide
  Antisense strand to SEQ ID NO: 2426126
acucuugacauguauuuau

SEQ ID NO: 2426128 - RNA, 19 nt, Artificial Sequence
  Description of Artificial Sequence: Synthetic oligonucleotide
  Sense strand starting at position 3237 of SEQ ID NO: 1886787
aacugucaucagggcugaa

SEQ ID NO: 2426129 - RNA, 19 nt, Artificial Sequence
  Description of Artificial Sequence: Synthetic oligonucleotide
  Antisense strand to SEQ ID NO: 2426128
uucagcccugaugacaguu

SEQ ID NO: 2426130 - RNA, 19 nt, Artificial Sequence
  Description of Artificial Sequence: Synthetic oligonucleotide
  Sense strand starting at position 3257 of SEQ ID NO: 1886787
uguuauaaccaguggucaa

SEQ ID NO: 2426131 - RNA, 19 nt, Artificial Sequence
  Description of Artificial Sequence: Synthetic oligonucleotide
  Antisense strand to SEQ ID NO: 2426130
uugaccacugguuauaaca

SEQ ID NO: 2426132 - RNA, 19 nt, Artificial Sequence
  Description of Artificial Sequence: Synthetic oligonucleotide
  Sense strand starting at position 3258 of SEQ ID NO: 1886787
guuauaaccaguggucaag

SEQ ID NO: 2426133 - RNA, 19 nt, Artificial Sequence
  Description of Artificial Sequence: Synthetic oligonucleotide
  Antisense strand to SEQ ID NO: 2426132
cuugaccacugguuauaac

SEQ ID NO: 2426134 - RNA, 19 nt, Artificial Sequence
  Description of Artificial Sequence: Synthetic oligonucleotide
  Sense strand starting at position 3276 of SEQ ID NO: 1886787
ggagaaaugucaguguaua

SEQ ID NO: 2426135 - RNA, 19 nt, Artificial Sequence
  Description of Artificial Sequence: Synthetic oligonucleotide
  Antisense strand to SEQ ID NO: 2426134
uauacacugacauuucucc

SEQ ID NO: 2426136 - RNA, 19 nt, Artificial Sequence
  Description of Artificial Sequence: Synthetic oligonucleotide
  Sense strand starting at position 3277 of SEQ ID NO: 1886787
gagaaaugucaguguauaa

SEQ ID NO: 2426137 - RNA, 19 nt, Artificial Sequence
  Description of Artificial Sequence: Synthetic oligonucleotide
  Antisense strand to SEQ ID NO: 2426136
uuauacacugacauuucuc

SEQ ID NO: 2426138 - RNA, 19 nt, Artificial Sequence
  Description of Artificial Sequence: Synthetic oligonucleotide
  Sense strand starting at position 3284 of SEQ ID NO: 1886787
gucaguguauaaucugacu

SEQ ID NO: 2426139 - RNA, 19 nt, Artificial Sequence
  Description of Artificial Sequence: Synthetic oligonucleotide
  Antisense strand to SEQ ID NO: 2426138
agucagauuauacacugac

SEQ ID NO: 2426140 - RNA, 19 nt, Artificial Sequence
  Description of Artificial Sequence: Synthetic oligonucleotide
  Sense strand starting at position 3312 of SEQ ID NO: 1886787
ggaauuaugcaucaaugcu

SEQ ID NO: 2426141 - RNA, 19 nt, Artificial Sequence
  Description of Artificial Sequence: Synthetic oligonucleotide
  Antisense strand to SEQ ID NO: 2426140
agcauugaugcauaauucc

SEQ ID NO: 2426142 - RNA, 19 nt, Artificial Sequence
  Description of Artificial Sequence: Synthetic oligonucleotide
  Sense strand starting at position 3320 of SEQ ID NO: 1886787
gcaucaaugcuuuaaaugu

SEQ ID NO: 2426143 - RNA, 19 nt, Artificial Sequence
  Description of Artificial Sequence: Synthetic oligonucleotide
  Antisense strand to SEQ ID NO: 2426142
acauuuaaagcauugaugc

SEQ ID NO: 2426144 - RNA, 19 nt, Artificial Sequence
  Description of Artificial Sequence: Synthetic oligonucleotide
  Sense strand starting at position 3490 of SEQ ID NO: 1886787
cacugaaaguaugauagga

SEQ ID NO: 2426145 - RNA, 19 nt, Artificial Sequence
  Description of Artificial Sequence: Synthetic oligonucleotide
  Antisense strand to SEQ ID NO: 2426144
uccuaucauacuuucagug

SEQ ID NO: 2426146 - RNA, 19 nt, Artificial Sequence
  Description of Artificial Sequence: Synthetic oligonucleotide
  Sense strand starting at position 3492 of SEQ ID NO: 1886787
cugaaaguaugauaggaaa

SEQ ID NO: 2426147 - RNA, 19 nt, Artificial Sequence
  Description of Artificial Sequence: Synthetic oligonucleotide
  Antisense strand to SEQ ID NO: 2426146
uuuccuaucauacuuucag

SEQ ID NO: 2426148 - RNA, 19 nt, Artificial Sequence
  Description of Artificial Sequence: Synthetic oligonucleotide
  Sense strand starting at position 3528 of SEQ ID NO: 1886787
auuagucucugaguuaagu

SEQ ID NO: 2426149 - RNA, 19 nt, Artificial Sequence
  Description of Artificial Sequence: Synthetic oligonucleotide
  Antisense strand to SEQ ID NO: 2426148
acuuaacucagagacuaau

SEQ ID NO: 2426150 - RNA, 19 nt, Artificial Sequence
  Description of Artificial Sequence: Synthetic oligonucleotide
  Sense strand starting at position 3536 of SEQ ID NO: 1886787
cugaguuaaguuuauagcu

SEQ ID NO: 2426151 - RNA, 19 nt, Artificial Sequence
  Description of Artificial Sequence: Synthetic oligonucleotide
  Antisense strand to SEQ ID NO: 2426150
agcuauaaacuuaacucag

SEQ ID NO: 2426152 - RNA, 19 nt, Artificial Sequence
  Description of Artificial Sequence: Synthetic oligonucleotide
  Sense strand starting at position 3541 of SEQ ID NO: 1886787
uuaaguuuauagcuguaga

SEQ ID NO: 2426153 - RNA, 19 nt, Artificial Sequence
  Description of Artificial Sequence: Synthetic oligonucleotide
  Antisense strand to SEQ ID NO: 2426152
ucuacagcuauaaacuuaa

SEQ ID NO: 2426154 - RNA, 19 nt, Artificial Sequence
  Description of Artificial Sequence: Synthetic oligonucleotide
  Sense strand starting at position 3544 of SEQ ID NO: 1886787
aguuuauagcuguagagac

SEQ ID NO: 2426155 - RNA, 19 nt, Artificial Sequence
  Description of Artificial Sequence: Synthetic oligonucleotide
  Antisense strand to SEQ ID NO: 2426154
gucucuacagcuauaaacu

SEQ ID NO: 2426156 - RNA, 19 nt, Artificial Sequence
  Description of Artificial Sequence: Synthetic oligonucleotide
  Sense strand starting at position 3552 of SEQ ID NO: 1886787
gcuguagagaccugacaaa

SEQ ID NO: 2426157 - RNA, 19 nt, Artificial Sequence
  Description of Artificial Sequence: Synthetic oligonucleotide
  Antisense strand to SEQ ID NO: 2426156
uuugucaggucucuacagc

SEQ ID NO: 2426158 - RNA, 19 nt, Artificial Sequence
  Description of Artificial Sequence: Synthetic oligonucleotide
  Sense strand starting at position 3633 of SEQ ID NO: 1886787
uuccgagcccuuuggagaa

SEQ ID NO: 2426159 - RNA, 19 nt, Artificial Sequence
  Description of Artificial Sequence: Synthetic oligonucleotide
  Antisense strand to SEQ ID NO: 2426158
uucuccaaagggcucggaa

SEQ ID NO: 2426160 - RNA, 19 nt, Artificial Sequence
  Description of Artificial Sequence: Synthetic oligonucleotide
  Sense strand starting at position 3727 of SEQ ID NO: 1886787
uuauguauaccuggaagac

SEQ ID NO: 2426161 - RNA, 19 nt, Artificial Sequence
  Description of Artificial Sequence: Synthetic oligonucleotide
  Antisense strand to SEQ ID NO: 2426160
gucuuccagguauacauaa

SEQ ID NO: 2426162 - RNA, 19 nt, Artificial Sequence
  Description of Artificial Sequence: Synthetic oligonucleotide
  Sense strand starting at position 3832 of SEQ ID NO: 1886787
augagaaauccuggagucu

SEQ ID NO: 2426163 - RNA, 19 nt, Artificial Sequence
  Description of Artificial Sequence: Synthetic oligonucleotide
  Antisense strand to SEQ ID NO: 2426162
agacuccaggauuucucau

SEQ ID NO: 2426164 - RNA, 19 nt, Artificial Sequence
  Description of Artificial Sequence: Synthetic oligonucleotide
  Sense strand starting at position 3861 of SEQ ID NO: 1886787
aguuuacaccuuuguguau

SEQ ID NO: 2426165 - RNA, 19 nt, Artificial Sequence
  Description of Artificial Sequence: Synthetic oligonucleotide
  Antisense strand to SEQ ID NO: 2426164
auacacaaagguguaaacu

SEQ ID NO: 2426166 - RNA, 19 nt, Artificial Sequence
  Description of Artificial Sequence: Synthetic oligonucleotide
  Sense strand starting at position 80 of SEQ ID NO: 1886788
ccaagaauugcuugaacug

SEQ ID NO: 2426167 - RNA, 19 nt, Artificial Sequence
  Description of Artificial Sequence: Synthetic oligonucleotide
  Antisense strand to SEQ ID NO: 2426166
caguucaagcaauucuugg

SEQ ID NO: 2426168 - RNA, 19 nt, Artificial Sequence
  Description of Artificial Sequence: Synthetic oligonucleotide
  Sense strand starting at position 515 of SEQ ID NO: 1886788
gguaaugagucucugugac

SEQ ID NO: 2426169 - RNA, 19 nt, Artificial Sequence
  Description of Artificial Sequence: Synthetic oligonucleotide
  Antisense strand to SEQ ID NO: 2426168
gucacagagacucauuacc

SEQ ID NO: 2426170 - RNA, 19 nt, Artificial Sequence
  Description of Artificial Sequence: Synthetic oligonucleotide
  Sense strand starting at position 870 of SEQ ID NO: 1886788
ucagucuucccauguguag

SEQ ID NO: 2426171 - RNA, 19 nt, Artificial Sequence
  Description of Artificial Sequence: Synthetic oligonucleotide
  Antisense strand to SEQ ID NO: 2426170
cuacacaugggaagacuga

SEQ ID NO: 2426172 - RNA, 19 nt, Artificial Sequence
  Description of Artificial Sequence: Synthetic oligonucleotide
  Sense strand starting at position 872 of SEQ ID NO: 1886788
agucuucccauguguagaa

SEQ ID NO: 2426173 - RNA, 19 nt, Artificial Sequence
  Description of Artificial Sequence: Synthetic oligonucleotide
  Antisense strand to SEQ ID NO: 2426172
uucuacacaugggaagacu

SEQ ID NO: 2426174 - RNA, 19 nt, Artificial Sequence
  Description of Artificial Sequence: Synthetic oligonucleotide
  Sense strand starting at position 882 of SEQ ID NO: 1886788
uguguagaagggugaauua

SEQ ID NO: 2426175 - RNA, 19 nt, Artificial Sequence
  Description of Artificial Sequence: Synthetic oligonucleotide
  Antisense strand to SEQ ID NO: 2426174
uaauucacccuucuacaca

SEQ ID NO: 2426176 - RNA, 19 nt, Artificial Sequence
  Description of Artificial Sequence: Synthetic oligonucleotide
  Sense strand starting at position 940 of SEQ ID NO: 1886788
ggaaauaauguccagcgua

SEQ ID NO: 2426177 - RNA, 19 nt, Artificial Sequence
  Description of Artificial Sequence: Synthetic oligonucleotide
  Antisense strand to SEQ ID NO: 2426176
uacgcuggacauuauuucc

SEQ ID NO: 2426178 - RNA, 19 nt, Artificial Sequence
  Description of Artificial Sequence: Synthetic oligonucleotide
  Sense strand starting at position 969 of SEQ ID NO: 1886788
caagguuacccgugaucuc

SEQ ID NO: 2426179 - RNA, 19 nt, Artificial Sequence
  Description of Artificial Sequence: Synthetic oligonucleotide
  Antisense strand to SEQ ID NO: 2426178
gagaucacggguaaccuug

SEQ ID NO: 2426180 - RNA, 19 nt, Artificial Sequence
  Description of Artificial Sequence: Synthetic oligonucleotide
  Sense strand starting at position 970 of SEQ ID NO: 1886788
aagguuacccgugaucuca

SEQ ID NO: 2426181 - RNA, 19 nt, Artificial Sequence
  Description of Artificial Sequence: Synthetic oligonucleotide
  Antisense strand to SEQ ID NO: 2426180
ugagaucacggguaaccuu

SEQ ID NO: 2426182 - RNA, 19 nt, Artificial Sequence
  Description of Artificial Sequence: Synthetic oligonucleotide
  Sense strand starting at position 972 of SEQ ID NO: 1886788
gguuacccgugaucucagu

SEQ ID NO: 2426183 - RNA, 19 nt, Artificial Sequence
  Description of Artificial Sequence: Synthetic oligonucleotide
  Antisense strand to SEQ ID NO: 2426182
acugagaucacggguaacc

SEQ ID NO: 2426184 - RNA, 19 nt, Artificial Sequence
  Description of Artificial Sequence: Synthetic oligonucleotide
  Sense strand starting at position 978 of SEQ ID NO: 1886788
ccgugaucucagugagcuc

SEQ ID NO: 2426185 - RNA, 19 nt, Artificial Sequence
  Description of Artificial Sequence: Synthetic oligonucleotide
  Antisense strand to SEQ ID NO: 2426184
gagcucacugagaucacgg

SEQ ID NO: 2426186 - RNA, 19 nt, Artificial Sequence
  Description of Artificial Sequence: Synthetic oligonucleotide
  Sense strand starting at position 2070 of SEQ ID NO: 1886788
gggcuuugcccaggaaggu

SEQ ID NO: 2426187 - RNA, 19 nt, Artificial Sequence
  Description of Artificial Sequence: Synthetic oligonucleotide
  Antisense strand to SEQ ID NO: 2426186
accuuccugggcaaagccc

SEQ ID NO: 2426188 - RNA, 19 nt, Artificial Sequence
  Description of Artificial Sequence: Synthetic oligonucleotide
  Sense strand starting at position 2622 of SEQ ID NO: 1886788
aguggugacuccucagauu

SEQ ID NO: 2426189 - RNA, 19 nt, Artificial Sequence
  Description of Artificial Sequence: Synthetic oligonucleotide
  Antisense strand to SEQ ID NO: 2426188
aaucugaggagucaccacu

SEQ ID NO: 2426190 - RNA, 19 nt, Artificial Sequence
  Description of Artificial Sequence: Synthetic oligonucleotide
  Sense strand starting at position 2628 of SEQ ID NO: 1886788
gacuccucagauuguugau

SEQ ID NO: 2426191 - RNA, 19 nt, Artificial Sequence
  Description of Artificial Sequence: Synthetic oligonucleotide
  Antisense strand to SEQ ID NO: 2426190
aucaacaaucugaggaguc

SEQ ID NO: 2426192 - RNA, 19 nt, Artificial Sequence
  Description of Artificial Sequence: Synthetic oligonucleotide
  Sense strand starting at position 2630 of SEQ ID NO: 1886788
cuccucagauuguugauau

SEQ ID NO: 2426193 - RNA, 19 nt, Artificial Sequence
  Description of Artificial Sequence: Synthetic oligonucleotide
  Antisense strand to SEQ ID NO: 2426192
auaucaacaaucugaggag

SEQ ID NO: 2426194 - RNA, 19 nt, Artificial Sequence
  Description of Artificial Sequence: Synthetic oligonucleotide
  Sense strand starting at position 2642 of SEQ ID NO: 1886788
uugauauggcuccguaggu

SEQ ID NO: 2426195 - RNA, 19 nt, Artificial Sequence
  Description of Artificial Sequence: Synthetic oligonucleotide
  Antisense strand to SEQ ID NO: 2426194
accuacggagccauaucaa

SEQ ID NO: 2426196 - RNA, 19 nt, Artificial Sequence
  Description of Artificial Sequence: Synthetic oligonucleotide
  Sense strand starting at position 2657 of SEQ ID NO: 1886788
aggugaagcucucugagcu

SEQ ID NO: 2426197 - RNA, 19 nt, Artificial Sequence
  Description of Artificial Sequence: Synthetic oligonucleotide
  Antisense strand to SEQ ID NO: 2426196
agcucagagagcuucaccu

SEQ ID NO: 2426198 - RNA, 19 nt, Artificial Sequence
  Description of Artificial Sequence: Synthetic oligonucleotide
  Sense strand starting at position 2782 of SEQ ID NO: 1886788
gaguauccaucguuguauu

SEQ ID NO: 2426199 - RNA, 19 nt, Artificial Sequence
  Description of Artificial Sequence: Synthetic oligonucleotide
  Antisense strand to SEQ ID NO: 2426198
aauacaacgauggauacuc

SEQ ID NO: 2426200 - RNA, 19 nt, Artificial Sequence
  Description of Artificial Sequence: Synthetic oligonucleotide
  Sense strand starting at position 2783 of SEQ ID NO: 1886788
aguauccaucguuguauua

SEQ ID NO: 2426201 - RNA, 19 nt, Artificial Sequence
  Description of Artificial Sequence: Synthetic oligonucleotide
  Antisense strand to SEQ ID NO: 2426200
uaauacaacgauggauacu

SEQ ID NO: 2426202 - RNA, 19 nt, Artificial Sequence
  Description of Artificial Sequence: Synthetic oligonucleotide
  Sense strand starting at position 2792 of SEQ ID NO: 1886788
cguuguauuaaccuuacgu

SEQ ID NO: 2426203 - RNA, 19 nt, Artificial Sequence
  Description of Artificial Sequence: Synthetic oligonucleotide
  Antisense strand to SEQ ID NO: 2426202
acguaagguuaauacaacg

SEQ ID NO: 2426204 - RNA, 19 nt, Artificial Sequence
  Description of Artificial Sequence: Synthetic oligonucleotide
  Sense strand starting at position 2794 of SEQ ID NO: 1886788
uuguauuaaccuuacguaa

SEQ ID NO: 2426205 - RNA, 19 nt, Artificial Sequence
  Description of Artificial Sequence: Synthetic oligonucleotide
  Antisense strand to SEQ ID NO: 2426204
uuacguaagguuaauacaa

SEQ ID NO: 2426206 - RNA, 19 nt, Artificial Sequence
  Description of Artificial Sequence: Synthetic oligonucleotide
  Sense strand starting at position 2838 of SEQ ID NO: 1886788
auguuauauaugugaaguc

SEQ ID NO: 2426207 - RNA, 19 nt, Artificial Sequence
  Description of Artificial Sequence: Synthetic oligonucleotide
  Antisense strand to SEQ ID NO: 2426206
gacuucacauauauaacau

SEQ ID NO: 2426208 - RNA, 19 nt, Artificial Sequence
  Description of Artificial Sequence: Synthetic oligonucleotide
  Sense strand starting at position 2847 of SEQ ID NO: 1886788
augugaaguccucauuagg

SEQ ID NO: 2426209 - RNA, 19 nt, Artificial Sequence
  Description of Artificial Sequence: Synthetic oligonucleotide
  Antisense strand to SEQ ID NO: 2426208
ccuaaugaggacuucacau

SEQ ID NO: 2426210 - RNA, 19 nt, Artificial Sequence
  Description of Artificial Sequence: Synthetic oligonucleotide
  Sense strand starting at position 3038 of SEQ ID NO: 1886788
guuucugugcagucaguuu

SEQ ID NO: 2426211 - RNA, 19 nt, Artificial Sequence
  Description of Artificial Sequence: Synthetic oligonucleotide
  Antisense strand to SEQ ID NO: 2426210
aaacugacugcacagaaac

SEQ ID NO: 2426212 - RNA, 19 nt, Artificial Sequence
  Description of Artificial Sequence: Synthetic oligonucleotide
  Sense strand starting at position 3130 of SEQ ID NO: 1886788
acauacaacugucuuggua

SEQ ID NO: 2426213 - RNA, 19 nt, Artificial Sequence
  Description of Artificial Sequence: Synthetic oligonucleotide
  Antisense strand to SEQ ID NO: 2426212
uaccaagacaguuguaugu

SEQ ID NO: 2426214 - RNA, 19 nt, Artificial Sequence
  Description of Artificial Sequence: Synthetic oligonucleotide
  Sense strand starting at position 3388 of SEQ ID NO: 1886788
cggugaguagcugggauua

SEQ ID NO: 2426215 - RNA, 19 nt, Artificial Sequence
  Description of Artificial Sequence: Synthetic oligonucleotide
  Antisense strand to SEQ ID NO: 2426214
uaaucccagcuacucaccg

SEQ ID NO: 2426216 - RNA, 19 nt, Artificial Sequence
  Description of Artificial Sequence: Synthetic oligonucleotide
  Sense strand starting at position 3606 of SEQ ID NO: 1886788
ggguguucggcauggguga

SEQ ID NO: 2426217 - RNA, 19 nt, Artificial Sequence
  Description of Artificial Sequence: Synthetic oligonucleotide
  Antisense strand to SEQ ID NO: 2426216
ucacccaugccgaacaccc

SEQ ID NO: 2426218 - RNA, 19 nt, Artificial Sequence
  Description of Artificial Sequence: Synthetic oligonucleotide
  Sense strand starting at position 3608 of SEQ ID NO: 1886788
guguucggcaugggugauu

SEQ ID NO: 2426219 - RNA, 19 nt, Artificial Sequence
  Description of Artificial Sequence: Synthetic oligonucleotide
  Antisense strand to SEQ ID NO: 2426218
aaucacccaugccgaacac

SEQ ID NO: 2426220 - RNA, 19 nt, Artificial Sequence
  Description of Artificial Sequence: Synthetic oligonucleotide
  Sense strand starting at position 3617 of SEQ ID NO: 1886788
augggugauuuguagauua

SEQ ID NO: 2426221 - RNA, 19 nt, Artificial Sequence
  Description of Artificial Sequence: Synthetic oligonucleotide
  Antisense strand to SEQ ID NO: 2426220
uaaucuacaaaucacccau

SEQ ID NO: 2426222 - RNA, 19 nt, Artificial Sequence
  Description of Artificial Sequence: Synthetic oligonucleotide
  Sense strand starting at position 3687 of SEQ ID NO: 1886788
ggaguauucuggcuacaac

SEQ ID NO: 2426223 - RNA, 19 nt, Artificial Sequence
  Description of Artificial Sequence: Synthetic oligonucleotide
  Antisense strand to SEQ ID NO: 2426222
guuguagccagaauacucc

SEQ ID NO: 2426224 - RNA, 19 nt, Artificial Sequence
  Description of Artificial Sequence: Synthetic oligonucleotide
  Sense strand starting at position 3688 of SEQ ID NO: 1886788
gaguauucuggcuacaacu

SEQ ID NO: 2426225 - RNA, 19 nt, Artificial Sequence
  Description of Artificial Sequence: Synthetic oligonucleotide
  Antisense strand to SEQ ID NO: 2426224
aguuguagccagaauacuc

SEQ ID NO: 2426226 - RNA, 19 nt, Artificial Sequence
  Description of Artificial Sequence: Synthetic oligonucleotide
  Sense strand starting at position 3711 of SEQ ID NO: 1886788
ugggacuaguuaggaaaca

SEQ ID NO: 2426227 - RNA, 19 nt, Artificial Sequence
  Description of Artificial Sequence: Synthetic oligonucleotide
  Antisense strand to SEQ ID NO: 2426226
uguuuccuaacuaguccca

SEQ ID NO: 2426228 - RNA, 19 nt, Artificial Sequence
  Description of Artificial Sequence: Synthetic oligonucleotide
  Sense strand starting at position 3712 of SEQ ID NO: 1886788
gggacuaguuaggaaacau

SEQ ID NO: 2426229 - RNA, 19 nt, Artificial Sequence
  Description of Artificial Sequence: Synthetic oligonucleotide
  Antisense strand to SEQ ID NO: 2426228
auguuuccuaacuaguccc

SEQ ID NO: 2426230 - RNA, 19 nt, Artificial Sequence
  Description of Artificial Sequence: Synthetic oligonucleotide
  Sense strand starting at position 3762 of SEQ ID NO: 1886788
guggcuucuguuuauagga

SEQ ID NO: 2426231 - RNA, 19 nt, Artificial Sequence
  Description of Artificial Sequence: Synthetic oligonucleotide
  Antisense strand to SEQ ID NO: 2426230
uccuauaaacagaagccac

SEQ ID NO: 2426232 - RNA, 19 nt, Artificial Sequence
  Description of Artificial Sequence: Synthetic oligonucleotide
  Sense strand starting at position 3767 of SEQ ID NO: 1886788
uucuguuuauaggagauaa

SEQ ID NO: 2426233 - RNA, 19 nt, Artificial Sequence
  Description of Artificial Sequence: Synthetic oligonucleotide
  Antisense strand to SEQ ID NO: 2426232
uuaucuccuauaaacagaa

SEQ ID NO: 2426234 - RNA, 19 nt, Artificial Sequence
  Description of Artificial Sequence: Synthetic oligonucleotide
  Sense strand starting at position 3777 of SEQ ID NO: 1886788
aggagauaauccuaaagag

SEQ ID NO: 2426235 - RNA, 19 nt, Artificial Sequence
  Description of Artificial Sequence: Synthetic oligonucleotide
  Antisense strand to SEQ ID NO: 2426234
cucuuuaggauuaucuccu

SEQ ID NO: 2426236 - RNA, 19 nt, Artificial Sequence
  Description of Artificial Sequence: Synthetic oligonucleotide
  Sense strand starting at position 3916 of SEQ ID NO: 1886788
ggcccauuuguguguaaga

SEQ ID NO: 2426237 - RNA, 19 nt, Artificial Sequence
  Description of Artificial Sequence: Synthetic oligonucleotide
  Antisense strand to SEQ ID NO: 2426236
ucuuacacacaaaugggcc

SEQ ID NO: 2426238 - RNA, 19 nt, Artificial Sequence
  Description of Artificial Sequence: Synthetic oligonucleotide
  Sense strand starting at position 3917 of SEQ ID NO: 1886788
gcccauuuguguguaagau

SEQ ID NO: 2426239 - RNA, 19 nt, Artificial Sequence
  Description of Artificial Sequence: Synthetic oligonucleotide
  Antisense strand to SEQ ID NO: 2426238
aucuuacacacaaaugggc

SEQ ID NO: 2426240 - RNA, 19 nt, Artificial Sequence
  Description of Artificial Sequence: Synthetic oligonucleotide
  Sense strand starting at position 3921 of SEQ ID NO: 1886788
auuuguguguaagaugaga

SEQ ID NO: 2426241 - RNA, 19 nt, Artificial Sequence
  Description of Artificial Sequence: Synthetic oligonucleotide
  Antisense strand to SEQ ID NO: 2426240
ucucaucuuacacacaaau

SEQ ID NO: 2426242 - RNA, 19 nt, Artificial Sequence
  Description of Artificial Sequence: Synthetic oligonucleotide
  Sense strand starting at position 3923 of SEQ ID NO: 1886788
uuguguguaagaugagaau

SEQ ID NO: 2426243 - RNA, 19 nt, Artificial Sequence
  Description of Artificial Sequence: Synthetic oligonucleotide
  Antisense strand to SEQ ID NO: 2426242
auucucaucuuacacacaa

SEQ ID NO: 2426244 - RNA, 19 nt, Artificial Sequence
  Description of Artificial Sequence: Synthetic oligonucleotide
  Sense strand starting at position 3926 of SEQ ID NO: 1886788
uguguaagaugagaauucu

SEQ ID NO: 2426245 - RNA, 19 nt, Artificial Sequence
  Description of Artificial Sequence: Synthetic oligonucleotide
  Antisense strand to SEQ ID NO: 2426244
agaauucucaucuuacaca

SEQ ID NO: 2426246 - RNA, 19 nt, Artificial Sequence
  Description of Artificial Sequence: Synthetic oligonucleotide
  Sense strand starting at position 357 of SEQ ID NO: 1886789
gguaaugagucucugugac

SEQ ID NO: 2426247 - RNA, 19 nt, Artificial Sequence
  Description of Artificial Sequence: Synthetic oligonucleotide
  Antisense strand to SEQ ID NO: 2426246
gucacagagacucauuacc

SEQ ID NO: 2426248 - RNA, 19 nt, Artificial Sequence
  Description of Artificial Sequence: Synthetic oligonucleotide
  Sense strand starting at position 712 of SEQ ID NO: 1886789
ucagucuucccauguguag

SEQ ID NO: 2426249 - RNA, 19 nt, Artificial Sequence
  Description of Artificial Sequence: Synthetic oligonucleotide
  Antisense strand to SEQ ID NO: 2426248
cuacacaugggaagacuga

SEQ ID NO: 2426250 - RNA, 19 nt, Artificial Sequence
  Description of Artificial Sequence: Synthetic oligonucleotide
  Sense strand starting at position 714 of SEQ ID NO: 1886789
agucuucccauguguagaa

SEQ ID NO: 2426251 - RNA, 19 nt, Artificial Sequence
  Description of Artificial Sequence: Synthetic oligonucleotide
  Antisense strand to SEQ ID NO: 2426250
uucuacacaugggaagacu

SEQ ID NO: 2426252 - RNA, 19 nt, Artificial Sequence
  Description of Artificial Sequence: Synthetic oligonucleotide
  Sense strand starting at position 724 of SEQ ID NO: 1886789
uguguagaagggugaauua

SEQ ID NO: 2426253 - RNA, 19 nt, Artificial Sequence
  Description of Artificial Sequence: Synthetic oligonucleotide
  Antisense strand to SEQ ID NO: 2426252
uaauucacccuucuacaca

SEQ ID NO: 2426254 - RNA, 19 nt, Artificial Sequence
  Description of Artificial Sequence: Synthetic oligonucleotide
  Sense strand starting at position 782 of SEQ ID NO: 1886789
ggaaauaauguccagcgua

SEQ ID NO: 2426255 - RNA, 19 nt, Artificial Sequence
  Description of Artificial Sequence: Synthetic oligonucleotide
  Antisense strand to SEQ ID NO: 2426254
uacgcuggacauuauuucc

SEQ ID NO: 2426256 - RNA, 19 nt, Artificial Sequence
  Description of Artificial Sequence: Synthetic oligonucleotide
  Sense strand starting at position 811 of SEQ ID NO: 1886789
caagguuacccgugaucuc

SEQ ID NO: 2426257 - RNA, 19 nt, Artificial Sequence
  Description of Artificial Sequence: Synthetic oligonucleotide
  Antisense strand to SEQ ID NO: 2426256
gagaucacggguaaccuug

SEQ ID NO: 2426258 - RNA, 19 nt, Artificial Sequence
  Description of Artificial Sequence: Synthetic oligonucleotide
  Sense strand starting at position 812 of SEQ ID NO: 1886789
aagguuacccgugaucuca

SEQ ID NO: 2426259 - RNA, 19 nt, Artificial Sequence
  Description of Artificial Sequence: Synthetic oligonucleotide
  Antisense strand to SEQ ID NO: 2426258
ugagaucacggguaaccuu

SEQ ID NO: 2426260 - RNA, 19 nt, Artificial Sequence
  Description of Artificial Sequence: Synthetic oligonucleotide
  Sense strand starting at position 814 of SEQ ID NO: 1886789
gguuacccgugaucucagu

SEQ ID NO: 2426261 - RNA, 19 nt, Artificial Sequence
  Description of Artificial Sequence: Synthetic oligonucleotide
  Antisense strand to SEQ ID NO: 2426260
acugagaucacggguaacc

SEQ ID NO: 2426262 - RNA, 19 nt, Artificial Sequence
  Description of Artificial Sequence: Synthetic oligonucleotide
  Sense strand starting at position 1912 of SEQ ID NO: 1886789
gggcuuugcccaggaaggu

SEQ ID NO: 2426263 - RNA, 19 nt, Artificial Sequence
  Description of Artificial Sequence: Synthetic oligonucleotide
  Antisense strand to SEQ ID NO: 2426262
accuuccugggcaaagccc

SEQ ID NO: 2426264 - RNA, 19 nt, Artificial Sequence
  Description of Artificial Sequence: Synthetic oligonucleotide
  Sense strand starting at position 2464 of SEQ ID NO: 1886789
aguggugacuccucagauu

SEQ ID NO: 2426265 - RNA, 19 nt, Artificial Sequence
  Description of Artificial Sequence: Synthetic oligonucleotide
  Antisense strand to SEQ ID NO: 2426264
aaucugaggagucaccacu

SEQ ID NO: 2426266 - RNA, 19 nt, Artificial Sequence
  Description of Artificial Sequence: Synthetic oligonucleotide
  Sense strand starting at position 2470 of SEQ ID NO: 1886789
gacuccucagauuguugau

SEQ ID NO: 2426267 - RNA, 19 nt, Artificial Sequence
  Description of Artificial Sequence: Synthetic oligonucleotide
  Antisense strand to SEQ ID NO: 2426266
aucaacaaucugaggaguc

SEQ ID NO: 2426268 - RNA, 19 nt, Artificial Sequence
  Description of Artificial Sequence: Synthetic oligonucleotide
  Sense strand starting at position 2472 of SEQ ID NO: 1886789
cuccucagauuguugauau

SEQ ID NO: 2426269 - RNA, 19 nt, Artificial Sequence
  Description of Artificial Sequence: Synthetic oligonucleotide
  Antisense strand to SEQ ID NO: 2426268
auaucaacaaucugaggag

SEQ ID NO: 2426270 - RNA, 19 nt, Artificial Sequence
  Description of Artificial Sequence: Synthetic oligonucleotide
  Sense strand starting at position 2484 of SEQ ID NO: 1886789
uugauauggcuccguaggu

SEQ ID NO: 2426271 - RNA, 19 nt, Artificial Sequence
  Description of Artificial Sequence: Synthetic oligonucleotide
  Antisense strand to SEQ ID NO: 2426270
accuacggagccauaucaa

SEQ ID NO: 2426272 - RNA, 19 nt, Artificial Sequence
  Description of Artificial Sequence: Synthetic oligonucleotide
  Sense strand starting at position 2499 of SEQ ID NO: 1886789
aggugaagcucucugagcu

SEQ ID NO: 2426273 - RNA, 19 nt, Artificial Sequence
  Description of Artificial Sequence: Synthetic oligonucleotide
  Antisense strand to SEQ ID NO: 2426272
agcucagagagcuucaccu

SEQ ID NO: 2426274 - RNA, 19 nt, Artificial Sequence
  Description of Artificial Sequence: Synthetic oligonucleotide
  Sense strand starting at position 2624 of SEQ ID NO: 1886789
gaguauccaucguuguauu

SEQ ID NO: 2426275 - RNA, 19 nt, Artificial Sequence
  Description of Artificial Sequence: Synthetic oligonucleotide
  Antisense strand to SEQ ID NO: 2426274
aauacaacgauggauacuc

SEQ ID NO: 2426276 - RNA, 19 nt, Artificial Sequence
  Description of Artificial Sequence: Synthetic oligonucleotide
  Sense strand starting at position 2625 of SEQ ID NO: 1886789
aguauccaucguuguauua

SEQ ID NO: 2426277 - RNA, 19 nt, Artificial Sequence
  Description of Artificial Sequence: Synthetic oligonucleotide
  Antisense strand to SEQ ID NO: 2426276
uaauacaacgauggauacu

SEQ ID NO: 2426278 - RNA, 19 nt, Artificial Sequence
  Description of Artificial Sequence: Synthetic oligonucleotide
  Sense strand starting at position 2634 of SEQ ID NO: 1886789
cguuguauuaaccuuacgu

SEQ ID NO: 2426279 - RNA, 19 nt, Artificial Sequence
  Description of Artificial Sequence: Synthetic oligonucleotide
  Antisense strand to SEQ ID NO: 2426278
acguaagguuaauacaacg

SEQ ID NO: 2426280 - RNA, 19 nt, Artificial Sequence
  Description of Artificial Sequence: Synthetic oligonucleotide
  Sense strand starting at position 2636 of SEQ ID NO: 1886789
uuguauuaaccuuacguaa

SEQ ID NO: 2426281 - RNA, 19 nt, Artificial Sequence
  Description of Artificial Sequence: Synthetic oligonucleotide
  Antisense strand to SEQ ID NO: 2426280
uuacguaagguuaauacaa

SEQ ID NO: 2426282 - RNA, 19 nt, Artificial Sequence
  Description of Artificial Sequence: Synthetic oligonucleotide
  Sense strand starting at position 2680 of SEQ ID NO: 1886789
auguuauauaugugaaguc

SEQ ID NO: 2426283 - RNA, 19 nt, Artificial Sequence
  Description of Artificial Sequence: Synthetic oligonucleotide
  Antisense strand to SEQ ID NO: 2426282
gacuucacauauauaacau

SEQ ID NO: 2426284 - RNA, 19 nt, Artificial Sequence
  Description of Artificial Sequence: Synthetic oligonucleotide
  Sense strand starting at position 2689 of SEQ ID NO: 1886789
augugaaguccucauuagg

SEQ ID NO: 2426285 - RNA, 19 nt, Artificial Sequence
  Description of Artificial Sequence: Synthetic oligonucleotide
  Antisense strand to SEQ ID NO: 2426284
ccuaaugaggacuucacau

SEQ ID NO: 2426286 - RNA, 19 nt, Artificial Sequence
  Description of Artificial Sequence: Synthetic oligonucleotide
  Sense strand starting at position 2880 of SEQ ID NO: 1886789
guuucugugcagucaguuu

SEQ ID NO: 2426287 - RNA, 19 nt, Artificial Sequence
  Description of Artificial Sequence: Synthetic oligonucleotide
  Antisense strand to SEQ ID NO: 2426286
aaacugacugcacagaaac

SEQ ID NO: 2426288 - RNA, 19 nt, Artificial Sequence
  Description of Artificial Sequence: Synthetic oligonucleotide
  Sense strand starting at position 2972 of SEQ ID NO: 1886789
acauacaacugucuuggua

SEQ ID NO: 2426289 - RNA, 19 nt, Artificial Sequence
  Description of Artificial Sequence: Synthetic oligonucleotide
  Antisense strand to SEQ ID NO: 2426288
uaccaagacaguuguaugu

SEQ ID NO: 2426290 - RNA, 19 nt, Artificial Sequence
  Description of Artificial Sequence: Synthetic oligonucleotide
  Sense strand starting at position 3230 of SEQ ID NO: 1886789
cggugaguagcugggauua

SEQ ID NO: 2426291 - RNA, 19 nt, Artificial Sequence
  Description of Artificial Sequence: Synthetic oligonucleotide
  Antisense strand to SEQ ID NO: 2426290
uaaucccagcuacucaccg

SEQ ID NO: 2426292 - RNA, 19 nt, Artificial Sequence
  Description of Artificial Sequence: Synthetic oligonucleotide
  Sense strand starting at position 3448 of SEQ ID NO: 1886789
ggguguucggcauggguga

SEQ ID NO: 2426293 - RNA, 19 nt, Artificial Sequence
  Description of Artificial Sequence: Synthetic oligonucleotide
  Antisense strand to SEQ ID NO: 2426292
ucacccaugccgaacaccc

SEQ ID NO: 2426294 - RNA, 19 nt, Artificial Sequence
  Description of Artificial Sequence: Synthetic oligonucleotide
  Sense strand starting at position 3459 of SEQ ID NO: 1886789
augggugauuuguagauua

SEQ ID NO: 2426295 - RNA, 19 nt, Artificial Sequence
  Description of Artificial Sequence: Synthetic oligonucleotide
  Antisense strand to SEQ ID NO: 2426294
uaaucuacaaaucacccau

SEQ ID NO: 2426296 - RNA, 19 nt, Artificial Sequence
  Description of Artificial Sequence: Synthetic oligonucleotide
  Sense strand starting at position 3529 of SEQ ID NO: 1886789
ggaguauucuggcuacaac

SEQ ID NO: 2426297 - RNA, 19 nt, Artificial Sequence
  Description of Artificial Sequence: Synthetic oligonucleotide
  Antisense strand to SEQ ID NO: 2426296
guuguagccagaauacucc

SEQ ID NO: 2426298 - RNA, 19 nt, Artificial Sequence
  Description of Artificial Sequence: Synthetic oligonucleotide
  Sense strand starting at position 3530 of SEQ ID NO: 1886789
gaguauucuggcuacaacu

SEQ ID NO: 2426299 - RNA, 19 nt, Artificial Sequence
  Description of Artificial Sequence: Synthetic oligonucleotide
  Antisense strand to SEQ ID NO: 2426298
aguuguagccagaauacuc

SEQ ID NO: 2426300 - RNA, 19 nt, Artificial Sequence
  Description of Artificial Sequence: Synthetic oligonucleotide
  Sense strand starting at position 3554 of SEQ ID NO: 1886789
gggacuaguuaggaaacau

SEQ ID NO: 2426301 - RNA, 19 nt, Artificial Sequence
  Description of Artificial Sequence: Synthetic oligonucleotide
  Antisense strand to SEQ ID NO: 2426300
auguuuccuaacuaguccc

SEQ ID NO: 2426302 - RNA, 19 nt, Artificial Sequence
  Description of Artificial Sequence: Synthetic oligonucleotide
  Sense strand starting at position 3604 of SEQ ID NO: 1886789
guggcuucuguuuauagga

SEQ ID NO: 2426303 - RNA, 19 nt, Artificial Sequence
  Description of Artificial Sequence: Synthetic oligonucleotide
  Antisense strand to SEQ ID NO: 2426302
uccuauaaacagaagccac

SEQ ID NO: 2426304 - RNA, 19 nt, Artificial Sequence
  Description of Artificial Sequence: Synthetic oligonucleotide
  Sense strand starting at position 3609 of SEQ ID NO: 1886789
uucuguuuauaggagauaa

SEQ ID NO: 2426305 - RNA, 19 nt, Artificial Sequence
  Description of Artificial Sequence: Synthetic oligonucleotide
  Antisense strand to SEQ ID NO: 2426304
uuaucuccuauaaacagaa

SEQ ID NO: 2426306 - RNA, 19 nt, Artificial Sequence
  Description of Artificial Sequence: Synthetic oligonucleotide
  Sense strand starting at position 3619 of SEQ ID NO: 1886789
aggagauaauccuaaagag

SEQ ID NO: 2426307 - RNA, 19 nt, Artificial Sequence
  Description of Artificial Sequence: Synthetic oligonucleotide
  Antisense strand to SEQ ID NO: 2426306
cucuuuaggauuaucuccu

SEQ ID NO: 2426308 - RNA, 19 nt, Artificial Sequence
  Description of Artificial Sequence: Synthetic oligonucleotide
  Sense strand starting at position 3758 of SEQ ID NO: 1886789
ggcccauuuguguguaaga

SEQ ID NO: 2426309 - RNA, 19 nt, Artificial Sequence
  Description of Artificial Sequence: Synthetic oligonucleotide
  Antisense strand to SEQ ID NO: 2426308
ucuuacacacaaaugggcc

SEQ ID NO: 2426310 - RNA, 19 nt, Artificial Sequence
  Description of Artificial Sequence: Synthetic oligonucleotide
  Sense strand starting at position 3759 of SEQ ID NO: 1886789
gcccauuuguguguaagau

SEQ ID NO: 2426311 - RNA, 19 nt, Artificial Sequence
  Description of Artificial Sequence: Synthetic oligonucleotide
  Antisense strand to SEQ ID NO: 2426310
aucuuacacacaaaugggc

SEQ ID NO: 2426312 - RNA, 19 nt, Artificial Sequence
  Description of Artificial Sequence: Synthetic oligonucleotide
  Sense strand starting at position 3763 of SEQ ID NO: 1886789
auuuguguguaagaugaga

SEQ ID NO: 2426313 - RNA, 19 nt, Artificial Sequence
  Description of Artificial Sequence: Synthetic oligonucleotide
  Antisense strand to SEQ ID NO: 2426312
ucucaucuuacacacaaau

SEQ ID NO: 2426314 - RNA, 19 nt, Artificial Sequence
  Description of Artificial Sequence: Synthetic oligonucleotide
  Sense strand starting at position 3765 of SEQ ID NO: 1886789
uuguguguaagaugagaau

SEQ ID NO: 2426315 - RNA, 19 nt, Artificial Sequence
  Description of Artificial Sequence: Synthetic oligonucleotide
  Antisense strand to SEQ ID NO: 2426314
auucucaucuuacacacaa

SEQ ID NO: 2426316 - RNA, 19 nt, Artificial Sequence
  Description of Artificial Sequence: Synthetic oligonucleotide
  Sense strand starting at position 3839 of SEQ ID NO: 1886789
gcuuguaaauucguaucua

SEQ ID NO: 2426317 - RNA, 19 nt, Artificial Sequence
  Description of Artificial Sequence: Synthetic oligonucleotide
  Antisense strand to SEQ ID NO: 2426316
uagauacgaauuuacaagc

SEQ ID NO: 2426318 - RNA, 19 nt, Artificial Sequence
  Description of Artificial Sequence: Synthetic oligonucleotide
  Sense strand starting at position 3843 of SEQ ID NO: 1886789
guaaauucguaucuagcuu

SEQ ID NO: 2426319 - RNA, 19 nt, Artificial Sequence
  Description of Artificial Sequence: Synthetic oligonucleotide
  Antisense strand to SEQ ID NO: 2426318
aagcuagauacgaauuuac

SEQ ID NO: 2426320 - RNA, 19 nt, Artificial Sequence
  Description of Artificial Sequence: Synthetic oligonucleotide
  Sense strand starting at position 3864 of SEQ ID NO: 1886789
acugaauugcaaggauuag

SEQ ID NO: 2426321 - RNA, 19 nt, Artificial Sequence
  Description of Artificial Sequence: Synthetic oligonucleotide
  Antisense strand to SEQ ID NO: 2426320
cuaauccuugcaauucagu

SEQ ID NO: 2426322 - RNA, 19 nt, Artificial Sequence
  Description of Artificial Sequence: Synthetic oligonucleotide
  Sense strand starting at position 3870 of SEQ ID NO: 1886789
uugcaaggauuagcuaauu

SEQ ID NO: 2426323 - RNA, 19 nt, Artificial Sequence
  Description of Artificial Sequence: Synthetic oligonucleotide
  Antisense strand to SEQ ID NO: 2426322
aauuagcuaauccuugcaa

SEQ ID NO: 2426324 - RNA, 19 nt, Artificial Sequence
  Description of Artificial Sequence: Synthetic oligonucleotide
  Sense strand starting at position 3917 of SEQ ID NO: 1886789
uguugucccuaccuuacaa

SEQ ID NO: 2426325 - RNA, 19 nt, Artificial Sequence
  Description of Artificial Sequence: Synthetic oligonucleotide
  Antisense strand to SEQ ID NO: 2426324
uuguaagguagggacaaca

SEQ ID NO: 2426326 - RNA, 19 nt, Artificial Sequence
  Description of Artificial Sequence: Synthetic oligonucleotide
  Sense strand starting at position 157 of SEQ ID NO: 1886790
uucuaaagauguguauaac

SEQ ID NO: 2426327 - RNA, 19 nt, Artificial Sequence
  Description of Artificial Sequence: Synthetic oligonucleotide
  Antisense strand to SEQ ID NO: 2426326
guuauacacaucuuuagaa

SEQ ID NO: 2426328 - RNA, 19 nt, Artificial Sequence
  Description of Artificial Sequence: Synthetic oligonucleotide
  Sense strand starting at position 160 of SEQ ID NO: 1886790
uaaagauguguauaacgcu

SEQ ID NO: 2426329 - RNA, 19 nt, Artificial Sequence
  Description of Artificial Sequence: Synthetic oligonucleotide
  Antisense strand to SEQ ID NO: 2426328
agcguuauacacaucuuua

SEQ ID NO: 2426330 - RNA, 19 nt, Artificial Sequence
  Description of Artificial Sequence: Synthetic oligonucleotide
  Sense strand starting at position 168 of SEQ ID NO: 1886790
uguauaacgcuuuagacug

SEQ ID NO: 2426331 - RNA, 19 nt, Artificial Sequence
  Description of Artificial Sequence: Synthetic oligonucleotide
  Antisense strand to SEQ ID NO: 2426330
cagucuaaagcguuauaca

SEQ ID NO: 2426332 - RNA, 19 nt, Artificial Sequence
  Description of Artificial Sequence: Synthetic oligonucleotide
  Sense strand starting at position 196 of SEQ ID NO: 1886790
acguaaauacugggacaau

SEQ ID NO: 2426333 - RNA, 19 nt, Artificial Sequence
  Description of Artificial Sequence: Synthetic oligonucleotide
  Antisense strand to SEQ ID NO: 2426332
auugucccaguauuuacgu

SEQ ID NO: 2426334 - RNA, 19 nt, Artificial Sequence
  Description of Artificial Sequence: Synthetic oligonucleotide
  Sense strand starting at position 284 of SEQ ID NO: 1886790
ugaauugugauugaugcuu

SEQ ID NO: 2426335 - RNA, 19 nt, Artificial Sequence
  Description of Artificial Sequence: Synthetic oligonucleotide
  Antisense strand to SEQ ID NO: 2426334
aagcaucaaucacaauuca

SEQ ID NO: 2426336 - RNA, 19 nt, Artificial Sequence
  Description of Artificial Sequence: Synthetic oligonucleotide
  Sense strand starting at position 289 of SEQ ID NO: 1886790
ugugauugaugcuuauuaa

SEQ ID NO: 2426337 - RNA, 19 nt, Artificial Sequence
  Description of Artificial Sequence: Synthetic oligonucleotide
  Antisense strand to SEQ ID NO: 2426336
uuaauaagcaucaaucaca

SEQ ID NO: 2426338 - RNA, 19 nt, Artificial Sequence
  Description of Artificial Sequence: Synthetic oligonucleotide
  Sense strand starting at position 290 of SEQ ID NO: 1886790
gugauugaugcuuauuaaa

SEQ ID NO: 2426339 - RNA, 19 nt, Artificial Sequence
  Description of Artificial Sequence: Synthetic oligonucleotide
  Antisense strand to SEQ ID NO: 2426338
uuuaauaagcaucaaucac

SEQ ID NO: 2426340 - RNA, 19 nt, Artificial Sequence
  Description of Artificial Sequence: Synthetic oligonucleotide
  Sense strand starting at position 313 of SEQ ID NO: 1886790
ggaagugagcuaugccuaa

SEQ ID NO: 2426341 - RNA, 19 nt, Artificial Sequence
  Description of Artificial Sequence: Synthetic oligonucleotide
  Antisense strand to SEQ ID NO: 2426340
uuaggcauagcucacuucc

SEQ ID NO: 2426342 - RNA, 19 nt, Artificial Sequence
  Description of Artificial Sequence: Synthetic oligonucleotide
  Sense strand starting at position 317 of SEQ ID NO: 1886790
gugagcuaugccuaaagau

SEQ ID NO: 2426343 - RNA, 19 nt, Artificial Sequence
  Description of Artificial Sequence: Synthetic oligonucleotide
  Antisense strand to SEQ ID NO: 2426342
aucuuuaggcauagcucac

SEQ ID NO: 2426344 - RNA, 19 nt, Artificial Sequence
  Description of Artificial Sequence: Synthetic oligonucleotide
  Sense strand starting at position 415 of SEQ ID NO: 1886790
uaagcuaguuaauuaggau

SEQ ID NO: 2426345 - RNA, 19 nt, Artificial Sequence
  Description of Artificial Sequence: Synthetic oligonucleotide
  Antisense strand to SEQ ID NO: 2426344
auccuaauuaacuagcuua

SEQ ID NO: 2426346 - RNA, 19 nt, Artificial Sequence
  Description of Artificial Sequence: Synthetic oligonucleotide
  Sense strand starting at position 1113 of SEQ ID NO: 1886790
uuuccaccacgggauuauu

SEQ ID NO: 2426347 - RNA, 19 nt, Artificial Sequence
  Description of Artificial Sequence: Synthetic oligonucleotide
  Antisense strand to SEQ ID NO: 2426346
aauaaucccgugguggaaa

SEQ ID NO: 2426348 - RNA, 19 nt, Artificial Sequence
  Description of Artificial Sequence: Synthetic oligonucleotide
  Sense strand starting at position 1191 of SEQ ID NO: 1886790
cugggauggauucgugcaa

SEQ ID NO: 2426349 - RNA, 19 nt, Artificial Sequence
  Description of Artificial Sequence: Synthetic oligonucleotide
  Antisense strand to SEQ ID NO: 2426348
uugcacgaauccaucccag

SEQ ID NO: 2426350 - RNA, 19 nt, Artificial Sequence
  Description of Artificial Sequence: Synthetic oligonucleotide
  Sense strand starting at position 1195 of SEQ ID NO: 1886790
gauggauucgugcaaggga

SEQ ID NO: 2426351 - RNA, 19 nt, Artificial Sequence
  Description of Artificial Sequence: Synthetic oligonucleotide
  Antisense strand to SEQ ID NO: 2426350
ucccuugcacgaauccauc

SEQ ID NO: 2426352 - RNA, 19 nt, Artificial Sequence
  Description of Artificial Sequence: Synthetic oligonucleotide
  Sense strand starting at position 1196 of SEQ ID NO: 1886790
auggauucgugcaagggau

SEQ ID NO: 2426353 - RNA, 19 nt, Artificial Sequence
  Description of Artificial Sequence: Synthetic oligonucleotide
  Antisense strand to SEQ ID NO: 2426352
aucccuugcacgaauccau

SEQ ID NO: 2426354 - RNA, 19 nt, Artificial Sequence
  Description of Artificial Sequence: Synthetic oligonucleotide
  Sense strand starting at position 2355 of SEQ ID NO: 1886790
ccgaggagggucugguuua

SEQ ID NO: 2426355 - RNA, 19 nt, Artificial Sequence
  Description of Artificial Sequence: Synthetic oligonucleotide
  Antisense strand to SEQ ID NO: 2426354
uaaaccagacccuccucgg

SEQ ID NO: 2426356 - RNA, 19 nt, Artificial Sequence
  Description of Artificial Sequence: Synthetic oligonucleotide
  Sense strand starting at position 2519 of SEQ ID NO: 1886790
acgcguaaagugcuugaca

SEQ ID NO: 2426357 - RNA, 19 nt, Artificial Sequence
  Description of Artificial Sequence: Synthetic oligonucleotide
  Antisense strand to SEQ ID NO: 2426356
ugucaagcacuuuacgcgu

SEQ ID NO: 2426358 - RNA, 19 nt, Artificial Sequence
  Description of Artificial Sequence: Synthetic oligonucleotide
  Sense strand starting at position 2522 of SEQ ID NO: 1886790
cguaaagugcuugacauga

SEQ ID NO: 2426359 - RNA, 19 nt, Artificial Sequence
  Description of Artificial Sequence: Synthetic oligonucleotide
  Antisense strand to SEQ ID NO: 2426358
ucaugucaagcacuuuacg

SEQ ID NO: 2426360 - RNA, 19 nt, Artificial Sequence
  Description of Artificial Sequence: Synthetic oligonucleotide
  Sense strand starting at position 2796 of SEQ ID NO: 1886790
cgcguaagauuucugugag

SEQ ID NO: 2426361 - RNA, 19 nt, Artificial Sequence
  Description of Artificial Sequence: Synthetic oligonucleotide
  Antisense strand to SEQ ID NO: 2426360
cucacagaaaucuuacgcg

SEQ ID NO: 2426362 - RNA, 19 nt, Artificial Sequence
  Description of Artificial Sequence: Synthetic oligonucleotide
  Sense strand starting at position 2821 of SEQ ID NO: 1886790
auuagauuaacgugagcac

SEQ ID NO: 2426363 - RNA, 19 nt, Artificial Sequence
  Description of Artificial Sequence: Synthetic oligonucleotide
  Antisense strand to SEQ ID NO: 2426362
gugcucacguuaaucuaau

SEQ ID NO: 2426364 - RNA, 19 nt, Artificial Sequence
  Description of Artificial Sequence: Synthetic oligonucleotide
  Sense strand starting at position 2822 of SEQ ID NO: 1886790
uuagauuaacgugagcaca

SEQ ID NO: 2426365 - RNA, 19 nt, Artificial Sequence
  Description of Artificial Sequence: Synthetic oligonucleotide
  Antisense strand to SEQ ID NO: 2426364
ugugcucacguuaaucuaa

SEQ ID NO: 2426366 - RNA, 19 nt, Artificial Sequence
  Description of Artificial Sequence: Synthetic oligonucleotide
  Sense strand starting at position 2824 of SEQ ID NO: 1886790
agauuaacgugagcacacu

SEQ ID NO: 2426367 - RNA, 19 nt, Artificial Sequence
  Description of Artificial Sequence: Synthetic oligonucleotide
  Antisense strand to SEQ ID NO: 2426366
agugugcucacguuaaucu

SEQ ID NO: 2426368 - RNA, 19 nt, Artificial Sequence
  Description of Artificial Sequence: Synthetic oligonucleotide
  Sense strand starting at position 2869 of SEQ ID NO: 1886790
ggcuacugggauuguuauu

SEQ ID NO: 2426369 - RNA, 19 nt, Artificial Sequence
  Description of Artificial Sequence: Synthetic oligonucleotide
  Antisense strand to SEQ ID NO: 2426368
aauaacaaucccaguagcc

SEQ ID NO: 2426370 - RNA, 19 nt, Artificial Sequence
  Description of Artificial Sequence: Synthetic oligonucleotide
  Sense strand starting at position 2874 of SEQ ID NO: 1886790
cugggauuguuauuaauaa

SEQ ID NO: 2426371 - RNA, 19 nt, Artificial Sequence
  Description of Artificial Sequence: Synthetic oligonucleotide
  Antisense strand to SEQ ID NO: 2426370
uuauuaauaacaaucccag

SEQ ID NO: 2426372 - RNA, 19 nt, Artificial Sequence
  Description of Artificial Sequence: Synthetic oligonucleotide
  Sense strand starting at position 3523 of SEQ ID NO: 1886790
auuggauaugggugaucuu

SEQ ID NO: 2426373 - RNA, 19 nt, Artificial Sequence
  Description of Artificial Sequence: Synthetic oligonucleotide
  Antisense strand to SEQ ID NO: 2426372
aagaucacccauauccaau

SEQ ID NO: 2426374 - RNA, 19 nt, Artificial Sequence
  Description of Artificial Sequence: Synthetic oligonucleotide
  Sense strand starting at position 3526 of SEQ ID NO: 1886790
ggauaugggugaucuucgu

SEQ ID NO: 2426375 - RNA, 19 nt, Artificial Sequence
  Description of Artificial Sequence: Synthetic oligonucleotide
  Antisense strand to SEQ ID NO: 2426374
acgaagaucacccauaucc

SEQ ID NO: 2426376 - RNA, 19 nt, Artificial Sequence
  Description of Artificial Sequence: Synthetic oligonucleotide
  Sense strand starting at position 3530 of SEQ ID NO: 1886790
augggugaucuucgugaau

SEQ ID NO: 2426377 - RNA, 19 nt, Artificial Sequence
  Description of Artificial Sequence: Synthetic oligonucleotide
  Antisense strand to SEQ ID NO: 2426376
auucacgaagaucacccau

SEQ ID NO: 2426378 - RNA, 19 nt, Artificial Sequence
  Description of Artificial Sequence: Synthetic oligonucleotide
  Sense strand starting at position 3533 of SEQ ID NO: 1886790
ggugaucuucgugaauuau

SEQ ID NO: 2426379 - RNA, 19 nt, Artificial Sequence
  Description of Artificial Sequence: Synthetic oligonucleotide
  Antisense strand to SEQ ID NO: 2426378
auaauucacgaagaucacc

SEQ ID NO: 2426380 - RNA, 19 nt, Artificial Sequence
  Description of Artificial Sequence: Synthetic oligonucleotide
  Sense strand starting at position 3539 of SEQ ID NO: 1886790
cuucgugaauuauugguaa

SEQ ID NO: 2426381 - RNA, 19 nt, Artificial Sequence
  Description of Artificial Sequence: Synthetic oligonucleotide
  Antisense strand to SEQ ID NO: 2426380
uuaccaauaauucacgaag

SEQ ID NO: 2426382 - RNA, 19 nt, Artificial Sequence
  Description of Artificial Sequence: Synthetic oligonucleotide
  Sense strand starting at position 3541 of SEQ ID NO: 1886790
ucgugaauuauugguaauu

SEQ ID NO: 2426383 - RNA, 19 nt, Artificial Sequence
  Description of Artificial Sequence: Synthetic oligonucleotide
  Antisense strand to SEQ ID NO: 2426382
aauuaccaauaauucacga

SEQ ID NO: 2426384 - RNA, 19 nt, Artificial Sequence
  Description of Artificial Sequence: Synthetic oligonucleotide
  Sense strand starting at position 3573 of SEQ ID NO: 1886790
auuauacugugcucacuga

SEQ ID NO: 2426385 - RNA, 19 nt, Artificial Sequence
  Description of Artificial Sequence: Synthetic oligonucleotide
  Antisense strand to SEQ ID NO: 2426384
ucagugagcacaguauaau

SEQ ID NO: 2426386 - RNA, 19 nt, Artificial Sequence
  Description of Artificial Sequence: Synthetic oligonucleotide
  Sense strand starting at position 3577 of SEQ ID NO: 1886790
uacugugcucacugagaga

SEQ ID NO: 2426387 - RNA, 19 nt, Artificial Sequence
  Description of Artificial Sequence: Synthetic oligonucleotide
  Antisense strand to SEQ ID NO: 2426386
ucucucagugagcacagua

SEQ ID NO: 2426388 - RNA, 19 nt, Artificial Sequence
  Description of Artificial Sequence: Synthetic oligonucleotide
  Sense strand starting at position 3588 of SEQ ID NO: 1886790
cugagagaauguccuuauu

SEQ ID NO: 2426389 - RNA, 19 nt, Artificial Sequence
  Description of Artificial Sequence: Synthetic oligonucleotide
  Antisense strand to SEQ ID NO: 2426388
aauaaggacauucucucag

SEQ ID NO: 2426390 - RNA, 19 nt, Artificial Sequence
  Description of Artificial Sequence: Synthetic oligonucleotide
  Sense strand starting at position 3590 of SEQ ID NO: 1886790
gagagaauguccuuauugu

SEQ ID NO: 2426391 - RNA, 19 nt, Artificial Sequence
  Description of Artificial Sequence: Synthetic oligonucleotide
  Antisense strand to SEQ ID NO: 2426390
acaauaaggacauucucuc

SEQ ID NO: 2426392 - RNA, 19 nt, Artificial Sequence
  Description of Artificial Sequence: Synthetic oligonucleotide
  Sense strand starting at position 3591 of SEQ ID NO: 1886790
agagaauguccuuauugug

SEQ ID NO: 2426393 - RNA, 19 nt, Artificial Sequence
  Description of Artificial Sequence: Synthetic oligonucleotide
  Antisense strand to SEQ ID NO: 2426392
cacaauaaggacauucucu

SEQ ID NO: 2426394 - RNA, 19 nt, Artificial Sequence
  Description of Artificial Sequence: Synthetic oligonucleotide
  Sense strand starting at position 3615 of SEQ ID NO: 1886790
augcauucugaagaguuga

SEQ ID NO: 2426395 - RNA, 19 nt, Artificial Sequence
  Description of Artificial Sequence: Synthetic oligonucleotide
  Antisense strand to SEQ ID NO: 2426394
ucaacucuucagaaugcau

SEQ ID NO: 2426396 - RNA, 19 nt, Artificial Sequence
  Description of Artificial Sequence: Synthetic oligonucleotide
  Sense strand starting at position 3641 of SEQ ID NO: 1886790
aggccauaaugccuguaaa

SEQ ID NO: 2426397 - RNA, 19 nt, Artificial Sequence
  Description of Artificial Sequence: Synthetic oligonucleotide
  Antisense strand to SEQ ID NO: 2426396
uuuacaggcauuauggccu

SEQ ID NO: 2426398 - RNA, 19 nt, Artificial Sequence
  Description of Artificial Sequence: Synthetic oligonucleotide
  Sense strand starting at position 3746 of SEQ ID NO: 1886790
uauuguuggcucuaaguag

SEQ ID NO: 2426399 - RNA, 19 nt, Artificial Sequence
  Description of Artificial Sequence: Synthetic oligonucleotide
  Antisense strand to SEQ ID NO: 2426398
cuacuuagagccaacaaua

SEQ ID NO: 2426400 - RNA, 19 nt, Artificial Sequence
  Description of Artificial Sequence: Synthetic oligonucleotide
  Sense strand starting at position 3872 of SEQ ID NO: 1886790
auaucugcacuuggauaga

SEQ ID NO: 2426401 - RNA, 19 nt, Artificial Sequence
  Description of Artificial Sequence: Synthetic oligonucleotide
  Antisense strand to SEQ ID NO: 2426400
ucuauccaagugcagauau

SEQ ID NO: 2426402 - RNA, 19 nt, Artificial Sequence
  Description of Artificial Sequence: Synthetic oligonucleotide
  Sense strand starting at position 3916 of SEQ ID NO: 1886790
gugauuuaugguugucucu

SEQ ID NO: 2426403 - RNA, 19 nt, Artificial Sequence
  Description of Artificial Sequence: Synthetic oligonucleotide
  Antisense strand to SEQ ID NO: 2426402
agagacaaccauaaaucac

SEQ ID NO: 2426404 - RNA, 19 nt, Artificial Sequence
  Description of Artificial Sequence: Synthetic oligonucleotide
  Sense strand starting at position 3918 of SEQ ID NO: 1886790
gauuuaugguugucucucu

SEQ ID NO: 2426405 - RNA, 19 nt, Artificial Sequence
  Description of Artificial Sequence: Synthetic oligonucleotide
  Antisense strand to SEQ ID NO: 2426404
agagagacaaccauaaauc

SEQ ID NO: 2426406 - RNA, 19 nt, Artificial Sequence
  Description of Artificial Sequence: Synthetic oligonucleotide
  Sense strand starting at position 39 of SEQ ID NO: 1886791
gugacugguguagaugcaa

SEQ ID NO: 2426407 - RNA, 19 nt, Artificial Sequence
  Description of Artificial Sequence: Synthetic oligonucleotide
  Antisense strand to SEQ ID NO: 2426406
uugcaucuacaccagucac

SEQ ID NO: 2426408 - RNA, 19 nt, Artificial Sequence
  Description of Artificial Sequence: Synthetic oligonucleotide
  Sense strand starting at position 98 of SEQ ID NO: 1886791
guaggauuccgaggacagu

SEQ ID NO: 2426409 - RNA, 19 nt, Artificial Sequence
  Description of Artificial Sequence: Synthetic oligonucleotide
  Antisense strand to SEQ ID NO: 2426408
acuguccucggaauccuac

SEQ ID NO: 2426410 - RNA, 19 nt, Artificial Sequence
  Description of Artificial Sequence: Synthetic oligonucleotide
  Sense strand starting at position 131 of SEQ ID NO: 1886791
uaacguuucuaguuuggga

SEQ ID NO: 2426411 - RNA, 19 nt, Artificial Sequence
  Description of Artificial Sequence: Synthetic oligonucleotide
  Antisense strand to SEQ ID NO: 2426410
ucccaaacuagaaacguua

SEQ ID NO: 2426412 - RNA, 19 nt, Artificial Sequence
  Description of Artificial Sequence: Synthetic oligonucleotide
  Sense strand starting at position 152 of SEQ ID NO: 1886791
ccacucacugcaugaagaa

SEQ ID NO: 2426413 - RNA, 19 nt, Artificial Sequence
  Description of Artificial Sequence: Synthetic oligonucleotide
  Antisense strand to SEQ ID NO: 2426412
uucuucaugcagugagugg

SEQ ID NO: 2426414 - RNA, 19 nt, Artificial Sequence
  Description of Artificial Sequence: Synthetic oligonucleotide
  Sense strand starting at position 238 of SEQ ID NO: 1886791
ggucuagggagugguguaa

SEQ ID NO: 2426415 - RNA, 19 nt, Artificial Sequence
  Description of Artificial Sequence: Synthetic oligonucleotide
  Antisense strand to SEQ ID NO: 2426414
uuacaccacucccuagacc

SEQ ID NO: 2426416 - RNA, 19 nt, Artificial Sequence
  Description of Artificial Sequence: Synthetic oligonucleotide
  Sense strand starting at position 380 of SEQ ID NO: 1886791
gcagaagugccugacccau

SEQ ID NO: 2426417 - RNA, 19 nt, Artificial Sequence
  Description of Artificial Sequence: Synthetic oligonucleotide
  Antisense strand to SEQ ID NO: 2426416
augggucaggcacuucugc

SEQ ID NO: 2426418 - RNA, 19 nt, Artificial Sequence
  Description of Artificial Sequence: Synthetic oligonucleotide
  Sense strand starting at position 1038 of SEQ ID NO: 1886791
ucaucugccugcuuuaaag

SEQ ID NO: 2426419 - RNA, 19 nt, Artificial Sequence
  Description of Artificial Sequence: Synthetic oligonucleotide
  Antisense strand to SEQ ID NO: 2426418
cuuuaaagcaggcagauga

SEQ ID NO: 2426420 - RNA, 19 nt, Artificial Sequence
  Description of Artificial Sequence: Synthetic oligonucleotide
  Sense strand starting at position 1057 of SEQ ID NO: 1886791
ggauuuaauucuugaugac

SEQ ID NO: 2426421 - RNA, 19 nt, Artificial Sequence
  Description of Artificial Sequence: Synthetic oligonucleotide
  Antisense strand to SEQ ID NO: 2426420
gucaucaagaauuaaaucc

SEQ ID NO: 2426422 - RNA, 19 nt, Artificial Sequence
  Description of Artificial Sequence: Synthetic oligonucleotide
  Sense strand starting at position 1066 of SEQ ID NO: 1886791
ucuugaugacacggacuuu

SEQ ID NO: 2426423 - RNA, 19 nt, Artificial Sequence
  Description of Artificial Sequence: Synthetic oligonucleotide
  Antisense strand to SEQ ID NO: 2426422
aaaguccgugucaucaaga

SEQ ID NO: 2426424 - RNA, 19 nt, Artificial Sequence
  Description of Artificial Sequence: Synthetic oligonucleotide
  Sense strand starting at position 1121 of SEQ ID NO: 1886791
cgagcugugcugugaggaa

SEQ ID NO: 2426425 - RNA, 19 nt, Artificial Sequence
  Description of Artificial Sequence: Synthetic oligonucleotide
  Antisense strand to SEQ ID NO: 2426424
uuccucacagcacagcucg

SEQ ID NO: 2426426 - RNA, 19 nt, Artificial Sequence
  Description of Artificial Sequence: Synthetic oligonucleotide
  Sense strand starting at position 1123 of SEQ ID NO: 1886791
agcugugcugugaggaaug

SEQ ID NO: 2426427 - RNA, 19 nt, Artificial Sequence
  Description of Artificial Sequence: Synthetic oligonucleotide
  Antisense strand to SEQ ID NO: 2426426
cauuccucacagcacagcu

SEQ ID NO: 2426428 - RNA, 19 nt, Artificial Sequence
  Description of Artificial Sequence: Synthetic oligonucleotide
  Sense strand starting at position 1327 of SEQ ID NO: 1886791
gcugcagcuuucuuuagga

SEQ ID NO: 2426429 - RNA, 19 nt, Artificial Sequence
  Description of Artificial Sequence: Synthetic oligonucleotide
  Antisense strand to SEQ ID NO: 2426428
uccuaaagaaagcugcagc

SEQ ID NO: 2426430 - RNA, 19 nt, Artificial Sequence
  Description of Artificial Sequence: Synthetic oligonucleotide
  Sense strand starting at position 1370 of SEQ ID NO: 1886791
ccucguaucagugggagga

SEQ ID NO: 2426431 - RNA, 19 nt, Artificial Sequence
  Description of Artificial Sequence: Synthetic oligonucleotide
  Antisense strand to SEQ ID NO: 2426430
uccucccacugauacgagg

SEQ ID NO: 2426432 - RNA, 19 nt, Artificial Sequence
  Description of Artificial Sequence: Synthetic oligonucleotide
  Sense strand starting at position 1451 of SEQ ID NO: 1886791
uugcaucugugucuuaaug

SEQ ID NO: 2426433 - RNA, 19 nt, Artificial Sequence
  Description of Artificial Sequence: Synthetic oligonucleotide
  Antisense strand to SEQ ID NO: 2426432
cauuaagacacagaugcaa

SEQ ID NO: 2426434 - RNA, 19 nt, Artificial Sequence
  Description of Artificial Sequence: Synthetic oligonucleotide
  Sense strand starting at position 1476 of SEQ ID NO: 1886791
cauggugguccaggaguga

SEQ ID NO: 2426435 - RNA, 19 nt, Artificial Sequence
  Description of Artificial Sequence: Synthetic oligonucleotide
  Antisense strand to SEQ ID NO: 2426434
ucacuccuggaccaccaug

SEQ ID NO: 2426436 - RNA, 19 nt, Artificial Sequence
  Description of Artificial Sequence: Synthetic oligonucleotide
  Sense strand starting at position 1480 of SEQ ID NO: 1886791
gugguccaggagugaucuu

SEQ ID NO: 2426437 - RNA, 19 nt, Artificial Sequence
  Description of Artificial Sequence: Synthetic oligonucleotide
  Antisense strand to SEQ ID NO: 2426436
aagaucacuccuggaccac

SEQ ID NO: 2426438 - RNA, 19 nt, Artificial Sequence
  Description of Artificial Sequence: Synthetic oligonucleotide
  Sense strand starting at position 1481 of SEQ ID NO: 1886791
ugguccaggagugaucuua

SEQ ID NO: 2426439 - RNA, 19 nt, Artificial Sequence
  Description of Artificial Sequence: Synthetic oligonucleotide
  Antisense strand to SEQ ID NO: 2426438
uaagaucacuccuggacca

SEQ ID NO: 2426440 - RNA, 19 nt, Artificial Sequence
  Description of Artificial Sequence: Synthetic oligonucleotide
  Sense strand starting at position 1540 of SEQ ID NO: 1886791
cacugucagccagaauuga

SEQ ID NO: 2426441 - RNA, 19 nt, Artificial Sequence
  Description of Artificial Sequence: Synthetic oligonucleotide
  Antisense strand to SEQ ID NO: 2426440
ucaauucuggcugacagug

SEQ ID NO: 2426442 - RNA, 19 nt, Artificial Sequence
  Description of Artificial Sequence: Synthetic oligonucleotide
  Sense strand starting at position 1558 of SEQ ID NO: 1886791
acagucaaaucugucugau

SEQ ID NO: 2426443 - RNA, 19 nt, Artificial Sequence
  Description of Artificial Sequence: Synthetic oligonucleotide
  Antisense strand to SEQ ID NO: 2426442
aucagacagauuugacugu

SEQ ID NO: 2426444 - RNA, 19 nt, Artificial Sequence
  Description of Artificial Sequence: Synthetic oligonucleotide
  Sense strand starting at position 1560 of SEQ ID NO: 1886791
agucaaaucugucugauuc

SEQ ID NO: 2426445 - RNA, 19 nt, Artificial Sequence
  Description of Artificial Sequence: Synthetic oligonucleotide
  Antisense strand to SEQ ID NO: 2426444
gaaucagacagauuugacu

SEQ ID NO: 2426446 - RNA, 19 nt, Artificial Sequence
  Description of Artificial Sequence: Synthetic oligonucleotide
  Sense strand starting at position 2139 of SEQ ID NO: 1886791
agcggacagucuuccauaa

SEQ ID NO: 2426447 - RNA, 19 nt, Artificial Sequence
  Description of Artificial Sequence: Synthetic oligonucleotide
  Antisense strand to SEQ ID NO: 2426446
uuauggaagacuguccgcu

SEQ ID NO: 2426448 - RNA, 19 nt, Artificial Sequence
  Description of Artificial Sequence: Synthetic oligonucleotide
  Sense strand starting at position 2182 of SEQ ID NO: 1886791
agauucuugccucaguguu

SEQ ID NO: 2426449 - RNA, 19 nt, Artificial Sequence
  Description of Artificial Sequence: Synthetic oligonucleotide
  Antisense strand to SEQ ID NO: 2426448
aacacugaggcaagaaucu

SEQ ID NO: 2426450 - RNA, 19 nt, Artificial Sequence
  Description of Artificial Sequence: Synthetic oligonucleotide
  Sense strand starting at position 2292 of SEQ ID NO: 1886791
cagaucacgcaguaagaua

SEQ ID NO: 2426451 - RNA, 19 nt, Artificial Sequence
  Description of Artificial Sequence: Synthetic oligonucleotide
  Antisense strand to SEQ ID NO: 2426450
uaucuuacugcgugaucug

SEQ ID NO: 2426452 - RNA, 19 nt, Artificial Sequence
  Description of Artificial Sequence: Synthetic oligonucleotide
  Sense strand starting at position 2548 of SEQ ID NO: 1886791
agucaugugccagggagaa

SEQ ID NO: 2426453 - RNA, 19 nt, Artificial Sequence
  Description of Artificial Sequence: Synthetic oligonucleotide
  Antisense strand to SEQ ID NO: 2426452
uucucccuggcacaugacu

SEQ ID NO: 2426454 - RNA, 19 nt, Artificial Sequence
  Description of Artificial Sequence: Synthetic oligonucleotide
  Sense strand starting at position 2682 of SEQ ID NO: 1886791
cagagaggacuguggucuu

SEQ ID NO: 2426455 - RNA, 19 nt, Artificial Sequence
  Description of Artificial Sequence: Synthetic oligonucleotide
  Antisense strand to SEQ ID NO: 2426454
aagaccacaguccucucug

SEQ ID NO: 2426456 - RNA, 19 nt, Artificial Sequence
  Description of Artificial Sequence: Synthetic oligonucleotide
  Sense strand starting at position 2685 of SEQ ID NO: 1886791
agaggacuguggucuucua

SEQ ID NO: 2426457 - RNA, 19 nt, Artificial Sequence
  Description of Artificial Sequence: Synthetic oligonucleotide
  Antisense strand to SEQ ID NO: 2426456
uagaagaccacaguccucu

SEQ ID NO: 2426458 - RNA, 19 nt, Artificial Sequence
  Description of Artificial Sequence: Synthetic oligonucleotide
  Sense strand starting at position 2718 of SEQ ID NO: 1886791
ggcaaaucguugcuaggga

SEQ ID NO: 2426459 - RNA, 19 nt, Artificial Sequence
  Description of Artificial Sequence: Synthetic oligonucleotide
  Antisense strand to SEQ ID NO: 2426458
ucccuagcaacgauuugcc

SEQ ID NO: 2426460 - RNA, 19 nt, Artificial Sequence
  Description of Artificial Sequence: Synthetic oligonucleotide
  Sense strand starting at position 2755 of SEQ ID NO: 1886791
guaacagucccagaacugu

SEQ ID NO: 2426461 - RNA, 19 nt, Artificial Sequence
  Description of Artificial Sequence: Synthetic oligonucleotide
  Antisense strand to SEQ ID NO: 2426460
acaguucugggacuguuac

SEQ ID NO: 2426462 - RNA, 19 nt, Artificial Sequence
  Description of Artificial Sequence: Synthetic oligonucleotide
  Sense strand starting at position 2941 of SEQ ID NO: 1886791
guauuuaccucuccauguu

SEQ ID NO: 2426463 - RNA, 19 nt, Artificial Sequence
  Description of Artificial Sequence: Synthetic oligonucleotide
  Antisense strand to SEQ ID NO: 2426462
aacauggagagguaaauac

SEQ ID NO: 2426464 - RNA, 19 nt, Artificial Sequence
  Description of Artificial Sequence: Synthetic oligonucleotide
  Sense strand starting at position 3161 of SEQ ID NO: 1886791
ccagccuuucccugaggca

SEQ ID NO: 2426465 - RNA, 19 nt, Artificial Sequence
  Description of Artificial Sequence: Synthetic oligonucleotide
  Antisense strand to SEQ ID NO: 2426464
ugccucagggaaaggcugg

SEQ ID NO: 2426466 - RNA, 19 nt, Artificial Sequence
  Description of Artificial Sequence: Synthetic oligonucleotide
  Sense strand starting at position 3224 of SEQ ID NO: 1886791
gcgaguugccugcaggacu

SEQ ID NO: 2426467 - RNA, 19 nt, Artificial Sequence
  Description of Artificial Sequence: Synthetic oligonucleotide
  Antisense strand to SEQ ID NO: 2426466
aguccugcaggcaacucgc

SEQ ID NO: 2426468 - RNA, 19 nt, Artificial Sequence
  Description of Artificial Sequence: Synthetic oligonucleotide
  Sense strand starting at position 3292 of SEQ ID NO: 1886791
ccaggacugucaccagaau

SEQ ID NO: 2426469 - RNA, 19 nt, Artificial Sequence
  Description of Artificial Sequence: Synthetic oligonucleotide
  Antisense strand to SEQ ID NO: 2426468
auucuggugacaguccugg

SEQ ID NO: 2426470 - RNA, 19 nt, Artificial Sequence
  Description of Artificial Sequence: Synthetic oligonucleotide
  Sense strand starting at position 3303 of SEQ ID NO: 1886791
accagaauucccuggagcu

SEQ ID NO: 2426471 - RNA, 19 nt, Artificial Sequence
  Description of Artificial Sequence: Synthetic oligonucleotide
  Antisense strand to SEQ ID NO: 2426470
agcuccagggaauucuggu

SEQ ID NO: 2426472 - RNA, 19 nt, Artificial Sequence
  Description of Artificial Sequence: Synthetic oligonucleotide
  Sense strand starting at position 3304 of SEQ ID NO: 1886791
ccagaauucccuggagcuu

SEQ ID NO: 2426473 - RNA, 19 nt, Artificial Sequence
  Description of Artificial Sequence: Synthetic oligonucleotide
  Antisense strand to SEQ ID NO: 2426472
aagcuccagggaauucugg

SEQ ID NO: 2426474 - RNA, 19 nt, Artificial Sequence
  Description of Artificial Sequence: Synthetic oligonucleotide
  Sense strand starting at position 3465 of SEQ ID NO: 1886791
gugagaucuugcuuagaga

SEQ ID NO: 2426475 - RNA, 19 nt, Artificial Sequence
  Description of Artificial Sequence: Synthetic oligonucleotide
  Antisense strand to SEQ ID NO: 2426474
ucucuaagcaagaucucac

SEQ ID NO: 2426476 - RNA, 19 nt, Artificial Sequence
  Description of Artificial Sequence: Synthetic oligonucleotide
  Sense strand starting at position 3613 of SEQ ID NO: 1886791
uugcaagucauguguugau

SEQ ID NO: 2426477 - RNA, 19 nt, Artificial Sequence
  Description of Artificial Sequence: Synthetic oligonucleotide
  Antisense strand to SEQ ID NO: 2426476
aucaacacaugacuugcaa

SEQ ID NO: 2426478 - RNA, 19 nt, Artificial Sequence
  Description of Artificial Sequence: Synthetic oligonucleotide
  Sense strand starting at position 3850 of SEQ ID NO: 1886791
ccuugugagugaucuuagu

SEQ ID NO: 2426479 - RNA, 19 nt, Artificial Sequence
  Description of Artificial Sequence: Synthetic oligonucleotide
  Antisense strand to SEQ ID NO: 2426478
acuaagaucacucacaagg

SEQ ID NO: 2426480 - RNA, 19 nt, Artificial Sequence
  Description of Artificial Sequence: Synthetic oligonucleotide
  Sense strand starting at position 3896 of SEQ ID NO: 1886791
aggguagguucugucauuu

SEQ ID NO: 2426481 - RNA, 19 nt, Artificial Sequence
  Description of Artificial Sequence: Synthetic oligonucleotide
  Antisense strand to SEQ ID NO: 2426480
aaaugacagaaccuacccu

SEQ ID NO: 2426482 - RNA, 19 nt, Artificial Sequence
  Description of Artificial Sequence: Synthetic oligonucleotide
  Sense strand starting at position 3948 of SEQ ID NO: 1886791
uaaguaacuugggccagau

SEQ ID NO: 2426483 - RNA, 19 nt, Artificial Sequence
  Description of Artificial Sequence: Synthetic oligonucleotide
  Antisense strand to SEQ ID NO: 2426482
aucuggcccaaguuacuua

SEQ ID NO: 2426484 - RNA, 19 nt, Artificial Sequence
  Description of Artificial Sequence: Synthetic oligonucleotide
  Sense strand starting at position 3970 of SEQ ID NO: 1886791
acuuauaugcuccaugaag

SEQ ID NO: 2426485 - RNA, 19 nt, Artificial Sequence
  Description of Artificial Sequence: Synthetic oligonucleotide
  Antisense strand to SEQ ID NO: 2426484
cuucauggagcauauaagu

SEQ ID NO: 2426486 - RNA, 19 nt, Artificial Sequence
  Description of Artificial Sequence: Synthetic oligonucleotide
  Sense strand starting at position 194 of SEQ ID NO: 1886792
cggauuguugcacaagcuu

SEQ ID NO: 2426487 - RNA, 19 nt, Artificial Sequence
  Description of Artificial Sequence: Synthetic oligonucleotide
  Antisense strand to SEQ ID NO: 2426486
aagcuugugcaacaauccg

SEQ ID NO: 2426488 - RNA, 19 nt, Artificial Sequence
  Description of Artificial Sequence: Synthetic oligonucleotide
  Sense strand starting at position 203 of SEQ ID NO: 1886792
gcacaagcuugcuuuaaca

SEQ ID NO: 2426489 - RNA, 19 nt, Artificial Sequence
  Description of Artificial Sequence: Synthetic oligonucleotide
  Antisense strand to SEQ ID NO: 2426488
uguuaaagcaagcuugugc

SEQ ID NO: 2426490 - RNA, 19 nt, Artificial Sequence
  Description of Artificial Sequence: Synthetic oligonucleotide
  Sense strand starting at position 205 of SEQ ID NO: 1886792
acaagcuugcuuuaacaag

SEQ ID NO: 2426491 - RNA, 19 nt, Artificial Sequence
  Description of Artificial Sequence: Synthetic oligonucleotide
  Antisense strand to SEQ ID NO: 2426490
cuuguuaaagcaagcuugu

SEQ ID NO: 2426492 - RNA, 19 nt, Artificial Sequence
  Description of Artificial Sequence: Synthetic oligonucleotide
  Sense strand starting at position 1240 of SEQ ID NO: 1886792
gaagacaucccuggugagu

SEQ ID NO: 2426493 - RNA, 19 nt, Artificial Sequence
  Description of Artificial Sequence: Synthetic oligonucleotide
  Antisense strand to SEQ ID NO: 2426492
acucaccagggaugucuuc

SEQ ID NO: 2426494 - RNA, 19 nt, Artificial Sequence
  Description of Artificial Sequence: Synthetic oligonucleotide
  Sense strand starting at position 1364 of SEQ ID NO: 1886792
gaaccuagugauugccaaa

SEQ ID NO: 2426495 - RNA, 19 nt, Artificial Sequence
  Description of Artificial Sequence: Synthetic oligonucleotide
  Antisense strand to SEQ ID NO: 2426494
uuuggcaaucacuagguuc

SEQ ID NO: 2426496 - RNA, 19 nt, Artificial Sequence
  Description of Artificial Sequence: Synthetic oligonucleotide
  Sense strand starting at position 2751 of SEQ ID NO: 1886792
gcaagucgcuucucugaaa

SEQ ID NO: 2426497 - RNA, 19 nt, Artificial Sequence
  Description of Artificial Sequence: Synthetic oligonucleotide
  Antisense strand to SEQ ID NO: 2426496
uuucagagaagcgacuugc

SEQ ID NO: 2426498 - RNA, 19 nt, Artificial Sequence
  Description of Artificial Sequence: Synthetic oligonucleotide
  Sense strand starting at position 2885 of SEQ ID NO: 1886792
ugcagugcuccguguacag

SEQ ID NO: 2426499 - RNA, 19 nt, Artificial Sequence
  Description of Artificial Sequence: Synthetic oligonucleotide
  Antisense strand to SEQ ID NO: 2426498
cuguacacggagcacugca

SEQ ID NO: 2426500 - RNA, 19 nt, Artificial Sequence
  Description of Artificial Sequence: Synthetic oligonucleotide
  Sense strand starting at position 3121 of SEQ ID NO: 1886792
gcaucuggauugccagaca

SEQ ID NO: 2426501 - RNA, 19 nt, Artificial Sequence
  Description of Artificial Sequence: Synthetic oligonucleotide
  Antisense strand to SEQ ID NO: 2426500
ugucuggcaauccagaugc

SEQ ID NO: 2426502 - RNA, 19 nt, Artificial Sequence
  Description of Artificial Sequence: Synthetic oligonucleotide
  Sense strand starting at position 3353 of SEQ ID NO: 1886792
agggucuguugaucagaga

SEQ ID NO: 2426503 - RNA, 19 nt, Artificial Sequence
  Description of Artificial Sequence: Synthetic oligonucleotide
  Antisense strand to SEQ ID NO: 2426502
ucucugaucaacagacccu

SEQ ID NO: 2426504 - RNA, 19 nt, Artificial Sequence
  Description of Artificial Sequence: Synthetic oligonucleotide
  Sense strand starting at position 3354 of SEQ ID NO: 1886792
gggucuguugaucagagac

SEQ ID NO: 2426505 - RNA, 19 nt, Artificial Sequence
  Description of Artificial Sequence: Synthetic oligonucleotide
  Antisense strand to SEQ ID NO: 2426504
gucucugaucaacagaccc

SEQ ID NO: 2426506 - RNA, 19 nt, Artificial Sequence
  Description of Artificial Sequence: Synthetic oligonucleotide
  Sense strand starting at position 3356 of SEQ ID NO: 1886792
gucuguugaucagagacuc

SEQ ID NO: 2426507 - RNA, 19 nt, Artificial Sequence
  Description of Artificial Sequence: Synthetic oligonucleotide
  Antisense strand to SEQ ID NO: 2426506
gagucucugaucaacagac

SEQ ID NO: 2426508 - RNA, 19 nt, Artificial Sequence
  Description of Artificial Sequence: Synthetic oligonucleotide
  Sense strand starting at position 3364 of SEQ ID NO: 1886792
aucagagacucugaucaga

SEQ ID NO: 2426509 - RNA, 19 nt, Artificial Sequence
  Description of Artificial Sequence: Synthetic oligonucleotide
  Antisense strand to SEQ ID NO: 2426508
ucugaucagagucucugau

SEQ ID NO: 2426510 - RNA, 19 nt, Artificial Sequence
  Description of Artificial Sequence: Synthetic oligonucleotide
  Sense strand starting at position 3421 of SEQ ID NO: 1886792
uuggaaacagugugguaga

SEQ ID NO: 2426511 - RNA, 19 nt, Artificial Sequence
  Description of Artificial Sequence: Synthetic oligonucleotide
  Antisense strand to SEQ ID NO: 2426510
ucuaccacacuguuuccaa

SEQ ID NO: 2426512 - RNA, 19 nt, Artificial Sequence
  Description of Artificial Sequence: Synthetic oligonucleotide
  Sense strand starting at position 3422 of SEQ ID NO: 1886792
uggaaacagugugguagaa

SEQ ID NO: 2426513 - RNA, 19 nt, Artificial Sequence
  Description of Artificial Sequence: Synthetic oligonucleotide
  Antisense strand to SEQ ID NO: 2426512
uucuaccacacuguuucca

SEQ ID NO: 2426514 - RNA, 19 nt, Artificial Sequence
  Description of Artificial Sequence: Synthetic oligonucleotide
  Sense strand starting at position 3424 of SEQ ID NO: 1886792
gaaacagugugguagaaac

SEQ ID NO: 2426515 - RNA, 19 nt, Artificial Sequence
  Description of Artificial Sequence: Synthetic oligonucleotide
  Antisense strand to SEQ ID NO: 2426514
guuucuaccacacuguuuc

SEQ ID NO: 2426516 - RNA, 19 nt, Artificial Sequence
  Description of Artificial Sequence: Synthetic oligonucleotide
  Sense strand starting at position 3665 of SEQ ID NO: 1886792
ucuaaagucuucccugguu

SEQ ID NO: 2426517 - RNA, 19 nt, Artificial Sequence
  Description of Artificial Sequence: Synthetic oligonucleotide
  Antisense strand to SEQ ID NO: 2426516
aaccagggaagacuuuaga

SEQ ID NO: 2426518 - RNA, 19 nt, Artificial Sequence
  Description of Artificial Sequence: Synthetic oligonucleotide
  Sense strand starting at position 3715 of SEQ ID NO: 1886792
aaaggaucauucuccgguu

SEQ ID NO: 2426519 - RNA, 19 nt, Artificial Sequence
  Description of Artificial Sequence: Synthetic oligonucleotide
  Antisense strand to SEQ ID NO: 2426518
aaccggagaaugauccuuu

SEQ ID NO: 2426520 - RNA, 19 nt, Artificial Sequence
  Description of Artificial Sequence: Synthetic oligonucleotide
  Sense strand starting at position 3718 of SEQ ID NO: 1886792
ggaucauucuccgguuucu

SEQ ID NO: 2426521 - RNA, 19 nt, Artificial Sequence
  Description of Artificial Sequence: Synthetic oligonucleotide
  Antisense strand to SEQ ID NO: 2426520
agaaaccggagaaugaucc

SEQ ID NO: 2426522 - RNA, 19 nt, Artificial Sequence
  Description of Artificial Sequence: Synthetic oligonucleotide
  Sense strand starting at position 3855 of SEQ ID NO: 1886792
gagguuucuugggcggaga

SEQ ID NO: 2426523 - RNA, 19 nt, Artificial Sequence
  Description of Artificial Sequence: Synthetic oligonucleotide
  Antisense strand to SEQ ID NO: 2426522
ucuccgcccaagaaaccuc

SEQ ID NO: 2426524 - RNA, 19 nt, Artificial Sequence
  Description of Artificial Sequence: Synthetic oligonucleotide
  Sense strand starting at position 3856 of SEQ ID NO: 1886792
agguuucuugggcggagaa

SEQ ID NO: 2426525 - RNA, 19 nt, Artificial Sequence
  Description of Artificial Sequence: Synthetic oligonucleotide
  Antisense strand to SEQ ID NO: 2426524
uucuccgcccaagaaaccu

SEQ ID NO: 2426526 - RNA, 19 nt, Artificial Sequence
  Description of Artificial Sequence: Synthetic oligonucleotide
  Sense strand starting at position 3857 of SEQ ID NO: 1886792
gguuucuugggcggagaaa

SEQ ID NO: 2426527 - RNA, 19 nt, Artificial Sequence
  Description of Artificial Sequence: Synthetic oligonucleotide
  Antisense strand to SEQ ID NO: 2426526
uuucuccgcccaagaaacc

SEQ ID NO: 2426528 - RNA, 19 nt, Artificial Sequence
  Description of Artificial Sequence: Synthetic oligonucleotide
  Sense strand starting at position 3933 of SEQ ID NO: 1886792
cggcucuguuccuagcaga

SEQ ID NO: 2426529 - RNA, 19 nt, Artificial Sequence
  Description of Artificial Sequence: Synthetic oligonucleotide
  Antisense strand to SEQ ID NO: 2426528
ucugcuaggaacagagccg

SEQ ID NO: 2426530 - RNA, 19 nt, Artificial Sequence
  Description of Artificial Sequence: Synthetic oligonucleotide
  Sense strand starting at position 512 of SEQ ID NO: 1886793
uugagagucggcuacagua

SEQ ID NO: 2426531 - RNA, 19 nt, Artificial Sequence
  Description of Artificial Sequence: Synthetic oligonucleotide
  Antisense strand to SEQ ID NO: 2426530
uacuguagccgacucucaa

SEQ ID NO: 2426532 - RNA, 19 nt, Artificial Sequence
  Description of Artificial Sequence: Synthetic oligonucleotide
  Sense strand starting at position 525 of SEQ ID NO: 1886793
acaguagguucucuaugga

SEQ ID NO: 2426533 - RNA, 19 nt, Artificial Sequence
  Description of Artificial Sequence: Synthetic oligonucleotide
  Antisense strand to SEQ ID NO: 2426532
uccauagagaaccuacugu

SEQ ID NO: 2426534 - RNA, 19 nt, Artificial Sequence
  Description of Artificial Sequence: Synthetic oligonucleotide
  Sense strand starting at position 528 of SEQ ID NO: 1886793
guagguucucuauggagac

SEQ ID NO: 2426535 - RNA, 19 nt, Artificial Sequence
  Description of Artificial Sequence: Synthetic oligonucleotide
  Antisense strand to SEQ ID NO: 2426534
gucuccauagagaaccuac

SEQ ID NO: 2426536 - RNA, 19 nt, Artificial Sequence
  Description of Artificial Sequence: Synthetic oligonucleotide
  Sense strand starting at position 552 of SEQ ID NO: 1886793
acguguauuuaggacauuu

SEQ ID NO: 2426537 - RNA, 19 nt, Artificial Sequence
  Description of Artificial Sequence: Synthetic oligonucleotide
  Antisense strand to SEQ ID NO: 2426536
aaauguccuaaauacacgu

SEQ ID NO: 2426538 - RNA, 19 nt, Artificial Sequence
  Description of Artificial Sequence: Synthetic oligonucleotide
  Sense strand starting at position 561 of SEQ ID NO: 1886793
uaggacauuuccuagguga

SEQ ID NO: 2426539 - RNA, 19 nt, Artificial Sequence
  Description of Artificial Sequence: Synthetic oligonucleotide
  Antisense strand to SEQ ID NO: 2426538
ucaccuaggaaauguccua

SEQ ID NO: 2426540 - RNA, 19 nt, Artificial Sequence
  Description of Artificial Sequence: Synthetic oligonucleotide
  Sense strand starting at position 580 of SEQ ID NO: 1886793
uucuaaggugccgauauaa

SEQ ID NO: 2426541 - RNA, 19 nt, Artificial Sequence
  Description of Artificial Sequence: Synthetic oligonucleotide
  Antisense strand to SEQ ID NO: 2426540
uuauaucggcaccuuagaa

SEQ ID NO: 2426542 - RNA, 19 nt, Artificial Sequence
  Description of Artificial Sequence: Synthetic oligonucleotide
  Sense strand starting at position 610 of SEQ ID NO: 1886793
guaucuuaagagcaaucaa

SEQ ID NO: 2426543 - RNA, 19 nt, Artificial Sequence
  Description of Artificial Sequence: Synthetic oligonucleotide
  Antisense strand to SEQ ID NO: 2426542
uugauugcucuuaagauac

SEQ ID NO: 2426544 - RNA, 19 nt, Artificial Sequence
  Description of Artificial Sequence: Synthetic oligonucleotide
  Sense strand starting at position 669 of SEQ ID NO: 1886793
gugcuaugugcuuuacgca

SEQ ID NO: 2426545 - RNA, 19 nt, Artificial Sequence
  Description of Artificial Sequence: Synthetic oligonucleotide
  Antisense strand to SEQ ID NO: 2426544
ugcguaaagcacauagcac

SEQ ID NO: 2426546 - RNA, 19 nt, Artificial Sequence
  Description of Artificial Sequence: Synthetic oligonucleotide
  Sense strand starting at position 695 of SEQ ID NO: 1886793
ugaacugacccucguauca

SEQ ID NO: 2426547 - RNA, 19 nt, Artificial Sequence
  Description of Artificial Sequence: Synthetic oligonucleotide
  Antisense strand to SEQ ID NO: 2426546
ugauacgagggucaguuca

SEQ ID NO: 2426548 - RNA, 19 nt, Artificial Sequence
  Description of Artificial Sequence: Synthetic oligonucleotide
  Sense strand starting at position 826 of SEQ ID NO: 1886793
agugaagcuaucuaggacu

SEQ ID NO: 2426549 - RNA, 19 nt, Artificial Sequence
  Description of Artificial Sequence: Synthetic oligonucleotide
  Antisense strand to SEQ ID NO: 2426548
aguccuagauagcuucacu

SEQ ID NO: 2426550 - RNA, 19 nt, Artificial Sequence
  Description of Artificial Sequence: Synthetic oligonucleotide
  Sense strand starting at position 965 of SEQ ID NO: 1886793
cgacccuagucucuacaaa

SEQ ID NO: 2426551 - RNA, 19 nt, Artificial Sequence
  Description of Artificial Sequence: Synthetic oligonucleotide
  Antisense strand to SEQ ID NO: 2426550
uuuguagagacuagggucg

SEQ ID NO: 2426552 - RNA, 19 nt, Artificial Sequence
  Description of Artificial Sequence: Synthetic oligonucleotide
  Sense strand starting at position 1129 of SEQ ID NO: 1886793
gcaauaccggucuggacaa

SEQ ID NO: 2426553 - RNA, 19 nt, Artificial Sequence
  Description of Artificial Sequence: Synthetic oligonucleotide
  Antisense strand to SEQ ID NO: 2426552
uuguccagaccgguauugc

SEQ ID NO: 2426554 - RNA, 19 nt, Artificial Sequence
  Description of Artificial Sequence: Synthetic oligonucleotide
  Sense strand starting at position 2184 of SEQ ID NO: 1886793
gugaaaguccgugaucaca

SEQ ID NO: 2426555 - RNA, 19 nt, Artificial Sequence
  Description of Artificial Sequence: Synthetic oligonucleotide
  Antisense strand to SEQ ID NO: 2426554
ugugaucacggacuuucac

SEQ ID NO: 2426556 - RNA, 19 nt, Artificial Sequence
  Description of Artificial Sequence: Synthetic oligonucleotide
  Sense strand starting at position 2186 of SEQ ID NO: 1886793
gaaaguccgugaucacaaa

SEQ ID NO: 2426557 - RNA, 19 nt, Artificial Sequence
  Description of Artificial Sequence: Synthetic oligonucleotide
  Antisense strand to SEQ ID NO: 2426556
uuugugaucacggacuuuc

SEQ ID NO: 2426558 - RNA, 19 nt, Artificial Sequence
  Description of Artificial Sequence: Synthetic oligonucleotide
  Sense strand starting at position 2218 of SEQ ID NO: 1886793
gccagcauucgugcugauu

SEQ ID NO: 2426559 - RNA, 19 nt, Artificial Sequence
  Description of Artificial Sequence: Synthetic oligonucleotide
  Antisense strand to SEQ ID NO: 2426558
aaucagcacgaaugcuggc

SEQ ID NO: 2426560 - RNA, 19 nt, Artificial Sequence
  Description of Artificial Sequence: Synthetic oligonucleotide
  Sense strand starting at position 2219 of SEQ ID NO: 1886793
ccagcauucgugcugauuc

SEQ ID NO: 2426561 - RNA, 19 nt, Artificial Sequence
  Description of Artificial Sequence: Synthetic oligonucleotide
  Antisense strand to SEQ ID NO: 2426560
gaaucagcacgaaugcugg

SEQ ID NO: 2426562 - RNA, 19 nt, Artificial Sequence
  Description of Artificial Sequence: Synthetic oligonucleotide
  Sense strand starting at position 2361 of SEQ ID NO: 1886793
gauaauagagacuguuguu

SEQ ID NO: 2426563 - RNA, 19 nt, Artificial Sequence
  Description of Artificial Sequence: Synthetic oligonucleotide
  Antisense strand to SEQ ID NO: 2426562
aacaacagucucuauuauc

SEQ ID NO: 2426564 - RNA, 19 nt, Artificial Sequence
  Description of Artificial Sequence: Synthetic oligonucleotide
  Sense strand starting at position 2366 of SEQ ID NO: 1886793
uagagacuguuguuuaaua

SEQ ID NO: 2426565 - RNA, 19 nt, Artificial Sequence
  Description of Artificial Sequence: Synthetic oligonucleotide
  Antisense strand to SEQ ID NO: 2426564
uauuaaacaacagucucua

SEQ ID NO: 2426566 - RNA, 19 nt, Artificial Sequence
  Description of Artificial Sequence: Synthetic oligonucleotide
  Sense strand starting at position 2367 of SEQ ID NO: 1886793
agagacuguuguuuaauag

SEQ ID NO: 2426567 - RNA, 19 nt, Artificial Sequence
  Description of Artificial Sequence: Synthetic oligonucleotide
  Antisense strand to SEQ ID NO: 2426566
cuauuaaacaacagucucu

SEQ ID NO: 2426568 - RNA, 19 nt, Artificial Sequence
  Description of Artificial Sequence: Synthetic oligonucleotide
  Sense strand starting at position 2384 of SEQ ID NO: 1886793
agagacucaugauaauaga

SEQ ID NO: 2426569 - RNA, 19 nt, Artificial Sequence
  Description of Artificial Sequence: Synthetic oligonucleotide
  Antisense strand to SEQ ID NO: 2426568
ucuauuaucaugagucucu

SEQ ID NO: 2426570 - RNA, 19 nt, Artificial Sequence
  Description of Artificial Sequence: Synthetic oligonucleotide
  Sense strand starting at position 2400 of SEQ ID NO: 1886793
agagacugaugauaauaga

SEQ ID NO: 2426571 - RNA, 19 nt, Artificial Sequence
  Description of Artificial Sequence: Synthetic oligonucleotide
  Antisense strand to SEQ ID NO: 2426570
ucuauuaucaucagucucu

SEQ ID NO: 2426572 - RNA, 19 nt, Artificial Sequence
  Description of Artificial Sequence: Synthetic oligonucleotide
  Sense strand starting at position 2417 of SEQ ID NO: 1886793
gagacugauugauaauaga

SEQ ID NO: 2426573 - RNA, 19 nt, Artificial Sequence
  Description of Artificial Sequence: Synthetic oligonucleotide
  Antisense strand to SEQ ID NO: 2426572
ucuauuaucaaucagucuc

SEQ ID NO: 2426574 - RNA, 19 nt, Artificial Sequence
  Description of Artificial Sequence: Synthetic oligonucleotide
  Sense strand starting at position 2457 of SEQ ID NO: 1886793
auguuuacggagcacuuaa

SEQ ID NO: 2426575 - RNA, 19 nt, Artificial Sequence
  Description of Artificial Sequence: Synthetic oligonucleotide
  Antisense strand to SEQ ID NO: 2426574
uuaagugcuccguaaacau

SEQ ID NO: 2426576 - RNA, 19 nt, Artificial Sequence
  Description of Artificial Sequence: Synthetic oligonucleotide
  Sense strand starting at position 2488 of SEQ ID NO: 1886793
gccagaaaugcacagacau

SEQ ID NO: 2426577 - RNA, 19 nt, Artificial Sequence
  Description of Artificial Sequence: Synthetic oligonucleotide
  Antisense strand to SEQ ID NO: 2426576
augucugugcauuucuggc

SEQ ID NO: 2426578 - RNA, 19 nt, Artificial Sequence
  Description of Artificial Sequence: Synthetic oligonucleotide
  Sense strand starting at position 2857 of SEQ ID NO: 1886793
cugccucaccuuuagagaa

SEQ ID NO: 2426579 - RNA, 19 nt, Artificial Sequence
  Description of Artificial Sequence: Synthetic oligonucleotide
  Antisense strand to SEQ ID NO: 2426578
uucucuaaaggugaggcag

SEQ ID NO: 2426580 - RNA, 19 nt, Artificial Sequence
  Description of Artificial Sequence: Synthetic oligonucleotide
  Sense strand starting at position 3021 of SEQ ID NO: 1886793
auagcuaauuaccugaaga

SEQ ID NO: 2426581 - RNA, 19 nt, Artificial Sequence
  Description of Artificial Sequence: Synthetic oligonucleotide
  Antisense strand to SEQ ID NO: 2426580
ucuucagguaauuagcuau

SEQ ID NO: 2426582 - RNA, 19 nt, Artificial Sequence
  Description of Artificial Sequence: Synthetic oligonucleotide
  Sense strand starting at position 3086 of SEQ ID NO: 1886793
gcaucacuccacuacaguu

SEQ ID NO: 2426583 - RNA, 19 nt, Artificial Sequence
  Description of Artificial Sequence: Synthetic oligonucleotide
  Antisense strand to SEQ ID NO: 2426582
aacuguaguggagugaugc

SEQ ID NO: 2426584 - RNA, 19 nt, Artificial Sequence
  Description of Artificial Sequence: Synthetic oligonucleotide
  Sense strand starting at position 3102 of SEQ ID NO: 1886793
guuauugacucauuugugu

SEQ ID NO: 2426585 - RNA, 19 nt, Artificial Sequence
  Description of Artificial Sequence: Synthetic oligonucleotide
  Antisense strand to SEQ ID NO: 2426584
acacaaaugagucaauaac

SEQ ID NO: 2426586 - RNA, 19 nt, Artificial Sequence
  Description of Artificial Sequence: Synthetic oligonucleotide
  Sense strand starting at position 3223 of SEQ ID NO: 1886793
ugaugugauuccuuagguu

SEQ ID NO: 2426587 - RNA, 19 nt, Artificial Sequence
  Description of Artificial Sequence: Synthetic oligonucleotide
  Antisense strand to SEQ ID NO: 2426586
aaccuaaggaaucacauca

SEQ ID NO: 2426588 - RNA, 19 nt, Artificial Sequence
  Description of Artificial Sequence: Synthetic oligonucleotide
  Sense strand starting at position 3326 of SEQ ID NO: 1886793
uccuauaaauguucuguau

SEQ ID NO: 2426589 - RNA, 19 nt, Artificial Sequence
  Description of Artificial Sequence: Synthetic oligonucleotide
  Antisense strand to SEQ ID NO: 2426588
auacagaacauuuauagga

SEQ ID NO: 2426590 - RNA, 19 nt, Artificial Sequence
  Description of Artificial Sequence: Synthetic oligonucleotide
  Sense strand starting at position 3435 of SEQ ID NO: 1886793
gaaaucuacugaccgugau

SEQ ID NO: 2426591 - RNA, 19 nt, Artificial Sequence
  Description of Artificial Sequence: Synthetic oligonucleotide
  Antisense strand to SEQ ID NO: 2426590
aucacggucaguagauuuc

SEQ ID NO: 2426592 - RNA, 19 nt, Artificial Sequence
  Description of Artificial Sequence: Synthetic oligonucleotide
  Sense strand starting at position 3436 of SEQ ID NO: 1886793
aaaucuacugaccgugauu

SEQ ID NO: 2426593 - RNA, 19 nt, Artificial Sequence
  Description of Artificial Sequence: Synthetic oligonucleotide
  Antisense strand to SEQ ID NO: 2426592
aaucacggucaguagauuu

SEQ ID NO: 2426594 - RNA, 19 nt, Artificial Sequence
  Description of Artificial Sequence: Synthetic oligonucleotide
  Sense strand starting at position 3479 of SEQ ID NO: 1886793
gcaagccuccaucagaaua

SEQ ID NO: 2426595 - RNA, 19 nt, Artificial Sequence
  Description of Artificial Sequence: Synthetic oligonucleotide
  Antisense strand to SEQ ID NO: 2426594
uauucugauggaggcuugc

SEQ ID NO: 2426596 - RNA, 19 nt, Artificial Sequence
  Description of Artificial Sequence: Synthetic oligonucleotide
  Sense strand starting at position 3507 of SEQ ID NO: 1886793
auuugauucuucugagaga

SEQ ID NO: 2426597 - RNA, 19 nt, Artificial Sequence
  Description of Artificial Sequence: Synthetic oligonucleotide
  Antisense strand to SEQ ID NO: 2426596
ucucucagaagaaucaaau

SEQ ID NO: 2426598 - RNA, 19 nt, Artificial Sequence
  Description of Artificial Sequence: Synthetic oligonucleotide
  Sense strand starting at position 3613 of SEQ ID NO: 1886793
auguucugaaauggaugau

SEQ ID NO: 2426599 - RNA, 19 nt, Artificial Sequence
  Description of Artificial Sequence: Synthetic oligonucleotide
  Antisense strand to SEQ ID NO: 2426598
aucauccauuucagaacau

SEQ ID NO: 2426600 - RNA, 19 nt, Artificial Sequence
  Description of Artificial Sequence: Synthetic oligonucleotide
  Sense strand starting at position 3619 of SEQ ID NO: 1886793
ugaaauggaugauugcuua

SEQ ID NO: 2426601 - RNA, 19 nt, Artificial Sequence
  Description of Artificial Sequence: Synthetic oligonucleotide
  Antisense strand to SEQ ID NO: 2426600
uaagcaaucauccauuuca

SEQ ID NO: 2426602 - RNA, 19 nt, Artificial Sequence
  Description of Artificial Sequence: Synthetic oligonucleotide
  Sense strand starting at position 3622 of SEQ ID NO: 1886793
aauggaugauugcuuagga

SEQ ID NO: 2426603 - RNA, 19 nt, Artificial Sequence
  Description of Artificial Sequence: Synthetic oligonucleotide
  Antisense strand to SEQ ID NO: 2426602
uccuaagcaaucauccauu

SEQ ID NO: 2426604 - RNA, 19 nt, Artificial Sequence
  Description of Artificial Sequence: Synthetic oligonucleotide
  Sense strand starting at position 3623 of SEQ ID NO: 1886793
auggaugauugcuuaggau

SEQ ID NO: 2426605 - RNA, 19 nt, Artificial Sequence
  Description of Artificial Sequence: Synthetic oligonucleotide
  Antisense strand to SEQ ID NO: 2426604
auccuaagcaaucauccau

SEQ ID NO: 2426606 - RNA, 19 nt, Artificial Sequence
  Description of Artificial Sequence: Synthetic oligonucleotide
  Sense strand starting at position 3653 of SEQ ID NO: 1886793
guacucauuagcggagaca

SEQ ID NO: 2426607 - RNA, 19 nt, Artificial Sequence
  Description of Artificial Sequence: Synthetic oligonucleotide
  Antisense strand to SEQ ID NO: 2426606
ugucuccgcuaaugaguac

SEQ ID NO: 2426608 - RNA, 19 nt, Artificial Sequence
  Description of Artificial Sequence: Synthetic oligonucleotide
  Sense strand starting at position 3665 of SEQ ID NO: 1886793
ggagacaccugccuuucua

SEQ ID NO: 2426609 - RNA, 19 nt, Artificial Sequence
  Description of Artificial Sequence: Synthetic oligonucleotide
  Antisense strand to SEQ ID NO: 2426608
uagaaaggcaggugucucc

SEQ ID NO: 2426610 - RNA, 19 nt, Artificial Sequence
  Description of Artificial Sequence: Synthetic oligonucleotide
  Sense strand starting at position 85 of SEQ ID NO: 1886794
ggcccaauacauugccaaa

SEQ ID NO: 2426611 - RNA, 19 nt, Artificial Sequence
  Description of Artificial Sequence: Synthetic oligonucleotide
  Antisense strand to SEQ ID NO: 2426610
uuuggcaauguauugggcc

SEQ ID NO: 2426612 - RNA, 19 nt, Artificial Sequence
  Description of Artificial Sequence: Synthetic oligonucleotide
  Sense strand starting at position 109 of SEQ ID NO: 1886794
agucaacaggccuaaaguu

SEQ ID NO: 2426613 - RNA, 19 nt, Artificial Sequence
  Description of Artificial Sequence: Synthetic oligonucleotide
  Antisense strand to SEQ ID NO: 2426612
aacuuuaggccuguugacu

SEQ ID NO: 2426614 - RNA, 19 nt, Artificial Sequence
  Description of Artificial Sequence: Synthetic oligonucleotide
  Sense strand starting at position 324 of SEQ ID NO: 1886794
ccaagagagucacauaaga

SEQ ID NO: 2426615 - RNA, 19 nt, Artificial Sequence
  Description of Artificial Sequence: Synthetic oligonucleotide
  Antisense strand to SEQ ID NO: 2426614
ucuuaugugacucucuugg

SEQ ID NO: 2426616 - RNA, 19 nt, Artificial Sequence
  Description of Artificial Sequence: Synthetic oligonucleotide
  Sense strand starting at position 607 of SEQ ID NO: 1886794
cuugucuucugugcaggaa

SEQ ID NO: 2426617 - RNA, 19 nt, Artificial Sequence
  Description of Artificial Sequence: Synthetic oligonucleotide
  Antisense strand to SEQ ID NO: 2426616
uuccugcacagaagacaag

SEQ ID NO: 2426618 - RNA, 19 nt, Artificial Sequence
  Description of Artificial Sequence: Synthetic oligonucleotide
  Sense strand starting at position 608 of SEQ ID NO: 1886794
uugucuucugugcaggaau

SEQ ID NO: 2426619 - RNA, 19 nt, Artificial Sequence
  Description of Artificial Sequence: Synthetic oligonucleotide
  Antisense strand to SEQ ID NO: 2426618
auuccugcacagaagacaa

SEQ ID NO: 2426620 - RNA, 19 nt, Artificial Sequence
  Description of Artificial Sequence: Synthetic oligonucleotide
  Sense strand starting at position 632 of SEQ ID NO: 1886794
gguucucaguuugcuggaa

SEQ ID NO: 2426621 - RNA, 19 nt, Artificial Sequence
  Description of Artificial Sequence: Synthetic oligonucleotide
  Antisense strand to SEQ ID NO: 2426620
uuccagcaaacugagaacc

SEQ ID NO: 2426622 - RNA, 19 nt, Artificial Sequence
  Description of Artificial Sequence: Synthetic oligonucleotide
  Sense strand starting at position 633 of SEQ ID NO: 1886794
guucucaguuugcuggaaa

SEQ ID NO: 2426623 - RNA, 19 nt, Artificial Sequence
  Description of Artificial Sequence: Synthetic oligonucleotide
  Antisense strand to SEQ ID NO: 2426622
uuuccagcaaacugagaac

SEQ ID NO: 2426624 - RNA, 19 nt, Artificial Sequence
  Description of Artificial Sequence: Synthetic oligonucleotide
  Sense strand starting at position 791 of SEQ ID NO: 1886794
uuguuucugaacggucauu

SEQ ID NO: 2426625 - RNA, 19 nt, Artificial Sequence
  Description of Artificial Sequence: Synthetic oligonucleotide
  Antisense strand to SEQ ID NO: 2426624
aaugaccguucagaaacaa

SEQ ID NO: 2426626 - RNA, 19 nt, Artificial Sequence
  Description of Artificial Sequence: Synthetic oligonucleotide
  Sense strand starting at position 796 of SEQ ID NO: 1886794
ucugaacggucauuaauuc

SEQ ID NO: 2426627 - RNA, 19 nt, Artificial Sequence
  Description of Artificial Sequence: Synthetic oligonucleotide
  Antisense strand to SEQ ID NO: 2426626
gaauuaaugaccguucaga

SEQ ID NO: 2426628 - RNA, 19 nt, Artificial Sequence
  Description of Artificial Sequence: Synthetic oligonucleotide
  Sense strand starting at position 1133 of SEQ ID NO: 1886794
augaaauggucccugaagu

SEQ ID NO: 2426629 - RNA, 19 nt, Artificial Sequence
  Description of Artificial Sequence: Synthetic oligonucleotide
  Antisense strand to SEQ ID NO: 2426628
acuucagggaccauuucau

SEQ ID NO: 2426630 - RNA, 19 nt, Artificial Sequence
  Description of Artificial Sequence: Synthetic oligonucleotide
  Sense strand starting at position 1134 of SEQ ID NO: 1886794
ugaaauggucccugaaguu

SEQ ID NO: 2426631 - RNA, 19 nt, Artificial Sequence
  Description of Artificial Sequence: Synthetic oligonucleotide
  Antisense strand to SEQ ID NO: 2426630
aacuucagggaccauuuca

SEQ ID NO: 2426632 - RNA, 19 nt, Artificial Sequence
  Description of Artificial Sequence: Synthetic oligonucleotide
  Sense strand starting at position 1416 of SEQ ID NO: 1886794
ggccauggcgccuuccaua

SEQ ID NO: 2426633 - RNA, 19 nt, Artificial Sequence
  Description of Artificial Sequence: Synthetic oligonucleotide
  Antisense strand to SEQ ID NO: 2426632
uauggaaggcgccauggcc

SEQ ID NO: 2426634 - RNA, 19 nt, Artificial Sequence
  Description of Artificial Sequence: Synthetic oligonucleotide
  Sense strand starting at position 1580 of SEQ ID NO: 1886794
gcagauauuucuguggguu

SEQ ID NO: 2426635 - RNA, 19 nt, Artificial Sequence
  Description of Artificial Sequence: Synthetic oligonucleotide
  Antisense strand to SEQ ID NO: 2426634
aacccacagaaauaucugc

SEQ ID NO: 2426636 - RNA, 19 nt, Artificial Sequence
  Description of Artificial Sequence: Synthetic oligonucleotide
  Sense strand starting at position 1611 of SEQ ID NO: 1886794
ggcagucugauguauaaau

SEQ ID NO: 2426637 - RNA, 19 nt, Artificial Sequence
  Description of Artificial Sequence: Synthetic oligonucleotide
  Antisense strand to SEQ ID NO: 2426636
auuuauacaucagacugcc

SEQ ID NO: 2426638 - RNA, 19 nt, Artificial Sequence
  Description of Artificial Sequence: Synthetic oligonucleotide
  Sense strand starting at position 1627 of SEQ ID NO: 1886794
aauagaucuucuuuggugu

SEQ ID NO: 2426639 - RNA, 19 nt, Artificial Sequence
  Description of Artificial Sequence: Synthetic oligonucleotide
  Antisense strand to SEQ ID NO: 2426638
acaccaaagaagaucuauu

SEQ ID NO: 2426640 - RNA, 19 nt, Artificial Sequence
  Description of Artificial Sequence: Synthetic oligonucleotide
  Sense strand starting at position 1630 of SEQ ID NO: 1886794
agaucuucuuuggugucau

SEQ ID NO: 2426641 - RNA, 19 nt, Artificial Sequence
  Description of Artificial Sequence: Synthetic oligonucleotide
  Antisense strand to SEQ ID NO: 2426640
augacaccaaagaagaucu

SEQ ID NO: 2426642 - RNA, 19 nt, Artificial Sequence
  Description of Artificial Sequence: Synthetic oligonucleotide
  Sense strand starting at position 1640 of SEQ ID NO: 1886794
uggugucauuucgauuuau

SEQ ID NO: 2426643 - RNA, 19 nt, Artificial Sequence
  Description of Artificial Sequence: Synthetic oligonucleotide
  Antisense strand to SEQ ID NO: 2426642
auaaaucgaaaugacacca

SEQ ID NO: 2426644 - RNA, 19 nt, Artificial Sequence
  Description of Artificial Sequence: Synthetic oligonucleotide
  Sense strand starting at position 2474 of SEQ ID NO: 1886794
cccuguuaaccaggcuaau

SEQ ID NO: 2426645 - RNA, 19 nt, Artificial Sequence
  Description of Artificial Sequence: Synthetic oligonucleotide
  Antisense strand to SEQ ID NO: 2426644
auuagccugguuaacaggg

SEQ ID NO: 2426646 - RNA, 19 nt, Artificial Sequence
  Description of Artificial Sequence: Synthetic oligonucleotide
  Sense strand starting at position 2583 of SEQ ID NO: 1886794
uuauucuuagagggagguu

SEQ ID NO: 2426647 - RNA, 19 nt, Artificial Sequence
  Description of Artificial Sequence: Synthetic oligonucleotide
  Antisense strand to SEQ ID NO: 2426646
aaccucccucuaagaauaa

SEQ ID NO: 2426648 - RNA, 19 nt, Artificial Sequence
  Description of Artificial Sequence: Synthetic oligonucleotide
  Sense strand starting at position 2586 of SEQ ID NO: 1886794
uucuuagagggagguuuau

SEQ ID NO: 2426649 - RNA, 19 nt, Artificial Sequence
  Description of Artificial Sequence: Synthetic oligonucleotide
  Antisense strand to SEQ ID NO: 2426648
auaaaccucccucuaagaa

SEQ ID NO: 2426650 - RNA, 19 nt, Artificial Sequence
  Description of Artificial Sequence: Synthetic oligonucleotide
  Sense strand starting at position 2598 of SEQ ID NO: 1886794
gguuuauauagguguacug

SEQ ID NO: 2426651 - RNA, 19 nt, Artificial Sequence
  Description of Artificial Sequence: Synthetic oligonucleotide
  Antisense strand to SEQ ID NO: 2426650
caguacaccuauauaaacc

SEQ ID NO: 2426652 - RNA, 19 nt, Artificial Sequence
  Description of Artificial Sequence: Synthetic oligonucleotide
  Sense strand starting at position 3000 of SEQ ID NO: 1886794
ggugaggaguggguugaaa

SEQ ID NO: 2426653 - RNA, 19 nt, Artificial Sequence
  Description of Artificial Sequence: Synthetic oligonucleotide
  Antisense strand to SEQ ID NO: 2426652
uuucaacccacuccucacc

SEQ ID NO: 2426654 - RNA, 19 nt, Artificial Sequence
  Description of Artificial Sequence: Synthetic oligonucleotide
  Sense strand starting at position 3002 of SEQ ID NO: 1886794
ugaggaguggguugaaaua

SEQ ID NO: 2426655 - RNA, 19 nt, Artificial Sequence
  Description of Artificial Sequence: Synthetic oligonucleotide
  Antisense strand to SEQ ID NO: 2426654
uauuucaacccacuccuca

SEQ ID NO: 2426656 - RNA, 19 nt, Artificial Sequence
  Description of Artificial Sequence: Synthetic oligonucleotide
  Sense strand starting at position 3064 of SEQ ID NO: 1886794
gggugacagguuuauuaca

SEQ ID NO: 2426657 - RNA, 19 nt, Artificial Sequence
  Description of Artificial Sequence: Synthetic oligonucleotide
  Antisense strand to SEQ ID NO: 2426656
uguaauaaaccugucaccc

SEQ ID NO: 2426658 - RNA, 19 nt, Artificial Sequence
  Description of Artificial Sequence: Synthetic oligonucleotide
  Sense strand starting at position 3066 of SEQ ID NO: 1886794
gugacagguuuauuacauu

SEQ ID NO: 2426659 - RNA, 19 nt, Artificial Sequence
  Description of Artificial Sequence: Synthetic oligonucleotide
  Antisense strand to SEQ ID NO: 2426658
aauguaauaaaccugucac

SEQ ID NO: 2426660 - RNA, 19 nt, Artificial Sequence
  Description of Artificial Sequence: Synthetic oligonucleotide
  Sense strand starting at position 3096 of SEQ ID NO: 1886794
uuucuauaugcuugaaacg

SEQ ID NO: 2426661 - RNA, 19 nt, Artificial Sequence
  Description of Artificial Sequence: Synthetic oligonucleotide
  Antisense strand to SEQ ID NO: 2426660
cguuucaagcauauagaaa

SEQ ID NO: 2426662 - RNA, 19 nt, Artificial Sequence
  Description of Artificial Sequence: Synthetic oligonucleotide
  Sense strand starting at position 3097 of SEQ ID NO: 1886794
uucuauaugcuugaaacgu

SEQ ID NO: 2426663 - RNA, 19 nt, Artificial Sequence
  Description of Artificial Sequence: Synthetic oligonucleotide
  Antisense strand to SEQ ID NO: 2426662
acguuucaagcauauagaa

SEQ ID NO: 2426664 - RNA, 19 nt, Artificial Sequence
  Description of Artificial Sequence: Synthetic oligonucleotide
  Sense strand starting at position 3114 of SEQ ID NO: 1886794
guuauuagccaagaauugu

SEQ ID NO: 2426665 - RNA, 19 nt, Artificial Sequence
  Description of Artificial Sequence: Synthetic oligonucleotide
  Antisense strand to SEQ ID NO: 2426664
acaauucuuggcuaauaac

SEQ ID NO: 2426666 - RNA, 19 nt, Artificial Sequence
  Description of Artificial Sequence: Synthetic oligonucleotide
  Sense strand starting at position 3143 of SEQ ID NO: 1886794
agaauaagcuucguaaaug

SEQ ID NO: 2426667 - RNA, 19 nt, Artificial Sequence
  Description of Artificial Sequence: Synthetic oligonucleotide
  Antisense strand to SEQ ID NO: 2426666
cauuuacgaagcuuauucu

SEQ ID NO: 2426668 - RNA, 19 nt, Artificial Sequence
  Description of Artificial Sequence: Synthetic oligonucleotide
  Sense strand starting at position 3183 of SEQ ID NO: 1886794
cgaggaaaugcugagugaa

SEQ ID NO: 2426669 - RNA, 19 nt, Artificial Sequence
  Description of Artificial Sequence: Synthetic oligonucleotide
  Antisense strand to SEQ ID NO: 2426668
uucacucagcauuuccucg

SEQ ID NO: 2426670 - RNA, 19 nt, Artificial Sequence
  Description of Artificial Sequence: Synthetic oligonucleotide
  Sense strand starting at position 3195 of SEQ ID NO: 1886794
gagugaauuugucaacacu

SEQ ID NO: 2426671 - RNA, 19 nt, Artificial Sequence
  Description of Artificial Sequence: Synthetic oligonucleotide
  Antisense strand to SEQ ID NO: 2426670
aguguugacaaauucacuc

SEQ ID NO: 2426672 - RNA, 19 nt, Artificial Sequence
  Description of Artificial Sequence: Synthetic oligonucleotide
  Sense strand starting at position 3203 of SEQ ID NO: 1886794
uugucaacacuguaucagu

SEQ ID NO: 2426673 - RNA, 19 nt, Artificial Sequence
  Description of Artificial Sequence: Synthetic oligonucleotide
  Antisense strand to SEQ ID NO: 2426672
acugauacaguguugacaa

SEQ ID NO: 2426674 - RNA, 19 nt, Artificial Sequence
  Description of Artificial Sequence: Synthetic oligonucleotide
  Sense strand starting at position 3233 of SEQ ID NO: 1886794
ugcucaaaguggucuuaaa

SEQ ID NO: 2426675 - RNA, 19 nt, Artificial Sequence
  Description of Artificial Sequence: Synthetic oligonucleotide
  Antisense strand to SEQ ID NO: 2426674
uuuaagaccacuuugagca

SEQ ID NO: 2426676 - RNA, 19 nt, Artificial Sequence
  Description of Artificial Sequence: Synthetic oligonucleotide
  Sense strand starting at position 3309 of SEQ ID NO: 1886794
cacuuuguguguuuacaca

SEQ ID NO: 2426677 - RNA, 19 nt, Artificial Sequence
  Description of Artificial Sequence: Synthetic oligonucleotide
  Antisense strand to SEQ ID NO: 2426676
uguguaaacacacaaagug

SEQ ID NO: 2426678 - RNA, 19 nt, Artificial Sequence
  Description of Artificial Sequence: Synthetic oligonucleotide
  Sense strand starting at position 3484 of SEQ ID NO: 1886794
cuugaauguagauggauua

SEQ ID NO: 2426679 - RNA, 19 nt, Artificial Sequence
  Description of Artificial Sequence: Synthetic oligonucleotide
  Antisense strand to SEQ ID NO: 2426678
uaauccaucuacauucaag

SEQ ID NO: 2426680 - RNA, 19 nt, Artificial Sequence
  Description of Artificial Sequence: Synthetic oligonucleotide
  Sense strand starting at position 3522 of SEQ ID NO: 1886794
ugcagauuggcagaauuga

SEQ ID NO: 2426681 - RNA, 19 nt, Artificial Sequence
  Description of Artificial Sequence: Synthetic oligonucleotide
  Antisense strand to SEQ ID NO: 2426680
ucaauucugccaaucugca

SEQ ID NO: 2426682 - RNA, 19 nt, Artificial Sequence
  Description of Artificial Sequence: Synthetic oligonucleotide
  Sense strand starting at position 3741 of SEQ ID NO: 1886794
gagaucauuugagagcaag

SEQ ID NO: 2426683 - RNA, 19 nt, Artificial Sequence
  Description of Artificial Sequence: Synthetic oligonucleotide
  Antisense strand to SEQ ID NO: 2426682
cuugcucucaaaugaucuc

SEQ ID NO: 2426684 - RNA, 19 nt, Artificial Sequence
  Description of Artificial Sequence: Synthetic oligonucleotide
  Sense strand starting at position 3854 of SEQ ID NO: 1886794
gaaagaauuugacgccaau

SEQ ID NO: 2426685 - RNA, 19 nt, Artificial Sequence
  Description of Artificial Sequence: Synthetic oligonucleotide
  Antisense strand to SEQ ID NO: 2426684
auuggcgucaaauucuuuc

SEQ ID NO: 2426686 - RNA, 19 nt, Artificial Sequence
  Description of Artificial Sequence: Synthetic oligonucleotide
  Sense strand starting at position 3939 of SEQ ID NO: 1886794
aauagaaacguuggacuua

SEQ ID NO: 2426687 - RNA, 19 nt, Artificial Sequence
  Description of Artificial Sequence: Synthetic oligonucleotide
  Antisense strand to SEQ ID NO: 2426686
uaaguccaacguuucuauu

SEQ ID NO: 2426688 - RNA, 19 nt, Artificial Sequence
  Description of Artificial Sequence: Synthetic oligonucleotide
  Sense strand starting at position 3974 of SEQ ID NO: 1886794
aaaggaaauucggagacuu

SEQ ID NO: 2426689 - RNA, 19 nt, Artificial Sequence
  Description of Artificial Sequence: Synthetic oligonucleotide
  Antisense strand to SEQ ID NO: 2426688
aagucuccgaauuuccuuu

SEQ ID NO: 2426690 - RNA, 19 nt, Artificial Sequence
  Description of Artificial Sequence: Synthetic oligonucleotide
  Sense strand starting at position 30 of SEQ ID NO: 1886795
guacccucugucuggaauu

SEQ ID NO: 2426691 - RNA, 19 nt, Artificial Sequence
  Description of Artificial Sequence: Synthetic oligonucleotide
  Antisense strand to SEQ ID NO: 2426690
aauuccagacagaggguac

SEQ ID NO: 2426692 - RNA, 19 nt, Artificial Sequence
  Description of Artificial Sequence: Synthetic oligonucleotide
  Sense strand starting at position 73 of SEQ ID NO: 1886795
uggugaauucucuagccag

SEQ ID NO: 2426693 - RNA, 19 nt, Artificial Sequence
  Description of Artificial Sequence: Synthetic oligonucleotide
  Antisense strand to SEQ ID NO: 2426692
cuggcuagagaauucacca

SEQ ID NO: 2426694 - RNA, 19 nt, Artificial Sequence
  Description of Artificial Sequence: Synthetic oligonucleotide
  Sense strand starting at position 123 of SEQ ID NO: 1886795
agguccuaucagugagguu

SEQ ID NO: 2426695 - RNA, 19 nt, Artificial Sequence
  Description of Artificial Sequence: Synthetic oligonucleotide
  Antisense strand to SEQ ID NO: 2426694
aaccucacugauaggaccu

SEQ ID NO: 2426696 - RNA, 19 nt, Artificial Sequence
  Description of Artificial Sequence: Synthetic oligonucleotide
  Sense strand starting at position 124 of SEQ ID NO: 1886795
gguccuaucagugagguuu

SEQ ID NO: 2426697 - RNA, 19 nt, Artificial Sequence
  Description of Artificial Sequence: Synthetic oligonucleotide
  Antisense strand to SEQ ID NO: 2426696
aaaccucacugauaggacc

SEQ ID NO: 2426698 - RNA, 19 nt, Artificial Sequence
  Description of Artificial Sequence: Synthetic oligonucleotide
  Sense strand starting at position 344 of SEQ ID NO: 1886795
cuuggaguuggaggaguau

SEQ ID NO: 2426699 - RNA, 19 nt, Artificial Sequence
  Description of Artificial Sequence: Synthetic oligonucleotide
  Antisense strand to SEQ ID NO: 2426698
auacuccuccaacuccaag

SEQ ID NO: 2426700 - RNA, 19 nt, Artificial Sequence
  Description of Artificial Sequence: Synthetic oligonucleotide
  Sense strand starting at position 398 of SEQ ID NO: 1886795
cugggaaccagauguguca

SEQ ID NO: 2426701 - RNA, 19 nt, Artificial Sequence
  Description of Artificial Sequence: Synthetic oligonucleotide
  Antisense strand to SEQ ID NO: 2426700
ugacacaucugguucccag

SEQ ID NO: 2426702 - RNA, 19 nt, Artificial Sequence
  Description of Artificial Sequence: Synthetic oligonucleotide
  Sense strand starting at position 405 of SEQ ID NO: 1886795
ccagaugugucaucuguaa

SEQ ID NO: 2426703 - RNA, 19 nt, Artificial Sequence
  Description of Artificial Sequence: Synthetic oligonucleotide
  Antisense strand to SEQ ID NO: 2426702
uuacagaugacacaucugg

SEQ ID NO: 2426704 - RNA, 19 nt, Artificial Sequence
  Description of Artificial Sequence: Synthetic oligonucleotide
  Sense strand starting at position 494 of SEQ ID NO: 1886795
augagacgccaucaucuau

SEQ ID NO: 2426705 - RNA, 19 nt, Artificial Sequence
  Description of Artificial Sequence: Synthetic oligonucleotide
  Antisense strand to SEQ ID NO: 2426704
auagaugauggcgucucau

SEQ ID NO: 2426706 - RNA, 19 nt, Artificial Sequence
  Description of Artificial Sequence: Synthetic oligonucleotide
  Sense strand starting at position 535 of SEQ ID NO: 1886795
aaagaauuguuagcauggu

SEQ ID NO: 2426707 - RNA, 19 nt, Artificial Sequence
  Description of Artificial Sequence: Synthetic oligonucleotide
  Antisense strand to SEQ ID NO: 2426706
accaugcuaacaauucuuu

SEQ ID NO: 2426708 - RNA, 19 nt, Artificial Sequence
  Description of Artificial Sequence: Synthetic oligonucleotide
  Sense strand starting at position 689 of SEQ ID NO: 1886795
uguguuuauccaggacuuu

SEQ ID NO: 2426709 - RNA, 19 nt, Artificial Sequence
  Description of Artificial Sequence: Synthetic oligonucleotide
  Antisense strand to SEQ ID NO: 2426708
aaaguccuggauaaacaca

SEQ ID NO: 2426710 - RNA, 19 nt, Artificial Sequence
  Description of Artificial Sequence: Synthetic oligonucleotide
  Sense strand starting at position 690 of SEQ ID NO: 1886795
guguuuauccaggacuuuc

SEQ ID NO: 2426711 - RNA, 19 nt, Artificial Sequence
  Description of Artificial Sequence: Synthetic oligonucleotide
  Antisense strand to SEQ ID NO: 2426710
gaaaguccuggauaaacac

SEQ ID NO: 2426712 - RNA, 19 nt, Artificial Sequence
  Description of Artificial Sequence: Synthetic oligonucleotide
  Sense strand starting at position 701 of SEQ ID NO: 1886795
ggacuuuccugagcuggca

SEQ ID NO: 2426713 - RNA, 19 nt, Artificial Sequence
  Description of Artificial Sequence: Synthetic oligonucleotide
  Antisense strand to SEQ ID NO: 2426712
ugccagcucaggaaagucc

SEQ ID NO: 2426714 - RNA, 19 nt, Artificial Sequence
  Description of Artificial Sequence: Synthetic oligonucleotide
  Sense strand starting at position 729 of SEQ ID NO: 1886795
ccaucauuaucugcgugaa

SEQ ID NO: 2426715 - RNA, 19 nt, Artificial Sequence
  Description of Artificial Sequence: Synthetic oligonucleotide
  Antisense strand to SEQ ID NO: 2426714
uucacgcagauaaugaugg

SEQ ID NO: 2426716 - RNA, 19 nt, Artificial Sequence
  Description of Artificial Sequence: Synthetic oligonucleotide
  Sense strand starting at position 730 of SEQ ID NO: 1886795
caucauuaucugcgugaac

SEQ ID NO: 2426717 - RNA, 19 nt, Artificial Sequence
  Description of Artificial Sequence: Synthetic oligonucleotide
  Antisense strand to SEQ ID NO: 2426716
guucacgcagauaaugaug

SEQ ID NO: 2426718 - RNA, 19 nt, Artificial Sequence
  Description of Artificial Sequence: Synthetic oligonucleotide
  Sense strand starting at position 732 of SEQ ID NO: 1886795
ucauuaucugcgugaaccu

SEQ ID NO: 2426719 - RNA, 19 nt, Artificial Sequence
  Description of Artificial Sequence: Synthetic oligonucleotide
  Antisense strand to SEQ ID NO: 2426718
agguucacgcagauaauga

SEQ ID NO: 2426720 - RNA, 19 nt, Artificial Sequence
  Description of Artificial Sequence: Synthetic oligonucleotide
  Sense strand starting at position 742 of SEQ ID NO: 1886795
cgugaaccucaugaccauu

SEQ ID NO: 2426721 - RNA, 19 nt, Artificial Sequence
  Description of Artificial Sequence: Synthetic oligonucleotide
  Antisense strand to SEQ ID NO: 2426720
aauggucaugagguucacg

SEQ ID NO: 2426722 - RNA, 19 nt, Artificial Sequence
  Description of Artificial Sequence: Synthetic oligonucleotide
  Sense strand starting at position 841 of SEQ ID NO: 1886795
ugauuccuggccugagguu

SEQ ID NO: 2426723 - RNA, 19 nt, Artificial Sequence
  Description of Artificial Sequence: Synthetic oligonucleotide
  Antisense strand to SEQ ID NO: 2426722
aaccucaggccaggaauca

SEQ ID NO: 2426724 - RNA, 19 nt, Artificial Sequence
  Description of Artificial Sequence: Synthetic oligonucleotide
  Sense strand starting at position 1297 of SEQ ID NO: 1886795
ggacauaagucauuguuag

SEQ ID NO: 2426725 - RNA, 19 nt, Artificial Sequence
  Description of Artificial Sequence: Synthetic oligonucleotide
  Antisense strand to SEQ ID NO: 2426724
cuaacaaugacuuaugucc

SEQ ID NO: 2426726 - RNA, 19 nt, Artificial Sequence
  Description of Artificial Sequence: Synthetic oligonucleotide
  Sense strand starting at position 1298 of SEQ ID NO: 1886795
gacauaagucauuguuaga

SEQ ID NO: 2426727 - RNA, 19 nt, Artificial Sequence
  Description of Artificial Sequence: Synthetic oligonucleotide
  Antisense strand to SEQ ID NO: 2426726
ucuaacaaugacuuauguc

SEQ ID NO: 2426728 - RNA, 19 nt, Artificial Sequence
  Description of Artificial Sequence: Synthetic oligonucleotide
  Sense strand starting at position 1425 of SEQ ID NO: 1886795
cggauucuuagaggacacu

SEQ ID NO: 2426729 - RNA, 19 nt, Artificial Sequence
  Description of Artificial Sequence: Synthetic oligonucleotide
  Antisense strand to SEQ ID NO: 2426728
aguguccucuaagaauccg

SEQ ID NO: 2426730 - RNA, 19 nt, Artificial Sequence
  Description of Artificial Sequence: Synthetic oligonucleotide
  Sense strand starting at position 1579 of SEQ ID NO: 1886795
ggugaauauuccuccucuu

SEQ ID NO: 2426731 - RNA, 19 nt, Artificial Sequence
  Description of Artificial Sequence: Synthetic oligonucleotide
  Antisense strand to SEQ ID NO: 2426730
aagaggaggaauauucacc

SEQ ID NO: 2426732 - RNA, 19 nt, Artificial Sequence
  Description of Artificial Sequence: Synthetic oligonucleotide
  Sense strand starting at position 1721 of SEQ ID NO: 1886795
cacucaucugggugcugau

SEQ ID NO: 2426733 - RNA, 19 nt, Artificial Sequence
  Description of Artificial Sequence: Synthetic oligonucleotide
  Antisense strand to SEQ ID NO: 2426732
aucagcacccagaugagug

SEQ ID NO: 2426734 - RNA, 19 nt, Artificial Sequence
  Description of Artificial Sequence: Synthetic oligonucleotide
  Sense strand starting at position 2157 of SEQ ID NO: 1886795
guuugaggcagcugaagua

SEQ ID NO: 2426735 - RNA, 19 nt, Artificial Sequence
  Description of Artificial Sequence: Synthetic oligonucleotide
  Antisense strand to SEQ ID NO: 2426734
uacuucagcugccucaaac

SEQ ID NO: 2426736 - RNA, 19 nt, Artificial Sequence
  Description of Artificial Sequence: Synthetic oligonucleotide
  Sense strand starting at position 2454 of SEQ ID NO: 1886795
uggaauuguccaggcucaa

SEQ ID NO: 2426737 - RNA, 19 nt, Artificial Sequence
  Description of Artificial Sequence: Synthetic oligonucleotide
  Antisense strand to SEQ ID NO: 2426736
uugagccuggacaauucca

SEQ ID NO: 2426738 - RNA, 19 nt, Artificial Sequence
  Description of Artificial Sequence: Synthetic oligonucleotide
  Sense strand starting at position 2595 of SEQ ID NO: 1886795
uggacauccuaagucuuaa

SEQ ID NO: 2426739 - RNA, 19 nt, Artificial Sequence
  Description of Artificial Sequence: Synthetic oligonucleotide
  Antisense strand to SEQ ID NO: 2426738
uuaagacuuaggaugucca

SEQ ID NO: 2426740 - RNA, 19 nt, Artificial Sequence
  Description of Artificial Sequence: Synthetic oligonucleotide
  Sense strand starting at position 2608 of SEQ ID NO: 1886795
ucuuaacugugaucccuga

SEQ ID NO: 2426741 - RNA, 19 nt, Artificial Sequence
  Description of Artificial Sequence: Synthetic oligonucleotide
  Antisense strand to SEQ ID NO: 2426740
ucagggaucacaguuaaga

SEQ ID NO: 2426742 - RNA, 19 nt, Artificial Sequence
  Description of Artificial Sequence: Synthetic oligonucleotide
  Sense strand starting at position 2637 of SEQ ID NO: 1886795
uggucuuuguucuuucuca

SEQ ID NO: 2426743 - RNA, 19 nt, Artificial Sequence
  Description of Artificial Sequence: Synthetic oligonucleotide
  Antisense strand to SEQ ID NO: 2426742
ugagaaagaacaaagacca

SEQ ID NO: 2426744 - RNA, 19 nt, Artificial Sequence
  Description of Artificial Sequence: Synthetic oligonucleotide
  Sense strand starting at position 2638 of SEQ ID NO: 1886795
ggucuuuguucuuucucaa

SEQ ID NO: 2426745 - RNA, 19 nt, Artificial Sequence
  Description of Artificial Sequence: Synthetic oligonucleotide
  Antisense strand to SEQ ID NO: 2426744
uugagaaagaacaaagacc

SEQ ID NO: 2426746 - RNA, 19 nt, Artificial Sequence
  Description of Artificial Sequence: Synthetic oligonucleotide
  Sense strand starting at position 2789 of SEQ ID NO: 1886795
acgucauguccuggagagu

SEQ ID NO: 2426747 - RNA, 19 nt, Artificial Sequence
  Description of Artificial Sequence: Synthetic oligonucleotide
  Antisense strand to SEQ ID NO: 2426746
acucuccaggacaugacgu

SEQ ID NO: 2426748 - RNA, 19 nt, Artificial Sequence
  Description of Artificial Sequence: Synthetic oligonucleotide
  Sense strand starting at position 2790 of SEQ ID NO: 1886795
cgucauguccuggagagug

SEQ ID NO: 2426749 - RNA, 19 nt, Artificial Sequence
  Description of Artificial Sequence: Synthetic oligonucleotide
  Antisense strand to SEQ ID NO: 2426748
cacucuccaggacaugacg

SEQ ID NO: 2426750 - RNA, 19 nt, Artificial Sequence
  Description of Artificial Sequence: Synthetic oligonucleotide
  Sense strand starting at position 2935 of SEQ ID NO: 1886795
augggcugucacuggguaa

SEQ ID NO: 2426751 - RNA, 19 nt, Artificial Sequence
  Description of Artificial Sequence: Synthetic oligonucleotide
  Antisense strand to SEQ ID NO: 2426750
uuacccagugacagcccau

SEQ ID NO: 2426752 - RNA, 19 nt, Artificial Sequence
  Description of Artificial Sequence: Synthetic oligonucleotide
  Sense strand starting at position 3047 of SEQ ID NO: 1886795
cuccuugucccuugagaca

SEQ ID NO: 2426753 - RNA, 19 nt, Artificial Sequence
  Description of Artificial Sequence: Synthetic oligonucleotide
  Antisense strand to SEQ ID NO: 2426752
ugucucaagggacaaggag

SEQ ID NO: 2426754 - RNA, 19 nt, Artificial Sequence
  Description of Artificial Sequence: Synthetic oligonucleotide
  Sense strand starting at position 3058 of SEQ ID NO: 1886795
uugagacagcacuguucua

SEQ ID NO: 2426755 - RNA, 19 nt, Artificial Sequence
  Description of Artificial Sequence: Synthetic oligonucleotide
  Antisense strand to SEQ ID NO: 2426754
uagaacagugcugucucaa

SEQ ID NO: 2426756 - RNA, 19 nt, Artificial Sequence
  Description of Artificial Sequence: Synthetic oligonucleotide
  Sense strand starting at position 3065 of SEQ ID NO: 1886795
agcacuguucuauggaaac

SEQ ID NO: 2426757 - RNA, 19 nt, Artificial Sequence
  Description of Artificial Sequence: Synthetic oligonucleotide
  Antisense strand to SEQ ID NO: 2426756
guuuccauagaacagugcu

SEQ ID NO: 2426758 - RNA, 19 nt, Artificial Sequence
  Description of Artificial Sequence: Synthetic oligonucleotide
  Sense strand starting at position 3150 of SEQ ID NO: 1886795
gcacuugaaaugugaguag

SEQ ID NO: 2426759 - RNA, 19 nt, Artificial Sequence
  Description of Artificial Sequence: Synthetic oligonucleotide
  Antisense strand to SEQ ID NO: 2426758
cuacucacauuucaagugc

SEQ ID NO: 2426760 - RNA, 19 nt, Artificial Sequence
  Description of Artificial Sequence: Synthetic oligonucleotide
  Sense strand starting at position 3527 of SEQ ID NO: 1886795
gaguuuaaauagccgcaua

SEQ ID NO: 2426761 - RNA, 19 nt, Artificial Sequence
  Description of Artificial Sequence: Synthetic oligonucleotide
  Antisense strand to SEQ ID NO: 2426760
uaugcggcuauuuaaacuc

SEQ ID NO: 2426762 - RNA, 19 nt, Artificial Sequence
  Description of Artificial Sequence: Synthetic oligonucleotide
  Sense strand starting at position 3654 of SEQ ID NO: 1886795
agaggugucugagcagcaa

SEQ ID NO: 2426763 - RNA, 19 nt, Artificial Sequence
  Description of Artificial Sequence: Synthetic oligonucleotide
  Antisense strand to SEQ ID NO: 2426762
uugcugcucagacaccucu

SEQ ID NO: 2426764 - RNA, 19 nt, Artificial Sequence
  Description of Artificial Sequence: Synthetic oligonucleotide
  Sense strand starting at position 3694 of SEQ ID NO: 1886795
gcugcuugcccuggagaga

SEQ ID NO: 2426765 - RNA, 19 nt, Artificial Sequence
  Description of Artificial Sequence: Synthetic oligonucleotide
  Antisense strand to SEQ ID NO: 2426764
ucucuccagggcaagcagc

SEQ ID NO: 2426766 - RNA, 19 nt, Artificial Sequence
  Description of Artificial Sequence: Synthetic oligonucleotide
  Sense strand starting at position 3809 of SEQ ID NO: 1886795
uuguuucuuggauguuaag

SEQ ID NO: 2426767 - RNA, 19 nt, Artificial Sequence
  Description of Artificial Sequence: Synthetic oligonucleotide
  Antisense strand to SEQ ID NO: 2426766
cuuaacauccaagaaacaa

SEQ ID NO: 2426768 - RNA, 19 nt, Artificial Sequence
  Description of Artificial Sequence: Synthetic oligonucleotide
  Sense strand starting at position 3827 of SEQ ID NO: 1886795
guauuuaagucccagagcu

SEQ ID NO: 2426769 - RNA, 19 nt, Artificial Sequence
  Description of Artificial Sequence: Synthetic oligonucleotide
  Antisense strand to SEQ ID NO: 2426768
agcucugggacuuaaauac

SEQ ID NO: 2426770 - RNA, 19 nt, Artificial Sequence
  Description of Artificial Sequence: Synthetic oligonucleotide
  Sense strand starting at position 30 of SEQ ID NO: 1886796
augugacugucucuccuau

SEQ ID NO: 2426771 - RNA, 19 nt, Artificial Sequence
  Description of Artificial Sequence: Synthetic oligonucleotide
  Antisense strand to SEQ ID NO: 2426770
auaggagagacagucacau

SEQ ID NO: 2426772 - RNA, 19 nt, Artificial Sequence
  Description of Artificial Sequence: Synthetic oligonucleotide
  Sense strand starting at position 32 of SEQ ID NO: 1886796
gugacugucucuccuauua

SEQ ID NO: 2426773 - RNA, 19 nt, Artificial Sequence
  Description of Artificial Sequence: Synthetic oligonucleotide
  Antisense strand to SEQ ID NO: 2426772
uaauaggagagacagucac

SEQ ID NO: 2426774 - RNA, 19 nt, Artificial Sequence
  Description of Artificial Sequence: Synthetic oligonucleotide
  Sense strand starting at position 288 of SEQ ID NO: 1886796
uucuguauugcacauuaua

SEQ ID NO: 2426775 - RNA, 19 nt, Artificial Sequence
  Description of Artificial Sequence: Synthetic oligonucleotide
  Antisense strand to SEQ ID NO: 2426774
uauaaugugcaauacagaa

SEQ ID NO: 2426776 - RNA, 19 nt, Artificial Sequence
  Description of Artificial Sequence: Synthetic oligonucleotide
  Sense strand starting at position 291 of SEQ ID NO: 1886796
uguauugcacauuauacau

SEQ ID NO: 2426777 - RNA, 19 nt, Artificial Sequence
  Description of Artificial Sequence: Synthetic oligonucleotide
  Antisense strand to SEQ ID NO: 2426776
auguauaaugugcaauaca

SEQ ID NO: 2426778 - RNA, 19 nt, Artificial Sequence
  Description of Artificial Sequence: Synthetic oligonucleotide
  Sense strand starting at position 666 of SEQ ID NO: 1886796
cccagaucccucuggagau

SEQ ID NO: 2426779 - RNA, 19 nt, Artificial Sequence
  Description of Artificial Sequence: Synthetic oligonucleotide
  Antisense strand to SEQ ID NO: 2426778
aucuccagagggaucuggg

SEQ ID NO: 2426780 - RNA, 19 nt, Artificial Sequence
  Description of Artificial Sequence: Synthetic oligonucleotide
  Sense strand starting at position 678 of SEQ ID NO: 1886796
uggagaugugcuugauaua

SEQ ID NO: 2426781 - RNA, 19 nt, Artificial Sequence
  Description of Artificial Sequence: Synthetic oligonucleotide
  Antisense strand to SEQ ID NO: 2426780
uauaucaagcacaucucca

SEQ ID NO: 2426782 - RNA, 19 nt, Artificial Sequence
  Description of Artificial Sequence: Synthetic oligonucleotide
  Sense strand starting at position 679 of SEQ ID NO: 1886796
ggagaugugcuugauauau

SEQ ID NO: 2426783 - RNA, 19 nt, Artificial Sequence
  Description of Artificial Sequence: Synthetic oligonucleotide
  Antisense strand to SEQ ID NO: 2426782
auauaucaagcacaucucc

SEQ ID NO: 2426784 - RNA, 19 nt, Artificial Sequence
  Description of Artificial Sequence: Synthetic oligonucleotide
  Sense strand starting at position 699 of SEQ ID NO: 1886796
gucugugcacuauauuauc

SEQ ID NO: 2426785 - RNA, 19 nt, Artificial Sequence
  Description of Artificial Sequence: Synthetic oligonucleotide
  Antisense strand to SEQ ID NO: 2426784
gauaauauagugcacagac

SEQ ID NO: 2426786 - RNA, 19 nt, Artificial Sequence
  Description of Artificial Sequence: Synthetic oligonucleotide
  Sense strand starting at position 1032 of SEQ ID NO: 1886796
agacgccaucuguaccaaa

SEQ ID NO: 2426787 - RNA, 19 nt, Artificial Sequence
  Description of Artificial Sequence: Synthetic oligonucleotide
  Antisense strand to SEQ ID NO: 2426786
uuugguacagauggcgucu

SEQ ID NO: 2426788 - RNA, 19 nt, Artificial Sequence
  Description of Artificial Sequence: Synthetic oligonucleotide
  Sense strand starting at position 1419 of SEQ ID NO: 1886796
cuugauguguuucuacaua

SEQ ID NO: 2426789 - RNA, 19 nt, Artificial Sequence
  Description of Artificial Sequence: Synthetic oligonucleotide
  Antisense strand to SEQ ID NO: 2426788
uauguagaaacacaucaag

SEQ ID NO: 2426790 - RNA, 19 nt, Artificial Sequence
  Description of Artificial Sequence: Synthetic oligonucleotide
  Sense strand starting at position 1487 of SEQ ID NO: 1886796
auggauaugcucuaguuuc

SEQ ID NO: 2426791 - RNA, 19 nt, Artificial Sequence
  Description of Artificial Sequence: Synthetic oligonucleotide
  Antisense strand to SEQ ID NO: 2426790
gaaacuagagcauauccau

SEQ ID NO: 2426792 - RNA, 19 nt, Artificial Sequence
  Description of Artificial Sequence: Synthetic oligonucleotide
  Sense strand starting at position 1507 of SEQ ID NO: 1886796
uaaucaauacucgagugau

SEQ ID NO: 2426793 - RNA, 19 nt, Artificial Sequence
  Description of Artificial Sequence: Synthetic oligonucleotide
  Antisense strand to SEQ ID NO: 2426792
aucacucgaguauugauua

SEQ ID NO: 2426794 - RNA, 19 nt, Artificial Sequence
  Description of Artificial Sequence: Synthetic oligonucleotide
  Sense strand starting at position 1510 of SEQ ID NO: 1886796
ucaauacucgagugaugca

SEQ ID NO: 2426795 - RNA, 19 nt, Artificial Sequence
  Description of Artificial Sequence: Synthetic oligonucleotide
  Antisense strand to SEQ ID NO: 2426794
ugcaucacucgaguauuga

SEQ ID NO: 2426796 - RNA, 19 nt, Artificial Sequence
  Description of Artificial Sequence: Synthetic oligonucleotide
  Sense strand starting at position 2218 of SEQ ID NO: 1886796
cuagauuuaccucguucuc

SEQ ID NO: 2426797 - RNA, 19 nt, Artificial Sequence
  Description of Artificial Sequence: Synthetic oligonucleotide
  Antisense strand to SEQ ID NO: 2426796
gagaacgagguaaaucuag

SEQ ID NO: 2426798 - RNA, 19 nt, Artificial Sequence
  Description of Artificial Sequence: Synthetic oligonucleotide
  Sense strand starting at position 2220 of SEQ ID NO: 1886796
agauuuaccucguucucuu

SEQ ID NO: 2426799 - RNA, 19 nt, Artificial Sequence
  Description of Artificial Sequence: Synthetic oligonucleotide
  Antisense strand to SEQ ID NO: 2426798
aagagaacgagguaaaucu

SEQ ID NO: 2426800 - RNA, 19 nt, Artificial Sequence
  Description of Artificial Sequence: Synthetic oligonucleotide
  Sense strand starting at position 2772 of SEQ ID NO: 1886796
ccucgacccggagaugauu

SEQ ID NO: 2426801 - RNA, 19 nt, Artificial Sequence
  Description of Artificial Sequence: Synthetic oligonucleotide
  Antisense strand to SEQ ID NO: 2426800
aaucaucuccgggucgagg

SEQ ID NO: 2426802 - RNA, 19 nt, Artificial Sequence
  Description of Artificial Sequence: Synthetic oligonucleotide
  Sense strand starting at position 2842 of SEQ ID NO: 1886796
gucuuaauuauguaggugu

SEQ ID NO: 2426803 - RNA, 19 nt, Artificial Sequence
  Description of Artificial Sequence: Synthetic oligonucleotide
  Antisense strand to SEQ ID NO: 2426802
acaccuacauaauuaagac

SEQ ID NO: 2426804 - RNA, 19 nt, Artificial Sequence
  Description of Artificial Sequence: Synthetic oligonucleotide
  Sense strand starting at position 2906 of SEQ ID NO: 1886796
aaagauagcuuucucguga

SEQ ID NO: 2426805 - RNA, 19 nt, Artificial Sequence
  Description of Artificial Sequence: Synthetic oligonucleotide
  Antisense strand to SEQ ID NO: 2426804
ucacgagaaagcuaucuuu

SEQ ID NO: 2426806 - RNA, 19 nt, Artificial Sequence
  Description of Artificial Sequence: Synthetic oligonucleotide
  Sense strand starting at position 2907 of SEQ ID NO: 1886796
aagauagcuuucucgugau

SEQ ID NO: 2426807 - RNA, 19 nt, Artificial Sequence
  Description of Artificial Sequence: Synthetic oligonucleotide
  Antisense strand to SEQ ID NO: 2426806
aucacgagaaagcuaucuu

SEQ ID NO: 2426808 - RNA, 19 nt, Artificial Sequence
  Description of Artificial Sequence: Synthetic oligonucleotide
  Sense strand starting at position 2919 of SEQ ID NO: 1886796
ucgugauagccacaaggcu

SEQ ID NO: 2426809 - RNA, 19 nt, Artificial Sequence
  Description of Artificial Sequence: Synthetic oligonucleotide
  Antisense strand to SEQ ID NO: 2426808
agccuuguggcuaucacga

SEQ ID NO: 2426810 - RNA, 19 nt, Artificial Sequence
  Description of Artificial Sequence: Synthetic oligonucleotide
  Sense strand starting at position 2943 of SEQ ID NO: 1886796
ccucauucugcucauaugu

SEQ ID NO: 2426811 - RNA, 19 nt, Artificial Sequence
  Description of Artificial Sequence: Synthetic oligonucleotide
  Antisense strand to SEQ ID NO: 2426810
acauaugagcagaaugagg

SEQ ID NO: 2426812 - RNA, 19 nt, Artificial Sequence
  Description of Artificial Sequence: Synthetic oligonucleotide
  Sense strand starting at position 3001 of SEQ ID NO: 1886796
cugugcucggcguuaacuu

SEQ ID NO: 2426813 - RNA, 19 nt, Artificial Sequence
  Description of Artificial Sequence: Synthetic oligonucleotide
  Antisense strand to SEQ ID NO: 2426812
aaguuaacgccgagcacag

SEQ ID NO: 2426814 - RNA, 19 nt, Artificial Sequence
  Description of Artificial Sequence: Synthetic oligonucleotide
  Sense strand starting at position 3031 of SEQ ID NO: 1886796
guuuaucacuaccugacau

SEQ ID NO: 2426815 - RNA, 19 nt, Artificial Sequence
  Description of Artificial Sequence: Synthetic oligonucleotide
  Antisense strand to SEQ ID NO: 2426814
augucagguagugauaaac

SEQ ID NO: 2426816 - RNA, 19 nt, Artificial Sequence
  Description of Artificial Sequence: Synthetic oligonucleotide
  Sense strand starting at position 3061 of SEQ ID NO: 1886796
ccacgacucaacgauaagu

SEQ ID NO: 2426817 - RNA, 19 nt, Artificial Sequence
  Description of Artificial Sequence: Synthetic oligonucleotide
  Antisense strand to SEQ ID NO: 2426816
acuuaucguugagucgugg

SEQ ID NO: 2426818 - RNA, 19 nt, Artificial Sequence
  Description of Artificial Sequence: Synthetic oligonucleotide
  Sense strand starting at position 3074 of SEQ ID NO: 1886796
auaaguguucaugagggca

SEQ ID NO: 2426819 - RNA, 19 nt, Artificial Sequence
  Description of Artificial Sequence: Synthetic oligonucleotide
  Antisense strand to SEQ ID NO: 2426818
ugcccucaugaacacuuau

SEQ ID NO: 2426820 - RNA, 19 nt, Artificial Sequence
  Description of Artificial Sequence: Synthetic oligonucleotide
  Sense strand starting at position 3100 of SEQ ID NO: 1886796
uuuaaugcccuaugacaag

SEQ ID NO: 2426821 - RNA, 19 nt, Artificial Sequence
  Description of Artificial Sequence: Synthetic oligonucleotide
  Antisense strand to SEQ ID NO: 2426820
cuugucauagggcauuaaa

SEQ ID NO: 2426822 - RNA, 19 nt, Artificial Sequence
  Description of Artificial Sequence: Synthetic oligonucleotide
  Sense strand starting at position 3140 of SEQ ID NO: 1886796
caugguagaugcuuaguaa

SEQ ID NO: 2426823 - RNA, 19 nt, Artificial Sequence
  Description of Artificial Sequence: Synthetic oligonucleotide
  Antisense strand to SEQ ID NO: 2426822
uuacuaagcaucuaccaug

SEQ ID NO: 2426824 - RNA, 19 nt, Artificial Sequence
  Description of Artificial Sequence: Synthetic oligonucleotide
  Sense strand starting at position 3141 of SEQ ID NO: 1886796
augguagaugcuuaguaaa

SEQ ID NO: 2426825 - RNA, 19 nt, Artificial Sequence
  Description of Artificial Sequence: Synthetic oligonucleotide
  Antisense strand to SEQ ID NO: 2426824
uuuacuaagcaucuaccau

SEQ ID NO: 2426826 - RNA, 19 nt, Artificial Sequence
  Description of Artificial Sequence: Synthetic oligonucleotide
  Sense strand starting at position 3163 of SEQ ID NO: 1886796
uuguuuaaugaaugaaggu

SEQ ID NO: 2426827 - RNA, 19 nt, Artificial Sequence
  Description of Artificial Sequence: Synthetic oligonucleotide
  Antisense strand to SEQ ID NO: 2426826
accuucauucauuaaacaa

SEQ ID NO: 2426828 - RNA, 19 nt, Artificial Sequence
  Description of Artificial Sequence: Synthetic oligonucleotide
  Sense strand starting at position 3260 of SEQ ID NO: 1886796
acaguuauaugccugugaa

SEQ ID NO: 2426829 - RNA, 19 nt, Artificial Sequence
  Description of Artificial Sequence: Synthetic oligonucleotide
  Antisense strand to SEQ ID NO: 2426828
uucacaggcauauaacugu

SEQ ID NO: 2426830 - RNA, 19 nt, Artificial Sequence
  Description of Artificial Sequence: Synthetic oligonucleotide
  Sense strand starting at position 3261 of SEQ ID NO: 1886796
caguuauaugccugugaau

SEQ ID NO: 2426831 - RNA, 19 nt, Artificial Sequence
  Description of Artificial Sequence: Synthetic oligonucleotide
  Antisense strand to SEQ ID NO: 2426830
auucacaggcauauaacug

SEQ ID NO: 2426832 - RNA, 19 nt, Artificial Sequence
  Description of Artificial Sequence: Synthetic oligonucleotide
  Sense strand starting at position 3672 of SEQ ID NO: 1886796
aucuuucuguauuugcaga

SEQ ID NO: 2426833 - RNA, 19 nt, Artificial Sequence
  Description of Artificial Sequence: Synthetic oligonucleotide
  Antisense strand to SEQ ID NO: 2426832
ucugcaaauacagaaagau

SEQ ID NO: 2426834 - RNA, 19 nt, Artificial Sequence
  Description of Artificial Sequence: Synthetic oligonucleotide
  Sense strand starting at position 3674 of SEQ ID NO: 1886796
cuuucuguauuugcagaua

SEQ ID NO: 2426835 - RNA, 19 nt, Artificial Sequence
  Description of Artificial Sequence: Synthetic oligonucleotide
  Antisense strand to SEQ ID NO: 2426834
uaucugcaaauacagaaag

SEQ ID NO: 2426836 - RNA, 19 nt, Artificial Sequence
  Description of Artificial Sequence: Synthetic oligonucleotide
  Sense strand starting at position 3759 of SEQ ID NO: 1886796
ccagauuacuuuguguaca

SEQ ID NO: 2426837 - RNA, 19 nt, Artificial Sequence
  Description of Artificial Sequence: Synthetic oligonucleotide
  Antisense strand to SEQ ID NO: 2426836
uguacacaaaguaaucugg

SEQ ID NO: 2426838 - RNA, 19 nt, Artificial Sequence
  Description of Artificial Sequence: Synthetic oligonucleotide
  Sense strand starting at position 3761 of SEQ ID NO: 1886796
agauuacuuuguguacaug

SEQ ID NO: 2426839 - RNA, 19 nt, Artificial Sequence
  Description of Artificial Sequence: Synthetic oligonucleotide
  Antisense strand to SEQ ID NO: 2426838
cauguacacaaaguaaucu

SEQ ID NO: 2426840 - RNA, 19 nt, Artificial Sequence
  Description of Artificial Sequence: Synthetic oligonucleotide
  Sense strand starting at position 3762 of SEQ ID NO: 1886796
gauuacuuuguguacaugu

SEQ ID NO: 2426841 - RNA, 19 nt, Artificial Sequence
  Description of Artificial Sequence: Synthetic oligonucleotide
  Antisense strand to SEQ ID NO: 2426840
acauguacacaaaguaauc

SEQ ID NO: 2426842 - RNA, 19 nt, Artificial Sequence
  Description of Artificial Sequence: Synthetic oligonucleotide
  Sense strand starting at position 3769 of SEQ ID NO: 1886796
uuguguacauguuuccaaa

SEQ ID NO: 2426843 - RNA, 19 nt, Artificial Sequence
  Description of Artificial Sequence: Synthetic oligonucleotide
  Antisense strand to SEQ ID NO: 2426842
uuuggaaacauguacacaa

SEQ ID NO: 2426844 - RNA, 19 nt, Artificial Sequence
  Description of Artificial Sequence: Synthetic oligonucleotide
  Sense strand starting at position 3912 of SEQ ID NO: 1886796
ugggaaacagcuugaugua

SEQ ID NO: 2426845 - RNA, 19 nt, Artificial Sequence
  Description of Artificial Sequence: Synthetic oligonucleotide
  Antisense strand to SEQ ID NO: 2426844
uacaucaagcuguuuccca

SEQ ID NO: 2426846 - RNA, 19 nt, Artificial Sequence
  Description of Artificial Sequence: Synthetic oligonucleotide
  Sense strand starting at position 3937 of SEQ ID NO: 1886796
ccauaagguccacaguaau

SEQ ID NO: 2426847 - RNA, 19 nt, Artificial Sequence
  Description of Artificial Sequence: Synthetic oligonucleotide
  Antisense strand to SEQ ID NO: 2426846
auuacuguggaccuuaugg

SEQ ID NO: 2426848 - RNA, 19 nt, Artificial Sequence
  Description of Artificial Sequence: Synthetic oligonucleotide
  Sense strand starting at position 3943 of SEQ ID NO: 1886796
gguccacaguaauuaaauu

SEQ ID NO: 2426849 - RNA, 19 nt, Artificial Sequence
  Description of Artificial Sequence: Synthetic oligonucleotide
  Antisense strand to SEQ ID NO: 2426848
aauuuaauuacuguggacc

SEQ ID NO: 2426850 - RNA, 19 nt, Artificial Sequence
  Description of Artificial Sequence: Synthetic oligonucleotide
  Sense strand starting at position 217 of SEQ ID NO: 1886797
uuaauuacuguggaccuua

SEQ ID NO: 2426851 - RNA, 19 nt, Artificial Sequence
  Description of Artificial Sequence: Synthetic oligonucleotide
  Antisense strand to SEQ ID NO: 2426850
uaagguccacaguaauuaa

SEQ ID NO: 2426852 - RNA, 19 nt, Artificial Sequence
  Description of Artificial Sequence: Synthetic oligonucleotide
  Sense strand starting at position 286 of SEQ ID NO: 1886797
acggcugaacacuguaaau

SEQ ID NO: 2426853 - RNA, 19 nt, Artificial Sequence
  Description of Artificial Sequence: Synthetic oligonucleotide
  Antisense strand to SEQ ID NO: 2426852
auuuacaguguucagccgu

SEQ ID NO: 2426854 - RNA, 19 nt, Artificial Sequence
  Description of Artificial Sequence: Synthetic oligonucleotide
  Sense strand starting at position 288 of SEQ ID NO: 1886797
ggcugaacacuguaaaugu

SEQ ID NO: 2426855 - RNA, 19 nt, Artificial Sequence
  Description of Artificial Sequence: Synthetic oligonucleotide
  Antisense strand to SEQ ID NO: 2426854
acauuuacaguguucagcc

SEQ ID NO: 2426856 - RNA, 19 nt, Artificial Sequence
  Description of Artificial Sequence: Synthetic oligonucleotide
  Sense strand starting at position 296 of SEQ ID NO: 1886797
acuguaaauguccaaaucu

SEQ ID NO: 2426857 - RNA, 19 nt, Artificial Sequence
  Description of Artificial Sequence: Synthetic oligonucleotide
  Antisense strand to SEQ ID NO: 2426856
agauuuggacauuuacagu

SEQ ID NO: 2426858 - RNA, 19 nt, Artificial Sequence
  Description of Artificial Sequence: Synthetic oligonucleotide
  Sense strand starting at position 339 of SEQ ID NO: 1886797
uugauucucaaguggaagu

SEQ ID NO: 2426859 - RNA, 19 nt, Artificial Sequence
  Description of Artificial Sequence: Synthetic oligonucleotide
  Antisense strand to SEQ ID NO: 2426858
acuuccacuugagaaucaa

SEQ ID NO: 2426860 - RNA, 19 nt, Artificial Sequence
  Description of Artificial Sequence: Synthetic oligonucleotide
  Sense strand starting at position 340 of SEQ ID NO: 1886797
ugauucucaaguggaaguu

SEQ ID NO: 2426861 - RNA, 19 nt, Artificial Sequence
  Description of Artificial Sequence: Synthetic oligonucleotide
  Antisense strand to SEQ ID NO: 2426860
aacuuccacuugagaauca

SEQ ID NO: 2426862 - RNA, 19 nt, Artificial Sequence
  Description of Artificial Sequence: Synthetic oligonucleotide
  Sense strand starting at position 370 of SEQ ID NO: 1886797
auucuuucuggaggacagu

SEQ ID NO: 2426863 - RNA, 19 nt, Artificial Sequence
  Description of Artificial Sequence: Synthetic oligonucleotide
  Antisense strand to SEQ ID NO: 2426862
acuguccuccagaaagaau

SEQ ID NO: 2426864 - RNA, 19 nt, Artificial Sequence
  Description of Artificial Sequence: Synthetic oligonucleotide
  Sense strand starting at position 461 of SEQ ID NO: 1886797
aauaaagguguacguagaa

SEQ ID NO: 2426865 - RNA, 19 nt, Artificial Sequence
  Description of Artificial Sequence: Synthetic oligonucleotide
  Antisense strand to SEQ ID NO: 2426864
uucuacguacaccuuuauu

SEQ ID NO: 2426866 - RNA, 19 nt, Artificial Sequence
  Description of Artificial Sequence: Synthetic oligonucleotide
  Sense strand starting at position 474 of SEQ ID NO: 1886797
guagaagcauaucugcaaa

SEQ ID NO: 2426867 - RNA, 19 nt, Artificial Sequence
  Description of Artificial Sequence: Synthetic oligonucleotide
  Antisense strand to SEQ ID NO: 2426866
uuugcagauaugcuucuac

SEQ ID NO: 2426868 - RNA, 19 nt, Artificial Sequence
  Description of Artificial Sequence: Synthetic oligonucleotide
  Sense strand starting at position 476 of SEQ ID NO: 1886797
agaagcauaucugcaaaua

SEQ ID NO: 2426869 - RNA, 19 nt, Artificial Sequence
  Description of Artificial Sequence: Synthetic oligonucleotide
  Antisense strand to SEQ ID NO: 2426868
uauuugcagauaugcuucu

SEQ ID NO: 2426870 - RNA, 19 nt, Artificial Sequence
  Description of Artificial Sequence: Synthetic oligonucleotide
  Sense strand starting at position 904 of SEQ ID NO: 1886797
gcauauaacugucugaaca

SEQ ID NO: 2426871 - RNA, 19 nt, Artificial Sequence
  Description of Artificial Sequence: Synthetic oligonucleotide
  Antisense strand to SEQ ID NO: 2426870
uguucagacaguuauaugc

SEQ ID NO: 2426872 - RNA, 19 nt, Artificial Sequence
  Description of Artificial Sequence: Synthetic oligonucleotide
  Sense strand starting at position 956 of SEQ ID NO: 1886797
guacuuauuccuggauggu

SEQ ID NO: 2426873 - RNA, 19 nt, Artificial Sequence
  Description of Artificial Sequence: Synthetic oligonucleotide
  Antisense strand to SEQ ID NO: 2426872
accauccaggaauaaguac

SEQ ID NO: 2426874 - RNA, 19 nt, Artificial Sequence
  Description of Artificial Sequence: Synthetic oligonucleotide
  Sense strand starting at position 957 of SEQ ID NO: 1886797
uacuuauuccuggaugguc

SEQ ID NO: 2426875 - RNA, 19 nt, Artificial Sequence
  Description of Artificial Sequence: Synthetic oligonucleotide
  Antisense strand to SEQ ID NO: 2426874
gaccauccaggaauaagua

SEQ ID NO: 2426876 - RNA, 19 nt, Artificial Sequence
  Description of Artificial Sequence: Synthetic oligonucleotide
  Sense strand starting at position 1057 of SEQ ID NO: 1886797
cuugucauagggcauuaaa

SEQ ID NO: 2426877 - RNA, 19 nt, Artificial Sequence
  Description of Artificial Sequence: Synthetic oligonucleotide
  Antisense strand to SEQ ID NO: 2426876
uuuaaugcccuaugacaag

SEQ ID NO: 2426878 - RNA, 19 nt, Artificial Sequence
  Description of Artificial Sequence: Synthetic oligonucleotide
  Sense strand starting at position 1111 of SEQ ID NO: 1886797
gugggaaacacguauaugu

SEQ ID NO: 2426879 - RNA, 19 nt, Artificial Sequence
  Description of Artificial Sequence: Synthetic oligonucleotide
  Antisense strand to SEQ ID NO: 2426878
acauauacguguuucccac

SEQ ID NO: 2426880 - RNA, 19 nt, Artificial Sequence
  Description of Artificial Sequence: Synthetic oligonucleotide
  Sense strand starting at position 1113 of SEQ ID NO: 1886797
gggaaacacguauauguca

SEQ ID NO: 2426881 - RNA, 19 nt, Artificial Sequence
  Description of Artificial Sequence: Synthetic oligonucleotide
  Antisense strand to SEQ ID NO: 2426880
ugacauauacguguuuccc

SEQ ID NO: 2426882 - RNA, 19 nt, Artificial Sequence
  Description of Artificial Sequence: Synthetic oligonucleotide
  Sense strand starting at position 1122 of SEQ ID NO: 1886797
guauaugucagguagugau

SEQ ID NO: 2426883 - RNA, 19 nt, Artificial Sequence
  Description of Artificial Sequence: Synthetic oligonucleotide
  Antisense strand to SEQ ID NO: 2426882
aucacuaccugacauauac

SEQ ID NO: 2426884 - RNA, 19 nt, Artificial Sequence
  Description of Artificial Sequence: Synthetic oligonucleotide
  Sense strand starting at position 1126 of SEQ ID NO: 1886797
augucagguagugauaaac

SEQ ID NO: 2426885 - RNA, 19 nt, Artificial Sequence
  Description of Artificial Sequence: Synthetic oligonucleotide
  Antisense strand to SEQ ID NO: 2426884
guuuaucacuaccugacau

SEQ ID NO: 2426886 - RNA, 19 nt, Artificial Sequence
  Description of Artificial Sequence: Synthetic oligonucleotide
  Sense strand starting at position 1210 of SEQ ID NO: 1886797
ggugacauaugagcagaau

SEQ ID NO: 2426887 - RNA, 19 nt, Artificial Sequence
  Description of Artificial Sequence: Synthetic oligonucleotide
  Antisense strand to SEQ ID NO: 2426886
auucugcucauaugucacc

SEQ ID NO: 2426888 - RNA, 19 nt, Artificial Sequence
  Description of Artificial Sequence: Synthetic oligonucleotide
  Sense strand starting at position 1245 of SEQ ID NO: 1886797
uggcuaucacgagaaagcu

SEQ ID NO: 2426889 - RNA, 19 nt, Artificial Sequence
  Description of Artificial Sequence: Synthetic oligonucleotide
  Antisense strand to SEQ ID NO: 2426888
agcuuucucgugauagcca

SEQ ID NO: 2426890 - RNA, 19 nt, Artificial Sequence
  Description of Artificial Sequence: Synthetic oligonucleotide
  Sense strand starting at position 1254 of SEQ ID NO: 1886797
cgagaaagcuaucuuuaug

SEQ ID NO: 2426891 - RNA, 19 nt, Artificial Sequence
  Description of Artificial Sequence: Synthetic oligonucleotide
  Antisense strand to SEQ ID NO: 2426890
cauaaagauagcuuucucg

SEQ ID NO: 2426892 - RNA, 19 nt, Artificial Sequence
  Description of Artificial Sequence: Synthetic oligonucleotide
  Sense strand starting at position 1257 of SEQ ID NO: 1886797
gaaagcuaucuuuaugguu

SEQ ID NO: 2426893 - RNA, 19 nt, Artificial Sequence
  Description of Artificial Sequence: Synthetic oligonucleotide
  Antisense strand to SEQ ID NO: 2426892
aaccauaaagauagcuuuc

SEQ ID NO: 2426894 - RNA, 19 nt, Artificial Sequence
  Description of Artificial Sequence: Synthetic oligonucleotide
  Sense strand starting at position 1651 of SEQ ID NO: 1886797
gacgccucuccagggaauu

SEQ ID NO: 2426895 - RNA, 19 nt, Artificial Sequence
  Description of Artificial Sequence: Synthetic oligonucleotide
  Antisense strand to SEQ ID NO: 2426894
aauucccuggagaggcguc

SEQ ID NO: 2426896 - RNA, 19 nt, Artificial Sequence
  Description of Artificial Sequence: Synthetic oligonucleotide
  Sense strand starting at position 1903 of SEQ ID NO: 1886797
gucgcaaggaaaugugaaa

SEQ ID NO: 2426897 - RNA, 19 nt, Artificial Sequence
  Description of Artificial Sequence: Synthetic oligonucleotide
  Antisense strand to SEQ ID NO: 2426896
uuucacauuuccuugcgac

SEQ ID NO: 2426898 - RNA, 19 nt, Artificial Sequence
  Description of Artificial Sequence: Synthetic oligonucleotide
  Sense strand starting at position 1947 of SEQ ID NO: 1886797
gguaaaucuagaugcagag

SEQ ID NO: 2426899 - RNA, 19 nt, Artificial Sequence
  Description of Artificial Sequence: Synthetic oligonucleotide
  Antisense strand to SEQ ID NO: 2426898
cucugcaucuagauuuacc

SEQ ID NO: 2426900 - RNA, 19 nt, Artificial Sequence
  Description of Artificial Sequence: Synthetic oligonucleotide
  Sense strand starting at position 2581 of SEQ ID NO: 1886797
gggucuugugaggagcaga

SEQ ID NO: 2426901 - RNA, 19 nt, Artificial Sequence
  Description of Artificial Sequence: Synthetic oligonucleotide
  Antisense strand to SEQ ID NO: 2426900
ucugcuccucacaagaccc

SEQ ID NO: 2426902 - RNA, 19 nt, Artificial Sequence
  Description of Artificial Sequence: Synthetic oligonucleotide
  Sense strand starting at position 2601 of SEQ ID NO: 1886797
uaaauaaagugcuuaggau

SEQ ID NO: 2426903 - RNA, 19 nt, Artificial Sequence
  Description of Artificial Sequence: Synthetic oligonucleotide
  Antisense strand to SEQ ID NO: 2426902
auccuaagcacuuuauuua

SEQ ID NO: 2426904 - RNA, 19 nt, Artificial Sequence
  Description of Artificial Sequence: Synthetic oligonucleotide
  Sense strand starting at position 2608 of SEQ ID NO: 1886797
agugcuuaggauggacuaa

SEQ ID NO: 2426905 - RNA, 19 nt, Artificial Sequence
  Description of Artificial Sequence: Synthetic oligonucleotide
  Antisense strand to SEQ ID NO: 2426904
uuaguccauccuaagcacu

SEQ ID NO: 2426906 - RNA, 19 nt, Artificial Sequence
  Description of Artificial Sequence: Synthetic oligonucleotide
  Sense strand starting at position 2622 of SEQ ID NO: 1886797
acuaaagaauuggaaacaa

SEQ ID NO: 2426907 - RNA, 19 nt, Artificial Sequence
  Description of Artificial Sequence: Synthetic oligonucleotide
  Antisense strand to SEQ ID NO: 2426906
uuguuuccaauucuuuagu

SEQ ID NO: 2426908 - RNA, 19 nt, Artificial Sequence
  Description of Artificial Sequence: Synthetic oligonucleotide
  Sense strand starting at position 2645 of SEQ ID NO: 1886797
aaugcaucacucgaguauu

SEQ ID NO: 2426909 - RNA, 19 nt, Artificial Sequence
  Description of Artificial Sequence: Synthetic oligonucleotide
  Antisense strand to SEQ ID NO: 2426908
aauacucgagugaugcauu

SEQ ID NO: 2426910 - RNA, 19 nt, Artificial Sequence
  Description of Artificial Sequence: Synthetic oligonucleotide
  Sense strand starting at position 2648 of SEQ ID NO: 1886797
gcaucacucgaguauugau

SEQ ID NO: 2426911 - RNA, 19 nt, Artificial Sequence
  Description of Artificial Sequence: Synthetic oligonucleotide
  Antisense strand to SEQ ID NO: 2426910
aucaauacucgagugaugc

SEQ ID NO: 2426912 - RNA, 19 nt, Artificial Sequence
  Description of Artificial Sequence: Synthetic oligonucleotide
  Sense strand starting at position 2804 of SEQ ID NO: 1886797
aaaggucugggacgucauu

SEQ ID NO: 2426913 - RNA, 19 nt, Artificial Sequence
  Description of Artificial Sequence: Synthetic oligonucleotide
  Antisense strand to SEQ ID NO: 2426912
aaugacgucccagaccuuu

SEQ ID NO: 2426914 - RNA, 19 nt, Artificial Sequence
  Description of Artificial Sequence: Synthetic oligonucleotide
  Sense strand starting at position 3323 of SEQ ID NO: 1886797
caauguaagguauaaaugu

SEQ ID NO: 2426915 - RNA, 19 nt, Artificial Sequence
  Description of Artificial Sequence: Synthetic oligonucleotide
  Antisense strand to SEQ ID NO: 2426914
acauuuauaccuuacauug

SEQ ID NO: 2426916 - RNA, 19 nt, Artificial Sequence
  Description of Artificial Sequence: Synthetic oligonucleotide
  Sense strand starting at position 3354 of SEQ ID NO: 1886797
uauguaccuguggauaaau

SEQ ID NO: 2426917 - RNA, 19 nt, Artificial Sequence
  Description of Artificial Sequence: Synthetic oligonucleotide
  Antisense strand to SEQ ID NO: 2426916
auuuauccacagguacaua

SEQ ID NO: 2426918 - RNA, 19 nt, Artificial Sequence
  Description of Artificial Sequence: Synthetic oligonucleotide
  Sense strand starting at position 3363 of SEQ ID NO: 1886797
guggauaaauggcuuugga

SEQ ID NO: 2426919 - RNA, 19 nt, Artificial Sequence
  Description of Artificial Sequence: Synthetic oligonucleotide
  Antisense strand to SEQ ID NO: 2426918
uccaaagccauuuauccac

SEQ ID NO: 2426920 - RNA, 19 nt, Artificial Sequence
  Description of Artificial Sequence: Synthetic oligonucleotide
  Sense strand starting at position 3467 of SEQ ID NO: 1886797
gugcacagacgauauauca

SEQ ID NO: 2426921 - RNA, 19 nt, Artificial Sequence
  Description of Artificial Sequence: Synthetic oligonucleotide
  Antisense strand to SEQ ID NO: 2426920
ugauauaucgucugugcac

SEQ ID NO: 2426922 - RNA, 19 nt, Artificial Sequence
  Description of Artificial Sequence: Synthetic oligonucleotide
  Sense strand starting at position 3865 of SEQ ID NO: 1886797
gauguauaaugugcaauac

SEQ ID NO: 2426923 - RNA, 19 nt, Artificial Sequence
  Description of Artificial Sequence: Synthetic oligonucleotide
  Antisense strand to SEQ ID NO: 2426922
guauugcacauuauacauc

SEQ ID NO: 2426924 - RNA, 19 nt, Artificial Sequence
  Description of Artificial Sequence: Synthetic oligonucleotide
  Sense strand starting at position 3866 of SEQ ID NO: 1886797
auguauaaugugcaauaca

SEQ ID NO: 2426925 - RNA, 19 nt, Artificial Sequence
  Description of Artificial Sequence: Synthetic oligonucleotide
  Antisense strand to SEQ ID NO: 2426924
uguauugcacauuauacau

SEQ ID NO: 2426926 - RNA, 19 nt, Artificial Sequence
  Description of Artificial Sequence: Synthetic oligonucleotide
  Sense strand starting at position 3898 of SEQ ID NO: 1886797
guggguauagcucaaugaa

SEQ ID NO: 2426927 - RNA, 19 nt, Artificial Sequence
  Description of Artificial Sequence: Synthetic oligonucleotide
  Antisense strand to SEQ ID NO: 2426926
uucauugagcuauacccac

SEQ ID NO: 2426928 - RNA, 19 nt, Artificial Sequence
  Description of Artificial Sequence: Synthetic oligonucleotide
  Sense strand starting at position 3901 of SEQ ID NO: 1886797
gguauagcucaaugaaauu

SEQ ID NO: 2426929 - RNA, 19 nt, Artificial Sequence
  Description of Artificial Sequence: Synthetic oligonucleotide
  Antisense strand to SEQ ID NO: 2426928
aauuucauugagcuauacc

SEQ ID NO: 2426930 - RNA, 19 nt, Artificial Sequence
  Description of Artificial Sequence: Synthetic oligonucleotide
  Sense strand starting at position 11 of SEQ ID NO: 1886798
gguaaugcuguuggaauac

SEQ ID NO: 2426931 - RNA, 19 nt, Artificial Sequence
  Description of Artificial Sequence: Synthetic oligonucleotide
  Antisense strand to SEQ ID NO: 2426930
guauuccaacagcauuacc

SEQ ID NO: 2426932 - RNA, 19 nt, Artificial Sequence
  Description of Artificial Sequence: Synthetic oligonucleotide
  Sense strand starting at position 30 of SEQ ID NO: 1886798
agacauaucuggcucaagu

SEQ ID NO: 2426933 - RNA, 19 nt, Artificial Sequence
  Description of Artificial Sequence: Synthetic oligonucleotide
  Antisense strand to SEQ ID NO: 2426932
acuugagccagauaugucu

SEQ ID NO: 2426934 - RNA, 19 nt, Artificial Sequence
  Description of Artificial Sequence: Synthetic oligonucleotide
  Sense strand starting at position 62 of SEQ ID NO: 1886798
acgguaucauuugagacau

SEQ ID NO: 2426935 - RNA, 19 nt, Artificial Sequence
  Description of Artificial Sequence: Synthetic oligonucleotide
  Antisense strand to SEQ ID NO: 2426934
augucucaaaugauaccgu

SEQ ID NO: 2426936 - RNA, 19 nt, Artificial Sequence
  Description of Artificial Sequence: Synthetic oligonucleotide
  Sense strand starting at position 64 of SEQ ID NO: 1886798
gguaucauuugagacauuc

SEQ ID NO: 2426937 - RNA, 19 nt, Artificial Sequence
  Description of Artificial Sequence: Synthetic oligonucleotide
  Antisense strand to SEQ ID NO: 2426936
gaaugucucaaaugauacc

SEQ ID NO: 2426938 - RNA, 19 nt, Artificial Sequence
  Description of Artificial Sequence: Synthetic oligonucleotide
  Sense strand starting at position 310 of SEQ ID NO: 1886798
augugucuccaagggauga

SEQ ID NO: 2426939 - RNA, 19 nt, Artificial Sequence
  Description of Artificial Sequence: Synthetic oligonucleotide
  Antisense strand to SEQ ID NO: 2426938
ucaucccuuggagacacau

SEQ ID NO: 2426940 - RNA, 19 nt, Artificial Sequence
  Description of Artificial Sequence: Synthetic oligonucleotide
  Sense strand starting at position 311 of SEQ ID NO: 1886798
ugugucuccaagggaugaa

SEQ ID NO: 2426941 - RNA, 19 nt, Artificial Sequence
  Description of Artificial Sequence: Synthetic oligonucleotide
  Antisense strand to SEQ ID NO: 2426940
uucaucccuuggagacaca

SEQ ID NO: 2426942 - RNA, 19 nt, Artificial Sequence
  Description of Artificial Sequence: Synthetic oligonucleotide
  Sense strand starting at position 385 of SEQ ID NO: 1886798
aagggugucccaggagauu

SEQ ID NO: 2426943 - RNA, 19 nt, Artificial Sequence
  Description of Artificial Sequence: Synthetic oligonucleotide
  Antisense strand to SEQ ID NO: 2426942
aaucuccugggacacccuu

SEQ ID NO: 2426944 - RNA, 19 nt, Artificial Sequence
  Description of Artificial Sequence: Synthetic oligonucleotide
  Sense strand starting at position 645 of SEQ ID NO: 1886798
cauucuuuccgauaacgug

SEQ ID NO: 2426945 - RNA, 19 nt, Artificial Sequence
  Description of Artificial Sequence: Synthetic oligonucleotide
  Antisense strand to SEQ ID NO: 2426944
cacguuaucggaaagaaug

SEQ ID NO: 2426946 - RNA, 19 nt, Artificial Sequence
  Description of Artificial Sequence: Synthetic oligonucleotide
  Sense strand starting at position 743 of SEQ ID NO: 1886798
uuccucucacgugaaaugu

SEQ ID NO: 2426947 - RNA, 19 nt, Artificial Sequence
  Description of Artificial Sequence: Synthetic oligonucleotide
  Antisense strand to SEQ ID NO: 2426946
acauuucacgugagaggaa

SEQ ID NO: 2426948 - RNA, 19 nt, Artificial Sequence
  Description of Artificial Sequence: Synthetic oligonucleotide
  Sense strand starting at position 796 of SEQ ID NO: 1886798
auccacugcucugugaaau

SEQ ID NO: 2426949 - RNA, 19 nt, Artificial Sequence
  Description of Artificial Sequence: Synthetic oligonucleotide
  Antisense strand to SEQ ID NO: 2426948
auuucacagagcaguggau

SEQ ID NO: 2426950 - RNA, 19 nt, Artificial Sequence
  Description of Artificial Sequence: Synthetic oligonucleotide
  Sense strand starting at position 861 of SEQ ID NO: 1886798
aauaguuaagaaugugaac

SEQ ID NO: 2426951 - RNA, 19 nt, Artificial Sequence
  Description of Artificial Sequence: Synthetic oligonucleotide
  Antisense strand to SEQ ID NO: 2426950
guucacauucuuaacuauu

SEQ ID NO: 2426952 - RNA, 19 nt, Artificial Sequence
  Description of Artificial Sequence: Synthetic oligonucleotide
  Sense strand starting at position 889 of SEQ ID NO: 1886798
gaaguuggccuuuggaaau

SEQ ID NO: 2426953 - RNA, 19 nt, Artificial Sequence
  Description of Artificial Sequence: Synthetic oligonucleotide
  Antisense strand to SEQ ID NO: 2426952
auuuccaaaggccaacuuc

SEQ ID NO: 2426954 - RNA, 19 nt, Artificial Sequence
  Description of Artificial Sequence: Synthetic oligonucleotide
  Sense strand starting at position 988 of SEQ ID NO: 1886798
gcgugcuacacguuaggaa

SEQ ID NO: 2426955 - RNA, 19 nt, Artificial Sequence
  Description of Artificial Sequence: Synthetic oligonucleotide
  Antisense strand to SEQ ID NO: 2426954
uuccuaacguguagcacgc

SEQ ID NO: 2426956 - RNA, 19 nt, Artificial Sequence
  Description of Artificial Sequence: Synthetic oligonucleotide
  Sense strand starting at position 1038 of SEQ ID NO: 1886798
guguuaagaugauuaauga

SEQ ID NO: 2426957 - RNA, 19 nt, Artificial Sequence
  Description of Artificial Sequence: Synthetic oligonucleotide
  Antisense strand to SEQ ID NO: 2426956
ucauuaaucaucuuaacac

SEQ ID NO: 2426958 - RNA, 19 nt, Artificial Sequence
  Description of Artificial Sequence: Synthetic oligonucleotide
  Sense strand starting at position 1048 of SEQ ID NO: 1886798
gauuaaugagcaggcgauu

SEQ ID NO: 2426959 - RNA, 19 nt, Artificial Sequence
  Description of Artificial Sequence: Synthetic oligonucleotide
  Antisense strand to SEQ ID NO: 2426958
aaucgccugcucauuaauc

SEQ ID NO: 2426960 - RNA, 19 nt, Artificial Sequence
  Description of Artificial Sequence: Synthetic oligonucleotide
  Sense strand starting at position 1051 of SEQ ID NO: 1886798
uaaugagcaggcgauuaua

SEQ ID NO: 2426961 - RNA, 19 nt, Artificial Sequence
  Description of Artificial Sequence: Synthetic oligonucleotide
  Antisense strand to SEQ ID NO: 2426960
uauaaucgccugcucauua

SEQ ID NO: 2426962 - RNA, 19 nt, Artificial Sequence
  Description of Artificial Sequence: Synthetic oligonucleotide
  Sense strand starting at position 1246 of SEQ ID NO: 1886798
cgguuaauuuggucugcuu

SEQ ID NO: 2426963 - RNA, 19 nt, Artificial Sequence
  Description of Artificial Sequence: Synthetic oligonucleotide
  Antisense strand to SEQ ID NO: 2426962
aagcagaccaaauuaaccg

SEQ ID NO: 2426964 - RNA, 19 nt, Artificial Sequence
  Description of Artificial Sequence: Synthetic oligonucleotide
  Sense strand starting at position 1353 of SEQ ID NO: 1886798
aucgcuauuugcucaaauu

SEQ ID NO: 2426965 - RNA, 19 nt, Artificial Sequence
  Description of Artificial Sequence: Synthetic oligonucleotide
  Antisense strand to SEQ ID NO: 2426964
aauuugagcaaauagcgau

SEQ ID NO: 2426966 - RNA, 19 nt, Artificial Sequence
  Description of Artificial Sequence: Synthetic oligonucleotide
  Sense strand starting at position 1354 of SEQ ID NO: 1886798
ucgcuauuugcucaaauuc

SEQ ID NO: 2426967 - RNA, 19 nt, Artificial Sequence
  Description of Artificial Sequence: Synthetic oligonucleotide
  Antisense strand to SEQ ID NO: 2426966
gaauuugagcaaauagcga

SEQ ID NO: 2426968 - RNA, 19 nt, Artificial Sequence
  Description of Artificial Sequence: Synthetic oligonucleotide
  Sense strand starting at position 3053 of SEQ ID NO: 1886798
gccagaaugcccuauuccu

SEQ ID NO: 2426969 - RNA, 19 nt, Artificial Sequence
  Description of Artificial Sequence: Synthetic oligonucleotide
  Antisense strand to SEQ ID NO: 2426968
aggaauagggcauucuggc

SEQ ID NO: 2426970 - RNA, 19 nt, Artificial Sequence
  Description of Artificial Sequence: Synthetic oligonucleotide
  Sense strand starting at position 3112 of SEQ ID NO: 1886798
cguagucuuccggcugagu

SEQ ID NO: 2426971 - RNA, 19 nt, Artificial Sequence
  Description of Artificial Sequence: Synthetic oligonucleotide
  Antisense strand to SEQ ID NO: 2426970
acucagccggaagacuacg

SEQ ID NO: 2426972 - RNA, 19 nt, Artificial Sequence
  Description of Artificial Sequence: Synthetic oligonucleotide
  Sense strand starting at position 3115 of SEQ ID NO: 1886798
agucuuccggcugaguaga

SEQ ID NO: 2426973 - RNA, 19 nt, Artificial Sequence
  Description of Artificial Sequence: Synthetic oligonucleotide
  Antisense strand to SEQ ID NO: 2426972
ucuacucagccggaagacu

SEQ ID NO: 2426974 - RNA, 19 nt, Artificial Sequence
  Description of Artificial Sequence: Synthetic oligonucleotide
  Sense strand starting at position 3125 of SEQ ID NO: 1886798
cugaguagauucuccuagu

SEQ ID NO: 2426975 - RNA, 19 nt, Artificial Sequence
  Description of Artificial Sequence: Synthetic oligonucleotide
  Antisense strand to SEQ ID NO: 2426974
acuaggagaaucuacucag

SEQ ID NO: 2426976 - RNA, 19 nt, Artificial Sequence
  Description of Artificial Sequence: Synthetic oligonucleotide
  Sense strand starting at position 3126 of SEQ ID NO: 1886798
ugaguagauucuccuaguc

SEQ ID NO: 2426977 - RNA, 19 nt, Artificial Sequence
  Description of Artificial Sequence: Synthetic oligonucleotide
  Antisense strand to SEQ ID NO: 2426976
gacuaggagaaucuacuca

SEQ ID NO: 2426978 - RNA, 19 nt, Artificial Sequence
  Description of Artificial Sequence: Synthetic oligonucleotide
  Sense strand starting at position 3141 of SEQ ID NO: 1886798
agucuucuggcugaguaga

SEQ ID NO: 2426979 - RNA, 19 nt, Artificial Sequence
  Description of Artificial Sequence: Synthetic oligonucleotide
  Antisense strand to SEQ ID NO: 2426978
ucuacucagccagaagacu

SEQ ID NO: 2426980 - RNA, 19 nt, Artificial Sequence
  Description of Artificial Sequence: Synthetic oligonucleotide
  Sense strand starting at position 3167 of SEQ ID NO: 1886798
agaggaggugggugucaaa

SEQ ID NO: 2426981 - RNA, 19 nt, Artificial Sequence
  Description of Artificial Sequence: Synthetic oligonucleotide
  Antisense strand to SEQ ID NO: 2426980
uuugacacccaccuccucu

SEQ ID NO: 2426982 - RNA, 19 nt, Artificial Sequence
  Description of Artificial Sequence: Synthetic oligonucleotide
  Sense strand starting at position 3204 of SEQ ID NO: 1886798
ccgccaucuagcuugguua

SEQ ID NO: 2426983 - RNA, 19 nt, Artificial Sequence
  Description of Artificial Sequence: Synthetic oligonucleotide
  Antisense strand to SEQ ID NO: 2426982
uaaccaagcuagauggcgg

SEQ ID NO: 2426984 - RNA, 19 nt, Artificial Sequence
  Description of Artificial Sequence: Synthetic oligonucleotide
  Sense strand starting at position 3207 of SEQ ID NO: 1886798
ccaucuagcuugguuaaac

SEQ ID NO: 2426985 - RNA, 19 nt, Artificial Sequence
  Description of Artificial Sequence: Synthetic oligonucleotide
  Antisense strand to SEQ ID NO: 2426984
guuuaaccaagcuagaugg

SEQ ID NO: 2426986 - RNA, 19 nt, Artificial Sequence
  Description of Artificial Sequence: Synthetic oligonucleotide
  Sense strand starting at position 3261 of SEQ ID NO: 1886798
cagugagacguguggaaca

SEQ ID NO: 2426987 - RNA, 19 nt, Artificial Sequence
  Description of Artificial Sequence: Synthetic oligonucleotide
  Antisense strand to SEQ ID NO: 2426986
uguuccacacgucucacug

SEQ ID NO: 2426988 - RNA, 19 nt, Artificial Sequence
  Description of Artificial Sequence: Synthetic oligonucleotide
  Sense strand starting at position 3263 of SEQ ID NO: 1886798
gugagacguguggaacaaa

SEQ ID NO: 2426989 - RNA, 19 nt, Artificial Sequence
  Description of Artificial Sequence: Synthetic oligonucleotide
  Antisense strand to SEQ ID NO: 2426988
uuuguuccacacgucucac

SEQ ID NO: 2426990 - RNA, 19 nt, Artificial Sequence
  Description of Artificial Sequence: Synthetic oligonucleotide
  Sense strand starting at position 3298 of SEQ ID NO: 1886798
gcagaaacaucccugauug

SEQ ID NO: 2426991 - RNA, 19 nt, Artificial Sequence
  Description of Artificial Sequence: Synthetic oligonucleotide
  Antisense strand to SEQ ID NO: 2426990
caaucagggauguuucugc

SEQ ID NO: 2426992 - RNA, 19 nt, Artificial Sequence
  Description of Artificial Sequence: Synthetic oligonucleotide
  Sense strand starting at position 3300 of SEQ ID NO: 1886798
agaaacaucccugauugcu

SEQ ID NO: 2426993 - RNA, 19 nt, Artificial Sequence
  Description of Artificial Sequence: Synthetic oligonucleotide
  Antisense strand to SEQ ID NO: 2426992
agcaaucagggauguuucu

SEQ ID NO: 2426994 - RNA, 19 nt, Artificial Sequence
  Description of Artificial Sequence: Synthetic oligonucleotide
  Sense strand starting at position 3657 of SEQ ID NO: 1886798
ucccuaggccuuugaaauc

SEQ ID NO: 2426995 - RNA, 19 nt, Artificial Sequence
  Description of Artificial Sequence: Synthetic oligonucleotide
  Antisense strand to SEQ ID NO: 2426994
gauuucaaaggccuaggga

SEQ ID NO: 2426996 - RNA, 19 nt, Artificial Sequence
  Description of Artificial Sequence: Synthetic oligonucleotide
  Sense strand starting at position 3666 of SEQ ID NO: 1886798
cuuugaaauccuggagauu

SEQ ID NO: 2426997 - RNA, 19 nt, Artificial Sequence
  Description of Artificial Sequence: Synthetic oligonucleotide
  Antisense strand to SEQ ID NO: 2426996
aaucuccaggauuucaaag

SEQ ID NO: 2426998 - RNA, 19 nt, Artificial Sequence
  Description of Artificial Sequence: Synthetic oligonucleotide
  Sense strand starting at position 3716 of SEQ ID NO: 1886798
ugauucucauccuucuagu

SEQ ID NO: 2426999 - RNA, 19 nt, Artificial Sequence
  Description of Artificial Sequence: Synthetic oligonucleotide
  Antisense strand to SEQ ID NO: 2426998
acuagaaggaugagaauca

SEQ ID NO: 2427000 - RNA, 19 nt, Artificial Sequence
  Description of Artificial Sequence: Synthetic oligonucleotide
  Sense strand starting at position 3775 of SEQ ID NO: 1886798
cugaaaugucuuggaaaca

SEQ ID NO: 2427001 - RNA, 19 nt, Artificial Sequence
  Description of Artificial Sequence: Synthetic oligonucleotide
  Antisense strand to SEQ ID NO: 2427000
uguuuccaagacauuucag

SEQ ID NO: 2427002 - RNA, 19 nt, Artificial Sequence
  Description of Artificial Sequence: Synthetic oligonucleotide
  Sense strand starting at position 3816 of SEQ ID NO: 1886798
gcugaaggcugaguuuaag

SEQ ID NO: 2427003 - RNA, 19 nt, Artificial Sequence
  Description of Artificial Sequence: Synthetic oligonucleotide
  Antisense strand to SEQ ID NO: 2427002
cuuaaacucagccuucagc

SEQ ID NO: 2427004 - RNA, 19 nt, Artificial Sequence
  Description of Artificial Sequence: Synthetic oligonucleotide
  Sense strand starting at position 3898 of SEQ ID NO: 1886798
gacucaaugugucugcaaa

SEQ ID NO: 2427005 - RNA, 19 nt, Artificial Sequence
  Description of Artificial Sequence: Synthetic oligonucleotide
  Antisense strand to SEQ ID NO: 2427004
uuugcagacacauugaguc

SEQ ID NO: 2427006 - RNA, 19 nt, Artificial Sequence
  Description of Artificial Sequence: Synthetic oligonucleotide
  Sense strand starting at position 3936 of SEQ ID NO: 1886798
guauuuguaagcuguugau

SEQ ID NO: 2427007 - RNA, 19 nt, Artificial Sequence
  Description of Artificial Sequence: Synthetic oligonucleotide
  Antisense strand to SEQ ID NO: 2427006
aucaacagcuuacaaauac

SEQ ID NO: 2427008 - RNA, 19 nt, Artificial Sequence
  Description of Artificial Sequence: Synthetic oligonucleotide
  Sense strand starting at position 3940 of SEQ ID NO: 1886798
uuguaagcuguugaugauu

SEQ ID NO: 2427009 - RNA, 19 nt, Artificial Sequence
  Description of Artificial Sequence: Synthetic oligonucleotide
  Antisense strand to SEQ ID NO: 2427008
aaucaucaacagcuuacaa

SEQ ID NO: 2427010 - RNA, 19 nt, Artificial Sequence
  Description of Artificial Sequence: Synthetic oligonucleotide
  Sense strand starting at position 119 of SEQ ID NO: 1886800
gccugaacgugcucugaac

SEQ ID NO: 2427011 - RNA, 19 nt, Artificial Sequence
  Description of Artificial Sequence: Synthetic oligonucleotide
  Antisense strand to SEQ ID NO: 2427010
guucagagcacguucaggc

SEQ ID NO: 2427012 - RNA, 19 nt, Artificial Sequence
  Description of Artificial Sequence: Synthetic oligonucleotide
  Sense strand starting at position 474 of SEQ ID NO: 1886800
aguguuagcagcuggcaaa

SEQ ID NO: 2427013 - RNA, 19 nt, Artificial Sequence
  Description of Artificial Sequence: Synthetic oligonucleotide
  Antisense strand to SEQ ID NO: 2427012
uuugccagcugcuaacacu

SEQ ID NO: 2427014 - RNA, 19 nt, Artificial Sequence
  Description of Artificial Sequence: Synthetic oligonucleotide
  Sense strand starting at position 775 of SEQ ID NO: 1886800
gcgguuuccugucugccaa

SEQ ID NO: 2427015 - RNA, 19 nt, Artificial Sequence
  Description of Artificial Sequence: Synthetic oligonucleotide
  Antisense strand to SEQ ID NO: 2427014
uuggcagacaggaaaccgc

SEQ ID NO: 2427016 - RNA, 19 nt, Artificial Sequence
  Description of Artificial Sequence: Synthetic oligonucleotide
  Sense strand starting at position 776 of SEQ ID NO: 1886800
cgguuuccugucugccaau

SEQ ID NO: 2427017 - RNA, 19 nt, Artificial Sequence
  Description of Artificial Sequence: Synthetic oligonucleotide
  Antisense strand to SEQ ID NO: 2427016
auuggcagacaggaaaccg

SEQ ID NO: 2427018 - RNA, 19 nt, Artificial Sequence
  Description of Artificial Sequence: Synthetic oligonucleotide
  Sense strand starting at position 777 of SEQ ID NO: 1886800
gguuuccugucugccaauu

SEQ ID NO: 2427019 - RNA, 19 nt, Artificial Sequence
  Description of Artificial Sequence: Synthetic oligonucleotide
  Antisense strand to SEQ ID NO: 2427018
aauuggcagacaggaaacc

SEQ ID NO: 2427020 - RNA, 19 nt, Artificial Sequence
  Description of Artificial Sequence: Synthetic oligonucleotide
  Sense strand starting at position 1700 of SEQ ID NO: 1886800
cgccucuuaccgugggaga

SEQ ID NO: 2427021 - RNA, 19 nt, Artificial Sequence
  Description of Artificial Sequence: Synthetic oligonucleotide
  Antisense strand to SEQ ID NO: 2427020
ucucccacgguaagaggcg

SEQ ID NO: 2427022 - RNA, 19 nt, Artificial Sequence
  Description of Artificial Sequence: Synthetic oligonucleotide
  Sense strand starting at position 2633 of SEQ ID NO: 1886800
gcucauuugugaugcuguu

SEQ ID NO: 2427023 - RNA, 19 nt, Artificial Sequence
  Description of Artificial Sequence: Synthetic oligonucleotide
  Antisense strand to SEQ ID NO: 2427022
aacagcaucacaaaugagc

SEQ ID NO: 2427024 - RNA, 19 nt, Artificial Sequence
  Description of Artificial Sequence: Synthetic oligonucleotide
  Sense strand starting at position 2639 of SEQ ID NO: 1886800
uugugaugcuguuugcagu

SEQ ID NO: 2427025 - RNA, 19 nt, Artificial Sequence
  Description of Artificial Sequence: Synthetic oligonucleotide
  Antisense strand to SEQ ID NO: 2427024
acugcaaacagcaucacaa

SEQ ID NO: 2427026 - RNA, 19 nt, Artificial Sequence
  Description of Artificial Sequence: Synthetic oligonucleotide
  Sense strand starting at position 2646 of SEQ ID NO: 1886800
gcuguuugcagucgucuua

SEQ ID NO: 2427027 - RNA, 19 nt, Artificial Sequence
  Description of Artificial Sequence: Synthetic oligonucleotide
  Antisense strand to SEQ ID NO: 2427026
uaagacgacugcaaacagc

SEQ ID NO: 2427028 - RNA, 19 nt, Artificial Sequence
  Description of Artificial Sequence: Synthetic oligonucleotide
  Sense strand starting at position 2653 of SEQ ID NO: 1886800
gcagucgucuuaggaagga

SEQ ID NO: 2427029 - RNA, 19 nt, Artificial Sequence
  Description of Artificial Sequence: Synthetic oligonucleotide
  Antisense strand to SEQ ID NO: 2427028
uccuuccuaagacgacugc

SEQ ID NO: 2427030 - RNA, 19 nt, Artificial Sequence
  Description of Artificial Sequence: Synthetic oligonucleotide
  Sense strand starting at position 2797 of SEQ ID NO: 1886800
ggagaagccucguuccuga

SEQ ID NO: 2427031 - RNA, 19 nt, Artificial Sequence
  Description of Artificial Sequence: Synthetic oligonucleotide
  Antisense strand to SEQ ID NO: 2427030
ucaggaacgaggcuucucc

SEQ ID NO: 2427032 - RNA, 19 nt, Artificial Sequence
  Description of Artificial Sequence: Synthetic oligonucleotide
  Sense strand starting at position 2869 of SEQ ID NO: 1886800
agaaauccugccuggauua

SEQ ID NO: 2427033 - RNA, 19 nt, Artificial Sequence
  Description of Artificial Sequence: Synthetic oligonucleotide
  Antisense strand to SEQ ID NO: 2427032
uaauccaggcaggauuucu

SEQ ID NO: 2427034 - RNA, 19 nt, Artificial Sequence
  Description of Artificial Sequence: Synthetic oligonucleotide
  Sense strand starting at position 2881 of SEQ ID NO: 1886800
uggauuauauuucgucuuu

SEQ ID NO: 2427035 - RNA, 19 nt, Artificial Sequence
  Description of Artificial Sequence: Synthetic oligonucleotide
  Antisense strand to SEQ ID NO: 2427034
aaagacgaaauauaaucca

SEQ ID NO: 2427036 - RNA, 19 nt, Artificial Sequence
  Description of Artificial Sequence: Synthetic oligonucleotide
  Sense strand starting at position 2882 of SEQ ID NO: 1886800
ggauuauauuucgucuuuc

SEQ ID NO: 2427037 - RNA, 19 nt, Artificial Sequence
  Description of Artificial Sequence: Synthetic oligonucleotide
  Antisense strand to SEQ ID NO: 2427036
gaaagacgaaauauaaucc

SEQ ID NO: 2427038 - RNA, 19 nt, Artificial Sequence
  Description of Artificial Sequence: Synthetic oligonucleotide
  Sense strand starting at position 2893 of SEQ ID NO: 1886800
cgucuuucucucugaggca

SEQ ID NO: 2427039 - RNA, 19 nt, Artificial Sequence
  Description of Artificial Sequence: Synthetic oligonucleotide
  Antisense strand to SEQ ID NO: 2427038
ugccucagagagaaagacg

SEQ ID NO: 2427040 - RNA, 19 nt, Artificial Sequence
  Description of Artificial Sequence: Synthetic oligonucleotide
  Sense strand starting at position 2894 of SEQ ID NO: 1886800
gucuuucucucugaggcau

SEQ ID NO: 2427041 - RNA, 19 nt, Artificial Sequence
  Description of Artificial Sequence: Synthetic oligonucleotide
  Antisense strand to SEQ ID NO: 2427040
augccucagagagaaagac

SEQ ID NO: 2427042 - RNA, 19 nt, Artificial Sequence
  Description of Artificial Sequence: Synthetic oligonucleotide
  Sense strand starting at position 2900 of SEQ ID NO: 1886800
cucucugaggcauagacuu

SEQ ID NO: 2427043 - RNA, 19 nt, Artificial Sequence
  Description of Artificial Sequence: Synthetic oligonucleotide
  Antisense strand to SEQ ID NO: 2427042
aagucuaugccucagagag

SEQ ID NO: 2427044 - RNA, 19 nt, Artificial Sequence
  Description of Artificial Sequence: Synthetic oligonucleotide
  Sense strand starting at position 2930 of SEQ ID NO: 1886800
acuuaacagcuagggauaa

SEQ ID NO: 2427045 - RNA, 19 nt, Artificial Sequence
  Description of Artificial Sequence: Synthetic oligonucleotide
  Antisense strand to SEQ ID NO: 2427044
uuaucccuagcuguuaagu

SEQ ID NO: 2427046 - RNA, 19 nt, Artificial Sequence
  Description of Artificial Sequence: Synthetic oligonucleotide
  Sense strand starting at position 2931 of SEQ ID NO: 1886800
cuuaacagcuagggauaaa

SEQ ID NO: 2427047 - RNA, 19 nt, Artificial Sequence
  Description of Artificial Sequence: Synthetic oligonucleotide
  Antisense strand to SEQ ID NO: 2427046
uuuaucccuagcuguuaag

SEQ ID NO: 2427048 - RNA, 19 nt, Artificial Sequence
  Description of Artificial Sequence: Synthetic oligonucleotide
  Sense strand starting at position 3268 of SEQ ID NO: 1886800
accauucugugguuccaau

SEQ ID NO: 2427049 - RNA, 19 nt, Artificial Sequence
  Description of Artificial Sequence: Synthetic oligonucleotide
  Antisense strand to SEQ ID NO: 2427048
auuggaaccacagaauggu

SEQ ID NO: 2427050 - RNA, 19 nt, Artificial Sequence
  Description of Artificial Sequence: Synthetic oligonucleotide
  Sense strand starting at position 3286 of SEQ ID NO: 1886800
ugaccugugccuugucaga

SEQ ID NO: 2427051 - RNA, 19 nt, Artificial Sequence
  Description of Artificial Sequence: Synthetic oligonucleotide
  Antisense strand to SEQ ID NO: 2427050
ucugacaaggcacagguca

SEQ ID NO: 2427052 - RNA, 19 nt, Artificial Sequence
  Description of Artificial Sequence: Synthetic oligonucleotide
  Sense strand starting at position 3315 of SEQ ID NO: 1886800
agccuugaaagguaacagu

SEQ ID NO: 2427053 - RNA, 19 nt, Artificial Sequence
  Description of Artificial Sequence: Synthetic oligonucleotide
  Antisense strand to SEQ ID NO: 2427052
acuguuaccuuucaaggcu

SEQ ID NO: 2427054 - RNA, 19 nt, Artificial Sequence
  Description of Artificial Sequence: Synthetic oligonucleotide
  Sense strand starting at position 3341 of SEQ ID NO: 1886800
uccugugugcacuggaaau

SEQ ID NO: 2427055 - RNA, 19 nt, Artificial Sequence
  Description of Artificial Sequence: Synthetic oligonucleotide
  Antisense strand to SEQ ID NO: 2427054
auuuccagugcacacagga

SEQ ID NO: 2427056 - RNA, 19 nt, Artificial Sequence
  Description of Artificial Sequence: Synthetic oligonucleotide
  Sense strand starting at position 3365 of SEQ ID NO: 1886800
acucgcagguucugggaaa

SEQ ID NO: 2427057 - RNA, 19 nt, Artificial Sequence
  Description of Artificial Sequence: Synthetic oligonucleotide
  Antisense strand to SEQ ID NO: 2427056
uuucccagaaccugcgagu

SEQ ID NO: 2427058 - RNA, 19 nt, Artificial Sequence
  Description of Artificial Sequence: Synthetic oligonucleotide
  Sense strand starting at position 3383 of SEQ ID NO: 1886800
agggauuucucggaacuua

SEQ ID NO: 2427059 - RNA, 19 nt, Artificial Sequence
  Description of Artificial Sequence: Synthetic oligonucleotide
  Antisense strand to SEQ ID NO: 2427058
uaaguuccgagaaaucccu

SEQ ID NO: 2427060 - RNA, 19 nt, Artificial Sequence
  Description of Artificial Sequence: Synthetic oligonucleotide
  Sense strand starting at position 3394 of SEQ ID NO: 1886800
ggaacuuaaaccgggaagu

SEQ ID NO: 2427061 - RNA, 19 nt, Artificial Sequence
  Description of Artificial Sequence: Synthetic oligonucleotide
  Antisense strand to SEQ ID NO: 2427060
acuucccgguuuaaguucc

SEQ ID NO: 2427062 - RNA, 19 nt, Artificial Sequence
  Description of Artificial Sequence: Synthetic oligonucleotide
  Sense strand starting at position 3477 of SEQ ID NO: 1886800
augaaucacccuugaguug

SEQ ID NO: 2427063 - RNA, 19 nt, Artificial Sequence
  Description of Artificial Sequence: Synthetic oligonucleotide
  Antisense strand to SEQ ID NO: 2427062
caacucaagggugauucau

SEQ ID NO: 2427064 - RNA, 19 nt, Artificial Sequence
  Description of Artificial Sequence: Synthetic oligonucleotide
  Sense strand starting at position 3484 of SEQ ID NO: 1886800
acccuugaguugcacaaga

SEQ ID NO: 2427065 - RNA, 19 nt, Artificial Sequence
  Description of Artificial Sequence: Synthetic oligonucleotide
  Antisense strand to SEQ ID NO: 2427064
ucuugugcaacucaagggu

SEQ ID NO: 2427066 - RNA, 19 nt, Artificial Sequence
  Description of Artificial Sequence: Synthetic oligonucleotide
  Sense strand starting at position 3486 of SEQ ID NO: 1886800
ccuugaguugcacaagaag

SEQ ID NO: 2427067 - RNA, 19 nt, Artificial Sequence
  Description of Artificial Sequence: Synthetic oligonucleotide
  Antisense strand to SEQ ID NO: 2427066
cuucuugugcaacucaagg

SEQ ID NO: 2427068 - RNA, 19 nt, Artificial Sequence
  Description of Artificial Sequence: Synthetic oligonucleotide
  Sense strand starting at position 3580 of SEQ ID NO: 1886800
guuccugugcuggagagaa

SEQ ID NO: 2427069 - RNA, 19 nt, Artificial Sequence
  Description of Artificial Sequence: Synthetic oligonucleotide
  Antisense strand to SEQ ID NO: 2427068
uucucuccagcacaggaac

SEQ ID NO: 2427070 - RNA, 19 nt, Artificial Sequence
  Description of Artificial Sequence: Synthetic oligonucleotide
  Sense strand starting at position 3746 of SEQ ID NO: 1886800
gcucaaugucucugggugu

SEQ ID NO: 2427071 - RNA, 19 nt, Artificial Sequence
  Description of Artificial Sequence: Synthetic oligonucleotide
  Antisense strand to SEQ ID NO: 2427070
acacccagagacauugagc

SEQ ID NO: 2427072 - RNA, 19 nt, Artificial Sequence
  Description of Artificial Sequence: Synthetic oligonucleotide
  Sense strand starting at position 3747 of SEQ ID NO: 1886800
cucaaugucucugggugua

SEQ ID NO: 2427073 - RNA, 19 nt, Artificial Sequence
  Description of Artificial Sequence: Synthetic oligonucleotide
  Antisense strand to SEQ ID NO: 2427072
uacacccagagacauugag

SEQ ID NO: 2427074 - RNA, 19 nt, Artificial Sequence
  Description of Artificial Sequence: Synthetic oligonucleotide
  Sense strand starting at position 3757 of SEQ ID NO: 1886800
cuggguguaucucagagau

SEQ ID NO: 2427075 - RNA, 19 nt, Artificial Sequence
  Description of Artificial Sequence: Synthetic oligonucleotide
  Antisense strand to SEQ ID NO: 2427074
aucucugagauacacccag

SEQ ID NO: 2427076 - RNA, 19 nt, Artificial Sequence
  Description of Artificial Sequence: Synthetic oligonucleotide
  Sense strand starting at position 3759 of SEQ ID NO: 1886800
ggguguaucucagagauaa

SEQ ID NO: 2427077 - RNA, 19 nt, Artificial Sequence
  Description of Artificial Sequence: Synthetic oligonucleotide
  Antisense strand to SEQ ID NO: 2427076
uuaucucugagauacaccc

SEQ ID NO: 2427078 - RNA, 19 nt, Artificial Sequence
  Description of Artificial Sequence: Synthetic oligonucleotide
  Sense strand starting at position 3761 of SEQ ID NO: 1886800
guguaucucagagauaagc

SEQ ID NO: 2427079 - RNA, 19 nt, Artificial Sequence
  Description of Artificial Sequence: Synthetic oligonucleotide
  Antisense strand to SEQ ID NO: 2427078
gcuuaucucugagauacac

SEQ ID NO: 2427080 - RNA, 19 nt, Artificial Sequence
  Description of Artificial Sequence: Synthetic oligonucleotide
  Sense strand starting at position 3784 of SEQ ID NO: 1886800
ggugguguuccuugcuuau

SEQ ID NO: 2427081 - RNA, 19 nt, Artificial Sequence
  Description of Artificial Sequence: Synthetic oligonucleotide
  Antisense strand to SEQ ID NO: 2427080
auaagcaaggaacaccacc

SEQ ID NO: 2427082 - RNA, 19 nt, Artificial Sequence
  Description of Artificial Sequence: Synthetic oligonucleotide
  Sense strand starting at position 3811 of SEQ ID NO: 1886800
ggcaccuggccggaauaau

SEQ ID NO: 2427083 - RNA, 19 nt, Artificial Sequence
  Description of Artificial Sequence: Synthetic oligonucleotide
  Antisense strand to SEQ ID NO: 2427082
auuauuccggccaggugcc

SEQ ID NO: 2427084 - RNA, 19 nt, Artificial Sequence
  Description of Artificial Sequence: Synthetic oligonucleotide
  Sense strand starting at position 3894 of SEQ ID NO: 1886800
cggaauaccugaggagcau

SEQ ID NO: 2427085 - RNA, 19 nt, Artificial Sequence
  Description of Artificial Sequence: Synthetic oligonucleotide
  Antisense strand to SEQ ID NO: 2427084
augcuccucagguauuccg

SEQ ID NO: 2427086 - RNA, 19 nt, Artificial Sequence
  Description of Artificial Sequence: Synthetic oligonucleotide
  Sense strand starting at position 3905 of SEQ ID NO: 1886800
aggagcauccacuauaucu

SEQ ID NO: 2427087 - RNA, 19 nt, Artificial Sequence
  Description of Artificial Sequence: Synthetic oligonucleotide
  Antisense strand to SEQ ID NO: 2427086
agauauaguggaugcuccu

SEQ ID NO: 2427088 - RNA, 19 nt, Artificial Sequence
  Description of Artificial Sequence: Synthetic oligonucleotide
  Sense strand starting at position 3916 of SEQ ID NO: 1886800
cuauaucucccagguguua

SEQ ID NO: 2427089 - RNA, 19 nt, Artificial Sequence
  Description of Artificial Sequence: Synthetic oligonucleotide
  Antisense strand to SEQ ID NO: 2427088
uaacaccugggagauauag

SEQ ID NO: 2427090 - RNA, 19 nt, Artificial Sequence
  Description of Artificial Sequence: Synthetic oligonucleotide
  Sense strand starting at position 158 of SEQ ID NO: 1886799
gcgguuuccugucugccaa

SEQ ID NO: 2427091 - RNA, 19 nt, Artificial Sequence
  Description of Artificial Sequence: Synthetic oligonucleotide
  Antisense strand to SEQ ID NO: 2427090
uuggcagacaggaaaccgc

SEQ ID NO: 2427092 - RNA, 19 nt, Artificial Sequence
  Description of Artificial Sequence: Synthetic oligonucleotide
  Sense strand starting at position 159 of SEQ ID NO: 1886799
cgguuuccugucugccaau

SEQ ID NO: 2427093 - RNA, 19 nt, Artificial Sequence
  Description of Artificial Sequence: Synthetic oligonucleotide
  Antisense strand to SEQ ID NO: 2427092
auuggcagacaggaaaccg

SEQ ID NO: 2427094 - RNA, 19 nt, Artificial Sequence
  Description of Artificial Sequence: Synthetic oligonucleotide
  Sense strand starting at position 160 of SEQ ID NO: 1886799
gguuuccugucugccaauu

SEQ ID NO: 2427095 - RNA, 19 nt, Artificial Sequence
  Description of Artificial Sequence: Synthetic oligonucleotide
  Antisense strand to SEQ ID NO: 2427094
aauuggcagacaggaaacc

SEQ ID NO: 2427096 - RNA, 19 nt, Artificial Sequence
  Description of Artificial Sequence: Synthetic oligonucleotide
  Sense strand starting at position 1083 of SEQ ID NO: 1886799
cgccucuuaccgugggaga

SEQ ID NO: 2427097 - RNA, 19 nt, Artificial Sequence
  Description of Artificial Sequence: Synthetic oligonucleotide
  Antisense strand to SEQ ID NO: 2427096
ucucccacgguaagaggcg

SEQ ID NO: 2427098 - RNA, 19 nt, Artificial Sequence
  Description of Artificial Sequence: Synthetic oligonucleotide
  Sense strand starting at position 2022 of SEQ ID NO: 1886799
uugugaugcuguuugcagu

SEQ ID NO: 2427099 - RNA, 19 nt, Artificial Sequence
  Description of Artificial Sequence: Synthetic oligonucleotide
  Antisense strand to SEQ ID NO: 2427098
acugcaaacagcaucacaa

SEQ ID NO: 2427100 - RNA, 19 nt, Artificial Sequence
  Description of Artificial Sequence: Synthetic oligonucleotide
  Sense strand starting at position 2180 of SEQ ID NO: 1886799
ggagaagccucguuccuga

SEQ ID NO: 2427101 - RNA, 19 nt, Artificial Sequence
  Description of Artificial Sequence: Synthetic oligonucleotide
  Antisense strand to SEQ ID NO: 2427100
ucaggaacgaggcuucucc

SEQ ID NO: 2427102 - RNA, 19 nt, Artificial Sequence
  Description of Artificial Sequence: Synthetic oligonucleotide
  Sense strand starting at position 2252 of SEQ ID NO: 1886799
agaaauccugccuggauua

SEQ ID NO: 2427103 - RNA, 19 nt, Artificial Sequence
  Description of Artificial Sequence: Synthetic oligonucleotide
  Antisense strand to SEQ ID NO: 2427102
uaauccaggcaggauuucu

SEQ ID NO: 2427104 - RNA, 19 nt, Artificial Sequence
  Description of Artificial Sequence: Synthetic oligonucleotide
  Sense strand starting at position 2264 of SEQ ID NO: 1886799
uggauuauauuucgucuuu

SEQ ID NO: 2427105 - RNA, 19 nt, Artificial Sequence
  Description of Artificial Sequence: Synthetic oligonucleotide
  Antisense strand to SEQ ID NO: 2427104
aaagacgaaauauaaucca

SEQ ID NO: 2427106 - RNA, 19 nt, Artificial Sequence
  Description of Artificial Sequence: Synthetic oligonucleotide
  Sense strand starting at position 2265 of SEQ ID NO: 1886799
ggauuauauuucgucuuuc

SEQ ID NO: 2427107 - RNA, 19 nt, Artificial Sequence
  Description of Artificial Sequence: Synthetic oligonucleotide
  Antisense strand to SEQ ID NO: 2427106
gaaagacgaaauauaaucc

SEQ ID NO: 2427108 - RNA, 19 nt, Artificial Sequence
  Description of Artificial Sequence: Synthetic oligonucleotide
  Sense strand starting at position 2276 of SEQ ID NO: 1886799
cgucuuucucucugaggca

SEQ ID NO: 2427109 - RNA, 19 nt, Artificial Sequence
  Description of Artificial Sequence: Synthetic oligonucleotide
  Antisense strand to SEQ ID NO: 2427108
ugccucagagagaaagacg

SEQ ID NO: 2427110 - RNA, 19 nt, Artificial Sequence
  Description of Artificial Sequence: Synthetic oligonucleotide
  Sense strand starting at position 2283 of SEQ ID NO: 1886799
cucucugaggcauagacuu

SEQ ID NO: 2427111 - RNA, 19 nt, Artificial Sequence
  Description of Artificial Sequence: Synthetic oligonucleotide
  Antisense strand to SEQ ID NO: 2427110
aagucuaugccucagagag

SEQ ID NO: 2427112 - RNA, 19 nt, Artificial Sequence
  Description of Artificial Sequence: Synthetic oligonucleotide
  Sense strand starting at position 2313 of SEQ ID NO: 1886799
acuuaacagcuagggauaa

SEQ ID NO: 2427113 - RNA, 19 nt, Artificial Sequence
  Description of Artificial Sequence: Synthetic oligonucleotide
  Antisense strand to SEQ ID NO: 2427112
uuaucccuagcuguuaagu

SEQ ID NO: 2427114 - RNA, 19 nt, Artificial Sequence
  Description of Artificial Sequence: Synthetic oligonucleotide
  Sense strand starting at position 2314 of SEQ ID NO: 1886799
cuuaacagcuagggauaaa

SEQ ID NO: 2427115 - RNA, 19 nt, Artificial Sequence
  Description of Artificial Sequence: Synthetic oligonucleotide
  Antisense strand to SEQ ID NO: 2427114
uuuaucccuagcuguuaag

SEQ ID NO: 2427116 - RNA, 19 nt, Artificial Sequence
  Description of Artificial Sequence: Synthetic oligonucleotide
  Sense strand starting at position 2651 of SEQ ID NO: 1886799
accauucugugguuccaau

SEQ ID NO: 2427117 - RNA, 19 nt, Artificial Sequence
  Description of Artificial Sequence: Synthetic oligonucleotide
  Antisense strand to SEQ ID NO: 2427116
auuggaaccacagaauggu

SEQ ID NO: 2427118 - RNA, 19 nt, Artificial Sequence
  Description of Artificial Sequence: Synthetic oligonucleotide
  Sense strand starting at position 2669 of SEQ ID NO: 1886799
ugaccugugccuugucaga

SEQ ID NO: 2427119 - RNA, 19 nt, Artificial Sequence
  Description of Artificial Sequence: Synthetic oligonucleotide
  Antisense strand to SEQ ID NO: 2427118
ucugacaaggcacagguca

SEQ ID NO: 2427120 - RNA, 19 nt, Artificial Sequence
  Description of Artificial Sequence: Synthetic oligonucleotide
  Sense strand starting at position 2698 of SEQ ID NO: 1886799
agccuugaaagguaacagu

SEQ ID NO: 2427121 - RNA, 19 nt, Artificial Sequence
  Description of Artificial Sequence: Synthetic oligonucleotide
  Antisense strand to SEQ ID NO: 2427120
acuguuaccuuucaaggcu

SEQ ID NO: 2427122 - RNA, 19 nt, Artificial Sequence
  Description of Artificial Sequence: Synthetic oligonucleotide
  Sense strand starting at position 2724 of SEQ ID NO: 1886799
uccugugugcacuggaaau

SEQ ID NO: 2427123 - RNA, 19 nt, Artificial Sequence
  Description of Artificial Sequence: Synthetic oligonucleotide
  Antisense strand to SEQ ID NO: 2427122
auuuccagugcacacagga

SEQ ID NO: 2427124 - RNA, 19 nt, Artificial Sequence
  Description of Artificial Sequence: Synthetic oligonucleotide
  Sense strand starting at position 2766 of SEQ ID NO: 1886799
agggauuucucggaacuua

SEQ ID NO: 2427125 - RNA, 19 nt, Artificial Sequence
  Description of Artificial Sequence: Synthetic oligonucleotide
  Antisense strand to SEQ ID NO: 2427124
uaaguuccgagaaaucccu

SEQ ID NO: 2427126 - RNA, 19 nt, Artificial Sequence
  Description of Artificial Sequence: Synthetic oligonucleotide
  Sense strand starting at position 2777 of SEQ ID NO: 1886799
ggaacuuaaaccgggaagu

SEQ ID NO: 2427127 - RNA, 19 nt, Artificial Sequence
  Description of Artificial Sequence: Synthetic oligonucleotide
  Antisense strand to SEQ ID NO: 2427126
acuucccgguuuaaguucc

SEQ ID NO: 2427128 - RNA, 19 nt, Artificial Sequence
  Description of Artificial Sequence: Synthetic oligonucleotide
  Sense strand starting at position 2860 of SEQ ID NO: 1886799
augaaucacccuugaguug

SEQ ID NO: 2427129 - RNA, 19 nt, Artificial Sequence
  Description of Artificial Sequence: Synthetic oligonucleotide
  Antisense strand to SEQ ID NO: 2427128
caacucaagggugauucau

SEQ ID NO: 2427130 - RNA, 19 nt, Artificial Sequence
  Description of Artificial Sequence: Synthetic oligonucleotide
  Sense strand starting at position 2867 of SEQ ID NO: 1886799
acccuugaguugcacaaga

SEQ ID NO: 2427131 - RNA, 19 nt, Artificial Sequence
  Description of Artificial Sequence: Synthetic oligonucleotide
  Antisense strand to SEQ ID NO: 2427130
ucuugugcaacucaagggu

SEQ ID NO: 2427132 - RNA, 19 nt, Artificial Sequence
  Description of Artificial Sequence: Synthetic oligonucleotide
  Sense strand starting at position 2869 of SEQ ID NO: 1886799
ccuugaguugcacaagaag

SEQ ID NO: 2427133 - RNA, 19 nt, Artificial Sequence
  Description of Artificial Sequence: Synthetic oligonucleotide
  Antisense strand to SEQ ID NO: 2427132
cuucuugugcaacucaagg

SEQ ID NO: 2427134 - RNA, 19 nt, Artificial Sequence
  Description of Artificial Sequence: Synthetic oligonucleotide
  Sense strand starting at position 2963 of SEQ ID NO: 1886799
guuccugugcuggagagaa

SEQ ID NO: 2427135 - RNA, 19 nt, Artificial Sequence
  Description of Artificial Sequence: Synthetic oligonucleotide
  Antisense strand to SEQ ID NO: 2427134
uucucuccagcacaggaac

SEQ ID NO: 2427136 - RNA, 19 nt, Artificial Sequence
  Description of Artificial Sequence: Synthetic oligonucleotide
  Sense strand starting at position 3129 of SEQ ID NO: 1886799
gcucaaugucucugggugu

SEQ ID NO: 2427137 - RNA, 19 nt, Artificial Sequence
  Description of Artificial Sequence: Synthetic oligonucleotide
  Antisense strand to SEQ ID NO: 2427136
acacccagagacauugagc

SEQ ID NO: 2427138 - RNA, 19 nt, Artificial Sequence
  Description of Artificial Sequence: Synthetic oligonucleotide
  Sense strand starting at position 3140 of SEQ ID NO: 1886799
cuggguguaucucagagau

SEQ ID NO: 2427139 - RNA, 19 nt, Artificial Sequence
  Description of Artificial Sequence: Synthetic oligonucleotide
  Antisense strand to SEQ ID NO: 2427138
aucucugagauacacccag

SEQ ID NO: 2427140 - RNA, 19 nt, Artificial Sequence
  Description of Artificial Sequence: Synthetic oligonucleotide
  Sense strand starting at position 3142 of SEQ ID NO: 1886799
ggguguaucucagagauaa

SEQ ID NO: 2427141 - RNA, 19 nt, Artificial Sequence
  Description of Artificial Sequence: Synthetic oligonucleotide
  Antisense strand to SEQ ID NO: 2427140
uuaucucugagauacaccc

SEQ ID NO: 2427142 - RNA, 19 nt, Artificial Sequence
  Description of Artificial Sequence: Synthetic oligonucleotide
  Sense strand starting at position 3144 of SEQ ID NO: 1886799
guguaucucagagauaagc

SEQ ID NO: 2427143 - RNA, 19 nt, Artificial Sequence
  Description of Artificial Sequence: Synthetic oligonucleotide
  Antisense strand to SEQ ID NO: 2427142
gcuuaucucugagauacac

SEQ ID NO: 2427144 - RNA, 19 nt, Artificial Sequence
  Description of Artificial Sequence: Synthetic oligonucleotide
  Sense strand starting at position 3167 of SEQ ID NO: 1886799
ggugguguuccuugcuuau

SEQ ID NO: 2427145 - RNA, 19 nt, Artificial Sequence
  Description of Artificial Sequence: Synthetic oligonucleotide
  Antisense strand to SEQ ID NO: 2427144
auaagcaaggaacaccacc

SEQ ID NO: 2427146 - RNA, 19 nt, Artificial Sequence
  Description of Artificial Sequence: Synthetic oligonucleotide
  Sense strand starting at position 3194 of SEQ ID NO: 1886799
ggcaccuggccggaauaau

SEQ ID NO: 2427147 - RNA, 19 nt, Artificial Sequence
  Description of Artificial Sequence: Synthetic oligonucleotide
  Antisense strand to SEQ ID NO: 2427146
auuauuccggccaggugcc

SEQ ID NO: 2427148 - RNA, 19 nt, Artificial Sequence
  Description of Artificial Sequence: Synthetic oligonucleotide
  Sense strand starting at position 3288 of SEQ ID NO: 1886799
aggagcauccacuauaucu

SEQ ID NO: 2427149 - RNA, 19 nt, Artificial Sequence
  Description of Artificial Sequence: Synthetic oligonucleotide
  Antisense strand to SEQ ID NO: 2427148
agauauaguggaugcuccu

SEQ ID NO: 2427150 - RNA, 19 nt, Artificial Sequence
  Description of Artificial Sequence: Synthetic oligonucleotide
  Sense strand starting at position 3299 of SEQ ID NO: 1886799
cuauaucucccagguguua

SEQ ID NO: 2427151 - RNA, 19 nt, Artificial Sequence
  Description of Artificial Sequence: Synthetic oligonucleotide
  Antisense strand to SEQ ID NO: 2427150
uaacaccugggagauauag

SEQ ID NO: 2427152 - RNA, 19 nt, Artificial Sequence
  Description of Artificial Sequence: Synthetic oligonucleotide
  Sense strand starting at position 3689 of SEQ ID NO: 1886799
uccuccaugcuggacaaau

SEQ ID NO: 2427153 - RNA, 19 nt, Artificial Sequence
  Description of Artificial Sequence: Synthetic oligonucleotide
  Antisense strand to SEQ ID NO: 2427152
auuuguccagcauggagga

SEQ ID NO: 2427154 - RNA, 19 nt, Artificial Sequence
  Description of Artificial Sequence: Synthetic oligonucleotide
  Sense strand starting at position 3702 of SEQ ID NO: 1886799
acaaauugugggcauccua

SEQ ID NO: 2427155 - RNA, 19 nt, Artificial Sequence
  Description of Artificial Sequence: Synthetic oligonucleotide
  Antisense strand to SEQ ID NO: 2427154
uaggaugcccacaauuugu

SEQ ID NO: 2427156 - RNA, 19 nt, Artificial Sequence
  Description of Artificial Sequence: Synthetic oligonucleotide
  Sense strand starting at position 3750 of SEQ ID NO: 1886799
ggucucuuguauccuucua

SEQ ID NO: 2427157 - RNA, 19 nt, Artificial Sequence
  Description of Artificial Sequence: Synthetic oligonucleotide
  Antisense strand to SEQ ID NO: 2427156
uagaaggauacaagagacc

SEQ ID NO: 2427158 - RNA, 19 nt, Artificial Sequence
  Description of Artificial Sequence: Synthetic oligonucleotide
  Sense strand starting at position 3796 of SEQ ID NO: 1886799
gcccacacucagugugaua

SEQ ID NO: 2427159 - RNA, 19 nt, Artificial Sequence
  Description of Artificial Sequence: Synthetic oligonucleotide
  Antisense strand to SEQ ID NO: 2427158
uaucacacugagugugggc

SEQ ID NO: 2427160 - RNA, 19 nt, Artificial Sequence
  Description of Artificial Sequence: Synthetic oligonucleotide
  Sense strand starting at position 3798 of SEQ ID NO: 1886799
ccacacucagugugauaua

SEQ ID NO: 2427161 - RNA, 19 nt, Artificial Sequence
  Description of Artificial Sequence: Synthetic oligonucleotide
  Antisense strand to SEQ ID NO: 2427160
uauaucacacugagugugg

SEQ ID NO: 2427162 - RNA, 19 nt, Artificial Sequence
  Description of Artificial Sequence: Synthetic oligonucleotide
  Sense strand starting at position 3807 of SEQ ID NO: 1886799
gugugauauaguggcagga

SEQ ID NO: 2427163 - RNA, 19 nt, Artificial Sequence
  Description of Artificial Sequence: Synthetic oligonucleotide
  Antisense strand to SEQ ID NO: 2427162
uccugccacuauaucacac

SEQ ID NO: 2427164 - RNA, 19 nt, Artificial Sequence
  Description of Artificial Sequence: Synthetic oligonucleotide
  Sense strand starting at position 3809 of SEQ ID NO: 1886799
gugauauaguggcaggaag

SEQ ID NO: 2427165 - RNA, 19 nt, Artificial Sequence
  Description of Artificial Sequence: Synthetic oligonucleotide
  Antisense strand to SEQ ID NO: 2427164
cuuccugccacuauaucac

SEQ ID NO: 2427166 - RNA, 19 nt, Artificial Sequence
  Description of Artificial Sequence: Synthetic oligonucleotide
  Sense strand starting at position 3830 of SEQ ID NO: 1886799
accagcguuguggauaaga

SEQ ID NO: 2427167 - RNA, 19 nt, Artificial Sequence
  Description of Artificial Sequence: Synthetic oligonucleotide
  Antisense strand to SEQ ID NO: 2427166
ucuuauccacaacgcuggu

SEQ ID NO: 2427168 - RNA, 19 nt, Artificial Sequence
  Description of Artificial Sequence: Synthetic oligonucleotide
  Sense strand starting at position 3832 of SEQ ID NO: 1886799
cagcguuguggauaagaag

SEQ ID NO: 2427169 - RNA, 19 nt, Artificial Sequence
  Description of Artificial Sequence: Synthetic oligonucleotide
  Antisense strand to SEQ ID NO: 2427168
cuucuuauccacaacgcug

SEQ ID NO: 2427170 - RNA, 19 nt, Artificial Sequence
  Description of Artificial Sequence: Synthetic oligonucleotide
  Sense strand starting at position 292 of SEQ ID NO: 1886801
agucaacagagaugucaga

SEQ ID NO: 2427171 - RNA, 19 nt, Artificial Sequence
  Description of Artificial Sequence: Synthetic oligonucleotide
  Antisense strand to SEQ ID NO: 2427170
ucugacaucucuguugacu

SEQ ID NO: 2427172 - RNA, 19 nt, Artificial Sequence
  Description of Artificial Sequence: Synthetic oligonucleotide
  Sense strand starting at position 411 of SEQ ID NO: 1886801
aaaggaucaguguggccau

SEQ ID NO: 2427173 - RNA, 19 nt, Artificial Sequence
  Description of Artificial Sequence: Synthetic oligonucleotide
  Antisense strand to SEQ ID NO: 2427172
auggccacacugauccuuu

SEQ ID NO: 2427174 - RNA, 19 nt, Artificial Sequence
  Description of Artificial Sequence: Synthetic oligonucleotide
  Sense strand starting at position 472 of SEQ ID NO: 1886801
ggacccucucgagaucuca

SEQ ID NO: 2427175 - RNA, 19 nt, Artificial Sequence
  Description of Artificial Sequence: Synthetic oligonucleotide
  Antisense strand to SEQ ID NO: 2427174
ugagaucucgagagggucc

SEQ ID NO: 2427176 - RNA, 19 nt, Artificial Sequence
  Description of Artificial Sequence: Synthetic oligonucleotide
  Sense strand starting at position 676 of SEQ ID NO: 1886801
gccugaacgugcucugaac

SEQ ID NO: 2427177 - RNA, 19 nt, Artificial Sequence
  Description of Artificial Sequence: Synthetic oligonucleotide
  Antisense strand to SEQ ID NO: 2427176
guucagagcacguucaggc

SEQ ID NO: 2427178 - RNA, 19 nt, Artificial Sequence
  Description of Artificial Sequence: Synthetic oligonucleotide
  Sense strand starting at position 1031 of SEQ ID NO: 1886801
aguguuagcagcuggcaaa

SEQ ID NO: 2427179 - RNA, 19 nt, Artificial Sequence
  Description of Artificial Sequence: Synthetic oligonucleotide
  Antisense strand to SEQ ID NO: 2427178
uuugccagcugcuaacacu

SEQ ID NO: 2427180 - RNA, 19 nt, Artificial Sequence
  Description of Artificial Sequence: Synthetic oligonucleotide
  Sense strand starting at position 1332 of SEQ ID NO: 1886801
gcgguuuccugucugccaa

SEQ ID NO: 2427181 - RNA, 19 nt, Artificial Sequence
  Description of Artificial Sequence: Synthetic oligonucleotide
  Antisense strand to SEQ ID NO: 2427180
uuggcagacaggaaaccgc

SEQ ID NO: 2427182 - RNA, 19 nt, Artificial Sequence
  Description of Artificial Sequence: Synthetic oligonucleotide
  Sense strand starting at position 1333 of SEQ ID NO: 1886801
cgguuuccugucugccaau

SEQ ID NO: 2427183 - RNA, 19 nt, Artificial Sequence
  Description of Artificial Sequence: Synthetic oligonucleotide
  Antisense strand to SEQ ID NO: 2427182
auuggcagacaggaaaccg

SEQ ID NO: 2427184 - RNA, 19 nt, Artificial Sequence
  Description of Artificial Sequence: Synthetic oligonucleotide
  Sense strand starting at position 1334 of SEQ ID NO: 1886801
gguuuccugucugccaauu

SEQ ID NO: 2427185 - RNA, 19 nt, Artificial Sequence
  Description of Artificial Sequence: Synthetic oligonucleotide
  Antisense strand to SEQ ID NO: 2427184
aauuggcagacaggaaacc

SEQ ID NO: 2427186 - RNA, 19 nt, Artificial Sequence
  Description of Artificial Sequence: Synthetic oligonucleotide
  Sense strand starting at position 2257 of SEQ ID NO: 1886801
cgccucuuaccgugggaga

SEQ ID NO: 2427187 - RNA, 19 nt, Artificial Sequence
  Description of Artificial Sequence: Synthetic oligonucleotide
  Antisense strand to SEQ ID NO: 2427186
ucucccacgguaagaggcg

SEQ ID NO: 2427188 - RNA, 19 nt, Artificial Sequence
  Description of Artificial Sequence: Synthetic oligonucleotide
  Sense strand starting at position 3190 of SEQ ID NO: 1886801
gcucauuugugaugcuguu

SEQ ID NO: 2427189 - RNA, 19 nt, Artificial Sequence
  Description of Artificial Sequence: Synthetic oligonucleotide
  Antisense strand to SEQ ID NO: 2427188
aacagcaucacaaaugagc

SEQ ID NO: 2427190 - RNA, 19 nt, Artificial Sequence
  Description of Artificial Sequence: Synthetic oligonucleotide
  Sense strand starting at position 3196 of SEQ ID NO: 1886801
uugugaugcuguuugcagu

SEQ ID NO: 2427191 - RNA, 19 nt, Artificial Sequence
  Description of Artificial Sequence: Synthetic oligonucleotide
  Antisense strand to SEQ ID NO: 2427190
acugcaaacagcaucacaa

SEQ ID NO: 2427192 - RNA, 19 nt, Artificial Sequence
  Description of Artificial Sequence: Synthetic oligonucleotide
  Sense strand starting at position 3203 of SEQ ID NO: 1886801
gcuguuugcagucgucuua

SEQ ID NO: 2427193 - RNA, 19 nt, Artificial Sequence
  Description of Artificial Sequence: Synthetic oligonucleotide
  Antisense strand to SEQ ID NO: 2427192
uaagacgacugcaaacagc

SEQ ID NO: 2427194 - RNA, 19 nt, Artificial Sequence
  Description of Artificial Sequence: Synthetic oligonucleotide
  Sense strand starting at position 3210 of SEQ ID NO: 1886801
gcagucgucuuaggaagga

SEQ ID NO: 2427195 - RNA, 19 nt, Artificial Sequence
  Description of Artificial Sequence: Synthetic oligonucleotide
  Antisense strand to SEQ ID NO: 2427194
uccuuccuaagacgacugc

SEQ ID NO: 2427196 - RNA, 19 nt, Artificial Sequence
  Description of Artificial Sequence: Synthetic oligonucleotide
  Sense strand starting at position 3354 of SEQ ID NO: 1886801
ggagaagccucguuccuga

SEQ ID NO: 2427197 - RNA, 19 nt, Artificial Sequence
  Description of Artificial Sequence: Synthetic oligonucleotide
  Antisense strand to SEQ ID NO: 2427196
ucaggaacgaggcuucucc

SEQ ID NO: 2427198 - RNA, 19 nt, Artificial Sequence
  Description of Artificial Sequence: Synthetic oligonucleotide
  Sense strand starting at position 3426 of SEQ ID NO: 1886801
agaaauccugccuggauua

SEQ ID NO: 2427199 - RNA, 19 nt, Artificial Sequence
  Description of Artificial Sequence: Synthetic oligonucleotide
  Antisense strand to SEQ ID NO: 2427198
uaauccaggcaggauuucu

SEQ ID NO: 2427200 - RNA, 19 nt, Artificial Sequence
  Description of Artificial Sequence: Synthetic oligonucleotide
  Sense strand starting at position 3438 of SEQ ID NO: 1886801
uggauuauauuucgucuuu

SEQ ID NO: 2427201 - RNA, 19 nt, Artificial Sequence
  Description of Artificial Sequence: Synthetic oligonucleotide
  Antisense strand to SEQ ID NO: 2427200
aaagacgaaauauaaucca

SEQ ID NO: 2427202 - RNA, 19 nt, Artificial Sequence
  Description of Artificial Sequence: Synthetic oligonucleotide
  Sense strand starting at position 3439 of SEQ ID NO: 1886801
ggauuauauuucgucuuuc

SEQ ID NO: 2427203 - RNA, 19 nt, Artificial Sequence
  Description of Artificial Sequence: Synthetic oligonucleotide
  Antisense strand to SEQ ID NO: 2427202
gaaagacgaaauauaaucc

SEQ ID NO: 2427204 - RNA, 19 nt, Artificial Sequence
  Description of Artificial Sequence: Synthetic oligonucleotide
  Sense strand starting at position 3450 of SEQ ID NO: 1886801
cgucuuucucucugaggca

SEQ ID NO: 2427205 - RNA, 19 nt, Artificial Sequence
  Description of Artificial Sequence: Synthetic oligonucleotide
  Antisense strand to SEQ ID NO: 2427204
ugccucagagagaaagacg

SEQ ID NO: 2427206 - RNA, 19 nt, Artificial Sequence
  Description of Artificial Sequence: Synthetic oligonucleotide
  Sense strand starting at position 3451 of SEQ ID NO: 1886801
gucuuucucucugaggcau

SEQ ID NO: 2427207 - RNA, 19 nt, Artificial Sequence
  Description of Artificial Sequence: Synthetic oligonucleotide
  Antisense strand to SEQ ID NO: 2427206
augccucagagagaaagac

SEQ ID NO: 2427208 - RNA, 19 nt, Artificial Sequence
  Description of Artificial Sequence: Synthetic oligonucleotide
  Sense strand starting at position 3457 of SEQ ID NO: 1886801
cucucugaggcauagacuu

SEQ ID NO: 2427209 - RNA, 19 nt, Artificial Sequence
  Description of Artificial Sequence: Synthetic oligonucleotide
  Antisense strand to SEQ ID NO: 2427208
aagucuaugccucagagag

SEQ ID NO: 2427210 - RNA, 19 nt, Artificial Sequence
  Description of Artificial Sequence: Synthetic oligonucleotide
  Sense strand starting at position 3487 of SEQ ID NO: 1886801
acuuaacagcuagggauaa

SEQ ID NO: 2427211 - RNA, 19 nt, Artificial Sequence
  Description of Artificial Sequence: Synthetic oligonucleotide
  Antisense strand to SEQ ID NO: 2427210
uuaucccuagcuguuaagu

SEQ ID NO: 2427212 - RNA, 19 nt, Artificial Sequence
  Description of Artificial Sequence: Synthetic oligonucleotide
  Sense strand starting at position 3488 of SEQ ID NO: 1886801
cuuaacagcuagggauaaa

SEQ ID NO: 2427213 - RNA, 19 nt, Artificial Sequence
  Description of Artificial Sequence: Synthetic oligonucleotide
  Antisense strand to SEQ ID NO: 2427212
uuuaucccuagcuguuaag

SEQ ID NO: 2427214 - RNA, 19 nt, Artificial Sequence
  Description of Artificial Sequence: Synthetic oligonucleotide
  Sense strand starting at position 3825 of SEQ ID NO: 1886801
accauucugugguuccaau

SEQ ID NO: 2427215 - RNA, 19 nt, Artificial Sequence
  Description of Artificial Sequence: Synthetic oligonucleotide
  Antisense strand to SEQ ID NO: 2427214
auuggaaccacagaauggu

SEQ ID NO: 2427216 - RNA, 19 nt, Artificial Sequence
  Description of Artificial Sequence: Synthetic oligonucleotide
  Sense strand starting at position 3843 of SEQ ID NO: 1886801
ugaccugugccuugucaga

SEQ ID NO: 2427217 - RNA, 19 nt, Artificial Sequence
  Description of Artificial Sequence: Synthetic oligonucleotide
  Antisense strand to SEQ ID NO: 2427216
ucugacaaggcacagguca

SEQ ID NO: 2427218 - RNA, 19 nt, Artificial Sequence
  Description of Artificial Sequence: Synthetic oligonucleotide
  Sense strand starting at position 3872 of SEQ ID NO: 1886801
agccuugaaagguaacagu

SEQ ID NO: 2427219 - RNA, 19 nt, Artificial Sequence
  Description of Artificial Sequence: Synthetic oligonucleotide
  Antisense strand to SEQ ID NO: 2427218
acuguuaccuuucaaggcu

SEQ ID NO: 2427220 - RNA, 19 nt, Artificial Sequence
  Description of Artificial Sequence: Synthetic oligonucleotide
  Sense strand starting at position 3898 of SEQ ID NO: 1886801
uccugugugcacuggaaau

SEQ ID NO: 2427221 - RNA, 19 nt, Artificial Sequence
  Description of Artificial Sequence: Synthetic oligonucleotide
  Antisense strand to SEQ ID NO: 2427220
auuuccagugcacacagga

SEQ ID NO: 2427222 - RNA, 19 nt, Artificial Sequence
  Description of Artificial Sequence: Synthetic oligonucleotide
  Sense strand starting at position 3922 of SEQ ID NO: 1886801
acucgcagguucugggaaa

SEQ ID NO: 2427223 - RNA, 19 nt, Artificial Sequence
  Description of Artificial Sequence: Synthetic oligonucleotide
  Antisense strand to SEQ ID NO: 2427222
uuucccagaaccugcgagu

SEQ ID NO: 2427224 - RNA, 19 nt, Artificial Sequence
  Description of Artificial Sequence: Synthetic oligonucleotide
  Sense strand starting at position 3940 of SEQ ID NO: 1886801
agggauuucucggaacuua

SEQ ID NO: 2427225 - RNA, 19 nt, Artificial Sequence
  Description of Artificial Sequence: Synthetic oligonucleotide
  Antisense strand to SEQ ID NO: 2427224
uaaguuccgagaaaucccu

SEQ ID NO: 2427226 - RNA, 19 nt, Artificial Sequence
  Description of Artificial Sequence: Synthetic oligonucleotide
  Sense strand starting at position 3951 of SEQ ID NO: 1886801
ggaacuuaaaccgggaagu

SEQ ID NO: 2427227 - RNA, 19 nt, Artificial Sequence
  Description of Artificial Sequence: Synthetic oligonucleotide
  Antisense strand to SEQ ID NO: 2427226
acuucccgguuuaaguucc

SEQ ID NO: 2427228 - RNA, 19 nt, Artificial Sequence
  Description of Artificial Sequence: Synthetic oligonucleotide
  Sense strand starting at position 272 of SEQ ID NO: 1886803
aaugaauagcucugggaug

SEQ ID NO: 2427229 - RNA, 19 nt, Artificial Sequence
  Description of Artificial Sequence: Synthetic oligonucleotide
  Antisense strand to SEQ ID NO: 2427228
caucccagagcuauucauu

SEQ ID NO: 2427230 - RNA, 19 nt, Artificial Sequence
  Description of Artificial Sequence: Synthetic oligonucleotide
  Sense strand starting at position 323 of SEQ ID NO: 1886803
ccaagugauuuagauauaa

SEQ ID NO: 2427231 - RNA, 19 nt, Artificial Sequence
  Description of Artificial Sequence: Synthetic oligonucleotide
  Antisense strand to SEQ ID NO: 2427230
uuauaucuaaaucacuugg

SEQ ID NO: 2427232 - RNA, 19 nt, Artificial Sequence
  Description of Artificial Sequence: Synthetic oligonucleotide
  Sense strand starting at position 334 of SEQ ID NO: 1886803
agauauaaccaauggccau

SEQ ID NO: 2427233 - RNA, 19 nt, Artificial Sequence
  Description of Artificial Sequence: Synthetic oligonucleotide
  Antisense strand to SEQ ID NO: 2427232
auggccauugguuauaucu

SEQ ID NO: 2427234 - RNA, 19 nt, Artificial Sequence
  Description of Artificial Sequence: Synthetic oligonucleotide
  Sense strand starting at position 395 of SEQ ID NO: 1886803
gaaauaucauggucagauc

SEQ ID NO: 2427235 - RNA, 19 nt, Artificial Sequence
  Description of Artificial Sequence: Synthetic oligonucleotide
  Antisense strand to SEQ ID NO: 2427234
gaucugaccaugauauuuc

SEQ ID NO: 2427236 - RNA, 19 nt, Artificial Sequence
  Description of Artificial Sequence: Synthetic oligonucleotide
  Sense strand starting at position 413 of SEQ ID NO: 1886803
cugaaucuuggacagcuau

SEQ ID NO: 2427237 - RNA, 19 nt, Artificial Sequence
  Description of Artificial Sequence: Synthetic oligonucleotide
  Antisense strand to SEQ ID NO: 2427236
auagcuguccaagauucag

SEQ ID NO: 2427238 - RNA, 19 nt, Artificial Sequence
  Description of Artificial Sequence: Synthetic oligonucleotide
  Sense strand starting at position 426 of SEQ ID NO: 1886803
agcuaucccuggucuugaa

SEQ ID NO: 2427239 - RNA, 19 nt, Artificial Sequence
  Description of Artificial Sequence: Synthetic oligonucleotide
  Antisense strand to SEQ ID NO: 2427238
uucaagaccagggauagcu

SEQ ID NO: 2427240 - RNA, 19 nt, Artificial Sequence
  Description of Artificial Sequence: Synthetic oligonucleotide
  Sense strand starting at position 441 of SEQ ID NO: 1886803
ugaagaaucuggcucugaa

SEQ ID NO: 2427241 - RNA, 19 nt, Artificial Sequence
  Description of Artificial Sequence: Synthetic oligonucleotide
  Antisense strand to SEQ ID NO: 2427240
uucagagccagauucuuca

SEQ ID NO: 2427242 - RNA, 19 nt, Artificial Sequence
  Description of Artificial Sequence: Synthetic oligonucleotide
  Sense strand starting at position 444 of SEQ ID NO: 1886803
agaaucuggcucugaaauu

SEQ ID NO: 2427243 - RNA, 19 nt, Artificial Sequence
  Description of Artificial Sequence: Synthetic oligonucleotide
  Antisense strand to SEQ ID NO: 2427242
aauuucagagccagauucu

SEQ ID NO: 2427244 - RNA, 19 nt, Artificial Sequence
  Description of Artificial Sequence: Synthetic oligonucleotide
  Sense strand starting at position 558 of SEQ ID NO: 1886803
gcaguauguccuucgcuga

SEQ ID NO: 2427245 - RNA, 19 nt, Artificial Sequence
  Description of Artificial Sequence: Synthetic oligonucleotide
  Antisense strand to SEQ ID NO: 2427244
ucagcgaaggacauacugc

SEQ ID NO: 2427246 - RNA, 19 nt, Artificial Sequence
  Description of Artificial Sequence: Synthetic oligonucleotide
  Sense strand starting at position 678 of SEQ ID NO: 1886803
uuaggaucucuuuggucca

SEQ ID NO: 2427247 - RNA, 19 nt, Artificial Sequence
  Description of Artificial Sequence: Synthetic oligonucleotide
  Antisense strand to SEQ ID NO: 2427246
uggaccaaagagauccuaa

SEQ ID NO: 2427248 - RNA, 19 nt, Artificial Sequence
  Description of Artificial Sequence: Synthetic oligonucleotide
  Sense strand starting at position 681 of SEQ ID NO: 1886803
ggaucucuuugguccaacu

SEQ ID NO: 2427249 - RNA, 19 nt, Artificial Sequence
  Description of Artificial Sequence: Synthetic oligonucleotide
  Antisense strand to SEQ ID NO: 2427248
aguuggaccaaagagaucc

SEQ ID NO: 2427250 - RNA, 19 nt, Artificial Sequence
  Description of Artificial Sequence: Synthetic oligonucleotide
  Sense strand starting at position 738 of SEQ ID NO: 1886803
gaggguagcaccuguuaaa

SEQ ID NO: 2427251 - RNA, 19 nt, Artificial Sequence
  Description of Artificial Sequence: Synthetic oligonucleotide
  Antisense strand to SEQ ID NO: 2427250
uuuaacaggugcuacccuc

SEQ ID NO: 2427252 - RNA, 19 nt, Artificial Sequence
  Description of Artificial Sequence: Synthetic oligonucleotide
  Sense strand starting at position 864 of SEQ ID NO: 1886803
gcaagacaauguuucuaca

SEQ ID NO: 2427253 - RNA, 19 nt, Artificial Sequence
  Description of Artificial Sequence: Synthetic oligonucleotide
  Antisense strand to SEQ ID NO: 2427252
uguagaaacauugucuugc

SEQ ID NO: 2427254 - RNA, 19 nt, Artificial Sequence
  Description of Artificial Sequence: Synthetic oligonucleotide
  Sense strand starting at position 948 of SEQ ID NO: 1886803
cagcuugcagacugacaua

SEQ ID NO: 2427255 - RNA, 19 nt, Artificial Sequence
  Description of Artificial Sequence: Synthetic oligonucleotide
  Antisense strand to SEQ ID NO: 2427254
uaugucagucugcaagcug

SEQ ID NO: 2427256 - RNA, 19 nt, Artificial Sequence
  Description of Artificial Sequence: Synthetic oligonucleotide
  Sense strand starting at position 964 of SEQ ID NO: 1886803
auaggaaucucuguguggu

SEQ ID NO: 2427257 - RNA, 19 nt, Artificial Sequence
  Description of Artificial Sequence: Synthetic oligonucleotide
  Antisense strand to SEQ ID NO: 2427256
accacacagagauuccuau

SEQ ID NO: 2427258 - RNA, 19 nt, Artificial Sequence
  Description of Artificial Sequence: Synthetic oligonucleotide
  Sense strand starting at position 965 of SEQ ID NO: 1886803
uaggaaucucuguguggug

SEQ ID NO: 2427259 - RNA, 19 nt, Artificial Sequence
  Description of Artificial Sequence: Synthetic oligonucleotide
  Antisense strand to SEQ ID NO: 2427258
caccacacagagauuccua

SEQ ID NO: 2427260 - RNA, 19 nt, Artificial Sequence
  Description of Artificial Sequence: Synthetic oligonucleotide
  Sense strand starting at position 967 of SEQ ID NO: 1886803
ggaaucucuguguggugga

SEQ ID NO: 2427261 - RNA, 19 nt, Artificial Sequence
  Description of Artificial Sequence: Synthetic oligonucleotide
  Antisense strand to SEQ ID NO: 2427260
uccaccacacagagauucc

SEQ ID NO: 2427262 - RNA, 19 nt, Artificial Sequence
  Description of Artificial Sequence: Synthetic oligonucleotide
  Sense strand starting at position 1119 of SEQ ID NO: 1886803
cgugguuauuuagcacuca

SEQ ID NO: 2427263 - RNA, 19 nt, Artificial Sequence
  Description of Artificial Sequence: Synthetic oligonucleotide
  Antisense strand to SEQ ID NO: 2427262
ugagugcuaaauaaccacg

SEQ ID NO: 2427264 - RNA, 19 nt, Artificial Sequence
  Description of Artificial Sequence: Synthetic oligonucleotide
  Sense strand starting at position 1195 of SEQ ID NO: 1886803
cagucaucgguguuucguu

SEQ ID NO: 2427265 - RNA, 19 nt, Artificial Sequence
  Description of Artificial Sequence: Synthetic oligonucleotide
  Antisense strand to SEQ ID NO: 2427264
aacgaaacaccgaugacug

SEQ ID NO: 2427266 - RNA, 19 nt, Artificial Sequence
  Description of Artificial Sequence: Synthetic oligonucleotide
  Sense strand starting at position 1202 of SEQ ID NO: 1886803
cgguguuucguuccaacca

SEQ ID NO: 2427267 - RNA, 19 nt, Artificial Sequence
  Description of Artificial Sequence: Synthetic oligonucleotide
  Antisense strand to SEQ ID NO: 2427266
ugguuggaacgaaacaccg

SEQ ID NO: 2427268 - RNA, 19 nt, Artificial Sequence
  Description of Artificial Sequence: Synthetic oligonucleotide
  Sense strand starting at position 1907 of SEQ ID NO: 1886803
cgccuuugccuggaacaca

SEQ ID NO: 2427269 - RNA, 19 nt, Artificial Sequence
  Description of Artificial Sequence: Synthetic oligonucleotide
  Antisense strand to SEQ ID NO: 2427268
uguguuccaggcaaaggcg

SEQ ID NO: 2427270 - RNA, 19 nt, Artificial Sequence
  Description of Artificial Sequence: Synthetic oligonucleotide
  Sense strand starting at position 1993 of SEQ ID NO: 1886803
aguguaauggcgcugcgau

SEQ ID NO: 2427271 - RNA, 19 nt, Artificial Sequence
  Description of Artificial Sequence: Synthetic oligonucleotide
  Antisense strand to SEQ ID NO: 2427270
aucgcagcgccauuacacu

SEQ ID NO: 2427272 - RNA, 19 nt, Artificial Sequence
  Description of Artificial Sequence: Synthetic oligonucleotide
  Sense strand starting at position 2040 of SEQ ID NO: 1886803
cccaauacgcgcguucauu

SEQ ID NO: 2427273 - RNA, 19 nt, Artificial Sequence
  Description of Artificial Sequence: Synthetic oligonucleotide
  Antisense strand to SEQ ID NO: 2427272
aaugaacgcgcguauuggg

SEQ ID NO: 2427274 - RNA, 19 nt, Artificial Sequence
  Description of Artificial Sequence: Synthetic oligonucleotide
  Sense strand starting at position 2306 of SEQ ID NO: 1886803
ccgaguuagagcugagauu

SEQ ID NO: 2427275 - RNA, 19 nt, Artificial Sequence
  Description of Artificial Sequence: Synthetic oligonucleotide
  Antisense strand to SEQ ID NO: 2427274
aaucucagcucuaacucgg

SEQ ID NO: 2427276 - RNA, 19 nt, Artificial Sequence
  Description of Artificial Sequence: Synthetic oligonucleotide
  Sense strand starting at position 2307 of SEQ ID NO: 1886803
cgaguuagagcugagauua

SEQ ID NO: 2427277 - RNA, 19 nt, Artificial Sequence
  Description of Artificial Sequence: Synthetic oligonucleotide
  Antisense strand to SEQ ID NO: 2427276
uaaucucagcucuaacucg

SEQ ID NO: 2427278 - RNA, 19 nt, Artificial Sequence
  Description of Artificial Sequence: Synthetic oligonucleotide
  Sense strand starting at position 2315 of SEQ ID NO: 1886803
agcugagauuauccugagu

SEQ ID NO: 2427279 - RNA, 19 nt, Artificial Sequence
  Description of Artificial Sequence: Synthetic oligonucleotide
  Antisense strand to SEQ ID NO: 2427278
acucaggauaaucucagcu

SEQ ID NO: 2427280 - RNA, 19 nt, Artificial Sequence
  Description of Artificial Sequence: Synthetic oligonucleotide
  Sense strand starting at position 2320 of SEQ ID NO: 1886803
agauuauccugaguuccuu

SEQ ID NO: 2427281 - RNA, 19 nt, Artificial Sequence
  Description of Artificial Sequence: Synthetic oligonucleotide
  Antisense strand to SEQ ID NO: 2427280
aaggaacucaggauaaucu

SEQ ID NO: 2427282 - RNA, 19 nt, Artificial Sequence
  Description of Artificial Sequence: Synthetic oligonucleotide
  Sense strand starting at position 2350 of SEQ ID NO: 1886803
cucagagcauccuugacuu

SEQ ID NO: 2427283 - RNA, 19 nt, Artificial Sequence
  Description of Artificial Sequence: Synthetic oligonucleotide
  Antisense strand to SEQ ID NO: 2427282
aagucaaggaugcucugag

SEQ ID NO: 2427284 - RNA, 19 nt, Artificial Sequence
  Description of Artificial Sequence: Synthetic oligonucleotide
  Sense strand starting at position 2364 of SEQ ID NO: 1886803
gacuuuggagaaugguuau

SEQ ID NO: 2427285 - RNA, 19 nt, Artificial Sequence
  Description of Artificial Sequence: Synthetic oligonucleotide
  Antisense strand to SEQ ID NO: 2427284
auaaccauucuccaaaguc

SEQ ID NO: 2427286 - RNA, 19 nt, Artificial Sequence
  Description of Artificial Sequence: Synthetic oligonucleotide
  Sense strand starting at position 2367 of SEQ ID NO: 1886803
uuuggagaaugguuaucuu

SEQ ID NO: 2427287 - RNA, 19 nt, Artificial Sequence
  Description of Artificial Sequence: Synthetic oligonucleotide
  Antisense strand to SEQ ID NO: 2427286
aagauaaccauucuccaaa

SEQ ID NO: 2427288 - RNA, 19 nt, Artificial Sequence
  Description of Artificial Sequence: Synthetic oligonucleotide
  Sense strand starting at position 2370 of SEQ ID NO: 1886803
ggagaaugguuaucuucuu

SEQ ID NO: 2427289 - RNA, 19 nt, Artificial Sequence
  Description of Artificial Sequence: Synthetic oligonucleotide
  Antisense strand to SEQ ID NO: 2427288
aagaagauaaccauucucc

SEQ ID NO: 2427290 - RNA, 19 nt, Artificial Sequence
  Description of Artificial Sequence: Synthetic oligonucleotide
  Sense strand starting at position 2371 of SEQ ID NO: 1886803
gagaaugguuaucuucuuu

SEQ ID NO: 2427291 - RNA, 19 nt, Artificial Sequence
  Description of Artificial Sequence: Synthetic oligonucleotide
  Antisense strand to SEQ ID NO: 2427290
aaagaagauaaccauucuc

SEQ ID NO: 2427292 - RNA, 19 nt, Artificial Sequence
  Description of Artificial Sequence: Synthetic oligonucleotide
  Sense strand starting at position 2406 of SEQ ID NO: 1886803
agggaauuaugguuagcau

SEQ ID NO: 2427293 - RNA, 19 nt, Artificial Sequence
  Description of Artificial Sequence: Synthetic oligonucleotide
  Antisense strand to SEQ ID NO: 2427292
augcuaaccauaauucccu

SEQ ID NO: 2427294 - RNA, 19 nt, Artificial Sequence
  Description of Artificial Sequence: Synthetic oligonucleotide
  Sense strand starting at position 2407 of SEQ ID NO: 1886803
gggaauuaugguuagcauu

SEQ ID NO: 2427295 - RNA, 19 nt, Artificial Sequence
  Description of Artificial Sequence: Synthetic oligonucleotide
  Antisense strand to SEQ ID NO: 2427294
aaugcuaaccauaauuccc

SEQ ID NO: 2427296 - RNA, 19 nt, Artificial Sequence
  Description of Artificial Sequence: Synthetic oligonucleotide
  Sense strand starting at position 2438 of SEQ ID NO: 1886803
gcgccaugcccagcauauu

SEQ ID NO: 2427297 - RNA, 19 nt, Artificial Sequence
  Description of Artificial Sequence: Synthetic oligonucleotide
  Antisense strand to SEQ ID NO: 2427296
aauaugcugggcauggcgc

SEQ ID NO: 2427298 - RNA, 19 nt, Artificial Sequence
  Description of Artificial Sequence: Synthetic oligonucleotide
  Sense strand starting at position 3341 of SEQ ID NO: 1886803
gugaaccaaugguuaucau

SEQ ID NO: 2427299 - RNA, 19 nt, Artificial Sequence
  Description of Artificial Sequence: Synthetic oligonucleotide
  Antisense strand to SEQ ID NO: 2427298
augauaaccauugguucac

SEQ ID NO: 2427300 - RNA, 19 nt, Artificial Sequence
  Description of Artificial Sequence: Synthetic oligonucleotide
  Sense strand starting at position 3392 of SEQ ID NO: 1886803
gggauuccaugaguuucca

SEQ ID NO: 2427301 - RNA, 19 nt, Artificial Sequence
  Description of Artificial Sequence: Synthetic oligonucleotide
  Antisense strand to SEQ ID NO: 2427300
uggaaacucauggaauccc

SEQ ID NO: 2427302 - RNA, 19 nt, Artificial Sequence
  Description of Artificial Sequence: Synthetic oligonucleotide
  Sense strand starting at position 3400 of SEQ ID NO: 1886803
augaguuuccagggccaua

SEQ ID NO: 2427303 - RNA, 19 nt, Artificial Sequence
  Description of Artificial Sequence: Synthetic oligonucleotide
  Antisense strand to SEQ ID NO: 2427302
uauggcccuggaaacucau

SEQ ID NO: 2427304 - RNA, 19 nt, Artificial Sequence
  Description of Artificial Sequence: Synthetic oligonucleotide
  Sense strand starting at position 3600 of SEQ ID NO: 1886803
cgugacauuuguucaacgu

SEQ ID NO: 2427305 - RNA, 19 nt, Artificial Sequence
  Description of Artificial Sequence: Synthetic oligonucleotide
  Antisense strand to SEQ ID NO: 2427304
acguugaacaaaugucacg

SEQ ID NO: 2427306 - RNA, 19 nt, Artificial Sequence
  Description of Artificial Sequence: Synthetic oligonucleotide
  Sense strand starting at position 3684 of SEQ ID NO: 1886803
gagcuuacagucuaguaaa

SEQ ID NO: 2427307 - RNA, 19 nt, Artificial Sequence
  Description of Artificial Sequence: Synthetic oligonucleotide
  Antisense strand to SEQ ID NO: 2427306
uuuacuagacuguaagcuc

SEQ ID NO: 2427308 - RNA, 19 nt, Artificial Sequence
  Description of Artificial Sequence: Synthetic oligonucleotide
  Sense strand starting at position 6 of SEQ ID NO: 1886805
gaaauaucauggucagauc

SEQ ID NO: 2427309 - RNA, 19 nt, Artificial Sequence
  Description of Artificial Sequence: Synthetic oligonucleotide
  Antisense strand to SEQ ID NO: 2427308
gaucugaccaugauauuuc

SEQ ID NO: 2427310 - RNA, 19 nt, Artificial Sequence
  Description of Artificial Sequence: Synthetic oligonucleotide
  Sense strand starting at position 24 of SEQ ID NO: 1886805
cugaaucuuggacagcuau

SEQ ID NO: 2427311 - RNA, 19 nt, Artificial Sequence
  Description of Artificial Sequence: Synthetic oligonucleotide
  Antisense strand to SEQ ID NO: 2427310
auagcuguccaagauucag

SEQ ID NO: 2427312 - RNA, 19 nt, Artificial Sequence
  Description of Artificial Sequence: Synthetic oligonucleotide
  Sense strand starting at position 34 of SEQ ID NO: 1886805
gacagcuaucccuggucuu

SEQ ID NO: 2427313 - RNA, 19 nt, Artificial Sequence
  Description of Artificial Sequence: Synthetic oligonucleotide
  Antisense strand to SEQ ID NO: 2427312
aagaccagggauagcuguc

SEQ ID NO: 2427314 - RNA, 19 nt, Artificial Sequence
  Description of Artificial Sequence: Synthetic oligonucleotide
  Sense strand starting at position 37 of SEQ ID NO: 1886805
agcuaucccuggucuugaa

SEQ ID NO: 2427315 - RNA, 19 nt, Artificial Sequence
  Description of Artificial Sequence: Synthetic oligonucleotide
  Antisense strand to SEQ ID NO: 2427314
uucaagaccagggauagcu

SEQ ID NO: 2427316 - RNA, 19 nt, Artificial Sequence
  Description of Artificial Sequence: Synthetic oligonucleotide
  Sense strand starting at position 52 of SEQ ID NO: 1886805
ugaagaaucuggcucugaa

SEQ ID NO: 2427317 - RNA, 19 nt, Artificial Sequence
  Description of Artificial Sequence: Synthetic oligonucleotide
  Antisense strand to SEQ ID NO: 2427316
uucagagccagauucuuca

SEQ ID NO: 2427318 - RNA, 19 nt, Artificial Sequence
  Description of Artificial Sequence: Synthetic oligonucleotide
  Sense strand starting at position 55 of SEQ ID NO: 1886805
agaaucuggcucugaaauu

SEQ ID NO: 2427319 - RNA, 19 nt, Artificial Sequence
  Description of Artificial Sequence: Synthetic oligonucleotide
  Antisense strand to SEQ ID NO: 2427318
aauuucagagccagauucu

SEQ ID NO: 2427320 - RNA, 19 nt, Artificial Sequence
  Description of Artificial Sequence: Synthetic oligonucleotide
  Sense strand starting at position 169 of SEQ ID NO: 1886805
gcaguauguccuucgcuga

SEQ ID NO: 2427321 - RNA, 19 nt, Artificial Sequence
  Description of Artificial Sequence: Synthetic oligonucleotide
  Antisense strand to SEQ ID NO: 2427320
ucagcgaaggacauacugc

SEQ ID NO: 2427322 - RNA, 19 nt, Artificial Sequence
  Description of Artificial Sequence: Synthetic oligonucleotide
  Sense strand starting at position 289 of SEQ ID NO: 1886805
uuaggaucucuuuggucca

SEQ ID NO: 2427323 - RNA, 19 nt, Artificial Sequence
  Description of Artificial Sequence: Synthetic oligonucleotide
  Antisense strand to SEQ ID NO: 2427322
uggaccaaagagauccuaa

SEQ ID NO: 2427324 - RNA, 19 nt, Artificial Sequence
  Description of Artificial Sequence: Synthetic oligonucleotide
  Sense strand starting at position 292 of SEQ ID NO: 1886805
ggaucucuuugguccaacu

SEQ ID NO: 2427325 - RNA, 19 nt, Artificial Sequence
  Description of Artificial Sequence: Synthetic oligonucleotide
  Antisense strand to SEQ ID NO: 2427324
aguuggaccaaagagaucc

SEQ ID NO: 2427326 - RNA, 19 nt, Artificial Sequence
  Description of Artificial Sequence: Synthetic oligonucleotide
  Sense strand starting at position 349 of SEQ ID NO: 1886805
gaggguagcaccuguuaaa

SEQ ID NO: 2427327 - RNA, 19 nt, Artificial Sequence
  Description of Artificial Sequence: Synthetic oligonucleotide
  Antisense strand to SEQ ID NO: 2427326
uuuaacaggugcuacccuc

SEQ ID NO: 2427328 - RNA, 19 nt, Artificial Sequence
  Description of Artificial Sequence: Synthetic oligonucleotide
  Sense strand starting at position 475 of SEQ ID NO: 1886805
gcaagacaauguuucuaca

SEQ ID NO: 2427329 - RNA, 19 nt, Artificial Sequence
  Description of Artificial Sequence: Synthetic oligonucleotide
  Antisense strand to SEQ ID NO: 2427328
uguagaaacauugucuugc

SEQ ID NO: 2427330 - RNA, 19 nt, Artificial Sequence
  Description of Artificial Sequence: Synthetic oligonucleotide
  Sense strand starting at position 559 of SEQ ID NO: 1886805
cagcuugcagacugacaua

SEQ ID NO: 2427331 - RNA, 19 nt, Artificial Sequence
  Description of Artificial Sequence: Synthetic oligonucleotide
  Antisense strand to SEQ ID NO: 2427330
uaugucagucugcaagcug

SEQ ID NO: 2427332 - RNA, 19 nt, Artificial Sequence
  Description of Artificial Sequence: Synthetic oligonucleotide
  Sense strand starting at position 575 of SEQ ID NO: 1886805
auaggaaucucuguguggu

SEQ ID NO: 2427333 - RNA, 19 nt, Artificial Sequence
  Description of Artificial Sequence: Synthetic oligonucleotide
  Antisense strand to SEQ ID NO: 2427332
accacacagagauuccuau

SEQ ID NO: 2427334 - RNA, 19 nt, Artificial Sequence
  Description of Artificial Sequence: Synthetic oligonucleotide
  Sense strand starting at position 576 of SEQ ID NO: 1886805
uaggaaucucuguguggug

SEQ ID NO: 2427335 - RNA, 19 nt, Artificial Sequence
  Description of Artificial Sequence: Synthetic oligonucleotide
  Antisense strand to SEQ ID NO: 2427334
caccacacagagauuccua

SEQ ID NO: 2427336 - RNA, 19 nt, Artificial Sequence
  Description of Artificial Sequence: Synthetic oligonucleotide
  Sense strand starting at position 578 of SEQ ID NO: 1886805
ggaaucucuguguggugga

SEQ ID NO: 2427337 - RNA, 19 nt, Artificial Sequence
  Description of Artificial Sequence: Synthetic oligonucleotide
  Antisense strand to SEQ ID NO: 2427336
uccaccacacagagauucc

SEQ ID NO: 2427338 - RNA, 19 nt, Artificial Sequence
  Description of Artificial Sequence: Synthetic oligonucleotide
  Sense strand starting at position 723 of SEQ ID NO: 1886805
ggcucugcgugguuauuua

SEQ ID NO: 2427339 - RNA, 19 nt, Artificial Sequence
  Description of Artificial Sequence: Synthetic oligonucleotide
  Antisense strand to SEQ ID NO: 2427338
uaaauaaccacgcagagcc

SEQ ID NO: 2427340 - RNA, 19 nt, Artificial Sequence
  Description of Artificial Sequence: Synthetic oligonucleotide
  Sense strand starting at position 730 of SEQ ID NO: 1886805
cgugguuauuuagcacuca

SEQ ID NO: 2427341 - RNA, 19 nt, Artificial Sequence
  Description of Artificial Sequence: Synthetic oligonucleotide
  Antisense strand to SEQ ID NO: 2427340
ugagugcuaaauaaccacg

SEQ ID NO: 2427342 - RNA, 19 nt, Artificial Sequence
  Description of Artificial Sequence: Synthetic oligonucleotide
  Sense strand starting at position 806 of SEQ ID NO: 1886805
cagucaucgguguuucguu

SEQ ID NO: 2427343 - RNA, 19 nt, Artificial Sequence
  Description of Artificial Sequence: Synthetic oligonucleotide
  Antisense strand to SEQ ID NO: 2427342
aacgaaacaccgaugacug

SEQ ID NO: 2427344 - RNA, 19 nt, Artificial Sequence
  Description of Artificial Sequence: Synthetic oligonucleotide
  Sense strand starting at position 813 of SEQ ID NO: 1886805
cgguguuucguuccaacca

SEQ ID NO: 2427345 - RNA, 19 nt, Artificial Sequence
  Description of Artificial Sequence: Synthetic oligonucleotide
  Antisense strand to SEQ ID NO: 2427344
ugguuggaacgaaacaccg

SEQ ID NO: 2427346 - RNA, 19 nt, Artificial Sequence
  Description of Artificial Sequence: Synthetic oligonucleotide
  Sense strand starting at position 1518 of SEQ ID NO: 1886805
cgccuuugccuggaacaca

SEQ ID NO: 2427347 - RNA, 19 nt, Artificial Sequence
  Description of Artificial Sequence: Synthetic oligonucleotide
  Antisense strand to SEQ ID NO: 2427346
uguguuccaggcaaaggcg

SEQ ID NO: 2427348 - RNA, 19 nt, Artificial Sequence
  Description of Artificial Sequence: Synthetic oligonucleotide
  Sense strand starting at position 1604 of SEQ ID NO: 1886805
aguguaauggcgcugcgau

SEQ ID NO: 2427349 - RNA, 19 nt, Artificial Sequence
  Description of Artificial Sequence: Synthetic oligonucleotide
  Antisense strand to SEQ ID NO: 2427348
aucgcagcgccauuacacu

SEQ ID NO: 2427350 - RNA, 19 nt, Artificial Sequence
  Description of Artificial Sequence: Synthetic oligonucleotide
  Sense strand starting at position 1651 of SEQ ID NO: 1886805
cccaauacgcgcguucauu

SEQ ID NO: 2427351 - RNA, 19 nt, Artificial Sequence
  Description of Artificial Sequence: Synthetic oligonucleotide
  Antisense strand to SEQ ID NO: 2427350
aaugaacgcgcguauuggg

SEQ ID NO: 2427352 - RNA, 19 nt, Artificial Sequence
  Description of Artificial Sequence: Synthetic oligonucleotide
  Sense strand starting at position 1917 of SEQ ID NO: 1886805
ccgaguuagagcugagauu

SEQ ID NO: 2427353 - RNA, 19 nt, Artificial Sequence
  Description of Artificial Sequence: Synthetic oligonucleotide
  Antisense strand to SEQ ID NO: 2427352
aaucucagcucuaacucgg

SEQ ID NO: 2427354 - RNA, 19 nt, Artificial Sequence
  Description of Artificial Sequence: Synthetic oligonucleotide
  Sense strand starting at position 1918 of SEQ ID NO: 1886805
cgaguuagagcugagauua

SEQ ID NO: 2427355 - RNA, 19 nt, Artificial Sequence
  Description of Artificial Sequence: Synthetic oligonucleotide
  Antisense strand to SEQ ID NO: 2427354
uaaucucagcucuaacucg

SEQ ID NO: 2427356 - RNA, 19 nt, Artificial Sequence
  Description of Artificial Sequence: Synthetic oligonucleotide
  Sense strand starting at position 1926 of SEQ ID NO: 1886805
agcugagauuauccugagu

SEQ ID NO: 2427357 - RNA, 19 nt, Artificial Sequence
  Description of Artificial Sequence: Synthetic oligonucleotide
  Antisense strand to SEQ ID NO: 2427356
acucaggauaaucucagcu

SEQ ID NO: 2427358 - RNA, 19 nt, Artificial Sequence
  Description of Artificial Sequence: Synthetic oligonucleotide
  Sense strand starting at position 1931 of SEQ ID NO: 1886805
agauuauccugaguuccuu

SEQ ID NO: 2427359 - RNA, 19 nt, Artificial Sequence
  Description of Artificial Sequence: Synthetic oligonucleotide
  Antisense strand to SEQ ID NO: 2427358
aaggaacucaggauaaucu

SEQ ID NO: 2427360 - RNA, 19 nt, Artificial Sequence
  Description of Artificial Sequence: Synthetic oligonucleotide
  Sense strand starting at position 1961 of SEQ ID NO: 1886805
cucagagcauccuugacuu

SEQ ID NO: 2427361 - RNA, 19 nt, Artificial Sequence
  Description of Artificial Sequence: Synthetic oligonucleotide
  Antisense strand to SEQ ID NO: 2427360
aagucaaggaugcucugag

SEQ ID NO: 2427362 - RNA, 19 nt, Artificial Sequence
  Description of Artificial Sequence: Synthetic oligonucleotide
  Sense strand starting at position 1975 of SEQ ID NO: 1886805
gacuuuggagaaugguuau

SEQ ID NO: 2427363 - RNA, 19 nt, Artificial Sequence
  Description of Artificial Sequence: Synthetic oligonucleotide
  Antisense strand to SEQ ID NO: 2427362
auaaccauucuccaaaguc

SEQ ID NO: 2427364 - RNA, 19 nt, Artificial Sequence
  Description of Artificial Sequence: Synthetic oligonucleotide
  Sense strand starting at position 1978 of SEQ ID NO: 1886805
uuuggagaaugguuaucuu

SEQ ID NO: 2427365 - RNA, 19 nt, Artificial Sequence
  Description of Artificial Sequence: Synthetic oligonucleotide
  Antisense strand to SEQ ID NO: 2427364
aagauaaccauucuccaaa

SEQ ID NO: 2427366 - RNA, 19 nt, Artificial Sequence
  Description of Artificial Sequence: Synthetic oligonucleotide
  Sense strand starting at position 1981 of SEQ ID NO: 1886805
ggagaaugguuaucuucuu

SEQ ID NO: 2427367 - RNA, 19 nt, Artificial Sequence
  Description of Artificial Sequence: Synthetic oligonucleotide
  Antisense strand to SEQ ID NO: 2427366
aagaagauaaccauucucc

SEQ ID NO: 2427368 - RNA, 19 nt, Artificial Sequence
  Description of Artificial Sequence: Synthetic oligonucleotide
  Sense strand starting at position 1982 of SEQ ID NO: 1886805
gagaaugguuaucuucuuu

SEQ ID NO: 2427369 - RNA, 19 nt, Artificial Sequence
  Description of Artificial Sequence: Synthetic oligonucleotide
  Antisense strand to SEQ ID NO: 2427368
aaagaagauaaccauucuc

SEQ ID NO: 2427370 - RNA, 19 nt, Artificial Sequence
  Description of Artificial Sequence: Synthetic oligonucleotide
  Sense strand starting at position 2017 of SEQ ID NO: 1886805
agggaauuaugguuagcau

SEQ ID NO: 2427371 - RNA, 19 nt, Artificial Sequence
  Description of Artificial Sequence: Synthetic oligonucleotide
  Antisense strand to SEQ ID NO: 2427370
augcuaaccauaauucccu

SEQ ID NO: 2427372 - RNA, 19 nt, Artificial Sequence
  Description of Artificial Sequence: Synthetic oligonucleotide
  Sense strand starting at position 2018 of SEQ ID NO: 1886805
gggaauuaugguuagcauu

SEQ ID NO: 2427373 - RNA, 19 nt, Artificial Sequence
  Description of Artificial Sequence: Synthetic oligonucleotide
  Antisense strand to SEQ ID NO: 2427372
aaugcuaaccauaauuccc

SEQ ID NO: 2427374 - RNA, 19 nt, Artificial Sequence
  Description of Artificial Sequence: Synthetic oligonucleotide
  Sense strand starting at position 2049 of SEQ ID NO: 1886805
gcgccaugcccagcauauu

SEQ ID NO: 2427375 - RNA, 19 nt, Artificial Sequence
  Description of Artificial Sequence: Synthetic oligonucleotide
  Antisense strand to SEQ ID NO: 2427374
aauaugcugggcauggcgc

SEQ ID NO: 2427376 - RNA, 19 nt, Artificial Sequence
  Description of Artificial Sequence: Synthetic oligonucleotide
  Sense strand starting at position 2952 of SEQ ID NO: 1886805
gugaaccaaugguuaucau

SEQ ID NO: 2427377 - RNA, 19 nt, Artificial Sequence
  Description of Artificial Sequence: Synthetic oligonucleotide
  Antisense strand to SEQ ID NO: 2427376
augauaaccauugguucac

SEQ ID NO: 2427378 - RNA, 19 nt, Artificial Sequence
  Description of Artificial Sequence: Synthetic oligonucleotide
  Sense strand starting at position 2962 of SEQ ID NO: 1886805
gguuaucauccugguucua

SEQ ID NO: 2427379 - RNA, 19 nt, Artificial Sequence
  Description of Artificial Sequence: Synthetic oligonucleotide
  Antisense strand to SEQ ID NO: 2427378
uagaaccaggaugauaacc

SEQ ID NO: 2427380 - RNA, 19 nt, Artificial Sequence
  Description of Artificial Sequence: Synthetic oligonucleotide
  Sense strand starting at position 3003 of SEQ ID NO: 1886805
gggauuccaugaguuucca

SEQ ID NO: 2427381 - RNA, 19 nt, Artificial Sequence
  Description of Artificial Sequence: Synthetic oligonucleotide
  Antisense strand to SEQ ID NO: 2427380
uggaaacucauggaauccc

SEQ ID NO: 2427382 - RNA, 19 nt, Artificial Sequence
  Description of Artificial Sequence: Synthetic oligonucleotide
  Sense strand starting at position 3011 of SEQ ID NO: 1886805
augaguuuccagggccaua

SEQ ID NO: 2427383 - RNA, 19 nt, Artificial Sequence
  Description of Artificial Sequence: Synthetic oligonucleotide
  Antisense strand to SEQ ID NO: 2427382
uauggcccuggaaacucau

SEQ ID NO: 2427384 - RNA, 19 nt, Artificial Sequence
  Description of Artificial Sequence: Synthetic oligonucleotide
  Sense strand starting at position 3211 of SEQ ID NO: 1886805
cgugacauuuguucaacgu

SEQ ID NO: 2427385 - RNA, 19 nt, Artificial Sequence
  Description of Artificial Sequence: Synthetic oligonucleotide
  Antisense strand to SEQ ID NO: 2427384
acguugaacaaaugucacg

SEQ ID NO: 2427386 - RNA, 19 nt, Artificial Sequence
  Description of Artificial Sequence: Synthetic oligonucleotide
  Sense strand starting at position 3295 of SEQ ID NO: 1886805
gagcuuacagucuaguaaa

SEQ ID NO: 2427387 - RNA, 19 nt, Artificial Sequence
  Description of Artificial Sequence: Synthetic oligonucleotide
  Antisense strand to SEQ ID NO: 2427386
uuuacuagacuguaagcuc

SEQ ID NO: 2427388 - RNA, 19 nt, Artificial Sequence
  Description of Artificial Sequence: Synthetic oligonucleotide
  Sense strand starting at position 225 of SEQ ID NO: 1886804
aaugaauagcucugggaug

SEQ ID NO: 2427389 - RNA, 19 nt, Artificial Sequence
  Description of Artificial Sequence: Synthetic oligonucleotide
  Antisense strand to SEQ ID NO: 2427388
caucccagagcuauucauu

SEQ ID NO: 2427390 - RNA, 19 nt, Artificial Sequence
  Description of Artificial Sequence: Synthetic oligonucleotide
  Sense strand starting at position 276 of SEQ ID NO: 1886804
ccaagugauuuagauauaa

SEQ ID NO: 2427391 - RNA, 19 nt, Artificial Sequence
  Description of Artificial Sequence: Synthetic oligonucleotide
  Antisense strand to SEQ ID NO: 2427390
uuauaucuaaaucacuugg

SEQ ID NO: 2427392 - RNA, 19 nt, Artificial Sequence
  Description of Artificial Sequence: Synthetic oligonucleotide
  Sense strand starting at position 287 of SEQ ID NO: 1886804
agauauaaccaauggccau

SEQ ID NO: 2427393 - RNA, 19 nt, Artificial Sequence
  Description of Artificial Sequence: Synthetic oligonucleotide
  Antisense strand to SEQ ID NO: 2427392
auggccauugguuauaucu

SEQ ID NO: 2427394 - RNA, 19 nt, Artificial Sequence
  Description of Artificial Sequence: Synthetic oligonucleotide
  Sense strand starting at position 348 of SEQ ID NO: 1886804
gaaauaucauggucagauc

SEQ ID NO: 2427395 - RNA, 19 nt, Artificial Sequence
  Description of Artificial Sequence: Synthetic oligonucleotide
  Antisense strand to SEQ ID NO: 2427394
gaucugaccaugauauuuc

SEQ ID NO: 2427396 - RNA, 19 nt, Artificial Sequence
  Description of Artificial Sequence: Synthetic oligonucleotide
  Sense strand starting at position 366 of SEQ ID NO: 1886804
cugaaucuuggacagcuau

SEQ ID NO: 2427397 - RNA, 19 nt, Artificial Sequence
  Description of Artificial Sequence: Synthetic oligonucleotide
  Antisense strand to SEQ ID NO: 2427396
auagcuguccaagauucag

SEQ ID NO: 2427398 - RNA, 19 nt, Artificial Sequence
  Description of Artificial Sequence: Synthetic oligonucleotide
  Sense strand starting at position 379 of SEQ ID NO: 1886804
agcuaucccuggucuugaa

SEQ ID NO: 2427399 - RNA, 19 nt, Artificial Sequence
  Description of Artificial Sequence: Synthetic oligonucleotide
  Antisense strand to SEQ ID NO: 2427398
uucaagaccagggauagcu

SEQ ID NO: 2427400 - RNA, 19 nt, Artificial Sequence
  Description of Artificial Sequence: Synthetic oligonucleotide
  Sense strand starting at position 394 of SEQ ID NO: 1886804
ugaagaaucuggcucugaa

SEQ ID NO: 2427401 - RNA, 19 nt, Artificial Sequence
  Description of Artificial Sequence: Synthetic oligonucleotide
  Antisense strand to SEQ ID NO: 2427400
uucagagccagauucuuca

SEQ ID NO: 2427402 - RNA, 19 nt, Artificial Sequence
  Description of Artificial Sequence: Synthetic oligonucleotide
  Sense strand starting at position 397 of SEQ ID NO: 1886804
agaaucuggcucugaaauu

SEQ ID NO: 2427403 - RNA, 19 nt, Artificial Sequence
  Description of Artificial Sequence: Synthetic oligonucleotide
  Antisense strand to SEQ ID NO: 2427402
aauuucagagccagauucu

SEQ ID NO: 2427404 - RNA, 19 nt, Artificial Sequence
  Description of Artificial Sequence: Synthetic oligonucleotide
  Sense strand starting at position 511 of SEQ ID NO: 1886804
gcaguauguccuucgcuga

SEQ ID NO: 2427405 - RNA, 19 nt, Artificial Sequence
  Description of Artificial Sequence: Synthetic oligonucleotide
  Antisense strand to SEQ ID NO: 2427404
ucagcgaaggacauacugc

SEQ ID NO: 2427406 - RNA, 19 nt, Artificial Sequence
  Description of Artificial Sequence: Synthetic oligonucleotide
  Sense strand starting at position 631 of SEQ ID NO: 1886804
uuaggaucucuuuggucca

SEQ ID NO: 2427407 - RNA, 19 nt, Artificial Sequence
  Description of Artificial Sequence: Synthetic oligonucleotide
  Antisense strand to SEQ ID NO: 2427406
uggaccaaagagauccuaa

SEQ ID NO: 2427408 - RNA, 19 nt, Artificial Sequence
  Description of Artificial Sequence: Synthetic oligonucleotide
  Sense strand starting at position 634 of SEQ ID NO: 1886804
ggaucucuuugguccaacu

SEQ ID NO: 2427409 - RNA, 19 nt, Artificial Sequence
  Description of Artificial Sequence: Synthetic oligonucleotide
  Antisense strand to SEQ ID NO: 2427408
aguuggaccaaagagaucc

SEQ ID NO: 2427410 - RNA, 19 nt, Artificial Sequence
  Description of Artificial Sequence: Synthetic oligonucleotide
  Sense strand starting at position 691 of SEQ ID NO: 1886804
gaggguagcaccuguuaaa

SEQ ID NO: 2427411 - RNA, 19 nt, Artificial Sequence
  Description of Artificial Sequence: Synthetic oligonucleotide
  Antisense strand to SEQ ID NO: 2427410
uuuaacaggugcuacccuc

SEQ ID NO: 2427412 - RNA, 19 nt, Artificial Sequence
  Description of Artificial Sequence: Synthetic oligonucleotide
  Sense strand starting at position 817 of SEQ ID NO: 1886804
gcaagacaauguuucuaca

SEQ ID NO: 2427413 - RNA, 19 nt, Artificial Sequence
  Description of Artificial Sequence: Synthetic oligonucleotide
  Antisense strand to SEQ ID NO: 2427412
uguagaaacauugucuugc

SEQ ID NO: 2427414 - RNA, 19 nt, Artificial Sequence
  Description of Artificial Sequence: Synthetic oligonucleotide
  Sense strand starting at position 901 of SEQ ID NO: 1886804
cagcuugcagacugacaua

SEQ ID NO: 2427415 - RNA, 19 nt, Artificial Sequence
  Description of Artificial Sequence: Synthetic oligonucleotide
  Antisense strand to SEQ ID NO: 2427414
uaugucagucugcaagcug

SEQ ID NO: 2427416 - RNA, 19 nt, Artificial Sequence
  Description of Artificial Sequence: Synthetic oligonucleotide
  Sense strand starting at position 917 of SEQ ID NO: 1886804
auaggaaucucuguguggu

SEQ ID NO: 2427417 - RNA, 19 nt, Artificial Sequence
  Description of Artificial Sequence: Synthetic oligonucleotide
  Antisense strand to SEQ ID NO: 2427416
accacacagagauuccuau

SEQ ID NO: 2427418 - RNA, 19 nt, Artificial Sequence
  Description of Artificial Sequence: Synthetic oligonucleotide
  Sense strand starting at position 918 of SEQ ID NO: 1886804
uaggaaucucuguguggug

SEQ ID NO: 2427419 - RNA, 19 nt, Artificial Sequence
  Description of Artificial Sequence: Synthetic oligonucleotide
  Antisense strand to SEQ ID NO: 2427418
caccacacagagauuccua

SEQ ID NO: 2427420 - RNA, 19 nt, Artificial Sequence
  Description of Artificial Sequence: Synthetic oligonucleotide
  Sense strand starting at position 920 of SEQ ID NO: 1886804
ggaaucucuguguggugga

SEQ ID NO: 2427421 - RNA, 19 nt, Artificial Sequence
  Description of Artificial Sequence: Synthetic oligonucleotide
  Antisense strand to SEQ ID NO: 2427420
uccaccacacagagauucc

SEQ ID NO: 2427422 - RNA, 19 nt, Artificial Sequence
  Description of Artificial Sequence: Synthetic oligonucleotide
  Sense strand starting at position 1072 of SEQ ID NO: 1886804
cgugguuauuuagcacuca

SEQ ID NO: 2427423 - RNA, 19 nt, Artificial Sequence
  Description of Artificial Sequence: Synthetic oligonucleotide
  Antisense strand to SEQ ID NO: 2427422
ugagugcuaaauaaccacg

SEQ ID NO: 2427424 - RNA, 19 nt, Artificial Sequence
  Description of Artificial Sequence: Synthetic oligonucleotide
  Sense strand starting at position 1148 of SEQ ID NO: 1886804
cagucaucgguguuucguu

SEQ ID NO: 2427425 - RNA, 19 nt, Artificial Sequence
  Description of Artificial Sequence: Synthetic oligonucleotide
  Antisense strand to SEQ ID NO: 2427424
aacgaaacaccgaugacug

SEQ ID NO: 2427426 - RNA, 19 nt, Artificial Sequence
  Description of Artificial Sequence: Synthetic oligonucleotide
  Sense strand starting at position 1155 of SEQ ID NO: 1886804
cgguguuucguuccaacca

SEQ ID NO: 2427427 - RNA, 19 nt, Artificial Sequence
  Description of Artificial Sequence: Synthetic oligonucleotide
  Antisense strand to SEQ ID NO: 2427426
ugguuggaacgaaacaccg

SEQ ID NO: 2427428 - RNA, 19 nt, Artificial Sequence
  Description of Artificial Sequence: Synthetic oligonucleotide
  Sense strand starting at position 1860 of SEQ ID NO: 1886804
cgccuuugccuggaacaca

SEQ ID NO: 2427429 - RNA, 19 nt, Artificial Sequence
  Description of Artificial Sequence: Synthetic oligonucleotide
  Antisense strand to SEQ ID NO: 2427428
uguguuccaggcaaaggcg

SEQ ID NO: 2427430 - RNA, 19 nt, Artificial Sequence
  Description of Artificial Sequence: Synthetic oligonucleotide
  Sense strand starting at position 1946 of SEQ ID NO: 1886804
aguguaauggcgcugcgau

SEQ ID NO: 2427431 - RNA, 19 nt, Artificial Sequence
  Description of Artificial Sequence: Synthetic oligonucleotide
  Antisense strand to SEQ ID NO: 2427430
aucgcagcgccauuacacu

SEQ ID NO: 2427432 - RNA, 19 nt, Artificial Sequence
  Description of Artificial Sequence: Synthetic oligonucleotide
  Sense strand starting at position 1993 of SEQ ID NO: 1886804
cccaauacgcgcguucauu

SEQ ID NO: 2427433 - RNA, 19 nt, Artificial Sequence
  Description of Artificial Sequence: Synthetic oligonucleotide
  Antisense strand to SEQ ID NO: 2427432
aaugaacgcgcguauuggg

SEQ ID NO: 2427434 - RNA, 19 nt, Artificial Sequence
  Description of Artificial Sequence: Synthetic oligonucleotide
  Sense strand starting at position 2259 of SEQ ID NO: 1886804
ccgaguuagagcugagauu

SEQ ID NO: 2427435 - RNA, 19 nt, Artificial Sequence
  Description of Artificial Sequence: Synthetic oligonucleotide
  Antisense strand to SEQ ID NO: 2427434
aaucucagcucuaacucgg

SEQ ID NO: 2427436 - RNA, 19 nt, Artificial Sequence
  Description of Artificial Sequence: Synthetic oligonucleotide
  Sense strand starting at position 2260 of SEQ ID NO: 1886804
cgaguuagagcugagauua

SEQ ID NO: 2427437 - RNA, 19 nt, Artificial Sequence
  Description of Artificial Sequence: Synthetic oligonucleotide
  Antisense strand to SEQ ID NO: 2427436
uaaucucagcucuaacucg

SEQ ID NO: 2427438 - RNA, 19 nt, Artificial Sequence
  Description of Artificial Sequence: Synthetic oligonucleotide
  Sense strand starting at position 2268 of SEQ ID NO: 1886804
agcugagauuauccugagu

SEQ ID NO: 2427439 - RNA, 19 nt, Artificial Sequence
  Description of Artificial Sequence: Synthetic oligonucleotide
  Antisense strand to SEQ ID NO: 2427438
acucaggauaaucucagcu

SEQ ID NO: 2427440 - RNA, 19 nt, Artificial Sequence
  Description of Artificial Sequence: Synthetic oligonucleotide
  Sense strand starting at position 2273 of SEQ ID NO: 1886804
agauuauccugaguuccuu

SEQ ID NO: 2427441 - RNA, 19 nt, Artificial Sequence
  Description of Artificial Sequence: Synthetic oligonucleotide
  Antisense strand to SEQ ID NO: 2427440
aaggaacucaggauaaucu

SEQ ID NO: 2427442 - RNA, 19 nt, Artificial Sequence
  Description of Artificial Sequence: Synthetic oligonucleotide
  Sense strand starting at position 2303 of SEQ ID NO: 1886804
cucagagcauccuugacuu

SEQ ID NO: 2427443 - RNA, 19 nt, Artificial Sequence
  Description of Artificial Sequence: Synthetic oligonucleotide
  Antisense strand to SEQ ID NO: 2427442
aagucaaggaugcucugag

SEQ ID NO: 2427444 - RNA, 19 nt, Artificial Sequence
  Description of Artificial Sequence: Synthetic oligonucleotide
  Sense strand starting at position 2317 of SEQ ID NO: 1886804
gacuuuggagaaugguuau

SEQ ID NO: 2427445 - RNA, 19 nt, Artificial Sequence
  Description of Artificial Sequence: Synthetic oligonucleotide
  Antisense strand to SEQ ID NO: 2427444
auaaccauucuccaaaguc

SEQ ID NO: 2427446 - RNA, 19 nt, Artificial Sequence
  Description of Artificial Sequence: Synthetic oligonucleotide
  Sense strand starting at position 2320 of SEQ ID NO: 1886804
uuuggagaaugguuaucuu

SEQ ID NO: 2427447 - RNA, 19 nt, Artificial Sequence
  Description of Artificial Sequence: Synthetic oligonucleotide
  Antisense strand to SEQ ID NO: 2427446
aagauaaccauucuccaaa

SEQ ID NO: 2427448 - RNA, 19 nt, Artificial Sequence
  Description of Artificial Sequence: Synthetic oligonucleotide
  Sense strand starting at position 2323 of SEQ ID NO: 1886804
ggagaaugguuaucuucuu

SEQ ID NO: 2427449 - RNA, 19 nt, Artificial Sequence
  Description of Artificial Sequence: Synthetic oligonucleotide
  Antisense strand to SEQ ID NO: 2427448
aagaagauaaccauucucc

SEQ ID NO: 2427450 - RNA, 19 nt, Artificial Sequence
  Description of Artificial Sequence: Synthetic oligonucleotide
  Sense strand starting at position 2324 of SEQ ID NO: 1886804
gagaaugguuaucuucuuu

SEQ ID NO: 2427451 - RNA, 19 nt, Artificial Sequence
  Description of Artificial Sequence: Synthetic oligonucleotide
  Antisense strand to SEQ ID NO: 2427450
aaagaagauaaccauucuc

SEQ ID NO: 2427452 - RNA, 19 nt, Artificial Sequence
  Description of Artificial Sequence: Synthetic oligonucleotide
  Sense strand starting at position 2359 of SEQ ID NO: 1886804
agggaauuaugguuagcau

SEQ ID NO: 2427453 - RNA, 19 nt, Artificial Sequence
  Description of Artificial Sequence: Synthetic oligonucleotide
  Antisense strand to SEQ ID NO: 2427452
augcuaaccauaauucccu

SEQ ID NO: 2427454 - RNA, 19 nt, Artificial Sequence
  Description of Artificial Sequence: Synthetic oligonucleotide
  Sense strand starting at position 2360 of SEQ ID NO: 1886804
gggaauuaugguuagcauu

SEQ ID NO: 2427455 - RNA, 19 nt, Artificial Sequence
  Description of Artificial Sequence: Synthetic oligonucleotide
  Antisense strand to SEQ ID NO: 2427454
aaugcuaaccauaauuccc

SEQ ID NO: 2427456 - RNA, 19 nt, Artificial Sequence
  Description of Artificial Sequence: Synthetic oligonucleotide
  Sense strand starting at position 2391 of SEQ ID NO: 1886804
gcgccaugcccagcauauu

SEQ ID NO: 2427457 - RNA, 19 nt, Artificial Sequence
  Description of Artificial Sequence: Synthetic oligonucleotide
  Antisense strand to SEQ ID NO: 2427456
aauaugcugggcauggcgc

SEQ ID NO: 2427458 - RNA, 19 nt, Artificial Sequence
  Description of Artificial Sequence: Synthetic oligonucleotide
  Sense strand starting at position 3294 of SEQ ID NO: 1886804
gugaaccaaugguuaucau

SEQ ID NO: 2427459 - RNA, 19 nt, Artificial Sequence
  Description of Artificial Sequence: Synthetic oligonucleotide
  Antisense strand to SEQ ID NO: 2427458
augauaaccauugguucac

SEQ ID NO: 2427460 - RNA, 19 nt, Artificial Sequence
  Description of Artificial Sequence: Synthetic oligonucleotide
  Sense strand starting at position 3345 of SEQ ID NO: 1886804
gggauuccaugaguuucca

SEQ ID NO: 2427461 - RNA, 19 nt, Artificial Sequence
  Description of Artificial Sequence: Synthetic oligonucleotide
  Antisense strand to SEQ ID NO: 2427460
uggaaacucauggaauccc

SEQ ID NO: 2427462 - RNA, 19 nt, Artificial Sequence
  Description of Artificial Sequence: Synthetic oligonucleotide
  Sense strand starting at position 3353 of SEQ ID NO: 1886804
augaguuuccagggccaua

SEQ ID NO: 2427463 - RNA, 19 nt, Artificial Sequence
  Description of Artificial Sequence: Synthetic oligonucleotide
  Antisense strand to SEQ ID NO: 2427462
uauggcccuggaaacucau

SEQ ID NO: 2427464 - RNA, 19 nt, Artificial Sequence
  Description of Artificial Sequence: Synthetic oligonucleotide
  Sense strand starting at position 3553 of SEQ ID NO: 1886804
cgugacauuuguucaacgu

SEQ ID NO: 2427465 - RNA, 19 nt, Artificial Sequence
  Description of Artificial Sequence: Synthetic oligonucleotide
  Antisense strand to SEQ ID NO: 2427464
acguugaacaaaugucacg

SEQ ID NO: 2427466 - RNA, 19 nt, Artificial Sequence
  Description of Artificial Sequence: Synthetic oligonucleotide
  Sense strand starting at position 3637 of SEQ ID NO: 1886804
gagcuuacagucuaguaaa

SEQ ID NO: 2427467 - RNA, 19 nt, Artificial Sequence
  Description of Artificial Sequence: Synthetic oligonucleotide
  Antisense strand to SEQ ID NO: 2427466
uuuacuagacuguaagcuc

SEQ ID NO: 2427468 - RNA, 19 nt, Artificial Sequence
  Description of Artificial Sequence: Synthetic oligonucleotide
  Sense strand starting at position 170 of SEQ ID NO: 1886802
accuaugagguaugagcua

SEQ ID NO: 2427469 - RNA, 19 nt, Artificial Sequence
  Description of Artificial Sequence: Synthetic oligonucleotide
  Antisense strand to SEQ ID NO: 2427468
uagcucauaccucauaggu

SEQ ID NO: 2427470 - RNA, 19 nt, Artificial Sequence
  Description of Artificial Sequence: Synthetic oligonucleotide
  Sense strand starting at position 175 of SEQ ID NO: 1886802
ugagguaugagcuagcagu

SEQ ID NO: 2427471 - RNA, 19 nt, Artificial Sequence
  Description of Artificial Sequence: Synthetic oligonucleotide
  Antisense strand to SEQ ID NO: 2427470
acugcuagcucauaccuca

SEQ ID NO: 2427472 - RNA, 19 nt, Artificial Sequence
  Description of Artificial Sequence: Synthetic oligonucleotide
  Sense strand starting at position 232 of SEQ ID NO: 1886802
acuccacugugaucagaau

SEQ ID NO: 2427473 - RNA, 19 nt, Artificial Sequence
  Description of Artificial Sequence: Synthetic oligonucleotide
  Antisense strand to SEQ ID NO: 2427472
auucugaucacaguggagu

SEQ ID NO: 2427474 - RNA, 19 nt, Artificial Sequence
  Description of Artificial Sequence: Synthetic oligonucleotide
  Sense strand starting at position 399 of SEQ ID NO: 1886802
cuguuagcauuguuaaaga

SEQ ID NO: 2427475 - RNA, 19 nt, Artificial Sequence
  Description of Artificial Sequence: Synthetic oligonucleotide
  Antisense strand to SEQ ID NO: 2427474
ucuuuaacaaugcuaacag

SEQ ID NO: 2427476 - RNA, 19 nt, Artificial Sequence
  Description of Artificial Sequence: Synthetic oligonucleotide
  Sense strand starting at position 830 of SEQ ID NO: 1886802
aaugaauagcucugggaug

SEQ ID NO: 2427477 - RNA, 19 nt, Artificial Sequence
  Description of Artificial Sequence: Synthetic oligonucleotide
  Antisense strand to SEQ ID NO: 2427476
caucccagagcuauucauu

SEQ ID NO: 2427478 - RNA, 19 nt, Artificial Sequence
  Description of Artificial Sequence: Synthetic oligonucleotide
  Sense strand starting at position 881 of SEQ ID NO: 1886802
ccaagugauuuagauauaa

SEQ ID NO: 2427479 - RNA, 19 nt, Artificial Sequence
  Description of Artificial Sequence: Synthetic oligonucleotide
  Antisense strand to SEQ ID NO: 2427478
uuauaucuaaaucacuugg

SEQ ID NO: 2427480 - RNA, 19 nt, Artificial Sequence
  Description of Artificial Sequence: Synthetic oligonucleotide
  Sense strand starting at position 892 of SEQ ID NO: 1886802
agauauaaccaauggccau

SEQ ID NO: 2427481 - RNA, 19 nt, Artificial Sequence
  Description of Artificial Sequence: Synthetic oligonucleotide
  Antisense strand to SEQ ID NO: 2427480
auggccauugguuauaucu

SEQ ID NO: 2427482 - RNA, 19 nt, Artificial Sequence
  Description of Artificial Sequence: Synthetic oligonucleotide
  Sense strand starting at position 953 of SEQ ID NO: 1886802
gaaauaucauggucagauc

SEQ ID NO: 2427483 - RNA, 19 nt, Artificial Sequence
  Description of Artificial Sequence: Synthetic oligonucleotide
  Antisense strand to SEQ ID NO: 2427482
gaucugaccaugauauuuc

SEQ ID NO: 2427484 - RNA, 19 nt, Artificial Sequence
  Description of Artificial Sequence: Synthetic oligonucleotide
  Sense strand starting at position 971 of SEQ ID NO: 1886802
cugaaucuuggacagcuau

SEQ ID NO: 2427485 - RNA, 19 nt, Artificial Sequence
  Description of Artificial Sequence: Synthetic oligonucleotide
  Antisense strand to SEQ ID NO: 2427484
auagcuguccaagauucag

SEQ ID NO: 2427486 - RNA, 19 nt, Artificial Sequence
  Description of Artificial Sequence: Synthetic oligonucleotide
  Sense strand starting at position 984 of SEQ ID NO: 1886802
agcuaucccuggucuugaa

SEQ ID NO: 2427487 - RNA, 19 nt, Artificial Sequence
  Description of Artificial Sequence: Synthetic oligonucleotide
  Antisense strand to SEQ ID NO: 2427486
uucaagaccagggauagcu

SEQ ID NO: 2427488 - RNA, 19 nt, Artificial Sequence
  Description of Artificial Sequence: Synthetic oligonucleotide
  Sense strand starting at position 999 of SEQ ID NO: 1886802
ugaagaaucuggcucugaa

SEQ ID NO: 2427489 - RNA, 19 nt, Artificial Sequence
  Description of Artificial Sequence: Synthetic oligonucleotide
  Antisense strand to SEQ ID NO: 2427488
uucagagccagauucuuca

SEQ ID NO: 2427490 - RNA, 19 nt, Artificial Sequence
  Description of Artificial Sequence: Synthetic oligonucleotide
  Sense strand starting at position 1002 of SEQ ID NO: 1886802
agaaucuggcucugaaauu

SEQ ID NO: 2427491 - RNA, 19 nt, Artificial Sequence
  Description of Artificial Sequence: Synthetic oligonucleotide
  Antisense strand to SEQ ID NO: 2427490
aauuucagagccagauucu

SEQ ID NO: 2427492 - RNA, 19 nt, Artificial Sequence
  Description of Artificial Sequence: Synthetic oligonucleotide
  Sense strand starting at position 1116 of SEQ ID NO: 1886802
gcaguauguccuucgcuga

SEQ ID NO: 2427493 - RNA, 19 nt, Artificial Sequence
  Description of Artificial Sequence: Synthetic oligonucleotide
  Antisense strand to SEQ ID NO: 2427492
ucagcgaaggacauacugc

SEQ ID NO: 2427494 - RNA, 19 nt, Artificial Sequence
  Description of Artificial Sequence: Synthetic oligonucleotide
  Sense strand starting at position 1236 of SEQ ID NO: 1886802
uuaggaucucuuuggucca

SEQ ID NO: 2427495 - RNA, 19 nt, Artificial Sequence
  Description of Artificial Sequence: Synthetic oligonucleotide
  Antisense strand to SEQ ID NO: 2427494
uggaccaaagagauccuaa

SEQ ID NO: 2427496 - RNA, 19 nt, Artificial Sequence
  Description of Artificial Sequence: Synthetic oligonucleotide
  Sense strand starting at position 1239 of SEQ ID NO: 1886802
ggaucucuuugguccaacu

SEQ ID NO: 2427497 - RNA, 19 nt, Artificial Sequence
  Description of Artificial Sequence: Synthetic oligonucleotide
  Antisense strand to SEQ ID NO: 2427496
aguuggaccaaagagaucc

SEQ ID NO: 2427498 - RNA, 19 nt, Artificial Sequence
  Description of Artificial Sequence: Synthetic oligonucleotide
  Sense strand starting at position 1296 of SEQ ID NO: 1886802
gaggguagcaccuguuaaa

SEQ ID NO: 2427499 - RNA, 19 nt, Artificial Sequence
  Description of Artificial Sequence: Synthetic oligonucleotide
  Antisense strand to SEQ ID NO: 2427498
uuuaacaggugcuacccuc

SEQ ID NO: 2427500 - RNA, 19 nt, Artificial Sequence
  Description of Artificial Sequence: Synthetic oligonucleotide
  Sense strand starting at position 1422 of SEQ ID NO: 1886802
gcaagacaauguuucuaca

SEQ ID NO: 2427501 - RNA, 19 nt, Artificial Sequence
  Description of Artificial Sequence: Synthetic oligonucleotide
  Antisense strand to SEQ ID NO: 2427500
uguagaaacauugucuugc

SEQ ID NO: 2427502 - RNA, 19 nt, Artificial Sequence
  Description of Artificial Sequence: Synthetic oligonucleotide
  Sense strand starting at position 1506 of SEQ ID NO: 1886802
cagcuugcagacugacaua

SEQ ID NO: 2427503 - RNA, 19 nt, Artificial Sequence
  Description of Artificial Sequence: Synthetic oligonucleotide
  Antisense strand to SEQ ID NO: 2427502
uaugucagucugcaagcug

SEQ ID NO: 2427504 - RNA, 19 nt, Artificial Sequence
  Description of Artificial Sequence: Synthetic oligonucleotide
  Sense strand starting at position 1522 of SEQ ID NO: 1886802
auaggaaucucuguguggu

SEQ ID NO: 2427505 - RNA, 19 nt, Artificial Sequence
  Description of Artificial Sequence: Synthetic oligonucleotide
  Antisense strand to SEQ ID NO: 2427504
accacacagagauuccuau

SEQ ID NO: 2427506 - RNA, 19 nt, Artificial Sequence
  Description of Artificial Sequence: Synthetic oligonucleotide
  Sense strand starting at position 1525 of SEQ ID NO: 1886802
ggaaucucuguguggugga

SEQ ID NO: 2427507 - RNA, 19 nt, Artificial Sequence
  Description of Artificial Sequence: Synthetic oligonucleotide
  Antisense strand to SEQ ID NO: 2427506
uccaccacacagagauucc

SEQ ID NO: 2427508 - RNA, 19 nt, Artificial Sequence
  Description of Artificial Sequence: Synthetic oligonucleotide
  Sense strand starting at position 1677 of SEQ ID NO: 1886802
cgugguuauuuagcacuca

SEQ ID NO: 2427509 - RNA, 19 nt, Artificial Sequence
  Description of Artificial Sequence: Synthetic oligonucleotide
  Antisense strand to SEQ ID NO: 2427508
ugagugcuaaauaaccacg

SEQ ID NO: 2427510 - RNA, 19 nt, Artificial Sequence
  Description of Artificial Sequence: Synthetic oligonucleotide
  Sense strand starting at position 1753 of SEQ ID NO: 1886802
cagucaucgguguuucguu

SEQ ID NO: 2427511 - RNA, 19 nt, Artificial Sequence
  Description of Artificial Sequence: Synthetic oligonucleotide
  Antisense strand to SEQ ID NO: 2427510
aacgaaacaccgaugacug

SEQ ID NO: 2427512 - RNA, 19 nt, Artificial Sequence
  Description of Artificial Sequence: Synthetic oligonucleotide
  Sense strand starting at position 1760 of SEQ ID NO: 1886802
cgguguuucguuccaacca

SEQ ID NO: 2427513 - RNA, 19 nt, Artificial Sequence
  Description of Artificial Sequence: Synthetic oligonucleotide
  Antisense strand to SEQ ID NO: 2427512
ugguuggaacgaaacaccg

SEQ ID NO: 2427514 - RNA, 19 nt, Artificial Sequence
  Description of Artificial Sequence: Synthetic oligonucleotide
  Sense strand starting at position 2551 of SEQ ID NO: 1886802
aguguaauggcgcugcgau

SEQ ID NO: 2427515 - RNA, 19 nt, Artificial Sequence
  Description of Artificial Sequence: Synthetic oligonucleotide
  Antisense strand to SEQ ID NO: 2427514
aucgcagcgccauuacacu

SEQ ID NO: 2427516 - RNA, 19 nt, Artificial Sequence
  Description of Artificial Sequence: Synthetic oligonucleotide
  Sense strand starting at position 2598 of SEQ ID NO: 1886802
cccaauacgcgcguucauu

SEQ ID NO: 2427517 - RNA, 19 nt, Artificial Sequence
  Description of Artificial Sequence: Synthetic oligonucleotide
  Antisense strand to SEQ ID NO: 2427516
aaugaacgcgcguauuggg

SEQ ID NO: 2427518 - RNA, 19 nt, Artificial Sequence
  Description of Artificial Sequence: Synthetic oligonucleotide
  Sense strand starting at position 2864 of SEQ ID NO: 1886802
ccgaguuagagcugagauu

SEQ ID NO: 2427519 - RNA, 19 nt, Artificial Sequence
  Description of Artificial Sequence: Synthetic oligonucleotide
  Antisense strand to SEQ ID NO: 2427518
aaucucagcucuaacucgg

SEQ ID NO: 2427520 - RNA, 19 nt, Artificial Sequence
  Description of Artificial Sequence: Synthetic oligonucleotide
  Sense strand starting at position 2865 of SEQ ID NO: 1886802
cgaguuagagcugagauua

SEQ ID NO: 2427521 - RNA, 19 nt, Artificial Sequence
  Description of Artificial Sequence: Synthetic oligonucleotide
  Antisense strand to SEQ ID NO: 2427520
uaaucucagcucuaacucg

SEQ ID NO: 2427522 - RNA, 19 nt, Artificial Sequence
  Description of Artificial Sequence: Synthetic oligonucleotide
  Sense strand starting at position 2873 of SEQ ID NO: 1886802
agcugagauuauccugagu

SEQ ID NO: 2427523 - RNA, 19 nt, Artificial Sequence
  Description of Artificial Sequence: Synthetic oligonucleotide
  Antisense strand to SEQ ID NO: 2427522
acucaggauaaucucagcu

SEQ ID NO: 2427524 - RNA, 19 nt, Artificial Sequence
  Description of Artificial Sequence: Synthetic oligonucleotide
  Sense strand starting at position 2878 of SEQ ID NO: 1886802
agauuauccugaguuccuu

SEQ ID NO: 2427525 - RNA, 19 nt, Artificial Sequence
  Description of Artificial Sequence: Synthetic oligonucleotide
  Antisense strand to SEQ ID NO: 2427524
aaggaacucaggauaaucu

SEQ ID NO: 2427526 - RNA, 19 nt, Artificial Sequence
  Description of Artificial Sequence: Synthetic oligonucleotide
  Sense strand starting at position 2908 of SEQ ID NO: 1886802
cucagagcauccuugacuu

SEQ ID NO: 2427527 - RNA, 19 nt, Artificial Sequence
  Description of Artificial Sequence: Synthetic oligonucleotide
  Antisense strand to SEQ ID NO: 2427526
aagucaaggaugcucugag

SEQ ID NO: 2427528 - RNA, 19 nt, Artificial Sequence
  Description of Artificial Sequence: Synthetic oligonucleotide
  Sense strand starting at position 2922 of SEQ ID NO: 1886802
gacuuuggagaaugguuau

SEQ ID NO: 2427529 - RNA, 19 nt, Artificial Sequence
  Description of Artificial Sequence: Synthetic oligonucleotide
  Antisense strand to SEQ ID NO: 2427528
auaaccauucuccaaaguc

SEQ ID NO: 2427530 - RNA, 19 nt, Artificial Sequence
  Description of Artificial Sequence: Synthetic oligonucleotide
  Sense strand starting at position 2925 of SEQ ID NO: 1886802
uuuggagaaugguuaucuu

SEQ ID NO: 2427531 - RNA, 19 nt, Artificial Sequence
  Description of Artificial Sequence: Synthetic oligonucleotide
  Antisense strand to SEQ ID NO: 2427530
aagauaaccauucuccaaa

SEQ ID NO: 2427532 - RNA, 19 nt, Artificial Sequence
  Description of Artificial Sequence: Synthetic oligonucleotide
  Sense strand starting at position 2928 of SEQ ID NO: 1886802
ggagaaugguuaucuucuu

SEQ ID NO: 2427533 - RNA, 19 nt, Artificial Sequence
  Description of Artificial Sequence: Synthetic oligonucleotide
  Antisense strand to SEQ ID NO: 2427532
aagaagauaaccauucucc

SEQ ID NO: 2427534 - RNA, 19 nt, Artificial Sequence
  Description of Artificial Sequence: Synthetic oligonucleotide
  Sense strand starting at position 2929 of SEQ ID NO: 1886802
gagaaugguuaucuucuuu

SEQ ID NO: 2427535 - RNA, 19 nt, Artificial Sequence
  Description of Artificial Sequence: Synthetic oligonucleotide
  Antisense strand to SEQ ID NO: 2427534
aaagaagauaaccauucuc

SEQ ID NO: 2427536 - RNA, 19 nt, Artificial Sequence
  Description of Artificial Sequence: Synthetic oligonucleotide
  Sense strand starting at position 2964 of SEQ ID NO: 1886802
agggaauuaugguuagcau

SEQ ID NO: 2427537 - RNA, 19 nt, Artificial Sequence
  Description of Artificial Sequence: Synthetic oligonucleotide
  Antisense strand to SEQ ID NO: 2427536
augcuaaccauaauucccu

SEQ ID NO: 2427538 - RNA, 19 nt, Artificial Sequence
  Description of Artificial Sequence: Synthetic oligonucleotide
  Sense strand starting at position 2965 of SEQ ID NO: 1886802
gggaauuaugguuagcauu

SEQ ID NO: 2427539 - RNA, 19 nt, Artificial Sequence
  Description of Artificial Sequence: Synthetic oligonucleotide
  Antisense strand to SEQ ID NO: 2427538
aaugcuaaccauaauuccc

SEQ ID NO: 2427540 - RNA, 19 nt, Artificial Sequence
  Description of Artificial Sequence: Synthetic oligonucleotide
  Sense strand starting at position 2996 of SEQ ID NO: 1886802
gcgccaugcccagcauauu

SEQ ID NO: 2427541 - RNA, 19 nt, Artificial Sequence
  Description of Artificial Sequence: Synthetic oligonucleotide
  Antisense strand to SEQ ID NO: 2427540
aauaugcugggcauggcgc

SEQ ID NO: 2427542 - RNA, 19 nt, Artificial Sequence
  Description of Artificial Sequence: Synthetic oligonucleotide
  Sense strand starting at position 3899 of SEQ ID NO: 1886802
gugaaccaaugguuaucau

SEQ ID NO: 2427543 - RNA, 19 nt, Artificial Sequence
  Description of Artificial Sequence: Synthetic oligonucleotide
  Antisense strand to SEQ ID NO: 2427542
augauaaccauugguucac

SEQ ID NO: 2427544 - RNA, 19 nt, Artificial Sequence
  Description of Artificial Sequence: Synthetic oligonucleotide
  Sense strand starting at position 3950 of SEQ ID NO: 1886802
gggauuccaugaguuucca

SEQ ID NO: 2427545 - RNA, 19 nt, Artificial Sequence
  Description of Artificial Sequence: Synthetic oligonucleotide
  Antisense strand to SEQ ID NO: 2427544
uggaaacucauggaauccc

SEQ ID NO: 2427546 - RNA, 19 nt, Artificial Sequence
  Description of Artificial Sequence: Synthetic oligonucleotide
  Sense strand starting at position 3958 of SEQ ID NO: 1886802
augaguuuccagggccaua

SEQ ID NO: 2427547 - RNA, 19 nt, Artificial Sequence
  Description of Artificial Sequence: Synthetic oligonucleotide
  Antisense strand to SEQ ID NO: 2427546
uauggcccuggaaacucau

SEQ ID NO: 2427548 - RNA, 19 nt, Artificial Sequence
  Description of Artificial Sequence: Synthetic oligonucleotide
  Sense strand starting at position 253 of SEQ ID NO: 1886806
aguacaaugcugcaauaau

SEQ ID NO: 2427549 - RNA, 19 nt, Artificial Sequence
  Description of Artificial Sequence: Synthetic oligonucleotide
  Antisense strand to SEQ ID NO: 2427548
auuauugcagcauuguacu

SEQ ID NO: 2427550 - RNA, 19 nt, Artificial Sequence
  Description of Artificial Sequence: Synthetic oligonucleotide
  Sense strand starting at position 446 of SEQ ID NO: 1886806
cccuaaaguguucgaaaua

SEQ ID NO: 2427551 - RNA, 19 nt, Artificial Sequence
  Description of Artificial Sequence: Synthetic oligonucleotide
  Antisense strand to SEQ ID NO: 2427550
uauuucgaacacuuuaggg

SEQ ID NO: 2427552 - RNA, 19 nt, Artificial Sequence
  Description of Artificial Sequence: Synthetic oligonucleotide
  Sense strand starting at position 453 of SEQ ID NO: 1886806
guguucgaaauauaggcau

SEQ ID NO: 2427553 - RNA, 19 nt, Artificial Sequence
  Description of Artificial Sequence: Synthetic oligonucleotide
  Antisense strand to SEQ ID NO: 2427552
augccuauauuucgaacac

SEQ ID NO: 2427554 - RNA, 19 nt, Artificial Sequence
  Description of Artificial Sequence: Synthetic oligonucleotide
  Sense strand starting at position 455 of SEQ ID NO: 1886806
guucgaaauauaggcauga

SEQ ID NO: 2427555 - RNA, 19 nt, Artificial Sequence
  Description of Artificial Sequence: Synthetic oligonucleotide
  Antisense strand to SEQ ID NO: 2427554
ucaugccuauauuucgaac

SEQ ID NO: 2427556 - RNA, 19 nt, Artificial Sequence
  Description of Artificial Sequence: Synthetic oligonucleotide
  Sense strand starting at position 523 of SEQ ID NO: 1886806
cuguguucuccuuguggau

SEQ ID NO: 2427557 - RNA, 19 nt, Artificial Sequence
  Description of Artificial Sequence: Synthetic oligonucleotide
  Antisense strand to SEQ ID NO: 2427556
auccacaaggagaacacag

SEQ ID NO: 2427558 - RNA, 19 nt, Artificial Sequence
  Description of Artificial Sequence: Synthetic oligonucleotide
  Sense strand starting at position 1279 of SEQ ID NO: 1886806
ggaaguaucuaccacaauc

SEQ ID NO: 2427559 - RNA, 19 nt, Artificial Sequence
  Description of Artificial Sequence: Synthetic oligonucleotide
  Antisense strand to SEQ ID NO: 2427558
gauugugguagauacuucc

SEQ ID NO: 2427560 - RNA, 19 nt, Artificial Sequence
  Description of Artificial Sequence: Synthetic oligonucleotide
  Sense strand starting at position 1297 of SEQ ID NO: 1886806
cucugaaaccugugaacuu

SEQ ID NO: 2427561 - RNA, 19 nt, Artificial Sequence
  Description of Artificial Sequence: Synthetic oligonucleotide
  Antisense strand to SEQ ID NO: 2427560
aaguucacagguuucagag

SEQ ID NO: 2427562 - RNA, 19 nt, Artificial Sequence
  Description of Artificial Sequence: Synthetic oligonucleotide
  Sense strand starting at position 1450 of SEQ ID NO: 1886806
uguacaugucaggaaucuu

SEQ ID NO: 2427563 - RNA, 19 nt, Artificial Sequence
  Description of Artificial Sequence: Synthetic oligonucleotide
  Antisense strand to SEQ ID NO: 2427562
aagauuccugacauguaca

SEQ ID NO: 2427564 - RNA, 19 nt, Artificial Sequence
  Description of Artificial Sequence: Synthetic oligonucleotide
  Sense strand starting at position 1482 of SEQ ID NO: 1886806
uuccauguuugaccagauu

SEQ ID NO: 2427565 - RNA, 19 nt, Artificial Sequence
  Description of Artificial Sequence: Synthetic oligonucleotide
  Antisense strand to SEQ ID NO: 2427564
aaucuggucaaacauggaa

SEQ ID NO: 2427566 - RNA, 19 nt, Artificial Sequence
  Description of Artificial Sequence: Synthetic oligonucleotide
  Sense strand starting at position 1494 of SEQ ID NO: 1886806
ccagauucccucugcaagu

SEQ ID NO: 2427567 - RNA, 19 nt, Artificial Sequence
  Description of Artificial Sequence: Synthetic oligonucleotide
  Antisense strand to SEQ ID NO: 2427566
acuugcagagggaaucugg

SEQ ID NO: 2427568 - RNA, 19 nt, Artificial Sequence
  Description of Artificial Sequence: Synthetic oligonucleotide
  Sense strand starting at position 1533 of SEQ ID NO: 1886806
uccucaaugcucuguggau

SEQ ID NO: 2427569 - RNA, 19 nt, Artificial Sequence
  Description of Artificial Sequence: Synthetic oligonucleotide
  Antisense strand to SEQ ID NO: 2427568
auccacagagcauugagga

SEQ ID NO: 2427570 - RNA, 19 nt, Artificial Sequence
  Description of Artificial Sequence: Synthetic oligonucleotide
  Sense strand starting at position 1534 of SEQ ID NO: 1886806
ccucaaugcucuguggaug

SEQ ID NO: 2427571 - RNA, 19 nt, Artificial Sequence
  Description of Artificial Sequence: Synthetic oligonucleotide
  Antisense strand to SEQ ID NO: 2427570
cauccacagagcauugagg

SEQ ID NO: 2427572 - RNA, 19 nt, Artificial Sequence
  Description of Artificial Sequence: Synthetic oligonucleotide
  Sense strand starting at position 1656 of SEQ ID NO: 1886806
agccauagaugacauaauu

SEQ ID NO: 2427573 - RNA, 19 nt, Artificial Sequence
  Description of Artificial Sequence: Synthetic oligonucleotide
  Antisense strand to SEQ ID NO: 2427572
aauuaugucaucuauggcu

SEQ ID NO: 2427574 - RNA, 19 nt, Artificial Sequence
  Description of Artificial Sequence: Synthetic oligonucleotide
  Sense strand starting at position 1664 of SEQ ID NO: 1886806
augacauaauucuugaagu

SEQ ID NO: 2427575 - RNA, 19 nt, Artificial Sequence
  Description of Artificial Sequence: Synthetic oligonucleotide
  Antisense strand to SEQ ID NO: 2427574
acuucaagaauuaugucau

SEQ ID NO: 2427576 - RNA, 19 nt, Artificial Sequence
  Description of Artificial Sequence: Synthetic oligonucleotide
  Sense strand starting at position 1747 of SEQ ID NO: 1886806
agcucuuaggaucgagaca

SEQ ID NO: 2427577 - RNA, 19 nt, Artificial Sequence
  Description of Artificial Sequence: Synthetic oligonucleotide
  Antisense strand to SEQ ID NO: 2427576
ugucucgauccuaagagcu

SEQ ID NO: 2427578 - RNA, 19 nt, Artificial Sequence
  Description of Artificial Sequence: Synthetic oligonucleotide
  Sense strand starting at position 1764 of SEQ ID NO: 1886806
caguccauuugaggagauu

SEQ ID NO: 2427579 - RNA, 19 nt, Artificial Sequence
  Description of Artificial Sequence: Synthetic oligonucleotide
  Antisense strand to SEQ ID NO: 2427578
aaucuccucaaauggacug

SEQ ID NO: 2427580 - RNA, 19 nt, Artificial Sequence
  Description of Artificial Sequence: Synthetic oligonucleotide
  Sense strand starting at position 1834 of SEQ ID NO: 1886806
cccugaucugaggguccaa

SEQ ID NO: 2427581 - RNA, 19 nt, Artificial Sequence
  Description of Artificial Sequence: Synthetic oligonucleotide
  Antisense strand to SEQ ID NO: 2427580
uuggacccucagaucaggg

SEQ ID NO: 2427582 - RNA, 19 nt, Artificial Sequence
  Description of Artificial Sequence: Synthetic oligonucleotide
  Sense strand starting at position 1879 of SEQ ID NO: 1886806
ucaucauucugcucuagga

SEQ ID NO: 2427583 - RNA, 19 nt, Artificial Sequence
  Description of Artificial Sequence: Synthetic oligonucleotide
  Antisense strand to SEQ ID NO: 2427582
uccuagagcagaaugauga

SEQ ID NO: 2427584 - RNA, 19 nt, Artificial Sequence
  Description of Artificial Sequence: Synthetic oligonucleotide
  Sense strand starting at position 1883 of SEQ ID NO: 1886806
cauucugcucuaggaaguu

SEQ ID NO: 2427585 - RNA, 19 nt, Artificial Sequence
  Description of Artificial Sequence: Synthetic oligonucleotide
  Antisense strand to SEQ ID NO: 2427584
aacuuccuagagcagaaug

SEQ ID NO: 2427586 - RNA, 19 nt, Artificial Sequence
  Description of Artificial Sequence: Synthetic oligonucleotide
  Sense strand starting at position 1900 of SEQ ID NO: 1886806
uucugcuccuguguuaaga

SEQ ID NO: 2427587 - RNA, 19 nt, Artificial Sequence
  Description of Artificial Sequence: Synthetic oligonucleotide
  Antisense strand to SEQ ID NO: 2427586
ucuuaacacaggagcagaa

SEQ ID NO: 2427588 - RNA, 19 nt, Artificial Sequence
  Description of Artificial Sequence: Synthetic oligonucleotide
  Sense strand starting at position 1927 of SEQ ID NO: 1886806
ugguaccacguuuaacaaa

SEQ ID NO: 2427589 - RNA, 19 nt, Artificial Sequence
  Description of Artificial Sequence: Synthetic oligonucleotide
  Antisense strand to SEQ ID NO: 2427588
uuuguuaaacgugguacca

SEQ ID NO: 2427590 - RNA, 19 nt, Artificial Sequence
  Description of Artificial Sequence: Synthetic oligonucleotide
  Sense strand starting at position 1949 of SEQ ID NO: 1886806
gauccugucuggucuugua

SEQ ID NO: 2427591 - RNA, 19 nt, Artificial Sequence
  Description of Artificial Sequence: Synthetic oligonucleotide
  Antisense strand to SEQ ID NO: 2427590
uacaagaccagacaggauc

SEQ ID NO: 2427592 - RNA, 19 nt, Artificial Sequence
  Description of Artificial Sequence: Synthetic oligonucleotide
  Sense strand starting at position 2056 of SEQ ID NO: 1886806
ucacuugcgacuuaugaga

SEQ ID NO: 2427593 - RNA, 19 nt, Artificial Sequence
  Description of Artificial Sequence: Synthetic oligonucleotide
  Antisense strand to SEQ ID NO: 2427592
ucucauaagucgcaaguga

SEQ ID NO: 2427594 - RNA, 19 nt, Artificial Sequence
  Description of Artificial Sequence: Synthetic oligonucleotide
  Sense strand starting at position 2177 of SEQ ID NO: 1886806
acacaaaugucaguggaca

SEQ ID NO: 2427595 - RNA, 19 nt, Artificial Sequence
  Description of Artificial Sequence: Synthetic oligonucleotide
  Antisense strand to SEQ ID NO: 2427594
uguccacugacauuugugu

SEQ ID NO: 2427596 - RNA, 19 nt, Artificial Sequence
  Description of Artificial Sequence: Synthetic oligonucleotide
  Sense strand starting at position 2227 of SEQ ID NO: 1886806
aggaaagauugguggguaa

SEQ ID NO: 2427597 - RNA, 19 nt, Artificial Sequence
  Description of Artificial Sequence: Synthetic oligonucleotide
  Antisense strand to SEQ ID NO: 2427596
uuacccaccaaucuuuccu

SEQ ID NO: 2427598 - RNA, 19 nt, Artificial Sequence
  Description of Artificial Sequence: Synthetic oligonucleotide
  Sense strand starting at position 2397 of SEQ ID NO: 1886806
cccagucugucucuaguaa

SEQ ID NO: 2427599 - RNA, 19 nt, Artificial Sequence
  Description of Artificial Sequence: Synthetic oligonucleotide
  Antisense strand to SEQ ID NO: 2427598
uuacuagagacagacuggg

SEQ ID NO: 2427600 - RNA, 19 nt, Artificial Sequence
  Description of Artificial Sequence: Synthetic oligonucleotide
  Sense strand starting at position 2857 of SEQ ID NO: 1886806
cugagacggugagaucaaa

SEQ ID NO: 2427601 - RNA, 19 nt, Artificial Sequence
  Description of Artificial Sequence: Synthetic oligonucleotide
  Antisense strand to SEQ ID NO: 2427600
uuugaucucaccgucucag

SEQ ID NO: 2427602 - RNA, 19 nt, Artificial Sequence
  Description of Artificial Sequence: Synthetic oligonucleotide
  Sense strand starting at position 2911 of SEQ ID NO: 1886806
ccaguacauucugugaaua

SEQ ID NO: 2427603 - RNA, 19 nt, Artificial Sequence
  Description of Artificial Sequence: Synthetic oligonucleotide
  Antisense strand to SEQ ID NO: 2427602
uauucacagaauguacugg

SEQ ID NO: 2427604 - RNA, 19 nt, Artificial Sequence
  Description of Artificial Sequence: Synthetic oligonucleotide
  Sense strand starting at position 2975 of SEQ ID NO: 1886806
auguauacauagcuaugau

SEQ ID NO: 2427605 - RNA, 19 nt, Artificial Sequence
  Description of Artificial Sequence: Synthetic oligonucleotide
  Antisense strand to SEQ ID NO: 2427604
aucauagcuauguauacau

SEQ ID NO: 2427606 - RNA, 19 nt, Artificial Sequence
  Description of Artificial Sequence: Synthetic oligonucleotide
  Sense strand starting at position 3165 of SEQ ID NO: 1886806
ggugaaaccuucuuuauug

SEQ ID NO: 2427607 - RNA, 19 nt, Artificial Sequence
  Description of Artificial Sequence: Synthetic oligonucleotide
  Antisense strand to SEQ ID NO: 2427606
caauaaagaagguuucacc

SEQ ID NO: 2427608 - RNA, 19 nt, Artificial Sequence
  Description of Artificial Sequence: Synthetic oligonucleotide
  Sense strand starting at position 3166 of SEQ ID NO: 1886806
gugaaaccuucuuuauugu

SEQ ID NO: 2427609 - RNA, 19 nt, Artificial Sequence
  Description of Artificial Sequence: Synthetic oligonucleotide
  Antisense strand to SEQ ID NO: 2427608
acaauaaagaagguuucac

SEQ ID NO: 2427610 - RNA, 19 nt, Artificial Sequence
  Description of Artificial Sequence: Synthetic oligonucleotide
  Sense strand starting at position 3522 of SEQ ID NO: 1886806
gcaacaagaugcucaucau

SEQ ID NO: 2427611 - RNA, 19 nt, Artificial Sequence
  Description of Artificial Sequence: Synthetic oligonucleotide
  Antisense strand to SEQ ID NO: 2427610
augaugagcaucuuguugc

SEQ ID NO: 2427612 - RNA, 19 nt, Artificial Sequence
  Description of Artificial Sequence: Synthetic oligonucleotide
  Sense strand starting at position 3560 of SEQ ID NO: 1886806
gggugccaugcagaugauu

SEQ ID NO: 2427613 - RNA, 19 nt, Artificial Sequence
  Description of Artificial Sequence: Synthetic oligonucleotide
  Antisense strand to SEQ ID NO: 2427612
aaucaucugcauggcaccc

SEQ ID NO: 2427614 - RNA, 19 nt, Artificial Sequence
  Description of Artificial Sequence: Synthetic oligonucleotide
  Sense strand starting at position 3562 of SEQ ID NO: 1886806
gugccaugcagaugauuua

SEQ ID NO: 2427615 - RNA, 19 nt, Artificial Sequence
  Description of Artificial Sequence: Synthetic oligonucleotide
  Antisense strand to SEQ ID NO: 2427614
uaaaucaucugcauggcac

SEQ ID NO: 2427616 - RNA, 19 nt, Artificial Sequence
  Description of Artificial Sequence: Synthetic oligonucleotide
  Sense strand starting at position 3569 of SEQ ID NO: 1886806
gcagaugauuuauacgaau

SEQ ID NO: 2427617 - RNA, 19 nt, Artificial Sequence
  Description of Artificial Sequence: Synthetic oligonucleotide
  Antisense strand to SEQ ID NO: 2427616
auucguauaaaucaucugc

SEQ ID NO: 2427618 - RNA, 19 nt, Artificial Sequence
  Description of Artificial Sequence: Synthetic oligonucleotide
  Sense strand starting at position 3850 of SEQ ID NO: 1886806
ugggauuacaggcgucaaa

SEQ ID NO: 2427619 - RNA, 19 nt, Artificial Sequence
  Description of Artificial Sequence: Synthetic oligonucleotide
  Antisense strand to SEQ ID NO: 2427618
uuugacgccuguaauccca

SEQ ID NO: 2427620 - RNA, 19 nt, Artificial Sequence
  Description of Artificial Sequence: Synthetic oligonucleotide
  Sense strand starting at position 3873 of SEQ ID NO: 1886806
gcgccaggccuauaugaau

SEQ ID NO: 2427621 - RNA, 19 nt, Artificial Sequence
  Description of Artificial Sequence: Synthetic oligonucleotide
  Antisense strand to SEQ ID NO: 2427620
auucauauaggccuggcgc

SEQ ID NO: 2427622 - RNA, 19 nt, Artificial Sequence
  Description of Artificial Sequence: Synthetic oligonucleotide
  Sense strand starting at position 3902 of SEQ ID NO: 1886806
gcuuacuugaucuggagaa

SEQ ID NO: 2427623 - RNA, 19 nt, Artificial Sequence
  Description of Artificial Sequence: Synthetic oligonucleotide
  Antisense strand to SEQ ID NO: 2427622
uucuccagaucaaguaagc

SEQ ID NO: 2427624 - RNA, 19 nt, Artificial Sequence
  Description of Artificial Sequence: Synthetic oligonucleotide
  Sense strand starting at position 3903 of SEQ ID NO: 1886806
cuuacuugaucuggagaaa

SEQ ID NO: 2427625 - RNA, 19 nt, Artificial Sequence
  Description of Artificial Sequence: Synthetic oligonucleotide
  Antisense strand to SEQ ID NO: 2427624
uuucuccagaucaaguaag

SEQ ID NO: 2427626 - RNA, 19 nt, Artificial Sequence
  Description of Artificial Sequence: Synthetic oligonucleotide
  Sense strand starting at position 3928 of SEQ ID NO: 1886806
gcugaccucuguuuacaaa

SEQ ID NO: 2427627 - RNA, 19 nt, Artificial Sequence
  Description of Artificial Sequence: Synthetic oligonucleotide
  Antisense strand to SEQ ID NO: 2427626
uuuguaaacagaggucagc

SEQ ID NO: 2427628 - RNA, 19 nt, Artificial Sequence
  Description of Artificial Sequence: Synthetic oligonucleotide
  Sense strand starting at position 61 of SEQ ID NO: 1886807
gcuggaugccucuggcaag

SEQ ID NO: 2427629 - RNA, 19 nt, Artificial Sequence
  Description of Artificial Sequence: Synthetic oligonucleotide
  Antisense strand to SEQ ID NO: 2427628
cuugccagaggcauccagc

SEQ ID NO: 2427630 - RNA, 19 nt, Artificial Sequence
  Description of Artificial Sequence: Synthetic oligonucleotide
  Sense strand starting at position 83 of SEQ ID NO: 1886807
ugauaagacucagagcaca

SEQ ID NO: 2427631 - RNA, 19 nt, Artificial Sequence
  Description of Artificial Sequence: Synthetic oligonucleotide
  Antisense strand to SEQ ID NO: 2427630
ugugcucugagucuuauca

SEQ ID NO: 2427632 - RNA, 19 nt, Artificial Sequence
  Description of Artificial Sequence: Synthetic oligonucleotide
  Sense strand starting at position 96 of SEQ ID NO: 1886807
agcacaacccucugggauu

SEQ ID NO: 2427633 - RNA, 19 nt, Artificial Sequence
  Description of Artificial Sequence: Synthetic oligonucleotide
  Antisense strand to SEQ ID NO: 2427632
aaucccagaggguugugcu

SEQ ID NO: 2427634 - RNA, 19 nt, Artificial Sequence
  Description of Artificial Sequence: Synthetic oligonucleotide
  Sense strand starting at position 132 of SEQ ID NO: 1886807
ccucuaaacggucaucuau

SEQ ID NO: 2427635 - RNA, 19 nt, Artificial Sequence
  Description of Artificial Sequence: Synthetic oligonucleotide
  Antisense strand to SEQ ID NO: 2427634
auagaugaccguuuagagg

SEQ ID NO: 2427636 - RNA, 19 nt, Artificial Sequence
  Description of Artificial Sequence: Synthetic oligonucleotide
  Sense strand starting at position 237 of SEQ ID NO: 1886807
gugacuaaggcugaacuca

SEQ ID NO: 2427637 - RNA, 19 nt, Artificial Sequence
  Description of Artificial Sequence: Synthetic oligonucleotide
  Antisense strand to SEQ ID NO: 2427636
ugaguucagccuuagucac

SEQ ID NO: 2427638 - RNA, 19 nt, Artificial Sequence
  Description of Artificial Sequence: Synthetic oligonucleotide
  Sense strand starting at position 282 of SEQ ID NO: 1886807
ggcauaaggugcuuacuau

SEQ ID NO: 2427639 - RNA, 19 nt, Artificial Sequence
  Description of Artificial Sequence: Synthetic oligonucleotide
  Antisense strand to SEQ ID NO: 2427638
auaguaagcaccuuaugcc

SEQ ID NO: 2427640 - RNA, 19 nt, Artificial Sequence
  Description of Artificial Sequence: Synthetic oligonucleotide
  Sense strand starting at position 283 of SEQ ID NO: 1886807
gcauaaggugcuuacuauc

SEQ ID NO: 2427641 - RNA, 19 nt, Artificial Sequence
  Description of Artificial Sequence: Synthetic oligonucleotide
  Antisense strand to SEQ ID NO: 2427640
gauaguaagcaccuuaugc

SEQ ID NO: 2427642 - RNA, 19 nt, Artificial Sequence
  Description of Artificial Sequence: Synthetic oligonucleotide
  Sense strand starting at position 370 of SEQ ID NO: 1886807
auuuaaacguaucacgaga

SEQ ID NO: 2427643 - RNA, 19 nt, Artificial Sequence
  Description of Artificial Sequence: Synthetic oligonucleotide
  Antisense strand to SEQ ID NO: 2427642
ucucgugauacguuuaaau

SEQ ID NO: 2427644 - RNA, 19 nt, Artificial Sequence
  Description of Artificial Sequence: Synthetic oligonucleotide
  Sense strand starting at position 1229 of SEQ ID NO: 1886807
gugguuucaguaggauaau

SEQ ID NO: 2427645 - RNA, 19 nt, Artificial Sequence
  Description of Artificial Sequence: Synthetic oligonucleotide
  Antisense strand to SEQ ID NO: 2427644
auuauccuacugaaaccac

SEQ ID NO: 2427646 - RNA, 19 nt, Artificial Sequence
  Description of Artificial Sequence: Synthetic oligonucleotide
  Sense strand starting at position 1240 of SEQ ID NO: 1886807
aggauaauguccuuacccu

SEQ ID NO: 2427647 - RNA, 19 nt, Artificial Sequence
  Description of Artificial Sequence: Synthetic oligonucleotide
  Antisense strand to SEQ ID NO: 2427646
aggguaaggacauuauccu

SEQ ID NO: 2427648 - RNA, 19 nt, Artificial Sequence
  Description of Artificial Sequence: Synthetic oligonucleotide
  Sense strand starting at position 1241 of SEQ ID NO: 1886807
ggauaauguccuuacccuu

SEQ ID NO: 2427649 - RNA, 19 nt, Artificial Sequence
  Description of Artificial Sequence: Synthetic oligonucleotide
  Antisense strand to SEQ ID NO: 2427648
aaggguaaggacauuaucc

SEQ ID NO: 2427650 - RNA, 19 nt, Artificial Sequence
  Description of Artificial Sequence: Synthetic oligonucleotide
  Sense strand starting at position 1288 of SEQ ID NO: 1886807
uuaaguaucaugugugcag

SEQ ID NO: 2427651 - RNA, 19 nt, Artificial Sequence
  Description of Artificial Sequence: Synthetic oligonucleotide
  Antisense strand to SEQ ID NO: 2427650
cugcacacaugauacuuaa

SEQ ID NO: 2427652 - RNA, 19 nt, Artificial Sequence
  Description of Artificial Sequence: Synthetic oligonucleotide
  Sense strand starting at position 1292 of SEQ ID NO: 1886807
guaucaugugugcaguuua

SEQ ID NO: 2427653 - RNA, 19 nt, Artificial Sequence
  Description of Artificial Sequence: Synthetic oligonucleotide
  Antisense strand to SEQ ID NO: 2427652
uaaacugcacacaugauac

SEQ ID NO: 2427654 - RNA, 19 nt, Artificial Sequence
  Description of Artificial Sequence: Synthetic oligonucleotide
  Sense strand starting at position 1344 of SEQ ID NO: 1886807
ccguaagguuuauuuauug

SEQ ID NO: 2427655 - RNA, 19 nt, Artificial Sequence
  Description of Artificial Sequence: Synthetic oligonucleotide
  Antisense strand to SEQ ID NO: 2427654
caauaaauaaaccuuacgg

SEQ ID NO: 2427656 - RNA, 19 nt, Artificial Sequence
  Description of Artificial Sequence: Synthetic oligonucleotide
  Sense strand starting at position 1402 of SEQ ID NO: 1886807
aaacgauugcaguggauau

SEQ ID NO: 2427657 - RNA, 19 nt, Artificial Sequence
  Description of Artificial Sequence: Synthetic oligonucleotide
  Antisense strand to SEQ ID NO: 2427656
auauccacugcaaucguuu

SEQ ID NO: 2427658 - RNA, 19 nt, Artificial Sequence
  Description of Artificial Sequence: Synthetic oligonucleotide
  Sense strand starting at position 1413 of SEQ ID NO: 1886807
guggauauuccuuguagca

SEQ ID NO: 2427659 - RNA, 19 nt, Artificial Sequence
  Description of Artificial Sequence: Synthetic oligonucleotide
  Antisense strand to SEQ ID NO: 2427658
ugcuacaaggaauauccac

SEQ ID NO: 2427660 - RNA, 19 nt, Artificial Sequence
  Description of Artificial Sequence: Synthetic oligonucleotide
  Sense strand starting at position 1513 of SEQ ID NO: 1886807
cguggauucgauuacucca

SEQ ID NO: 2427661 - RNA, 19 nt, Artificial Sequence
  Description of Artificial Sequence: Synthetic oligonucleotide
  Antisense strand to SEQ ID NO: 2427660
uggaguaaucgaauccacg

SEQ ID NO: 2427662 - RNA, 19 nt, Artificial Sequence
  Description of Artificial Sequence: Synthetic oligonucleotide
  Sense strand starting at position 1516 of SEQ ID NO: 1886807
ggauucgauuacuccaaga

SEQ ID NO: 2427663 - RNA, 19 nt, Artificial Sequence
  Description of Artificial Sequence: Synthetic oligonucleotide
  Antisense strand to SEQ ID NO: 2427662
ucuuggaguaaucgaaucc

SEQ ID NO: 2427664 - RNA, 19 nt, Artificial Sequence
  Description of Artificial Sequence: Synthetic oligonucleotide
  Sense strand starting at position 2640 of SEQ ID NO: 1886807
caggcauauugauccugga

SEQ ID NO: 2427665 - RNA, 19 nt, Artificial Sequence
  Description of Artificial Sequence: Synthetic oligonucleotide
  Antisense strand to SEQ ID NO: 2427664
uccaggaucaauaugccug

SEQ ID NO: 2427666 - RNA, 19 nt, Artificial Sequence
  Description of Artificial Sequence: Synthetic oligonucleotide
  Sense strand starting at position 2644 of SEQ ID NO: 1886807
cauauugauccuggaguuc

SEQ ID NO: 2427667 - RNA, 19 nt, Artificial Sequence
  Description of Artificial Sequence: Synthetic oligonucleotide
  Antisense strand to SEQ ID NO: 2427666
gaacuccaggaucaauaug

SEQ ID NO: 2427668 - RNA, 19 nt, Artificial Sequence
  Description of Artificial Sequence: Synthetic oligonucleotide
  Sense strand starting at position 2711 of SEQ ID NO: 1886807
agcgcaaugcccgacagau

SEQ ID NO: 2427669 - RNA, 19 nt, Artificial Sequence
  Description of Artificial Sequence: Synthetic oligonucleotide
  Antisense strand to SEQ ID NO: 2427668
aucugucgggcauugcgcu

SEQ ID NO: 2427670 - RNA, 19 nt, Artificial Sequence
  Description of Artificial Sequence: Synthetic oligonucleotide
  Sense strand starting at position 2755 of SEQ ID NO: 1886807
cugugugcuagugacacau

SEQ ID NO: 2427671 - RNA, 19 nt, Artificial Sequence
  Description of Artificial Sequence: Synthetic oligonucleotide
  Antisense strand to SEQ ID NO: 2427670
augugucacuagcacacag

SEQ ID NO: 2427672 - RNA, 19 nt, Artificial Sequence
  Description of Artificial Sequence: Synthetic oligonucleotide
  Sense strand starting at position 2759 of SEQ ID NO: 1886807
gugcuagugacacaugaac

SEQ ID NO: 2427673 - RNA, 19 nt, Artificial Sequence
  Description of Artificial Sequence: Synthetic oligonucleotide
  Antisense strand to SEQ ID NO: 2427672
guucaugugucacuagcac

SEQ ID NO: 2427674 - RNA, 19 nt, Artificial Sequence
  Description of Artificial Sequence: Synthetic oligonucleotide
  Sense strand starting at position 2864 of SEQ ID NO: 1886807
gcaguuuauaaugaaaggu

SEQ ID NO: 2427675 - RNA, 19 nt, Artificial Sequence
  Description of Artificial Sequence: Synthetic oligonucleotide
  Antisense strand to SEQ ID NO: 2427674
accuuucauuauaaacugc

SEQ ID NO: 2427676 - RNA, 19 nt, Artificial Sequence
  Description of Artificial Sequence: Synthetic oligonucleotide
  Sense strand starting at position 2873 of SEQ ID NO: 1886807
aaugaaaggugcuaagaca

SEQ ID NO: 2427677 - RNA, 19 nt, Artificial Sequence
  Description of Artificial Sequence: Synthetic oligonucleotide
  Antisense strand to SEQ ID NO: 2427676
ugucuuagcaccuuucauu

SEQ ID NO: 2427678 - RNA, 19 nt, Artificial Sequence
  Description of Artificial Sequence: Synthetic oligonucleotide
  Sense strand starting at position 2894 of SEQ ID NO: 1886807
ugguuagccgucugagaaa

SEQ ID NO: 2427679 - RNA, 19 nt, Artificial Sequence
  Description of Artificial Sequence: Synthetic oligonucleotide
  Antisense strand to SEQ ID NO: 2427678
uuucucagacggcuaacca

SEQ ID NO: 2427680 - RNA, 19 nt, Artificial Sequence
  Description of Artificial Sequence: Synthetic oligonucleotide
  Sense strand starting at position 2901 of SEQ ID NO: 1886807
ccgucugagaaaugaugaa

SEQ ID NO: 2427681 - RNA, 19 nt, Artificial Sequence
  Description of Artificial Sequence: Synthetic oligonucleotide
  Antisense strand to SEQ ID NO: 2427680
uucaucauuucucagacgg

SEQ ID NO: 2427682 - RNA, 19 nt, Artificial Sequence
  Description of Artificial Sequence: Synthetic oligonucleotide
  Sense strand starting at position 2994 of SEQ ID NO: 1886807
augugaaguguucacguga

SEQ ID NO: 2427683 - RNA, 19 nt, Artificial Sequence
  Description of Artificial Sequence: Synthetic oligonucleotide
  Antisense strand to SEQ ID NO: 2427682
ucacgugaacacuucacau

SEQ ID NO: 2427684 - RNA, 19 nt, Artificial Sequence
  Description of Artificial Sequence: Synthetic oligonucleotide
  Sense strand starting at position 3007 of SEQ ID NO: 1886807
acgugauuucguggcugau

SEQ ID NO: 2427685 - RNA, 19 nt, Artificial Sequence
  Description of Artificial Sequence: Synthetic oligonucleotide
  Antisense strand to SEQ ID NO: 2427684
aucagccacgaaaucacgu

SEQ ID NO: 2427686 - RNA, 19 nt, Artificial Sequence
  Description of Artificial Sequence: Synthetic oligonucleotide
  Sense strand starting at position 3009 of SEQ ID NO: 1886807
gugauuucguggcugauua

SEQ ID NO: 2427687 - RNA, 19 nt, Artificial Sequence
  Description of Artificial Sequence: Synthetic oligonucleotide
  Antisense strand to SEQ ID NO: 2427686
uaaucagccacgaaaucac

SEQ ID NO: 2427688 - RNA, 19 nt, Artificial Sequence
  Description of Artificial Sequence: Synthetic oligonucleotide
  Sense strand starting at position 3010 of SEQ ID NO: 1886807
ugauuucguggcugauuaa

SEQ ID NO: 2427689 - RNA, 19 nt, Artificial Sequence
  Description of Artificial Sequence: Synthetic oligonucleotide
  Antisense strand to SEQ ID NO: 2427688
uuaaucagccacgaaauca

SEQ ID NO: 2427690 - RNA, 19 nt, Artificial Sequence
  Description of Artificial Sequence: Synthetic oligonucleotide
  Sense strand starting at position 3013 of SEQ ID NO: 1886807
uuucguggcugauuaagaa

SEQ ID NO: 2427691 - RNA, 19 nt, Artificial Sequence
  Description of Artificial Sequence: Synthetic oligonucleotide
  Antisense strand to SEQ ID NO: 2427690
uucuuaaucagccacgaaa

SEQ ID NO: 2427692 - RNA, 19 nt, Artificial Sequence
  Description of Artificial Sequence: Synthetic oligonucleotide
  Sense strand starting at position 3094 of SEQ ID NO: 1886807
ucucacgcaccaugagauu

SEQ ID NO: 2427693 - RNA, 19 nt, Artificial Sequence
  Description of Artificial Sequence: Synthetic oligonucleotide
  Antisense strand to SEQ ID NO: 2427692
aaucucauggugcgugaga

SEQ ID NO: 2427694 - RNA, 19 nt, Artificial Sequence
  Description of Artificial Sequence: Synthetic oligonucleotide
  Sense strand starting at position 3106 of SEQ ID NO: 1886807
ugagauuacccacaggcuu

SEQ ID NO: 2427695 - RNA, 19 nt, Artificial Sequence
  Description of Artificial Sequence: Synthetic oligonucleotide
  Antisense strand to SEQ ID NO: 2427694
aagccuguggguaaucuca

SEQ ID NO: 2427696 - RNA, 19 nt, Artificial Sequence
  Description of Artificial Sequence: Synthetic oligonucleotide
  Sense strand starting at position 3255 of SEQ ID NO: 1886807
cugacaggugucugaguca

SEQ ID NO: 2427697 - RNA, 19 nt, Artificial Sequence
  Description of Artificial Sequence: Synthetic oligonucleotide
  Antisense strand to SEQ ID NO: 2427696
ugacucagacaccugucag

SEQ ID NO: 2427698 - RNA, 19 nt, Artificial Sequence
  Description of Artificial Sequence: Synthetic oligonucleotide
  Sense strand starting at position 3258 of SEQ ID NO: 1886807
acaggugucugagucacaa

SEQ ID NO: 2427699 - RNA, 19 nt, Artificial Sequence
  Description of Artificial Sequence: Synthetic oligonucleotide
  Antisense strand to SEQ ID NO: 2427698
uugugacucagacaccugu

SEQ ID NO: 2427700 - RNA, 19 nt, Artificial Sequence
  Description of Artificial Sequence: Synthetic oligonucleotide
  Sense strand starting at position 3400 of SEQ ID NO: 1886807
cacuaugaguguuugggau

SEQ ID NO: 2427701 - RNA, 19 nt, Artificial Sequence
  Description of Artificial Sequence: Synthetic oligonucleotide
  Antisense strand to SEQ ID NO: 2427700
aucccaaacacucauagug

SEQ ID NO: 2427702 - RNA, 19 nt, Artificial Sequence
  Description of Artificial Sequence: Synthetic oligonucleotide
  Sense strand starting at position 3406 of SEQ ID NO: 1886807
gaguguuugggauguguuu

SEQ ID NO: 2427703 - RNA, 19 nt, Artificial Sequence
  Description of Artificial Sequence: Synthetic oligonucleotide
  Antisense strand to SEQ ID NO: 2427702
aaacacaucccaaacacuc

SEQ ID NO: 2427704 - RNA, 19 nt, Artificial Sequence
  Description of Artificial Sequence: Synthetic oligonucleotide
  Sense strand starting at position 3569 of SEQ ID NO: 1886807
aggugcccaccuuguaauu

SEQ ID NO: 2427705 - RNA, 19 nt, Artificial Sequence
  Description of Artificial Sequence: Synthetic oligonucleotide
  Antisense strand to SEQ ID NO: 2427704
aauuacaaggugggcaccu

SEQ ID NO: 2427706 - RNA, 19 nt, Artificial Sequence
  Description of Artificial Sequence: Synthetic oligonucleotide
  Sense strand starting at position 3772 of SEQ ID NO: 1886807
cgaagucuugcucugucga

SEQ ID NO: 2427707 - RNA, 19 nt, Artificial Sequence
  Description of Artificial Sequence: Synthetic oligonucleotide
  Antisense strand to SEQ ID NO: 2427706
ucgacagagcaagacuucg

SEQ ID NO: 2427708 - RNA, 19 nt, Artificial Sequence
  Description of Artificial Sequence: Synthetic oligonucleotide
  Sense strand starting at position 385 of SEQ ID NO: 1886808
ggcugaguccacuaagcug

SEQ ID NO: 2427709 - RNA, 19 nt, Artificial Sequence
  Description of Artificial Sequence: Synthetic oligonucleotide
  Antisense strand to SEQ ID NO: 2427708
cagcuuaguggacucagcc

SEQ ID NO: 2427710 - RNA, 19 nt, Artificial Sequence
  Description of Artificial Sequence: Synthetic oligonucleotide
  Sense strand starting at position 411 of SEQ ID NO: 1886808
cacgguuugcccucggcaa

SEQ ID NO: 2427711 - RNA, 19 nt, Artificial Sequence
  Description of Artificial Sequence: Synthetic oligonucleotide
  Antisense strand to SEQ ID NO: 2427710
uugccgagggcaaaccgug

SEQ ID NO: 2427712 - RNA, 19 nt, Artificial Sequence
  Description of Artificial Sequence: Synthetic oligonucleotide
  Sense strand starting at position 455 of SEQ ID NO: 1886808
ccaugaagucaagggucau

SEQ ID NO: 2427713 - RNA, 19 nt, Artificial Sequence
  Description of Artificial Sequence: Synthetic oligonucleotide
  Antisense strand to SEQ ID NO: 2427712
augacccuugacuucaugg

SEQ ID NO: 2427714 - RNA, 19 nt, Artificial Sequence
  Description of Artificial Sequence: Synthetic oligonucleotide
  Sense strand starting at position 530 of SEQ ID NO: 1886808
gggaaugcaugauccacau

SEQ ID NO: 2427715 - RNA, 19 nt, Artificial Sequence
  Description of Artificial Sequence: Synthetic oligonucleotide
  Antisense strand to SEQ ID NO: 2427714
auguggaucaugcauuccc

SEQ ID NO: 2427716 - RNA, 19 nt, Artificial Sequence
  Description of Artificial Sequence: Synthetic oligonucleotide
  Sense strand starting at position 567 of SEQ ID NO: 1886808
uuacaaucuugugcuagaa

SEQ ID NO: 2427717 - RNA, 19 nt, Artificial Sequence
  Description of Artificial Sequence: Synthetic oligonucleotide
  Antisense strand to SEQ ID NO: 2427716
uucuagcacaagauuguaa

SEQ ID NO: 2427718 - RNA, 19 nt, Artificial Sequence
  Description of Artificial Sequence: Synthetic oligonucleotide
  Sense strand starting at position 673 of SEQ ID NO: 1886808
caggacuggguuugauuaa

SEQ ID NO: 2427719 - RNA, 19 nt, Artificial Sequence
  Description of Artificial Sequence: Synthetic oligonucleotide
  Antisense strand to SEQ ID NO: 2427718
uuaaucaaacccaguccug

SEQ ID NO: 2427720 - RNA, 19 nt, Artificial Sequence
  Description of Artificial Sequence: Synthetic oligonucleotide
  Sense strand starting at position 906 of SEQ ID NO: 1886808
ugacauugguccucuugac

SEQ ID NO: 2427721 - RNA, 19 nt, Artificial Sequence
  Description of Artificial Sequence: Synthetic oligonucleotide
  Antisense strand to SEQ ID NO: 2427720
gucaagaggaccaauguca

SEQ ID NO: 2427722 - RNA, 19 nt, Artificial Sequence
  Description of Artificial Sequence: Synthetic oligonucleotide
  Sense strand starting at position 1007 of SEQ ID NO: 1886808
ccaagauagccucgauaga

SEQ ID NO: 2427723 - RNA, 19 nt, Artificial Sequence
  Description of Artificial Sequence: Synthetic oligonucleotide
  Antisense strand to SEQ ID NO: 2427722
ucuaucgaggcuaucuugg

SEQ ID NO: 2427724 - RNA, 19 nt, Artificial Sequence
  Description of Artificial Sequence: Synthetic oligonucleotide
  Sense strand starting at position 1016 of SEQ ID NO: 1886808
ccucgauagaaucgauaca

SEQ ID NO: 2427725 - RNA, 19 nt, Artificial Sequence
  Description of Artificial Sequence: Synthetic oligonucleotide
  Antisense strand to SEQ ID NO: 2427724
uguaucgauucuaucgagg

SEQ ID NO: 2427726 - RNA, 19 nt, Artificial Sequence
  Description of Artificial Sequence: Synthetic oligonucleotide
  Sense strand starting at position 1028 of SEQ ID NO: 1886808
cgauacaagucugcagaga

SEQ ID NO: 2427727 - RNA, 19 nt, Artificial Sequence
  Description of Artificial Sequence: Synthetic oligonucleotide
  Antisense strand to SEQ ID NO: 2427726
ucucugcagacuuguaucg

SEQ ID NO: 2427728 - RNA, 19 nt, Artificial Sequence
  Description of Artificial Sequence: Synthetic oligonucleotide
  Sense strand starting at position 1194 of SEQ ID NO: 1886808
guccaaagauugccauaug

SEQ ID NO: 2427729 - RNA, 19 nt, Artificial Sequence
  Description of Artificial Sequence: Synthetic oligonucleotide
  Antisense strand to SEQ ID NO: 2427728
cauauggcaaucuuuggac

SEQ ID NO: 2427730 - RNA, 19 nt, Artificial Sequence
  Description of Artificial Sequence: Synthetic oligonucleotide
  Sense strand starting at position 1204 of SEQ ID NO: 1886808
ugccauaugccauaugauu

SEQ ID NO: 2427731 - RNA, 19 nt, Artificial Sequence
  Description of Artificial Sequence: Synthetic oligonucleotide
  Antisense strand to SEQ ID NO: 2427730
aaucauauggcauauggca

SEQ ID NO: 2427732 - RNA, 19 nt, Artificial Sequence
  Description of Artificial Sequence: Synthetic oligonucleotide
  Sense strand starting at position 1213 of SEQ ID NO: 1886808
ccauaugauuugggaacca

SEQ ID NO: 2427733 - RNA, 19 nt, Artificial Sequence
  Description of Artificial Sequence: Synthetic oligonucleotide
  Antisense strand to SEQ ID NO: 2427732
ugguucccaaaucauaugg

SEQ ID NO: 2427734 - RNA, 19 nt, Artificial Sequence
  Description of Artificial Sequence: Synthetic oligonucleotide
  Sense strand starting at position 1824 of SEQ ID NO: 1886808
ucuggcauuuaguuaucuu

SEQ ID NO: 2427735 - RNA, 19 nt, Artificial Sequence
  Description of Artificial Sequence: Synthetic oligonucleotide
  Antisense strand to SEQ ID NO: 2427734
aagauaacuaaaugccaga

SEQ ID NO: 2427736 - RNA, 19 nt, Artificial Sequence
  Description of Artificial Sequence: Synthetic oligonucleotide
  Sense strand starting at position 1828 of SEQ ID NO: 1886808
gcauuuaguuaucuuaccu

SEQ ID NO: 2427737 - RNA, 19 nt, Artificial Sequence
  Description of Artificial Sequence: Synthetic oligonucleotide
  Antisense strand to SEQ ID NO: 2427736
agguaagauaacuaaaugc

SEQ ID NO: 2427738 - RNA, 19 nt, Artificial Sequence
  Description of Artificial Sequence: Synthetic oligonucleotide
  Sense strand starting at position 1873 of SEQ ID NO: 1886808
cauggauugccuggaauca

SEQ ID NO: 2427739 - RNA, 19 nt, Artificial Sequence
  Description of Artificial Sequence: Synthetic oligonucleotide
  Antisense strand to SEQ ID NO: 2427738
ugauuccaggcaauccaug

SEQ ID NO: 2427740 - RNA, 19 nt, Artificial Sequence
  Description of Artificial Sequence: Synthetic oligonucleotide
  Sense strand starting at position 1894 of SEQ ID NO: 1886808
auuucagaguuguaggaga

SEQ ID NO: 2427741 - RNA, 19 nt, Artificial Sequence
  Description of Artificial Sequence: Synthetic oligonucleotide
  Antisense strand to SEQ ID NO: 2427740
ucuccuacaacucugaaau

SEQ ID NO: 2427742 - RNA, 19 nt, Artificial Sequence
  Description of Artificial Sequence: Synthetic oligonucleotide
  Sense strand starting at position 1917 of SEQ ID NO: 1886808
gggaaucaccaaugucuuc

SEQ ID NO: 2427743 - RNA, 19 nt, Artificial Sequence
  Description of Artificial Sequence: Synthetic oligonucleotide
  Antisense strand to SEQ ID NO: 2427742
gaagacauuggugauuccc

SEQ ID NO: 2427744 - RNA, 19 nt, Artificial Sequence
  Description of Artificial Sequence: Synthetic oligonucleotide
  Sense strand starting at position 1981 of SEQ ID NO: 1886808
gaagucauagccggaugga

SEQ ID NO: 2427745 - RNA, 19 nt, Artificial Sequence
  Description of Artificial Sequence: Synthetic oligonucleotide
  Antisense strand to SEQ ID NO: 2427744
uccauccggcuaugacuuc

SEQ ID NO: 2427746 - RNA, 19 nt, Artificial Sequence
  Description of Artificial Sequence: Synthetic oligonucleotide
  Sense strand starting at position 1982 of SEQ ID NO: 1886808
aagucauagccggauggaa

SEQ ID NO: 2427747 - RNA, 19 nt, Artificial Sequence
  Description of Artificial Sequence: Synthetic oligonucleotide
  Antisense strand to SEQ ID NO: 2427746
uuccauccggcuaugacuu

SEQ ID NO: 2427748 - RNA, 19 nt, Artificial Sequence
  Description of Artificial Sequence: Synthetic oligonucleotide
  Sense strand starting at position 1984 of SEQ ID NO: 1886808
gucauagccggauggaaga

SEQ ID NO: 2427749 - RNA, 19 nt, Artificial Sequence
  Description of Artificial Sequence: Synthetic oligonucleotide
  Antisense strand to SEQ ID NO: 2427748
ucuuccauccggcuaugac

SEQ ID NO: 2427750 - RNA, 19 nt, Artificial Sequence
  Description of Artificial Sequence: Synthetic oligonucleotide
  Sense strand starting at position 2015 of SEQ ID NO: 1886808
agaacuugguguucuaaau

SEQ ID NO: 2427751 - RNA, 19 nt, Artificial Sequence
  Description of Artificial Sequence: Synthetic oligonucleotide
  Antisense strand to SEQ ID NO: 2427750
auuuagaacaccaaguucu

SEQ ID NO: 2427752 - RNA, 19 nt, Artificial Sequence
  Description of Artificial Sequence: Synthetic oligonucleotide
  Sense strand starting at position 2036 of SEQ ID NO: 1886808
cgagaucaauauucuaaac

SEQ ID NO: 2427753 - RNA, 19 nt, Artificial Sequence
  Description of Artificial Sequence: Synthetic oligonucleotide
  Antisense strand to SEQ ID NO: 2427752
guuuagaauauugaucucg

SEQ ID NO: 2427754 - RNA, 19 nt, Artificial Sequence
  Description of Artificial Sequence: Synthetic oligonucleotide
  Sense strand starting at position 2147 of SEQ ID NO: 1886808
aauguuucucuguaaggug

SEQ ID NO: 2427755 - RNA, 19 nt, Artificial Sequence
  Description of Artificial Sequence: Synthetic oligonucleotide
  Antisense strand to SEQ ID NO: 2427754
caccuuacagagaaacauu

SEQ ID NO: 2427756 - RNA, 19 nt, Artificial Sequence
  Description of Artificial Sequence: Synthetic oligonucleotide
  Sense strand starting at position 2237 of SEQ ID NO: 1886808
ugagaagauugucauuuaa

SEQ ID NO: 2427757 - RNA, 19 nt, Artificial Sequence
  Description of Artificial Sequence: Synthetic oligonucleotide
  Antisense strand to SEQ ID NO: 2427756
uuaaaugacaaucuucuca

SEQ ID NO: 2427758 - RNA, 19 nt, Artificial Sequence
  Description of Artificial Sequence: Synthetic oligonucleotide
  Sense strand starting at position 2319 of SEQ ID NO: 1886808
ggaaauuucugcccuugcu

SEQ ID NO: 2427759 - RNA, 19 nt, Artificial Sequence
  Description of Artificial Sequence: Synthetic oligonucleotide
  Antisense strand to SEQ ID NO: 2427758
agcaagggcagaaauuucc

SEQ ID NO: 2427760 - RNA, 19 nt, Artificial Sequence
  Description of Artificial Sequence: Synthetic oligonucleotide
  Sense strand starting at position 2494 of SEQ ID NO: 1886808
cuuguaaugcgcucuuuga

SEQ ID NO: 2427761 - RNA, 19 nt, Artificial Sequence
  Description of Artificial Sequence: Synthetic oligonucleotide
  Antisense strand to SEQ ID NO: 2427760
ucaaagagcgcauuacaag

SEQ ID NO: 2427762 - RNA, 19 nt, Artificial Sequence
  Description of Artificial Sequence: Synthetic oligonucleotide
  Sense strand starting at position 2495 of SEQ ID NO: 1886808
uuguaaugcgcucuuugac

SEQ ID NO: 2427763 - RNA, 19 nt, Artificial Sequence
  Description of Artificial Sequence: Synthetic oligonucleotide
  Antisense strand to SEQ ID NO: 2427762
gucaaagagcgcauuacaa

SEQ ID NO: 2427764 - RNA, 19 nt, Artificial Sequence
  Description of Artificial Sequence: Synthetic oligonucleotide
  Sense strand starting at position 2604 of SEQ ID NO: 1886808
caacuucuugccgaugaga

SEQ ID NO: 2427765 - RNA, 19 nt, Artificial Sequence
  Description of Artificial Sequence: Synthetic oligonucleotide
  Antisense strand to SEQ ID NO: 2427764
ucucaucggcaagaaguug

SEQ ID NO: 2427766 - RNA, 19 nt, Artificial Sequence
  Description of Artificial Sequence: Synthetic oligonucleotide
  Sense strand starting at position 3005 of SEQ ID NO: 1886808
gggcaccucuaagcuauaa

SEQ ID NO: 2427767 - RNA, 19 nt, Artificial Sequence
  Description of Artificial Sequence: Synthetic oligonucleotide
  Antisense strand to SEQ ID NO: 2427766
uuauagcuuagaggugccc

SEQ ID NO: 2427768 - RNA, 19 nt, Artificial Sequence
  Description of Artificial Sequence: Synthetic oligonucleotide
  Sense strand starting at position 3055 of SEQ ID NO: 1886808
ucauucucuguguaugaau

SEQ ID NO: 2427769 - RNA, 19 nt, Artificial Sequence
  Description of Artificial Sequence: Synthetic oligonucleotide
  Antisense strand to SEQ ID NO: 2427768
auucauacacagagaauga

SEQ ID NO: 2427770 - RNA, 19 nt, Artificial Sequence
  Description of Artificial Sequence: Synthetic oligonucleotide
  Sense strand starting at position 3064 of SEQ ID NO: 1886808
guguaugaaugcuuagaau

SEQ ID NO: 2427771 - RNA, 19 nt, Artificial Sequence
  Description of Artificial Sequence: Synthetic oligonucleotide
  Antisense strand to SEQ ID NO: 2427770
auucuaagcauucauacac

SEQ ID NO: 2427772 - RNA, 19 nt, Artificial Sequence
  Description of Artificial Sequence: Synthetic oligonucleotide
  Sense strand starting at position 3138 of SEQ ID NO: 1886808
uggaauggaucacaaauaa

SEQ ID NO: 2427773 - RNA, 19 nt, Artificial Sequence
  Description of Artificial Sequence: Synthetic oligonucleotide
  Antisense strand to SEQ ID NO: 2427772
uuauuugugauccauucca

SEQ ID NO: 2427774 - RNA, 19 nt, Artificial Sequence
  Description of Artificial Sequence: Synthetic oligonucleotide
  Sense strand starting at position 3203 of SEQ ID NO: 1886808
aguaucauuuccuuugcuu

SEQ ID NO: 2427775 - RNA, 19 nt, Artificial Sequence
  Description of Artificial Sequence: Synthetic oligonucleotide
  Antisense strand to SEQ ID NO: 2427774
aagcaaaggaaaugauacu

SEQ ID NO: 2427776 - RNA, 19 nt, Artificial Sequence
  Description of Artificial Sequence: Synthetic oligonucleotide
  Sense strand starting at position 3253 of SEQ ID NO: 1886808
guauuaggauuguucccau

SEQ ID NO: 2427777 - RNA, 19 nt, Artificial Sequence
  Description of Artificial Sequence: Synthetic oligonucleotide
  Antisense strand to SEQ ID NO: 2427776
augggaacaauccuaauac

SEQ ID NO: 2427778 - RNA, 19 nt, Artificial Sequence
  Description of Artificial Sequence: Synthetic oligonucleotide
  Sense strand starting at position 3390 of SEQ ID NO: 1886808
gacugaaucuguguaggga

SEQ ID NO: 2427779 - RNA, 19 nt, Artificial Sequence
  Description of Artificial Sequence: Synthetic oligonucleotide
  Antisense strand to SEQ ID NO: 2427778
ucccuacacagauucaguc

SEQ ID NO: 2427780 - RNA, 19 nt, Artificial Sequence
  Description of Artificial Sequence: Synthetic oligonucleotide
  Sense strand starting at position 3441 of SEQ ID NO: 1886808
gguugccugcauuagaaga

SEQ ID NO: 2427781 - RNA, 19 nt, Artificial Sequence
  Description of Artificial Sequence: Synthetic oligonucleotide
  Antisense strand to SEQ ID NO: 2427780
ucuucuaaugcaggcaacc

SEQ ID NO: 2427782 - RNA, 19 nt, Artificial Sequence
  Description of Artificial Sequence: Synthetic oligonucleotide
  Sense strand starting at position 3473 of SEQ ID NO: 1886808
aguucuuagcaauggauau

SEQ ID NO: 2427783 - RNA, 19 nt, Artificial Sequence
  Description of Artificial Sequence: Synthetic oligonucleotide
  Antisense strand to SEQ ID NO: 2427782
auauccauugcuaagaacu

SEQ ID NO: 2427784 - RNA, 19 nt, Artificial Sequence
  Description of Artificial Sequence: Synthetic oligonucleotide
  Sense strand starting at position 3474 of SEQ ID NO: 1886808
guucuuagcaauggauaug

SEQ ID NO: 2427785 - RNA, 19 nt, Artificial Sequence
  Description of Artificial Sequence: Synthetic oligonucleotide
  Antisense strand to SEQ ID NO: 2427784
cauauccauugcuaagaac

SEQ ID NO: 2427786 - RNA, 19 nt, Artificial Sequence
  Description of Artificial Sequence: Synthetic oligonucleotide
  Sense strand starting at position 3879 of SEQ ID NO: 1886808
gccuccugccaauagacau

SEQ ID NO: 2427787 - RNA, 19 nt, Artificial Sequence
  Description of Artificial Sequence: Synthetic oligonucleotide
  Antisense strand to SEQ ID NO: 2427786
augucuauuggcaggaggc

SEQ ID NO: 2427788 - RNA, 19 nt, Artificial Sequence
  Description of Artificial Sequence: Synthetic oligonucleotide
  Sense strand starting at position 90 of SEQ ID NO: 1886809
gccuguggccuguacucau

SEQ ID NO: 2427789 - RNA, 19 nt, Artificial Sequence
  Description of Artificial Sequence: Synthetic oligonucleotide
  Antisense strand to SEQ ID NO: 2427788
augaguacaggccacaggc

SEQ ID NO: 2427790 - RNA, 19 nt, Artificial Sequence
  Description of Artificial Sequence: Synthetic oligonucleotide
  Sense strand starting at position 109 of SEQ ID NO: 1886809
cucuccaguucuggaggaa

SEQ ID NO: 2427791 - RNA, 19 nt, Artificial Sequence
  Description of Artificial Sequence: Synthetic oligonucleotide
  Antisense strand to SEQ ID NO: 2427790
uuccuccagaacuggagag

SEQ ID NO: 2427792 - RNA, 19 nt, Artificial Sequence
  Description of Artificial Sequence: Synthetic oligonucleotide
  Sense strand starting at position 518 of SEQ ID NO: 1886809
gcgcacacauggucugaua

SEQ ID NO: 2427793 - RNA, 19 nt, Artificial Sequence
  Description of Artificial Sequence: Synthetic oligonucleotide
  Antisense strand to SEQ ID NO: 2427792
uaucagaccaugugugcgc

SEQ ID NO: 2427794 - RNA, 19 nt, Artificial Sequence
  Description of Artificial Sequence: Synthetic oligonucleotide
  Sense strand starting at position 520 of SEQ ID NO: 1886809
gcacacauggucugauacu

SEQ ID NO: 2427795 - RNA, 19 nt, Artificial Sequence
  Description of Artificial Sequence: Synthetic oligonucleotide
  Antisense strand to SEQ ID NO: 2427794
aguaucagaccaugugugc

SEQ ID NO: 2427796 - RNA, 19 nt, Artificial Sequence
  Description of Artificial Sequence: Synthetic oligonucleotide
  Sense strand starting at position 939 of SEQ ID NO: 1886809
guauguaucuggccucuuu

SEQ ID NO: 2427797 - RNA, 19 nt, Artificial Sequence
  Description of Artificial Sequence: Synthetic oligonucleotide
  Antisense strand to SEQ ID NO: 2427796
aaagaggccagauacauac

SEQ ID NO: 2427798 - RNA, 19 nt, Artificial Sequence
  Description of Artificial Sequence: Synthetic oligonucleotide
  Sense strand starting at position 1073 of SEQ ID NO: 1886809
cccucucagccagaaggau

SEQ ID NO: 2427799 - RNA, 19 nt, Artificial Sequence
  Description of Artificial Sequence: Synthetic oligonucleotide
  Antisense strand to SEQ ID NO: 2427798
auccuucuggcugagaggg

SEQ ID NO: 2427800 - RNA, 19 nt, Artificial Sequence
  Description of Artificial Sequence: Synthetic oligonucleotide
  Sense strand starting at position 1357 of SEQ ID NO: 1886809
ugguccuuugggugcaaga

SEQ ID NO: 2427801 - RNA, 19 nt, Artificial Sequence
  Description of Artificial Sequence: Synthetic oligonucleotide
  Antisense strand to SEQ ID NO: 2427800
ucuugcacccaaaggacca

SEQ ID NO: 2427802 - RNA, 19 nt, Artificial Sequence
  Description of Artificial Sequence: Synthetic oligonucleotide
  Sense strand starting at position 1359 of SEQ ID NO: 1886809
guccuuugggugcaagauc

SEQ ID NO: 2427803 - RNA, 19 nt, Artificial Sequence
  Description of Artificial Sequence: Synthetic oligonucleotide
  Antisense strand to SEQ ID NO: 2427802
gaucuugcacccaaaggac

SEQ ID NO: 2427804 - RNA, 19 nt, Artificial Sequence
  Description of Artificial Sequence: Synthetic oligonucleotide
  Sense strand starting at position 1367 of SEQ ID NO: 1886809
ggugcaagauccuguggca

SEQ ID NO: 2427805 - RNA, 19 nt, Artificial Sequence
  Description of Artificial Sequence: Synthetic oligonucleotide
  Antisense strand to SEQ ID NO: 2427804
ugccacaggaucuugcacc

SEQ ID NO: 2427806 - RNA, 19 nt, Artificial Sequence
  Description of Artificial Sequence: Synthetic oligonucleotide
  Sense strand starting at position 1639 of SEQ ID NO: 1886809
gcacucuugucucccaaga

SEQ ID NO: 2427807 - RNA, 19 nt, Artificial Sequence
  Description of Artificial Sequence: Synthetic oligonucleotide
  Antisense strand to SEQ ID NO: 2427806
ucuugggagacaagagugc

SEQ ID NO: 2427808 - RNA, 19 nt, Artificial Sequence
  Description of Artificial Sequence: Synthetic oligonucleotide
  Sense strand starting at position 1668 of SEQ ID NO: 1886809
auuugcaguucuuagagga

SEQ ID NO: 2427809 - RNA, 19 nt, Artificial Sequence
  Description of Artificial Sequence: Synthetic oligonucleotide
  Antisense strand to SEQ ID NO: 2427808
uccucuaagaacugcaaau

SEQ ID NO: 2427810 - RNA, 19 nt, Artificial Sequence
  Description of Artificial Sequence: Synthetic oligonucleotide
  Sense strand starting at position 1771 of SEQ ID NO: 1886809
agaagcuccuguuccuaaa

SEQ ID NO: 2427811 - RNA, 19 nt, Artificial Sequence
  Description of Artificial Sequence: Synthetic oligonucleotide
  Antisense strand to SEQ ID NO: 2427810
uuuaggaacaggagcuucu

SEQ ID NO: 2427812 - RNA, 19 nt, Artificial Sequence
  Description of Artificial Sequence: Synthetic oligonucleotide
  Sense strand starting at position 2000 of SEQ ID NO: 1886809
cgagcuaucccaggcagga

SEQ ID NO: 2427813 - RNA, 19 nt, Artificial Sequence
  Description of Artificial Sequence: Synthetic oligonucleotide
  Antisense strand to SEQ ID NO: 2427812
uccugccugggauagcucg

SEQ ID NO: 2427814 - RNA, 19 nt, Artificial Sequence
  Description of Artificial Sequence: Synthetic oligonucleotide
  Sense strand starting at position 2294 of SEQ ID NO: 1886809
gcacuuuaaguacguucua

SEQ ID NO: 2427815 - RNA, 19 nt, Artificial Sequence
  Description of Artificial Sequence: Synthetic oligonucleotide
  Antisense strand to SEQ ID NO: 2427814
uagaacguacuuaaagugc

SEQ ID NO: 2427816 - RNA, 19 nt, Artificial Sequence
  Description of Artificial Sequence: Synthetic oligonucleotide
  Sense strand starting at position 2667 of SEQ ID NO: 1886809
gaggaagcuucugcuccua

SEQ ID NO: 2427817 - RNA, 19 nt, Artificial Sequence
  Description of Artificial Sequence: Synthetic oligonucleotide
  Antisense strand to SEQ ID NO: 2427816
uaggagcagaagcuuccuc

SEQ ID NO: 2427818 - RNA, 19 nt, Artificial Sequence
  Description of Artificial Sequence: Synthetic oligonucleotide
  Sense strand starting at position 2779 of SEQ ID NO: 1886809
ggauacgcgucuccuuuaa

SEQ ID NO: 2427819 - RNA, 19 nt, Artificial Sequence
  Description of Artificial Sequence: Synthetic oligonucleotide
  Antisense strand to SEQ ID NO: 2427818
uuaaaggagacgcguaucc

SEQ ID NO: 2427820 - RNA, 19 nt, Artificial Sequence
  Description of Artificial Sequence: Synthetic oligonucleotide
  Sense strand starting at position 2783 of SEQ ID NO: 1886809
acgcgucuccuuuaaucca

SEQ ID NO: 2427821 - RNA, 19 nt, Artificial Sequence
  Description of Artificial Sequence: Synthetic oligonucleotide
  Antisense strand to SEQ ID NO: 2427820
uggauuaaaggagacgcgu

SEQ ID NO: 2427822 - RNA, 19 nt, Artificial Sequence
  Description of Artificial Sequence: Synthetic oligonucleotide
  Sense strand starting at position 2812 of SEQ ID NO: 1886809
cggccaaaugaguauuaac

SEQ ID NO: 2427823 - RNA, 19 nt, Artificial Sequence
  Description of Artificial Sequence: Synthetic oligonucleotide
  Antisense strand to SEQ ID NO: 2427822
guuaauacucauuuggccg

SEQ ID NO: 2427824 - RNA, 19 nt, Artificial Sequence
  Description of Artificial Sequence: Synthetic oligonucleotide
  Sense strand starting at position 2821 of SEQ ID NO: 1886809
gaguauuaaccacguuaua

SEQ ID NO: 2427825 - RNA, 19 nt, Artificial Sequence
  Description of Artificial Sequence: Synthetic oligonucleotide
  Antisense strand to SEQ ID NO: 2427824
uauaacgugguuaauacuc

SEQ ID NO: 2427826 - RNA, 19 nt, Artificial Sequence
  Description of Artificial Sequence: Synthetic oligonucleotide
  Sense strand starting at position 2918 of SEQ ID NO: 1886809
gggucagccuccugacaug

SEQ ID NO: 2427827 - RNA, 19 nt, Artificial Sequence
  Description of Artificial Sequence: Synthetic oligonucleotide
  Antisense strand to SEQ ID NO: 2427826
caugucaggaggcugaccc

SEQ ID NO: 2427828 - RNA, 19 nt, Artificial Sequence
  Description of Artificial Sequence: Synthetic oligonucleotide
  Sense strand starting at position 2999 of SEQ ID NO: 1886809
ucaugauucuccugcuggu

SEQ ID NO: 2427829 - RNA, 19 nt, Artificial Sequence
  Description of Artificial Sequence: Synthetic oligonucleotide
  Antisense strand to SEQ ID NO: 2427828
accagcaggagaaucauga

SEQ ID NO: 2427830 - RNA, 19 nt, Artificial Sequence
  Description of Artificial Sequence: Synthetic oligonucleotide
  Sense strand starting at position 3283 of SEQ ID NO: 1886809
ggucauguccaagaccuca

SEQ ID NO: 2427831 - RNA, 19 nt, Artificial Sequence
  Description of Artificial Sequence: Synthetic oligonucleotide
  Antisense strand to SEQ ID NO: 2427830
ugaggucuuggacaugacc

SEQ ID NO: 2427832 - RNA, 19 nt, Artificial Sequence
  Description of Artificial Sequence: Synthetic oligonucleotide
  Sense strand starting at position 3717 of SEQ ID NO: 1886809
guauguuaaacauggugaa

SEQ ID NO: 2427833 - RNA, 19 nt, Artificial Sequence
  Description of Artificial Sequence: Synthetic oligonucleotide
  Antisense strand to SEQ ID NO: 2427832
uucaccauguuuaacauac

SEQ ID NO: 2427834 - RNA, 19 nt, Artificial Sequence
  Description of Artificial Sequence: Synthetic oligonucleotide
  Sense strand starting at position 3718 of SEQ ID NO: 1886809
uauguuaaacauggugaaa

SEQ ID NO: 2427835 - RNA, 19 nt, Artificial Sequence
  Description of Artificial Sequence: Synthetic oligonucleotide
  Antisense strand to SEQ ID NO: 2427834
uuucaccauguuuaacaua

SEQ ID NO: 2427836 - RNA, 19 nt, Artificial Sequence
  Description of Artificial Sequence: Synthetic oligonucleotide
  Sense strand starting at position 3720 of SEQ ID NO: 1886809
uguuaaacauggugaaacu

SEQ ID NO: 2427837 - RNA, 19 nt, Artificial Sequence
  Description of Artificial Sequence: Synthetic oligonucleotide
  Antisense strand to SEQ ID NO: 2427836
aguuucaccauguuuaaca

SEQ ID NO: 2427838 - RNA, 19 nt, Artificial Sequence
  Description of Artificial Sequence: Synthetic oligonucleotide
  Sense strand starting at position 3786 of SEQ ID NO: 1886809
gggugaucgcugggaccuu

SEQ ID NO: 2427839 - RNA, 19 nt, Artificial Sequence
  Description of Artificial Sequence: Synthetic oligonucleotide
  Antisense strand to SEQ ID NO: 2427838
aaggucccagcgaucaccc

SEQ ID NO: 2427840 - RNA, 19 nt, Artificial Sequence
  Description of Artificial Sequence: Synthetic oligonucleotide
  Sense strand starting at position 3798 of SEQ ID NO: 1886809
ggaccuuuguccuggucaa

SEQ ID NO: 2427841 - RNA, 19 nt, Artificial Sequence
  Description of Artificial Sequence: Synthetic oligonucleotide
  Antisense strand to SEQ ID NO: 2427840
uugaccaggacaaaggucc

SEQ ID NO: 2427842 - RNA, 19 nt, Artificial Sequence
  Description of Artificial Sequence: Synthetic oligonucleotide
  Sense strand starting at position 3799 of SEQ ID NO: 1886809
gaccuuuguccuggucaac

SEQ ID NO: 2427843 - RNA, 19 nt, Artificial Sequence
  Description of Artificial Sequence: Synthetic oligonucleotide
  Antisense strand to SEQ ID NO: 2427842
guugaccaggacaaagguc

SEQ ID NO: 2427844 - RNA, 19 nt, Artificial Sequence
  Description of Artificial Sequence: Synthetic oligonucleotide
  Sense strand starting at position 19 of SEQ ID NO: 1886810
uccuaagagcccuguugga

SEQ ID NO: 2427845 - RNA, 19 nt, Artificial Sequence
  Description of Artificial Sequence: Synthetic oligonucleotide
  Antisense strand to SEQ ID NO: 2427844
uccaacagggcucuuagga

SEQ ID NO: 2427846 - RNA, 19 nt, Artificial Sequence
  Description of Artificial Sequence: Synthetic oligonucleotide
  Sense strand starting at position 194 of SEQ ID NO: 1886810
gcaagucuccaggacacuu

SEQ ID NO: 2427847 - RNA, 19 nt, Artificial Sequence
  Description of Artificial Sequence: Synthetic oligonucleotide
  Antisense strand to SEQ ID NO: 2427846
aaguguccuggagacuugc

SEQ ID NO: 2427848 - RNA, 19 nt, Artificial Sequence
  Description of Artificial Sequence: Synthetic oligonucleotide
  Sense strand starting at position 823 of SEQ ID NO: 1886810
ccucgaaaccugcaaguga

SEQ ID NO: 2427849 - RNA, 19 nt, Artificial Sequence
  Description of Artificial Sequence: Synthetic oligonucleotide
  Antisense strand to SEQ ID NO: 2427848
ucacuugcagguuucgagg

SEQ ID NO: 2427850 - RNA, 19 nt, Artificial Sequence
  Description of Artificial Sequence: Synthetic oligonucleotide
  Sense strand starting at position 1647 of SEQ ID NO: 1886810
cccgguuugcauggaaauu

SEQ ID NO: 2427851 - RNA, 19 nt, Artificial Sequence
  Description of Artificial Sequence: Synthetic oligonucleotide
  Antisense strand to SEQ ID NO: 2427850
aauuuccaugcaaaccggg

SEQ ID NO: 2427852 - RNA, 19 nt, Artificial Sequence
  Description of Artificial Sequence: Synthetic oligonucleotide
  Sense strand starting at position 1648 of SEQ ID NO: 1886810
ccgguuugcauggaaauua

SEQ ID NO: 2427853 - RNA, 19 nt, Artificial Sequence
  Description of Artificial Sequence: Synthetic oligonucleotide
  Antisense strand to SEQ ID NO: 2427852
uaauuuccaugcaaaccgg

SEQ ID NO: 2427854 - RNA, 19 nt, Artificial Sequence
  Description of Artificial Sequence: Synthetic oligonucleotide
  Sense strand starting at position 1993 of SEQ ID NO: 1886810
gagcgauucucagagcccu

SEQ ID NO: 2427855 - RNA, 19 nt, Artificial Sequence
  Description of Artificial Sequence: Synthetic oligonucleotide
  Antisense strand to SEQ ID NO: 2427854
agggcucugagaaucgcuc

SEQ ID NO: 2427856 - RNA, 19 nt, Artificial Sequence
  Description of Artificial Sequence: Synthetic oligonucleotide
  Sense strand starting at position 2366 of SEQ ID NO: 1886810
uggccugagugggagauaa

SEQ ID NO: 2427857 - RNA, 19 nt, Artificial Sequence
  Description of Artificial Sequence: Synthetic oligonucleotide
  Antisense strand to SEQ ID NO: 2427856
uuaucucccacucaggcca

SEQ ID NO: 2427858 - RNA, 19 nt, Artificial Sequence
  Description of Artificial Sequence: Synthetic oligonucleotide
  Sense strand starting at position 2588 of SEQ ID NO: 1886810
gcauuugcucccuggagga

SEQ ID NO: 2427859 - RNA, 19 nt, Artificial Sequence
  Description of Artificial Sequence: Synthetic oligonucleotide
  Antisense strand to SEQ ID NO: 2427858
uccuccagggagcaaaugc

SEQ ID NO: 2427860 - RNA, 19 nt, Artificial Sequence
  Description of Artificial Sequence: Synthetic oligonucleotide
  Sense strand starting at position 2648 of SEQ ID NO: 1886810
gggugucacuugcucagaa

SEQ ID NO: 2427861 - RNA, 19 nt, Artificial Sequence
  Description of Artificial Sequence: Synthetic oligonucleotide
  Antisense strand to SEQ ID NO: 2427860
uucugagcaagugacaccc

SEQ ID NO: 2427862 - RNA, 19 nt, Artificial Sequence
  Description of Artificial Sequence: Synthetic oligonucleotide
  Sense strand starting at position 2649 of SEQ ID NO: 1886810
ggugucacuugcucagaaa

SEQ ID NO: 2427863 - RNA, 19 nt, Artificial Sequence
  Description of Artificial Sequence: Synthetic oligonucleotide
  Antisense strand to SEQ ID NO: 2427862
uuucugagcaagugacacc

SEQ ID NO: 2427864 - RNA, 19 nt, Artificial Sequence
  Description of Artificial Sequence: Synthetic oligonucleotide
  Sense strand starting at position 2650 of SEQ ID NO: 1886810
gugucacuugcucagaaau

SEQ ID NO: 2427865 - RNA, 19 nt, Artificial Sequence
  Description of Artificial Sequence: Synthetic oligonucleotide
  Antisense strand to SEQ ID NO: 2427864
auuucugagcaagugacac

SEQ ID NO: 2427866 - RNA, 19 nt, Artificial Sequence
  Description of Artificial Sequence: Synthetic oligonucleotide
  Sense strand starting at position 2652 of SEQ ID NO: 1886810
gucacuugcucagaaauga

SEQ ID NO: 2427867 - RNA, 19 nt, Artificial Sequence
  Description of Artificial Sequence: Synthetic oligonucleotide
  Antisense strand to SEQ ID NO: 2427866
ucauuucugagcaagugac

SEQ ID NO: 2427868 - RNA, 19 nt, Artificial Sequence
  Description of Artificial Sequence: Synthetic oligonucleotide
  Sense strand starting at position 2663 of SEQ ID NO: 1886810
agaaaugacuuccuguagu

SEQ ID NO: 2427869 - RNA, 19 nt, Artificial Sequence
  Description of Artificial Sequence: Synthetic oligonucleotide
  Antisense strand to SEQ ID NO: 2427868
acuacaggaagucauuucu

SEQ ID NO: 2427870 - RNA, 19 nt, Artificial Sequence
  Description of Artificial Sequence: Synthetic oligonucleotide
  Sense strand starting at position 2959 of SEQ ID NO: 1886810
cugcccuucucuggguaaa

SEQ ID NO: 2427871 - RNA, 19 nt, Artificial Sequence
  Description of Artificial Sequence: Synthetic oligonucleotide
  Antisense strand to SEQ ID NO: 2427870
uuuacccagagaagggcag

SEQ ID NO: 2427872 - RNA, 19 nt, Artificial Sequence
  Description of Artificial Sequence: Synthetic oligonucleotide
  Sense strand starting at position 2961 of SEQ ID NO: 1886810
gcccuucucuggguaaaca

SEQ ID NO: 2427873 - RNA, 19 nt, Artificial Sequence
  Description of Artificial Sequence: Synthetic oligonucleotide
  Antisense strand to SEQ ID NO: 2427872
uguuuacccagagaagggc

SEQ ID NO: 2427874 - RNA, 19 nt, Artificial Sequence
  Description of Artificial Sequence: Synthetic oligonucleotide
  Sense strand starting at position 2970 of SEQ ID NO: 1886810
uggguaaacagcugugauc

SEQ ID NO: 2427875 - RNA, 19 nt, Artificial Sequence
  Description of Artificial Sequence: Synthetic oligonucleotide
  Antisense strand to SEQ ID NO: 2427874
gaucacagcuguuuaccca

SEQ ID NO: 2427876 - RNA, 19 nt, Artificial Sequence
  Description of Artificial Sequence: Synthetic oligonucleotide
  Sense strand starting at position 2972 of SEQ ID NO: 1886810
gguaaacagcugugaucug

SEQ ID NO: 2427877 - RNA, 19 nt, Artificial Sequence
  Description of Artificial Sequence: Synthetic oligonucleotide
  Antisense strand to SEQ ID NO: 2427876
cagaucacagcuguuuacc

SEQ ID NO: 2427878 - RNA, 19 nt, Artificial Sequence
  Description of Artificial Sequence: Synthetic oligonucleotide
  Sense strand starting at position 2973 of SEQ ID NO: 1886810
guaaacagcugugaucuga

SEQ ID NO: 2427879 - RNA, 19 nt, Artificial Sequence
  Description of Artificial Sequence: Synthetic oligonucleotide
  Antisense strand to SEQ ID NO: 2427878
ucagaucacagcuguuuac

SEQ ID NO: 2427880 - RNA, 19 nt, Artificial Sequence
  Description of Artificial Sequence: Synthetic oligonucleotide
  Sense strand starting at position 2981 of SEQ ID NO: 1886810
cugugaucugaauaauucu

SEQ ID NO: 2427881 - RNA, 19 nt, Artificial Sequence
  Description of Artificial Sequence: Synthetic oligonucleotide
  Antisense strand to SEQ ID NO: 2427880
agaauuauucagaucacag

SEQ ID NO: 2427882 - RNA, 19 nt, Artificial Sequence
  Description of Artificial Sequence: Synthetic oligonucleotide
  Sense strand starting at position 2987 of SEQ ID NO: 1886810
ucugaauaauucuaaugug

SEQ ID NO: 2427883 - RNA, 19 nt, Artificial Sequence
  Description of Artificial Sequence: Synthetic oligonucleotide
  Antisense strand to SEQ ID NO: 2427882
cacauuagaauuauucaga

SEQ ID NO: 2427884 - RNA, 19 nt, Artificial Sequence
  Description of Artificial Sequence: Synthetic oligonucleotide
  Sense strand starting at position 2995 of SEQ ID NO: 1886810
auucuaauguguccguuua

SEQ ID NO: 2427885 - RNA, 19 nt, Artificial Sequence
  Description of Artificial Sequence: Synthetic oligonucleotide
  Antisense strand to SEQ ID NO: 2427884
uaaacggacacauuagaau

SEQ ID NO: 2427886 - RNA, 19 nt, Artificial Sequence
  Description of Artificial Sequence: Synthetic oligonucleotide
  Sense strand starting at position 2996 of SEQ ID NO: 1886810
uucuaauguguccguuuaa

SEQ ID NO: 2427887 - RNA, 19 nt, Artificial Sequence
  Description of Artificial Sequence: Synthetic oligonucleotide
  Antisense strand to SEQ ID NO: 2427886
uuaaacggacacauuagaa

SEQ ID NO: 2427888 - RNA, 19 nt, Artificial Sequence
  Description of Artificial Sequence: Synthetic oligonucleotide
  Sense strand starting at position 2997 of SEQ ID NO: 1886810
ucuaauguguccguuuaau

SEQ ID NO: 2427889 - RNA, 19 nt, Artificial Sequence
  Description of Artificial Sequence: Synthetic oligonucleotide
  Antisense strand to SEQ ID NO: 2427888
auuaaacggacacauuaga

SEQ ID NO: 2427890 - RNA, 19 nt, Artificial Sequence
  Description of Artificial Sequence: Synthetic oligonucleotide
  Sense strand starting at position 3003 of SEQ ID NO: 1886810
guguccguuuaaugacuua

SEQ ID NO: 2427891 - RNA, 19 nt, Artificial Sequence
  Description of Artificial Sequence: Synthetic oligonucleotide
  Antisense strand to SEQ ID NO: 2427890
uaagucauuaaacggacac

SEQ ID NO: 2427892 - RNA, 19 nt, Artificial Sequence
  Description of Artificial Sequence: Synthetic oligonucleotide
  Sense strand starting at position 3010 of SEQ ID NO: 1886810
uuuaaugacuuagaggaaa

SEQ ID NO: 2427893 - RNA, 19 nt, Artificial Sequence
  Description of Artificial Sequence: Synthetic oligonucleotide
  Antisense strand to SEQ ID NO: 2427892
uuuccucuaagucauuaaa

SEQ ID NO: 2427894 - RNA, 19 nt, Artificial Sequence
  Description of Artificial Sequence: Synthetic oligonucleotide
  Sense strand starting at position 3048 of SEQ ID NO: 1886810
gggcgucucuccucugcaa

SEQ ID NO: 2427895 - RNA, 19 nt, Artificial Sequence
  Description of Artificial Sequence: Synthetic oligonucleotide
  Antisense strand to SEQ ID NO: 2427894
uugcagaggagagacgccc

SEQ ID NO: 2427896 - RNA, 19 nt, Artificial Sequence
  Description of Artificial Sequence: Synthetic oligonucleotide
  Sense strand starting at position 3050 of SEQ ID NO: 1886810
gcgucucuccucugcaaga

SEQ ID NO: 2427897 - RNA, 19 nt, Artificial Sequence
  Description of Artificial Sequence: Synthetic oligonucleotide
  Antisense strand to SEQ ID NO: 2427896
ucuugcagaggagagacgc

SEQ ID NO: 2427898 - RNA, 19 nt, Artificial Sequence
  Description of Artificial Sequence: Synthetic oligonucleotide
  Sense strand starting at position 3051 of SEQ ID NO: 1886810
cgucucuccucugcaagau

SEQ ID NO: 2427899 - RNA, 19 nt, Artificial Sequence
  Description of Artificial Sequence: Synthetic oligonucleotide
  Antisense strand to SEQ ID NO: 2427898
aucuugcagaggagagacg

SEQ ID NO: 2427900 - RNA, 19 nt, Artificial Sequence
  Description of Artificial Sequence: Synthetic oligonucleotide
  Sense strand starting at position 3304 of SEQ ID NO: 1886810
uggccuugccucugugaac

SEQ ID NO: 2427901 - RNA, 19 nt, Artificial Sequence
  Description of Artificial Sequence: Synthetic oligonucleotide
  Antisense strand to SEQ ID NO: 2427900
guucacagaggcaaggcca

SEQ ID NO: 2427902 - RNA, 19 nt, Artificial Sequence
  Description of Artificial Sequence: Synthetic oligonucleotide
  Sense strand starting at position 3496 of SEQ ID NO: 1886810
gcgagcugguuccuucuga

SEQ ID NO: 2427903 - RNA, 19 nt, Artificial Sequence
  Description of Artificial Sequence: Synthetic oligonucleotide
  Antisense strand to SEQ ID NO: 2427902
ucagaaggaaccagcucgc

SEQ ID NO: 2427904 - RNA, 19 nt, Artificial Sequence
  Description of Artificial Sequence: Synthetic oligonucleotide
  Sense strand starting at position 3573 of SEQ ID NO: 1886810
gcaguuggcuuguguguca

SEQ ID NO: 2427905 - RNA, 19 nt, Artificial Sequence
  Description of Artificial Sequence: Synthetic oligonucleotide
  Antisense strand to SEQ ID NO: 2427904
ugacacacaagccaacugc

SEQ ID NO: 2427906 - RNA, 19 nt, Artificial Sequence
  Description of Artificial Sequence: Synthetic oligonucleotide
  Sense strand starting at position 3580 of SEQ ID NO: 1886810
gcuugugugucacucagca

SEQ ID NO: 2427907 - RNA, 19 nt, Artificial Sequence
  Description of Artificial Sequence: Synthetic oligonucleotide
  Antisense strand to SEQ ID NO: 2427906
ugcugagugacacacaagc

SEQ ID NO: 2427908 - RNA, 19 nt, Artificial Sequence
  Description of Artificial Sequence: Synthetic oligonucleotide
  Sense strand starting at position 3716 of SEQ ID NO: 1886810
cggcaguuguggugguaca

SEQ ID NO: 2427909 - RNA, 19 nt, Artificial Sequence
  Description of Artificial Sequence: Synthetic oligonucleotide
  Antisense strand to SEQ ID NO: 2427908
uguaccaccacaacugccg

SEQ ID NO: 2427910 - RNA, 19 nt, Artificial Sequence
  Description of Artificial Sequence: Synthetic oligonucleotide
  Sense strand starting at position 119 of SEQ ID NO: 1886811
uagguaauguagccaguuu

SEQ ID NO: 2427911 - RNA, 19 nt, Artificial Sequence
  Description of Artificial Sequence: Synthetic oligonucleotide
  Antisense strand to SEQ ID NO: 2427910
aaacuggcuacauuaccua

SEQ ID NO: 2427912 - RNA, 19 nt, Artificial Sequence
  Description of Artificial Sequence: Synthetic oligonucleotide
  Sense strand starting at position 127 of SEQ ID NO: 1886811
guagccaguuucugaacuu

SEQ ID NO: 2427913 - RNA, 19 nt, Artificial Sequence
  Description of Artificial Sequence: Synthetic oligonucleotide
  Antisense strand to SEQ ID NO: 2427912
aaguucagaaacuggcuac

SEQ ID NO: 2427914 - RNA, 19 nt, Artificial Sequence
  Description of Artificial Sequence: Synthetic oligonucleotide
  Sense strand starting at position 182 of SEQ ID NO: 1886811
aucuguauauaaucgacaa

SEQ ID NO: 2427915 - RNA, 19 nt, Artificial Sequence
  Description of Artificial Sequence: Synthetic oligonucleotide
  Antisense strand to SEQ ID NO: 2427914
uugucgauuauauacagau

SEQ ID NO: 2427916 - RNA, 19 nt, Artificial Sequence
  Description of Artificial Sequence: Synthetic oligonucleotide
  Sense strand starting at position 223 of SEQ ID NO: 1886811
gcuguugcauuugauaaca

SEQ ID NO: 2427917 - RNA, 19 nt, Artificial Sequence
  Description of Artificial Sequence: Synthetic oligonucleotide
  Antisense strand to SEQ ID NO: 2427916
uguuaucaaaugcaacagc

SEQ ID NO: 2427918 - RNA, 19 nt, Artificial Sequence
  Description of Artificial Sequence: Synthetic oligonucleotide
  Sense strand starting at position 268 of SEQ ID NO: 1886811
gcuguaauagucuacugau

SEQ ID NO: 2427919 - RNA, 19 nt, Artificial Sequence
  Description of Artificial Sequence: Synthetic oligonucleotide
  Antisense strand to SEQ ID NO: 2427918
aucaguagacuauuacagc

SEQ ID NO: 2427920 - RNA, 19 nt, Artificial Sequence
  Description of Artificial Sequence: Synthetic oligonucleotide
  Sense strand starting at position 271 of SEQ ID NO: 1886811
guaauagucuacugaugaa

SEQ ID NO: 2427921 - RNA, 19 nt, Artificial Sequence
  Description of Artificial Sequence: Synthetic oligonucleotide
  Antisense strand to SEQ ID NO: 2427920
uucaucaguagacuauuac

SEQ ID NO: 2427922 - RNA, 19 nt, Artificial Sequence
  Description of Artificial Sequence: Synthetic oligonucleotide
  Sense strand starting at position 274 of SEQ ID NO: 1886811
auagucuacugaugaaugu

SEQ ID NO: 2427923 - RNA, 19 nt, Artificial Sequence
  Description of Artificial Sequence: Synthetic oligonucleotide
  Antisense strand to SEQ ID NO: 2427922
acauucaucaguagacuau

SEQ ID NO: 2427924 - RNA, 19 nt, Artificial Sequence
  Description of Artificial Sequence: Synthetic oligonucleotide
  Sense strand starting at position 281 of SEQ ID NO: 1886811
acugaugaaugugcuauaa

SEQ ID NO: 2427925 - RNA, 19 nt, Artificial Sequence
  Description of Artificial Sequence: Synthetic oligonucleotide
  Antisense strand to SEQ ID NO: 2427924
uuauagcacauucaucagu

SEQ ID NO: 2427926 - RNA, 19 nt, Artificial Sequence
  Description of Artificial Sequence: Synthetic oligonucleotide
  Sense strand starting at position 406 of SEQ ID NO: 1886811
guguguauaucuugagaug

SEQ ID NO: 2427927 - RNA, 19 nt, Artificial Sequence
  Description of Artificial Sequence: Synthetic oligonucleotide
  Antisense strand to SEQ ID NO: 2427926
caucucaagauauacacac

SEQ ID NO: 2427928 - RNA, 19 nt, Artificial Sequence
  Description of Artificial Sequence: Synthetic oligonucleotide
  Sense strand starting at position 407 of SEQ ID NO: 1886811
uguguauaucuugagaugu

SEQ ID NO: 2427929 - RNA, 19 nt, Artificial Sequence
  Description of Artificial Sequence: Synthetic oligonucleotide
  Antisense strand to SEQ ID NO: 2427928
acaucucaagauauacaca

SEQ ID NO: 2427930 - RNA, 19 nt, Artificial Sequence
  Description of Artificial Sequence: Synthetic oligonucleotide
  Sense strand starting at position 409 of SEQ ID NO: 1886811
uguauaucuugagauguaa

SEQ ID NO: 2427931 - RNA, 19 nt, Artificial Sequence
  Description of Artificial Sequence: Synthetic oligonucleotide
  Antisense strand to SEQ ID NO: 2427930
uuacaucucaagauauaca

SEQ ID NO: 2427932 - RNA, 19 nt, Artificial Sequence
  Description of Artificial Sequence: Synthetic oligonucleotide
  Sense strand starting at position 437 of SEQ ID NO: 1886811
uggaauuacuaggucacaa

SEQ ID NO: 2427933 - RNA, 19 nt, Artificial Sequence
  Description of Artificial Sequence: Synthetic oligonucleotide
  Antisense strand to SEQ ID NO: 2427932
uugugaccuaguaauucca

SEQ ID NO: 2427934 - RNA, 19 nt, Artificial Sequence
  Description of Artificial Sequence: Synthetic oligonucleotide
  Sense strand starting at position 478 of SEQ ID NO: 1886811
uuuaguugaucuugccaaa

SEQ ID NO: 2427935 - RNA, 19 nt, Artificial Sequence
  Description of Artificial Sequence: Synthetic oligonucleotide
  Antisense strand to SEQ ID NO: 2427934
uuuggcaagaucaacuaaa

SEQ ID NO: 2427936 - RNA, 19 nt, Artificial Sequence
  Description of Artificial Sequence: Synthetic oligonucleotide
  Sense strand starting at position 481 of SEQ ID NO: 1886811
aguugaucuugccaaacag

SEQ ID NO: 2427937 - RNA, 19 nt, Artificial Sequence
  Description of Artificial Sequence: Synthetic oligonucleotide
  Antisense strand to SEQ ID NO: 2427936
cuguuuggcaagaucaacu

SEQ ID NO: 2427938 - RNA, 19 nt, Artificial Sequence
  Description of Artificial Sequence: Synthetic oligonucleotide
  Sense strand starting at position 521 of SEQ ID NO: 1886811
cccacagaguaugagaauu

SEQ ID NO: 2427939 - RNA, 19 nt, Artificial Sequence
  Description of Artificial Sequence: Synthetic oligonucleotide
  Antisense strand to SEQ ID NO: 2427938
aauucucauacucuguggg

SEQ ID NO: 2427940 - RNA, 19 nt, Artificial Sequence
  Description of Artificial Sequence: Synthetic oligonucleotide
  Sense strand starting at position 560 of SEQ ID NO: 1886811
ugccucacauuugaaagaa

SEQ ID NO: 2427941 - RNA, 19 nt, Artificial Sequence
  Description of Artificial Sequence: Synthetic oligonucleotide
  Antisense strand to SEQ ID NO: 2427940
uucuuucaaaugugaggca

SEQ ID NO: 2427942 - RNA, 19 nt, Artificial Sequence
  Description of Artificial Sequence: Synthetic oligonucleotide
  Sense strand starting at position 636 of SEQ ID NO: 1886811
acuuccagacuggguuaaa

SEQ ID NO: 2427943 - RNA, 19 nt, Artificial Sequence
  Description of Artificial Sequence: Synthetic oligonucleotide
  Antisense strand to SEQ ID NO: 2427942
uuuaacccagucuggaagu

SEQ ID NO: 2427944 - RNA, 19 nt, Artificial Sequence
  Description of Artificial Sequence: Synthetic oligonucleotide
  Sense strand starting at position 685 of SEQ ID NO: 1886811
acaucuaagucaugggcaa

SEQ ID NO: 2427945 - RNA, 19 nt, Artificial Sequence
  Description of Artificial Sequence: Synthetic oligonucleotide
  Antisense strand to SEQ ID NO: 2427944
uugcccaugacuuagaugu

SEQ ID NO: 2427946 - RNA, 19 nt, Artificial Sequence
  Description of Artificial Sequence: Synthetic oligonucleotide
  Sense strand starting at position 686 of SEQ ID NO: 1886811
caucuaagucaugggcaau

SEQ ID NO: 2427947 - RNA, 19 nt, Artificial Sequence
  Description of Artificial Sequence: Synthetic oligonucleotide
  Antisense strand to SEQ ID NO: 2427946
auugcccaugacuuagaug

SEQ ID NO: 2427948 - RNA, 19 nt, Artificial Sequence
  Description of Artificial Sequence: Synthetic oligonucleotide
  Sense strand starting at position 687 of SEQ ID NO: 1886811
aucuaagucaugggcaaug

SEQ ID NO: 2427949 - RNA, 19 nt, Artificial Sequence
  Description of Artificial Sequence: Synthetic oligonucleotide
  Antisense strand to SEQ ID NO: 2427948
cauugcccaugacuuagau

SEQ ID NO: 2427950 - RNA, 19 nt, Artificial Sequence
  Description of Artificial Sequence: Synthetic oligonucleotide
  Sense strand starting at position 692 of SEQ ID NO: 1886811
agucaugggcaaugacuua

SEQ ID NO: 2427951 - RNA, 19 nt, Artificial Sequence
  Description of Artificial Sequence: Synthetic oligonucleotide
  Antisense strand to SEQ ID NO: 2427950
uaagucauugcccaugacu

SEQ ID NO: 2427952 - RNA, 19 nt, Artificial Sequence
  Description of Artificial Sequence: Synthetic oligonucleotide
  Sense strand starting at position 734 of SEQ ID NO: 1886811
auuagaaauggcugcccaa

SEQ ID NO: 2427953 - RNA, 19 nt, Artificial Sequence
  Description of Artificial Sequence: Synthetic oligonucleotide
  Antisense strand to SEQ ID NO: 2427952
uugggcagccauuucuaau

SEQ ID NO: 2427954 - RNA, 19 nt, Artificial Sequence
  Description of Artificial Sequence: Synthetic oligonucleotide
  Sense strand starting at position 737 of SEQ ID NO: 1886811
agaaauggcugcccaaaua

SEQ ID NO: 2427955 - RNA, 19 nt, Artificial Sequence
  Description of Artificial Sequence: Synthetic oligonucleotide
  Antisense strand to SEQ ID NO: 2427954
uauuugggcagccauuucu

SEQ ID NO: 2427956 - RNA, 19 nt, Artificial Sequence
  Description of Artificial Sequence: Synthetic oligonucleotide
  Sense strand starting at position 762 of SEQ ID NO: 1886811
gaagucaaguucuagaccu

SEQ ID NO: 2427957 - RNA, 19 nt, Artificial Sequence
  Description of Artificial Sequence: Synthetic oligonucleotide
  Antisense strand to SEQ ID NO: 2427956
aggucuagaacuugacuuc

SEQ ID NO: 2427958 - RNA, 19 nt, Artificial Sequence
  Description of Artificial Sequence: Synthetic oligonucleotide
  Sense strand starting at position 764 of SEQ ID NO: 1886811
agucaaguucuagaccuaa

SEQ ID NO: 2427959 - RNA, 19 nt, Artificial Sequence
  Description of Artificial Sequence: Synthetic oligonucleotide
  Antisense strand to SEQ ID NO: 2427958
uuaggucuagaacuugacu

SEQ ID NO: 2427960 - RNA, 19 nt, Artificial Sequence
  Description of Artificial Sequence: Synthetic oligonucleotide
  Sense strand starting at position 783 of SEQ ID NO: 1886811
agucuuaaauaaggaaaga

SEQ ID NO: 2427961 - RNA, 19 nt, Artificial Sequence
  Description of Artificial Sequence: Synthetic oligonucleotide
  Antisense strand to SEQ ID NO: 2427960
ucuuuccuuauuuaagacu

SEQ ID NO: 2427962 - RNA, 19 nt, Artificial Sequence
  Description of Artificial Sequence: Synthetic oligonucleotide
  Sense strand starting at position 843 of SEQ ID NO: 1886811
ucuccuuauuuguuuagca

SEQ ID NO: 2427963 - RNA, 19 nt, Artificial Sequence
  Description of Artificial Sequence: Synthetic oligonucleotide
  Antisense strand to SEQ ID NO: 2427962
ugcuaaacaaauaaggaga

SEQ ID NO: 2427964 - RNA, 19 nt, Artificial Sequence
  Description of Artificial Sequence: Synthetic oligonucleotide
  Sense strand starting at position 1009 of SEQ ID NO: 1886811
uuugauuagguauguagac

SEQ ID NO: 2427965 - RNA, 19 nt, Artificial Sequence
  Description of Artificial Sequence: Synthetic oligonucleotide
  Antisense strand to SEQ ID NO: 2427964
gucuacauaccuaaucaaa

SEQ ID NO: 2427966 - RNA, 19 nt, Artificial Sequence
  Description of Artificial Sequence: Synthetic oligonucleotide
  Sense strand starting at position 1010 of SEQ ID NO: 1886811
uugauuagguauguagaca

SEQ ID NO: 2427967 - RNA, 19 nt, Artificial Sequence
  Description of Artificial Sequence: Synthetic oligonucleotide
  Antisense strand to SEQ ID NO: 2427966
ugucuacauaccuaaucaa

SEQ ID NO: 2427968 - RNA, 19 nt, Artificial Sequence
  Description of Artificial Sequence: Synthetic oligonucleotide
  Sense strand starting at position 1029 of SEQ ID NO: 1886811
gagaaccucuuuguucgua

SEQ ID NO: 2427969 - RNA, 19 nt, Artificial Sequence
  Description of Artificial Sequence: Synthetic oligonucleotide
  Antisense strand to SEQ ID NO: 2427968
uacgaacaaagagguucuc

SEQ ID NO: 2427970 - RNA, 19 nt, Artificial Sequence
  Description of Artificial Sequence: Synthetic oligonucleotide
  Sense strand starting at position 1031 of SEQ ID NO: 1886811
gaaccucuuuguucguaga

SEQ ID NO: 2427971 - RNA, 19 nt, Artificial Sequence
  Description of Artificial Sequence: Synthetic oligonucleotide
  Antisense strand to SEQ ID NO: 2427970
ucuacgaacaaagagguuc

SEQ ID NO: 2427972 - RNA, 19 nt, Artificial Sequence
  Description of Artificial Sequence: Synthetic oligonucleotide
  Sense strand starting at position 1034 of SEQ ID NO: 1886811
ccucuuuguucguagagca

SEQ ID NO: 2427973 - RNA, 19 nt, Artificial Sequence
  Description of Artificial Sequence: Synthetic oligonucleotide
  Antisense strand to SEQ ID NO: 2427972
ugcucuacgaacaaagagg

SEQ ID NO: 2427974 - RNA, 19 nt, Artificial Sequence
  Description of Artificial Sequence: Synthetic oligonucleotide
  Sense strand starting at position 1186 of SEQ ID NO: 1886811
ugcuaauaauuggcucuaa

SEQ ID NO: 2427975 - RNA, 19 nt, Artificial Sequence
  Description of Artificial Sequence: Synthetic oligonucleotide
  Antisense strand to SEQ ID NO: 2427974
uuagagccaauuauuagca

SEQ ID NO: 2427976 - RNA, 19 nt, Artificial Sequence
  Description of Artificial Sequence: Synthetic oligonucleotide
  Sense strand starting at position 1187 of SEQ ID NO: 1886811
gcuaauaauuggcucuaaa

SEQ ID NO: 2427977 - RNA, 19 nt, Artificial Sequence
  Description of Artificial Sequence: Synthetic oligonucleotide
  Antisense strand to SEQ ID NO: 2427976
uuuagagccaauuauuagc

SEQ ID NO: 2427978 - RNA, 19 nt, Artificial Sequence
  Description of Artificial Sequence: Synthetic oligonucleotide
  Sense strand starting at position 1208 of SEQ ID NO: 1886811
gguauacaugagugacuga

SEQ ID NO: 2427979 - RNA, 19 nt, Artificial Sequence
  Description of Artificial Sequence: Synthetic oligonucleotide
  Antisense strand to SEQ ID NO: 2427978
ucagucacucauguauacc

SEQ ID NO: 2427980 - RNA, 19 nt, Artificial Sequence
  Description of Artificial Sequence: Synthetic oligonucleotide
  Sense strand starting at position 1211 of SEQ ID NO: 1886811
auacaugagugacugaguu

SEQ ID NO: 2427981 - RNA, 19 nt, Artificial Sequence
  Description of Artificial Sequence: Synthetic oligonucleotide
  Antisense strand to SEQ ID NO: 2427980
aacucagucacucauguau

SEQ ID NO: 2427982 - RNA, 19 nt, Artificial Sequence
  Description of Artificial Sequence: Synthetic oligonucleotide
  Sense strand starting at position 1215 of SEQ ID NO: 1886811
augagugacugaguuaaca

SEQ ID NO: 2427983 - RNA, 19 nt, Artificial Sequence
  Description of Artificial Sequence: Synthetic oligonucleotide
  Antisense strand to SEQ ID NO: 2427982
uguuaacucagucacucau

SEQ ID NO: 2427984 - RNA, 19 nt, Artificial Sequence
  Description of Artificial Sequence: Synthetic oligonucleotide
  Sense strand starting at position 1291 of SEQ ID NO: 1886811
gaugcugagguuugcuauu

SEQ ID NO: 2427985 - RNA, 19 nt, Artificial Sequence
  Description of Artificial Sequence: Synthetic oligonucleotide
  Antisense strand to SEQ ID NO: 2427984
aauagcaaaccucagcauc

SEQ ID NO: 2427986 - RNA, 19 nt, Artificial Sequence
  Description of Artificial Sequence: Synthetic oligonucleotide
  Sense strand starting at position 2366 of SEQ ID NO: 1886811
caggguccuguccguuaga

SEQ ID NO: 2427987 - RNA, 19 nt, Artificial Sequence
  Description of Artificial Sequence: Synthetic oligonucleotide
  Antisense strand to SEQ ID NO: 2427986
ucuaacggacaggacccug

SEQ ID NO: 2427988 - RNA, 19 nt, Artificial Sequence
  Description of Artificial Sequence: Synthetic oligonucleotide
  Sense strand starting at position 30 of SEQ ID NO: 1886812
guaugacccuccuauccua

SEQ ID NO: 2427989 - RNA, 19 nt, Artificial Sequence
  Description of Artificial Sequence: Synthetic oligonucleotide
  Antisense strand to SEQ ID NO: 2427988
uaggauaggagggucauac

SEQ ID NO: 2427990 - RNA, 19 nt, Artificial Sequence
  Description of Artificial Sequence: Synthetic oligonucleotide
  Sense strand starting at position 37 of SEQ ID NO: 1886812
ccuccuauccuagaggcaa

SEQ ID NO: 2427991 - RNA, 19 nt, Artificial Sequence
  Description of Artificial Sequence: Synthetic oligonucleotide
  Antisense strand to SEQ ID NO: 2427990
uugccucuaggauaggagg

SEQ ID NO: 2427992 - RNA, 19 nt, Artificial Sequence
  Description of Artificial Sequence: Synthetic oligonucleotide
  Sense strand starting at position 58 of SEQ ID NO: 1886812
ggcagagagguuugggaaa

SEQ ID NO: 2427993 - RNA, 19 nt, Artificial Sequence
  Description of Artificial Sequence: Synthetic oligonucleotide
  Antisense strand to SEQ ID NO: 2427992
uuucccaaaccucucugcc

SEQ ID NO: 2427994 - RNA, 19 nt, Artificial Sequence
  Description of Artificial Sequence: Synthetic oligonucleotide
  Sense strand starting at position 695 of SEQ ID NO: 1886812
ugugguuuccagguguguu

SEQ ID NO: 2427995 - RNA, 19 nt, Artificial Sequence
  Description of Artificial Sequence: Synthetic oligonucleotide
  Antisense strand to SEQ ID NO: 2427994
aacacaccuggaaaccaca

SEQ ID NO: 2427996 - RNA, 19 nt, Artificial Sequence
  Description of Artificial Sequence: Synthetic oligonucleotide
  Sense strand starting at position 707 of SEQ ID NO: 1886812
guguguuugccauuccugu

SEQ ID NO: 2427997 - RNA, 19 nt, Artificial Sequence
  Description of Artificial Sequence: Synthetic oligonucleotide
  Antisense strand to SEQ ID NO: 2427996
acaggaauggcaaacacac

SEQ ID NO: 2427998 - RNA, 19 nt, Artificial Sequence
  Description of Artificial Sequence: Synthetic oligonucleotide
  Sense strand starting at position 1114 of SEQ ID NO: 1886812
cucccucucuccgauguaa

SEQ ID NO: 2427999 - RNA, 19 nt, Artificial Sequence
  Description of Artificial Sequence: Synthetic oligonucleotide
  Antisense strand to SEQ ID NO: 2427998
uuacaucggagagagggag

SEQ ID NO: 2428000 - RNA, 19 nt, Artificial Sequence
  Description of Artificial Sequence: Synthetic oligonucleotide
  Sense strand starting at position 1116 of SEQ ID NO: 1886812
cccucucuccgauguaaac

SEQ ID NO: 2428001 - RNA, 19 nt, Artificial Sequence
  Description of Artificial Sequence: Synthetic oligonucleotide
  Antisense strand to SEQ ID NO: 2428000
guuuacaucggagagaggg

SEQ ID NO: 2428002 - RNA, 19 nt, Artificial Sequence
  Description of Artificial Sequence: Synthetic oligonucleotide
  Sense strand starting at position 1618 of SEQ ID NO: 1886812
gcacgucaucugcgacaag

SEQ ID NO: 2428003 - RNA, 19 nt, Artificial Sequence
  Description of Artificial Sequence: Synthetic oligonucleotide
  Antisense strand to SEQ ID NO: 2428002
cuugucgcagaugacgugc

SEQ ID NO: 2428004 - RNA, 19 nt, Artificial Sequence
  Description of Artificial Sequence: Synthetic oligonucleotide
  Sense strand starting at position 1737 of SEQ ID NO: 1886812
ugccgaaccucgugucauu

SEQ ID NO: 2428005 - RNA, 19 nt, Artificial Sequence
  Description of Artificial Sequence: Synthetic oligonucleotide
  Antisense strand to SEQ ID NO: 2428004
aaugacacgagguucggca

SEQ ID NO: 2428006 - RNA, 19 nt, Artificial Sequence
  Description of Artificial Sequence: Synthetic oligonucleotide
  Sense strand starting at position 1824 of SEQ ID NO: 1886812
acuuguaccugucccauaa

SEQ ID NO: 2428007 - RNA, 19 nt, Artificial Sequence
  Description of Artificial Sequence: Synthetic oligonucleotide
  Antisense strand to SEQ ID NO: 2428006
uuaugggacagguacaagu

SEQ ID NO: 2428008 - RNA, 19 nt, Artificial Sequence
  Description of Artificial Sequence: Synthetic oligonucleotide
  Sense strand starting at position 1984 of SEQ ID NO: 1886812
caacaagauccgugagcug

SEQ ID NO: 2428009 - RNA, 19 nt, Artificial Sequence
  Description of Artificial Sequence: Synthetic oligonucleotide
  Antisense strand to SEQ ID NO: 2428008
cagcucacggaucuuguug

SEQ ID NO: 2428010 - RNA, 19 nt, Artificial Sequence
  Description of Artificial Sequence: Synthetic oligonucleotide
  Sense strand starting at position 2097 of SEQ ID NO: 1886812
uggagaaccucgccaaauu

SEQ ID NO: 2428011 - RNA, 19 nt, Artificial Sequence
  Description of Artificial Sequence: Synthetic oligonucleotide
  Antisense strand to SEQ ID NO: 2428010
aauuuggcgagguucucca

SEQ ID NO: 2428012 - RNA, 19 nt, Artificial Sequence
  Description of Artificial Sequence: Synthetic oligonucleotide
  Sense strand starting at position 2230 of SEQ ID NO: 1886812
cuuccaguccuuuggcaga

SEQ ID NO: 2428013 - RNA, 19 nt, Artificial Sequence
  Description of Artificial Sequence: Synthetic oligonucleotide
  Antisense strand to SEQ ID NO: 2428012
ucugccaaaggacuggaag

SEQ ID NO: 2428014 - RNA, 19 nt, Artificial Sequence
  Description of Artificial Sequence: Synthetic oligonucleotide
  Sense strand starting at position 2232 of SEQ ID NO: 1886812
uccaguccuuuggcagaua

SEQ ID NO: 2428015 - RNA, 19 nt, Artificial Sequence
  Description of Artificial Sequence: Synthetic oligonucleotide
  Antisense strand to SEQ ID NO: 2428014
uaucugccaaaggacugga

SEQ ID NO: 2428016 - RNA, 19 nt, Artificial Sequence
  Description of Artificial Sequence: Synthetic oligonucleotide
  Sense strand starting at position 2673 of SEQ ID NO: 1886812
aaaggaagguuuguuuauu

SEQ ID NO: 2428017 - RNA, 19 nt, Artificial Sequence
  Description of Artificial Sequence: Synthetic oligonucleotide
  Antisense strand to SEQ ID NO: 2428016
aauaaacaaaccuuccuuu

SEQ ID NO: 2428018 - RNA, 19 nt, Artificial Sequence
  Description of Artificial Sequence: Synthetic oligonucleotide
  Sense strand starting at position 2678 of SEQ ID NO: 1886812
aagguuuguuuauugagga

SEQ ID NO: 2428019 - RNA, 19 nt, Artificial Sequence
  Description of Artificial Sequence: Synthetic oligonucleotide
  Antisense strand to SEQ ID NO: 2428018
uccucaauaaacaaaccuu

SEQ ID NO: 2428020 - RNA, 19 nt, Artificial Sequence
  Description of Artificial Sequence: Synthetic oligonucleotide
  Sense strand starting at position 2679 of SEQ ID NO: 1886812
agguuuguuuauugaggag

SEQ ID NO: 2428021 - RNA, 19 nt, Artificial Sequence
  Description of Artificial Sequence: Synthetic oligonucleotide
  Antisense strand to SEQ ID NO: 2428020
cuccucaauaaacaaaccu

SEQ ID NO: 2428022 - RNA, 19 nt, Artificial Sequence
  Description of Artificial Sequence: Synthetic oligonucleotide
  Sense strand starting at position 2800 of SEQ ID NO: 1886812
gaagcaaaugccugaggaa

SEQ ID NO: 2428023 - RNA, 19 nt, Artificial Sequence
  Description of Artificial Sequence: Synthetic oligonucleotide
  Antisense strand to SEQ ID NO: 2428022
uuccucaggcauuugcuuc

SEQ ID NO: 2428024 - RNA, 19 nt, Artificial Sequence
  Description of Artificial Sequence: Synthetic oligonucleotide
  Sense strand starting at position 2993 of SEQ ID NO: 1886812
uugucaauccuuggcccaa

SEQ ID NO: 2428025 - RNA, 19 nt, Artificial Sequence
  Description of Artificial Sequence: Synthetic oligonucleotide
  Antisense strand to SEQ ID NO: 2428024
uugggccaaggauugacaa

SEQ ID NO: 2428026 - RNA, 19 nt, Artificial Sequence
  Description of Artificial Sequence: Synthetic oligonucleotide
  Sense strand starting at position 2995 of SEQ ID NO: 1886812
gucaauccuuggcccaaga

SEQ ID NO: 2428027 - RNA, 19 nt, Artificial Sequence
  Description of Artificial Sequence: Synthetic oligonucleotide
  Antisense strand to SEQ ID NO: 2428026
ucuugggccaaggauugac

SEQ ID NO: 2428028 - RNA, 19 nt, Artificial Sequence
  Description of Artificial Sequence: Synthetic oligonucleotide
  Sense strand starting at position 3016 of SEQ ID NO: 1886812
ccaggugucucuccacaga

SEQ ID NO: 2428029 - RNA, 19 nt, Artificial Sequence
  Description of Artificial Sequence: Synthetic oligonucleotide
  Antisense strand to SEQ ID NO: 2428028
ucuguggagagacaccugg

SEQ ID NO: 2428030 - RNA, 19 nt, Artificial Sequence
  Description of Artificial Sequence: Synthetic oligonucleotide
  Sense strand starting at position 3019 of SEQ ID NO: 1886812
ggugucucuccacagagaa

SEQ ID NO: 2428031 - RNA, 19 nt, Artificial Sequence
  Description of Artificial Sequence: Synthetic oligonucleotide
  Antisense strand to SEQ ID NO: 2428030
uucucuguggagagacacc

SEQ ID NO: 2428032 - RNA, 19 nt, Artificial Sequence
  Description of Artificial Sequence: Synthetic oligonucleotide
  Sense strand starting at position 3266 of SEQ ID NO: 1886812
agaggagagucugguuacu

SEQ ID NO: 2428033 - RNA, 19 nt, Artificial Sequence
  Description of Artificial Sequence: Synthetic oligonucleotide
  Antisense strand to SEQ ID NO: 2428032
aguaaccagacucuccucu

SEQ ID NO: 2428034 - RNA, 19 nt, Artificial Sequence
  Description of Artificial Sequence: Synthetic oligonucleotide
  Sense strand starting at position 3330 of SEQ ID NO: 1886812
guggagaugugggcagaau

SEQ ID NO: 2428035 - RNA, 19 nt, Artificial Sequence
  Description of Artificial Sequence: Synthetic oligonucleotide
  Antisense strand to SEQ ID NO: 2428034
auucugcccacaucuccac

SEQ ID NO: 2428036 - RNA, 19 nt, Artificial Sequence
  Description of Artificial Sequence: Synthetic oligonucleotide
  Sense strand starting at position 3367 of SEQ ID NO: 1886812
aaccuuugucuggguggaa

SEQ ID NO: 2428037 - RNA, 19 nt, Artificial Sequence
  Description of Artificial Sequence: Synthetic oligonucleotide
  Antisense strand to SEQ ID NO: 2428036
uuccacccagacaaagguu

SEQ ID NO: 2428038 - RNA, 19 nt, Artificial Sequence
  Description of Artificial Sequence: Synthetic oligonucleotide
  Sense strand starting at position 3460 of SEQ ID NO: 1886812
gugccagaguggucuuuca

SEQ ID NO: 2428039 - RNA, 19 nt, Artificial Sequence
  Description of Artificial Sequence: Synthetic oligonucleotide
  Antisense strand to SEQ ID NO: 2428038
ugaaagaccacucuggcac

SEQ ID NO: 2428040 - RNA, 19 nt, Artificial Sequence
  Description of Artificial Sequence: Synthetic oligonucleotide
  Sense strand starting at position 3797 of SEQ ID NO: 1886812
cccaguguuugugcaggga

SEQ ID NO: 2428041 - RNA, 19 nt, Artificial Sequence
  Description of Artificial Sequence: Synthetic oligonucleotide
  Antisense strand to SEQ ID NO: 2428040
ucccugcacaaacacuggg

SEQ ID NO: 2428042 - RNA, 19 nt, Artificial Sequence
  Description of Artificial Sequence: Synthetic oligonucleotide
  Sense strand starting at position 3801 of SEQ ID NO: 1886812
guguuugugcagggauugu

SEQ ID NO: 2428043 - RNA, 19 nt, Artificial Sequence
  Description of Artificial Sequence: Synthetic oligonucleotide
  Antisense strand to SEQ ID NO: 2428042
acaaucccugcacaaacac

SEQ ID NO: 2428044 - RNA, 19 nt, Artificial Sequence
  Description of Artificial Sequence: Synthetic oligonucleotide
  Sense strand starting at position 3872 of SEQ ID NO: 1886812
ugcugugacccagggcaaa

SEQ ID NO: 2428045 - RNA, 19 nt, Artificial Sequence
  Description of Artificial Sequence: Synthetic oligonucleotide
  Antisense strand to SEQ ID NO: 2428044
uuugcccugggucacagca

SEQ ID NO: 2428046 - RNA, 19 nt, Artificial Sequence
  Description of Artificial Sequence: Synthetic oligonucleotide
  Sense strand starting at position 219 of SEQ ID NO: 1886813
cguggaugccgcaagauuc

SEQ ID NO: 2428047 - RNA, 19 nt, Artificial Sequence
  Description of Artificial Sequence: Synthetic oligonucleotide
  Antisense strand to SEQ ID NO: 2428046
gaaucuugcggcauccacg

SEQ ID NO: 2428048 - RNA, 19 nt, Artificial Sequence
  Description of Artificial Sequence: Synthetic oligonucleotide
  Sense strand starting at position 252 of SEQ ID NO: 1886813
agagcccucccuuagugau

SEQ ID NO: 2428049 - RNA, 19 nt, Artificial Sequence
  Description of Artificial Sequence: Synthetic oligonucleotide
  Antisense strand to SEQ ID NO: 2428048
aucacuaagggagggcucu

SEQ ID NO: 2428050 - RNA, 19 nt, Artificial Sequence
  Description of Artificial Sequence: Synthetic oligonucleotide
  Sense strand starting at position 272 of SEQ ID NO: 1886813
cugugucaccgaggaugua

SEQ ID NO: 2428051 - RNA, 19 nt, Artificial Sequence
  Description of Artificial Sequence: Synthetic oligonucleotide
  Antisense strand to SEQ ID NO: 2428050
uacauccucggugacacag

SEQ ID NO: 2428052 - RNA, 19 nt, Artificial Sequence
  Description of Artificial Sequence: Synthetic oligonucleotide
  Sense strand starting at position 273 of SEQ ID NO: 1886813
ugugucaccgaggauguaa

SEQ ID NO: 2428053 - RNA, 19 nt, Artificial Sequence
  Description of Artificial Sequence: Synthetic oligonucleotide
  Antisense strand to SEQ ID NO: 2428052
uuacauccucggugacaca

SEQ ID NO: 2428054 - RNA, 19 nt, Artificial Sequence
  Description of Artificial Sequence: Synthetic oligonucleotide
  Sense strand starting at position 293 of SEQ ID NO: 1886813
aguagaaaccuuuagcuca

SEQ ID NO: 2428055 - RNA, 19 nt, Artificial Sequence
  Description of Artificial Sequence: Synthetic oligonucleotide
  Antisense strand to SEQ ID NO: 2428054
ugagcuaaagguuucuacu

SEQ ID NO: 2428056 - RNA, 19 nt, Artificial Sequence
  Description of Artificial Sequence: Synthetic oligonucleotide
  Sense strand starting at position 403 of SEQ ID NO: 1886813
cguagcucuucuccagaga

SEQ ID NO: 2428057 - RNA, 19 nt, Artificial Sequence
  Description of Artificial Sequence: Synthetic oligonucleotide
  Antisense strand to SEQ ID NO: 2428056
ucucuggagaagagcuacg

SEQ ID NO: 2428058 - RNA, 19 nt, Artificial Sequence
  Description of Artificial Sequence: Synthetic oligonucleotide
  Sense strand starting at position 404 of SEQ ID NO: 1886813
guagcucuucuccagagaa

SEQ ID NO: 2428059 - RNA, 19 nt, Artificial Sequence
  Description of Artificial Sequence: Synthetic oligonucleotide
  Antisense strand to SEQ ID NO: 2428058
uucucuggagaagagcuac

SEQ ID NO: 2428060 - RNA, 19 nt, Artificial Sequence
  Description of Artificial Sequence: Synthetic oligonucleotide
  Sense strand starting at position 485 of SEQ ID NO: 1886813
cuugaugucgcgcacgauu

SEQ ID NO: 2428061 - RNA, 19 nt, Artificial Sequence
  Description of Artificial Sequence: Synthetic oligonucleotide
  Antisense strand to SEQ ID NO: 2428060
aaucgugcgcgacaucaag

SEQ ID NO: 2428062 - RNA, 19 nt, Artificial Sequence
  Description of Artificial Sequence: Synthetic oligonucleotide
  Sense strand starting at position 613 of SEQ ID NO: 1886813
gggcguagcccucguagau

SEQ ID NO: 2428063 - RNA, 19 nt, Artificial Sequence
  Description of Artificial Sequence: Synthetic oligonucleotide
  Antisense strand to SEQ ID NO: 2428062
aucuacgagggcuacgccc

SEQ ID NO: 2428064 - RNA, 19 nt, Artificial Sequence
  Description of Artificial Sequence: Synthetic oligonucleotide
  Sense strand starting at position 614 of SEQ ID NO: 1886813
ggcguagcccucguagaug

SEQ ID NO: 2428065 - RNA, 19 nt, Artificial Sequence
  Description of Artificial Sequence: Synthetic oligonucleotide
  Antisense strand to SEQ ID NO: 2428064
caucuacgagggcuacgcc

SEQ ID NO: 2428066 - RNA, 19 nt, Artificial Sequence
  Description of Artificial Sequence: Synthetic oligonucleotide
  Sense strand starting at position 753 of SEQ ID NO: 1886813
aacauaaucugagaaggga

SEQ ID NO: 2428067 - RNA, 19 nt, Artificial Sequence
  Description of Artificial Sequence: Synthetic oligonucleotide
  Antisense strand to SEQ ID NO: 2428066
ucccuucucagauuauguu

SEQ ID NO: 2428068 - RNA, 19 nt, Artificial Sequence
  Description of Artificial Sequence: Synthetic oligonucleotide
  Sense strand starting at position 779 of SEQ ID NO: 1886813
cggcuuagucagggacaga

SEQ ID NO: 2428069 - RNA, 19 nt, Artificial Sequence
  Description of Artificial Sequence: Synthetic oligonucleotide
  Antisense strand to SEQ ID NO: 2428068
ucugucccugacuaagccg

SEQ ID NO: 2428070 - RNA, 19 nt, Artificial Sequence
  Description of Artificial Sequence: Synthetic oligonucleotide
  Sense strand starting at position 834 of SEQ ID NO: 1886813
gcugcaugccagugugaug

SEQ ID NO: 2428071 - RNA, 19 nt, Artificial Sequence
  Description of Artificial Sequence: Synthetic oligonucleotide
  Antisense strand to SEQ ID NO: 2428070
caucacacuggcaugcagc

SEQ ID NO: 2428072 - RNA, 19 nt, Artificial Sequence
  Description of Artificial Sequence: Synthetic oligonucleotide
  Sense strand starting at position 843 of SEQ ID NO: 1886813
cagugugauguguggagaa

SEQ ID NO: 2428073 - RNA, 19 nt, Artificial Sequence
  Description of Artificial Sequence: Synthetic oligonucleotide
  Antisense strand to SEQ ID NO: 2428072
uucuccacacaucacacug

SEQ ID NO: 2428074 - RNA, 19 nt, Artificial Sequence
  Description of Artificial Sequence: Synthetic oligonucleotide
  Sense strand starting at position 1114 of SEQ ID NO: 1886813
cgcgcagcucguuguagaa

SEQ ID NO: 2428075 - RNA, 19 nt, Artificial Sequence
  Description of Artificial Sequence: Synthetic oligonucleotide
  Antisense strand to SEQ ID NO: 2428074
uucuacaacgagcugcgcg

SEQ ID NO: 2428076 - RNA, 19 nt, Artificial Sequence
  Description of Artificial Sequence: Synthetic oligonucleotide
  Sense strand starting at position 1471 of SEQ ID NO: 1886813
ggcgaucucuucuuccauu

SEQ ID NO: 2428077 - RNA, 19 nt, Artificial Sequence
  Description of Artificial Sequence: Synthetic oligonucleotide
  Antisense strand to SEQ ID NO: 2428076
aauggaagaagagaucgcc

SEQ ID NO: 2428078 - RNA, 19 nt, Artificial Sequence
  Description of Artificial Sequence: Synthetic oligonucleotide
  Sense strand starting at position 1952 of SEQ ID NO: 1886813
cgccguuauuuaagcggaa

SEQ ID NO: 2428079 - RNA, 19 nt, Artificial Sequence
  Description of Artificial Sequence: Synthetic oligonucleotide
  Antisense strand to SEQ ID NO: 2428078
uuccgcuuaaauaacggcg

SEQ ID NO: 2428080 - RNA, 19 nt, Artificial Sequence
  Description of Artificial Sequence: Synthetic oligonucleotide
  Sense strand starting at position 2016 of SEQ ID NO: 1886813
guccauauauggcgaucuu

SEQ ID NO: 2428081 - RNA, 19 nt, Artificial Sequence
  Description of Artificial Sequence: Synthetic oligonucleotide
  Antisense strand to SEQ ID NO: 2428080
aagaucgccauauauggac

SEQ ID NO: 2428082 - RNA, 19 nt, Artificial Sequence
  Description of Artificial Sequence: Synthetic oligonucleotide
  Sense strand starting at position 2017 of SEQ ID NO: 1886813
uccauauauggcgaucuuu

SEQ ID NO: 2428083 - RNA, 19 nt, Artificial Sequence
  Description of Artificial Sequence: Synthetic oligonucleotide
  Antisense strand to SEQ ID NO: 2428082
aaagaucgccauauaugga

SEQ ID NO: 2428084 - RNA, 19 nt, Artificial Sequence
  Description of Artificial Sequence: Synthetic oligonucleotide
  Sense strand starting at position 2368 of SEQ ID NO: 1886813
ggacgucccuugcaaucuu

SEQ ID NO: 2428085 - RNA, 19 nt, Artificial Sequence
  Description of Artificial Sequence: Synthetic oligonucleotide
  Antisense strand to SEQ ID NO: 2428084
aagauugcaagggacgucc

SEQ ID NO: 2428086 - RNA, 19 nt, Artificial Sequence
  Description of Artificial Sequence: Synthetic oligonucleotide
  Sense strand starting at position 2585 of SEQ ID NO: 1886813
cccggaucuccguucguuu

SEQ ID NO: 2428087 - RNA, 19 nt, Artificial Sequence
  Description of Artificial Sequence: Synthetic oligonucleotide
  Antisense strand to SEQ ID NO: 2428086
aaacgaacggagauccggg

SEQ ID NO: 2428088 - RNA, 19 nt, Artificial Sequence
  Description of Artificial Sequence: Synthetic oligonucleotide
  Sense strand starting at position 2588 of SEQ ID NO: 1886813
ggaucuccguucguuugaa

SEQ ID NO: 2428089 - RNA, 19 nt, Artificial Sequence
  Description of Artificial Sequence: Synthetic oligonucleotide
  Antisense strand to SEQ ID NO: 2428088
uucaaacgaacggagaucc

SEQ ID NO: 2428090 - RNA, 19 nt, Artificial Sequence
  Description of Artificial Sequence: Synthetic oligonucleotide
  Sense strand starting at position 2752 of SEQ ID NO: 1886813
ucuggucaccuguagacau

SEQ ID NO: 2428091 - RNA, 19 nt, Artificial Sequence
  Description of Artificial Sequence: Synthetic oligonucleotide
  Antisense strand to SEQ ID NO: 2428090
augucuacaggugaccaga

SEQ ID NO: 2428092 - RNA, 19 nt, Artificial Sequence
  Description of Artificial Sequence: Synthetic oligonucleotide
  Sense strand starting at position 2754 of SEQ ID NO: 1886813
uggucaccuguagacauua

SEQ ID NO: 2428093 - RNA, 19 nt, Artificial Sequence
  Description of Artificial Sequence: Synthetic oligonucleotide
  Antisense strand to SEQ ID NO: 2428092
uaaugucuacaggugacca

SEQ ID NO: 2428094 - RNA, 19 nt, Artificial Sequence
  Description of Artificial Sequence: Synthetic oligonucleotide
  Sense strand starting at position 2845 of SEQ ID NO: 1886813
gggauacccucuucuguuu

SEQ ID NO: 2428095 - RNA, 19 nt, Artificial Sequence
  Description of Artificial Sequence: Synthetic oligonucleotide
  Antisense strand to SEQ ID NO: 2428094
aaacagaagaggguauccc

SEQ ID NO: 2428096 - RNA, 19 nt, Artificial Sequence
  Description of Artificial Sequence: Synthetic oligonucleotide
  Sense strand starting at position 2850 of SEQ ID NO: 1886813
acccucuucuguuuacgau

SEQ ID NO: 2428097 - RNA, 19 nt, Artificial Sequence
  Description of Artificial Sequence: Synthetic oligonucleotide
  Antisense strand to SEQ ID NO: 2428096
aucguaaacagaagagggu

SEQ ID NO: 2428098 - RNA, 19 nt, Artificial Sequence
  Description of Artificial Sequence: Synthetic oligonucleotide
  Sense strand starting at position 2856 of SEQ ID NO: 1886813
uucuguuuacgaugcuagu

SEQ ID NO: 2428099 - RNA, 19 nt, Artificial Sequence
  Description of Artificial Sequence: Synthetic oligonucleotide
  Antisense strand to SEQ ID NO: 2428098
acuagcaucguaaacagaa

SEQ ID NO: 2428100 - RNA, 19 nt, Artificial Sequence
  Description of Artificial Sequence: Synthetic oligonucleotide
  Sense strand starting at position 2859 of SEQ ID NO: 1886813
uguuuacgaugcuaguuaa

SEQ ID NO: 2428101 - RNA, 19 nt, Artificial Sequence
  Description of Artificial Sequence: Synthetic oligonucleotide
  Antisense strand to SEQ ID NO: 2428100
uuaacuagcaucguaaaca

SEQ ID NO: 2428102 - RNA, 19 nt, Artificial Sequence
  Description of Artificial Sequence: Synthetic oligonucleotide
  Sense strand starting at position 2862 of SEQ ID NO: 1886813
uuacgaugcuaguuaagag

SEQ ID NO: 2428103 - RNA, 19 nt, Artificial Sequence
  Description of Artificial Sequence: Synthetic oligonucleotide
  Antisense strand to SEQ ID NO: 2428102
cucuuaacuagcaucguaa

SEQ ID NO: 2428104 - RNA, 19 nt, Artificial Sequence
  Description of Artificial Sequence: Synthetic oligonucleotide
  Sense strand starting at position 3086 of SEQ ID NO: 1886813
ggucgcagagcguucagau

SEQ ID NO: 2428105 - RNA, 19 nt, Artificial Sequence
  Description of Artificial Sequence: Synthetic oligonucleotide
  Antisense strand to SEQ ID NO: 2428104
aucugaacgcucugcgacc

SEQ ID NO: 2428106 - RNA, 19 nt, Artificial Sequence
  Description of Artificial Sequence: Synthetic oligonucleotide
  Sense strand starting at position 3087 of SEQ ID NO: 1886813
gucgcagagcguucagauu

SEQ ID NO: 2428107 - RNA, 19 nt, Artificial Sequence
  Description of Artificial Sequence: Synthetic oligonucleotide
  Antisense strand to SEQ ID NO: 2428106
aaucugaacgcucugcgac

SEQ ID NO: 2428108 - RNA, 19 nt, Artificial Sequence
  Description of Artificial Sequence: Synthetic oligonucleotide
  Sense strand starting at position 3180 of SEQ ID NO: 1886813
cguguuugggagugacaac

SEQ ID NO: 2428109 - RNA, 19 nt, Artificial Sequence
  Description of Artificial Sequence: Synthetic oligonucleotide
  Antisense strand to SEQ ID NO: 2428108
guugucacucccaaacacg

SEQ ID NO: 2428110 - RNA, 19 nt, Artificial Sequence
  Description of Artificial Sequence: Synthetic oligonucleotide
  Sense strand starting at position 3181 of SEQ ID NO: 1886813
guguuugggagugacaaca

SEQ ID NO: 2428111 - RNA, 19 nt, Artificial Sequence
  Description of Artificial Sequence: Synthetic oligonucleotide
  Antisense strand to SEQ ID NO: 2428110
uguugucacucccaaacac

SEQ ID NO: 2428112 - RNA, 19 nt, Artificial Sequence
  Description of Artificial Sequence: Synthetic oligonucleotide
  Sense strand starting at position 3340 of SEQ ID NO: 1886813
gggcaaggcugucagguau

SEQ ID NO: 2428113 - RNA, 19 nt, Artificial Sequence
  Description of Artificial Sequence: Synthetic oligonucleotide
  Antisense strand to SEQ ID NO: 2428112
auaccugacagccuugccc

SEQ ID NO: 2428114 - RNA, 19 nt, Artificial Sequence
  Description of Artificial Sequence: Synthetic oligonucleotide
  Sense strand starting at position 3614 of SEQ ID NO: 1886813
uccgaagcuucuuugucua

SEQ ID NO: 2428115 - RNA, 19 nt, Artificial Sequence
  Description of Artificial Sequence: Synthetic oligonucleotide
  Antisense strand to SEQ ID NO: 2428114
uagacaaagaagcuucgga

SEQ ID NO: 2428116 - RNA, 19 nt, Artificial Sequence
  Description of Artificial Sequence: Synthetic oligonucleotide
  Sense strand starting at position 3617 of SEQ ID NO: 1886813
gaagcuucuuugucuagga

SEQ ID NO: 2428117 - RNA, 19 nt, Artificial Sequence
  Description of Artificial Sequence: Synthetic oligonucleotide
  Antisense strand to SEQ ID NO: 2428116
uccuagacaaagaagcuuc

SEQ ID NO: 2428118 - RNA, 19 nt, Artificial Sequence
  Description of Artificial Sequence: Synthetic oligonucleotide
  Sense strand starting at position 3618 of SEQ ID NO: 1886813
aagcuucuuugucuaggaa

SEQ ID NO: 2428119 - RNA, 19 nt, Artificial Sequence
  Description of Artificial Sequence: Synthetic oligonucleotide
  Antisense strand to SEQ ID NO: 2428118
uuccuagacaaagaagcuu

SEQ ID NO: 2428120 - RNA, 19 nt, Artificial Sequence
  Description of Artificial Sequence: Synthetic oligonucleotide
  Sense strand starting at position 235 of SEQ ID NO: 1886814
guuacuuagucucugagau

SEQ ID NO: 2428121 - RNA, 19 nt, Artificial Sequence
  Description of Artificial Sequence: Synthetic oligonucleotide
  Antisense strand to SEQ ID NO: 2428120
aucucagagacuaaguaac

SEQ ID NO: 2428122 - RNA, 19 nt, Artificial Sequence
  Description of Artificial Sequence: Synthetic oligonucleotide
  Sense strand starting at position 236 of SEQ ID NO: 1886814
uuacuuagucucugagauu

SEQ ID NO: 2428123 - RNA, 19 nt, Artificial Sequence
  Description of Artificial Sequence: Synthetic oligonucleotide
  Antisense strand to SEQ ID NO: 2428122
aaucucagagacuaaguaa

SEQ ID NO: 2428124 - RNA, 19 nt, Artificial Sequence
  Description of Artificial Sequence: Synthetic oligonucleotide
  Sense strand starting at position 255 of SEQ ID NO: 1886814
caguuuccugacugguaga

SEQ ID NO: 2428125 - RNA, 19 nt, Artificial Sequence
  Description of Artificial Sequence: Synthetic oligonucleotide
  Antisense strand to SEQ ID NO: 2428124
ucuaccagucaggaaacug

SEQ ID NO: 2428126 - RNA, 19 nt, Artificial Sequence
  Description of Artificial Sequence: Synthetic oligonucleotide
  Sense strand starting at position 256 of SEQ ID NO: 1886814
aguuuccugacugguagaa

SEQ ID NO: 2428127 - RNA, 19 nt, Artificial Sequence
  Description of Artificial Sequence: Synthetic oligonucleotide
  Antisense strand to SEQ ID NO: 2428126
uucuaccagucaggaaacu

SEQ ID NO: 2428128 - RNA, 19 nt, Artificial Sequence
  Description of Artificial Sequence: Synthetic oligonucleotide
  Sense strand starting at position 260 of SEQ ID NO: 1886814
uccugacugguagaaggua

SEQ ID NO: 2428129 - RNA, 19 nt, Artificial Sequence
  Description of Artificial Sequence: Synthetic oligonucleotide
  Antisense strand to SEQ ID NO: 2428128
uaccuucuaccagucagga

SEQ ID NO: 2428130 - RNA, 19 nt, Artificial Sequence
  Description of Artificial Sequence: Synthetic oligonucleotide
  Sense strand starting at position 268 of SEQ ID NO: 1886814
gguagaagguaucuaucca

SEQ ID NO: 2428131 - RNA, 19 nt, Artificial Sequence
  Description of Artificial Sequence: Synthetic oligonucleotide
  Antisense strand to SEQ ID NO: 2428130
uggauagauaccuucuacc

SEQ ID NO: 2428132 - RNA, 19 nt, Artificial Sequence
  Description of Artificial Sequence: Synthetic oligonucleotide
  Sense strand starting at position 617 of SEQ ID NO: 1886814
uggcgugaacccuggaaga

SEQ ID NO: 2428133 - RNA, 19 nt, Artificial Sequence
  Description of Artificial Sequence: Synthetic oligonucleotide
  Antisense strand to SEQ ID NO: 2428132
ucuuccaggguucacgcca

SEQ ID NO: 2428134 - RNA, 19 nt, Artificial Sequence
  Description of Artificial Sequence: Synthetic oligonucleotide
  Sense strand starting at position 619 of SEQ ID NO: 1886814
gcgugaacccuggaagaag

SEQ ID NO: 2428135 - RNA, 19 nt, Artificial Sequence
  Description of Artificial Sequence: Synthetic oligonucleotide
  Antisense strand to SEQ ID NO: 2428134
cuucuuccaggguucacgc

SEQ ID NO: 2428136 - RNA, 19 nt, Artificial Sequence
  Description of Artificial Sequence: Synthetic oligonucleotide
  Sense strand starting at position 888 of SEQ ID NO: 1886814
gaaggcauguauccaaauc

SEQ ID NO: 2428137 - RNA, 19 nt, Artificial Sequence
  Description of Artificial Sequence: Synthetic oligonucleotide
  Antisense strand to SEQ ID NO: 2428136
gauuuggauacaugccuuc

SEQ ID NO: 2428138 - RNA, 19 nt, Artificial Sequence
  Description of Artificial Sequence: Synthetic oligonucleotide
  Sense strand starting at position 918 of SEQ ID NO: 1886814
agagauaaagcaugcgagu

SEQ ID NO: 2428139 - RNA, 19 nt, Artificial Sequence
  Description of Artificial Sequence: Synthetic oligonucleotide
  Antisense strand to SEQ ID NO: 2428138
acucgcaugcuuuaucucu

SEQ ID NO: 2428140 - RNA, 19 nt, Artificial Sequence
  Description of Artificial Sequence: Synthetic oligonucleotide
  Sense strand starting at position 920 of SEQ ID NO: 1886814
agauaaagcaugcgaguaa

SEQ ID NO: 2428141 - RNA, 19 nt, Artificial Sequence
  Description of Artificial Sequence: Synthetic oligonucleotide
  Antisense strand to SEQ ID NO: 2428140
uuacucgcaugcuuuaucu

SEQ ID NO: 2428142 - RNA, 19 nt, Artificial Sequence
  Description of Artificial Sequence: Synthetic oligonucleotide
  Sense strand starting at position 969 of SEQ ID NO: 1886814
ucuuccucccagugaagga

SEQ ID NO: 2428143 - RNA, 19 nt, Artificial Sequence
  Description of Artificial Sequence: Synthetic oligonucleotide
  Antisense strand to SEQ ID NO: 2428142
uccuucacugggaggaaga

SEQ ID NO: 2428144 - RNA, 19 nt, Artificial Sequence
  Description of Artificial Sequence: Synthetic oligonucleotide
  Sense strand starting at position 982 of SEQ ID NO: 1886814
gaaggagcucuuugucaga

SEQ ID NO: 2428145 - RNA, 19 nt, Artificial Sequence
  Description of Artificial Sequence: Synthetic oligonucleotide
  Antisense strand to SEQ ID NO: 2428144
ucugacaaagagcuccuuc

SEQ ID NO: 2428146 - RNA, 19 nt, Artificial Sequence
  Description of Artificial Sequence: Synthetic oligonucleotide
  Sense strand starting at position 995 of SEQ ID NO: 1886814
gucagagguccuuggaucu

SEQ ID NO: 2428147 - RNA, 19 nt, Artificial Sequence
  Description of Artificial Sequence: Synthetic oligonucleotide
  Antisense strand to SEQ ID NO: 2428146
agauccaaggaccucugac

SEQ ID NO: 2428148 - RNA, 19 nt, Artificial Sequence
  Description of Artificial Sequence: Synthetic oligonucleotide
  Sense strand starting at position 1001 of SEQ ID NO: 1886814
gguccuuggaucuguccaa

SEQ ID NO: 2428149 - RNA, 19 nt, Artificial Sequence
  Description of Artificial Sequence: Synthetic oligonucleotide
  Antisense strand to SEQ ID NO: 2428148
uuggacagauccaaggacc

SEQ ID NO: 2428150 - RNA, 19 nt, Artificial Sequence
  Description of Artificial Sequence: Synthetic oligonucleotide
  Sense strand starting at position 1002 of SEQ ID NO: 1886814
guccuuggaucuguccaau

SEQ ID NO: 2428151 - RNA, 19 nt, Artificial Sequence
  Description of Artificial Sequence: Synthetic oligonucleotide
  Antisense strand to SEQ ID NO: 2428150
auuggacagauccaaggac

SEQ ID NO: 2428152 - RNA, 19 nt, Artificial Sequence
  Description of Artificial Sequence: Synthetic oligonucleotide
  Sense strand starting at position 1015 of SEQ ID NO: 1886814
uccaaucuguaccuggaaa

SEQ ID NO: 2428153 - RNA, 19 nt, Artificial Sequence
  Description of Artificial Sequence: Synthetic oligonucleotide
  Antisense strand to SEQ ID NO: 2428152
uuuccagguacagauugga

SEQ ID NO: 2428154 - RNA, 19 nt, Artificial Sequence
  Description of Artificial Sequence: Synthetic oligonucleotide
  Sense strand starting at position 1034 of SEQ ID NO: 1886814
gguuauuaccuguaggauc

SEQ ID NO: 2428155 - RNA, 19 nt, Artificial Sequence
  Description of Artificial Sequence: Synthetic oligonucleotide
  Antisense strand to SEQ ID NO: 2428154
gauccuacagguaauaacc

SEQ ID NO: 2428156 - RNA, 19 nt, Artificial Sequence
  Description of Artificial Sequence: Synthetic oligonucleotide
  Sense strand starting at position 1091 of SEQ ID NO: 1886814
ccaucuuuguugcuauuau

SEQ ID NO: 2428157 - RNA, 19 nt, Artificial Sequence
  Description of Artificial Sequence: Synthetic oligonucleotide
  Antisense strand to SEQ ID NO: 2428156
auaauagcaacaaagaugg

SEQ ID NO: 2428158 - RNA, 19 nt, Artificial Sequence
  Description of Artificial Sequence: Synthetic oligonucleotide
  Sense strand starting at position 1102 of SEQ ID NO: 1886814
gcuauuauuuaugaucaug

SEQ ID NO: 2428159 - RNA, 19 nt, Artificial Sequence
  Description of Artificial Sequence: Synthetic oligonucleotide
  Antisense strand to SEQ ID NO: 2428158
caugaucauaaauaauagc

SEQ ID NO: 2428160 - RNA, 19 nt, Artificial Sequence
  Description of Artificial Sequence: Synthetic oligonucleotide
  Sense strand starting at position 1113 of SEQ ID NO: 1886814
ugaucaugauuauacaaug

SEQ ID NO: 2428161 - RNA, 19 nt, Artificial Sequence
  Description of Artificial Sequence: Synthetic oligonucleotide
  Antisense strand to SEQ ID NO: 2428160
cauuguauaaucaugauca

SEQ ID NO: 2428162 - RNA, 19 nt, Artificial Sequence
  Description of Artificial Sequence: Synthetic oligonucleotide
  Sense strand starting at position 1118 of SEQ ID NO: 1886814
augauuauacaauggguuu

SEQ ID NO: 2428163 - RNA, 19 nt, Artificial Sequence
  Description of Artificial Sequence: Synthetic oligonucleotide
  Antisense strand to SEQ ID NO: 2428162
aaacccauuguauaaucau

SEQ ID NO: 2428164 - RNA, 19 nt, Artificial Sequence
  Description of Artificial Sequence: Synthetic oligonucleotide
  Sense strand starting at position 1359 of SEQ ID NO: 1886814
agacuaagucuuggucuau

SEQ ID NO: 2428165 - RNA, 19 nt, Artificial Sequence
  Description of Artificial Sequence: Synthetic oligonucleotide
  Antisense strand to SEQ ID NO: 2428164
auagaccaagacuuagucu

SEQ ID NO: 2428166 - RNA, 19 nt, Artificial Sequence
  Description of Artificial Sequence: Synthetic oligonucleotide
  Sense strand starting at position 1360 of SEQ ID NO: 1886814
gacuaagucuuggucuauc

SEQ ID NO: 2428167 - RNA, 19 nt, Artificial Sequence
  Description of Artificial Sequence: Synthetic oligonucleotide
  Antisense strand to SEQ ID NO: 2428166
gauagaccaagacuuaguc

SEQ ID NO: 2428168 - RNA, 19 nt, Artificial Sequence
  Description of Artificial Sequence: Synthetic oligonucleotide
  Sense strand starting at position 1399 of SEQ ID NO: 1886814
guacaaauggcaugaucuc

SEQ ID NO: 2428169 - RNA, 19 nt, Artificial Sequence
  Description of Artificial Sequence: Synthetic oligonucleotide
  Antisense strand to SEQ ID NO: 2428168
gagaucaugccauuuguac

SEQ ID NO: 2428170 - RNA, 19 nt, Artificial Sequence
  Description of Artificial Sequence: Synthetic oligonucleotide
  Sense strand starting at position 1633 of SEQ ID NO: 1886814
agggucuacggauauuauu

SEQ ID NO: 2428171 - RNA, 19 nt, Artificial Sequence
  Description of Artificial Sequence: Synthetic oligonucleotide
  Antisense strand to SEQ ID NO: 2428170
aauaauauccguagacccu

SEQ ID NO: 2428172 - RNA, 19 nt, Artificial Sequence
  Description of Artificial Sequence: Synthetic oligonucleotide
  Sense strand starting at position 1641 of SEQ ID NO: 1886814
cggauauuauuagcauagu

SEQ ID NO: 2428173 - RNA, 19 nt, Artificial Sequence
  Description of Artificial Sequence: Synthetic oligonucleotide
  Antisense strand to SEQ ID NO: 2428172
acuaugcuaauaauauccg

SEQ ID NO: 2428174 - RNA, 19 nt, Artificial Sequence
  Description of Artificial Sequence: Synthetic oligonucleotide
  Sense strand starting at position 2284 of SEQ ID NO: 1886814
cuuggagaguacucggguu

SEQ ID NO: 2428175 - RNA, 19 nt, Artificial Sequence
  Description of Artificial Sequence: Synthetic oligonucleotide
  Antisense strand to SEQ ID NO: 2428174
aacccgaguacucuccaag

SEQ ID NO: 2428176 - RNA, 19 nt, Artificial Sequence
  Description of Artificial Sequence: Synthetic oligonucleotide
  Sense strand starting at position 2487 of SEQ ID NO: 1886814
ccuucucuccuaggugauu

SEQ ID NO: 2428177 - RNA, 19 nt, Artificial Sequence
  Description of Artificial Sequence: Synthetic oligonucleotide
  Antisense strand to SEQ ID NO: 2428176
aaucaccuaggagagaagg

SEQ ID NO: 2428178 - RNA, 19 nt, Artificial Sequence
  Description of Artificial Sequence: Synthetic oligonucleotide
  Sense strand starting at position 2695 of SEQ ID NO: 1886814
gggugcuccucccuugaau

SEQ ID NO: 2428179 - RNA, 19 nt, Artificial Sequence
  Description of Artificial Sequence: Synthetic oligonucleotide
  Antisense strand to SEQ ID NO: 2428178
auucaagggaggagcaccc

SEQ ID NO: 2428180 - RNA, 19 nt, Artificial Sequence
  Description of Artificial Sequence: Synthetic oligonucleotide
  Sense strand starting at position 2826 of SEQ ID NO: 1886814
cccaccaaguccucugaga

SEQ ID NO: 2428181 - RNA, 19 nt, Artificial Sequence
  Description of Artificial Sequence: Synthetic oligonucleotide
  Antisense strand to SEQ ID NO: 2428180
ucucagaggacuugguggg

SEQ ID NO: 2428182 - RNA, 19 nt, Artificial Sequence
  Description of Artificial Sequence: Synthetic oligonucleotide
  Sense strand starting at position 2828 of SEQ ID NO: 1886814
caccaaguccucugagaag

SEQ ID NO: 2428183 - RNA, 19 nt, Artificial Sequence
  Description of Artificial Sequence: Synthetic oligonucleotide
  Antisense strand to SEQ ID NO: 2428182
cuucucagaggacuuggug

SEQ ID NO: 2428184 - RNA, 19 nt, Artificial Sequence
  Description of Artificial Sequence: Synthetic oligonucleotide
  Sense strand starting at position 2977 of SEQ ID NO: 1886814
gcucuccugaggugauaga

SEQ ID NO: 2428185 - RNA, 19 nt, Artificial Sequence
  Description of Artificial Sequence: Synthetic oligonucleotide
  Antisense strand to SEQ ID NO: 2428184
ucuaucaccucaggagagc

SEQ ID NO: 2428186 - RNA, 19 nt, Artificial Sequence
  Description of Artificial Sequence: Synthetic oligonucleotide
  Sense strand starting at position 3023 of SEQ ID NO: 1886814
ugaguuucuugaguaaacu

SEQ ID NO: 2428187 - RNA, 19 nt, Artificial Sequence
  Description of Artificial Sequence: Synthetic oligonucleotide
  Antisense strand to SEQ ID NO: 2428186
aguuuacucaagaaacuca

SEQ ID NO: 2428188 - RNA, 19 nt, Artificial Sequence
  Description of Artificial Sequence: Synthetic oligonucleotide
  Sense strand starting at position 3024 of SEQ ID NO: 1886814
gaguuucuugaguaaacua

SEQ ID NO: 2428189 - RNA, 19 nt, Artificial Sequence
  Description of Artificial Sequence: Synthetic oligonucleotide
  Antisense strand to SEQ ID NO: 2428188
uaguuuacucaagaaacuc

SEQ ID NO: 2428190 - RNA, 19 nt, Artificial Sequence
  Description of Artificial Sequence: Synthetic oligonucleotide
  Sense strand starting at position 3072 of SEQ ID NO: 1886814
uguucuucuagagguagga

SEQ ID NO: 2428191 - RNA, 19 nt, Artificial Sequence
  Description of Artificial Sequence: Synthetic oligonucleotide
  Antisense strand to SEQ ID NO: 2428190
uccuaccucuagaagaaca

SEQ ID NO: 2428192 - RNA, 19 nt, Artificial Sequence
  Description of Artificial Sequence: Synthetic oligonucleotide
  Sense strand starting at position 3393 of SEQ ID NO: 1886814
gaagauguggcucagaguu

SEQ ID NO: 2428193 - RNA, 19 nt, Artificial Sequence
  Description of Artificial Sequence: Synthetic oligonucleotide
  Antisense strand to SEQ ID NO: 2428192
aacucugagccacaucuuc

SEQ ID NO: 2428194 - RNA, 19 nt, Artificial Sequence
  Description of Artificial Sequence: Synthetic oligonucleotide
  Sense strand starting at position 3543 of SEQ ID NO: 1886814
cguugaucacuugagguua

SEQ ID NO: 2428195 - RNA, 19 nt, Artificial Sequence
  Description of Artificial Sequence: Synthetic oligonucleotide
  Antisense strand to SEQ ID NO: 2428194
uaaccucaagugaucaacg

SEQ ID NO: 2428196 - RNA, 19 nt, Artificial Sequence
  Description of Artificial Sequence: Synthetic oligonucleotide
  Sense strand starting at position 3845 of SEQ ID NO: 1886814
gcagguucccucuacaugu

SEQ ID NO: 2428197 - RNA, 19 nt, Artificial Sequence
  Description of Artificial Sequence: Synthetic oligonucleotide
  Antisense strand to SEQ ID NO: 2428196
acauguagagggaaccugc

SEQ ID NO: 2428198 - RNA, 19 nt, Artificial Sequence
  Description of Artificial Sequence: Synthetic oligonucleotide
  Sense strand starting at position 3980 of SEQ ID NO: 1886814
acccucuuuguagggauau

SEQ ID NO: 2428199 - RNA, 19 nt, Artificial Sequence
  Description of Artificial Sequence: Synthetic oligonucleotide
  Antisense strand to SEQ ID NO: 2428198
auaucccuacaaagagggu

SEQ ID NO: 2428200 - RNA, 19 nt, Artificial Sequence
  Description of Artificial Sequence: Synthetic oligonucleotide
  Sense strand starting at position 391 of SEQ ID NO: 1886815
uauggacacugagauauga

SEQ ID NO: 2428201 - RNA, 19 nt, Artificial Sequence
  Description of Artificial Sequence: Synthetic oligonucleotide
  Antisense strand to SEQ ID NO: 2428200
ucauaucucaguguccaua

SEQ ID NO: 2428202 - RNA, 19 nt, Artificial Sequence
  Description of Artificial Sequence: Synthetic oligonucleotide
  Sense strand starting at position 399 of SEQ ID NO: 1886815
cugagauaugaauguuaca

SEQ ID NO: 2428203 - RNA, 19 nt, Artificial Sequence
  Description of Artificial Sequence: Synthetic oligonucleotide
  Antisense strand to SEQ ID NO: 2428202
uguaacauucauaucucag

SEQ ID NO: 2428204 - RNA, 19 nt, Artificial Sequence
  Description of Artificial Sequence: Synthetic oligonucleotide
  Sense strand starting at position 402 of SEQ ID NO: 1886815
agauaugaauguuacauca

SEQ ID NO: 2428205 - RNA, 19 nt, Artificial Sequence
  Description of Artificial Sequence: Synthetic oligonucleotide
  Antisense strand to SEQ ID NO: 2428204
ugauguaacauucauaucu

SEQ ID NO: 2428206 - RNA, 19 nt, Artificial Sequence
  Description of Artificial Sequence: Synthetic oligonucleotide
  Sense strand starting at position 479 of SEQ ID NO: 1886815
aaaugugcuuuguuugaga

SEQ ID NO: 2428207 - RNA, 19 nt, Artificial Sequence
  Description of Artificial Sequence: Synthetic oligonucleotide
  Antisense strand to SEQ ID NO: 2428206
ucucaaacaaagcacauuu

SEQ ID NO: 2428208 - RNA, 19 nt, Artificial Sequence
  Description of Artificial Sequence: Synthetic oligonucleotide
  Sense strand starting at position 481 of SEQ ID NO: 1886815
augugcuuuguuugagaca

SEQ ID NO: 2428209 - RNA, 19 nt, Artificial Sequence
  Description of Artificial Sequence: Synthetic oligonucleotide
  Antisense strand to SEQ ID NO: 2428208
ugucucaaacaaagcacau

SEQ ID NO: 2428210 - RNA, 19 nt, Artificial Sequence
  Description of Artificial Sequence: Synthetic oligonucleotide
  Sense strand starting at position 684 of SEQ ID NO: 1886815
ugacucaguucuuuggcaa

SEQ ID NO: 2428211 - RNA, 19 nt, Artificial Sequence
  Description of Artificial Sequence: Synthetic oligonucleotide
  Antisense strand to SEQ ID NO: 2428210
uugccaaagaacugaguca

SEQ ID NO: 2428212 - RNA, 19 nt, Artificial Sequence
  Description of Artificial Sequence: Synthetic oligonucleotide
  Sense strand starting at position 685 of SEQ ID NO: 1886815
gacucaguucuuuggcaaa

SEQ ID NO: 2428213 - RNA, 19 nt, Artificial Sequence
  Description of Artificial Sequence: Synthetic oligonucleotide
  Antisense strand to SEQ ID NO: 2428212
uuugccaaagaacugaguc

SEQ ID NO: 2428214 - RNA, 19 nt, Artificial Sequence
  Description of Artificial Sequence: Synthetic oligonucleotide
  Sense strand starting at position 687 of SEQ ID NO: 1886815
cucaguucuuuggcaaauu

SEQ ID NO: 2428215 - RNA, 19 nt, Artificial Sequence
  Description of Artificial Sequence: Synthetic oligonucleotide
  Antisense strand to SEQ ID NO: 2428214
aauuugccaaagaacugag

SEQ ID NO: 2428216 - RNA, 19 nt, Artificial Sequence
  Description of Artificial Sequence: Synthetic oligonucleotide
  Sense strand starting at position 748 of SEQ ID NO: 1886815
gucccugaauaagaaucau

SEQ ID NO: 2428217 - RNA, 19 nt, Artificial Sequence
  Description of Artificial Sequence: Synthetic oligonucleotide
  Antisense strand to SEQ ID NO: 2428216
augauucuuauucagggac

SEQ ID NO: 2428218 - RNA, 19 nt, Artificial Sequence
  Description of Artificial Sequence: Synthetic oligonucleotide
  Sense strand starting at position 871 of SEQ ID NO: 1886815
ccuuuaauacucugggauc

SEQ ID NO: 2428219 - RNA, 19 nt, Artificial Sequence
  Description of Artificial Sequence: Synthetic oligonucleotide
  Antisense strand to SEQ ID NO: 2428218
gaucccagaguauuaaagg

SEQ ID NO: 2428220 - RNA, 19 nt, Artificial Sequence
  Description of Artificial Sequence: Synthetic oligonucleotide
  Sense strand starting at position 873 of SEQ ID NO: 1886815
uuuaauacucugggaucua

SEQ ID NO: 2428221 - RNA, 19 nt, Artificial Sequence
  Description of Artificial Sequence: Synthetic oligonucleotide
  Antisense strand to SEQ ID NO: 2428220
uagaucccagaguauuaaa

SEQ ID NO: 2428222 - RNA, 19 nt, Artificial Sequence
  Description of Artificial Sequence: Synthetic oligonucleotide
  Sense strand starting at position 887 of SEQ ID NO: 1886815
aucuauguguuucccacau

SEQ ID NO: 2428223 - RNA, 19 nt, Artificial Sequence
  Description of Artificial Sequence: Synthetic oligonucleotide
  Antisense strand to SEQ ID NO: 2428222
augugggaaacacauagau

SEQ ID NO: 2428224 - RNA, 19 nt, Artificial Sequence
  Description of Artificial Sequence: Synthetic oligonucleotide
  Sense strand starting at position 891 of SEQ ID NO: 1886815
auguguuucccacauucca

SEQ ID NO: 2428225 - RNA, 19 nt, Artificial Sequence
  Description of Artificial Sequence: Synthetic oligonucleotide
  Antisense strand to SEQ ID NO: 2428224
uggaaugugggaaacacau

SEQ ID NO: 2428226 - RNA, 19 nt, Artificial Sequence
  Description of Artificial Sequence: Synthetic oligonucleotide
  Sense strand starting at position 989 of SEQ ID NO: 1886815
uaguguuuauuuguuaggu

SEQ ID NO: 2428227 - RNA, 19 nt, Artificial Sequence
  Description of Artificial Sequence: Synthetic oligonucleotide
  Antisense strand to SEQ ID NO: 2428226
accuaacaaauaaacacua

SEQ ID NO: 2428228 - RNA, 19 nt, Artificial Sequence
  Description of Artificial Sequence: Synthetic oligonucleotide
  Sense strand starting at position 1050 of SEQ ID NO: 1886815
ggucacuguccucacuaga

SEQ ID NO: 2428229 - RNA, 19 nt, Artificial Sequence
  Description of Artificial Sequence: Synthetic oligonucleotide
  Antisense strand to SEQ ID NO: 2428228
ucuagugaggacagugacc

SEQ ID NO: 2428230 - RNA, 19 nt, Artificial Sequence
  Description of Artificial Sequence: Synthetic oligonucleotide
  Sense strand starting at position 1408 of SEQ ID NO: 1886815
aucugucacucaccaguua

SEQ ID NO: 2428231 - RNA, 19 nt, Artificial Sequence
  Description of Artificial Sequence: Synthetic oligonucleotide
  Antisense strand to SEQ ID NO: 2428230
uaacuggugagugacagau

SEQ ID NO: 2428232 - RNA, 19 nt, Artificial Sequence
  Description of Artificial Sequence: Synthetic oligonucleotide
  Sense strand starting at position 1409 of SEQ ID NO: 1886815
ucugucacucaccaguuaa

SEQ ID NO: 2428233 - RNA, 19 nt, Artificial Sequence
  Description of Artificial Sequence: Synthetic oligonucleotide
  Antisense strand to SEQ ID NO: 2428232
uuaacuggugagugacaga

SEQ ID NO: 2428234 - RNA, 19 nt, Artificial Sequence
  Description of Artificial Sequence: Synthetic oligonucleotide
  Sense strand starting at position 1522 of SEQ ID NO: 1886815
agagaagcaaagugacauu

SEQ ID NO: 2428235 - RNA, 19 nt, Artificial Sequence
  Description of Artificial Sequence: Synthetic oligonucleotide
  Antisense strand to SEQ ID NO: 2428234
aaugucacuuugcuucucu

SEQ ID NO: 2428236 - RNA, 19 nt, Artificial Sequence
  Description of Artificial Sequence: Synthetic oligonucleotide
  Sense strand starting at position 1648 of SEQ ID NO: 1886815
guauuucacgugcgaugau

SEQ ID NO: 2428237 - RNA, 19 nt, Artificial Sequence
  Description of Artificial Sequence: Synthetic oligonucleotide
  Antisense strand to SEQ ID NO: 2428236
aucaucgcacgugaaauac

SEQ ID NO: 2428238 - RNA, 19 nt, Artificial Sequence
  Description of Artificial Sequence: Synthetic oligonucleotide
  Sense strand starting at position 1651 of SEQ ID NO: 1886815
uuucacgugcgaugauaaa

SEQ ID NO: 2428239 - RNA, 19 nt, Artificial Sequence
  Description of Artificial Sequence: Synthetic oligonucleotide
  Antisense strand to SEQ ID NO: 2428238
uuuaucaucgcacgugaaa

SEQ ID NO: 2428240 - RNA, 19 nt, Artificial Sequence
  Description of Artificial Sequence: Synthetic oligonucleotide
  Sense strand starting at position 1669 of SEQ ID NO: 1886815
aauguuacuuaggagaaac

SEQ ID NO: 2428241 - RNA, 19 nt, Artificial Sequence
  Description of Artificial Sequence: Synthetic oligonucleotide
  Antisense strand to SEQ ID NO: 2428240
guuucuccuaaguaacauu

SEQ ID NO: 2428242 - RNA, 19 nt, Artificial Sequence
  Description of Artificial Sequence: Synthetic oligonucleotide
  Sense strand starting at position 1770 of SEQ ID NO: 1886815
acuccuuuacacugucaga

SEQ ID NO: 2428243 - RNA, 19 nt, Artificial Sequence
  Description of Artificial Sequence: Synthetic oligonucleotide
  Antisense strand to SEQ ID NO: 2428242
ucugacaguguaaaggagu

SEQ ID NO: 2428244 - RNA, 19 nt, Artificial Sequence
  Description of Artificial Sequence: Synthetic oligonucleotide
  Sense strand starting at position 1828 of SEQ ID NO: 1886815
acgcucucuguuggugaaa

SEQ ID NO: 2428245 - RNA, 19 nt, Artificial Sequence
  Description of Artificial Sequence: Synthetic oligonucleotide
  Antisense strand to SEQ ID NO: 2428244
uuucaccaacagagagcgu

SEQ ID NO: 2428246 - RNA, 19 nt, Artificial Sequence
  Description of Artificial Sequence: Synthetic oligonucleotide
  Sense strand starting at position 1876 of SEQ ID NO: 1886815
aggagagacuaaggaauuu

SEQ ID NO: 2428247 - RNA, 19 nt, Artificial Sequence
  Description of Artificial Sequence: Synthetic oligonucleotide
  Antisense strand to SEQ ID NO: 2428246
aaauuccuuagucucuccu

SEQ ID NO: 2428248 - RNA, 19 nt, Artificial Sequence
  Description of Artificial Sequence: Synthetic oligonucleotide
  Sense strand starting at position 1912 of SEQ ID NO: 1886815
gcuccaauccuccgauacu

SEQ ID NO: 2428249 - RNA, 19 nt, Artificial Sequence
  Description of Artificial Sequence: Synthetic oligonucleotide
  Antisense strand to SEQ ID NO: 2428248
aguaucggaggauuggagc

SEQ ID NO: 2428250 - RNA, 19 nt, Artificial Sequence
  Description of Artificial Sequence: Synthetic oligonucleotide
  Sense strand starting at position 2901 of SEQ ID NO: 1886815
agaggugcuugaguugaau

SEQ ID NO: 2428251 - RNA, 19 nt, Artificial Sequence
  Description of Artificial Sequence: Synthetic oligonucleotide
  Antisense strand to SEQ ID NO: 2428250
auucaacucaagcaccucu

SEQ ID NO: 2428252 - RNA, 19 nt, Artificial Sequence
  Description of Artificial Sequence: Synthetic oligonucleotide
  Sense strand starting at position 2904 of SEQ ID NO: 1886815
ggugcuugaguugaaugga

SEQ ID NO: 2428253 - RNA, 19 nt, Artificial Sequence
  Description of Artificial Sequence: Synthetic oligonucleotide
  Antisense strand to SEQ ID NO: 2428252
uccauucaacucaagcacc

SEQ ID NO: 2428254 - RNA, 19 nt, Artificial Sequence
  Description of Artificial Sequence: Synthetic oligonucleotide
  Sense strand starting at position 2907 of SEQ ID NO: 1886815
gcuugaguugaauggagga

SEQ ID NO: 2428255 - RNA, 19 nt, Artificial Sequence
  Description of Artificial Sequence: Synthetic oligonucleotide
  Antisense strand to SEQ ID NO: 2428254
uccuccauucaacucaagc

SEQ ID NO: 2428256 - RNA, 19 nt, Artificial Sequence
  Description of Artificial Sequence: Synthetic oligonucleotide
  Sense strand starting at position 2939 of SEQ ID NO: 1886815
gagagugcuuguuccagaa

SEQ ID NO: 2428257 - RNA, 19 nt, Artificial Sequence
  Description of Artificial Sequence: Synthetic oligonucleotide
  Antisense strand to SEQ ID NO: 2428256
uucuggaacaagcacucuc

SEQ ID NO: 2428258 - RNA, 19 nt, Artificial Sequence
  Description of Artificial Sequence: Synthetic oligonucleotide
  Sense strand starting at position 2943 of SEQ ID NO: 1886815
gugcuuguuccagaaaugu

SEQ ID NO: 2428259 - RNA, 19 nt, Artificial Sequence
  Description of Artificial Sequence: Synthetic oligonucleotide
  Antisense strand to SEQ ID NO: 2428258
acauuucuggaacaagcac

SEQ ID NO: 2428260 - RNA, 19 nt, Artificial Sequence
  Description of Artificial Sequence: Synthetic oligonucleotide
  Sense strand starting at position 3266 of SEQ ID NO: 1886815
ggguuuacgaagugaacau

SEQ ID NO: 2428261 - RNA, 19 nt, Artificial Sequence
  Description of Artificial Sequence: Synthetic oligonucleotide
  Antisense strand to SEQ ID NO: 2428260
auguucacuucguaaaccc

SEQ ID NO: 2428262 - RNA, 19 nt, Artificial Sequence
  Description of Artificial Sequence: Synthetic oligonucleotide
  Sense strand starting at position 3285 of SEQ ID NO: 1886815
gaggucaggugccugaauu

SEQ ID NO: 2428263 - RNA, 19 nt, Artificial Sequence
  Description of Artificial Sequence: Synthetic oligonucleotide
  Antisense strand to SEQ ID NO: 2428262
aauucaggcaccugaccuc

SEQ ID NO: 2428264 - RNA, 19 nt, Artificial Sequence
  Description of Artificial Sequence: Synthetic oligonucleotide
  Sense strand starting at position 3327 of SEQ ID NO: 1886815
uccagauaaugcucggaau

SEQ ID NO: 2428265 - RNA, 19 nt, Artificial Sequence
  Description of Artificial Sequence: Synthetic oligonucleotide
  Antisense strand to SEQ ID NO: 2428264
auuccgagcauuaucugga

SEQ ID NO: 2428266 - RNA, 19 nt, Artificial Sequence
  Description of Artificial Sequence: Synthetic oligonucleotide
  Sense strand starting at position 3328 of SEQ ID NO: 1886815
ccagauaaugcucggaaua

SEQ ID NO: 2428267 - RNA, 19 nt, Artificial Sequence
  Description of Artificial Sequence: Synthetic oligonucleotide
  Antisense strand to SEQ ID NO: 2428266
uauuccgagcauuaucugg

SEQ ID NO: 2428268 - RNA, 19 nt, Artificial Sequence
  Description of Artificial Sequence: Synthetic oligonucleotide
  Sense strand starting at position 3457 of SEQ ID NO: 1886815
gaggccuagggucagaauu

SEQ ID NO: 2428269 - RNA, 19 nt, Artificial Sequence
  Description of Artificial Sequence: Synthetic oligonucleotide
  Antisense strand to SEQ ID NO: 2428268
aauucugacccuaggccuc

SEQ ID NO: 2428270 - RNA, 19 nt, Artificial Sequence
  Description of Artificial Sequence: Synthetic oligonucleotide
  Sense strand starting at position 3527 of SEQ ID NO: 1886815
gagagcggcuuucuugaga

SEQ ID NO: 2428271 - RNA, 19 nt, Artificial Sequence
  Description of Artificial Sequence: Synthetic oligonucleotide
  Antisense strand to SEQ ID NO: 2428270
ucucaagaaagccgcucuc

SEQ ID NO: 2428272 - RNA, 19 nt, Artificial Sequence
  Description of Artificial Sequence: Synthetic oligonucleotide
  Sense strand starting at position 3530 of SEQ ID NO: 1886815
agcggcuuucuugagaaug

SEQ ID NO: 2428273 - RNA, 19 nt, Artificial Sequence
  Description of Artificial Sequence: Synthetic oligonucleotide
  Antisense strand to SEQ ID NO: 2428272
cauucucaagaaagccgcu

SEQ ID NO: 2428274 - RNA, 19 nt, Artificial Sequence
  Description of Artificial Sequence: Synthetic oligonucleotide
  Sense strand starting at position 3535 of SEQ ID NO: 1886815
cuuucuugagaaugugguu

SEQ ID NO: 2428275 - RNA, 19 nt, Artificial Sequence
  Description of Artificial Sequence: Synthetic oligonucleotide
  Antisense strand to SEQ ID NO: 2428274
aaccacauucucaagaaag

SEQ ID NO: 2428276 - RNA, 19 nt, Artificial Sequence
  Description of Artificial Sequence: Synthetic oligonucleotide
  Sense strand starting at position 3604 of SEQ ID NO: 1886815
gugugaccucuuuagguau

SEQ ID NO: 2428277 - RNA, 19 nt, Artificial Sequence
  Description of Artificial Sequence: Synthetic oligonucleotide
  Antisense strand to SEQ ID NO: 2428276
auaccuaaagaggucacac

SEQ ID NO: 2428278 - RNA, 19 nt, Artificial Sequence
  Description of Artificial Sequence: Synthetic oligonucleotide
  Sense strand starting at position 3742 of SEQ ID NO: 1886815
ggcacauagugcucagaaa

SEQ ID NO: 2428279 - RNA, 19 nt, Artificial Sequence
  Description of Artificial Sequence: Synthetic oligonucleotide
  Antisense strand to SEQ ID NO: 2428278
uuucugagcacuaugugcc

SEQ ID NO: 2428280 - RNA, 19 nt, Artificial Sequence
  Description of Artificial Sequence: Synthetic oligonucleotide
  Sense strand starting at position 90 of SEQ ID NO: 1886816
uccucuauuugaggacauu

SEQ ID NO: 2428281 - RNA, 19 nt, Artificial Sequence
  Description of Artificial Sequence: Synthetic oligonucleotide
  Antisense strand to SEQ ID NO: 2428280
aauguccucaaauagagga

SEQ ID NO: 2428282 - RNA, 19 nt, Artificial Sequence
  Description of Artificial Sequence: Synthetic oligonucleotide
  Sense strand starting at position 333 of SEQ ID NO: 1886816
cuuggaauaucugccaaca

SEQ ID NO: 2428283 - RNA, 19 nt, Artificial Sequence
  Description of Artificial Sequence: Synthetic oligonucleotide
  Antisense strand to SEQ ID NO: 2428282
uguuggcagauauuccaag

SEQ ID NO: 2428284 - RNA, 19 nt, Artificial Sequence
  Description of Artificial Sequence: Synthetic oligonucleotide
  Sense strand starting at position 404 of SEQ ID NO: 1886816
gcaggacucuuucucuauu

SEQ ID NO: 2428285 - RNA, 19 nt, Artificial Sequence
  Description of Artificial Sequence: Synthetic oligonucleotide
  Antisense strand to SEQ ID NO: 2428284
aauagagaaagaguccugc

SEQ ID NO: 2428286 - RNA, 19 nt, Artificial Sequence
  Description of Artificial Sequence: Synthetic oligonucleotide
  Sense strand starting at position 412 of SEQ ID NO: 1886816
cuuucucuauuggcaaaga

SEQ ID NO: 2428287 - RNA, 19 nt, Artificial Sequence
  Description of Artificial Sequence: Synthetic oligonucleotide
  Antisense strand to SEQ ID NO: 2428286
ucuuugccaauagagaaag

SEQ ID NO: 2428288 - RNA, 19 nt, Artificial Sequence
  Description of Artificial Sequence: Synthetic oligonucleotide
  Sense strand starting at position 443 of SEQ ID NO: 1886816
cuuccuaagucaguguuau

SEQ ID NO: 2428289 - RNA, 19 nt, Artificial Sequence
  Description of Artificial Sequence: Synthetic oligonucleotide
  Antisense strand to SEQ ID NO: 2428288
auaacacugacuuaggaag

SEQ ID NO: 2428290 - RNA, 19 nt, Artificial Sequence
  Description of Artificial Sequence: Synthetic oligonucleotide
  Sense strand starting at position 460 of SEQ ID NO: 1886816
auuaauaugcccuggccau

SEQ ID NO: 2428291 - RNA, 19 nt, Artificial Sequence
  Description of Artificial Sequence: Synthetic oligonucleotide
  Antisense strand to SEQ ID NO: 2428290
auggccagggcauauuaau

SEQ ID NO: 2428292 - RNA, 19 nt, Artificial Sequence
  Description of Artificial Sequence: Synthetic oligonucleotide
  Sense strand starting at position 461 of SEQ ID NO: 1886816
uuaauaugcccuggccauu

SEQ ID NO: 2428293 - RNA, 19 nt, Artificial Sequence
  Description of Artificial Sequence: Synthetic oligonucleotide
  Antisense strand to SEQ ID NO: 2428292
aauggccagggcauauuaa

SEQ ID NO: 2428294 - RNA, 19 nt, Artificial Sequence
  Description of Artificial Sequence: Synthetic oligonucleotide
  Sense strand starting at position 492 of SEQ ID NO: 1886816
acuuauugacuagaagcuu

SEQ ID NO: 2428295 - RNA, 19 nt, Artificial Sequence
  Description of Artificial Sequence: Synthetic oligonucleotide
  Antisense strand to SEQ ID NO: 2428294
aagcuucuagucaauaagu

SEQ ID NO: 2428296 - RNA, 19 nt, Artificial Sequence
  Description of Artificial Sequence: Synthetic oligonucleotide
  Sense strand starting at position 537 of SEQ ID NO: 1886816
acuguuuguucucuuagaa

SEQ ID NO: 2428297 - RNA, 19 nt, Artificial Sequence
  Description of Artificial Sequence: Synthetic oligonucleotide
  Antisense strand to SEQ ID NO: 2428296
uucuaagagaacaaacagu

SEQ ID NO: 2428298 - RNA, 19 nt, Artificial Sequence
  Description of Artificial Sequence: Synthetic oligonucleotide
  Sense strand starting at position 686 of SEQ ID NO: 1886816
uccagucaugcagaaugau

SEQ ID NO: 2428299 - RNA, 19 nt, Artificial Sequence
  Description of Artificial Sequence: Synthetic oligonucleotide
  Antisense strand to SEQ ID NO: 2428298
aucauucugcaugacugga

SEQ ID NO: 2428300 - RNA, 19 nt, Artificial Sequence
  Description of Artificial Sequence: Synthetic oligonucleotide
  Sense strand starting at position 689 of SEQ ID NO: 1886816
agucaugcagaaugauuga

SEQ ID NO: 2428301 - RNA, 19 nt, Artificial Sequence
  Description of Artificial Sequence: Synthetic oligonucleotide
  Antisense strand to SEQ ID NO: 2428300
ucaaucauucugcaugacu

SEQ ID NO: 2428302 - RNA, 19 nt, Artificial Sequence
  Description of Artificial Sequence: Synthetic oligonucleotide
  Sense strand starting at position 846 of SEQ ID NO: 1886816
accgcaucucuagaguaaa

SEQ ID NO: 2428303 - RNA, 19 nt, Artificial Sequence
  Description of Artificial Sequence: Synthetic oligonucleotide
  Antisense strand to SEQ ID NO: 2428302
uuuacucuagagaugcggu

SEQ ID NO: 2428304 - RNA, 19 nt, Artificial Sequence
  Description of Artificial Sequence: Synthetic oligonucleotide
  Sense strand starting at position 993 of SEQ ID NO: 1886816
cuagcagaacuaugagaau

SEQ ID NO: 2428305 - RNA, 19 nt, Artificial Sequence
  Description of Artificial Sequence: Synthetic oligonucleotide
  Antisense strand to SEQ ID NO: 2428304
auucucauaguucugcuag

SEQ ID NO: 2428306 - RNA, 19 nt, Artificial Sequence
  Description of Artificial Sequence: Synthetic oligonucleotide
  Sense strand starting at position 1033 of SEQ ID NO: 1886816
agaagacuccagugaaguu

SEQ ID NO: 2428307 - RNA, 19 nt, Artificial Sequence
  Description of Artificial Sequence: Synthetic oligonucleotide
  Antisense strand to SEQ ID NO: 2428306
aacuucacuggagucuucu

SEQ ID NO: 2428308 - RNA, 19 nt, Artificial Sequence
  Description of Artificial Sequence: Synthetic oligonucleotide
  Sense strand starting at position 1080 of SEQ ID NO: 1886816
uugaaugcaugucucacaa

SEQ ID NO: 2428309 - RNA, 19 nt, Artificial Sequence
  Description of Artificial Sequence: Synthetic oligonucleotide
  Antisense strand to SEQ ID NO: 2428308
uugugagacaugcauucaa

SEQ ID NO: 2428310 - RNA, 19 nt, Artificial Sequence
  Description of Artificial Sequence: Synthetic oligonucleotide
  Sense strand starting at position 1355 of SEQ ID NO: 1886816
gccucccaccugugaaaga

SEQ ID NO: 2428311 - RNA, 19 nt, Artificial Sequence
  Description of Artificial Sequence: Synthetic oligonucleotide
  Antisense strand to SEQ ID NO: 2428310
ucuuucacaggugggaggc

SEQ ID NO: 2428312 - RNA, 19 nt, Artificial Sequence
  Description of Artificial Sequence: Synthetic oligonucleotide
  Sense strand starting at position 1994 of SEQ ID NO: 1886816
ggugccuucccguugguaa

SEQ ID NO: 2428313 - RNA, 19 nt, Artificial Sequence
  Description of Artificial Sequence: Synthetic oligonucleotide
  Antisense strand to SEQ ID NO: 2428312
uuaccaacgggaaggcacc

SEQ ID NO: 2428314 - RNA, 19 nt, Artificial Sequence
  Description of Artificial Sequence: Synthetic oligonucleotide
  Sense strand starting at position 2683 of SEQ ID NO: 1886816
gauccaagccuuggaguua

SEQ ID NO: 2428315 - RNA, 19 nt, Artificial Sequence
  Description of Artificial Sequence: Synthetic oligonucleotide
  Antisense strand to SEQ ID NO: 2428314
uaacuccaaggcuuggauc

SEQ ID NO: 2428316 - RNA, 19 nt, Artificial Sequence
  Description of Artificial Sequence: Synthetic oligonucleotide
  Sense strand starting at position 2701 of SEQ ID NO: 1886816
acccguuuccuagaauaca

SEQ ID NO: 2428317 - RNA, 19 nt, Artificial Sequence
  Description of Artificial Sequence: Synthetic oligonucleotide
  Antisense strand to SEQ ID NO: 2428316
uguauucuaggaaacgggu

SEQ ID NO: 2428318 - RNA, 19 nt, Artificial Sequence
  Description of Artificial Sequence: Synthetic oligonucleotide
  Sense strand starting at position 2717 of SEQ ID NO: 1886816
acaugaaagugagaaauac

SEQ ID NO: 2428319 - RNA, 19 nt, Artificial Sequence
  Description of Artificial Sequence: Synthetic oligonucleotide
  Antisense strand to SEQ ID NO: 2428318
guauuucucacuuucaugu

SEQ ID NO: 2428320 - RNA, 19 nt, Artificial Sequence
  Description of Artificial Sequence: Synthetic oligonucleotide
  Sense strand starting at position 2785 of SEQ ID NO: 1886816
ccaccuugcacggaagaua

SEQ ID NO: 2428321 - RNA, 19 nt, Artificial Sequence
  Description of Artificial Sequence: Synthetic oligonucleotide
  Antisense strand to SEQ ID NO: 2428320
uaucuuccgugcaaggugg

SEQ ID NO: 2428322 - RNA, 19 nt, Artificial Sequence
  Description of Artificial Sequence: Synthetic oligonucleotide
  Sense strand starting at position 2799 of SEQ ID NO: 1886816
agauacaccuuugucaaga

SEQ ID NO: 2428323 - RNA, 19 nt, Artificial Sequence
  Description of Artificial Sequence: Synthetic oligonucleotide
  Antisense strand to SEQ ID NO: 2428322
ucuugacaaagguguaucu

SEQ ID NO: 2428324 - RNA, 19 nt, Artificial Sequence
  Description of Artificial Sequence: Synthetic oligonucleotide
  Sense strand starting at position 2809 of SEQ ID NO: 1886816
uugucaagacccuagaguu

SEQ ID NO: 2428325 - RNA, 19 nt, Artificial Sequence
  Description of Artificial Sequence: Synthetic oligonucleotide
  Antisense strand to SEQ ID NO: 2428324
aacucuagggucuugacaa

SEQ ID NO: 2428326 - RNA, 19 nt, Artificial Sequence
  Description of Artificial Sequence: Synthetic oligonucleotide
  Sense strand starting at position 3493 of SEQ ID NO: 1886816
ugaggauaguucuugcucu

SEQ ID NO: 2428327 - RNA, 19 nt, Artificial Sequence
  Description of Artificial Sequence: Synthetic oligonucleotide
  Antisense strand to SEQ ID NO: 2428326
agagcaagaacuauccuca

SEQ ID NO: 2428328 - RNA, 19 nt, Artificial Sequence
  Description of Artificial Sequence: Synthetic oligonucleotide
  Sense strand starting at position 3514 of SEQ ID NO: 1886816
guccuuuacuaguuguuaa

SEQ ID NO: 2428329 - RNA, 19 nt, Artificial Sequence
  Description of Artificial Sequence: Synthetic oligonucleotide
  Antisense strand to SEQ ID NO: 2428328
uuaacaacuaguaaaggac

SEQ ID NO: 2428330 - RNA, 19 nt, Artificial Sequence
  Description of Artificial Sequence: Synthetic oligonucleotide
  Sense strand starting at position 3517 of SEQ ID NO: 1886816
cuuuacuaguuguuaacuu

SEQ ID NO: 2428331 - RNA, 19 nt, Artificial Sequence
  Description of Artificial Sequence: Synthetic oligonucleotide
  Antisense strand to SEQ ID NO: 2428330
aaguuaacaacuaguaaag

SEQ ID NO: 2428332 - RNA, 19 nt, Artificial Sequence
  Description of Artificial Sequence: Synthetic oligonucleotide
  Sense strand starting at position 3521 of SEQ ID NO: 1886816
acuaguuguuaacuugaaa

SEQ ID NO: 2428333 - RNA, 19 nt, Artificial Sequence
  Description of Artificial Sequence: Synthetic oligonucleotide
  Antisense strand to SEQ ID NO: 2428332
uuucaaguuaacaacuagu

SEQ ID NO: 2428334 - RNA, 19 nt, Artificial Sequence
  Description of Artificial Sequence: Synthetic oligonucleotide
  Sense strand starting at position 3524 of SEQ ID NO: 1886816
aguuguuaacuugaaacac

SEQ ID NO: 2428335 - RNA, 19 nt, Artificial Sequence
  Description of Artificial Sequence: Synthetic oligonucleotide
  Antisense strand to SEQ ID NO: 2428334
guguuucaaguuaacaacu

SEQ ID NO: 2428336 - RNA, 19 nt, Artificial Sequence
  Description of Artificial Sequence: Synthetic oligonucleotide
  Sense strand starting at position 3533 of SEQ ID NO: 1886816
cuugaaacacugugaacau

SEQ ID NO: 2428337 - RNA, 19 nt, Artificial Sequence
  Description of Artificial Sequence: Synthetic oligonucleotide
  Antisense strand to SEQ ID NO: 2428336
auguucacaguguuucaag

SEQ ID NO: 2428338 - RNA, 19 nt, Artificial Sequence
  Description of Artificial Sequence: Synthetic oligonucleotide
  Sense strand starting at position 3580 of SEQ ID NO: 1886816
caggaauaguguuucuaag

SEQ ID NO: 2428339 - RNA, 19 nt, Artificial Sequence
  Description of Artificial Sequence: Synthetic oligonucleotide
  Antisense strand to SEQ ID NO: 2428338
cuuagaaacacuauuccug

SEQ ID NO: 2428340 - RNA, 19 nt, Artificial Sequence
  Description of Artificial Sequence: Synthetic oligonucleotide
  Sense strand starting at position 3582 of SEQ ID NO: 1886816
ggaauaguguuucuaaguu

SEQ ID NO: 2428341 - RNA, 19 nt, Artificial Sequence
  Description of Artificial Sequence: Synthetic oligonucleotide
  Antisense strand to SEQ ID NO: 2428340
aacuuagaaacacuauucc

SEQ ID NO: 2428342 - RNA, 19 nt, Artificial Sequence
  Description of Artificial Sequence: Synthetic oligonucleotide
  Sense strand starting at position 3625 of SEQ ID NO: 1886816
guucuaucuuuccuggagu

SEQ ID NO: 2428343 - RNA, 19 nt, Artificial Sequence
  Description of Artificial Sequence: Synthetic oligonucleotide
  Antisense strand to SEQ ID NO: 2428342
acuccaggaaagauagaac

SEQ ID NO: 2428344 - RNA, 19 nt, Artificial Sequence
  Description of Artificial Sequence: Synthetic oligonucleotide
  Sense strand starting at position 3627 of SEQ ID NO: 1886816
ucuaucuuuccuggaguau

SEQ ID NO: 2428345 - RNA, 19 nt, Artificial Sequence
  Description of Artificial Sequence: Synthetic oligonucleotide
  Antisense strand to SEQ ID NO: 2428344
auacuccaggaaagauaga

SEQ ID NO: 2428346 - RNA, 19 nt, Artificial Sequence
  Description of Artificial Sequence: Synthetic oligonucleotide
  Sense strand starting at position 3628 of SEQ ID NO: 1886816
cuaucuuuccuggaguaua

SEQ ID NO: 2428347 - RNA, 19 nt, Artificial Sequence
  Description of Artificial Sequence: Synthetic oligonucleotide
  Antisense strand to SEQ ID NO: 2428346
uauacuccaggaaagauag

SEQ ID NO: 2428348 - RNA, 19 nt, Artificial Sequence
  Description of Artificial Sequence: Synthetic oligonucleotide
  Sense strand starting at position 3638 of SEQ ID NO: 1886816
uggaguauacuuugcagau

SEQ ID NO: 2428349 - RNA, 19 nt, Artificial Sequence
  Description of Artificial Sequence: Synthetic oligonucleotide
  Antisense strand to SEQ ID NO: 2428348
aucugcaaaguauacucca

SEQ ID NO: 2428350 - RNA, 19 nt, Artificial Sequence
  Description of Artificial Sequence: Synthetic oligonucleotide
  Sense strand starting at position 3639 of SEQ ID NO: 1886816
ggaguauacuuugcagaug

SEQ ID NO: 2428351 - RNA, 19 nt, Artificial Sequence
  Description of Artificial Sequence: Synthetic oligonucleotide
  Antisense strand to SEQ ID NO: 2428350
caucugcaaaguauacucc

SEQ ID NO: 2428352 - RNA, 19 nt, Artificial Sequence
  Description of Artificial Sequence: Synthetic oligonucleotide
  Sense strand starting at position 3642 of SEQ ID NO: 1886816
guauacuuugcagaugacu

SEQ ID NO: 2428353 - RNA, 19 nt, Artificial Sequence
  Description of Artificial Sequence: Synthetic oligonucleotide
  Antisense strand to SEQ ID NO: 2428352
agucaucugcaaaguauac

SEQ ID NO: 2428354 - RNA, 19 nt, Artificial Sequence
  Description of Artificial Sequence: Synthetic oligonucleotide
  Sense strand starting at position 3660 of SEQ ID NO: 1886816
ucucaaaucugugugucua

SEQ ID NO: 2428355 - RNA, 19 nt, Artificial Sequence
  Description of Artificial Sequence: Synthetic oligonucleotide
  Antisense strand to SEQ ID NO: 2428354
uagacacacagauuugaga

SEQ ID NO: 2428356 - RNA, 19 nt, Artificial Sequence
  Description of Artificial Sequence: Synthetic oligonucleotide
  Sense strand starting at position 3661 of SEQ ID NO: 1886816
cucaaaucugugugucuag

SEQ ID NO: 2428357 - RNA, 19 nt, Artificial Sequence
  Description of Artificial Sequence: Synthetic oligonucleotide
  Antisense strand to SEQ ID NO: 2428356
cuagacacacagauuugag

SEQ ID NO: 2428358 - RNA, 19 nt, Artificial Sequence
  Description of Artificial Sequence: Synthetic oligonucleotide
  Sense strand starting at position 3732 of SEQ ID NO: 1886816
gguaccuccagcuagugaa

SEQ ID NO: 2428359 - RNA, 19 nt, Artificial Sequence
  Description of Artificial Sequence: Synthetic oligonucleotide
  Antisense strand to SEQ ID NO: 2428358
uucacuagcuggagguacc

SEQ ID NO: 2428360 - RNA, 19 nt, Artificial Sequence
  Description of Artificial Sequence: Synthetic oligonucleotide
  Sense strand starting at position 123 of SEQ ID NO: 1886817
cagagaauuauguggugca

SEQ ID NO: 2428361 - RNA, 19 nt, Artificial Sequence
  Description of Artificial Sequence: Synthetic oligonucleotide
  Antisense strand to SEQ ID NO: 2428360
ugcaccacauaauucucug

SEQ ID NO: 2428362 - RNA, 19 nt, Artificial Sequence
  Description of Artificial Sequence: Synthetic oligonucleotide
  Sense strand starting at position 130 of SEQ ID NO: 1886817
uuauguggugcagaauguu

SEQ ID NO: 2428363 - RNA, 19 nt, Artificial Sequence
  Description of Artificial Sequence: Synthetic oligonucleotide
  Antisense strand to SEQ ID NO: 2428362
aacauucugcaccacauaa

SEQ ID NO: 2428364 - RNA, 19 nt, Artificial Sequence
  Description of Artificial Sequence: Synthetic oligonucleotide
  Sense strand starting at position 133 of SEQ ID NO: 1886817
uguggugcagaauguuaau

SEQ ID NO: 2428365 - RNA, 19 nt, Artificial Sequence
  Description of Artificial Sequence: Synthetic oligonucleotide
  Antisense strand to SEQ ID NO: 2428364
auuaacauucugcaccaca

SEQ ID NO: 2428366 - RNA, 19 nt, Artificial Sequence
  Description of Artificial Sequence: Synthetic oligonucleotide
  Sense strand starting at position 162 of SEQ ID NO: 1886817
uugagaaaccuugggugua

SEQ ID NO: 2428367 - RNA, 19 nt, Artificial Sequence
  Description of Artificial Sequence: Synthetic oligonucleotide
  Antisense strand to SEQ ID NO: 2428366
uacacccaagguuucucaa

SEQ ID NO: 2428368 - RNA, 19 nt, Artificial Sequence
  Description of Artificial Sequence: Synthetic oligonucleotide
  Sense strand starting at position 164 of SEQ ID NO: 1886817
gagaaaccuuggguguaga

SEQ ID NO: 2428369 - RNA, 19 nt, Artificial Sequence
  Description of Artificial Sequence: Synthetic oligonucleotide
  Antisense strand to SEQ ID NO: 2428368
ucuacacccaagguuucuc

SEQ ID NO: 2428370 - RNA, 19 nt, Artificial Sequence
  Description of Artificial Sequence: Synthetic oligonucleotide
  Sense strand starting at position 165 of SEQ ID NO: 1886817
agaaaccuuggguguagau

SEQ ID NO: 2428371 - RNA, 19 nt, Artificial Sequence
  Description of Artificial Sequence: Synthetic oligonucleotide
  Antisense strand to SEQ ID NO: 2428370
aucuacacccaagguuucu

SEQ ID NO: 2428372 - RNA, 19 nt, Artificial Sequence
  Description of Artificial Sequence: Synthetic oligonucleotide
  Sense strand starting at position 231 of SEQ ID NO: 1886817
ggguaauggcugggauggu

SEQ ID NO: 2428373 - RNA, 19 nt, Artificial Sequence
  Description of Artificial Sequence: Synthetic oligonucleotide
  Antisense strand to SEQ ID NO: 2428372
accaucccagccauuaccc

SEQ ID NO: 2428374 - RNA, 19 nt, Artificial Sequence
  Description of Artificial Sequence: Synthetic oligonucleotide
  Sense strand starting at position 523 of SEQ ID NO: 1886817
ucaaaucccuggguuggaa

SEQ ID NO: 2428375 - RNA, 19 nt, Artificial Sequence
  Description of Artificial Sequence: Synthetic oligonucleotide
  Antisense strand to SEQ ID NO: 2428374
uuccaacccagggauuuga

SEQ ID NO: 2428376 - RNA, 19 nt, Artificial Sequence
  Description of Artificial Sequence: Synthetic oligonucleotide
  Sense strand starting at position 535 of SEQ ID NO: 1886817
guuggaagucuguauauug

SEQ ID NO: 2428377 - RNA, 19 nt, Artificial Sequence
  Description of Artificial Sequence: Synthetic oligonucleotide
  Antisense strand to SEQ ID NO: 2428376
caauauacagacuuccaac

SEQ ID NO: 2428378 - RNA, 19 nt, Artificial Sequence
  Description of Artificial Sequence: Synthetic oligonucleotide
  Sense strand starting at position 1007 of SEQ ID NO: 1886817
gagcuccuguucccgauau

SEQ ID NO: 2428379 - RNA, 19 nt, Artificial Sequence
  Description of Artificial Sequence: Synthetic oligonucleotide
  Antisense strand to SEQ ID NO: 2428378
auaucgggaacaggagcuc

SEQ ID NO: 2428380 - RNA, 19 nt, Artificial Sequence
  Description of Artificial Sequence: Synthetic oligonucleotide
  Sense strand starting at position 1009 of SEQ ID NO: 1886817
gcuccuguucccgauauuu

SEQ ID NO: 2428381 - RNA, 19 nt, Artificial Sequence
  Description of Artificial Sequence: Synthetic oligonucleotide
  Antisense strand to SEQ ID NO: 2428380
aaauaucgggaacaggagc

SEQ ID NO: 2428382 - RNA, 19 nt, Artificial Sequence
  Description of Artificial Sequence: Synthetic oligonucleotide
  Sense strand starting at position 1018 of SEQ ID NO: 1886817
cccgauauuucuuaaacag

SEQ ID NO: 2428383 - RNA, 19 nt, Artificial Sequence
  Description of Artificial Sequence: Synthetic oligonucleotide
  Antisense strand to SEQ ID NO: 2428382
cuguuuaagaaauaucggg

SEQ ID NO: 2428384 - RNA, 19 nt, Artificial Sequence
  Description of Artificial Sequence: Synthetic oligonucleotide
  Sense strand starting at position 1527 of SEQ ID NO: 1886817
agagaauccuggcuccguu

SEQ ID NO: 2428385 - RNA, 19 nt, Artificial Sequence
  Description of Artificial Sequence: Synthetic oligonucleotide
  Antisense strand to SEQ ID NO: 2428384
aacggagccaggauucucu

SEQ ID NO: 2428386 - RNA, 19 nt, Artificial Sequence
  Description of Artificial Sequence: Synthetic oligonucleotide
  Sense strand starting at position 1991 of SEQ ID NO: 1886817
gcccaucuugcccggagau

SEQ ID NO: 2428387 - RNA, 19 nt, Artificial Sequence
  Description of Artificial Sequence: Synthetic oligonucleotide
  Antisense strand to SEQ ID NO: 2428386
aucuccgggcaagaugggc

SEQ ID NO: 2428388 - RNA, 19 nt, Artificial Sequence
  Description of Artificial Sequence: Synthetic oligonucleotide
  Sense strand starting at position 2077 of SEQ ID NO: 1886817
ggcuguuguauuuggguuu

SEQ ID NO: 2428389 - RNA, 19 nt, Artificial Sequence
  Description of Artificial Sequence: Synthetic oligonucleotide
  Antisense strand to SEQ ID NO: 2428388
aaacccaaauacaacagcc

SEQ ID NO: 2428390 - RNA, 19 nt, Artificial Sequence
  Description of Artificial Sequence: Synthetic oligonucleotide
  Sense strand starting at position 2166 of SEQ ID NO: 1886817
ggucucuguauccagaguu

SEQ ID NO: 2428391 - RNA, 19 nt, Artificial Sequence
  Description of Artificial Sequence: Synthetic oligonucleotide
  Antisense strand to SEQ ID NO: 2428390
aacucuggauacagagacc

SEQ ID NO: 2428392 - RNA, 19 nt, Artificial Sequence
  Description of Artificial Sequence: Synthetic oligonucleotide
  Sense strand starting at position 2337 of SEQ ID NO: 1886817
aaauaagauugccacggaa

SEQ ID NO: 2428393 - RNA, 19 nt, Artificial Sequence
  Description of Artificial Sequence: Synthetic oligonucleotide
  Antisense strand to SEQ ID NO: 2428392
uuccguggcaaucuuauuu

SEQ ID NO: 2428394 - RNA, 19 nt, Artificial Sequence
  Description of Artificial Sequence: Synthetic oligonucleotide
  Sense strand starting at position 2339 of SEQ ID NO: 1886817
auaagauugccacggaagu

SEQ ID NO: 2428395 - RNA, 19 nt, Artificial Sequence
  Description of Artificial Sequence: Synthetic oligonucleotide
  Antisense strand to SEQ ID NO: 2428394
acuuccguggcaaucuuau

SEQ ID NO: 2428396 - RNA, 19 nt, Artificial Sequence
  Description of Artificial Sequence: Synthetic oligonucleotide
  Sense strand starting at position 2355 of SEQ ID NO: 1886817
agugaaauggcuugaucau

SEQ ID NO: 2428397 - RNA, 19 nt, Artificial Sequence
  Description of Artificial Sequence: Synthetic oligonucleotide
  Antisense strand to SEQ ID NO: 2428396
augaucaagccauuucacu

SEQ ID NO: 2428398 - RNA, 19 nt, Artificial Sequence
  Description of Artificial Sequence: Synthetic oligonucleotide
  Sense strand starting at position 2356 of SEQ ID NO: 1886817
gugaaauggcuugaucaua

SEQ ID NO: 2428399 - RNA, 19 nt, Artificial Sequence
  Description of Artificial Sequence: Synthetic oligonucleotide
  Antisense strand to SEQ ID NO: 2428398
uaugaucaagccauuucac

SEQ ID NO: 2428400 - RNA, 19 nt, Artificial Sequence
  Description of Artificial Sequence: Synthetic oligonucleotide
  Sense strand starting at position 2451 of SEQ ID NO: 1886817
cugggcuaucgugaacaga

SEQ ID NO: 2428401 - RNA, 19 nt, Artificial Sequence
  Description of Artificial Sequence: Synthetic oligonucleotide
  Antisense strand to SEQ ID NO: 2428400
ucuguucacgauagcccag

SEQ ID NO: 2428402 - RNA, 19 nt, Artificial Sequence
  Description of Artificial Sequence: Synthetic oligonucleotide
  Sense strand starting at position 2567 of SEQ ID NO: 1886817
gucuuucuugcauaagcua

SEQ ID NO: 2428403 - RNA, 19 nt, Artificial Sequence
  Description of Artificial Sequence: Synthetic oligonucleotide
  Antisense strand to SEQ ID NO: 2428402
uagcuuaugcaagaaagac

SEQ ID NO: 2428404 - RNA, 19 nt, Artificial Sequence
  Description of Artificial Sequence: Synthetic oligonucleotide
  Sense strand starting at position 2580 of SEQ ID NO: 1886817
aagcuacauccagaugagu

SEQ ID NO: 2428405 - RNA, 19 nt, Artificial Sequence
  Description of Artificial Sequence: Synthetic oligonucleotide
  Antisense strand to SEQ ID NO: 2428404
acucaucuggauguagcuu

SEQ ID NO: 2428406 - RNA, 19 nt, Artificial Sequence
  Description of Artificial Sequence: Synthetic oligonucleotide
  Sense strand starting at position 2582 of SEQ ID NO: 1886817
gcuacauccagaugaguug

SEQ ID NO: 2428407 - RNA, 19 nt, Artificial Sequence
  Description of Artificial Sequence: Synthetic oligonucleotide
  Antisense strand to SEQ ID NO: 2428406
caacucaucuggauguagc

SEQ ID NO: 2428408 - RNA, 19 nt, Artificial Sequence
  Description of Artificial Sequence: Synthetic oligonucleotide
  Sense strand starting at position 2699 of SEQ ID NO: 1886817
uuuauaguuguauggcuga

SEQ ID NO: 2428409 - RNA, 19 nt, Artificial Sequence
  Description of Artificial Sequence: Synthetic oligonucleotide
  Antisense strand to SEQ ID NO: 2428408
ucagccauacaacuauaaa

SEQ ID NO: 2428410 - RNA, 19 nt, Artificial Sequence
  Description of Artificial Sequence: Synthetic oligonucleotide
  Sense strand starting at position 2713 of SEQ ID NO: 1886817
gcugacuccuagucaucaa

SEQ ID NO: 2428411 - RNA, 19 nt, Artificial Sequence
  Description of Artificial Sequence: Synthetic oligonucleotide
  Antisense strand to SEQ ID NO: 2428410
uugaugacuaggagucagc

SEQ ID NO: 2428412 - RNA, 19 nt, Artificial Sequence
  Description of Artificial Sequence: Synthetic oligonucleotide
  Sense strand starting at position 2728 of SEQ ID NO: 1886817
ucaaauugacagugacuuu

SEQ ID NO: 2428413 - RNA, 19 nt, Artificial Sequence
  Description of Artificial Sequence: Synthetic oligonucleotide
  Antisense strand to SEQ ID NO: 2428412
aaagucacugucaauuuga

SEQ ID NO: 2428414 - RNA, 19 nt, Artificial Sequence
  Description of Artificial Sequence: Synthetic oligonucleotide
  Sense strand starting at position 2804 of SEQ ID NO: 1886817
guauguuuauacuccuauu

SEQ ID NO: 2428415 - RNA, 19 nt, Artificial Sequence
  Description of Artificial Sequence: Synthetic oligonucleotide
  Antisense strand to SEQ ID NO: 2428414
aauaggaguauaaacauac

SEQ ID NO: 2428416 - RNA, 19 nt, Artificial Sequence
  Description of Artificial Sequence: Synthetic oligonucleotide
  Sense strand starting at position 3296 of SEQ ID NO: 1886817
uccugauaaguuggugaug

SEQ ID NO: 2428417 - RNA, 19 nt, Artificial Sequence
  Description of Artificial Sequence: Synthetic oligonucleotide
  Antisense strand to SEQ ID NO: 2428416
caucaccaacuuaucagga

SEQ ID NO: 2428418 - RNA, 19 nt, Artificial Sequence
  Description of Artificial Sequence: Synthetic oligonucleotide
  Sense strand starting at position 3305 of SEQ ID NO: 1886817
guuggugauggguagguaa

SEQ ID NO: 2428419 - RNA, 19 nt, Artificial Sequence
  Description of Artificial Sequence: Synthetic oligonucleotide
  Antisense strand to SEQ ID NO: 2428418
uuaccuacccaucaccaac

SEQ ID NO: 2428420 - RNA, 19 nt, Artificial Sequence
  Description of Artificial Sequence: Synthetic oligonucleotide
  Sense strand starting at position 3307 of SEQ ID NO: 1886817
uggugauggguagguaauu

SEQ ID NO: 2428421 - RNA, 19 nt, Artificial Sequence
  Description of Artificial Sequence: Synthetic oligonucleotide
  Antisense strand to SEQ ID NO: 2428420
aauuaccuacccaucacca

SEQ ID NO: 2428422 - RNA, 19 nt, Artificial Sequence
  Description of Artificial Sequence: Synthetic oligonucleotide
  Sense strand starting at position 3394 of SEQ ID NO: 1886817
acugaagaauccugagaau

SEQ ID NO: 2428423 - RNA, 19 nt, Artificial Sequence
  Description of Artificial Sequence: Synthetic oligonucleotide
  Antisense strand to SEQ ID NO: 2428422
auucucaggauucuucagu

SEQ ID NO: 2428424 - RNA, 19 nt, Artificial Sequence
  Description of Artificial Sequence: Synthetic oligonucleotide
  Sense strand starting at position 3397 of SEQ ID NO: 1886817
gaagaauccugagaauacg

SEQ ID NO: 2428425 - RNA, 19 nt, Artificial Sequence
  Description of Artificial Sequence: Synthetic oligonucleotide
  Antisense strand to SEQ ID NO: 2428424
cguauucucaggauucuuc

SEQ ID NO: 2428426 - RNA, 19 nt, Artificial Sequence
  Description of Artificial Sequence: Synthetic oligonucleotide
  Sense strand starting at position 3406 of SEQ ID NO: 1886817
ugagaauacgagcggucau

SEQ ID NO: 2428427 - RNA, 19 nt, Artificial Sequence
  Description of Artificial Sequence: Synthetic oligonucleotide
  Antisense strand to SEQ ID NO: 2428426
augaccgcucguauucuca

SEQ ID NO: 2428428 - RNA, 19 nt, Artificial Sequence
  Description of Artificial Sequence: Synthetic oligonucleotide
  Sense strand starting at position 3663 of SEQ ID NO: 1886817
gcaauaacagcuuagacuu

SEQ ID NO: 2428429 - RNA, 19 nt, Artificial Sequence
  Description of Artificial Sequence: Synthetic oligonucleotide
  Antisense strand to SEQ ID NO: 2428428
aagucuaagcuguuauugc

SEQ ID NO: 2428430 - RNA, 19 nt, Artificial Sequence
  Description of Artificial Sequence: Synthetic oligonucleotide
  Sense strand starting at position 3897 of SEQ ID NO: 1886817
ccacuuuguugcuuaaguu

SEQ ID NO: 2428431 - RNA, 19 nt, Artificial Sequence
  Description of Artificial Sequence: Synthetic oligonucleotide
  Antisense strand to SEQ ID NO: 2428430
aacuuaagcaacaaagugg

SEQ ID NO: 2428432 - RNA, 19 nt, Artificial Sequence
  Description of Artificial Sequence: Synthetic oligonucleotide
  Sense strand starting at position 3905 of SEQ ID NO: 1886817
uugcuuaaguuagcuugaa

SEQ ID NO: 2428433 - RNA, 19 nt, Artificial Sequence
  Description of Artificial Sequence: Synthetic oligonucleotide
  Antisense strand to SEQ ID NO: 2428432
uucaagcuaacuuaagcaa

SEQ ID NO: 2428434 - RNA, 19 nt, Artificial Sequence
  Description of Artificial Sequence: Synthetic oligonucleotide
  Sense strand starting at position 3906 of SEQ ID NO: 1886817
ugcuuaaguuagcuugaag

SEQ ID NO: 2428435 - RNA, 19 nt, Artificial Sequence
  Description of Artificial Sequence: Synthetic oligonucleotide
  Antisense strand to SEQ ID NO: 2428434
cuucaagcuaacuuaagca

SEQ ID NO: 2428436 - RNA, 19 nt, Artificial Sequence
  Description of Artificial Sequence: Synthetic oligonucleotide
  Sense strand starting at position 3909 of SEQ ID NO: 1886817
uuaaguuagcuugaaguag

SEQ ID NO: 2428437 - RNA, 19 nt, Artificial Sequence
  Description of Artificial Sequence: Synthetic oligonucleotide
  Antisense strand to SEQ ID NO: 2428436
cuacuucaagcuaacuuaa

SEQ ID NO: 2428438 - RNA, 19 nt, Artificial Sequence
  Description of Artificial Sequence: Synthetic oligonucleotide
  Sense strand starting at position 3983 of SEQ ID NO: 1886817
agggaauugcagugagucu

SEQ ID NO: 2428439 - RNA, 19 nt, Artificial Sequence
  Description of Artificial Sequence: Synthetic oligonucleotide
  Antisense strand to SEQ ID NO: 2428438
agacucacugcaauucccu

SEQ ID NO: 2428440 - RNA, 19 nt, Artificial Sequence
  Description of Artificial Sequence: Synthetic oligonucleotide
  Sense strand starting at position 289 of SEQ ID NO: 1886818
ugugcccagccuuauaauu

SEQ ID NO: 2428441 - RNA, 19 nt, Artificial Sequence
  Description of Artificial Sequence: Synthetic oligonucleotide
  Antisense strand to SEQ ID NO: 2428440
aauuauaaggcugggcaca

SEQ ID NO: 2428442 - RNA, 19 nt, Artificial Sequence
  Description of Artificial Sequence: Synthetic oligonucleotide
  Sense strand starting at position 327 of SEQ ID NO: 1886818
gccucaguugcacagaaga

SEQ ID NO: 2428443 - RNA, 19 nt, Artificial Sequence
  Description of Artificial Sequence: Synthetic oligonucleotide
  Antisense strand to SEQ ID NO: 2428442
ucuucugugcaacugaggc

SEQ ID NO: 2428444 - RNA, 19 nt, Artificial Sequence
  Description of Artificial Sequence: Synthetic oligonucleotide
  Sense strand starting at position 357 of SEQ ID NO: 1886818
aucagagaggcuggguauu

SEQ ID NO: 2428445 - RNA, 19 nt, Artificial Sequence
  Description of Artificial Sequence: Synthetic oligonucleotide
  Antisense strand to SEQ ID NO: 2428444
aauacccagccucucugau

SEQ ID NO: 2428446 - RNA, 19 nt, Artificial Sequence
  Description of Artificial Sequence: Synthetic oligonucleotide
  Sense strand starting at position 454 of SEQ ID NO: 1886818
uccucucuguuguuccaua

SEQ ID NO: 2428447 - RNA, 19 nt, Artificial Sequence
  Description of Artificial Sequence: Synthetic oligonucleotide
  Antisense strand to SEQ ID NO: 2428446
uauggaacaacagagagga

SEQ ID NO: 2428448 - RNA, 19 nt, Artificial Sequence
  Description of Artificial Sequence: Synthetic oligonucleotide
  Sense strand starting at position 674 of SEQ ID NO: 1886818
ggaccucuccugcagaauc

SEQ ID NO: 2428449 - RNA, 19 nt, Artificial Sequence
  Description of Artificial Sequence: Synthetic oligonucleotide
  Antisense strand to SEQ ID NO: 2428448
gauucugcaggagaggucc

SEQ ID NO: 2428450 - RNA, 19 nt, Artificial Sequence
  Description of Artificial Sequence: Synthetic oligonucleotide
  Sense strand starting at position 1125 of SEQ ID NO: 1886818
ggguaagcguccugggaga

SEQ ID NO: 2428451 - RNA, 19 nt, Artificial Sequence
  Description of Artificial Sequence: Synthetic oligonucleotide
  Antisense strand to SEQ ID NO: 2428450
ucucccaggacgcuuaccc

SEQ ID NO: 2428452 - RNA, 19 nt, Artificial Sequence
  Description of Artificial Sequence: Synthetic oligonucleotide
  Sense strand starting at position 1127 of SEQ ID NO: 1886818
guaagcguccugggagaca

SEQ ID NO: 2428453 - RNA, 19 nt, Artificial Sequence
  Description of Artificial Sequence: Synthetic oligonucleotide
  Antisense strand to SEQ ID NO: 2428452
ugucucccaggacgcuuac

SEQ ID NO: 2428454 - RNA, 19 nt, Artificial Sequence
  Description of Artificial Sequence: Synthetic oligonucleotide
  Sense strand starting at position 1220 of SEQ ID NO: 1886818
ucuagcaagucggaacauu

SEQ ID NO: 2428455 - RNA, 19 nt, Artificial Sequence
  Description of Artificial Sequence: Synthetic oligonucleotide
  Antisense strand to SEQ ID NO: 2428454
aauguuccgacuugcuaga

SEQ ID NO: 2428456 - RNA, 19 nt, Artificial Sequence
  Description of Artificial Sequence: Synthetic oligonucleotide
  Sense strand starting at position 1520 of SEQ ID NO: 1886818
ugcccagcgucagaacauu

SEQ ID NO: 2428457 - RNA, 19 nt, Artificial Sequence
  Description of Artificial Sequence: Synthetic oligonucleotide
  Antisense strand to SEQ ID NO: 2428456
aauguucugacgcugggca

SEQ ID NO: 2428458 - RNA, 19 nt, Artificial Sequence
  Description of Artificial Sequence: Synthetic oligonucleotide
  Sense strand starting at position 1590 of SEQ ID NO: 1886818
guuugagcaucauucugag

SEQ ID NO: 2428459 - RNA, 19 nt, Artificial Sequence
  Description of Artificial Sequence: Synthetic oligonucleotide
  Antisense strand to SEQ ID NO: 2428458
cucagaaugaugcucaaac

SEQ ID NO: 2428460 - RNA, 19 nt, Artificial Sequence
  Description of Artificial Sequence: Synthetic oligonucleotide
  Sense strand starting at position 1594 of SEQ ID NO: 1886818
gagcaucauucugagacuc

SEQ ID NO: 2428461 - RNA, 19 nt, Artificial Sequence
  Description of Artificial Sequence: Synthetic oligonucleotide
  Antisense strand to SEQ ID NO: 2428460
gagucucagaaugaugcuc

SEQ ID NO: 2428462 - RNA, 19 nt, Artificial Sequence
  Description of Artificial Sequence: Synthetic oligonucleotide
  Sense strand starting at position 1596 of SEQ ID NO: 1886818
gcaucauucugagacucca

SEQ ID NO: 2428463 - RNA, 19 nt, Artificial Sequence
  Description of Artificial Sequence: Synthetic oligonucleotide
  Antisense strand to SEQ ID NO: 2428462
uggagucucagaaugaugc

SEQ ID NO: 2428464 - RNA, 19 nt, Artificial Sequence
  Description of Artificial Sequence: Synthetic oligonucleotide
  Sense strand starting at position 2035 of SEQ ID NO: 1886818
gggcuuggccagugacuuu

SEQ ID NO: 2428465 - RNA, 19 nt, Artificial Sequence
  Description of Artificial Sequence: Synthetic oligonucleotide
  Antisense strand to SEQ ID NO: 2428464
aaagucacuggccaagccc

SEQ ID NO: 2428466 - RNA, 19 nt, Artificial Sequence
  Description of Artificial Sequence: Synthetic oligonucleotide
  Sense strand starting at position 2406 of SEQ ID NO: 1886818
cggagauccagcugcagaa

SEQ ID NO: 2428467 - RNA, 19 nt, Artificial Sequence
  Description of Artificial Sequence: Synthetic oligonucleotide
  Antisense strand to SEQ ID NO: 2428466
uucugcagcuggaucuccg

SEQ ID NO: 2428468 - RNA, 19 nt, Artificial Sequence
  Description of Artificial Sequence: Synthetic oligonucleotide
  Sense strand starting at position 3101 of SEQ ID NO: 1886818
uggauuuggucccgagaac

SEQ ID NO: 2428469 - RNA, 19 nt, Artificial Sequence
  Description of Artificial Sequence: Synthetic oligonucleotide
  Antisense strand to SEQ ID NO: 2428468
guucucgggaccaaaucca

SEQ ID NO: 2428470 - RNA, 19 nt, Artificial Sequence
  Description of Artificial Sequence: Synthetic oligonucleotide
  Sense strand starting at position 3122 of SEQ ID NO: 1886818
gcgggagccguucgaaugu

SEQ ID NO: 2428471 - RNA, 19 nt, Artificial Sequence
  Description of Artificial Sequence: Synthetic oligonucleotide
  Antisense strand to SEQ ID NO: 2428470
acauucgaacggcucccgc

SEQ ID NO: 2428472 - RNA, 19 nt, Artificial Sequence
  Description of Artificial Sequence: Synthetic oligonucleotide
  Sense strand starting at position 3127 of SEQ ID NO: 1886818
agccguucgaauguguuaa

SEQ ID NO: 2428473 - RNA, 19 nt, Artificial Sequence
  Description of Artificial Sequence: Synthetic oligonucleotide
  Antisense strand to SEQ ID NO: 2428472
uuaacacauucgaacggcu

SEQ ID NO: 2428474 - RNA, 19 nt, Artificial Sequence
  Description of Artificial Sequence: Synthetic oligonucleotide
  Sense strand starting at position 3128 of SEQ ID NO: 1886818
gccguucgaauguguuaag

SEQ ID NO: 2428475 - RNA, 19 nt, Artificial Sequence
  Description of Artificial Sequence: Synthetic oligonucleotide
  Antisense strand to SEQ ID NO: 2428474
cuuaacacauucgaacggc

SEQ ID NO: 2428476 - RNA, 19 nt, Artificial Sequence
  Description of Artificial Sequence: Synthetic oligonucleotide
  Sense strand starting at position 3131 of SEQ ID NO: 1886818
guucgaauguguuaagcag

SEQ ID NO: 2428477 - RNA, 19 nt, Artificial Sequence
  Description of Artificial Sequence: Synthetic oligonucleotide
  Antisense strand to SEQ ID NO: 2428476
cugcuuaacacauucgaac

SEQ ID NO: 2428478 - RNA, 19 nt, Artificial Sequence
  Description of Artificial Sequence: Synthetic oligonucleotide
  Sense strand starting at position 3151 of SEQ ID NO: 1886818
gggagugaauuagggagaa

SEQ ID NO: 2428479 - RNA, 19 nt, Artificial Sequence
  Description of Artificial Sequence: Synthetic oligonucleotide
  Antisense strand to SEQ ID NO: 2428478
uucucccuaauucacuccc

SEQ ID NO: 2428480 - RNA, 19 nt, Artificial Sequence
  Description of Artificial Sequence: Synthetic oligonucleotide
  Sense strand starting at position 3165 of SEQ ID NO: 1886818
gagaaaucauuccggcuuc

SEQ ID NO: 2428481 - RNA, 19 nt, Artificial Sequence
  Description of Artificial Sequence: Synthetic oligonucleotide
  Antisense strand to SEQ ID NO: 2428480
gaagccggaaugauuucuc

SEQ ID NO: 2428482 - RNA, 19 nt, Artificial Sequence
  Description of Artificial Sequence: Synthetic oligonucleotide
  Sense strand starting at position 3226 of SEQ ID NO: 1886818
ggagguuugaaauggcuuu

SEQ ID NO: 2428483 - RNA, 19 nt, Artificial Sequence
  Description of Artificial Sequence: Synthetic oligonucleotide
  Antisense strand to SEQ ID NO: 2428482
aaagccauuucaaaccucc

SEQ ID NO: 2428484 - RNA, 19 nt, Artificial Sequence
  Description of Artificial Sequence: Synthetic oligonucleotide
  Sense strand starting at position 3288 of SEQ ID NO: 1886818
gcaguuuccaggcaccaga

SEQ ID NO: 2428485 - RNA, 19 nt, Artificial Sequence
  Description of Artificial Sequence: Synthetic oligonucleotide
  Antisense strand to SEQ ID NO: 2428484
ucuggugccuggaaacugc

SEQ ID NO: 2428486 - RNA, 19 nt, Artificial Sequence
  Description of Artificial Sequence: Synthetic oligonucleotide
  Sense strand starting at position 3299 of SEQ ID NO: 1886818
gcaccagagcuguguggaa

SEQ ID NO: 2428487 - RNA, 19 nt, Artificial Sequence
  Description of Artificial Sequence: Synthetic oligonucleotide
  Antisense strand to SEQ ID NO: 2428486
uuccacacagcucuggugc

SEQ ID NO: 2428488 - RNA, 19 nt, Artificial Sequence
  Description of Artificial Sequence: Synthetic oligonucleotide
  Sense strand starting at position 3340 of SEQ ID NO: 1886818
ccuuaauuccaaggagauc

SEQ ID NO: 2428489 - RNA, 19 nt, Artificial Sequence
  Description of Artificial Sequence: Synthetic oligonucleotide
  Antisense strand to SEQ ID NO: 2428488
gaucuccuuggaauuaagg

SEQ ID NO: 2428490 - RNA, 19 nt, Artificial Sequence
  Description of Artificial Sequence: Synthetic oligonucleotide
  Sense strand starting at position 3355 of SEQ ID NO: 1886818
gaucgaguagcggaaacau

SEQ ID NO: 2428491 - RNA, 19 nt, Artificial Sequence
  Description of Artificial Sequence: Synthetic oligonucleotide
  Antisense strand to SEQ ID NO: 2428490
auguuuccgcuacucgauc

SEQ ID NO: 2428492 - RNA, 19 nt, Artificial Sequence
  Description of Artificial Sequence: Synthetic oligonucleotide
  Sense strand starting at position 3379 of SEQ ID NO: 1886818
gagcguuuacuguguguca

SEQ ID NO: 2428493 - RNA, 19 nt, Artificial Sequence
  Description of Artificial Sequence: Synthetic oligonucleotide
  Antisense strand to SEQ ID NO: 2428492
ugacacacaguaaacgcuc

SEQ ID NO: 2428494 - RNA, 19 nt, Artificial Sequence
  Description of Artificial Sequence: Synthetic oligonucleotide
  Sense strand starting at position 3642 of SEQ ID NO: 1886818
gggagaugcucagggucua

SEQ ID NO: 2428495 - RNA, 19 nt, Artificial Sequence
  Description of Artificial Sequence: Synthetic oligonucleotide
  Antisense strand to SEQ ID NO: 2428494
uagacccugagcaucuccc

SEQ ID NO: 2428496 - RNA, 19 nt, Artificial Sequence
  Description of Artificial Sequence: Synthetic oligonucleotide
  Sense strand starting at position 3672 of SEQ ID NO: 1886818
gccggauucuuguuuagag

SEQ ID NO: 2428497 - RNA, 19 nt, Artificial Sequence
  Description of Artificial Sequence: Synthetic oligonucleotide
  Antisense strand to SEQ ID NO: 2428496
cucuaaacaagaauccggc

SEQ ID NO: 2428498 - RNA, 19 nt, Artificial Sequence
  Description of Artificial Sequence: Synthetic oligonucleotide
  Sense strand starting at position 3790 of SEQ ID NO: 1886818
uuugacguucccugagaca

SEQ ID NO: 2428499 - RNA, 19 nt, Artificial Sequence
  Description of Artificial Sequence: Synthetic oligonucleotide
  Antisense strand to SEQ ID NO: 2428498
ugucucagggaacgucaaa

SEQ ID NO: 2428500 - RNA, 19 nt, Artificial Sequence
  Description of Artificial Sequence: Synthetic oligonucleotide
  Sense strand starting at position 3840 of SEQ ID NO: 1886818
uagagcagugaugggaauu

SEQ ID NO: 2428501 - RNA, 19 nt, Artificial Sequence
  Description of Artificial Sequence: Synthetic oligonucleotide
  Antisense strand to SEQ ID NO: 2428500
aauucccaucacugcucua

SEQ ID NO: 2428502 - RNA, 19 nt, Artificial Sequence
  Description of Artificial Sequence: Synthetic oligonucleotide
  Sense strand starting at position 3858 of SEQ ID NO: 1886818
uugggcuuucgcggaagaa

SEQ ID NO: 2428503 - RNA, 19 nt, Artificial Sequence
  Description of Artificial Sequence: Synthetic oligonucleotide
  Antisense strand to SEQ ID NO: 2428502
uucuuccgcgaaagcccaa

SEQ ID NO: 2428504 - RNA, 19 nt, Artificial Sequence
  Description of Artificial Sequence: Synthetic oligonucleotide
  Sense strand starting at position 3859 of SEQ ID NO: 1886818
ugggcuuucgcggaagaaa

SEQ ID NO: 2428505 - RNA, 19 nt, Artificial Sequence
  Description of Artificial Sequence: Synthetic oligonucleotide
  Antisense strand to SEQ ID NO: 2428504
uuucuuccgcgaaagccca

SEQ ID NO: 2428506 - RNA, 19 nt, Artificial Sequence
  Description of Artificial Sequence: Synthetic oligonucleotide
  Sense strand starting at position 3894 of SEQ ID NO: 1886818
gguagaacacccgguagau

SEQ ID NO: 2428507 - RNA, 19 nt, Artificial Sequence
  Description of Artificial Sequence: Synthetic oligonucleotide
  Antisense strand to SEQ ID NO: 2428506
aucuaccggguguucuacc

SEQ ID NO: 2428508 - RNA, 19 nt, Artificial Sequence
  Description of Artificial Sequence: Synthetic oligonucleotide
  Sense strand starting at position 3930 of SEQ ID NO: 1886818
gggaggugggucgggaaau

SEQ ID NO: 2428509 - RNA, 19 nt, Artificial Sequence
  Description of Artificial Sequence: Synthetic oligonucleotide
  Antisense strand to SEQ ID NO: 2428508
auuucccgacccaccuccc

SEQ ID NO: 2428510 - RNA, 19 nt, Artificial Sequence
  Description of Artificial Sequence: Synthetic oligonucleotide
  Sense strand starting at position 3940 of SEQ ID NO: 1886818
ucgggaaaucgagagcguu

SEQ ID NO: 2428511 - RNA, 19 nt, Artificial Sequence
  Description of Artificial Sequence: Synthetic oligonucleotide
  Antisense strand to SEQ ID NO: 2428510
aacgcucucgauuucccga

SEQ ID NO: 2428512 - RNA, 19 nt, Artificial Sequence
  Description of Artificial Sequence: Synthetic oligonucleotide
  Sense strand starting at position 3954 of SEQ ID NO: 1886818
gcguucuccugucuugacu

SEQ ID NO: 2428513 - RNA, 19 nt, Artificial Sequence
  Description of Artificial Sequence: Synthetic oligonucleotide
  Antisense strand to SEQ ID NO: 2428512
agucaagacaggagaacgc

SEQ ID NO: 2428514 - RNA, 19 nt, Artificial Sequence
  Description of Artificial Sequence: Synthetic oligonucleotide
  Sense strand starting at position 28 of SEQ ID NO: 1886819
ugaaaugacugacugcuaa

SEQ ID NO: 2428515 - RNA, 19 nt, Artificial Sequence
  Description of Artificial Sequence: Synthetic oligonucleotide
  Antisense strand to SEQ ID NO: 2428514
uuagcagucagucauuuca

SEQ ID NO: 2428516 - RNA, 19 nt, Artificial Sequence
  Description of Artificial Sequence: Synthetic oligonucleotide
  Sense strand starting at position 40 of SEQ ID NO: 1886819
cugcuaaugcuuuagagug

SEQ ID NO: 2428517 - RNA, 19 nt, Artificial Sequence
  Description of Artificial Sequence: Synthetic oligonucleotide
  Antisense strand to SEQ ID NO: 2428516
cacucuaaagcauuagcag

SEQ ID NO: 2428518 - RNA, 19 nt, Artificial Sequence
  Description of Artificial Sequence: Synthetic oligonucleotide
  Sense strand starting at position 46 of SEQ ID NO: 1886819
augcuuuagaguggucaca

SEQ ID NO: 2428519 - RNA, 19 nt, Artificial Sequence
  Description of Artificial Sequence: Synthetic oligonucleotide
  Antisense strand to SEQ ID NO: 2428518
ugugaccacucuaaagcau

SEQ ID NO: 2428520 - RNA, 19 nt, Artificial Sequence
  Description of Artificial Sequence: Synthetic oligonucleotide
  Sense strand starting at position 48 of SEQ ID NO: 1886819
gcuuuagaguggucacacu

SEQ ID NO: 2428521 - RNA, 19 nt, Artificial Sequence
  Description of Artificial Sequence: Synthetic oligonucleotide
  Antisense strand to SEQ ID NO: 2428520
agugugaccacucuaaagc

SEQ ID NO: 2428522 - RNA, 19 nt, Artificial Sequence
  Description of Artificial Sequence: Synthetic oligonucleotide
  Sense strand starting at position 67 of SEQ ID NO: 1886819
uagagugguuuccucaugu

SEQ ID NO: 2428523 - RNA, 19 nt, Artificial Sequence
  Description of Artificial Sequence: Synthetic oligonucleotide
  Antisense strand to SEQ ID NO: 2428522
acaugaggaaaccacucua

SEQ ID NO: 2428524 - RNA, 19 nt, Artificial Sequence
  Description of Artificial Sequence: Synthetic oligonucleotide
  Sense strand starting at position 482 of SEQ ID NO: 1886819
gaauaauauuggccuggca

SEQ ID NO: 2428525 - RNA, 19 nt, Artificial Sequence
  Description of Artificial Sequence: Synthetic oligonucleotide
  Antisense strand to SEQ ID NO: 2428524
ugccaggccaauauuauuc

SEQ ID NO: 2428526 - RNA, 19 nt, Artificial Sequence
  Description of Artificial Sequence: Synthetic oligonucleotide
  Sense strand starting at position 484 of SEQ ID NO: 1886819
auaauauuggccuggcaug

SEQ ID NO: 2428527 - RNA, 19 nt, Artificial Sequence
  Description of Artificial Sequence: Synthetic oligonucleotide
  Antisense strand to SEQ ID NO: 2428526
caugccaggccaauauuau

SEQ ID NO: 2428528 - RNA, 19 nt, Artificial Sequence
  Description of Artificial Sequence: Synthetic oligonucleotide
  Sense strand starting at position 786 of SEQ ID NO: 1886819
ucauuagugccacaugaaa

SEQ ID NO: 2428529 - RNA, 19 nt, Artificial Sequence
  Description of Artificial Sequence: Synthetic oligonucleotide
  Antisense strand to SEQ ID NO: 2428528
uuucauguggcacuaauga

SEQ ID NO: 2428530 - RNA, 19 nt, Artificial Sequence
  Description of Artificial Sequence: Synthetic oligonucleotide
  Sense strand starting at position 995 of SEQ ID NO: 1886819
cguguuccuauguagaguu

SEQ ID NO: 2428531 - RNA, 19 nt, Artificial Sequence
  Description of Artificial Sequence: Synthetic oligonucleotide
  Antisense strand to SEQ ID NO: 2428530
aacucuacauaggaacacg

SEQ ID NO: 2428532 - RNA, 19 nt, Artificial Sequence
  Description of Artificial Sequence: Synthetic oligonucleotide
  Sense strand starting at position 1095 of SEQ ID NO: 1886819
ucuggaucaucucugucau

SEQ ID NO: 2428533 - RNA, 19 nt, Artificial Sequence
  Description of Artificial Sequence: Synthetic oligonucleotide
  Antisense strand to SEQ ID NO: 2428532
augacagagaugauccaga

SEQ ID NO: 2428534 - RNA, 19 nt, Artificial Sequence
  Description of Artificial Sequence: Synthetic oligonucleotide
  Sense strand starting at position 1096 of SEQ ID NO: 1886819
cuggaucaucucugucaua

SEQ ID NO: 2428535 - RNA, 19 nt, Artificial Sequence
  Description of Artificial Sequence: Synthetic oligonucleotide
  Antisense strand to SEQ ID NO: 2428534
uaugacagagaugauccag

SEQ ID NO: 2428536 - RNA, 19 nt, Artificial Sequence
  Description of Artificial Sequence: Synthetic oligonucleotide
  Sense strand starting at position 1097 of SEQ ID NO: 1886819
uggaucaucucugucauau

SEQ ID NO: 2428537 - RNA, 19 nt, Artificial Sequence
  Description of Artificial Sequence: Synthetic oligonucleotide
  Antisense strand to SEQ ID NO: 2428536
auaugacagagaugaucca

SEQ ID NO: 2428538 - RNA, 19 nt, Artificial Sequence
  Description of Artificial Sequence: Synthetic oligonucleotide
  Sense strand starting at position 1137 of SEQ ID NO: 1886819
ccaguuuaaugauagacaa

SEQ ID NO: 2428539 - RNA, 19 nt, Artificial Sequence
  Description of Artificial Sequence: Synthetic oligonucleotide
  Antisense strand to SEQ ID NO: 2428538
uugucuaucauuaaacugg

SEQ ID NO: 2428540 - RNA, 19 nt, Artificial Sequence
  Description of Artificial Sequence: Synthetic oligonucleotide
  Sense strand starting at position 1148 of SEQ ID NO: 1886819
auagacaacugaugggaaa

SEQ ID NO: 2428541 - RNA, 19 nt, Artificial Sequence
  Description of Artificial Sequence: Synthetic oligonucleotide
  Antisense strand to SEQ ID NO: 2428540
uuucccaucaguugucuau

SEQ ID NO: 2428542 - RNA, 19 nt, Artificial Sequence
  Description of Artificial Sequence: Synthetic oligonucleotide
  Sense strand starting at position 1171 of SEQ ID NO: 1886819
aagcuaaugucuguucuga

SEQ ID NO: 2428543 - RNA, 19 nt, Artificial Sequence
  Description of Artificial Sequence: Synthetic oligonucleotide
  Antisense strand to SEQ ID NO: 2428542
ucagaacagacauuagcuu

SEQ ID NO: 2428544 - RNA, 19 nt, Artificial Sequence
  Description of Artificial Sequence: Synthetic oligonucleotide
  Sense strand starting at position 1179 of SEQ ID NO: 1886819
gucuguucugauugaaccu

SEQ ID NO: 2428545 - RNA, 19 nt, Artificial Sequence
  Description of Artificial Sequence: Synthetic oligonucleotide
  Antisense strand to SEQ ID NO: 2428544
agguucaaucagaacagac

SEQ ID NO: 2428546 - RNA, 19 nt, Artificial Sequence
  Description of Artificial Sequence: Synthetic oligonucleotide
  Sense strand starting at position 1236 of SEQ ID NO: 1886819
aucaaaugucucuguacuc

SEQ ID NO: 2428547 - RNA, 19 nt, Artificial Sequence
  Description of Artificial Sequence: Synthetic oligonucleotide
  Antisense strand to SEQ ID NO: 2428546
gaguacagagacauuugau

SEQ ID NO: 2428548 - RNA, 19 nt, Artificial Sequence
  Description of Artificial Sequence: Synthetic oligonucleotide
  Sense strand starting at position 1237 of SEQ ID NO: 1886819
ucaaaugucucuguacuca

SEQ ID NO: 2428549 - RNA, 19 nt, Artificial Sequence
  Description of Artificial Sequence: Synthetic oligonucleotide
  Antisense strand to SEQ ID NO: 2428548
ugaguacagagacauuuga

SEQ ID NO: 2428550 - RNA, 19 nt, Artificial Sequence
  Description of Artificial Sequence: Synthetic oligonucleotide
  Sense strand starting at position 1302 of SEQ ID NO: 1886819
gcugaaaucugacuucuac

SEQ ID NO: 2428551 - RNA, 19 nt, Artificial Sequence
  Description of Artificial Sequence: Synthetic oligonucleotide
  Antisense strand to SEQ ID NO: 2428550
guagaagucagauuucagc

SEQ ID NO: 2428552 - RNA, 19 nt, Artificial Sequence
  Description of Artificial Sequence: Synthetic oligonucleotide
  Sense strand starting at position 1342 of SEQ ID NO: 1886819
uguaccuuccaguggucua

SEQ ID NO: 2428553 - RNA, 19 nt, Artificial Sequence
  Description of Artificial Sequence: Synthetic oligonucleotide
  Antisense strand to SEQ ID NO: 2428552
uagaccacuggaagguaca

SEQ ID NO: 2428554 - RNA, 19 nt, Artificial Sequence
  Description of Artificial Sequence: Synthetic oligonucleotide
  Sense strand starting at position 1354 of SEQ ID NO: 1886819
uggucuaccuaccuugauu

SEQ ID NO: 2428555 - RNA, 19 nt, Artificial Sequence
  Description of Artificial Sequence: Synthetic oligonucleotide
  Antisense strand to SEQ ID NO: 2428554
aaucaagguagguagacca

SEQ ID NO: 2428556 - RNA, 19 nt, Artificial Sequence
  Description of Artificial Sequence: Synthetic oligonucleotide
  Sense strand starting at position 1363 of SEQ ID NO: 1886819
uaccuugauuaggaaggaa

SEQ ID NO: 2428557 - RNA, 19 nt, Artificial Sequence
  Description of Artificial Sequence: Synthetic oligonucleotide
  Antisense strand to SEQ ID NO: 2428556
uuccuuccuaaucaaggua

SEQ ID NO: 2428558 - RNA, 19 nt, Artificial Sequence
  Description of Artificial Sequence: Synthetic oligonucleotide
  Sense strand starting at position 1470 of SEQ ID NO: 1886819
uaacgaaggcagugagaaa

SEQ ID NO: 2428559 - RNA, 19 nt, Artificial Sequence
  Description of Artificial Sequence: Synthetic oligonucleotide
  Antisense strand to SEQ ID NO: 2428558
uuucucacugccuucguua

SEQ ID NO: 2428560 - RNA, 19 nt, Artificial Sequence
  Description of Artificial Sequence: Synthetic oligonucleotide
  Sense strand starting at position 1634 of SEQ ID NO: 1886819
ggagaaguuggccacccua

SEQ ID NO: 2428561 - RNA, 19 nt, Artificial Sequence
  Description of Artificial Sequence: Synthetic oligonucleotide
  Antisense strand to SEQ ID NO: 2428560
uaggguggccaacuucucc

SEQ ID NO: 2428562 - RNA, 19 nt, Artificial Sequence
  Description of Artificial Sequence: Synthetic oligonucleotide
  Sense strand starting at position 2595 of SEQ ID NO: 1886819
cagcauuagggcugagcua

SEQ ID NO: 2428563 - RNA, 19 nt, Artificial Sequence
  Description of Artificial Sequence: Synthetic oligonucleotide
  Antisense strand to SEQ ID NO: 2428562
uagcucagcccuaaugcug

SEQ ID NO: 2428564 - RNA, 19 nt, Artificial Sequence
  Description of Artificial Sequence: Synthetic oligonucleotide
  Sense strand starting at position 3090 of SEQ ID NO: 1886819
cuuguuggcucuccuuaga

SEQ ID NO: 2428565 - RNA, 19 nt, Artificial Sequence
  Description of Artificial Sequence: Synthetic oligonucleotide
  Antisense strand to SEQ ID NO: 2428564
ucuaaggagagccaacaag

SEQ ID NO: 2428566 - RNA, 19 nt, Artificial Sequence
  Description of Artificial Sequence: Synthetic oligonucleotide
  Sense strand starting at position 3093 of SEQ ID NO: 1886819
guuggcucuccuuagagga

SEQ ID NO: 2428567 - RNA, 19 nt, Artificial Sequence
  Description of Artificial Sequence: Synthetic oligonucleotide
  Antisense strand to SEQ ID NO: 2428566
uccucuaaggagagccaac

SEQ ID NO: 2428568 - RNA, 19 nt, Artificial Sequence
  Description of Artificial Sequence: Synthetic oligonucleotide
  Sense strand starting at position 3109 of SEQ ID NO: 1886819
ggacauuaacucugugugu

SEQ ID NO: 2428569 - RNA, 19 nt, Artificial Sequence
  Description of Artificial Sequence: Synthetic oligonucleotide
  Antisense strand to SEQ ID NO: 2428568
acacacagaguuaaugucc

SEQ ID NO: 2428570 - RNA, 19 nt, Artificial Sequence
  Description of Artificial Sequence: Synthetic oligonucleotide
  Sense strand starting at position 3110 of SEQ ID NO: 1886819
gacauuaacucuguguguu

SEQ ID NO: 2428571 - RNA, 19 nt, Artificial Sequence
  Description of Artificial Sequence: Synthetic oligonucleotide
  Antisense strand to SEQ ID NO: 2428570
aacacacagaguuaauguc

SEQ ID NO: 2428572 - RNA, 19 nt, Artificial Sequence
  Description of Artificial Sequence: Synthetic oligonucleotide
  Sense strand starting at position 3113 of SEQ ID NO: 1886819
auuaacucuguguguuuga

SEQ ID NO: 2428573 - RNA, 19 nt, Artificial Sequence
  Description of Artificial Sequence: Synthetic oligonucleotide
  Antisense strand to SEQ ID NO: 2428572
ucaaacacacagaguuaau

SEQ ID NO: 2428574 - RNA, 19 nt, Artificial Sequence
  Description of Artificial Sequence: Synthetic oligonucleotide
  Sense strand starting at position 3114 of SEQ ID NO: 1886819
uuaacucuguguguuugaa

SEQ ID NO: 2428575 - RNA, 19 nt, Artificial Sequence
  Description of Artificial Sequence: Synthetic oligonucleotide
  Antisense strand to SEQ ID NO: 2428574
uucaaacacacagaguuaa

SEQ ID NO: 2428576 - RNA, 19 nt, Artificial Sequence
  Description of Artificial Sequence: Synthetic oligonucleotide
  Sense strand starting at position 3272 of SEQ ID NO: 1886819
ccaugacuguucucaaagu

SEQ ID NO: 2428577 - RNA, 19 nt, Artificial Sequence
  Description of Artificial Sequence: Synthetic oligonucleotide
  Antisense strand to SEQ ID NO: 2428576
acuuugagaacagucaugg

SEQ ID NO: 2428578 - RNA, 19 nt, Artificial Sequence
  Description of Artificial Sequence: Synthetic oligonucleotide
  Sense strand starting at position 3280 of SEQ ID NO: 1886819
guucucaaaguuugaaguu

SEQ ID NO: 2428579 - RNA, 19 nt, Artificial Sequence
  Description of Artificial Sequence: Synthetic oligonucleotide
  Antisense strand to SEQ ID NO: 2428578
aacuucaaacuuugagaac

SEQ ID NO: 2428580 - RNA, 19 nt, Artificial Sequence
  Description of Artificial Sequence: Synthetic oligonucleotide
  Sense strand starting at position 3287 of SEQ ID NO: 1886819
aaguuugaaguugagcaua

SEQ ID NO: 2428581 - RNA, 19 nt, Artificial Sequence
  Description of Artificial Sequence: Synthetic oligonucleotide
  Antisense strand to SEQ ID NO: 2428580
uaugcucaacuucaaacuu

SEQ ID NO: 2428582 - RNA, 19 nt, Artificial Sequence
  Description of Artificial Sequence: Synthetic oligonucleotide
  Sense strand starting at position 3333 of SEQ ID NO: 1886819
ugagaagucguaggcuuuc

SEQ ID NO: 2428583 - RNA, 19 nt, Artificial Sequence
  Description of Artificial Sequence: Synthetic oligonucleotide
  Antisense strand to SEQ ID NO: 2428582
gaaagccuacgacuucuca

SEQ ID NO: 2428584 - RNA, 19 nt, Artificial Sequence
  Description of Artificial Sequence: Synthetic oligonucleotide
  Sense strand starting at position 3415 of SEQ ID NO: 1886819
gaagguggucugugcuuga

SEQ ID NO: 2428585 - RNA, 19 nt, Artificial Sequence
  Description of Artificial Sequence: Synthetic oligonucleotide
  Antisense strand to SEQ ID NO: 2428584
ucaagcacagaccaccuuc

SEQ ID NO: 2428586 - RNA, 19 nt, Artificial Sequence
  Description of Artificial Sequence: Synthetic oligonucleotide
  Sense strand starting at position 3536 of SEQ ID NO: 1886819
uuguuauuauuugacacga

SEQ ID NO: 2428587 - RNA, 19 nt, Artificial Sequence
  Description of Artificial Sequence: Synthetic oligonucleotide
  Antisense strand to SEQ ID NO: 2428586
ucgugucaaauaauaacaa

SEQ ID NO: 2428588 - RNA, 19 nt, Artificial Sequence
  Description of Artificial Sequence: Synthetic oligonucleotide
  Sense strand starting at position 3538 of SEQ ID NO: 1886819
guuauuauuugacacgaag

SEQ ID NO: 2428589 - RNA, 19 nt, Artificial Sequence
  Description of Artificial Sequence: Synthetic oligonucleotide
  Antisense strand to SEQ ID NO: 2428588
cuucgugucaaauaauaac

SEQ ID NO: 2428590 - RNA, 19 nt, Artificial Sequence
  Description of Artificial Sequence: Synthetic oligonucleotide
  Sense strand starting at position 3855 of SEQ ID NO: 1886819
gggaucaaaugaguuccuu

SEQ ID NO: 2428591 - RNA, 19 nt, Artificial Sequence
  Description of Artificial Sequence: Synthetic oligonucleotide
  Antisense strand to SEQ ID NO: 2428590
aaggaacucauuugauccc

SEQ ID NO: 2428592 - RNA, 19 nt, Artificial Sequence
  Description of Artificial Sequence: Synthetic oligonucleotide
  Sense strand starting at position 3859 of SEQ ID NO: 1886819
ucaaaugaguuccuuugga

SEQ ID NO: 2428593 - RNA, 19 nt, Artificial Sequence
  Description of Artificial Sequence: Synthetic oligonucleotide
  Antisense strand to SEQ ID NO: 2428592
uccaaaggaacucauuuga

SEQ ID NO: 2428594 - RNA, 19 nt, Artificial Sequence
  Description of Artificial Sequence: Synthetic oligonucleotide
  Sense strand starting at position 158 of SEQ ID NO: 1886820
ggugacauagugugaccua

SEQ ID NO: 2428595 - RNA, 19 nt, Artificial Sequence
  Description of Artificial Sequence: Synthetic oligonucleotide
  Antisense strand to SEQ ID NO: 2428594
uaggucacacuaugucacc

SEQ ID NO: 2428596 - RNA, 19 nt, Artificial Sequence
  Description of Artificial Sequence: Synthetic oligonucleotide
  Sense strand starting at position 276 of SEQ ID NO: 1886820
cuaguauuacugcgaggac

SEQ ID NO: 2428597 - RNA, 19 nt, Artificial Sequence
  Description of Artificial Sequence: Synthetic oligonucleotide
  Antisense strand to SEQ ID NO: 2428596
guccucgcaguaauacuag

SEQ ID NO: 2428598 - RNA, 19 nt, Artificial Sequence
  Description of Artificial Sequence: Synthetic oligonucleotide
  Sense strand starting at position 879 of SEQ ID NO: 1886820
ucacgagguuaucugaagu

SEQ ID NO: 2428599 - RNA, 19 nt, Artificial Sequence
  Description of Artificial Sequence: Synthetic oligonucleotide
  Antisense strand to SEQ ID NO: 2428598
acuucagauaaccucguga

SEQ ID NO: 2428600 - RNA, 19 nt, Artificial Sequence
  Description of Artificial Sequence: Synthetic oligonucleotide
  Sense strand starting at position 1098 of SEQ ID NO: 1886820
caacaaugucccugcacga

SEQ ID NO: 2428601 - RNA, 19 nt, Artificial Sequence
  Description of Artificial Sequence: Synthetic oligonucleotide
  Antisense strand to SEQ ID NO: 2428600
ucgugcagggacauuguug

SEQ ID NO: 2428602 - RNA, 19 nt, Artificial Sequence
  Description of Artificial Sequence: Synthetic oligonucleotide
  Sense strand starting at position 1114 of SEQ ID NO: 1886820
cgauuccugacagguaacu

SEQ ID NO: 2428603 - RNA, 19 nt, Artificial Sequence
  Description of Artificial Sequence: Synthetic oligonucleotide
  Antisense strand to SEQ ID NO: 2428602
aguuaccugucaggaaucg

SEQ ID NO: 2428604 - RNA, 19 nt, Artificial Sequence
  Description of Artificial Sequence: Synthetic oligonucleotide
  Sense strand starting at position 1166 of SEQ ID NO: 1886820
acaauaaggcuuugacaau

SEQ ID NO: 2428605 - RNA, 19 nt, Artificial Sequence
  Description of Artificial Sequence: Synthetic oligonucleotide
  Antisense strand to SEQ ID NO: 2428604
auugucaaagccuuauugu

SEQ ID NO: 2428606 - RNA, 19 nt, Artificial Sequence
  Description of Artificial Sequence: Synthetic oligonucleotide
  Sense strand starting at position 1591 of SEQ ID NO: 1886820
ucgauuuccuaaggagaag

SEQ ID NO: 2428607 - RNA, 19 nt, Artificial Sequence
  Description of Artificial Sequence: Synthetic oligonucleotide
  Antisense strand to SEQ ID NO: 2428606
cuucuccuuaggaaaucga

SEQ ID NO: 2428608 - RNA, 19 nt, Artificial Sequence
  Description of Artificial Sequence: Synthetic oligonucleotide
  Sense strand starting at position 1754 of SEQ ID NO: 1886820
cgggagggacguugucaua

SEQ ID NO: 2428609 - RNA, 19 nt, Artificial Sequence
  Description of Artificial Sequence: Synthetic oligonucleotide
  Antisense strand to SEQ ID NO: 2428608
uaugacaacgucccucccg

SEQ ID NO: 2428610 - RNA, 19 nt, Artificial Sequence
  Description of Artificial Sequence: Synthetic oligonucleotide
  Sense strand starting at position 1980 of SEQ ID NO: 1886820
cugcaaccucgcgagaagu

SEQ ID NO: 2428611 - RNA, 19 nt, Artificial Sequence
  Description of Artificial Sequence: Synthetic oligonucleotide
  Antisense strand to SEQ ID NO: 2428610
acuucucgcgagguugcag

SEQ ID NO: 2428612 - RNA, 19 nt, Artificial Sequence
  Description of Artificial Sequence: Synthetic oligonucleotide
  Sense strand starting at position 2172 of SEQ ID NO: 1886820
gcucgagauuuauuaagca

SEQ ID NO: 2428613 - RNA, 19 nt, Artificial Sequence
  Description of Artificial Sequence: Synthetic oligonucleotide
  Antisense strand to SEQ ID NO: 2428612
ugcuuaauaaaucucgagc

SEQ ID NO: 2428614 - RNA, 19 nt, Artificial Sequence
  Description of Artificial Sequence: Synthetic oligonucleotide
  Sense strand starting at position 2180 of SEQ ID NO: 1886820
uuuauuaagcacugacuga

SEQ ID NO: 2428615 - RNA, 19 nt, Artificial Sequence
  Description of Artificial Sequence: Synthetic oligonucleotide
  Antisense strand to SEQ ID NO: 2428614
ucagucagugcuuaauaaa

SEQ ID NO: 2428616 - RNA, 19 nt, Artificial Sequence
  Description of Artificial Sequence: Synthetic oligonucleotide
  Sense strand starting at position 2191 of SEQ ID NO: 1886820
cugacugagcccugucaua

SEQ ID NO: 2428617 - RNA, 19 nt, Artificial Sequence
  Description of Artificial Sequence: Synthetic oligonucleotide
  Antisense strand to SEQ ID NO: 2428616
uaugacagggcucagucag

SEQ ID NO: 2428618 - RNA, 19 nt, Artificial Sequence
  Description of Artificial Sequence: Synthetic oligonucleotide
  Sense strand starting at position 2253 of SEQ ID NO: 1886820
ugcagacuacucuggagaa

SEQ ID NO: 2428619 - RNA, 19 nt, Artificial Sequence
  Description of Artificial Sequence: Synthetic oligonucleotide
  Antisense strand to SEQ ID NO: 2428618
uucuccagaguagucugca

SEQ ID NO: 2428620 - RNA, 19 nt, Artificial Sequence
  Description of Artificial Sequence: Synthetic oligonucleotide
  Sense strand starting at position 2263 of SEQ ID NO: 1886820
ucuggagaagcuuggcaau

SEQ ID NO: 2428621 - RNA, 19 nt, Artificial Sequence
  Description of Artificial Sequence: Synthetic oligonucleotide
  Antisense strand to SEQ ID NO: 2428620
auugccaagcuucuccaga

SEQ ID NO: 2428622 - RNA, 19 nt, Artificial Sequence
  Description of Artificial Sequence: Synthetic oligonucleotide
  Sense strand starting at position 2265 of SEQ ID NO: 1886820
uggagaagcuuggcaauga

SEQ ID NO: 2428623 - RNA, 19 nt, Artificial Sequence
  Description of Artificial Sequence: Synthetic oligonucleotide
  Antisense strand to SEQ ID NO: 2428622
ucauugccaagcuucucca

SEQ ID NO: 2428624 - RNA, 19 nt, Artificial Sequence
  Description of Artificial Sequence: Synthetic oligonucleotide
  Sense strand starting at position 2308 of SEQ ID NO: 1886820
gguccuuagguuuguaaag

SEQ ID NO: 2428625 - RNA, 19 nt, Artificial Sequence
  Description of Artificial Sequence: Synthetic oligonucleotide
  Antisense strand to SEQ ID NO: 2428624
cuuuacaaaccuaaggacc

SEQ ID NO: 2428626 - RNA, 19 nt, Artificial Sequence
  Description of Artificial Sequence: Synthetic oligonucleotide
  Sense strand starting at position 2309 of SEQ ID NO: 1886820
guccuuagguuuguaaaga

SEQ ID NO: 2428627 - RNA, 19 nt, Artificial Sequence
  Description of Artificial Sequence: Synthetic oligonucleotide
  Antisense strand to SEQ ID NO: 2428626
ucuuuacaaaccuaaggac

SEQ ID NO: 2428628 - RNA, 19 nt, Artificial Sequence
  Description of Artificial Sequence: Synthetic oligonucleotide
  Sense strand starting at position 2371 of SEQ ID NO: 1886820
gagguaggaugcucugcau

SEQ ID NO: 2428629 - RNA, 19 nt, Artificial Sequence
  Description of Artificial Sequence: Synthetic oligonucleotide
  Antisense strand to SEQ ID NO: 2428628
augcagagcauccuaccuc

SEQ ID NO: 2428630 - RNA, 19 nt, Artificial Sequence
  Description of Artificial Sequence: Synthetic oligonucleotide
  Sense strand starting at position 2436 of SEQ ID NO: 1886820
gucaccuguuauuccacua

SEQ ID NO: 2428631 - RNA, 19 nt, Artificial Sequence
  Description of Artificial Sequence: Synthetic oligonucleotide
  Antisense strand to SEQ ID NO: 2428630
uaguggaauaacaggugac

SEQ ID NO: 2428632 - RNA, 19 nt, Artificial Sequence
  Description of Artificial Sequence: Synthetic oligonucleotide
  Sense strand starting at position 2468 of SEQ ID NO: 1886820
caagaacaugcgugcagau

SEQ ID NO: 2428633 - RNA, 19 nt, Artificial Sequence
  Description of Artificial Sequence: Synthetic oligonucleotide
  Antisense strand to SEQ ID NO: 2428632
aucugcacgcauguucuug

SEQ ID NO: 2428634 - RNA, 19 nt, Artificial Sequence
  Description of Artificial Sequence: Synthetic oligonucleotide
  Sense strand starting at position 2470 of SEQ ID NO: 1886820
agaacaugcgugcagauau

SEQ ID NO: 2428635 - RNA, 19 nt, Artificial Sequence
  Description of Artificial Sequence: Synthetic oligonucleotide
  Antisense strand to SEQ ID NO: 2428634
auaucugcacgcauguucu

SEQ ID NO: 2428636 - RNA, 19 nt, Artificial Sequence
  Description of Artificial Sequence: Synthetic oligonucleotide
  Sense strand starting at position 2603 of SEQ ID NO: 1886820
guuggaaggccugguuuca

SEQ ID NO: 2428637 - RNA, 19 nt, Artificial Sequence
  Description of Artificial Sequence: Synthetic oligonucleotide
  Antisense strand to SEQ ID NO: 2428636
ugaaaccaggccuuccaac

SEQ ID NO: 2428638 - RNA, 19 nt, Artificial Sequence
  Description of Artificial Sequence: Synthetic oligonucleotide
  Sense strand starting at position 2629 of SEQ ID NO: 1886820
cauguauguguugauggau

SEQ ID NO: 2428639 - RNA, 19 nt, Artificial Sequence
  Description of Artificial Sequence: Synthetic oligonucleotide
  Antisense strand to SEQ ID NO: 2428638
auccaucaacacauacaug

SEQ ID NO: 2428640 - RNA, 19 nt, Artificial Sequence
  Description of Artificial Sequence: Synthetic oligonucleotide
  Sense strand starting at position 2632 of SEQ ID NO: 1886820
guauguguugauggaucac

SEQ ID NO: 2428641 - RNA, 19 nt, Artificial Sequence
  Description of Artificial Sequence: Synthetic oligonucleotide
  Antisense strand to SEQ ID NO: 2428640
gugauccaucaacacauac

SEQ ID NO: 2428642 - RNA, 19 nt, Artificial Sequence
  Description of Artificial Sequence: Synthetic oligonucleotide
  Sense strand starting at position 2718 of SEQ ID NO: 1886820
uugggauugcauugcccaa

SEQ ID NO: 2428643 - RNA, 19 nt, Artificial Sequence
  Description of Artificial Sequence: Synthetic oligonucleotide
  Antisense strand to SEQ ID NO: 2428642
uugggcaaugcaaucccaa

SEQ ID NO: 2428644 - RNA, 19 nt, Artificial Sequence
  Description of Artificial Sequence: Synthetic oligonucleotide
  Sense strand starting at position 2736 of SEQ ID NO: 1886820
aaauaaauugagggugcua

SEQ ID NO: 2428645 - RNA, 19 nt, Artificial Sequence
  Description of Artificial Sequence: Synthetic oligonucleotide
  Antisense strand to SEQ ID NO: 2428644
uagcacccucaauuuauuu

SEQ ID NO: 2428646 - RNA, 19 nt, Artificial Sequence
  Description of Artificial Sequence: Synthetic oligonucleotide
  Sense strand starting at position 2772 of SEQ ID NO: 1886820
ccaucaaacgugggauaca

SEQ ID NO: 2428647 - RNA, 19 nt, Artificial Sequence
  Description of Artificial Sequence: Synthetic oligonucleotide
  Antisense strand to SEQ ID NO: 2428646
uguaucccacguuugaugg

SEQ ID NO: 2428648 - RNA, 19 nt, Artificial Sequence
  Description of Artificial Sequence: Synthetic oligonucleotide
  Sense strand starting at position 2822 of SEQ ID NO: 1886820
aacugcaggucucugauaa

SEQ ID NO: 2428649 - RNA, 19 nt, Artificial Sequence
  Description of Artificial Sequence: Synthetic oligonucleotide
  Antisense strand to SEQ ID NO: 2428648
uuaucagagaccugcaguu

SEQ ID NO: 2428650 - RNA, 19 nt, Artificial Sequence
  Description of Artificial Sequence: Synthetic oligonucleotide
  Sense strand starting at position 2823 of SEQ ID NO: 1886820
acugcaggucucugauaau

SEQ ID NO: 2428651 - RNA, 19 nt, Artificial Sequence
  Description of Artificial Sequence: Synthetic oligonucleotide
  Antisense strand to SEQ ID NO: 2428650
auuaucagagaccugcagu

SEQ ID NO: 2428652 - RNA, 19 nt, Artificial Sequence
  Description of Artificial Sequence: Synthetic oligonucleotide
  Sense strand starting at position 2873 of SEQ ID NO: 1886820
agagcuuggugguuaaagu

SEQ ID NO: 2428653 - RNA, 19 nt, Artificial Sequence
  Description of Artificial Sequence: Synthetic oligonucleotide
  Antisense strand to SEQ ID NO: 2428652
acuuuaaccaccaagcucu

SEQ ID NO: 2428654 - RNA, 19 nt, Artificial Sequence
  Description of Artificial Sequence: Synthetic oligonucleotide
  Sense strand starting at position 2999 of SEQ ID NO: 1886820
ggugaaucaccugaagucu

SEQ ID NO: 2428655 - RNA, 19 nt, Artificial Sequence
  Description of Artificial Sequence: Synthetic oligonucleotide
  Antisense strand to SEQ ID NO: 2428654
agacuucaggugauucacc

SEQ ID NO: 2428656 - RNA, 19 nt, Artificial Sequence
  Description of Artificial Sequence: Synthetic oligonucleotide
  Sense strand starting at position 3007 of SEQ ID NO: 1886820
accugaagucuagagcuca

SEQ ID NO: 2428657 - RNA, 19 nt, Artificial Sequence
  Description of Artificial Sequence: Synthetic oligonucleotide
  Antisense strand to SEQ ID NO: 2428656
ugagcucuagacuucaggu

SEQ ID NO: 2428658 - RNA, 19 nt, Artificial Sequence
  Description of Artificial Sequence: Synthetic oligonucleotide
  Sense strand starting at position 3300 of SEQ ID NO: 1886820
auuagauguugggauuuag

SEQ ID NO: 2428659 - RNA, 19 nt, Artificial Sequence
  Description of Artificial Sequence: Synthetic oligonucleotide
  Antisense strand to SEQ ID NO: 2428658
cuaaaucccaacaucuaau

SEQ ID NO: 2428660 - RNA, 19 nt, Artificial Sequence
  Description of Artificial Sequence: Synthetic oligonucleotide
  Sense strand starting at position 3374 of SEQ ID NO: 1886820
acuauacgauuaguuaaga

SEQ ID NO: 2428661 - RNA, 19 nt, Artificial Sequence
  Description of Artificial Sequence: Synthetic oligonucleotide
  Antisense strand to SEQ ID NO: 2428660
ucuuaacuaaucguauagu

SEQ ID NO: 2428662 - RNA, 19 nt, Artificial Sequence
  Description of Artificial Sequence: Synthetic oligonucleotide
  Sense strand starting at position 3415 of SEQ ID NO: 1886820
acaguaacauagcugaaua

SEQ ID NO: 2428663 - RNA, 19 nt, Artificial Sequence
  Description of Artificial Sequence: Synthetic oligonucleotide
  Antisense strand to SEQ ID NO: 2428662
uauucagcuauguuacugu

SEQ ID NO: 2428664 - RNA, 19 nt, Artificial Sequence
  Description of Artificial Sequence: Synthetic oligonucleotide
  Sense strand starting at position 3649 of SEQ ID NO: 1886820
ucaggauugcagggaaagu

SEQ ID NO: 2428665 - RNA, 19 nt, Artificial Sequence
  Description of Artificial Sequence: Synthetic oligonucleotide
  Antisense strand to SEQ ID NO: 2428664
acuuucccugcaauccuga

SEQ ID NO: 2428666 - RNA, 19 nt, Artificial Sequence
  Description of Artificial Sequence: Synthetic oligonucleotide
  Sense strand starting at position 3711 of SEQ ID NO: 1886820
aaggaaggaucugaauuag

SEQ ID NO: 2428667 - RNA, 19 nt, Artificial Sequence
  Description of Artificial Sequence: Synthetic oligonucleotide
  Antisense strand to SEQ ID NO: 2428666
cuaauucagauccuuccuu

SEQ ID NO: 2428668 - RNA, 19 nt, Artificial Sequence
  Description of Artificial Sequence: Synthetic oligonucleotide
  Sense strand starting at position 3915 of SEQ ID NO: 1886820
agaagaaucugagaacaga

SEQ ID NO: 2428669 - RNA, 19 nt, Artificial Sequence
  Description of Artificial Sequence: Synthetic oligonucleotide
  Antisense strand to SEQ ID NO: 2428668
ucuguucucagauucuucu

SEQ ID NO: 2428670 - RNA, 19 nt, Artificial Sequence
  Description of Artificial Sequence: Synthetic oligonucleotide
  Sense strand starting at position 3932 of SEQ ID NO: 1886820
gaauaagagugucagaaac

SEQ ID NO: 2428671 - RNA, 19 nt, Artificial Sequence
  Description of Artificial Sequence: Synthetic oligonucleotide
  Antisense strand to SEQ ID NO: 2428670
guuucugacacucuuauuc

SEQ ID NO: 2428672 - RNA, 19 nt, Artificial Sequence
  Description of Artificial Sequence: Synthetic oligonucleotide
  Sense strand starting at position 3962 of SEQ ID NO: 1886820
uuuaaaguuggagaagcuu

SEQ ID NO: 2428673 - RNA, 19 nt, Artificial Sequence
  Description of Artificial Sequence: Synthetic oligonucleotide
  Antisense strand to SEQ ID NO: 2428672
aagcuucuccaacuuuaaa

SEQ ID NO: 2428674 - RNA, 19 nt, Artificial Sequence
  Description of Artificial Sequence: Synthetic oligonucleotide
  Sense strand starting at position 13 of SEQ ID NO: 1886821
ucccaagaucuuuggauga

SEQ ID NO: 2428675 - RNA, 19 nt, Artificial Sequence
  Description of Artificial Sequence: Synthetic oligonucleotide
  Antisense strand to SEQ ID NO: 2428674
ucauccaaagaucuuggga

SEQ ID NO: 2428676 - RNA, 19 nt, Artificial Sequence
  Description of Artificial Sequence: Synthetic oligonucleotide
  Sense strand starting at position 143 of SEQ ID NO: 1886821
cgucuuccuuucugggaua

SEQ ID NO: 2428677 - RNA, 19 nt, Artificial Sequence
  Description of Artificial Sequence: Synthetic oligonucleotide
  Antisense strand to SEQ ID NO: 2428676
uaucccagaaaggaagacg

SEQ ID NO: 2428678 - RNA, 19 nt, Artificial Sequence
  Description of Artificial Sequence: Synthetic oligonucleotide
  Sense strand starting at position 144 of SEQ ID NO: 1886821
gucuuccuuucugggauaa

SEQ ID NO: 2428679 - RNA, 19 nt, Artificial Sequence
  Description of Artificial Sequence: Synthetic oligonucleotide
  Antisense strand to SEQ ID NO: 2428678
uuaucccagaaaggaagac

SEQ ID NO: 2428680 - RNA, 19 nt, Artificial Sequence
  Description of Artificial Sequence: Synthetic oligonucleotide
  Sense strand starting at position 145 of SEQ ID NO: 1886821
ucuuccuuucugggauaau

SEQ ID NO: 2428681 - RNA, 19 nt, Artificial Sequence
  Description of Artificial Sequence: Synthetic oligonucleotide
  Antisense strand to SEQ ID NO: 2428680
auuaucccagaaaggaaga

SEQ ID NO: 2428682 - RNA, 19 nt, Artificial Sequence
  Description of Artificial Sequence: Synthetic oligonucleotide
  Sense strand starting at position 146 of SEQ ID NO: 1886821
cuuccuuucugggauaauc

SEQ ID NO: 2428683 - RNA, 19 nt, Artificial Sequence
  Description of Artificial Sequence: Synthetic oligonucleotide
  Antisense strand to SEQ ID NO: 2428682
gauuaucccagaaaggaag

SEQ ID NO: 2428684 - RNA, 19 nt, Artificial Sequence
  Description of Artificial Sequence: Synthetic oligonucleotide
  Sense strand starting at position 2057 of SEQ ID NO: 1886821
agcugugauuuccacagac

SEQ ID NO: 2428685 - RNA, 19 nt, Artificial Sequence
  Description of Artificial Sequence: Synthetic oligonucleotide
  Antisense strand to SEQ ID NO: 2428684
gucuguggaaaucacagcu

SEQ ID NO: 2428686 - RNA, 19 nt, Artificial Sequence
  Description of Artificial Sequence: Synthetic oligonucleotide
  Sense strand starting at position 2201 of SEQ ID NO: 1886821
gcaggaucugugcagagca

SEQ ID NO: 2428687 - RNA, 19 nt, Artificial Sequence
  Description of Artificial Sequence: Synthetic oligonucleotide
  Antisense strand to SEQ ID NO: 2428686
ugcucugcacagauccugc

SEQ ID NO: 2428688 - RNA, 19 nt, Artificial Sequence
  Description of Artificial Sequence: Synthetic oligonucleotide
  Sense strand starting at position 2258 of SEQ ID NO: 1886821
ccacuuagucagggccaga

SEQ ID NO: 2428689 - RNA, 19 nt, Artificial Sequence
  Description of Artificial Sequence: Synthetic oligonucleotide
  Antisense strand to SEQ ID NO: 2428688
ucuggcccugacuaagugg

SEQ ID NO: 2428690 - RNA, 19 nt, Artificial Sequence
  Description of Artificial Sequence: Synthetic oligonucleotide
  Sense strand starting at position 2261 of SEQ ID NO: 1886821
cuuagucagggccagauau

SEQ ID NO: 2428691 - RNA, 19 nt, Artificial Sequence
  Description of Artificial Sequence: Synthetic oligonucleotide
  Antisense strand to SEQ ID NO: 2428690
auaucuggcccugacuaag

SEQ ID NO: 2428692 - RNA, 19 nt, Artificial Sequence
  Description of Artificial Sequence: Synthetic oligonucleotide
  Sense strand starting at position 2394 of SEQ ID NO: 1886821
gcgcuaauuucccuggcca

SEQ ID NO: 2428693 - RNA, 19 nt, Artificial Sequence
  Description of Artificial Sequence: Synthetic oligonucleotide
  Antisense strand to SEQ ID NO: 2428692
uggccagggaaauuagcgc

SEQ ID NO: 2428694 - RNA, 19 nt, Artificial Sequence
  Description of Artificial Sequence: Synthetic oligonucleotide
  Sense strand starting at position 2396 of SEQ ID NO: 1886821
gcuaauuucccuggccaga

SEQ ID NO: 2428695 - RNA, 19 nt, Artificial Sequence
  Description of Artificial Sequence: Synthetic oligonucleotide
  Antisense strand to SEQ ID NO: 2428694
ucuggccagggaaauuagc

SEQ ID NO: 2428696 - RNA, 19 nt, Artificial Sequence
  Description of Artificial Sequence: Synthetic oligonucleotide
  Sense strand starting at position 2407 of SEQ ID NO: 1886821
uggccagacuccuuaguau

SEQ ID NO: 2428697 - RNA, 19 nt, Artificial Sequence
  Description of Artificial Sequence: Synthetic oligonucleotide
  Antisense strand to SEQ ID NO: 2428696
auacuaaggagucuggcca

SEQ ID NO: 2428698 - RNA, 19 nt, Artificial Sequence
  Description of Artificial Sequence: Synthetic oligonucleotide
  Sense strand starting at position 2416 of SEQ ID NO: 1886821
uccuuaguauucuccagag

SEQ ID NO: 2428699 - RNA, 19 nt, Artificial Sequence
  Description of Artificial Sequence: Synthetic oligonucleotide
  Antisense strand to SEQ ID NO: 2428698
cucuggagaauacuaagga

SEQ ID NO: 2428700 - RNA, 19 nt, Artificial Sequence
  Description of Artificial Sequence: Synthetic oligonucleotide
  Sense strand starting at position 3229 of SEQ ID NO: 1886821
cguggagcaauccauguaa

SEQ ID NO: 2428701 - RNA, 19 nt, Artificial Sequence
  Description of Artificial Sequence: Synthetic oligonucleotide
  Antisense strand to SEQ ID NO: 2428700
uuacauggauugcuccacg

SEQ ID NO: 2428702 - RNA, 19 nt, Artificial Sequence
  Description of Artificial Sequence: Synthetic oligonucleotide
  Sense strand starting at position 3272 of SEQ ID NO: 1886821
gccagugucccagagcuaa

SEQ ID NO: 2428703 - RNA, 19 nt, Artificial Sequence
  Description of Artificial Sequence: Synthetic oligonucleotide
  Antisense strand to SEQ ID NO: 2428702
uuagcucugggacacuggc

SEQ ID NO: 2428704 - RNA, 19 nt, Artificial Sequence
  Description of Artificial Sequence: Synthetic oligonucleotide
  Sense strand starting at position 3303 of SEQ ID NO: 1886821
agggaugaccuguguuggu

SEQ ID NO: 2428705 - RNA, 19 nt, Artificial Sequence
  Description of Artificial Sequence: Synthetic oligonucleotide
  Antisense strand to SEQ ID NO: 2428704
accaacacaggucaucccu

SEQ ID NO: 2428706 - RNA, 19 nt, Artificial Sequence
  Description of Artificial Sequence: Synthetic oligonucleotide
  Sense strand starting at position 3310 of SEQ ID NO: 1886821
accuguguuggucaucaga

SEQ ID NO: 2428707 - RNA, 19 nt, Artificial Sequence
  Description of Artificial Sequence: Synthetic oligonucleotide
  Antisense strand to SEQ ID NO: 2428706
ucugaugaccaacacaggu

SEQ ID NO: 2428708 - RNA, 19 nt, Artificial Sequence
  Description of Artificial Sequence: Synthetic oligonucleotide
  Sense strand starting at position 3312 of SEQ ID NO: 1886821
cuguguuggucaucagaaa

SEQ ID NO: 2428709 - RNA, 19 nt, Artificial Sequence
  Description of Artificial Sequence: Synthetic oligonucleotide
  Antisense strand to SEQ ID NO: 2428708
uuucugaugaccaacacag

SEQ ID NO: 2428710 - RNA, 19 nt, Artificial Sequence
  Description of Artificial Sequence: Synthetic oligonucleotide
  Sense strand starting at position 3577 of SEQ ID NO: 1886821
gcugguaucuggccaggaa

SEQ ID NO: 2428711 - RNA, 19 nt, Artificial Sequence
  Description of Artificial Sequence: Synthetic oligonucleotide
  Antisense strand to SEQ ID NO: 2428710
uuccuggccagauaccagc

SEQ ID NO: 2428712 - RNA, 19 nt, Artificial Sequence
  Description of Artificial Sequence: Synthetic oligonucleotide
  Sense strand starting at position 3578 of SEQ ID NO: 1886821
cugguaucuggccaggaau

SEQ ID NO: 2428713 - RNA, 19 nt, Artificial Sequence
  Description of Artificial Sequence: Synthetic oligonucleotide
  Antisense strand to SEQ ID NO: 2428712
auuccuggccagauaccag

SEQ ID NO: 2428714 - RNA, 19 nt, Artificial Sequence
  Description of Artificial Sequence: Synthetic oligonucleotide
  Sense strand starting at position 3580 of SEQ ID NO: 1886821
gguaucuggccaggaauca

SEQ ID NO: 2428715 - RNA, 19 nt, Artificial Sequence
  Description of Artificial Sequence: Synthetic oligonucleotide
  Antisense strand to SEQ ID NO: 2428714
ugauuccuggccagauacc

SEQ ID NO: 2428716 - RNA, 19 nt, Artificial Sequence
  Description of Artificial Sequence: Synthetic oligonucleotide
  Sense strand starting at position 3581 of SEQ ID NO: 1886821
guaucuggccaggaaucau

SEQ ID NO: 2428717 - RNA, 19 nt, Artificial Sequence
  Description of Artificial Sequence: Synthetic oligonucleotide
  Antisense strand to SEQ ID NO: 2428716
augauuccuggccagauac

SEQ ID NO: 2428718 - RNA, 19 nt, Artificial Sequence
  Description of Artificial Sequence: Synthetic oligonucleotide
  Sense strand starting at position 3593 of SEQ ID NO: 1886821
gaaucauaagaaggugguu

SEQ ID NO: 2428719 - RNA, 19 nt, Artificial Sequence
  Description of Artificial Sequence: Synthetic oligonucleotide
  Antisense strand to SEQ ID NO: 2428718
aaccaccuucuuaugauuc

SEQ ID NO: 2428720 - RNA, 19 nt, Artificial Sequence
  Description of Artificial Sequence: Synthetic oligonucleotide
  Sense strand starting at position 3615 of SEQ ID NO: 1886821
ggaaaugucaagugccuuu

SEQ ID NO: 2428721 - RNA, 19 nt, Artificial Sequence
  Description of Artificial Sequence: Synthetic oligonucleotide
  Antisense strand to SEQ ID NO: 2428720
aaaggcacuugacauuucc

SEQ ID NO: 2428722 - RNA, 19 nt, Artificial Sequence
  Description of Artificial Sequence: Synthetic oligonucleotide
  Sense strand starting at position 3655 of SEQ ID NO: 1886821
auccgauucugugugagac

SEQ ID NO: 2428723 - RNA, 19 nt, Artificial Sequence
  Description of Artificial Sequence: Synthetic oligonucleotide
  Antisense strand to SEQ ID NO: 2428722
gucucacacagaaucggau

SEQ ID NO: 2428724 - RNA, 19 nt, Artificial Sequence
  Description of Artificial Sequence: Synthetic oligonucleotide
  Sense strand starting at position 3657 of SEQ ID NO: 1886821
ccgauucugugugagacca

SEQ ID NO: 2428725 - RNA, 19 nt, Artificial Sequence
  Description of Artificial Sequence: Synthetic oligonucleotide
  Antisense strand to SEQ ID NO: 2428724
uggucucacacagaaucgg

SEQ ID NO: 2428726 - RNA, 19 nt, Artificial Sequence
  Description of Artificial Sequence: Synthetic oligonucleotide
  Sense strand starting at position 3659 of SEQ ID NO: 1886821
gauucugugugagaccauu

SEQ ID NO: 2428727 - RNA, 19 nt, Artificial Sequence
  Description of Artificial Sequence: Synthetic oligonucleotide
  Antisense strand to SEQ ID NO: 2428726
aauggucucacacagaauc

SEQ ID NO: 2428728 - RNA, 19 nt, Artificial Sequence
  Description of Artificial Sequence: Synthetic oligonucleotide
  Sense strand starting at position 3685 of SEQ ID NO: 1886821
guguaucuaacuuggguuu

SEQ ID NO: 2428729 - RNA, 19 nt, Artificial Sequence
  Description of Artificial Sequence: Synthetic oligonucleotide
  Antisense strand to SEQ ID NO: 2428728
aaacccaaguuagauacac

SEQ ID NO: 2428730 - RNA, 19 nt, Artificial Sequence
  Description of Artificial Sequence: Synthetic oligonucleotide
  Sense strand starting at position 3687 of SEQ ID NO: 1886821
guaucuaacuuggguuuga

SEQ ID NO: 2428731 - RNA, 19 nt, Artificial Sequence
  Description of Artificial Sequence: Synthetic oligonucleotide
  Antisense strand to SEQ ID NO: 2428730
ucaaacccaaguuagauac

SEQ ID NO: 2428732 - RNA, 19 nt, Artificial Sequence
  Description of Artificial Sequence: Synthetic oligonucleotide
  Sense strand starting at position 3738 of SEQ ID NO: 1886821
aagggaguuugucuccaag

SEQ ID NO: 2428733 - RNA, 19 nt, Artificial Sequence
  Description of Artificial Sequence: Synthetic oligonucleotide
  Antisense strand to SEQ ID NO: 2428732
cuuggagacaaacucccuu

SEQ ID NO: 2428734 - RNA, 19 nt, Artificial Sequence
  Description of Artificial Sequence: Synthetic oligonucleotide
  Sense strand starting at position 3740 of SEQ ID NO: 1886821
gggaguuugucuccaagga

SEQ ID NO: 2428735 - RNA, 19 nt, Artificial Sequence
  Description of Artificial Sequence: Synthetic oligonucleotide
  Antisense strand to SEQ ID NO: 2428734
uccuuggagacaaacuccc

SEQ ID NO: 2428736 - RNA, 19 nt, Artificial Sequence
  Description of Artificial Sequence: Synthetic oligonucleotide
  Sense strand starting at position 3741 of SEQ ID NO: 1886821
ggaguuugucuccaaggac

SEQ ID NO: 2428737 - RNA, 19 nt, Artificial Sequence
  Description of Artificial Sequence: Synthetic oligonucleotide
  Antisense strand to SEQ ID NO: 2428736
guccuuggagacaaacucc

SEQ ID NO: 2428738 - RNA, 19 nt, Artificial Sequence
  Description of Artificial Sequence: Synthetic oligonucleotide
  Sense strand starting at position 1998 of SEQ ID NO: 1886822
gcugcuggucaagaggaau

SEQ ID NO: 2428739 - RNA, 19 nt, Artificial Sequence
  Description of Artificial Sequence: Synthetic oligonucleotide
  Antisense strand to SEQ ID NO: 2428738
auuccucuugaccagcagc

SEQ ID NO: 2428740 - RNA, 19 nt, Artificial Sequence
  Description of Artificial Sequence: Synthetic oligonucleotide
  Sense strand starting at position 2075 of SEQ ID NO: 1886822
uaggaaucaggucguguua

SEQ ID NO: 2428741 - RNA, 19 nt, Artificial Sequence
  Description of Artificial Sequence: Synthetic oligonucleotide
  Antisense strand to SEQ ID NO: 2428740
uaacacgaccugauuccua

SEQ ID NO: 2428742 - RNA, 19 nt, Artificial Sequence
  Description of Artificial Sequence: Synthetic oligonucleotide
  Sense strand starting at position 2077 of SEQ ID NO: 1886822
ggaaucaggucguguuaag

SEQ ID NO: 2428743 - RNA, 19 nt, Artificial Sequence
  Description of Artificial Sequence: Synthetic oligonucleotide
  Antisense strand to SEQ ID NO: 2428742
cuuaacacgaccugauucc

SEQ ID NO: 2428744 - RNA, 19 nt, Artificial Sequence
  Description of Artificial Sequence: Synthetic oligonucleotide
  Sense strand starting at position 2144 of SEQ ID NO: 1886822
cuguccuccuguuccaaau

SEQ ID NO: 2428745 - RNA, 19 nt, Artificial Sequence
  Description of Artificial Sequence: Synthetic oligonucleotide
  Antisense strand to SEQ ID NO: 2428744
auuuggaacaggaggacag

SEQ ID NO: 2428746 - RNA, 19 nt, Artificial Sequence
  Description of Artificial Sequence: Synthetic oligonucleotide
  Sense strand starting at position 2200 of SEQ ID NO: 1886822
uaggcagagagguguguuu

SEQ ID NO: 2428747 - RNA, 19 nt, Artificial Sequence
  Description of Artificial Sequence: Synthetic oligonucleotide
  Antisense strand to SEQ ID NO: 2428746
aaacacaccucucugccua

SEQ ID NO: 2428748 - RNA, 19 nt, Artificial Sequence
  Description of Artificial Sequence: Synthetic oligonucleotide
  Sense strand starting at position 2464 of SEQ ID NO: 1886822
agggaagccugaggguaau

SEQ ID NO: 2428749 - RNA, 19 nt, Artificial Sequence
  Description of Artificial Sequence: Synthetic oligonucleotide
  Antisense strand to SEQ ID NO: 2428748
auuacccucaggcuucccu

SEQ ID NO: 2428750 - RNA, 19 nt, Artificial Sequence
  Description of Artificial Sequence: Synthetic oligonucleotide
  Sense strand starting at position 2476 of SEQ ID NO: 1886822
ggguaaugaugagaaagca

SEQ ID NO: 2428751 - RNA, 19 nt, Artificial Sequence
  Description of Artificial Sequence: Synthetic oligonucleotide
  Antisense strand to SEQ ID NO: 2428750
ugcuuucucaucauuaccc

SEQ ID NO: 2428752 - RNA, 19 nt, Artificial Sequence
  Description of Artificial Sequence: Synthetic oligonucleotide
  Sense strand starting at position 2655 of SEQ ID NO: 1886822
gaguauaaccgagaccuuc

SEQ ID NO: 2428753 - RNA, 19 nt, Artificial Sequence
  Description of Artificial Sequence: Synthetic oligonucleotide
  Antisense strand to SEQ ID NO: 2428752
gaaggucucgguuauacuc

SEQ ID NO: 2428754 - RNA, 19 nt, Artificial Sequence
  Description of Artificial Sequence: Synthetic oligonucleotide
  Sense strand starting at position 2744 of SEQ ID NO: 1886822
ggacuuaucucgggccuga

SEQ ID NO: 2428755 - RNA, 19 nt, Artificial Sequence
  Description of Artificial Sequence: Synthetic oligonucleotide
  Antisense strand to SEQ ID NO: 2428754
ucaggcccgagauaagucc

SEQ ID NO: 2428756 - RNA, 19 nt, Artificial Sequence
  Description of Artificial Sequence: Synthetic oligonucleotide
  Sense strand starting at position 2859 of SEQ ID NO: 1886822
guggaaagccacugucauu

SEQ ID NO: 2428757 - RNA, 19 nt, Artificial Sequence
  Description of Artificial Sequence: Synthetic oligonucleotide
  Antisense strand to SEQ ID NO: 2428756
aaugacaguggcuuuccac

SEQ ID NO: 2428758 - RNA, 19 nt, Artificial Sequence
  Description of Artificial Sequence: Synthetic oligonucleotide
  Sense strand starting at position 2975 of SEQ ID NO: 1886822
ggacacaucuaggaagacu

SEQ ID NO: 2428759 - RNA, 19 nt, Artificial Sequence
  Description of Artificial Sequence: Synthetic oligonucleotide
  Antisense strand to SEQ ID NO: 2428758
agucuuccuagaugugucc

SEQ ID NO: 2428760 - RNA, 19 nt, Artificial Sequence
  Description of Artificial Sequence: Synthetic oligonucleotide
  Sense strand starting at position 2987 of SEQ ID NO: 1886822
gaagacuucucaggaagag

SEQ ID NO: 2428761 - RNA, 19 nt, Artificial Sequence
  Description of Artificial Sequence: Synthetic oligonucleotide
  Antisense strand to SEQ ID NO: 2428760
cucuuccugagaagucuuc

SEQ ID NO: 2428762 - RNA, 19 nt, Artificial Sequence
  Description of Artificial Sequence: Synthetic oligonucleotide
  Sense strand starting at position 3121 of SEQ ID NO: 1886822
cagccuauuuggugggagu

SEQ ID NO: 2428763 - RNA, 19 nt, Artificial Sequence
  Description of Artificial Sequence: Synthetic oligonucleotide
  Antisense strand to SEQ ID NO: 2428762
acucccaccaaauaggcug

SEQ ID NO: 2428764 - RNA, 19 nt, Artificial Sequence
  Description of Artificial Sequence: Synthetic oligonucleotide
  Sense strand starting at position 3122 of SEQ ID NO: 1886822
agccuauuuggugggaguu

SEQ ID NO: 2428765 - RNA, 19 nt, Artificial Sequence
  Description of Artificial Sequence: Synthetic oligonucleotide
  Antisense strand to SEQ ID NO: 2428764
aacucccaccaaauaggcu

SEQ ID NO: 2428766 - RNA, 19 nt, Artificial Sequence
  Description of Artificial Sequence: Synthetic oligonucleotide
  Sense strand starting at position 3164 of SEQ ID NO: 1886822
gagguaagaucaugaagac

SEQ ID NO: 2428767 - RNA, 19 nt, Artificial Sequence
  Description of Artificial Sequence: Synthetic oligonucleotide
  Antisense strand to SEQ ID NO: 2428766
gucuucaugaucuuaccuc

SEQ ID NO: 2428768 - RNA, 19 nt, Artificial Sequence
  Description of Artificial Sequence: Synthetic oligonucleotide
  Sense strand starting at position 3202 of SEQ ID NO: 1886822
caagguagucauugcagaa

SEQ ID NO: 2428769 - RNA, 19 nt, Artificial Sequence
  Description of Artificial Sequence: Synthetic oligonucleotide
  Antisense strand to SEQ ID NO: 2428768
uucugcaaugacuaccuug

SEQ ID NO: 2428770 - RNA, 19 nt, Artificial Sequence
  Description of Artificial Sequence: Synthetic oligonucleotide
  Sense strand starting at position 3206 of SEQ ID NO: 1886822
guagucauugcagaaagac

SEQ ID NO: 2428771 - RNA, 19 nt, Artificial Sequence
  Description of Artificial Sequence: Synthetic oligonucleotide
  Antisense strand to SEQ ID NO: 2428770
gucuuucugcaaugacuac

SEQ ID NO: 2428772 - RNA, 19 nt, Artificial Sequence
  Description of Artificial Sequence: Synthetic oligonucleotide
  Sense strand starting at position 3306 of SEQ ID NO: 1886822
gaggcuuaugugggucauu

SEQ ID NO: 2428773 - RNA, 19 nt, Artificial Sequence
  Description of Artificial Sequence: Synthetic oligonucleotide
  Antisense strand to SEQ ID NO: 2428772
aaugacccacauaagccuc

SEQ ID NO: 2428774 - RNA, 19 nt, Artificial Sequence
  Description of Artificial Sequence: Synthetic oligonucleotide
  Sense strand starting at position 3307 of SEQ ID NO: 1886822
aggcuuaugugggucauuu

SEQ ID NO: 2428775 - RNA, 19 nt, Artificial Sequence
  Description of Artificial Sequence: Synthetic oligonucleotide
  Antisense strand to SEQ ID NO: 2428774
aaaugacccacauaagccu

SEQ ID NO: 2428776 - RNA, 19 nt, Artificial Sequence
  Description of Artificial Sequence: Synthetic oligonucleotide
  Sense strand starting at position 3495 of SEQ ID NO: 1886822
gggucaggcuauccagaaa

SEQ ID NO: 2428777 - RNA, 19 nt, Artificial Sequence
  Description of Artificial Sequence: Synthetic oligonucleotide
  Antisense strand to SEQ ID NO: 2428776
uuucuggauagccugaccc

SEQ ID NO: 2428778 - RNA, 19 nt, Artificial Sequence
  Description of Artificial Sequence: Synthetic oligonucleotide
  Sense strand starting at position 3498 of SEQ ID NO: 1886822
ucaggcuauccagaaaugu

SEQ ID NO: 2428779 - RNA, 19 nt, Artificial Sequence
  Description of Artificial Sequence: Synthetic oligonucleotide
  Antisense strand to SEQ ID NO: 2428778
acauuucuggauagccuga

SEQ ID NO: 2428780 - RNA, 19 nt, Artificial Sequence
  Description of Artificial Sequence: Synthetic oligonucleotide
  Sense strand starting at position 3506 of SEQ ID NO: 1886822
uccagaaauguuuaugcca

SEQ ID NO: 2428781 - RNA, 19 nt, Artificial Sequence
  Description of Artificial Sequence: Synthetic oligonucleotide
  Antisense strand to SEQ ID NO: 2428780
uggcauaaacauuucugga

SEQ ID NO: 2428782 - RNA, 19 nt, Artificial Sequence
  Description of Artificial Sequence: Synthetic oligonucleotide
  Sense strand starting at position 3515 of SEQ ID NO: 1886822
guuuaugccauugguugua

SEQ ID NO: 2428783 - RNA, 19 nt, Artificial Sequence
  Description of Artificial Sequence: Synthetic oligonucleotide
  Antisense strand to SEQ ID NO: 2428782
uacaaccaauggcauaaac

SEQ ID NO: 2428784 - RNA, 19 nt, Artificial Sequence
  Description of Artificial Sequence: Synthetic oligonucleotide
  Sense strand starting at position 3540 of SEQ ID NO: 1886822
uaaggaaacuugccugguu

SEQ ID NO: 2428785 - RNA, 19 nt, Artificial Sequence
  Description of Artificial Sequence: Synthetic oligonucleotide
  Antisense strand to SEQ ID NO: 2428784
aaccaggcaaguuuccuua

SEQ ID NO: 2428786 - RNA, 19 nt, Artificial Sequence
  Description of Artificial Sequence: Synthetic oligonucleotide
  Sense strand starting at position 3541 of SEQ ID NO: 1886822
aaggaaacuugccugguuu

SEQ ID NO: 2428787 - RNA, 19 nt, Artificial Sequence
  Description of Artificial Sequence: Synthetic oligonucleotide
  Antisense strand to SEQ ID NO: 2428786
aaaccaggcaaguuuccuu

SEQ ID NO: 2428788 - RNA, 19 nt, Artificial Sequence
  Description of Artificial Sequence: Synthetic oligonucleotide
  Sense strand starting at position 538 of SEQ ID NO: 1886823
uuccuuugauagucucaca

SEQ ID NO: 2428789 - RNA, 19 nt, Artificial Sequence
  Description of Artificial Sequence: Synthetic oligonucleotide
  Antisense strand to SEQ ID NO: 2428788
ugugagacuaucaaaggaa

SEQ ID NO: 2428790 - RNA, 19 nt, Artificial Sequence
  Description of Artificial Sequence: Synthetic oligonucleotide
  Sense strand starting at position 630 of SEQ ID NO: 1886823
gucacauuugucugauccu

SEQ ID NO: 2428791 - RNA, 19 nt, Artificial Sequence
  Description of Artificial Sequence: Synthetic oligonucleotide
  Antisense strand to SEQ ID NO: 2428790
aggaucagacaaaugugac

SEQ ID NO: 2428792 - RNA, 19 nt, Artificial Sequence
  Description of Artificial Sequence: Synthetic oligonucleotide
  Sense strand starting at position 798 of SEQ ID NO: 1886823
ucauguguaagaugcaaga

SEQ ID NO: 2428793 - RNA, 19 nt, Artificial Sequence
  Description of Artificial Sequence: Synthetic oligonucleotide
  Antisense strand to SEQ ID NO: 2428792
ucuugcaucuuacacauga

SEQ ID NO: 2428794 - RNA, 19 nt, Artificial Sequence
  Description of Artificial Sequence: Synthetic oligonucleotide
  Sense strand starting at position 843 of SEQ ID NO: 1886823
uuauuaguacucuagucag

SEQ ID NO: 2428795 - RNA, 19 nt, Artificial Sequence
  Description of Artificial Sequence: Synthetic oligonucleotide
  Antisense strand to SEQ ID NO: 2428794
cugacuagaguacuaauaa

SEQ ID NO: 2428796 - RNA, 19 nt, Artificial Sequence
  Description of Artificial Sequence: Synthetic oligonucleotide
  Sense strand starting at position 846 of SEQ ID NO: 1886823
uuaguacucuagucagaga

SEQ ID NO: 2428797 - RNA, 19 nt, Artificial Sequence
  Description of Artificial Sequence: Synthetic oligonucleotide
  Antisense strand to SEQ ID NO: 2428796
ucucugacuagaguacuaa

SEQ ID NO: 2428798 - RNA, 19 nt, Artificial Sequence
  Description of Artificial Sequence: Synthetic oligonucleotide
  Sense strand starting at position 955 of SEQ ID NO: 1886823
cagguuugugugggagaua

SEQ ID NO: 2428799 - RNA, 19 nt, Artificial Sequence
  Description of Artificial Sequence: Synthetic oligonucleotide
  Antisense strand to SEQ ID NO: 2428798
uaucucccacacaaaccug

SEQ ID NO: 2428800 - RNA, 19 nt, Artificial Sequence
  Description of Artificial Sequence: Synthetic oligonucleotide
  Sense strand starting at position 1028 of SEQ ID NO: 1886823
gguacuuugugagugagag

SEQ ID NO: 2428801 - RNA, 19 nt, Artificial Sequence
  Description of Artificial Sequence: Synthetic oligonucleotide
  Antisense strand to SEQ ID NO: 2428800
cucucacucacaaaguacc

SEQ ID NO: 2428802 - RNA, 19 nt, Artificial Sequence
  Description of Artificial Sequence: Synthetic oligonucleotide
  Sense strand starting at position 1029 of SEQ ID NO: 1886823
guacuuugugagugagaga

SEQ ID NO: 2428803 - RNA, 19 nt, Artificial Sequence
  Description of Artificial Sequence: Synthetic oligonucleotide
  Antisense strand to SEQ ID NO: 2428802
ucucucacucacaaaguac

SEQ ID NO: 2428804 - RNA, 19 nt, Artificial Sequence
  Description of Artificial Sequence: Synthetic oligonucleotide
  Sense strand starting at position 1030 of SEQ ID NO: 1886823
uacuuugugagugagagau

SEQ ID NO: 2428805 - RNA, 19 nt, Artificial Sequence
  Description of Artificial Sequence: Synthetic oligonucleotide
  Antisense strand to SEQ ID NO: 2428804
aucucucacucacaaagua

SEQ ID NO: 2428806 - RNA, 19 nt, Artificial Sequence
  Description of Artificial Sequence: Synthetic oligonucleotide
  Sense strand starting at position 1122 of SEQ ID NO: 1886823
ggauaugucauaggcauca

SEQ ID NO: 2428807 - RNA, 19 nt, Artificial Sequence
  Description of Artificial Sequence: Synthetic oligonucleotide
  Antisense strand to SEQ ID NO: 2428806
ugaugccuaugacauaucc

SEQ ID NO: 2428808 - RNA, 19 nt, Artificial Sequence
  Description of Artificial Sequence: Synthetic oligonucleotide
  Sense strand starting at position 1127 of SEQ ID NO: 1886823
ugucauaggcaucagagua

SEQ ID NO: 2428809 - RNA, 19 nt, Artificial Sequence
  Description of Artificial Sequence: Synthetic oligonucleotide
  Antisense strand to SEQ ID NO: 2428808
uacucugaugccuaugaca

SEQ ID NO: 2428810 - RNA, 19 nt, Artificial Sequence
  Description of Artificial Sequence: Synthetic oligonucleotide
  Sense strand starting at position 1183 of SEQ ID NO: 1886823
guaucuugcauuuggaagu

SEQ ID NO: 2428811 - RNA, 19 nt, Artificial Sequence
  Description of Artificial Sequence: Synthetic oligonucleotide
  Antisense strand to SEQ ID NO: 2428810
acuuccaaaugcaagauac

SEQ ID NO: 2428812 - RNA, 19 nt, Artificial Sequence
  Description of Artificial Sequence: Synthetic oligonucleotide
  Sense strand starting at position 1194 of SEQ ID NO: 1886823
uuggaagucacuuguggga

SEQ ID NO: 2428813 - RNA, 19 nt, Artificial Sequence
  Description of Artificial Sequence: Synthetic oligonucleotide
  Antisense strand to SEQ ID NO: 2428812
ucccacaagugacuuccaa

SEQ ID NO: 2428814 - RNA, 19 nt, Artificial Sequence
  Description of Artificial Sequence: Synthetic oligonucleotide
  Sense strand starting at position 1208 of SEQ ID NO: 1886823
ugggacucucagugaaggu

SEQ ID NO: 2428815 - RNA, 19 nt, Artificial Sequence
  Description of Artificial Sequence: Synthetic oligonucleotide
  Antisense strand to SEQ ID NO: 2428814
accuucacugagaguccca

SEQ ID NO: 2428816 - RNA, 19 nt, Artificial Sequence
  Description of Artificial Sequence: Synthetic oligonucleotide
  Sense strand starting at position 1265 of SEQ ID NO: 1886823
guggaagggagcuguagaa

SEQ ID NO: 2428817 - RNA, 19 nt, Artificial Sequence
  Description of Artificial Sequence: Synthetic oligonucleotide
  Antisense strand to SEQ ID NO: 2428816
uucuacagcucccuuccac

SEQ ID NO: 2428818 - RNA, 19 nt, Artificial Sequence
  Description of Artificial Sequence: Synthetic oligonucleotide
  Sense strand starting at position 1339 of SEQ ID NO: 1886823
ggcacauucuucuuggaug

SEQ ID NO: 2428819 - RNA, 19 nt, Artificial Sequence
  Description of Artificial Sequence: Synthetic oligonucleotide
  Antisense strand to SEQ ID NO: 2428818
cauccaagaagaaugugcc

SEQ ID NO: 2428820 - RNA, 19 nt, Artificial Sequence
  Description of Artificial Sequence: Synthetic oligonucleotide
  Sense strand starting at position 1354 of SEQ ID NO: 1886823
gauggaagguaucugguuu

SEQ ID NO: 2428821 - RNA, 19 nt, Artificial Sequence
  Description of Artificial Sequence: Synthetic oligonucleotide
  Antisense strand to SEQ ID NO: 2428820
aaaccagauaccuuccauc

SEQ ID NO: 2428822 - RNA, 19 nt, Artificial Sequence
  Description of Artificial Sequence: Synthetic oligonucleotide
  Sense strand starting at position 1471 of SEQ ID NO: 1886823
uggucuguucuuggagaag

SEQ ID NO: 2428823 - RNA, 19 nt, Artificial Sequence
  Description of Artificial Sequence: Synthetic oligonucleotide
  Antisense strand to SEQ ID NO: 2428822
cuucuccaagaacagacca

SEQ ID NO: 2428824 - RNA, 19 nt, Artificial Sequence
  Description of Artificial Sequence: Synthetic oligonucleotide
  Sense strand starting at position 1496 of SEQ ID NO: 1886823
caggcuucuccugagugaa

SEQ ID NO: 2428825 - RNA, 19 nt, Artificial Sequence
  Description of Artificial Sequence: Synthetic oligonucleotide
  Antisense strand to SEQ ID NO: 2428824
uucacucaggagaagccug

SEQ ID NO: 2428826 - RNA, 19 nt, Artificial Sequence
  Description of Artificial Sequence: Synthetic oligonucleotide
  Sense strand starting at position 1599 of SEQ ID NO: 1886823
aagcuaguuucuccugaag

SEQ ID NO: 2428827 - RNA, 19 nt, Artificial Sequence
  Description of Artificial Sequence: Synthetic oligonucleotide
  Antisense strand to SEQ ID NO: 2428826
cuucaggagaaacuagcuu

SEQ ID NO: 2428828 - RNA, 19 nt, Artificial Sequence
  Description of Artificial Sequence: Synthetic oligonucleotide
  Sense strand starting at position 1602 of SEQ ID NO: 1886823
cuaguuucuccugaagauu

SEQ ID NO: 2428829 - RNA, 19 nt, Artificial Sequence
  Description of Artificial Sequence: Synthetic oligonucleotide
  Antisense strand to SEQ ID NO: 2428828
aaucuucaggagaaacuag

SEQ ID NO: 2428830 - RNA, 19 nt, Artificial Sequence
  Description of Artificial Sequence: Synthetic oligonucleotide
  Sense strand starting at position 1628 of SEQ ID NO: 1886823
gggaacauggucuggcuaa

SEQ ID NO: 2428831 - RNA, 19 nt, Artificial Sequence
  Description of Artificial Sequence: Synthetic oligonucleotide
  Antisense strand to SEQ ID NO: 2428830
uuagccagaccauguuccc

SEQ ID NO: 2428832 - RNA, 19 nt, Artificial Sequence
  Description of Artificial Sequence: Synthetic oligonucleotide
  Sense strand starting at position 1871 of SEQ ID NO: 1886823
uuggaaucauuccuguuga

SEQ ID NO: 2428833 - RNA, 19 nt, Artificial Sequence
  Description of Artificial Sequence: Synthetic oligonucleotide
  Antisense strand to SEQ ID NO: 2428832
ucaacaggaaugauuccaa

SEQ ID NO: 2428834 - RNA, 19 nt, Artificial Sequence
  Description of Artificial Sequence: Synthetic oligonucleotide
  Sense strand starting at position 1891 of SEQ ID NO: 1886823
gaaagagucuagcuaggga

SEQ ID NO: 2428835 - RNA, 19 nt, Artificial Sequence
  Description of Artificial Sequence: Synthetic oligonucleotide
  Antisense strand to SEQ ID NO: 2428834
ucccuagcuagacucuuuc

SEQ ID NO: 2428836 - RNA, 19 nt, Artificial Sequence
  Description of Artificial Sequence: Synthetic oligonucleotide
  Sense strand starting at position 1929 of SEQ ID NO: 1886823
ucaucaugguuucugaaau

SEQ ID NO: 2428837 - RNA, 19 nt, Artificial Sequence
  Description of Artificial Sequence: Synthetic oligonucleotide
  Antisense strand to SEQ ID NO: 2428836
auuucagaaaccaugauga

SEQ ID NO: 2428838 - RNA, 19 nt, Artificial Sequence
  Description of Artificial Sequence: Synthetic oligonucleotide
  Sense strand starting at position 2600 of SEQ ID NO: 1886823
gaguaaagcuacuugauua

SEQ ID NO: 2428839 - RNA, 19 nt, Artificial Sequence
  Description of Artificial Sequence: Synthetic oligonucleotide
  Antisense strand to SEQ ID NO: 2428838
uaaucaaguagcuuuacuc

SEQ ID NO: 2428840 - RNA, 19 nt, Artificial Sequence
  Description of Artificial Sequence: Synthetic oligonucleotide
  Sense strand starting at position 2686 of SEQ ID NO: 1886823
cuggaauagaccuggugua

SEQ ID NO: 2428841 - RNA, 19 nt, Artificial Sequence
  Description of Artificial Sequence: Synthetic oligonucleotide
  Antisense strand to SEQ ID NO: 2428840
uacaccaggucuauuccag

SEQ ID NO: 2428842 - RNA, 19 nt, Artificial Sequence
  Description of Artificial Sequence: Synthetic oligonucleotide
  Sense strand starting at position 2768 of SEQ ID NO: 1886823
ugugaagaaaucugaaguu

SEQ ID NO: 2428843 - RNA, 19 nt, Artificial Sequence
  Description of Artificial Sequence: Synthetic oligonucleotide
  Antisense strand to SEQ ID NO: 2428842
aacuucagauuucuucaca

SEQ ID NO: 2428844 - RNA, 19 nt, Artificial Sequence
  Description of Artificial Sequence: Synthetic oligonucleotide
  Sense strand starting at position 2778 of SEQ ID NO: 1886823
ucugaaguuccucauaaug

SEQ ID NO: 2428845 - RNA, 19 nt, Artificial Sequence
  Description of Artificial Sequence: Synthetic oligonucleotide
  Antisense strand to SEQ ID NO: 2428844
cauuaugaggaacuucaga

SEQ ID NO: 2428846 - RNA, 19 nt, Artificial Sequence
  Description of Artificial Sequence: Synthetic oligonucleotide
  Sense strand starting at position 3131 of SEQ ID NO: 1886823
aagagauccuaugugauug

SEQ ID NO: 2428847 - RNA, 19 nt, Artificial Sequence
  Description of Artificial Sequence: Synthetic oligonucleotide
  Antisense strand to SEQ ID NO: 2428846
caaucacauaggaucucuu

SEQ ID NO: 2428848 - RNA, 19 nt, Artificial Sequence
  Description of Artificial Sequence: Synthetic oligonucleotide
  Sense strand starting at position 3135 of SEQ ID NO: 1886823
gauccuaugugauugggau

SEQ ID NO: 2428849 - RNA, 19 nt, Artificial Sequence
  Description of Artificial Sequence: Synthetic oligonucleotide
  Antisense strand to SEQ ID NO: 2428848
aucccaaucacauaggauc

SEQ ID NO: 2428850 - RNA, 19 nt, Artificial Sequence
  Description of Artificial Sequence: Synthetic oligonucleotide
  Sense strand starting at position 3136 of SEQ ID NO: 1886823
auccuaugugauugggauu

SEQ ID NO: 2428851 - RNA, 19 nt, Artificial Sequence
  Description of Artificial Sequence: Synthetic oligonucleotide
  Antisense strand to SEQ ID NO: 2428850
aaucccaaucacauaggau

SEQ ID NO: 2428852 - RNA, 19 nt, Artificial Sequence
  Description of Artificial Sequence: Synthetic oligonucleotide
  Sense strand starting at position 3137 of SEQ ID NO: 1886823
uccuaugugauugggauua

SEQ ID NO: 2428853 - RNA, 19 nt, Artificial Sequence
  Description of Artificial Sequence: Synthetic oligonucleotide
  Antisense strand to SEQ ID NO: 2428852
uaaucccaaucacauagga

SEQ ID NO: 2428854 - RNA, 19 nt, Artificial Sequence
  Description of Artificial Sequence: Synthetic oligonucleotide
  Sense strand starting at position 3160 of SEQ ID NO: 1886823
acaagugcuuucuuggaaa

SEQ ID NO: 2428855 - RNA, 19 nt, Artificial Sequence
  Description of Artificial Sequence: Synthetic oligonucleotide
  Antisense strand to SEQ ID NO: 2428854
uuuccaagaaagcacuugu

SEQ ID NO: 2428856 - RNA, 19 nt, Artificial Sequence
  Description of Artificial Sequence: Synthetic oligonucleotide
  Sense strand starting at position 3594 of SEQ ID NO: 1886823
gggccuuagagugguggaa

SEQ ID NO: 2428857 - RNA, 19 nt, Artificial Sequence
  Description of Artificial Sequence: Synthetic oligonucleotide
  Antisense strand to SEQ ID NO: 2428856
uuccaccacucuaaggccc

SEQ ID NO: 2428858 - RNA, 19 nt, Artificial Sequence
  Description of Artificial Sequence: Synthetic oligonucleotide
  Sense strand starting at position 3667 of SEQ ID NO: 1886823
gggucuuaagcauauuaag

SEQ ID NO: 2428859 - RNA, 19 nt, Artificial Sequence
  Description of Artificial Sequence: Synthetic oligonucleotide
  Antisense strand to SEQ ID NO: 2428858
cuuaauaugcuuaagaccc

SEQ ID NO: 2428860 - RNA, 19 nt, Artificial Sequence
  Description of Artificial Sequence: Synthetic oligonucleotide
  Sense strand starting at position 3748 of SEQ ID NO: 1886823
ccauccuuaguauaguaga

SEQ ID NO: 2428861 - RNA, 19 nt, Artificial Sequence
  Description of Artificial Sequence: Synthetic oligonucleotide
  Antisense strand to SEQ ID NO: 2428860
ucuacuauacuaaggaugg

SEQ ID NO: 2428862 - RNA, 19 nt, Artificial Sequence
  Description of Artificial Sequence: Synthetic oligonucleotide
  Sense strand starting at position 3765 of SEQ ID NO: 1886823
gaugaaggaugagaauaug

SEQ ID NO: 2428863 - RNA, 19 nt, Artificial Sequence
  Description of Artificial Sequence: Synthetic oligonucleotide
  Antisense strand to SEQ ID NO: 2428862
cauauucucauccuucauc

SEQ ID NO: 2428864 - RNA, 19 nt, Artificial Sequence
  Description of Artificial Sequence: Synthetic oligonucleotide
  Sense strand starting at position 3791 of SEQ ID NO: 1886823
uugaaauauccagguagcu

SEQ ID NO: 2428865 - RNA, 19 nt, Artificial Sequence
  Description of Artificial Sequence: Synthetic oligonucleotide
  Antisense strand to SEQ ID NO: 2428864
agcuaccuggauauuucaa

SEQ ID NO: 2428866 - RNA, 19 nt, Artificial Sequence
  Description of Artificial Sequence: Synthetic oligonucleotide
  Sense strand starting at position 3907 of SEQ ID NO: 1886823
augagaaccuaucuguaca

SEQ ID NO: 2428867 - RNA, 19 nt, Artificial Sequence
  Description of Artificial Sequence: Synthetic oligonucleotide
  Antisense strand to SEQ ID NO: 2428866
uguacagauagguucucau

SEQ ID NO: 2428868 - RNA, 19 nt, Artificial Sequence
  Description of Artificial Sequence: Synthetic oligonucleotide
  Sense strand starting at position 467 of SEQ ID NO: 1886824
ccucguucuccgcugcaau

SEQ ID NO: 2428869 - RNA, 19 nt, Artificial Sequence
  Description of Artificial Sequence: Synthetic oligonucleotide
  Antisense strand to SEQ ID NO: 2428868
auugcagcggagaacgagg

SEQ ID NO: 2428870 - RNA, 19 nt, Artificial Sequence
  Description of Artificial Sequence: Synthetic oligonucleotide
  Sense strand starting at position 600 of SEQ ID NO: 1886824
cgcacuucugagcaggagu

SEQ ID NO: 2428871 - RNA, 19 nt, Artificial Sequence
  Description of Artificial Sequence: Synthetic oligonucleotide
  Antisense strand to SEQ ID NO: 2428870
acuccugcucagaagugcg

SEQ ID NO: 2428872 - RNA, 19 nt, Artificial Sequence
  Description of Artificial Sequence: Synthetic oligonucleotide
  Sense strand starting at position 981 of SEQ ID NO: 1886824
gugguagucacauguaaac

SEQ ID NO: 2428873 - RNA, 19 nt, Artificial Sequence
  Description of Artificial Sequence: Synthetic oligonucleotide
  Antisense strand to SEQ ID NO: 2428872
guuuacaugugacuaccac

SEQ ID NO: 2428874 - RNA, 19 nt, Artificial Sequence
  Description of Artificial Sequence: Synthetic oligonucleotide
  Sense strand starting at position 983 of SEQ ID NO: 1886824
gguagucacauguaaacgu

SEQ ID NO: 2428875 - RNA, 19 nt, Artificial Sequence
  Description of Artificial Sequence: Synthetic oligonucleotide
  Antisense strand to SEQ ID NO: 2428874
acguuuacaugugacuacc

SEQ ID NO: 2428876 - RNA, 19 nt, Artificial Sequence
  Description of Artificial Sequence: Synthetic oligonucleotide
  Sense strand starting at position 1102 of SEQ ID NO: 1886824
cuaaguaucugcgguuucu

SEQ ID NO: 2428877 - RNA, 19 nt, Artificial Sequence
  Description of Artificial Sequence: Synthetic oligonucleotide
  Antisense strand to SEQ ID NO: 2428876
agaaaccgcagauacuuag

SEQ ID NO: 2428878 - RNA, 19 nt, Artificial Sequence
  Description of Artificial Sequence: Synthetic oligonucleotide
  Sense strand starting at position 1112 of SEQ ID NO: 1886824
gcgguuucuccacaauugu

SEQ ID NO: 2428879 - RNA, 19 nt, Artificial Sequence
  Description of Artificial Sequence: Synthetic oligonucleotide
  Antisense strand to SEQ ID NO: 2428878
acaauuguggagaaaccgc

SEQ ID NO: 2428880 - RNA, 19 nt, Artificial Sequence
  Description of Artificial Sequence: Synthetic oligonucleotide
  Sense strand starting at position 1133 of SEQ ID NO: 1886824
gggucugugaccuacaacu

SEQ ID NO: 2428881 - RNA, 19 nt, Artificial Sequence
  Description of Artificial Sequence: Synthetic oligonucleotide
  Antisense strand to SEQ ID NO: 2428880
aguuguaggucacagaccc

SEQ ID NO: 2428882 - RNA, 19 nt, Artificial Sequence
  Description of Artificial Sequence: Synthetic oligonucleotide
  Sense strand starting at position 2388 of SEQ ID NO: 1886824
gggauuaaguucucguuaa

SEQ ID NO: 2428883 - RNA, 19 nt, Artificial Sequence
  Description of Artificial Sequence: Synthetic oligonucleotide
  Antisense strand to SEQ ID NO: 2428882
uuaacgagaacuuaauccc

SEQ ID NO: 2428884 - RNA, 19 nt, Artificial Sequence
  Description of Artificial Sequence: Synthetic oligonucleotide
  Sense strand starting at position 2389 of SEQ ID NO: 1886824
ggauuaaguucucguuaaa

SEQ ID NO: 2428885 - RNA, 19 nt, Artificial Sequence
  Description of Artificial Sequence: Synthetic oligonucleotide
  Antisense strand to SEQ ID NO: 2428884
uuuaacgagaacuuaaucc

SEQ ID NO: 2428886 - RNA, 19 nt, Artificial Sequence
  Description of Artificial Sequence: Synthetic oligonucleotide
  Sense strand starting at position 2392 of SEQ ID NO: 1886824
uuaaguucucguuaaacac

SEQ ID NO: 2428887 - RNA, 19 nt, Artificial Sequence
  Description of Artificial Sequence: Synthetic oligonucleotide
  Antisense strand to SEQ ID NO: 2428886
guguuuaacgagaacuuaa

SEQ ID NO: 2428888 - RNA, 19 nt, Artificial Sequence
  Description of Artificial Sequence: Synthetic oligonucleotide
  Sense strand starting at position 2614 of SEQ ID NO: 1886824
gcccuagugucccugagga

SEQ ID NO: 2428889 - RNA, 19 nt, Artificial Sequence
  Description of Artificial Sequence: Synthetic oligonucleotide
  Antisense strand to SEQ ID NO: 2428888
uccucagggacacuagggc

SEQ ID NO: 2428890 - RNA, 19 nt, Artificial Sequence
  Description of Artificial Sequence: Synthetic oligonucleotide
  Sense strand starting at position 2616 of SEQ ID NO: 1886824
ccuagugucccugaggaau

SEQ ID NO: 2428891 - RNA, 19 nt, Artificial Sequence
  Description of Artificial Sequence: Synthetic oligonucleotide
  Antisense strand to SEQ ID NO: 2428890
auuccucagggacacuagg

SEQ ID NO: 2428892 - RNA, 19 nt, Artificial Sequence
  Description of Artificial Sequence: Synthetic oligonucleotide
  Sense strand starting at position 2734 of SEQ ID NO: 1886824
cuccgcuuguuccgagauu

SEQ ID NO: 2428893 - RNA, 19 nt, Artificial Sequence
  Description of Artificial Sequence: Synthetic oligonucleotide
  Antisense strand to SEQ ID NO: 2428892
aaucucggaacaagcggag

SEQ ID NO: 2428894 - RNA, 19 nt, Artificial Sequence
  Description of Artificial Sequence: Synthetic oligonucleotide
  Sense strand starting at position 2765 of SEQ ID NO: 1886824
ccacaagggccguguugaa

SEQ ID NO: 2428895 - RNA, 19 nt, Artificial Sequence
  Description of Artificial Sequence: Synthetic oligonucleotide
  Antisense strand to SEQ ID NO: 2428894
uucaacacggcccuugugg

SEQ ID NO: 2428896 - RNA, 19 nt, Artificial Sequence
  Description of Artificial Sequence: Synthetic oligonucleotide
  Sense strand starting at position 3798 of SEQ ID NO: 1886824
uucugaauguuggagggau

SEQ ID NO: 2428897 - RNA, 19 nt, Artificial Sequence
  Description of Artificial Sequence: Synthetic oligonucleotide
  Antisense strand to SEQ ID NO: 2428896
aucccuccaacauucagaa

SEQ ID NO: 2428898 - RNA, 19 nt, Artificial Sequence
  Description of Artificial Sequence: Synthetic oligonucleotide
  Sense strand starting at position 3800 of SEQ ID NO: 1886824
cugaauguuggagggauau

SEQ ID NO: 2428899 - RNA, 19 nt, Artificial Sequence
  Description of Artificial Sequence: Synthetic oligonucleotide
  Antisense strand to SEQ ID NO: 2428898
auaucccuccaacauucag

SEQ ID NO: 2428900 - RNA, 19 nt, Artificial Sequence
  Description of Artificial Sequence: Synthetic oligonucleotide
  Sense strand starting at position 3819 of SEQ ID NO: 1886824
uugagaguuucuguaacug

SEQ ID NO: 2428901 - RNA, 19 nt, Artificial Sequence
  Description of Artificial Sequence: Synthetic oligonucleotide
  Antisense strand to SEQ ID NO: 2428900
caguuacagaaacucucaa

SEQ ID NO: 2428902 - RNA, 19 nt, Artificial Sequence
  Description of Artificial Sequence: Synthetic oligonucleotide
  Sense strand starting at position 3824 of SEQ ID NO: 1886824
aguuucuguaacugaguca

SEQ ID NO: 2428903 - RNA, 19 nt, Artificial Sequence
  Description of Artificial Sequence: Synthetic oligonucleotide
  Antisense strand to SEQ ID NO: 2428902
ugacucaguuacagaaacu

SEQ ID NO: 2428904 - RNA, 19 nt, Artificial Sequence
  Description of Artificial Sequence: Synthetic oligonucleotide
  Sense strand starting at position 3845 of SEQ ID NO: 1886824
cugucagugccaugucauc

SEQ ID NO: 2428905 - RNA, 19 nt, Artificial Sequence
  Description of Artificial Sequence: Synthetic oligonucleotide
  Antisense strand to SEQ ID NO: 2428904
gaugacauggcacugacag

SEQ ID NO: 2428906 - RNA, 19 nt, Artificial Sequence
  Description of Artificial Sequence: Synthetic oligonucleotide
  Sense strand starting at position 3851 of SEQ ID NO: 1886824
gugccaugucaucagcaca

SEQ ID NO: 2428907 - RNA, 19 nt, Artificial Sequence
  Description of Artificial Sequence: Synthetic oligonucleotide
  Antisense strand to SEQ ID NO: 2428906
ugugcugaugacauggcac

SEQ ID NO: 2428908 - RNA, 19 nt, Artificial Sequence
  Description of Artificial Sequence: Synthetic oligonucleotide
  Sense strand starting at position 3872 of SEQ ID NO: 1886824
guuuccuaaucagguguga

SEQ ID NO: 2428909 - RNA, 19 nt, Artificial Sequence
  Description of Artificial Sequence: Synthetic oligonucleotide
  Antisense strand to SEQ ID NO: 2428908
ucacaccugauuaggaaac

SEQ ID NO: 2428910 - RNA, 19 nt, Artificial Sequence
  Description of Artificial Sequence: Synthetic oligonucleotide
  Sense strand starting at position 3876 of SEQ ID NO: 1886824
ccuaaucaggugugaaaug

SEQ ID NO: 2428911 - RNA, 19 nt, Artificial Sequence
  Description of Artificial Sequence: Synthetic oligonucleotide
  Antisense strand to SEQ ID NO: 2428910
cauuucacaccugauuagg

SEQ ID NO: 2428912 - RNA, 19 nt, Artificial Sequence
  Description of Artificial Sequence: Synthetic oligonucleotide
  Sense strand starting at position 3926 of SEQ ID NO: 1886824
aggugaucauguugcccaa

SEQ ID NO: 2428913 - RNA, 19 nt, Artificial Sequence
  Description of Artificial Sequence: Synthetic oligonucleotide
  Antisense strand to SEQ ID NO: 2428912
uugggcaacaugaucaccu

SEQ ID NO: 2428914 - RNA, 19 nt, Artificial Sequence
  Description of Artificial Sequence: Synthetic oligonucleotide
  Sense strand starting at position 97 of SEQ ID NO: 1886825
ccuacaugguuucuaccau

SEQ ID NO: 2428915 - RNA, 19 nt, Artificial Sequence
  Description of Artificial Sequence: Synthetic oligonucleotide
  Antisense strand to SEQ ID NO: 2428914
augguagaaaccauguagg

SEQ ID NO: 2428916 - RNA, 19 nt, Artificial Sequence
  Description of Artificial Sequence: Synthetic oligonucleotide
  Sense strand starting at position 98 of SEQ ID NO: 1886825
cuacaugguuucuaccaua

SEQ ID NO: 2428917 - RNA, 19 nt, Artificial Sequence
  Description of Artificial Sequence: Synthetic oligonucleotide
  Antisense strand to SEQ ID NO: 2428916
uaugguagaaaccauguag

SEQ ID NO: 2428918 - RNA, 19 nt, Artificial Sequence
  Description of Artificial Sequence: Synthetic oligonucleotide
  Sense strand starting at position 117 of SEQ ID NO: 1886825
ggcccaguuucugcuacaa

SEQ ID NO: 2428919 - RNA, 19 nt, Artificial Sequence
  Description of Artificial Sequence: Synthetic oligonucleotide
  Antisense strand to SEQ ID NO: 2428918
uuguagcagaaacugggcc

SEQ ID NO: 2428920 - RNA, 19 nt, Artificial Sequence
  Description of Artificial Sequence: Synthetic oligonucleotide
  Sense strand starting at position 240 of SEQ ID NO: 1886825
cgauaugguagccgcuaga

SEQ ID NO: 2428921 - RNA, 19 nt, Artificial Sequence
  Description of Artificial Sequence: Synthetic oligonucleotide
  Antisense strand to SEQ ID NO: 2428920
ucuagcggcuaccauaucg

SEQ ID NO: 2428922 - RNA, 19 nt, Artificial Sequence
  Description of Artificial Sequence: Synthetic oligonucleotide
  Sense strand starting at position 243 of SEQ ID NO: 1886825
uaugguagccgcuagaaua

SEQ ID NO: 2428923 - RNA, 19 nt, Artificial Sequence
  Description of Artificial Sequence: Synthetic oligonucleotide
  Antisense strand to SEQ ID NO: 2428922
uauucuagcggcuaccaua

SEQ ID NO: 2428924 - RNA, 19 nt, Artificial Sequence
  Description of Artificial Sequence: Synthetic oligonucleotide
  Sense strand starting at position 631 of SEQ ID NO: 1886825
uuuccuguggcccagaauu

SEQ ID NO: 2428925 - RNA, 19 nt, Artificial Sequence
  Description of Artificial Sequence: Synthetic oligonucleotide
  Antisense strand to SEQ ID NO: 2428924
aauucugggccacaggaaa

SEQ ID NO: 2428926 - RNA, 19 nt, Artificial Sequence
  Description of Artificial Sequence: Synthetic oligonucleotide
  Sense strand starting at position 660 of SEQ ID NO: 1886825
gagggaaauugugccaagu

SEQ ID NO: 2428927 - RNA, 19 nt, Artificial Sequence
  Description of Artificial Sequence: Synthetic oligonucleotide
  Antisense strand to SEQ ID NO: 2428926
acuuggcacaauuucccuc

SEQ ID NO: 2428928 - RNA, 19 nt, Artificial Sequence
  Description of Artificial Sequence: Synthetic oligonucleotide
  Sense strand starting at position 662 of SEQ ID NO: 1886825
gggaaauugugccaaguua

SEQ ID NO: 2428929 - RNA, 19 nt, Artificial Sequence
  Description of Artificial Sequence: Synthetic oligonucleotide
  Antisense strand to SEQ ID NO: 2428928
uaacuuggcacaauuuccc

SEQ ID NO: 2428930 - RNA, 19 nt, Artificial Sequence
  Description of Artificial Sequence: Synthetic oligonucleotide
  Sense strand starting at position 762 of SEQ ID NO: 1886825
cuuucucugggauguuuaa

SEQ ID NO: 2428931 - RNA, 19 nt, Artificial Sequence
  Description of Artificial Sequence: Synthetic oligonucleotide
  Antisense strand to SEQ ID NO: 2428930
uuaaacaucccagagaaag

SEQ ID NO: 2428932 - RNA, 19 nt, Artificial Sequence
  Description of Artificial Sequence: Synthetic oligonucleotide
  Sense strand starting at position 795 of SEQ ID NO: 1886825
gacggaucaucucucugau

SEQ ID NO: 2428933 - RNA, 19 nt, Artificial Sequence
  Description of Artificial Sequence: Synthetic oligonucleotide
  Antisense strand to SEQ ID NO: 2428932
aucagagagaugauccguc

SEQ ID NO: 2428934 - RNA, 19 nt, Artificial Sequence
  Description of Artificial Sequence: Synthetic oligonucleotide
  Sense strand starting at position 797 of SEQ ID NO: 1886825
cggaucaucucucugauga

SEQ ID NO: 2428935 - RNA, 19 nt, Artificial Sequence
  Description of Artificial Sequence: Synthetic oligonucleotide
  Antisense strand to SEQ ID NO: 2428934
ucaucagagagaugauccg

SEQ ID NO: 2428936 - RNA, 19 nt, Artificial Sequence
  Description of Artificial Sequence: Synthetic oligonucleotide
  Sense strand starting at position 798 of SEQ ID NO: 1886825
ggaucaucucucugaugau

SEQ ID NO: 2428937 - RNA, 19 nt, Artificial Sequence
  Description of Artificial Sequence: Synthetic oligonucleotide
  Antisense strand to SEQ ID NO: 2428936
aucaucagagagaugaucc

SEQ ID NO: 2428938 - RNA, 19 nt, Artificial Sequence
  Description of Artificial Sequence: Synthetic oligonucleotide
  Sense strand starting at position 821 of SEQ ID NO: 1886825
uucugaugcucgucuacuu

SEQ ID NO: 2428939 - RNA, 19 nt, Artificial Sequence
  Description of Artificial Sequence: Synthetic oligonucleotide
  Antisense strand to SEQ ID NO: 2428938
aaguagacgagcaucagaa

SEQ ID NO: 2428940 - RNA, 19 nt, Artificial Sequence
  Description of Artificial Sequence: Synthetic oligonucleotide
  Sense strand starting at position 833 of SEQ ID NO: 1886825
ucuacuugaugcucagaaa

SEQ ID NO: 2428941 - RNA, 19 nt, Artificial Sequence
  Description of Artificial Sequence: Synthetic oligonucleotide
  Antisense strand to SEQ ID NO: 2428940
uuucugagcaucaaguaga

SEQ ID NO: 2428942 - RNA, 19 nt, Artificial Sequence
  Description of Artificial Sequence: Synthetic oligonucleotide
  Sense strand starting at position 857 of SEQ ID NO: 1886825
guucucauacucuauaggu

SEQ ID NO: 2428943 - RNA, 19 nt, Artificial Sequence
  Description of Artificial Sequence: Synthetic oligonucleotide
  Antisense strand to SEQ ID NO: 2428942
accuauagaguaugagaac

SEQ ID NO: 2428944 - RNA, 19 nt, Artificial Sequence
  Description of Artificial Sequence: Synthetic oligonucleotide
  Sense strand starting at position 911 of SEQ ID NO: 1886825
gccagagcucaggaccaau

SEQ ID NO: 2428945 - RNA, 19 nt, Artificial Sequence
  Description of Artificial Sequence: Synthetic oligonucleotide
  Antisense strand to SEQ ID NO: 2428944
auugguccugagcucuggc

SEQ ID NO: 2428946 - RNA, 19 nt, Artificial Sequence
  Description of Artificial Sequence: Synthetic oligonucleotide
  Sense strand starting at position 939 of SEQ ID NO: 1886825
cugauacccucugaguuga

SEQ ID NO: 2428947 - RNA, 19 nt, Artificial Sequence
  Description of Artificial Sequence: Synthetic oligonucleotide
  Antisense strand to SEQ ID NO: 2428946
ucaacucagaggguaucag

SEQ ID NO: 2428948 - RNA, 19 nt, Artificial Sequence
  Description of Artificial Sequence: Synthetic oligonucleotide
  Sense strand starting at position 1088 of SEQ ID NO: 1886825
ggguaucaguggaaggaaa

SEQ ID NO: 2428949 - RNA, 19 nt, Artificial Sequence
  Description of Artificial Sequence: Synthetic oligonucleotide
  Antisense strand to SEQ ID NO: 2428948
uuuccuuccacugauaccc

SEQ ID NO: 2428950 - RNA, 19 nt, Artificial Sequence
  Description of Artificial Sequence: Synthetic oligonucleotide
  Sense strand starting at position 1270 of SEQ ID NO: 1886825
guagaaguuugggugagga

SEQ ID NO: 2428951 - RNA, 19 nt, Artificial Sequence
  Description of Artificial Sequence: Synthetic oligonucleotide
  Antisense strand to SEQ ID NO: 2428950
uccucacccaaacuucuac

SEQ ID NO: 2428952 - RNA, 19 nt, Artificial Sequence
  Description of Artificial Sequence: Synthetic oligonucleotide
  Sense strand starting at position 1586 of SEQ ID NO: 1886825
cccucauuauccucgagga

SEQ ID NO: 2428953 - RNA, 19 nt, Artificial Sequence
  Description of Artificial Sequence: Synthetic oligonucleotide
  Antisense strand to SEQ ID NO: 2428952
uccucgaggauaaugaggg

SEQ ID NO: 2428954 - RNA, 19 nt, Artificial Sequence
  Description of Artificial Sequence: Synthetic oligonucleotide
  Sense strand starting at position 1587 of SEQ ID NO: 1886825
ccucauuauccucgaggac

SEQ ID NO: 2428955 - RNA, 19 nt, Artificial Sequence
  Description of Artificial Sequence: Synthetic oligonucleotide
  Antisense strand to SEQ ID NO: 2428954
guccucgaggauaaugagg

SEQ ID NO: 2428956 - RNA, 19 nt, Artificial Sequence
  Description of Artificial Sequence: Synthetic oligonucleotide
  Sense strand starting at position 2160 of SEQ ID NO: 1886825
ggaucuaagucuuucgauu

SEQ ID NO: 2428957 - RNA, 19 nt, Artificial Sequence
  Description of Artificial Sequence: Synthetic oligonucleotide
  Antisense strand to SEQ ID NO: 2428956
aaucgaaagacuuagaucc

SEQ ID NO: 2428958 - RNA, 19 nt, Artificial Sequence
  Description of Artificial Sequence: Synthetic oligonucleotide
  Sense strand starting at position 2216 of SEQ ID NO: 1886825
cuuuguuugcuuucucagu

SEQ ID NO: 2428959 - RNA, 19 nt, Artificial Sequence
  Description of Artificial Sequence: Synthetic oligonucleotide
  Antisense strand to SEQ ID NO: 2428958
acugagaaagcaaacaaag

SEQ ID NO: 2428960 - RNA, 19 nt, Artificial Sequence
  Description of Artificial Sequence: Synthetic oligonucleotide
  Sense strand starting at position 2327 of SEQ ID NO: 1886825
gguucaauugcgugaugcu

SEQ ID NO: 2428961 - RNA, 19 nt, Artificial Sequence
  Description of Artificial Sequence: Synthetic oligonucleotide
  Antisense strand to SEQ ID NO: 2428960
agcaucacgcaauugaacc

SEQ ID NO: 2428962 - RNA, 19 nt, Artificial Sequence
  Description of Artificial Sequence: Synthetic oligonucleotide
  Sense strand starting at position 2328 of SEQ ID NO: 1886825
guucaauugcgugaugcuu

SEQ ID NO: 2428963 - RNA, 19 nt, Artificial Sequence
  Description of Artificial Sequence: Synthetic oligonucleotide
  Antisense strand to SEQ ID NO: 2428962
aagcaucacgcaauugaac

SEQ ID NO: 2428964 - RNA, 19 nt, Artificial Sequence
  Description of Artificial Sequence: Synthetic oligonucleotide
  Sense strand starting at position 2442 of SEQ ID NO: 1886825
gguguuugcauuugaucuu

SEQ ID NO: 2428965 - RNA, 19 nt, Artificial Sequence
  Description of Artificial Sequence: Synthetic oligonucleotide
  Antisense strand to SEQ ID NO: 2428964
aagaucaaaugcaaacacc

SEQ ID NO: 2428966 - RNA, 19 nt, Artificial Sequence
  Description of Artificial Sequence: Synthetic oligonucleotide
  Sense strand starting at position 2451 of SEQ ID NO: 1886825
auuugaucuucgcaggguu

SEQ ID NO: 2428967 - RNA, 19 nt, Artificial Sequence
  Description of Artificial Sequence: Synthetic oligonucleotide
  Antisense strand to SEQ ID NO: 2428966
aacccugcgaagaucaaau

SEQ ID NO: 2428968 - RNA, 19 nt, Artificial Sequence
  Description of Artificial Sequence: Synthetic oligonucleotide
  Sense strand starting at position 2640 of SEQ ID NO: 1886825
ccugccuuccuagaauagu

SEQ ID NO: 2428969 - RNA, 19 nt, Artificial Sequence
  Description of Artificial Sequence: Synthetic oligonucleotide
  Antisense strand to SEQ ID NO: 2428968
acuauucuaggaaggcagg

SEQ ID NO: 2428970 - RNA, 19 nt, Artificial Sequence
  Description of Artificial Sequence: Synthetic oligonucleotide
  Sense strand starting at position 2650 of SEQ ID NO: 1886825
uagaauaguugaggagaca

SEQ ID NO: 2428971 - RNA, 19 nt, Artificial Sequence
  Description of Artificial Sequence: Synthetic oligonucleotide
  Antisense strand to SEQ ID NO: 2428970
ugucuccucaacuauucua

SEQ ID NO: 2428972 - RNA, 19 nt, Artificial Sequence
  Description of Artificial Sequence: Synthetic oligonucleotide
  Sense strand starting at position 2677 of SEQ ID NO: 1886825
gguauuacccaggaaugcu

SEQ ID NO: 2428973 - RNA, 19 nt, Artificial Sequence
  Description of Artificial Sequence: Synthetic oligonucleotide
  Antisense strand to SEQ ID NO: 2428972
agcauuccuggguaauacc

SEQ ID NO: 2428974 - RNA, 19 nt, Artificial Sequence
  Description of Artificial Sequence: Synthetic oligonucleotide
  Sense strand starting at position 2686 of SEQ ID NO: 1886825
caggaaugcuauuacagag

SEQ ID NO: 2428975 - RNA, 19 nt, Artificial Sequence
  Description of Artificial Sequence: Synthetic oligonucleotide
  Antisense strand to SEQ ID NO: 2428974
cucuguaauagcauuccug

SEQ ID NO: 2428976 - RNA, 19 nt, Artificial Sequence
  Description of Artificial Sequence: Synthetic oligonucleotide
  Sense strand starting at position 2692 of SEQ ID NO: 1886825
ugcuauuacagaggucuga

SEQ ID NO: 2428977 - RNA, 19 nt, Artificial Sequence
  Description of Artificial Sequence: Synthetic oligonucleotide
  Antisense strand to SEQ ID NO: 2428976
ucagaccucuguaauagca

SEQ ID NO: 2428978 - RNA, 19 nt, Artificial Sequence
  Description of Artificial Sequence: Synthetic oligonucleotide
  Sense strand starting at position 2696 of SEQ ID NO: 1886825
auuacagaggucugaguca

SEQ ID NO: 2428979 - RNA, 19 nt, Artificial Sequence
  Description of Artificial Sequence: Synthetic oligonucleotide
  Antisense strand to SEQ ID NO: 2428978
ugacucagaccucuguaau

SEQ ID NO: 2428980 - RNA, 19 nt, Artificial Sequence
  Description of Artificial Sequence: Synthetic oligonucleotide
  Sense strand starting at position 2703 of SEQ ID NO: 1886825
aggucugagucagaagaca

SEQ ID NO: 2428981 - RNA, 19 nt, Artificial Sequence
  Description of Artificial Sequence: Synthetic oligonucleotide
  Antisense strand to SEQ ID NO: 2428980
ugucuucugacucagaccu

SEQ ID NO: 2428982 - RNA, 19 nt, Artificial Sequence
  Description of Artificial Sequence: Synthetic oligonucleotide
  Sense strand starting at position 2790 of SEQ ID NO: 1886825
ugaggacagucuuucugaa

SEQ ID NO: 2428983 - RNA, 19 nt, Artificial Sequence
  Description of Artificial Sequence: Synthetic oligonucleotide
  Antisense strand to SEQ ID NO: 2428982
uucagaaagacuguccuca

SEQ ID NO: 2428984 - RNA, 19 nt, Artificial Sequence
  Description of Artificial Sequence: Synthetic oligonucleotide
  Sense strand starting at position 2794 of SEQ ID NO: 1886825
gacagucuuucugaaggau

SEQ ID NO: 2428985 - RNA, 19 nt, Artificial Sequence
  Description of Artificial Sequence: Synthetic oligonucleotide
  Antisense strand to SEQ ID NO: 2428984
auccuucagaaagacuguc

SEQ ID NO: 2428986 - RNA, 19 nt, Artificial Sequence
  Description of Artificial Sequence: Synthetic oligonucleotide
  Sense strand starting at position 2806 of SEQ ID NO: 1886825
gaaggaugcgcagaaguuu

SEQ ID NO: 2428987 - RNA, 19 nt, Artificial Sequence
  Description of Artificial Sequence: Synthetic oligonucleotide
  Antisense strand to SEQ ID NO: 2428986
aaacuucugcgcauccuuc

SEQ ID NO: 2428988 - RNA, 19 nt, Artificial Sequence
  Description of Artificial Sequence: Synthetic oligonucleotide
  Sense strand starting at position 3894 of SEQ ID NO: 1886825
ggguacucuucuguuaggu

SEQ ID NO: 2428989 - RNA, 19 nt, Artificial Sequence
  Description of Artificial Sequence: Synthetic oligonucleotide
  Antisense strand to SEQ ID NO: 2428988
accuaacagaagaguaccc

SEQ ID NO: 2428990 - RNA, 19 nt, Artificial Sequence
  Description of Artificial Sequence: Synthetic oligonucleotide
  Sense strand starting at position 3978 of SEQ ID NO: 1886825
gccuuuaugagcuguagua

SEQ ID NO: 2428991 - RNA, 19 nt, Artificial Sequence
  Description of Artificial Sequence: Synthetic oligonucleotide
  Antisense strand to SEQ ID NO: 2428990
uacuacagcucauaaaggc

SEQ ID NO: 2428992 - RNA, 19 nt, Artificial Sequence
  Description of Artificial Sequence: Synthetic oligonucleotide
  Sense strand starting at position 3980 of SEQ ID NO: 1886825
cuuuaugagcuguaguacu

SEQ ID NO: 2428993 - RNA, 19 nt, Artificial Sequence
  Description of Artificial Sequence: Synthetic oligonucleotide
  Antisense strand to SEQ ID NO: 2428992
aguacuacagcucauaaag

SEQ ID NO: 2428994 - RNA, 19 nt, Artificial Sequence
  Description of Artificial Sequence: Synthetic oligonucleotide
  Sense strand starting at position 556 of SEQ ID NO: 1886826
acaguuggauuccauuuau

SEQ ID NO: 2428995 - RNA, 19 nt, Artificial Sequence
  Description of Artificial Sequence: Synthetic oligonucleotide
  Antisense strand to SEQ ID NO: 2428994
auaaauggaauccaacugu

SEQ ID NO: 2428996 - RNA, 19 nt, Artificial Sequence
  Description of Artificial Sequence: Synthetic oligonucleotide
  Sense strand starting at position 607 of SEQ ID NO: 1886826
ggugacagacgucagaaua

SEQ ID NO: 2428997 - RNA, 19 nt, Artificial Sequence
  Description of Artificial Sequence: Synthetic oligonucleotide
  Antisense strand to SEQ ID NO: 2428996
uauucugacgucugucacc

SEQ ID NO: 2428998 - RNA, 19 nt, Artificial Sequence
  Description of Artificial Sequence: Synthetic oligonucleotide
  Sense strand starting at position 625 of SEQ ID NO: 1886826
agugauuacucuuuggagg

SEQ ID NO: 2428999 - RNA, 19 nt, Artificial Sequence
  Description of Artificial Sequence: Synthetic oligonucleotide
  Antisense strand to SEQ ID NO: 2428998
ccuccaaagaguaaucacu

SEQ ID NO: 2429000 - RNA, 19 nt, Artificial Sequence
  Description of Artificial Sequence: Synthetic oligonucleotide
  Sense strand starting at position 626 of SEQ ID NO: 1886826
gugauuacucuuuggaggu

SEQ ID NO: 2429001 - RNA, 19 nt, Artificial Sequence
  Description of Artificial Sequence: Synthetic oligonucleotide
  Antisense strand to SEQ ID NO: 2429000
accuccaaagaguaaucac

SEQ ID NO: 2429002 - RNA, 19 nt, Artificial Sequence
  Description of Artificial Sequence: Synthetic oligonucleotide
  Sense strand starting at position 630 of SEQ ID NO: 1886826
uuacucuuuggagguuaau

SEQ ID NO: 2429003 - RNA, 19 nt, Artificial Sequence
  Description of Artificial Sequence: Synthetic oligonucleotide
  Antisense strand to SEQ ID NO: 2429002
auuaaccuccaaagaguaa

SEQ ID NO: 2429004 - RNA, 19 nt, Artificial Sequence
  Description of Artificial Sequence: Synthetic oligonucleotide
  Sense strand starting at position 639 of SEQ ID NO: 1886826
ggagguuaauggcuagaag

SEQ ID NO: 2429005 - RNA, 19 nt, Artificial Sequence
  Description of Artificial Sequence: Synthetic oligonucleotide
  Antisense strand to SEQ ID NO: 2429004
cuucuagccauuaaccucc

SEQ ID NO: 2429006 - RNA, 19 nt, Artificial Sequence
  Description of Artificial Sequence: Synthetic oligonucleotide
  Sense strand starting at position 1014 of SEQ ID NO: 1886826
gugcuacuucugccagugu

SEQ ID NO: 2429007 - RNA, 19 nt, Artificial Sequence
  Description of Artificial Sequence: Synthetic oligonucleotide
  Antisense strand to SEQ ID NO: 2429006
acacuggcagaaguagcac

SEQ ID NO: 2429008 - RNA, 19 nt, Artificial Sequence
  Description of Artificial Sequence: Synthetic oligonucleotide
  Sense strand starting at position 1028 of SEQ ID NO: 1886826
aguguucaguugguagaag

SEQ ID NO: 2429009 - RNA, 19 nt, Artificial Sequence
  Description of Artificial Sequence: Synthetic oligonucleotide
  Antisense strand to SEQ ID NO: 2429008
cuucuaccaacugaacacu

SEQ ID NO: 2429010 - RNA, 19 nt, Artificial Sequence
  Description of Artificial Sequence: Synthetic oligonucleotide
  Sense strand starting at position 1091 of SEQ ID NO: 1886826
uccuuuaaucaguaguucu

SEQ ID NO: 2429011 - RNA, 19 nt, Artificial Sequence
  Description of Artificial Sequence: Synthetic oligonucleotide
  Antisense strand to SEQ ID NO: 2429010
agaacuacugauuaaagga

SEQ ID NO: 2429012 - RNA, 19 nt, Artificial Sequence
  Description of Artificial Sequence: Synthetic oligonucleotide
  Sense strand starting at position 1635 of SEQ ID NO: 1886826
cuggauaaguucuugaaag

SEQ ID NO: 2429013 - RNA, 19 nt, Artificial Sequence
  Description of Artificial Sequence: Synthetic oligonucleotide
  Antisense strand to SEQ ID NO: 2429012
cuuucaagaacuuauccag

SEQ ID NO: 2429014 - RNA, 19 nt, Artificial Sequence
  Description of Artificial Sequence: Synthetic oligonucleotide
  Sense strand starting at position 1637 of SEQ ID NO: 1886826
ggauaaguucuugaaagcu

SEQ ID NO: 2429015 - RNA, 19 nt, Artificial Sequence
  Description of Artificial Sequence: Synthetic oligonucleotide
  Antisense strand to SEQ ID NO: 2429014
agcuuucaagaacuuaucc

SEQ ID NO: 2429016 - RNA, 19 nt, Artificial Sequence
  Description of Artificial Sequence: Synthetic oligonucleotide
  Sense strand starting at position 1643 of SEQ ID NO: 1886826
guucuugaaagcuggacuu

SEQ ID NO: 2429017 - RNA, 19 nt, Artificial Sequence
  Description of Artificial Sequence: Synthetic oligonucleotide
  Antisense strand to SEQ ID NO: 2429016
aaguccagcuuucaagaac

SEQ ID NO: 2429018 - RNA, 19 nt, Artificial Sequence
  Description of Artificial Sequence: Synthetic oligonucleotide
  Sense strand starting at position 1689 of SEQ ID NO: 1886826
gccgaaucugugccuucuu

SEQ ID NO: 2429019 - RNA, 19 nt, Artificial Sequence
  Description of Artificial Sequence: Synthetic oligonucleotide
  Antisense strand to SEQ ID NO: 2429018
aagaaggcacagauucggc

SEQ ID NO: 2429020 - RNA, 19 nt, Artificial Sequence
  Description of Artificial Sequence: Synthetic oligonucleotide
  Sense strand starting at position 1694 of SEQ ID NO: 1886826
aucugugccuucuuugaaa

SEQ ID NO: 2429021 - RNA, 19 nt, Artificial Sequence
  Description of Artificial Sequence: Synthetic oligonucleotide
  Antisense strand to SEQ ID NO: 2429020
uuucaaagaaggcacagau

SEQ ID NO: 2429022 - RNA, 19 nt, Artificial Sequence
  Description of Artificial Sequence: Synthetic oligonucleotide
  Sense strand starting at position 1818 of SEQ ID NO: 1886826
agagcugaguucuuacuaa

SEQ ID NO: 2429023 - RNA, 19 nt, Artificial Sequence
  Description of Artificial Sequence: Synthetic oligonucleotide
  Antisense strand to SEQ ID NO: 2429022
uuaguaagaacucagcucu

SEQ ID NO: 2429024 - RNA, 19 nt, Artificial Sequence
  Description of Artificial Sequence: Synthetic oligonucleotide
  Sense strand starting at position 1853 of SEQ ID NO: 1886826
guuaggugcgcguugcaaa

SEQ ID NO: 2429025 - RNA, 19 nt, Artificial Sequence
  Description of Artificial Sequence: Synthetic oligonucleotide
  Antisense strand to SEQ ID NO: 2429024
uuugcaacgcgcaccuaac

SEQ ID NO: 2429026 - RNA, 19 nt, Artificial Sequence
  Description of Artificial Sequence: Synthetic oligonucleotide
  Sense strand starting at position 1860 of SEQ ID NO: 1886826
gcgcguugcaaagcaguaa

SEQ ID NO: 2429027 - RNA, 19 nt, Artificial Sequence
  Description of Artificial Sequence: Synthetic oligonucleotide
  Antisense strand to SEQ ID NO: 2429026
uuacugcuuugcaacgcgc

SEQ ID NO: 2429028 - RNA, 19 nt, Artificial Sequence
  Description of Artificial Sequence: Synthetic oligonucleotide
  Sense strand starting at position 2134 of SEQ ID NO: 1886826
cccuccuuccgcugagaaa

SEQ ID NO: 2429029 - RNA, 19 nt, Artificial Sequence
  Description of Artificial Sequence: Synthetic oligonucleotide
  Antisense strand to SEQ ID NO: 2429028
uuucucagcggaaggaggg

SEQ ID NO: 2429030 - RNA, 19 nt, Artificial Sequence
  Description of Artificial Sequence: Synthetic oligonucleotide
  Sense strand starting at position 2238 of SEQ ID NO: 1886826
cuuccugucccugguauaa

SEQ ID NO: 2429031 - RNA, 19 nt, Artificial Sequence
  Description of Artificial Sequence: Synthetic oligonucleotide
  Antisense strand to SEQ ID NO: 2429030
uuauaccagggacaggaag

SEQ ID NO: 2429032 - RNA, 19 nt, Artificial Sequence
  Description of Artificial Sequence: Synthetic oligonucleotide
  Sense strand starting at position 3072 of SEQ ID NO: 1886826
cucugagaaaguugucuga

SEQ ID NO: 2429033 - RNA, 19 nt, Artificial Sequence
  Description of Artificial Sequence: Synthetic oligonucleotide
  Antisense strand to SEQ ID NO: 2429032
ucagacaacuuucucagag

SEQ ID NO: 2429034 - RNA, 19 nt, Artificial Sequence
  Description of Artificial Sequence: Synthetic oligonucleotide
  Sense strand starting at position 3075 of SEQ ID NO: 1886826
ugagaaaguugucugaggu

SEQ ID NO: 2429035 - RNA, 19 nt, Artificial Sequence
  Description of Artificial Sequence: Synthetic oligonucleotide
  Antisense strand to SEQ ID NO: 2429034
accucagacaacuuucuca

SEQ ID NO: 2429036 - RNA, 19 nt, Artificial Sequence
  Description of Artificial Sequence: Synthetic oligonucleotide
  Sense strand starting at position 3076 of SEQ ID NO: 1886826
gagaaaguugucugaggug

SEQ ID NO: 2429037 - RNA, 19 nt, Artificial Sequence
  Description of Artificial Sequence: Synthetic oligonucleotide
  Antisense strand to SEQ ID NO: 2429036
caccucagacaacuuucuc

SEQ ID NO: 2429038 - RNA, 19 nt, Artificial Sequence
  Description of Artificial Sequence: Synthetic oligonucleotide
  Sense strand starting at position 3090 of SEQ ID NO: 1886826
agguguuauagcuaguaag

SEQ ID NO: 2429039 - RNA, 19 nt, Artificial Sequence
  Description of Artificial Sequence: Synthetic oligonucleotide
  Antisense strand to SEQ ID NO: 2429038
cuuacuagcuauaacaccu

SEQ ID NO: 2429040 - RNA, 19 nt, Artificial Sequence
  Description of Artificial Sequence: Synthetic oligonucleotide
  Sense strand starting at position 3100 of SEQ ID NO: 1886826
gcuaguaagacgcaagacu

SEQ ID NO: 2429041 - RNA, 19 nt, Artificial Sequence
  Description of Artificial Sequence: Synthetic oligonucleotide
  Antisense strand to SEQ ID NO: 2429040
agucuugcgucuuacuagc

SEQ ID NO: 2429042 - RNA, 19 nt, Artificial Sequence
  Description of Artificial Sequence: Synthetic oligonucleotide
  Sense strand starting at position 3120 of SEQ ID NO: 1886826
ggguuauaauuaguuguuu

SEQ ID NO: 2429043 - RNA, 19 nt, Artificial Sequence
  Description of Artificial Sequence: Synthetic oligonucleotide
  Antisense strand to SEQ ID NO: 2429042
aaacaacuaauuauaaccc

SEQ ID NO: 2429044 - RNA, 19 nt, Artificial Sequence
  Description of Artificial Sequence: Synthetic oligonucleotide
  Sense strand starting at position 3175 of SEQ ID NO: 1886826
ugauguguuccacagauaa

SEQ ID NO: 2429045 - RNA, 19 nt, Artificial Sequence
  Description of Artificial Sequence: Synthetic oligonucleotide
  Antisense strand to SEQ ID NO: 2429044
uuaucuguggaacacauca

SEQ ID NO: 2429046 - RNA, 19 nt, Artificial Sequence
  Description of Artificial Sequence: Synthetic oligonucleotide
  Sense strand starting at position 3186 of SEQ ID NO: 1886826
acagauaauucuuugagca

SEQ ID NO: 2429047 - RNA, 19 nt, Artificial Sequence
  Description of Artificial Sequence: Synthetic oligonucleotide
  Antisense strand to SEQ ID NO: 2429046
ugcucaaagaauuaucugu

SEQ ID NO: 2429048 - RNA, 19 nt, Artificial Sequence
  Description of Artificial Sequence: Synthetic oligonucleotide
  Sense strand starting at position 3212 of SEQ ID NO: 1886826
gggcauuauauuggacacu

SEQ ID NO: 2429049 - RNA, 19 nt, Artificial Sequence
  Description of Artificial Sequence: Synthetic oligonucleotide
  Antisense strand to SEQ ID NO: 2429048
aguguccaauauaaugccc

SEQ ID NO: 2429050 - RNA, 19 nt, Artificial Sequence
  Description of Artificial Sequence: Synthetic oligonucleotide
  Sense strand starting at position 3250 of SEQ ID NO: 1886826
auacgauccuugucuacca

SEQ ID NO: 2429051 - RNA, 19 nt, Artificial Sequence
  Description of Artificial Sequence: Synthetic oligonucleotide
  Antisense strand to SEQ ID NO: 2429050
ugguagacaaggaucguau

SEQ ID NO: 2429052 - RNA, 19 nt, Artificial Sequence
  Description of Artificial Sequence: Synthetic oligonucleotide
  Sense strand starting at position 3258 of SEQ ID NO: 1886826
cuugucuaccaggagucua

SEQ ID NO: 2429053 - RNA, 19 nt, Artificial Sequence
  Description of Artificial Sequence: Synthetic oligonucleotide
  Antisense strand to SEQ ID NO: 2429052
uagacuccugguagacaag

SEQ ID NO: 2429054 - RNA, 19 nt, Artificial Sequence
  Description of Artificial Sequence: Synthetic oligonucleotide
  Sense strand starting at position 3289 of SEQ ID NO: 1886826
acagguacauaaguauaau

SEQ ID NO: 2429055 - RNA, 19 nt, Artificial Sequence
  Description of Artificial Sequence: Synthetic oligonucleotide
  Antisense strand to SEQ ID NO: 2429054
auuauacuuauguaccugu

SEQ ID NO: 2429056 - RNA, 19 nt, Artificial Sequence
  Description of Artificial Sequence: Synthetic oligonucleotide
  Sense strand starting at position 3323 of SEQ ID NO: 1886826
cugugagaauagucugaua

SEQ ID NO: 2429057 - RNA, 19 nt, Artificial Sequence
  Description of Artificial Sequence: Synthetic oligonucleotide
  Antisense strand to SEQ ID NO: 2429056
uaucagacuauucucacag

SEQ ID NO: 2429058 - RNA, 19 nt, Artificial Sequence
  Description of Artificial Sequence: Synthetic oligonucleotide
  Sense strand starting at position 3325 of SEQ ID NO: 1886826
gugagaauagucugauaau

SEQ ID NO: 2429059 - RNA, 19 nt, Artificial Sequence
  Description of Artificial Sequence: Synthetic oligonucleotide
  Antisense strand to SEQ ID NO: 2429058
auuaucagacuauucucac

SEQ ID NO: 2429060 - RNA, 19 nt, Artificial Sequence
  Description of Artificial Sequence: Synthetic oligonucleotide
  Sense strand starting at position 3505 of SEQ ID NO: 1886826
gauugugagagcuguuaug

SEQ ID NO: 2429061 - RNA, 19 nt, Artificial Sequence
  Description of Artificial Sequence: Synthetic oligonucleotide
  Antisense strand to SEQ ID NO: 2429060
cauaacagcucucacaauc

SEQ ID NO: 2429062 - RNA, 19 nt, Artificial Sequence
  Description of Artificial Sequence: Synthetic oligonucleotide
  Sense strand starting at position 3512 of SEQ ID NO: 1886826
agagcuguuauggaaucuu

SEQ ID NO: 2429063 - RNA, 19 nt, Artificial Sequence
  Description of Artificial Sequence: Synthetic oligonucleotide
  Antisense strand to SEQ ID NO: 2429062
aagauuccauaacagcucu

SEQ ID NO: 2429064 - RNA, 19 nt, Artificial Sequence
  Description of Artificial Sequence: Synthetic oligonucleotide
  Sense strand starting at position 3550 of SEQ ID NO: 1886826
gggaguggucauugcagga

SEQ ID NO: 2429065 - RNA, 19 nt, Artificial Sequence
  Description of Artificial Sequence: Synthetic oligonucleotide
  Antisense strand to SEQ ID NO: 2429064
uccugcaaugaccacuccc

SEQ ID NO: 2429066 - RNA, 19 nt, Artificial Sequence
  Description of Artificial Sequence: Synthetic oligonucleotide
  Sense strand starting at position 3627 of SEQ ID NO: 1886826
cagggcuugccagaaguuu

SEQ ID NO: 2429067 - RNA, 19 nt, Artificial Sequence
  Description of Artificial Sequence: Synthetic oligonucleotide
  Antisense strand to SEQ ID NO: 2429066
aaacuucuggcaagcccug

SEQ ID NO: 2429068 - RNA, 19 nt, Artificial Sequence
  Description of Artificial Sequence: Synthetic oligonucleotide
  Sense strand starting at position 3708 of SEQ ID NO: 1886826
uuagauuugucugacucug

SEQ ID NO: 2429069 - RNA, 19 nt, Artificial Sequence
  Description of Artificial Sequence: Synthetic oligonucleotide
  Antisense strand to SEQ ID NO: 2429068
cagagucagacaaaucuaa

SEQ ID NO: 2429070 - RNA, 19 nt, Artificial Sequence
  Description of Artificial Sequence: Synthetic oligonucleotide
  Sense strand starting at position 3773 of SEQ ID NO: 1886826
cuggaucugugaccaggaa

SEQ ID NO: 2429071 - RNA, 19 nt, Artificial Sequence
  Description of Artificial Sequence: Synthetic oligonucleotide
  Antisense strand to SEQ ID NO: 2429070
uuccuggucacagauccag

SEQ ID NO: 2429072 - RNA, 19 nt, Artificial Sequence
  Description of Artificial Sequence: Synthetic oligonucleotide
  Sense strand starting at position 3923 of SEQ ID NO: 1886826
gcuugaccaagcgauagaa

SEQ ID NO: 2429073 - RNA, 19 nt, Artificial Sequence
  Description of Artificial Sequence: Synthetic oligonucleotide
  Antisense strand to SEQ ID NO: 2429072
uucuaucgcuuggucaagc

SEQ ID NO: 2429074 - RNA, 19 nt, Artificial Sequence
  Description of Artificial Sequence: Synthetic oligonucleotide
  Sense strand starting at position 92 of SEQ ID NO: 1886827
aacgcuuggagccaugaga

SEQ ID NO: 2429075 - RNA, 19 nt, Artificial Sequence
  Description of Artificial Sequence: Synthetic oligonucleotide
  Antisense strand to SEQ ID NO: 2429074
ucucauggcuccaagcguu

SEQ ID NO: 2429076 - RNA, 19 nt, Artificial Sequence
  Description of Artificial Sequence: Synthetic oligonucleotide
  Sense strand starting at position 128 of SEQ ID NO: 1886827
gggauucucccuuagggca

SEQ ID NO: 2429077 - RNA, 19 nt, Artificial Sequence
  Description of Artificial Sequence: Synthetic oligonucleotide
  Antisense strand to SEQ ID NO: 2429076
ugcccuaagggagaauccc

SEQ ID NO: 2429078 - RNA, 19 nt, Artificial Sequence
  Description of Artificial Sequence: Synthetic oligonucleotide
  Sense strand starting at position 194 of SEQ ID NO: 1886827
gagggaauauaugacuguu

SEQ ID NO: 2429079 - RNA, 19 nt, Artificial Sequence
  Description of Artificial Sequence: Synthetic oligonucleotide
  Antisense strand to SEQ ID NO: 2429078
aacagucauauauucccuc

SEQ ID NO: 2429080 - RNA, 19 nt, Artificial Sequence
  Description of Artificial Sequence: Synthetic oligonucleotide
  Sense strand starting at position 196 of SEQ ID NO: 1886827
gggaauauaugacuguuua

SEQ ID NO: 2429081 - RNA, 19 nt, Artificial Sequence
  Description of Artificial Sequence: Synthetic oligonucleotide
  Antisense strand to SEQ ID NO: 2429080
uaaacagucauauauuccc

SEQ ID NO: 2429082 - RNA, 19 nt, Artificial Sequence
  Description of Artificial Sequence: Synthetic oligonucleotide
  Sense strand starting at position 692 of SEQ ID NO: 1886827
gccuuaaacuugccuagca

SEQ ID NO: 2429083 - RNA, 19 nt, Artificial Sequence
  Description of Artificial Sequence: Synthetic oligonucleotide
  Antisense strand to SEQ ID NO: 2429082
ugcuaggcaaguuuaaggc

SEQ ID NO: 2429084 - RNA, 19 nt, Artificial Sequence
  Description of Artificial Sequence: Synthetic oligonucleotide
  Sense strand starting at position 987 of SEQ ID NO: 1886827
gcagcagaggcucaauaaa

SEQ ID NO: 2429085 - RNA, 19 nt, Artificial Sequence
  Description of Artificial Sequence: Synthetic oligonucleotide
  Antisense strand to SEQ ID NO: 2429084
uuuauugagccucugcugc

SEQ ID NO: 2429086 - RNA, 19 nt, Artificial Sequence
  Description of Artificial Sequence: Synthetic oligonucleotide
  Sense strand starting at position 1364 of SEQ ID NO: 1886827
cagugagugacucggcaaa

SEQ ID NO: 2429087 - RNA, 19 nt, Artificial Sequence
  Description of Artificial Sequence: Synthetic oligonucleotide
  Antisense strand to SEQ ID NO: 2429086
uuugccgagucacucacug

SEQ ID NO: 2429088 - RNA, 19 nt, Artificial Sequence
  Description of Artificial Sequence: Synthetic oligonucleotide
  Sense strand starting at position 1529 of SEQ ID NO: 1886827
ccgaguacucgaugcgggu

SEQ ID NO: 2429089 - RNA, 19 nt, Artificial Sequence
  Description of Artificial Sequence: Synthetic oligonucleotide
  Antisense strand to SEQ ID NO: 2429088
acccgcaucgaguacucgg

SEQ ID NO: 2429090 - RNA, 19 nt, Artificial Sequence
  Description of Artificial Sequence: Synthetic oligonucleotide
  Sense strand starting at position 2499 of SEQ ID NO: 1886827
gucccuaaaccugagggua

SEQ ID NO: 2429091 - RNA, 19 nt, Artificial Sequence
  Description of Artificial Sequence: Synthetic oligonucleotide
  Antisense strand to SEQ ID NO: 2429090
uacccucagguuuagggac

SEQ ID NO: 2429092 - RNA, 19 nt, Artificial Sequence
  Description of Artificial Sequence: Synthetic oligonucleotide
  Sense strand starting at position 2986 of SEQ ID NO: 1886827
ccggcagucauugcugagu

SEQ ID NO: 2429093 - RNA, 19 nt, Artificial Sequence
  Description of Artificial Sequence: Synthetic oligonucleotide
  Antisense strand to SEQ ID NO: 2429092
acucagcaaugacugccgg

SEQ ID NO: 2429094 - RNA, 19 nt, Artificial Sequence
  Description of Artificial Sequence: Synthetic oligonucleotide
  Sense strand starting at position 2989 of SEQ ID NO: 1886827
gcagucauugcugagucua

SEQ ID NO: 2429095 - RNA, 19 nt, Artificial Sequence
  Description of Artificial Sequence: Synthetic oligonucleotide
  Antisense strand to SEQ ID NO: 2429094
uagacucagcaaugacugc

SEQ ID NO: 2429096 - RNA, 19 nt, Artificial Sequence
  Description of Artificial Sequence: Synthetic oligonucleotide
  Sense strand starting at position 2991 of SEQ ID NO: 1886827
agucauugcugagucuaag

SEQ ID NO: 2429097 - RNA, 19 nt, Artificial Sequence
  Description of Artificial Sequence: Synthetic oligonucleotide
  Antisense strand to SEQ ID NO: 2429096
cuuagacucagcaaugacu

SEQ ID NO: 2429098 - RNA, 19 nt, Artificial Sequence
  Description of Artificial Sequence: Synthetic oligonucleotide
  Sense strand starting at position 3034 of SEQ ID NO: 1886827
ugccuuccugucgaugaca

SEQ ID NO: 2429099 - RNA, 19 nt, Artificial Sequence
  Description of Artificial Sequence: Synthetic oligonucleotide
  Antisense strand to SEQ ID NO: 2429098
ugucaucgacaggaaggca

SEQ ID NO: 2429100 - RNA, 19 nt, Artificial Sequence
  Description of Artificial Sequence: Synthetic oligonucleotide
  Sense strand starting at position 3036 of SEQ ID NO: 1886827
ccuuccugucgaugacaua

SEQ ID NO: 2429101 - RNA, 19 nt, Artificial Sequence
  Description of Artificial Sequence: Synthetic oligonucleotide
  Antisense strand to SEQ ID NO: 2429100
uaugucaucgacaggaagg

SEQ ID NO: 2429102 - RNA, 19 nt, Artificial Sequence
  Description of Artificial Sequence: Synthetic oligonucleotide
  Sense strand starting at position 3037 of SEQ ID NO: 1886827
cuuccugucgaugacauau

SEQ ID NO: 2429103 - RNA, 19 nt, Artificial Sequence
  Description of Artificial Sequence: Synthetic oligonucleotide
  Antisense strand to SEQ ID NO: 2429102
auaugucaucgacaggaag

SEQ ID NO: 2429104 - RNA, 19 nt, Artificial Sequence
  Description of Artificial Sequence: Synthetic oligonucleotide
  Sense strand starting at position 3047 of SEQ ID NO: 1886827
augacauauccaugucacc

SEQ ID NO: 2429105 - RNA, 19 nt, Artificial Sequence
  Description of Artificial Sequence: Synthetic oligonucleotide
  Antisense strand to SEQ ID NO: 2429104
ggugacauggauaugucau

SEQ ID NO: 2429106 - RNA, 19 nt, Artificial Sequence
  Description of Artificial Sequence: Synthetic oligonucleotide
  Sense strand starting at position 3071 of SEQ ID NO: 1886827
acaccuguaugcugacaaa

SEQ ID NO: 2429107 - RNA, 19 nt, Artificial Sequence
  Description of Artificial Sequence: Synthetic oligonucleotide
  Antisense strand to SEQ ID NO: 2429106
uuugucagcauacaggugu

SEQ ID NO: 2429108 - RNA, 19 nt, Artificial Sequence
  Description of Artificial Sequence: Synthetic oligonucleotide
  Sense strand starting at position 3090 of SEQ ID NO: 1886827
cacggacaucuauguacau

SEQ ID NO: 2429109 - RNA, 19 nt, Artificial Sequence
  Description of Artificial Sequence: Synthetic oligonucleotide
  Antisense strand to SEQ ID NO: 2429108
auguacauagauguccgug

SEQ ID NO: 2429110 - RNA, 19 nt, Artificial Sequence
  Description of Artificial Sequence: Synthetic oligonucleotide
  Sense strand starting at position 3091 of SEQ ID NO: 1886827
acggacaucuauguacauu

SEQ ID NO: 2429111 - RNA, 19 nt, Artificial Sequence
  Description of Artificial Sequence: Synthetic oligonucleotide
  Antisense strand to SEQ ID NO: 2429110
aauguacauagauguccgu

SEQ ID NO: 2429112 - RNA, 19 nt, Artificial Sequence
  Description of Artificial Sequence: Synthetic oligonucleotide
  Sense strand starting at position 3097 of SEQ ID NO: 1886827
aucuauguacauuggagaa

SEQ ID NO: 2429113 - RNA, 19 nt, Artificial Sequence
  Description of Artificial Sequence: Synthetic oligonucleotide
  Antisense strand to SEQ ID NO: 2429112
uucuccaauguacauagau

SEQ ID NO: 2429114 - RNA, 19 nt, Artificial Sequence
  Description of Artificial Sequence: Synthetic oligonucleotide
  Sense strand starting at position 3241 of SEQ ID NO: 1886827
uuugaagagucuguuccua

SEQ ID NO: 2429115 - RNA, 19 nt, Artificial Sequence
  Description of Artificial Sequence: Synthetic oligonucleotide
  Antisense strand to SEQ ID NO: 2429114
uaggaacagacucuucaaa

SEQ ID NO: 2429116 - RNA, 19 nt, Artificial Sequence
  Description of Artificial Sequence: Synthetic oligonucleotide
  Sense strand starting at position 3243 of SEQ ID NO: 1886827
ugaagagucuguuccuauu

SEQ ID NO: 2429117 - RNA, 19 nt, Artificial Sequence
  Description of Artificial Sequence: Synthetic oligonucleotide
  Antisense strand to SEQ ID NO: 2429116
aauaggaacagacucuuca

SEQ ID NO: 2429118 - RNA, 19 nt, Artificial Sequence
  Description of Artificial Sequence: Synthetic oligonucleotide
  Sense strand starting at position 3279 of SEQ ID NO: 1886827
cagucuggauccuugguua

SEQ ID NO: 2429119 - RNA, 19 nt, Artificial Sequence
  Description of Artificial Sequence: Synthetic oligonucleotide
  Antisense strand to SEQ ID NO: 2429118
uaaccaaggauccagacug

SEQ ID NO: 2429120 - RNA, 19 nt, Artificial Sequence
  Description of Artificial Sequence: Synthetic oligonucleotide
  Sense strand starting at position 3282 of SEQ ID NO: 1886827
ucuggauccuugguuaaac

SEQ ID NO: 2429121 - RNA, 19 nt, Artificial Sequence
  Description of Artificial Sequence: Synthetic oligonucleotide
  Antisense strand to SEQ ID NO: 2429120
guuuaaccaaggauccaga

SEQ ID NO: 2429122 - RNA, 19 nt, Artificial Sequence
  Description of Artificial Sequence: Synthetic oligonucleotide
  Sense strand starting at position 3395 of SEQ ID NO: 1886827
cagcuuugggucugcugaa

SEQ ID NO: 2429123 - RNA, 19 nt, Artificial Sequence
  Description of Artificial Sequence: Synthetic oligonucleotide
  Antisense strand to SEQ ID NO: 2429122
uucagcagacccaaagcug

SEQ ID NO: 2429124 - RNA, 19 nt, Artificial Sequence
  Description of Artificial Sequence: Synthetic oligonucleotide
  Sense strand starting at position 3396 of SEQ ID NO: 1886827
agcuuugggucugcugaau

SEQ ID NO: 2429125 - RNA, 19 nt, Artificial Sequence
  Description of Artificial Sequence: Synthetic oligonucleotide
  Antisense strand to SEQ ID NO: 2429124
auucagcagacccaaagcu

SEQ ID NO: 2429126 - RNA, 19 nt, Artificial Sequence
  Description of Artificial Sequence: Synthetic oligonucleotide
  Sense strand starting at position 3408 of SEQ ID NO: 1886827
gcugaauuccuccaugguc

SEQ ID NO: 2429127 - RNA, 19 nt, Artificial Sequence
  Description of Artificial Sequence: Synthetic oligonucleotide
  Antisense strand to SEQ ID NO: 2429126
gaccauggaggaauucagc

SEQ ID NO: 2429128 - RNA, 19 nt, Artificial Sequence
  Description of Artificial Sequence: Synthetic oligonucleotide
  Sense strand starting at position 3410 of SEQ ID NO: 1886827
ugaauuccuccauggucaa

SEQ ID NO: 2429129 - RNA, 19 nt, Artificial Sequence
  Description of Artificial Sequence: Synthetic oligonucleotide
  Antisense strand to SEQ ID NO: 2429128
uugaccauggaggaauuca

SEQ ID NO: 2429130 - RNA, 19 nt, Artificial Sequence
  Description of Artificial Sequence: Synthetic oligonucleotide
  Sense strand starting at position 3435 of SEQ ID NO: 1886827
uggcuccuuguggaguaau

SEQ ID NO: 2429131 - RNA, 19 nt, Artificial Sequence
  Description of Artificial Sequence: Synthetic oligonucleotide
  Antisense strand to SEQ ID NO: 2429130
auuacuccacaaggagcca

SEQ ID NO: 2429132 - RNA, 19 nt, Artificial Sequence
  Description of Artificial Sequence: Synthetic oligonucleotide
  Sense strand starting at position 3438 of SEQ ID NO: 1886827
cuccuuguggaguaauuaa

SEQ ID NO: 2429133 - RNA, 19 nt, Artificial Sequence
  Description of Artificial Sequence: Synthetic oligonucleotide
  Antisense strand to SEQ ID NO: 2429132
uuaauuacuccacaaggag

SEQ ID NO: 2429134 - RNA, 19 nt, Artificial Sequence
  Description of Artificial Sequence: Synthetic oligonucleotide
  Sense strand starting at position 3447 of SEQ ID NO: 1886827
gaguaauuaaggcaugcgu

SEQ ID NO: 2429135 - RNA, 19 nt, Artificial Sequence
  Description of Artificial Sequence: Synthetic oligonucleotide
  Antisense strand to SEQ ID NO: 2429134
acgcaugccuuaauuacuc

SEQ ID NO: 2429136 - RNA, 19 nt, Artificial Sequence
  Description of Artificial Sequence: Synthetic oligonucleotide
  Sense strand starting at position 3449 of SEQ ID NO: 1886827
guaauuaaggcaugcguga

SEQ ID NO: 2429137 - RNA, 19 nt, Artificial Sequence
  Description of Artificial Sequence: Synthetic oligonucleotide
  Antisense strand to SEQ ID NO: 2429136
ucacgcaugccuuaauuac

SEQ ID NO: 2429138 - RNA, 19 nt, Artificial Sequence
  Description of Artificial Sequence: Synthetic oligonucleotide
  Sense strand starting at position 3467 of SEQ ID NO: 1886827
aggucauucucugagacca

SEQ ID NO: 2429139 - RNA, 19 nt, Artificial Sequence
  Description of Artificial Sequence: Synthetic oligonucleotide
  Antisense strand to SEQ ID NO: 2429138
uggucucagagaaugaccu

SEQ ID NO: 2429140 - RNA, 19 nt, Artificial Sequence
  Description of Artificial Sequence: Synthetic oligonucleotide
  Sense strand starting at position 3469 of SEQ ID NO: 1886827
gucauucucugagaccaca

SEQ ID NO: 2429141 - RNA, 19 nt, Artificial Sequence
  Description of Artificial Sequence: Synthetic oligonucleotide
  Antisense strand to SEQ ID NO: 2429140
uguggucucagagaaugac

SEQ ID NO: 2429142 - RNA, 19 nt, Artificial Sequence
  Description of Artificial Sequence: Synthetic oligonucleotide
  Sense strand starting at position 3529 of SEQ ID NO: 1886827
gcaucaguuaaugaguaga

SEQ ID NO: 2429143 - RNA, 19 nt, Artificial Sequence
  Description of Artificial Sequence: Synthetic oligonucleotide
  Antisense strand to SEQ ID NO: 2429142
ucuacucauuaacugaugc

SEQ ID NO: 2429144 - RNA, 19 nt, Artificial Sequence
  Description of Artificial Sequence: Synthetic oligonucleotide
  Sense strand starting at position 3531 of SEQ ID NO: 1886827
aucaguuaaugaguagauu

SEQ ID NO: 2429145 - RNA, 19 nt, Artificial Sequence
  Description of Artificial Sequence: Synthetic oligonucleotide
  Antisense strand to SEQ ID NO: 2429144
aaucuacucauuaacugau

SEQ ID NO: 2429146 - RNA, 19 nt, Artificial Sequence
  Description of Artificial Sequence: Synthetic oligonucleotide
  Sense strand starting at position 3532 of SEQ ID NO: 1886827
ucaguuaaugaguagauuc

SEQ ID NO: 2429147 - RNA, 19 nt, Artificial Sequence
  Description of Artificial Sequence: Synthetic oligonucleotide
  Antisense strand to SEQ ID NO: 2429146
gaaucuacucauuaacuga

SEQ ID NO: 2429148 - RNA, 19 nt, Artificial Sequence
  Description of Artificial Sequence: Synthetic oligonucleotide
  Sense strand starting at position 3551 of SEQ ID NO: 1886827
aguguuaaaccguaaagcu

SEQ ID NO: 2429149 - RNA, 19 nt, Artificial Sequence
  Description of Artificial Sequence: Synthetic oligonucleotide
  Antisense strand to SEQ ID NO: 2429148
agcuuuacgguuuaacacu

SEQ ID NO: 2429150 - RNA, 19 nt, Artificial Sequence
  Description of Artificial Sequence: Synthetic oligonucleotide
  Sense strand starting at position 3590 of SEQ ID NO: 1886827
guuuauuguuucuucuaca

SEQ ID NO: 2429151 - RNA, 19 nt, Artificial Sequence
  Description of Artificial Sequence: Synthetic oligonucleotide
  Antisense strand to SEQ ID NO: 2429150
uguagaagaaacaauaaac

SEQ ID NO: 2429152 - RNA, 19 nt, Artificial Sequence
  Description of Artificial Sequence: Synthetic oligonucleotide
  Sense strand starting at position 3615 of SEQ ID NO: 1886827
gucacuuucggucaagcuu

SEQ ID NO: 2429153 - RNA, 19 nt, Artificial Sequence
  Description of Artificial Sequence: Synthetic oligonucleotide
  Antisense strand to SEQ ID NO: 2429152
aagcuugaccgaaagugac

SEQ ID NO: 2429154 - RNA, 19 nt, Artificial Sequence
  Description of Artificial Sequence: Synthetic oligonucleotide
  Sense strand starting at position 33 of SEQ ID NO: 1886828
uguucugcauuccuaggua

SEQ ID NO: 2429155 - RNA, 19 nt, Artificial Sequence
  Description of Artificial Sequence: Synthetic oligonucleotide
  Antisense strand to SEQ ID NO: 2429154
uaccuaggaaugcagaaca

SEQ ID NO: 2429156 - RNA, 19 nt, Artificial Sequence
  Description of Artificial Sequence: Synthetic oligonucleotide
  Sense strand starting at position 36 of SEQ ID NO: 1886828
ucugcauuccuagguauga

SEQ ID NO: 2429157 - RNA, 19 nt, Artificial Sequence
  Description of Artificial Sequence: Synthetic oligonucleotide
  Antisense strand to SEQ ID NO: 2429156
ucauaccuaggaaugcaga

SEQ ID NO: 2429158 - RNA, 19 nt, Artificial Sequence
  Description of Artificial Sequence: Synthetic oligonucleotide
  Sense strand starting at position 128 of SEQ ID NO: 1886828
ccauguacagcauggauaa

SEQ ID NO: 2429159 - RNA, 19 nt, Artificial Sequence
  Description of Artificial Sequence: Synthetic oligonucleotide
  Antisense strand to SEQ ID NO: 2429158
uuauccaugcuguacaugg

SEQ ID NO: 2429160 - RNA, 19 nt, Artificial Sequence
  Description of Artificial Sequence: Synthetic oligonucleotide
  Sense strand starting at position 268 of SEQ ID NO: 1886828
cugagucggucaccgaaua

SEQ ID NO: 2429161 - RNA, 19 nt, Artificial Sequence
  Description of Artificial Sequence: Synthetic oligonucleotide
  Antisense strand to SEQ ID NO: 2429160
uauucggugaccgacucag

SEQ ID NO: 2429162 - RNA, 19 nt, Artificial Sequence
  Description of Artificial Sequence: Synthetic oligonucleotide
  Sense strand starting at position 269 of SEQ ID NO: 1886828
ugagucggucaccgaauau

SEQ ID NO: 2429163 - RNA, 19 nt, Artificial Sequence
  Description of Artificial Sequence: Synthetic oligonucleotide
  Antisense strand to SEQ ID NO: 2429162
auauucggugaccgacuca

SEQ ID NO: 2429164 - RNA, 19 nt, Artificial Sequence
  Description of Artificial Sequence: Synthetic oligonucleotide
  Sense strand starting at position 335 of SEQ ID NO: 1886828
gaaguaacgcugggagcuu

SEQ ID NO: 2429165 - RNA, 19 nt, Artificial Sequence
  Description of Artificial Sequence: Synthetic oligonucleotide
  Antisense strand to SEQ ID NO: 2429164
aagcucccagcguuacuuc

SEQ ID NO: 2429166 - RNA, 19 nt, Artificial Sequence
  Description of Artificial Sequence: Synthetic oligonucleotide
  Sense strand starting at position 721 of SEQ ID NO: 1886828
ucagguaaaugcccucauu

SEQ ID NO: 2429167 - RNA, 19 nt, Artificial Sequence
  Description of Artificial Sequence: Synthetic oligonucleotide
  Antisense strand to SEQ ID NO: 2429166
aaugagggcauuuaccuga

SEQ ID NO: 2429168 - RNA, 19 nt, Artificial Sequence
  Description of Artificial Sequence: Synthetic oligonucleotide
  Sense strand starting at position 747 of SEQ ID NO: 1886828
gccaguuugagcgagcuuu

SEQ ID NO: 2429169 - RNA, 19 nt, Artificial Sequence
  Description of Artificial Sequence: Synthetic oligonucleotide
  Antisense strand to SEQ ID NO: 2429168
aaagcucgcucaaacuggc

SEQ ID NO: 2429170 - RNA, 19 nt, Artificial Sequence
  Description of Artificial Sequence: Synthetic oligonucleotide
  Sense strand starting at position 751 of SEQ ID NO: 1886828
guuugagcgagcuuucugu

SEQ ID NO: 2429171 - RNA, 19 nt, Artificial Sequence
  Description of Artificial Sequence: Synthetic oligonucleotide
  Antisense strand to SEQ ID NO: 2429170
acagaaagcucgcucaaac

SEQ ID NO: 2429172 - RNA, 19 nt, Artificial Sequence
  Description of Artificial Sequence: Synthetic oligonucleotide
  Sense strand starting at position 758 of SEQ ID NO: 1886828
cgagcuuucugucauuuac

SEQ ID NO: 2429173 - RNA, 19 nt, Artificial Sequence
  Description of Artificial Sequence: Synthetic oligonucleotide
  Antisense strand to SEQ ID NO: 2429172
guaaaugacagaaagcucg

SEQ ID NO: 2429174 - RNA, 19 nt, Artificial Sequence
  Description of Artificial Sequence: Synthetic oligonucleotide
  Sense strand starting at position 760 of SEQ ID NO: 1886828
agcuuucugucauuuacca

SEQ ID NO: 2429175 - RNA, 19 nt, Artificial Sequence
  Description of Artificial Sequence: Synthetic oligonucleotide
  Antisense strand to SEQ ID NO: 2429174
ugguaaaugacagaaagcu

SEQ ID NO: 2429176 - RNA, 19 nt, Artificial Sequence
  Description of Artificial Sequence: Synthetic oligonucleotide
  Sense strand starting at position 919 of SEQ ID NO: 1886828
aggcaaugcuuccugaauc

SEQ ID NO: 2429177 - RNA, 19 nt, Artificial Sequence
  Description of Artificial Sequence: Synthetic oligonucleotide
  Antisense strand to SEQ ID NO: 2429176
gauucaggaagcauugccu

SEQ ID NO: 2429178 - RNA, 19 nt, Artificial Sequence
  Description of Artificial Sequence: Synthetic oligonucleotide
  Sense strand starting at position 1024 of SEQ ID NO: 1886828
gccugacucguugaaggaa

SEQ ID NO: 2429179 - RNA, 19 nt, Artificial Sequence
  Description of Artificial Sequence: Synthetic oligonucleotide
  Antisense strand to SEQ ID NO: 2429178
uuccuucaacgagucaggc

SEQ ID NO: 2429180 - RNA, 19 nt, Artificial Sequence
  Description of Artificial Sequence: Synthetic oligonucleotide
  Sense strand starting at position 1152 of SEQ ID NO: 1886828
auguuagccuaauuuaugu

SEQ ID NO: 2429181 - RNA, 19 nt, Artificial Sequence
  Description of Artificial Sequence: Synthetic oligonucleotide
  Antisense strand to SEQ ID NO: 2429180
acauaaauuaggcuaacau

SEQ ID NO: 2429182 - RNA, 19 nt, Artificial Sequence
  Description of Artificial Sequence: Synthetic oligonucleotide
  Sense strand starting at position 1184 of SEQ ID NO: 1886828
cgggaauuguaccgggaga

SEQ ID NO: 2429183 - RNA, 19 nt, Artificial Sequence
  Description of Artificial Sequence: Synthetic oligonucleotide
  Antisense strand to SEQ ID NO: 2429182
ucucccgguacaauucccg

SEQ ID NO: 2429184 - RNA, 19 nt, Artificial Sequence
  Description of Artificial Sequence: Synthetic oligonucleotide
  Sense strand starting at position 1185 of SEQ ID NO: 1886828
gggaauuguaccgggagac

SEQ ID NO: 2429185 - RNA, 19 nt, Artificial Sequence
  Description of Artificial Sequence: Synthetic oligonucleotide
  Antisense strand to SEQ ID NO: 2429184
gucucccgguacaauuccc

SEQ ID NO: 2429186 - RNA, 19 nt, Artificial Sequence
  Description of Artificial Sequence: Synthetic oligonucleotide
  Sense strand starting at position 1334 of SEQ ID NO: 1886828
ggcuuuccaccgcaugaga

SEQ ID NO: 2429187 - RNA, 19 nt, Artificial Sequence
  Description of Artificial Sequence: Synthetic oligonucleotide
  Antisense strand to SEQ ID NO: 2429186
ucucaugcgguggaaagcc

SEQ ID NO: 2429188 - RNA, 19 nt, Artificial Sequence
  Description of Artificial Sequence: Synthetic oligonucleotide
  Sense strand starting at position 1431 of SEQ ID NO: 1886828
cgagaaucuucugacggca

SEQ ID NO: 2429189 - RNA, 19 nt, Artificial Sequence
  Description of Artificial Sequence: Synthetic oligonucleotide
  Antisense strand to SEQ ID NO: 2429188
ugccgucagaagauucucg

SEQ ID NO: 2429190 - RNA, 19 nt, Artificial Sequence
  Description of Artificial Sequence: Synthetic oligonucleotide
  Sense strand starting at position 1434 of SEQ ID NO: 1886828
gaaucuucugacggcagga

SEQ ID NO: 2429191 - RNA, 19 nt, Artificial Sequence
  Description of Artificial Sequence: Synthetic oligonucleotide
  Antisense strand to SEQ ID NO: 2429190
uccugccgucagaagauuc

SEQ ID NO: 2429192 - RNA, 19 nt, Artificial Sequence
  Description of Artificial Sequence: Synthetic oligonucleotide
  Sense strand starting at position 3204 of SEQ ID NO: 1886828
ggauggguggacggauaau

SEQ ID NO: 2429193 - RNA, 19 nt, Artificial Sequence
  Description of Artificial Sequence: Synthetic oligonucleotide
  Antisense strand to SEQ ID NO: 2429192
auuauccguccacccaucc

SEQ ID NO: 2429194 - RNA, 19 nt, Artificial Sequence
  Description of Artificial Sequence: Synthetic oligonucleotide
  Sense strand starting at position 3215 of SEQ ID NO: 1886828
cggauaaucuaucaucuua

SEQ ID NO: 2429195 - RNA, 19 nt, Artificial Sequence
  Description of Artificial Sequence: Synthetic oligonucleotide
  Antisense strand to SEQ ID NO: 2429194
uaagaugauagauuauccg

SEQ ID NO: 2429196 - RNA, 19 nt, Artificial Sequence
  Description of Artificial Sequence: Synthetic oligonucleotide
  Sense strand starting at position 3231 of SEQ ID NO: 1886828
uuauguaaccgcggagaga

SEQ ID NO: 2429197 - RNA, 19 nt, Artificial Sequence
  Description of Artificial Sequence: Synthetic oligonucleotide
  Antisense strand to SEQ ID NO: 2429196
ucucuccgcgguuacauaa

SEQ ID NO: 2429198 - RNA, 19 nt, Artificial Sequence
  Description of Artificial Sequence: Synthetic oligonucleotide
  Sense strand starting at position 3247 of SEQ ID NO: 1886828
agagaagacuaauugugua

SEQ ID NO: 2429199 - RNA, 19 nt, Artificial Sequence
  Description of Artificial Sequence: Synthetic oligonucleotide
  Antisense strand to SEQ ID NO: 2429198
uacacaauuagucuucucu

SEQ ID NO: 2429200 - RNA, 19 nt, Artificial Sequence
  Description of Artificial Sequence: Synthetic oligonucleotide
  Sense strand starting at position 3250 of SEQ ID NO: 1886828
gaagacuaauuguguagga

SEQ ID NO: 2429201 - RNA, 19 nt, Artificial Sequence
  Description of Artificial Sequence: Synthetic oligonucleotide
  Antisense strand to SEQ ID NO: 2429200
uccuacacaauuagucuuc

SEQ ID NO: 2429202 - RNA, 19 nt, Artificial Sequence
  Description of Artificial Sequence: Synthetic oligonucleotide
  Sense strand starting at position 3295 of SEQ ID NO: 1886828
auguguuaagaguggcauc

SEQ ID NO: 2429203 - RNA, 19 nt, Artificial Sequence
  Description of Artificial Sequence: Synthetic oligonucleotide
  Antisense strand to SEQ ID NO: 2429202
gaugccacucuuaacacau

SEQ ID NO: 2429204 - RNA, 19 nt, Artificial Sequence
  Description of Artificial Sequence: Synthetic oligonucleotide
  Sense strand starting at position 3313 of SEQ ID NO: 1886828
ccacguucucgucugcgaa

SEQ ID NO: 2429205 - RNA, 19 nt, Artificial Sequence
  Description of Artificial Sequence: Synthetic oligonucleotide
  Antisense strand to SEQ ID NO: 2429204
uucgcagacgagaacgugg

SEQ ID NO: 2429206 - RNA, 19 nt, Artificial Sequence
  Description of Artificial Sequence: Synthetic oligonucleotide
  Sense strand starting at position 3314 of SEQ ID NO: 1886828
cacguucucgucugcgaaa

SEQ ID NO: 2429207 - RNA, 19 nt, Artificial Sequence
  Description of Artificial Sequence: Synthetic oligonucleotide
  Antisense strand to SEQ ID NO: 2429206
uuucgcagacgagaacgug

SEQ ID NO: 2429208 - RNA, 19 nt, Artificial Sequence
  Description of Artificial Sequence: Synthetic oligonucleotide
  Sense strand starting at position 3315 of SEQ ID NO: 1886828
acguucucgucugcgaaau

SEQ ID NO: 2429209 - RNA, 19 nt, Artificial Sequence
  Description of Artificial Sequence: Synthetic oligonucleotide
  Antisense strand to SEQ ID NO: 2429208
auuucgcagacgagaacgu

SEQ ID NO: 2429210 - RNA, 19 nt, Artificial Sequence
  Description of Artificial Sequence: Synthetic oligonucleotide
  Sense strand starting at position 3316 of SEQ ID NO: 1886828
cguucucgucugcgaaaug

SEQ ID NO: 2429211 - RNA, 19 nt, Artificial Sequence
  Description of Artificial Sequence: Synthetic oligonucleotide
  Antisense strand to SEQ ID NO: 2429210
cauuucgcagacgagaacg

SEQ ID NO: 2429212 - RNA, 19 nt, Artificial Sequence
  Description of Artificial Sequence: Synthetic oligonucleotide
  Sense strand starting at position 3613 of SEQ ID NO: 1886828
cgaugaguggaguggguau

SEQ ID NO: 2429213 - RNA, 19 nt, Artificial Sequence
  Description of Artificial Sequence: Synthetic oligonucleotide
  Antisense strand to SEQ ID NO: 2429212
auacccacuccacucaucg

SEQ ID NO: 2429214 - RNA, 19 nt, Artificial Sequence
  Description of Artificial Sequence: Synthetic oligonucleotide
  Sense strand starting at position 3625 of SEQ ID NO: 1886828
uggguauuuacccggcagu

SEQ ID NO: 2429215 - RNA, 19 nt, Artificial Sequence
  Description of Artificial Sequence: Synthetic oligonucleotide
  Antisense strand to SEQ ID NO: 2429214
acugccggguaaauaccca

SEQ ID NO: 2429216 - RNA, 19 nt, Artificial Sequence
  Description of Artificial Sequence: Synthetic oligonucleotide
  Sense strand starting at position 3684 of SEQ ID NO: 1886828
cagaguaacuguuucugau

SEQ ID NO: 2429217 - RNA, 19 nt, Artificial Sequence
  Description of Artificial Sequence: Synthetic oligonucleotide
  Antisense strand to SEQ ID NO: 2429216
aucagaaacaguuacucug

SEQ ID NO: 2429218 - RNA, 19 nt, Artificial Sequence
  Description of Artificial Sequence: Synthetic oligonucleotide
  Sense strand starting at position 3686 of SEQ ID NO: 1886828
gaguaacuguuucugauug

SEQ ID NO: 2429219 - RNA, 19 nt, Artificial Sequence
  Description of Artificial Sequence: Synthetic oligonucleotide
  Antisense strand to SEQ ID NO: 2429218
caaucagaaacaguuacuc

SEQ ID NO: 2429220 - RNA, 19 nt, Artificial Sequence
  Description of Artificial Sequence: Synthetic oligonucleotide
  Sense strand starting at position 3753 of SEQ ID NO: 1886828
agcucucaggcuugggaga

SEQ ID NO: 2429221 - RNA, 19 nt, Artificial Sequence
  Description of Artificial Sequence: Synthetic oligonucleotide
  Antisense strand to SEQ ID NO: 2429220
ucucccaagccugagagcu

SEQ ID NO: 2429222 - RNA, 19 nt, Artificial Sequence
  Description of Artificial Sequence: Synthetic oligonucleotide
  Sense strand starting at position 3825 of SEQ ID NO: 1886828
gccgauugcacuugaauac

SEQ ID NO: 2429223 - RNA, 19 nt, Artificial Sequence
  Description of Artificial Sequence: Synthetic oligonucleotide
  Antisense strand to SEQ ID NO: 2429222
guauucaagugcaaucggc

SEQ ID NO: 2429224 - RNA, 19 nt, Artificial Sequence
  Description of Artificial Sequence: Synthetic oligonucleotide
  Sense strand starting at position 3826 of SEQ ID NO: 1886828
ccgauugcacuugaauaca

SEQ ID NO: 2429225 - RNA, 19 nt, Artificial Sequence
  Description of Artificial Sequence: Synthetic oligonucleotide
  Antisense strand to SEQ ID NO: 2429224
uguauucaagugcaaucgg

SEQ ID NO: 2429226 - RNA, 19 nt, Artificial Sequence
  Description of Artificial Sequence: Synthetic oligonucleotide
  Sense strand starting at position 3874 of SEQ ID NO: 1886828
cgcgucagucuggaagguu

SEQ ID NO: 2429227 - RNA, 19 nt, Artificial Sequence
  Description of Artificial Sequence: Synthetic oligonucleotide
  Antisense strand to SEQ ID NO: 2429226
aaccuuccagacugacgcg

SEQ ID NO: 2429228 - RNA, 19 nt, Artificial Sequence
  Description of Artificial Sequence: Synthetic oligonucleotide
  Sense strand starting at position 3875 of SEQ ID NO: 1886828
gcgucagucuggaagguuu

SEQ ID NO: 2429229 - RNA, 19 nt, Artificial Sequence
  Description of Artificial Sequence: Synthetic oligonucleotide
  Antisense strand to SEQ ID NO: 2429228
aaaccuuccagacugacgc

SEQ ID NO: 2429230 - RNA, 19 nt, Artificial Sequence
  Description of Artificial Sequence: Synthetic oligonucleotide
  Sense strand starting at position 3900 of SEQ ID NO: 1886828
gcgggugugcggucgacua

SEQ ID NO: 2429231 - RNA, 19 nt, Artificial Sequence
  Description of Artificial Sequence: Synthetic oligonucleotide
  Antisense strand to SEQ ID NO: 2429230
uagucgaccgcacacccgc

SEQ ID NO: 2429232 - RNA, 19 nt, Artificial Sequence
  Description of Artificial Sequence: Synthetic oligonucleotide
  Sense strand starting at position 3912 of SEQ ID NO: 1886828
ucgacuagaugaguccuaa

SEQ ID NO: 2429233 - RNA, 19 nt, Artificial Sequence
  Description of Artificial Sequence: Synthetic oligonucleotide
  Antisense strand to SEQ ID NO: 2429232
uuaggacucaucuagucga

SEQ ID NO: 2429234 - RNA, 19 nt, Artificial Sequence
  Description of Artificial Sequence: Synthetic oligonucleotide
  Sense strand starting at position 57 of SEQ ID NO: 1886829
ggaguuuagcucugucgcu

SEQ ID NO: 2429235 - RNA, 19 nt, Artificial Sequence
  Description of Artificial Sequence: Synthetic oligonucleotide
  Antisense strand to SEQ ID NO: 2429234
agcgacagagcuaaacucc

SEQ ID NO: 2429236 - RNA, 19 nt, Artificial Sequence
  Description of Artificial Sequence: Synthetic oligonucleotide
  Sense strand starting at position 451 of SEQ ID NO: 1886829
cugucuuucccggaccaca

SEQ ID NO: 2429237 - RNA, 19 nt, Artificial Sequence
  Description of Artificial Sequence: Synthetic oligonucleotide
  Antisense strand to SEQ ID NO: 2429236
ugugguccgggaaagacag

SEQ ID NO: 2429238 - RNA, 19 nt, Artificial Sequence
  Description of Artificial Sequence: Synthetic oligonucleotide
  Sense strand starting at position 603 of SEQ ID NO: 1886829
uuucuucccuaguauguaa

SEQ ID NO: 2429239 - RNA, 19 nt, Artificial Sequence
  Description of Artificial Sequence: Synthetic oligonucleotide
  Antisense strand to SEQ ID NO: 2429238
uuacauacuagggaagaaa

SEQ ID NO: 2429240 - RNA, 19 nt, Artificial Sequence
  Description of Artificial Sequence: Synthetic oligonucleotide
  Sense strand starting at position 610 of SEQ ID NO: 1886829
ccuaguauguaaggucaau

SEQ ID NO: 2429241 - RNA, 19 nt, Artificial Sequence
  Description of Artificial Sequence: Synthetic oligonucleotide
  Antisense strand to SEQ ID NO: 2429240
auugaccuuacauacuagg

SEQ ID NO: 2429242 - RNA, 19 nt, Artificial Sequence
  Description of Artificial Sequence: Synthetic oligonucleotide
  Sense strand starting at position 740 of SEQ ID NO: 1886829
guacuucuucaacgcgaag

SEQ ID NO: 2429243 - RNA, 19 nt, Artificial Sequence
  Description of Artificial Sequence: Synthetic oligonucleotide
  Antisense strand to SEQ ID NO: 2429242
cuucgcguugaagaaguac

SEQ ID NO: 2429244 - RNA, 19 nt, Artificial Sequence
  Description of Artificial Sequence: Synthetic oligonucleotide
  Sense strand starting at position 751 of SEQ ID NO: 1886829
acgcgaagagcagauaaau

SEQ ID NO: 2429245 - RNA, 19 nt, Artificial Sequence
  Description of Artificial Sequence: Synthetic oligonucleotide
  Antisense strand to SEQ ID NO: 2429244
auuuaucugcucuucgcgu

SEQ ID NO: 2429246 - RNA, 19 nt, Artificial Sequence
  Description of Artificial Sequence: Synthetic oligonucleotide
  Sense strand starting at position 1089 of SEQ ID NO: 1886829
gccuuagcuuucuccaaug

SEQ ID NO: 2429247 - RNA, 19 nt, Artificial Sequence
  Description of Artificial Sequence: Synthetic oligonucleotide
  Antisense strand to SEQ ID NO: 2429246
cauuggagaaagcuaaggc

SEQ ID NO: 2429248 - RNA, 19 nt, Artificial Sequence
  Description of Artificial Sequence: Synthetic oligonucleotide
  Sense strand starting at position 1361 of SEQ ID NO: 1886829
agacauauuccuggcaccu

SEQ ID NO: 2429249 - RNA, 19 nt, Artificial Sequence
  Description of Artificial Sequence: Synthetic oligonucleotide
  Antisense strand to SEQ ID NO: 2429248
aggugccaggaauaugucu

SEQ ID NO: 2429250 - RNA, 19 nt, Artificial Sequence
  Description of Artificial Sequence: Synthetic oligonucleotide
  Sense strand starting at position 1708 of SEQ ID NO: 1886829
aguuccuaucacgaggauu

SEQ ID NO: 2429251 - RNA, 19 nt, Artificial Sequence
  Description of Artificial Sequence: Synthetic oligonucleotide
  Antisense strand to SEQ ID NO: 2429250
aauccucgugauaggaacu

SEQ ID NO: 2429252 - RNA, 19 nt, Artificial Sequence
  Description of Artificial Sequence: Synthetic oligonucleotide
  Sense strand starting at position 1861 of SEQ ID NO: 1886829
aucugucagcuucggaaau

SEQ ID NO: 2429253 - RNA, 19 nt, Artificial Sequence
  Description of Artificial Sequence: Synthetic oligonucleotide
  Antisense strand to SEQ ID NO: 2429252
auuuccgaagcugacagau

SEQ ID NO: 2429254 - RNA, 19 nt, Artificial Sequence
  Description of Artificial Sequence: Synthetic oligonucleotide
  Sense strand starting at position 2030 of SEQ ID NO: 1886829
ggaagucucagcgagcuca

SEQ ID NO: 2429255 - RNA, 19 nt, Artificial Sequence
  Description of Artificial Sequence: Synthetic oligonucleotide
  Antisense strand to SEQ ID NO: 2429254
ugagcucgcugagacuucc

SEQ ID NO: 2429256 - RNA, 19 nt, Artificial Sequence
  Description of Artificial Sequence: Synthetic oligonucleotide
  Sense strand starting at position 2075 of SEQ ID NO: 1886829
ucuguaauucccgcgcuuu

SEQ ID NO: 2429257 - RNA, 19 nt, Artificial Sequence
  Description of Artificial Sequence: Synthetic oligonucleotide
  Antisense strand to SEQ ID NO: 2429256
aaagcgcgggaauuacaga

SEQ ID NO: 2429258 - RNA, 19 nt, Artificial Sequence
  Description of Artificial Sequence: Synthetic oligonucleotide
  Sense strand starting at position 2128 of SEQ ID NO: 1886829
gcagcagccucucagaaua

SEQ ID NO: 2429259 - RNA, 19 nt, Artificial Sequence
  Description of Artificial Sequence: Synthetic oligonucleotide
  Antisense strand to SEQ ID NO: 2429258
uauucugagaggcugcugc

SEQ ID NO: 2429260 - RNA, 19 nt, Artificial Sequence
  Description of Artificial Sequence: Synthetic oligonucleotide
  Sense strand starting at position 2133 of SEQ ID NO: 1886829
agccucucagaauacgaaa

SEQ ID NO: 2429261 - RNA, 19 nt, Artificial Sequence
  Description of Artificial Sequence: Synthetic oligonucleotide
  Antisense strand to SEQ ID NO: 2429260
uuucguauucugagaggcu

SEQ ID NO: 2429262 - RNA, 19 nt, Artificial Sequence
  Description of Artificial Sequence: Synthetic oligonucleotide
  Sense strand starting at position 2436 of SEQ ID NO: 1886829
ucuccaguuucgguaaaua

SEQ ID NO: 2429263 - RNA, 19 nt, Artificial Sequence
  Description of Artificial Sequence: Synthetic oligonucleotide
  Antisense strand to SEQ ID NO: 2429262
uauuuaccgaaacuggaga

SEQ ID NO: 2429264 - RNA, 19 nt, Artificial Sequence
  Description of Artificial Sequence: Synthetic oligonucleotide
  Sense strand starting at position 2441 of SEQ ID NO: 1886829
aguuucgguaaauauaagu

SEQ ID NO: 2429265 - RNA, 19 nt, Artificial Sequence
  Description of Artificial Sequence: Synthetic oligonucleotide
  Antisense strand to SEQ ID NO: 2429264
acuuauauuuaccgaaacu

SEQ ID NO: 2429266 - RNA, 19 nt, Artificial Sequence
  Description of Artificial Sequence: Synthetic oligonucleotide
  Sense strand starting at position 2491 of SEQ ID NO: 1886829
aauuauuuccagcaugcgu

SEQ ID NO: 2429267 - RNA, 19 nt, Artificial Sequence
  Description of Artificial Sequence: Synthetic oligonucleotide
  Antisense strand to SEQ ID NO: 2429266
acgcaugcuggaaauaauu

SEQ ID NO: 2429268 - RNA, 19 nt, Artificial Sequence
  Description of Artificial Sequence: Synthetic oligonucleotide
  Sense strand starting at position 2499 of SEQ ID NO: 1886829
ccagcaugcguugcggaau

SEQ ID NO: 2429269 - RNA, 19 nt, Artificial Sequence
  Description of Artificial Sequence: Synthetic oligonucleotide
  Antisense strand to SEQ ID NO: 2429268
auuccgcaacgcaugcugg

SEQ ID NO: 2429270 - RNA, 19 nt, Artificial Sequence
  Description of Artificial Sequence: Synthetic oligonucleotide
  Sense strand starting at position 2502 of SEQ ID NO: 1886829
gcaugcguugcggaaugaa

SEQ ID NO: 2429271 - RNA, 19 nt, Artificial Sequence
  Description of Artificial Sequence: Synthetic oligonucleotide
  Antisense strand to SEQ ID NO: 2429270
uucauuccgcaacgcaugc

SEQ ID NO: 2429272 - RNA, 19 nt, Artificial Sequence
  Description of Artificial Sequence: Synthetic oligonucleotide
  Sense strand starting at position 2516 of SEQ ID NO: 1886829
augaaaggucuucgccaca

SEQ ID NO: 2429273 - RNA, 19 nt, Artificial Sequence
  Description of Artificial Sequence: Synthetic oligonucleotide
  Antisense strand to SEQ ID NO: 2429272
uguggcgaagaccuuucau

SEQ ID NO: 2429274 - RNA, 19 nt, Artificial Sequence
  Description of Artificial Sequence: Synthetic oligonucleotide
  Sense strand starting at position 2529 of SEQ ID NO: 1886829
gccacaguguuccuuagaa

SEQ ID NO: 2429275 - RNA, 19 nt, Artificial Sequence
  Description of Artificial Sequence: Synthetic oligonucleotide
  Antisense strand to SEQ ID NO: 2429274
uucuaaggaacacuguggc

SEQ ID NO: 2429276 - RNA, 19 nt, Artificial Sequence
  Description of Artificial Sequence: Synthetic oligonucleotide
  Sense strand starting at position 2533 of SEQ ID NO: 1886829
caguguuccuuagaaacug

SEQ ID NO: 2429277 - RNA, 19 nt, Artificial Sequence
  Description of Artificial Sequence: Synthetic oligonucleotide
  Antisense strand to SEQ ID NO: 2429276
caguuucuaaggaacacug

SEQ ID NO: 2429278 - RNA, 19 nt, Artificial Sequence
  Description of Artificial Sequence: Synthetic oligonucleotide
  Sense strand starting at position 2543 of SEQ ID NO: 1886829
uagaaacuguagucuuaug

SEQ ID NO: 2429279 - RNA, 19 nt, Artificial Sequence
  Description of Artificial Sequence: Synthetic oligonucleotide
  Antisense strand to SEQ ID NO: 2429278
cauaagacuacaguuucua

SEQ ID NO: 2429280 - RNA, 19 nt, Artificial Sequence
  Description of Artificial Sequence: Synthetic oligonucleotide
  Sense strand starting at position 2632 of SEQ ID NO: 1886829
cgcgcuuguacuugucaac

SEQ ID NO: 2429281 - RNA, 19 nt, Artificial Sequence
  Description of Artificial Sequence: Synthetic oligonucleotide
  Antisense strand to SEQ ID NO: 2429280
guugacaaguacaagcgcg

SEQ ID NO: 2429282 - RNA, 19 nt, Artificial Sequence
  Description of Artificial Sequence: Synthetic oligonucleotide
  Sense strand starting at position 2633 of SEQ ID NO: 1886829
gcgcuuguacuugucaaca

SEQ ID NO: 2429283 - RNA, 19 nt, Artificial Sequence
  Description of Artificial Sequence: Synthetic oligonucleotide
  Antisense strand to SEQ ID NO: 2429282
uguugacaaguacaagcgc

SEQ ID NO: 2429284 - RNA, 19 nt, Artificial Sequence
  Description of Artificial Sequence: Synthetic oligonucleotide
  Sense strand starting at position 2638 of SEQ ID NO: 1886829
uguacuugucaacaguuau

SEQ ID NO: 2429285 - RNA, 19 nt, Artificial Sequence
  Description of Artificial Sequence: Synthetic oligonucleotide
  Antisense strand to SEQ ID NO: 2429284
auaacuguugacaaguaca

SEQ ID NO: 2429286 - RNA, 19 nt, Artificial Sequence
  Description of Artificial Sequence: Synthetic oligonucleotide
  Sense strand starting at position 2650 of SEQ ID NO: 1886829
caguuauggacuggagugu

SEQ ID NO: 2429287 - RNA, 19 nt, Artificial Sequence
  Description of Artificial Sequence: Synthetic oligonucleotide
  Antisense strand to SEQ ID NO: 2429286
acacuccaguccauaacug

SEQ ID NO: 2429288 - RNA, 19 nt, Artificial Sequence
  Description of Artificial Sequence: Synthetic oligonucleotide
  Sense strand starting at position 2713 of SEQ ID NO: 1886829
acguacaacucuuuaggga

SEQ ID NO: 2429289 - RNA, 19 nt, Artificial Sequence
  Description of Artificial Sequence: Synthetic oligonucleotide
  Antisense strand to SEQ ID NO: 2429288
ucccuaaagaguuguacgu

SEQ ID NO: 2429290 - RNA, 19 nt, Artificial Sequence
  Description of Artificial Sequence: Synthetic oligonucleotide
  Sense strand starting at position 2717 of SEQ ID NO: 1886829
acaacucuuuagggagacu

SEQ ID NO: 2429291 - RNA, 19 nt, Artificial Sequence
  Description of Artificial Sequence: Synthetic oligonucleotide
  Antisense strand to SEQ ID NO: 2429290
agucucccuaaagaguugu

SEQ ID NO: 2429292 - RNA, 19 nt, Artificial Sequence
  Description of Artificial Sequence: Synthetic oligonucleotide
  Sense strand starting at position 2767 of SEQ ID NO: 1886829
caaguagucuuguaagguc

SEQ ID NO: 2429293 - RNA, 19 nt, Artificial Sequence
  Description of Artificial Sequence: Synthetic oligonucleotide
  Antisense strand to SEQ ID NO: 2429292
gaccuuacaagacuacuug

SEQ ID NO: 2429294 - RNA, 19 nt, Artificial Sequence
  Description of Artificial Sequence: Synthetic oligonucleotide
  Sense strand starting at position 2801 of SEQ ID NO: 1886829
cgcagugagcgccgaauuu

SEQ ID NO: 2429295 - RNA, 19 nt, Artificial Sequence
  Description of Artificial Sequence: Synthetic oligonucleotide
  Antisense strand to SEQ ID NO: 2429294
aaauucggcgcucacugcg

SEQ ID NO: 2429296 - RNA, 19 nt, Artificial Sequence
  Description of Artificial Sequence: Synthetic oligonucleotide
  Sense strand starting at position 2977 of SEQ ID NO: 1886829
agugguaagagccaaucuu

SEQ ID NO: 2429297 - RNA, 19 nt, Artificial Sequence
  Description of Artificial Sequence: Synthetic oligonucleotide
  Antisense strand to SEQ ID NO: 2429296
aagauuggcucuuaccacu

SEQ ID NO: 2429298 - RNA, 19 nt, Artificial Sequence
  Description of Artificial Sequence: Synthetic oligonucleotide
  Sense strand starting at position 2987 of SEQ ID NO: 1886829
gccaaucuucuuggcgaaa

SEQ ID NO: 2429299 - RNA, 19 nt, Artificial Sequence
  Description of Artificial Sequence: Synthetic oligonucleotide
  Antisense strand to SEQ ID NO: 2429298
uuucgccaagaagauuggc

SEQ ID NO: 2429300 - RNA, 19 nt, Artificial Sequence
  Description of Artificial Sequence: Synthetic oligonucleotide
  Sense strand starting at position 3270 of SEQ ID NO: 1886829
gagagagcccuucguguuc

SEQ ID NO: 2429301 - RNA, 19 nt, Artificial Sequence
  Description of Artificial Sequence: Synthetic oligonucleotide
  Antisense strand to SEQ ID NO: 2429300
gaacacgaagggcucucuc

SEQ ID NO: 2429302 - RNA, 19 nt, Artificial Sequence
  Description of Artificial Sequence: Synthetic oligonucleotide
  Sense strand starting at position 3281 of SEQ ID NO: 1886829
ucguguucugagggaccga

SEQ ID NO: 2429303 - RNA, 19 nt, Artificial Sequence
  Description of Artificial Sequence: Synthetic oligonucleotide
  Antisense strand to SEQ ID NO: 2429302
ucggucccucagaacacga

SEQ ID NO: 2429304 - RNA, 19 nt, Artificial Sequence
  Description of Artificial Sequence: Synthetic oligonucleotide
  Sense strand starting at position 3325 of SEQ ID NO: 1886829
gagagucugugguucagaa

SEQ ID NO: 2429305 - RNA, 19 nt, Artificial Sequence
  Description of Artificial Sequence: Synthetic oligonucleotide
  Antisense strand to SEQ ID NO: 2429304
uucugaaccacagacucuc

SEQ ID NO: 2429306 - RNA, 19 nt, Artificial Sequence
  Description of Artificial Sequence: Synthetic oligonucleotide
  Sense strand starting at position 3327 of SEQ ID NO: 1886829
gagucugugguucagaaug

SEQ ID NO: 2429307 - RNA, 19 nt, Artificial Sequence
  Description of Artificial Sequence: Synthetic oligonucleotide
  Antisense strand to SEQ ID NO: 2429306
cauucugaaccacagacuc

SEQ ID NO: 2429308 - RNA, 19 nt, Artificial Sequence
  Description of Artificial Sequence: Synthetic oligonucleotide
  Sense strand starting at position 3337 of SEQ ID NO: 1886829
uucagaaugcgaggugaca

SEQ ID NO: 2429309 - RNA, 19 nt, Artificial Sequence
  Description of Artificial Sequence: Synthetic oligonucleotide
  Antisense strand to SEQ ID NO: 2429308
ugucaccucgcauucugaa

SEQ ID NO: 2429310 - RNA, 19 nt, Artificial Sequence
  Description of Artificial Sequence: Synthetic oligonucleotide
  Sense strand starting at position 3964 of SEQ ID NO: 1886829
uuaugucuagccugaggau

SEQ ID NO: 2429311 - RNA, 19 nt, Artificial Sequence
  Description of Artificial Sequence: Synthetic oligonucleotide
  Antisense strand to SEQ ID NO: 2429310
auccucaggcuagacauaa

SEQ ID NO: 2429312 - RNA, 19 nt, Artificial Sequence
  Description of Artificial Sequence: Synthetic oligonucleotide
  Sense strand starting at position 3965 of SEQ ID NO: 1886829
uaugucuagccugaggauu

SEQ ID NO: 2429313 - RNA, 19 nt, Artificial Sequence
  Description of Artificial Sequence: Synthetic oligonucleotide
  Antisense strand to SEQ ID NO: 2429312
aauccucaggcuagacaua

SEQ ID NO: 2429314 - RNA, 19 nt, Artificial Sequence
  Description of Artificial Sequence: Synthetic oligonucleotide
  Sense strand starting at position 42 of SEQ ID NO: 1886830
ggcuccauuucuuucguca

SEQ ID NO: 2429315 - RNA, 19 nt, Artificial Sequence
  Description of Artificial Sequence: Synthetic oligonucleotide
  Antisense strand to SEQ ID NO: 2429314
ugacgaaagaaauggagcc

SEQ ID NO: 2429316 - RNA, 19 nt, Artificial Sequence
  Description of Artificial Sequence: Synthetic oligonucleotide
  Sense strand starting at position 44 of SEQ ID NO: 1886830
cuccauuucuuucgucauu

SEQ ID NO: 2429317 - RNA, 19 nt, Artificial Sequence
  Description of Artificial Sequence: Synthetic oligonucleotide
  Antisense strand to SEQ ID NO: 2429316
aaugacgaaagaaauggag

SEQ ID NO: 2429318 - RNA, 19 nt, Artificial Sequence
  Description of Artificial Sequence: Synthetic oligonucleotide
  Sense strand starting at position 55 of SEQ ID NO: 1886830
ucgucauuugucuguccuu

SEQ ID NO: 2429319 - RNA, 19 nt, Artificial Sequence
  Description of Artificial Sequence: Synthetic oligonucleotide
  Antisense strand to SEQ ID NO: 2429318
aaggacagacaaaugacga

SEQ ID NO: 2429320 - RNA, 19 nt, Artificial Sequence
  Description of Artificial Sequence: Synthetic oligonucleotide
  Sense strand starting at position 162 of SEQ ID NO: 1886830
ucucuucuuccaugagucu

SEQ ID NO: 2429321 - RNA, 19 nt, Artificial Sequence
  Description of Artificial Sequence: Synthetic oligonucleotide
  Antisense strand to SEQ ID NO: 2429320
agacucauggaagaagaga

SEQ ID NO: 2429322 - RNA, 19 nt, Artificial Sequence
  Description of Artificial Sequence: Synthetic oligonucleotide
  Sense strand starting at position 173 of SEQ ID NO: 1886830
augagucugucuguccuua

SEQ ID NO: 2429323 - RNA, 19 nt, Artificial Sequence
  Description of Artificial Sequence: Synthetic oligonucleotide
  Antisense strand to SEQ ID NO: 2429322
uaaggacagacagacucau

SEQ ID NO: 2429324 - RNA, 19 nt, Artificial Sequence
  Description of Artificial Sequence: Synthetic oligonucleotide
  Sense strand starting at position 521 of SEQ ID NO: 1886830
ucugaaggccugggacaua

SEQ ID NO: 2429325 - RNA, 19 nt, Artificial Sequence
  Description of Artificial Sequence: Synthetic oligonucleotide
  Antisense strand to SEQ ID NO: 2429324
uaugucccaggccuucaga

SEQ ID NO: 2429326 - RNA, 19 nt, Artificial Sequence
  Description of Artificial Sequence: Synthetic oligonucleotide
  Sense strand starting at position 558 of SEQ ID NO: 1886830
ccaugucuccuuggaccau

SEQ ID NO: 2429327 - RNA, 19 nt, Artificial Sequence
  Description of Artificial Sequence: Synthetic oligonucleotide
  Antisense strand to SEQ ID NO: 2429326
augguccaaggagacaugg

SEQ ID NO: 2429328 - RNA, 19 nt, Artificial Sequence
  Description of Artificial Sequence: Synthetic oligonucleotide
  Sense strand starting at position 731 of SEQ ID NO: 1886830
agcgcugugccauccuuaa

SEQ ID NO: 2429329 - RNA, 19 nt, Artificial Sequence
  Description of Artificial Sequence: Synthetic oligonucleotide
  Antisense strand to SEQ ID NO: 2429328
uuaaggauggcacagcgcu

SEQ ID NO: 2429330 - RNA, 19 nt, Artificial Sequence
  Description of Artificial Sequence: Synthetic oligonucleotide
  Sense strand starting at position 863 of SEQ ID NO: 1886830
gcucaauggaggugacaaa

SEQ ID NO: 2429331 - RNA, 19 nt, Artificial Sequence
  Description of Artificial Sequence: Synthetic oligonucleotide
  Antisense strand to SEQ ID NO: 2429330
uuugucaccuccauugagc

SEQ ID NO: 2429332 - RNA, 19 nt, Artificial Sequence
  Description of Artificial Sequence: Synthetic oligonucleotide
  Sense strand starting at position 1126 of SEQ ID NO: 1886830
gcccgaaagcugcaggaaa

SEQ ID NO: 2429333 - RNA, 19 nt, Artificial Sequence
  Description of Artificial Sequence: Synthetic oligonucleotide
  Antisense strand to SEQ ID NO: 2429332
uuuccugcagcuuucgggc

SEQ ID NO: 2429334 - RNA, 19 nt, Artificial Sequence
  Description of Artificial Sequence: Synthetic oligonucleotide
  Sense strand starting at position 1395 of SEQ ID NO: 1886830
ggagcaggauucuggauua

SEQ ID NO: 2429335 - RNA, 19 nt, Artificial Sequence
  Description of Artificial Sequence: Synthetic oligonucleotide
  Antisense strand to SEQ ID NO: 2429334
uaauccagaauccugcucc

SEQ ID NO: 2429336 - RNA, 19 nt, Artificial Sequence
  Description of Artificial Sequence: Synthetic oligonucleotide
  Sense strand starting at position 1446 of SEQ ID NO: 1886830
gagcucaucucaggguaua

SEQ ID NO: 2429337 - RNA, 19 nt, Artificial Sequence
  Description of Artificial Sequence: Synthetic oligonucleotide
  Antisense strand to SEQ ID NO: 2429336
uauacccugagaugagcuc

SEQ ID NO: 2429338 - RNA, 19 nt, Artificial Sequence
  Description of Artificial Sequence: Synthetic oligonucleotide
  Sense strand starting at position 1517 of SEQ ID NO: 1886830
gcagcauccuuugauccua

SEQ ID NO: 2429339 - RNA, 19 nt, Artificial Sequence
  Description of Artificial Sequence: Synthetic oligonucleotide
  Antisense strand to SEQ ID NO: 2429338
uaggaucaaaggaugcugc

SEQ ID NO: 2429340 - RNA, 19 nt, Artificial Sequence
  Description of Artificial Sequence: Synthetic oligonucleotide
  Sense strand starting at position 1530 of SEQ ID NO: 1886830
auccuaaacucagauguag

SEQ ID NO: 2429341 - RNA, 19 nt, Artificial Sequence
  Description of Artificial Sequence: Synthetic oligonucleotide
  Antisense strand to SEQ ID NO: 2429340
cuacaucugaguuuaggau

SEQ ID NO: 2429342 - RNA, 19 nt, Artificial Sequence
  Description of Artificial Sequence: Synthetic oligonucleotide
  Sense strand starting at position 1651 of SEQ ID NO: 1886830
gcuaacuccuccuuuggga

SEQ ID NO: 2429343 - RNA, 19 nt, Artificial Sequence
  Description of Artificial Sequence: Synthetic oligonucleotide
  Antisense strand to SEQ ID NO: 2429342
ucccaaaggaggaguuagc

SEQ ID NO: 2429344 - RNA, 19 nt, Artificial Sequence
  Description of Artificial Sequence: Synthetic oligonucleotide
  Sense strand starting at position 1992 of SEQ ID NO: 1886830
agauguuaaugagacgcaa

SEQ ID NO: 2429345 - RNA, 19 nt, Artificial Sequence
  Description of Artificial Sequence: Synthetic oligonucleotide
  Antisense strand to SEQ ID NO: 2429344
uugcgucucauuaacaucu

SEQ ID NO: 2429346 - RNA, 19 nt, Artificial Sequence
  Description of Artificial Sequence: Synthetic oligonucleotide
  Sense strand starting at position 1994 of SEQ ID NO: 1886830
auguuaaugagacgcaaau

SEQ ID NO: 2429347 - RNA, 19 nt, Artificial Sequence
  Description of Artificial Sequence: Synthetic oligonucleotide
  Antisense strand to SEQ ID NO: 2429346
auuugcgucucauuaacau

SEQ ID NO: 2429348 - RNA, 19 nt, Artificial Sequence
  Description of Artificial Sequence: Synthetic oligonucleotide
  Sense strand starting at position 1996 of SEQ ID NO: 1886830
guuaaugagacgcaaauga

SEQ ID NO: 2429349 - RNA, 19 nt, Artificial Sequence
  Description of Artificial Sequence: Synthetic oligonucleotide
  Antisense strand to SEQ ID NO: 2429348
ucauuugcgucucauuaac

SEQ ID NO: 2429350 - RNA, 19 nt, Artificial Sequence
  Description of Artificial Sequence: Synthetic oligonucleotide
  Sense strand starting at position 2106 of SEQ ID NO: 1886830
ugggcauuucugugcucca

SEQ ID NO: 2429351 - RNA, 19 nt, Artificial Sequence
  Description of Artificial Sequence: Synthetic oligonucleotide
  Antisense strand to SEQ ID NO: 2429350
uggagcacagaaaugccca

SEQ ID NO: 2429352 - RNA, 19 nt, Artificial Sequence
  Description of Artificial Sequence: Synthetic oligonucleotide
  Sense strand starting at position 2245 of SEQ ID NO: 1886830
uacugagaaugaccgcaua

SEQ ID NO: 2429353 - RNA, 19 nt, Artificial Sequence
  Description of Artificial Sequence: Synthetic oligonucleotide
  Antisense strand to SEQ ID NO: 2429352
uaugcggucauucucagua

SEQ ID NO: 2429354 - RNA, 19 nt, Artificial Sequence
  Description of Artificial Sequence: Synthetic oligonucleotide
  Sense strand starting at position 2273 of SEQ ID NO: 1886830
gggagcauguggccacaua

SEQ ID NO: 2429355 - RNA, 19 nt, Artificial Sequence
  Description of Artificial Sequence: Synthetic oligonucleotide
  Antisense strand to SEQ ID NO: 2429354
uauguggccacaugcuccc

SEQ ID NO: 2429356 - RNA, 19 nt, Artificial Sequence
  Description of Artificial Sequence: Synthetic oligonucleotide
  Sense strand starting at position 2930 of SEQ ID NO: 1886830
gccgcaaaucccugguugu

SEQ ID NO: 2429357 - RNA, 19 nt, Artificial Sequence
  Description of Artificial Sequence: Synthetic oligonucleotide
  Antisense strand to SEQ ID NO: 2429356
acaaccagggauuugcggc

SEQ ID NO: 2429358 - RNA, 19 nt, Artificial Sequence
  Description of Artificial Sequence: Synthetic oligonucleotide
  Sense strand starting at position 3178 of SEQ ID NO: 1886830
ucuggcuucucgccaucau

SEQ ID NO: 2429359 - RNA, 19 nt, Artificial Sequence
  Description of Artificial Sequence: Synthetic oligonucleotide
  Antisense strand to SEQ ID NO: 2429358
augauggcgagaagccaga

SEQ ID NO: 2429360 - RNA, 19 nt, Artificial Sequence
  Description of Artificial Sequence: Synthetic oligonucleotide
  Sense strand starting at position 3261 of SEQ ID NO: 1886830
gugaucugauagugaccaa

SEQ ID NO: 2429361 - RNA, 19 nt, Artificial Sequence
  Description of Artificial Sequence: Synthetic oligonucleotide
  Antisense strand to SEQ ID NO: 2429360
uuggucacuaucagaucac

SEQ ID NO: 2429362 - RNA, 19 nt, Artificial Sequence
  Description of Artificial Sequence: Synthetic oligonucleotide
  Sense strand starting at position 3295 of SEQ ID NO: 1886830
ggaggcuucuugcucagau

SEQ ID NO: 2429363 - RNA, 19 nt, Artificial Sequence
  Description of Artificial Sequence: Synthetic oligonucleotide
  Antisense strand to SEQ ID NO: 2429362
aucugagcaagaagccucc

SEQ ID NO: 2429364 - RNA, 19 nt, Artificial Sequence
  Description of Artificial Sequence: Synthetic oligonucleotide
  Sense strand starting at position 3296 of SEQ ID NO: 1886830
gaggcuucuugcucagauu

SEQ ID NO: 2429365 - RNA, 19 nt, Artificial Sequence
  Description of Artificial Sequence: Synthetic oligonucleotide
  Antisense strand to SEQ ID NO: 2429364
aaucugagcaagaagccuc

SEQ ID NO: 2429366 - RNA, 19 nt, Artificial Sequence
  Description of Artificial Sequence: Synthetic oligonucleotide
  Sense strand starting at position 3375 of SEQ ID NO: 1886830
caaaguuugcacggauaau

SEQ ID NO: 2429367 - RNA, 19 nt, Artificial Sequence
  Description of Artificial Sequence: Synthetic oligonucleotide
  Antisense strand to SEQ ID NO: 2429366
auuauccgugcaaacuuug

SEQ ID NO: 2429368 - RNA, 19 nt, Artificial Sequence
  Description of Artificial Sequence: Synthetic oligonucleotide
  Sense strand starting at position 3467 of SEQ ID NO: 1886830
agcccagauuuggaugaua

SEQ ID NO: 2429369 - RNA, 19 nt, Artificial Sequence
  Description of Artificial Sequence: Synthetic oligonucleotide
  Antisense strand to SEQ ID NO: 2429368
uaucauccaaaucugggcu

SEQ ID NO: 2429370 - RNA, 19 nt, Artificial Sequence
  Description of Artificial Sequence: Synthetic oligonucleotide
  Sense strand starting at position 3534 of SEQ ID NO: 1886830
cuccuaguucucugccagu

SEQ ID NO: 2429371 - RNA, 19 nt, Artificial Sequence
  Description of Artificial Sequence: Synthetic oligonucleotide
  Antisense strand to SEQ ID NO: 2429370
acuggcagagaacuaggag

SEQ ID NO: 2429372 - RNA, 19 nt, Artificial Sequence
  Description of Artificial Sequence: Synthetic oligonucleotide
  Sense strand starting at position 3570 of SEQ ID NO: 1886830
gacaguuauugagugcaga

SEQ ID NO: 2429373 - RNA, 19 nt, Artificial Sequence
  Description of Artificial Sequence: Synthetic oligonucleotide
  Antisense strand to SEQ ID NO: 2429372
ucugcacucaauaacuguc

SEQ ID NO: 2429374 - RNA, 19 nt, Artificial Sequence
  Description of Artificial Sequence: Synthetic oligonucleotide
  Sense strand starting at position 3571 of SEQ ID NO: 1886830
acaguuauugagugcagag

SEQ ID NO: 2429375 - RNA, 19 nt, Artificial Sequence
  Description of Artificial Sequence: Synthetic oligonucleotide
  Antisense strand to SEQ ID NO: 2429374
cucugcacucaauaacugu

SEQ ID NO: 2429376 - RNA, 19 nt, Artificial Sequence
  Description of Artificial Sequence: Synthetic oligonucleotide
  Sense strand starting at position 3618 of SEQ ID NO: 1886830
aaagcuuuggccuggauaa

SEQ ID NO: 2429377 - RNA, 19 nt, Artificial Sequence
  Description of Artificial Sequence: Synthetic oligonucleotide
  Antisense strand to SEQ ID NO: 2429376
uuauccaggccaaagcuuu

SEQ ID NO: 2429378 - RNA, 19 nt, Artificial Sequence
  Description of Artificial Sequence: Synthetic oligonucleotide
  Sense strand starting at position 3619 of SEQ ID NO: 1886830
aagcuuuggccuggauaaa

SEQ ID NO: 2429379 - RNA, 19 nt, Artificial Sequence
  Description of Artificial Sequence: Synthetic oligonucleotide
  Antisense strand to SEQ ID NO: 2429378
uuuauccaggccaaagcuu

SEQ ID NO: 2429380 - RNA, 19 nt, Artificial Sequence
  Description of Artificial Sequence: Synthetic oligonucleotide
  Sense strand starting at position 3620 of SEQ ID NO: 1886830
agcuuuggccuggauaaag

SEQ ID NO: 2429381 - RNA, 19 nt, Artificial Sequence
  Description of Artificial Sequence: Synthetic oligonucleotide
  Antisense strand to SEQ ID NO: 2429380
cuuuauccaggccaaagcu

SEQ ID NO: 2429382 - RNA, 19 nt, Artificial Sequence
  Description of Artificial Sequence: Synthetic oligonucleotide
  Sense strand starting at position 3681 of SEQ ID NO: 1886830
cacuuauggcuccaggaca

SEQ ID NO: 2429383 - RNA, 19 nt, Artificial Sequence
  Description of Artificial Sequence: Synthetic oligonucleotide
  Antisense strand to SEQ ID NO: 2429382
uguccuggagccauaagug

SEQ ID NO: 2429384 - RNA, 19 nt, Artificial Sequence
  Description of Artificial Sequence: Synthetic oligonucleotide
  Sense strand starting at position 3704 of SEQ ID NO: 1886830
ggugcagccuuuguacuua

SEQ ID NO: 2429385 - RNA, 19 nt, Artificial Sequence
  Description of Artificial Sequence: Synthetic oligonucleotide
  Antisense strand to SEQ ID NO: 2429384
uaaguacaaaggcugcacc

SEQ ID NO: 2429386 - RNA, 19 nt, Artificial Sequence
  Description of Artificial Sequence: Synthetic oligonucleotide
  Sense strand starting at position 3789 of SEQ ID NO: 1886830
ggaucucuugcuggcugaa

SEQ ID NO: 2429387 - RNA, 19 nt, Artificial Sequence
  Description of Artificial Sequence: Synthetic oligonucleotide
  Antisense strand to SEQ ID NO: 2429386
uucagccagcaagagaucc

SEQ ID NO: 2429388 - RNA, 19 nt, Artificial Sequence
  Description of Artificial Sequence: Synthetic oligonucleotide
  Sense strand starting at position 3792 of SEQ ID NO: 1886830
ucucuugcuggcugaauga

SEQ ID NO: 2429389 - RNA, 19 nt, Artificial Sequence
  Description of Artificial Sequence: Synthetic oligonucleotide
  Antisense strand to SEQ ID NO: 2429388
ucauucagccagcaagaga

SEQ ID NO: 2429390 - RNA, 19 nt, Artificial Sequence
  Description of Artificial Sequence: Synthetic oligonucleotide
  Sense strand starting at position 3926 of SEQ ID NO: 1886830
ggacaaccuacccgugauu

SEQ ID NO: 2429391 - RNA, 19 nt, Artificial Sequence
  Description of Artificial Sequence: Synthetic oligonucleotide
  Antisense strand to SEQ ID NO: 2429390
aaucacggguagguugucc

SEQ ID NO: 2429392 - RNA, 19 nt, Artificial Sequence
  Description of Artificial Sequence: Synthetic oligonucleotide
  Sense strand starting at position 3982 of SEQ ID NO: 1886830
ugguaaguccuaggucaag

SEQ ID NO: 2429393 - RNA, 19 nt, Artificial Sequence
  Description of Artificial Sequence: Synthetic oligonucleotide
  Antisense strand to SEQ ID NO: 2429392
cuugaccuaggacuuacca

SEQ ID NO: 2429394 - RNA, 19 nt, Artificial Sequence
  Description of Artificial Sequence: Synthetic oligonucleotide
  Sense strand starting at position 21 of SEQ ID NO: 1886831
gggacccaaugcuaauaaa

SEQ ID NO: 2429395 - RNA, 19 nt, Artificial Sequence
  Description of Artificial Sequence: Synthetic oligonucleotide
  Antisense strand to SEQ ID NO: 2429394
uuuauuagcauuggguccc

SEQ ID NO: 2429396 - RNA, 19 nt, Artificial Sequence
  Description of Artificial Sequence: Synthetic oligonucleotide
  Sense strand starting at position 156 of SEQ ID NO: 1886831
gucgcuccuccagaagaua

SEQ ID NO: 2429397 - RNA, 19 nt, Artificial Sequence
  Description of Artificial Sequence: Synthetic oligonucleotide
  Antisense strand to SEQ ID NO: 2429396
uaucuucuggaggagcgac

SEQ ID NO: 2429398 - RNA, 19 nt, Artificial Sequence
  Description of Artificial Sequence: Synthetic oligonucleotide
  Sense strand starting at position 547 of SEQ ID NO: 1886831
ugacaugacuggcaugaca

SEQ ID NO: 2429399 - RNA, 19 nt, Artificial Sequence
  Description of Artificial Sequence: Synthetic oligonucleotide
  Antisense strand to SEQ ID NO: 2429398
ugucaugccagucauguca

SEQ ID NO: 2429400 - RNA, 19 nt, Artificial Sequence
  Description of Artificial Sequence: Synthetic oligonucleotide
  Sense strand starting at position 629 of SEQ ID NO: 1886831
aaacauagggcgugucuua

SEQ ID NO: 2429401 - RNA, 19 nt, Artificial Sequence
  Description of Artificial Sequence: Synthetic oligonucleotide
  Antisense strand to SEQ ID NO: 2429400
uaagacacgcccuauguuu

SEQ ID NO: 2429402 - RNA, 19 nt, Artificial Sequence
  Description of Artificial Sequence: Synthetic oligonucleotide
  Sense strand starting at position 634 of SEQ ID NO: 1886831
uagggcgugucuuacacau

SEQ ID NO: 2429403 - RNA, 19 nt, Artificial Sequence
  Description of Artificial Sequence: Synthetic oligonucleotide
  Antisense strand to SEQ ID NO: 2429402
auguguaagacacgcccua

SEQ ID NO: 2429404 - RNA, 19 nt, Artificial Sequence
  Description of Artificial Sequence: Synthetic oligonucleotide
  Sense strand starting at position 636 of SEQ ID NO: 1886831
gggcgugucuuacacauag

SEQ ID NO: 2429405 - RNA, 19 nt, Artificial Sequence
  Description of Artificial Sequence: Synthetic oligonucleotide
  Antisense strand to SEQ ID NO: 2429404
cuauguguaagacacgccc

SEQ ID NO: 2429406 - RNA, 19 nt, Artificial Sequence
  Description of Artificial Sequence: Synthetic oligonucleotide
  Sense strand starting at position 638 of SEQ ID NO: 1886831
gcgugucuuacacauagaa

SEQ ID NO: 2429407 - RNA, 19 nt, Artificial Sequence
  Description of Artificial Sequence: Synthetic oligonucleotide
  Antisense strand to SEQ ID NO: 2429406
uucuauguguaagacacgc

SEQ ID NO: 2429408 - RNA, 19 nt, Artificial Sequence
  Description of Artificial Sequence: Synthetic oligonucleotide
  Sense strand starting at position 756 of SEQ ID NO: 1886831
auagauacauggugauaua

SEQ ID NO: 2429409 - RNA, 19 nt, Artificial Sequence
  Description of Artificial Sequence: Synthetic oligonucleotide
  Antisense strand to SEQ ID NO: 2429408
uauaucaccauguaucuau

SEQ ID NO: 2429410 - RNA, 19 nt, Artificial Sequence
  Description of Artificial Sequence: Synthetic oligonucleotide
  Sense strand starting at position 790 of SEQ ID NO: 1886831
ccaugucauuaugcauauu

SEQ ID NO: 2429411 - RNA, 19 nt, Artificial Sequence
  Description of Artificial Sequence: Synthetic oligonucleotide
  Antisense strand to SEQ ID NO: 2429410
aauaugcauaaugacaugg

SEQ ID NO: 2429412 - RNA, 19 nt, Artificial Sequence
  Description of Artificial Sequence: Synthetic oligonucleotide
  Sense strand starting at position 804 of SEQ ID NO: 1886831
auauuuacaugacgauaug

SEQ ID NO: 2429413 - RNA, 19 nt, Artificial Sequence
  Description of Artificial Sequence: Synthetic oligonucleotide
  Antisense strand to SEQ ID NO: 2429412
cauaucgucauguaaauau

SEQ ID NO: 2429414 - RNA, 19 nt, Artificial Sequence
  Description of Artificial Sequence: Synthetic oligonucleotide
  Sense strand starting at position 813 of SEQ ID NO: 1886831
ugacgauaugagcauguca

SEQ ID NO: 2429415 - RNA, 19 nt, Artificial Sequence
  Description of Artificial Sequence: Synthetic oligonucleotide
  Antisense strand to SEQ ID NO: 2429414
ugacaugcucauaucguca

SEQ ID NO: 2429416 - RNA, 19 nt, Artificial Sequence
  Description of Artificial Sequence: Synthetic oligonucleotide
  Sense strand starting at position 815 of SEQ ID NO: 1886831
acgauaugagcaugucaua

SEQ ID NO: 2429417 - RNA, 19 nt, Artificial Sequence
  Description of Artificial Sequence: Synthetic oligonucleotide
  Antisense strand to SEQ ID NO: 2429416
uaugacaugcucauaucgu

SEQ ID NO: 2429418 - RNA, 19 nt, Artificial Sequence
  Description of Artificial Sequence: Synthetic oligonucleotide
  Sense strand starting at position 818 of SEQ ID NO: 1886831
auaugagcaugucauauau

SEQ ID NO: 2429419 - RNA, 19 nt, Artificial Sequence
  Description of Artificial Sequence: Synthetic oligonucleotide
  Antisense strand to SEQ ID NO: 2429418
auauaugacaugcucauau

SEQ ID NO: 2429420 - RNA, 19 nt, Artificial Sequence
  Description of Artificial Sequence: Synthetic oligonucleotide
  Sense strand starting at position 820 of SEQ ID NO: 1886831
augagcaugucauauauug

SEQ ID NO: 2429421 - RNA, 19 nt, Artificial Sequence
  Description of Artificial Sequence: Synthetic oligonucleotide
  Antisense strand to SEQ ID NO: 2429420
caauauaugacaugcucau

SEQ ID NO: 2429422 - RNA, 19 nt, Artificial Sequence
  Description of Artificial Sequence: Synthetic oligonucleotide
  Sense strand starting at position 827 of SEQ ID NO: 1886831
ugucauauauuguguaauc

SEQ ID NO: 2429423 - RNA, 19 nt, Artificial Sequence
  Description of Artificial Sequence: Synthetic oligonucleotide
  Antisense strand to SEQ ID NO: 2429422
gauuacacaauauaugaca

SEQ ID NO: 2429424 - RNA, 19 nt, Artificial Sequence
  Description of Artificial Sequence: Synthetic oligonucleotide
  Sense strand starting at position 828 of SEQ ID NO: 1886831
gucauauauuguguaauca

SEQ ID NO: 2429425 - RNA, 19 nt, Artificial Sequence
  Description of Artificial Sequence: Synthetic oligonucleotide
  Antisense strand to SEQ ID NO: 2429424
ugauuacacaauauaugac

SEQ ID NO: 2429426 - RNA, 19 nt, Artificial Sequence
  Description of Artificial Sequence: Synthetic oligonucleotide
  Sense strand starting at position 847 of SEQ ID NO: 1886831
auuacuacauugugccaua

SEQ ID NO: 2429427 - RNA, 19 nt, Artificial Sequence
  Description of Artificial Sequence: Synthetic oligonucleotide
  Antisense strand to SEQ ID NO: 2429426
uauggcacaauguaguaau

SEQ ID NO: 2429428 - RNA, 19 nt, Artificial Sequence
  Description of Artificial Sequence: Synthetic oligonucleotide
  Sense strand starting at position 860 of SEQ ID NO: 1886831
gccauauaguagcauccau

SEQ ID NO: 2429429 - RNA, 19 nt, Artificial Sequence
  Description of Artificial Sequence: Synthetic oligonucleotide
  Antisense strand to SEQ ID NO: 2429428
auggaugcuacuauauggc

SEQ ID NO: 2429430 - RNA, 19 nt, Artificial Sequence
  Description of Artificial Sequence: Synthetic oligonucleotide
  Sense strand starting at position 884 of SEQ ID NO: 1886831
uauauaucaugauguguug

SEQ ID NO: 2429431 - RNA, 19 nt, Artificial Sequence
  Description of Artificial Sequence: Synthetic oligonucleotide
  Antisense strand to SEQ ID NO: 2429430
caacacaucaugauauaua

SEQ ID NO: 2429432 - RNA, 19 nt, Artificial Sequence
  Description of Artificial Sequence: Synthetic oligonucleotide
  Sense strand starting at position 887 of SEQ ID NO: 1886831
auaucaugauguguuguaa

SEQ ID NO: 2429433 - RNA, 19 nt, Artificial Sequence
  Description of Artificial Sequence: Synthetic oligonucleotide
  Antisense strand to SEQ ID NO: 2429432
uuacaacacaucaugauau

SEQ ID NO: 2429434 - RNA, 19 nt, Artificial Sequence
  Description of Artificial Sequence: Synthetic oligonucleotide
  Sense strand starting at position 891 of SEQ ID NO: 1886831
caugauguguuguaauuua

SEQ ID NO: 2429435 - RNA, 19 nt, Artificial Sequence
  Description of Artificial Sequence: Synthetic oligonucleotide
  Antisense strand to SEQ ID NO: 2429434
uaaauuacaacacaucaug

SEQ ID NO: 2429436 - RNA, 19 nt, Artificial Sequence
  Description of Artificial Sequence: Synthetic oligonucleotide
  Sense strand starting at position 1007 of SEQ ID NO: 1886831
agauacacccaauguguuu

SEQ ID NO: 2429437 - RNA, 19 nt, Artificial Sequence
  Description of Artificial Sequence: Synthetic oligonucleotide
  Antisense strand to SEQ ID NO: 2429436
aaacacauuggguguaucu

SEQ ID NO: 2429438 - RNA, 19 nt, Artificial Sequence
  Description of Artificial Sequence: Synthetic oligonucleotide
  Sense strand starting at position 1035 of SEQ ID NO: 1886831
uuuauuaugugacucauag

SEQ ID NO: 2429439 - RNA, 19 nt, Artificial Sequence
  Description of Artificial Sequence: Synthetic oligonucleotide
  Antisense strand to SEQ ID NO: 2429438
cuaugagucacauaauaaa

SEQ ID NO: 2429440 - RNA, 19 nt, Artificial Sequence
  Description of Artificial Sequence: Synthetic oligonucleotide
  Sense strand starting at position 1152 of SEQ ID NO: 1886831
cgcauaauggcaugcauau

SEQ ID NO: 2429441 - RNA, 19 nt, Artificial Sequence
  Description of Artificial Sequence: Synthetic oligonucleotide
  Antisense strand to SEQ ID NO: 2429440
auaugcaugccauuaugcg

SEQ ID NO: 2429442 - RNA, 19 nt, Artificial Sequence
  Description of Artificial Sequence: Synthetic oligonucleotide
  Sense strand starting at position 1331 of SEQ ID NO: 1886831
caguaucaccgcugcuauu

SEQ ID NO: 2429443 - RNA, 19 nt, Artificial Sequence
  Description of Artificial Sequence: Synthetic oligonucleotide
  Antisense strand to SEQ ID NO: 2429442
aauagcagcggugauacug

SEQ ID NO: 2429444 - RNA, 19 nt, Artificial Sequence
  Description of Artificial Sequence: Synthetic oligonucleotide
  Sense strand starting at position 1589 of SEQ ID NO: 1886831
ccaggcaauucgggacaaa

SEQ ID NO: 2429445 - RNA, 19 nt, Artificial Sequence
  Description of Artificial Sequence: Synthetic oligonucleotide
  Antisense strand to SEQ ID NO: 2429444
uuugucccgaauugccugg

SEQ ID NO: 2429446 - RNA, 19 nt, Artificial Sequence
  Description of Artificial Sequence: Synthetic oligonucleotide
  Sense strand starting at position 1670 of SEQ ID NO: 1886831
ugcaaucugccaggaggaa

SEQ ID NO: 2429447 - RNA, 19 nt, Artificial Sequence
  Description of Artificial Sequence: Synthetic oligonucleotide
  Antisense strand to SEQ ID NO: 2429446
uuccuccuggcagauugca

SEQ ID NO: 2429448 - RNA, 19 nt, Artificial Sequence
  Description of Artificial Sequence: Synthetic oligonucleotide
  Sense strand starting at position 1692 of SEQ ID NO: 1886831
gaaggaauucuccgucuau

SEQ ID NO: 2429449 - RNA, 19 nt, Artificial Sequence
  Description of Artificial Sequence: Synthetic oligonucleotide
  Antisense strand to SEQ ID NO: 2429448
auagacggagaauuccuuc

SEQ ID NO: 2429450 - RNA, 19 nt, Artificial Sequence
  Description of Artificial Sequence: Synthetic oligonucleotide
  Sense strand starting at position 1693 of SEQ ID NO: 1886831
aaggaauucuccgucuauu

SEQ ID NO: 2429451 - RNA, 19 nt, Artificial Sequence
  Description of Artificial Sequence: Synthetic oligonucleotide
  Antisense strand to SEQ ID NO: 2429450
aauagacggagaauuccuu

SEQ ID NO: 2429452 - RNA, 19 nt, Artificial Sequence
  Description of Artificial Sequence: Synthetic oligonucleotide
  Sense strand starting at position 1841 of SEQ ID NO: 1886831
ccguucugucucuaucagu

SEQ ID NO: 2429453 - RNA, 19 nt, Artificial Sequence
  Description of Artificial Sequence: Synthetic oligonucleotide
  Antisense strand to SEQ ID NO: 2429452
acugauagagacagaacgg

SEQ ID NO: 2429454 - RNA, 19 nt, Artificial Sequence
  Description of Artificial Sequence: Synthetic oligonucleotide
  Sense strand starting at position 3479 of SEQ ID NO: 1886831
gguccaucucuguggcuau

SEQ ID NO: 2429455 - RNA, 19 nt, Artificial Sequence
  Description of Artificial Sequence: Synthetic oligonucleotide
  Antisense strand to SEQ ID NO: 2429454
auagccacagagauggacc

SEQ ID NO: 2429456 - RNA, 19 nt, Artificial Sequence
  Description of Artificial Sequence: Synthetic oligonucleotide
  Sense strand starting at position 3530 of SEQ ID NO: 1886831
ggcuccauuucuuucguca

SEQ ID NO: 2429457 - RNA, 19 nt, Artificial Sequence
  Description of Artificial Sequence: Synthetic oligonucleotide
  Antisense strand to SEQ ID NO: 2429456
ugacgaaagaaauggagcc

SEQ ID NO: 2429458 - RNA, 19 nt, Artificial Sequence
  Description of Artificial Sequence: Synthetic oligonucleotide
  Sense strand starting at position 3532 of SEQ ID NO: 1886831
cuccauuucuuucgucauu

SEQ ID NO: 2429459 - RNA, 19 nt, Artificial Sequence
  Description of Artificial Sequence: Synthetic oligonucleotide
  Antisense strand to SEQ ID NO: 2429458
aaugacgaaagaaauggag

SEQ ID NO: 2429460 - RNA, 19 nt, Artificial Sequence
  Description of Artificial Sequence: Synthetic oligonucleotide
  Sense strand starting at position 3543 of SEQ ID NO: 1886831
ucgucauuugucuguccuu

SEQ ID NO: 2429461 - RNA, 19 nt, Artificial Sequence
  Description of Artificial Sequence: Synthetic oligonucleotide
  Antisense strand to SEQ ID NO: 2429460
aaggacagacaaaugacga

SEQ ID NO: 2429462 - RNA, 19 nt, Artificial Sequence
  Description of Artificial Sequence: Synthetic oligonucleotide
  Sense strand starting at position 3650 of SEQ ID NO: 1886831
ucucuucuuccaugagucu

SEQ ID NO: 2429463 - RNA, 19 nt, Artificial Sequence
  Description of Artificial Sequence: Synthetic oligonucleotide
  Antisense strand to SEQ ID NO: 2429462
agacucauggaagaagaga

SEQ ID NO: 2429464 - RNA, 19 nt, Artificial Sequence
  Description of Artificial Sequence: Synthetic oligonucleotide
  Sense strand starting at position 3661 of SEQ ID NO: 1886831
augagucugucuguccuua

SEQ ID NO: 2429465 - RNA, 19 nt, Artificial Sequence
  Description of Artificial Sequence: Synthetic oligonucleotide
  Antisense strand to SEQ ID NO: 2429464
uaaggacagacagacucau

SEQ ID NO: 2429466 - RNA, 19 nt, Artificial Sequence
  Description of Artificial Sequence: Synthetic oligonucleotide
  Sense strand starting at position 3790 of SEQ ID NO: 1886831
ugagcaggcuccuguagaa

SEQ ID NO: 2429467 - RNA, 19 nt, Artificial Sequence
  Description of Artificial Sequence: Synthetic oligonucleotide
  Antisense strand to SEQ ID NO: 2429466
uucuacaggagccugcuca

SEQ ID NO: 2429468 - RNA, 19 nt, Artificial Sequence
  Description of Artificial Sequence: Synthetic oligonucleotide
  Sense strand starting at position 23 of SEQ ID NO: 1886832
accugagugucucugaaac

SEQ ID NO: 2429469 - RNA, 19 nt, Artificial Sequence
  Description of Artificial Sequence: Synthetic oligonucleotide
  Antisense strand to SEQ ID NO: 2429468
guuucagagacacucaggu

SEQ ID NO: 2429470 - RNA, 19 nt, Artificial Sequence
  Description of Artificial Sequence: Synthetic oligonucleotide
  Sense strand starting at position 25 of SEQ ID NO: 1886832
cugagugucucugaaacug

SEQ ID NO: 2429471 - RNA, 19 nt, Artificial Sequence
  Description of Artificial Sequence: Synthetic oligonucleotide
  Antisense strand to SEQ ID NO: 2429470
caguuucagagacacucag

SEQ ID NO: 2429472 - RNA, 19 nt, Artificial Sequence
  Description of Artificial Sequence: Synthetic oligonucleotide
  Sense strand starting at position 293 of SEQ ID NO: 1886832
ugcagucacccauaaagua

SEQ ID NO: 2429473 - RNA, 19 nt, Artificial Sequence
  Description of Artificial Sequence: Synthetic oligonucleotide
  Antisense strand to SEQ ID NO: 2429472
uacuuuaugggugacugca

SEQ ID NO: 2429474 - RNA, 19 nt, Artificial Sequence
  Description of Artificial Sequence: Synthetic oligonucleotide
  Sense strand starting at position 337 of SEQ ID NO: 1886832
gguguaguguuuccuacuu

SEQ ID NO: 2429475 - RNA, 19 nt, Artificial Sequence
  Description of Artificial Sequence: Synthetic oligonucleotide
  Antisense strand to SEQ ID NO: 2429474
aaguaggaaacacuacacc

SEQ ID NO: 2429476 - RNA, 19 nt, Artificial Sequence
  Description of Artificial Sequence: Synthetic oligonucleotide
  Sense strand starting at position 339 of SEQ ID NO: 1886832
uguaguguuuccuacuuua

SEQ ID NO: 2429477 - RNA, 19 nt, Artificial Sequence
  Description of Artificial Sequence: Synthetic oligonucleotide
  Antisense strand to SEQ ID NO: 2429476
uaaaguaggaaacacuaca

SEQ ID NO: 2429478 - RNA, 19 nt, Artificial Sequence
  Description of Artificial Sequence: Synthetic oligonucleotide
  Sense strand starting at position 346 of SEQ ID NO: 1886832
uuuccuacuuuauggauga

SEQ ID NO: 2429479 - RNA, 19 nt, Artificial Sequence
  Description of Artificial Sequence: Synthetic oligonucleotide
  Antisense strand to SEQ ID NO: 2429478
ucauccauaaaguaggaaa

SEQ ID NO: 2429480 - RNA, 19 nt, Artificial Sequence
  Description of Artificial Sequence: Synthetic oligonucleotide
  Sense strand starting at position 350 of SEQ ID NO: 1886832
cuacuuuauggaugagugu

SEQ ID NO: 2429481 - RNA, 19 nt, Artificial Sequence
  Description of Artificial Sequence: Synthetic oligonucleotide
  Antisense strand to SEQ ID NO: 2429480
acacucauccauaaaguag

SEQ ID NO: 2429482 - RNA, 19 nt, Artificial Sequence
  Description of Artificial Sequence: Synthetic oligonucleotide
  Sense strand starting at position 351 of SEQ ID NO: 1886832
uacuuuauggaugagugua

SEQ ID NO: 2429483 - RNA, 19 nt, Artificial Sequence
  Description of Artificial Sequence: Synthetic oligonucleotide
  Antisense strand to SEQ ID NO: 2429482
uacacucauccauaaagua

SEQ ID NO: 2429484 - RNA, 19 nt, Artificial Sequence
  Description of Artificial Sequence: Synthetic oligonucleotide
  Sense strand starting at position 688 of SEQ ID NO: 1886832
gggacccaaugcuaauaaa

SEQ ID NO: 2429485 - RNA, 19 nt, Artificial Sequence
  Description of Artificial Sequence: Synthetic oligonucleotide
  Antisense strand to SEQ ID NO: 2429484
uuuauuagcauuggguccc

SEQ ID NO: 2429486 - RNA, 19 nt, Artificial Sequence
  Description of Artificial Sequence: Synthetic oligonucleotide
  Sense strand starting at position 823 of SEQ ID NO: 1886832
gucgcuccuccagaagaua

SEQ ID NO: 2429487 - RNA, 19 nt, Artificial Sequence
  Description of Artificial Sequence: Synthetic oligonucleotide
  Antisense strand to SEQ ID NO: 2429486
uaucuucuggaggagcgac

SEQ ID NO: 2429488 - RNA, 19 nt, Artificial Sequence
  Description of Artificial Sequence: Synthetic oligonucleotide
  Sense strand starting at position 1214 of SEQ ID NO: 1886832
ugacaugacuggcaugaca

SEQ ID NO: 2429489 - RNA, 19 nt, Artificial Sequence
  Description of Artificial Sequence: Synthetic oligonucleotide
  Antisense strand to SEQ ID NO: 2429488
ugucaugccagucauguca

SEQ ID NO: 2429490 - RNA, 19 nt, Artificial Sequence
  Description of Artificial Sequence: Synthetic oligonucleotide
  Sense strand starting at position 1296 of SEQ ID NO: 1886832
aaacauagggcgugucuua

SEQ ID NO: 2429491 - RNA, 19 nt, Artificial Sequence
  Description of Artificial Sequence: Synthetic oligonucleotide
  Antisense strand to SEQ ID NO: 2429490
uaagacacgcccuauguuu

SEQ ID NO: 2429492 - RNA, 19 nt, Artificial Sequence
  Description of Artificial Sequence: Synthetic oligonucleotide
  Sense strand starting at position 1301 of SEQ ID NO: 1886832
uagggcgugucuuacacau

SEQ ID NO: 2429493 - RNA, 19 nt, Artificial Sequence
  Description of Artificial Sequence: Synthetic oligonucleotide
  Antisense strand to SEQ ID NO: 2429492
auguguaagacacgcccua

SEQ ID NO: 2429494 - RNA, 19 nt, Artificial Sequence
  Description of Artificial Sequence: Synthetic oligonucleotide
  Sense strand starting at position 1303 of SEQ ID NO: 1886832
gggcgugucuuacacauag

SEQ ID NO: 2429495 - RNA, 19 nt, Artificial Sequence
  Description of Artificial Sequence: Synthetic oligonucleotide
  Antisense strand to SEQ ID NO: 2429494
cuauguguaagacacgccc

SEQ ID NO: 2429496 - RNA, 19 nt, Artificial Sequence
  Description of Artificial Sequence: Synthetic oligonucleotide
  Sense strand starting at position 1305 of SEQ ID NO: 1886832
gcgugucuuacacauagaa

SEQ ID NO: 2429497 - RNA, 19 nt, Artificial Sequence
  Description of Artificial Sequence: Synthetic oligonucleotide
  Antisense strand to SEQ ID NO: 2429496
uucuauguguaagacacgc

SEQ ID NO: 2429498 - RNA, 19 nt, Artificial Sequence
  Description of Artificial Sequence: Synthetic oligonucleotide
  Sense strand starting at position 1423 of SEQ ID NO: 1886832
auagauacauggugauaua

SEQ ID NO: 2429499 - RNA, 19 nt, Artificial Sequence
  Description of Artificial Sequence: Synthetic oligonucleotide
  Antisense strand to SEQ ID NO: 2429498
uauaucaccauguaucuau

SEQ ID NO: 2429500 - RNA, 19 nt, Artificial Sequence
  Description of Artificial Sequence: Synthetic oligonucleotide
  Sense strand starting at position 1457 of SEQ ID NO: 1886832
ccaugucauuaugcauauu

SEQ ID NO: 2429501 - RNA, 19 nt, Artificial Sequence
  Description of Artificial Sequence: Synthetic oligonucleotide
  Antisense strand to SEQ ID NO: 2429500
aauaugcauaaugacaugg

SEQ ID NO: 2429502 - RNA, 19 nt, Artificial Sequence
  Description of Artificial Sequence: Synthetic oligonucleotide
  Sense strand starting at position 1471 of SEQ ID NO: 1886832
auauuuacaugacgauaug

SEQ ID NO: 2429503 - RNA, 19 nt, Artificial Sequence
  Description of Artificial Sequence: Synthetic oligonucleotide
  Antisense strand to SEQ ID NO: 2429502
cauaucgucauguaaauau

SEQ ID NO: 2429504 - RNA, 19 nt, Artificial Sequence
  Description of Artificial Sequence: Synthetic oligonucleotide
  Sense strand starting at position 1480 of SEQ ID NO: 1886832
ugacgauaugagcauguca

SEQ ID NO: 2429505 - RNA, 19 nt, Artificial Sequence
  Description of Artificial Sequence: Synthetic oligonucleotide
  Antisense strand to SEQ ID NO: 2429504
ugacaugcucauaucguca

SEQ ID NO: 2429506 - RNA, 19 nt, Artificial Sequence
  Description of Artificial Sequence: Synthetic oligonucleotide
  Sense strand starting at position 1482 of SEQ ID NO: 1886832
acgauaugagcaugucaua

SEQ ID NO: 2429507 - RNA, 19 nt, Artificial Sequence
  Description of Artificial Sequence: Synthetic oligonucleotide
  Antisense strand to SEQ ID NO: 2429506
uaugacaugcucauaucgu

SEQ ID NO: 2429508 - RNA, 19 nt, Artificial Sequence
  Description of Artificial Sequence: Synthetic oligonucleotide
  Sense strand starting at position 1485 of SEQ ID NO: 1886832
auaugagcaugucauauau

SEQ ID NO: 2429509 - RNA, 19 nt, Artificial Sequence
  Description of Artificial Sequence: Synthetic oligonucleotide
  Antisense strand to SEQ ID NO: 2429508
auauaugacaugcucauau

SEQ ID NO: 2429510 - RNA, 19 nt, Artificial Sequence
  Description of Artificial Sequence: Synthetic oligonucleotide
  Sense strand starting at position 1487 of SEQ ID NO: 1886832
augagcaugucauauauug

SEQ ID NO: 2429511 - RNA, 19 nt, Artificial Sequence
  Description of Artificial Sequence: Synthetic oligonucleotide
  Antisense strand to SEQ ID NO: 2429510
caauauaugacaugcucau

SEQ ID NO: 2429512 - RNA, 19 nt, Artificial Sequence
  Description of Artificial Sequence: Synthetic oligonucleotide
  Sense strand starting at position 1494 of SEQ ID NO: 1886832
ugucauauauuguguaauc

SEQ ID NO: 2429513 - RNA, 19 nt, Artificial Sequence
  Description of Artificial Sequence: Synthetic oligonucleotide
  Antisense strand to SEQ ID NO: 2429512
gauuacacaauauaugaca

SEQ ID NO: 2429514 - RNA, 19 nt, Artificial Sequence
  Description of Artificial Sequence: Synthetic oligonucleotide
  Sense strand starting at position 1495 of SEQ ID NO: 1886832
gucauauauuguguaauca

SEQ ID NO: 2429515 - RNA, 19 nt, Artificial Sequence
  Description of Artificial Sequence: Synthetic oligonucleotide
  Antisense strand to SEQ ID NO: 2429514
ugauuacacaauauaugac

SEQ ID NO: 2429516 - RNA, 19 nt, Artificial Sequence
  Description of Artificial Sequence: Synthetic oligonucleotide
  Sense strand starting at position 1514 of SEQ ID NO: 1886832
auuacuacauugugccaua

SEQ ID NO: 2429517 - RNA, 19 nt, Artificial Sequence
  Description of Artificial Sequence: Synthetic oligonucleotide
  Antisense strand to SEQ ID NO: 2429516
uauggcacaauguaguaau

SEQ ID NO: 2429518 - RNA, 19 nt, Artificial Sequence
  Description of Artificial Sequence: Synthetic oligonucleotide
  Sense strand starting at position 1527 of SEQ ID NO: 1886832
gccauauaguagcauccau

SEQ ID NO: 2429519 - RNA, 19 nt, Artificial Sequence
  Description of Artificial Sequence: Synthetic oligonucleotide
  Antisense strand to SEQ ID NO: 2429518
auggaugcuacuauauggc

SEQ ID NO: 2429520 - RNA, 19 nt, Artificial Sequence
  Description of Artificial Sequence: Synthetic oligonucleotide
  Sense strand starting at position 1551 of SEQ ID NO: 1886832
uauauaucaugauguguug

SEQ ID NO: 2429521 - RNA, 19 nt, Artificial Sequence
  Description of Artificial Sequence: Synthetic oligonucleotide
  Antisense strand to SEQ ID NO: 2429520
caacacaucaugauauaua

SEQ ID NO: 2429522 - RNA, 19 nt, Artificial Sequence
  Description of Artificial Sequence: Synthetic oligonucleotide
  Sense strand starting at position 1554 of SEQ ID NO: 1886832
auaucaugauguguuguaa

SEQ ID NO: 2429523 - RNA, 19 nt, Artificial Sequence
  Description of Artificial Sequence: Synthetic oligonucleotide
  Antisense strand to SEQ ID NO: 2429522
uuacaacacaucaugauau

SEQ ID NO: 2429524 - RNA, 19 nt, Artificial Sequence
  Description of Artificial Sequence: Synthetic oligonucleotide
  Sense strand starting at position 1558 of SEQ ID NO: 1886832
caugauguguuguaauuua

SEQ ID NO: 2429525 - RNA, 19 nt, Artificial Sequence
  Description of Artificial Sequence: Synthetic oligonucleotide
  Antisense strand to SEQ ID NO: 2429524
uaaauuacaacacaucaug

SEQ ID NO: 2429526 - RNA, 19 nt, Artificial Sequence
  Description of Artificial Sequence: Synthetic oligonucleotide
  Sense strand starting at position 1674 of SEQ ID NO: 1886832
agauacacccaauguguuu

SEQ ID NO: 2429527 - RNA, 19 nt, Artificial Sequence
  Description of Artificial Sequence: Synthetic oligonucleotide
  Antisense strand to SEQ ID NO: 2429526
aaacacauuggguguaucu

SEQ ID NO: 2429528 - RNA, 19 nt, Artificial Sequence
  Description of Artificial Sequence: Synthetic oligonucleotide
  Sense strand starting at position 1702 of SEQ ID NO: 1886832
uuuauuaugugacucauag

SEQ ID NO: 2429529 - RNA, 19 nt, Artificial Sequence
  Description of Artificial Sequence: Synthetic oligonucleotide
  Antisense strand to SEQ ID NO: 2429528
cuaugagucacauaauaaa

SEQ ID NO: 2429530 - RNA, 19 nt, Artificial Sequence
  Description of Artificial Sequence: Synthetic oligonucleotide
  Sense strand starting at position 1819 of SEQ ID NO: 1886832
cgcauaauggcaugcauau

SEQ ID NO: 2429531 - RNA, 19 nt, Artificial Sequence
  Description of Artificial Sequence: Synthetic oligonucleotide
  Antisense strand to SEQ ID NO: 2429530
auaugcaugccauuaugcg

SEQ ID NO: 2429532 - RNA, 19 nt, Artificial Sequence
  Description of Artificial Sequence: Synthetic oligonucleotide
  Sense strand starting at position 1998 of SEQ ID NO: 1886832
caguaucaccgcugcuauu

SEQ ID NO: 2429533 - RNA, 19 nt, Artificial Sequence
  Description of Artificial Sequence: Synthetic oligonucleotide
  Antisense strand to SEQ ID NO: 2429532
aauagcagcggugauacug

SEQ ID NO: 2429534 - RNA, 19 nt, Artificial Sequence
  Description of Artificial Sequence: Synthetic oligonucleotide
  Sense strand starting at position 2256 of SEQ ID NO: 1886832
ccaggcaauucgggacaaa

SEQ ID NO: 2429535 - RNA, 19 nt, Artificial Sequence
  Description of Artificial Sequence: Synthetic oligonucleotide
  Antisense strand to SEQ ID NO: 2429534
uuugucccgaauugccugg

SEQ ID NO: 2429536 - RNA, 19 nt, Artificial Sequence
  Description of Artificial Sequence: Synthetic oligonucleotide
  Sense strand starting at position 2337 of SEQ ID NO: 1886832
ugcaaucugccaggaggaa

SEQ ID NO: 2429537 - RNA, 19 nt, Artificial Sequence
  Description of Artificial Sequence: Synthetic oligonucleotide
  Antisense strand to SEQ ID NO: 2429536
uuccuccuggcagauugca

SEQ ID NO: 2429538 - RNA, 19 nt, Artificial Sequence
  Description of Artificial Sequence: Synthetic oligonucleotide
  Sense strand starting at position 2359 of SEQ ID NO: 1886832
gaaggaauucuccgucuau

SEQ ID NO: 2429539 - RNA, 19 nt, Artificial Sequence
  Description of Artificial Sequence: Synthetic oligonucleotide
  Antisense strand to SEQ ID NO: 2429538
auagacggagaauuccuuc

SEQ ID NO: 2429540 - RNA, 19 nt, Artificial Sequence
  Description of Artificial Sequence: Synthetic oligonucleotide
  Sense strand starting at position 2360 of SEQ ID NO: 1886832
aaggaauucuccgucuauu

SEQ ID NO: 2429541 - RNA, 19 nt, Artificial Sequence
  Description of Artificial Sequence: Synthetic oligonucleotide
  Antisense strand to SEQ ID NO: 2429540
aauagacggagaauuccuu

SEQ ID NO: 2429542 - RNA, 19 nt, Artificial Sequence
  Description of Artificial Sequence: Synthetic oligonucleotide
  Sense strand starting at position 2508 of SEQ ID NO: 1886832
ccguucugucucuaucagu

SEQ ID NO: 2429543 - RNA, 19 nt, Artificial Sequence
  Description of Artificial Sequence: Synthetic oligonucleotide
  Antisense strand to SEQ ID NO: 2429542
acugauagagacagaacgg

SEQ ID NO: 2429544 - RNA, 19 nt, Artificial Sequence
  Description of Artificial Sequence: Synthetic oligonucleotide
  Sense strand starting at position 124 of SEQ ID NO: 1886833
gggcauggucuggauucau

SEQ ID NO: 2429545 - RNA, 19 nt, Artificial Sequence
  Description of Artificial Sequence: Synthetic oligonucleotide
  Antisense strand to SEQ ID NO: 2429544
augaauccagaccaugccc

SEQ ID NO: 2429546 - RNA, 19 nt, Artificial Sequence
  Description of Artificial Sequence: Synthetic oligonucleotide
  Sense strand starting at position 318 of SEQ ID NO: 1886833
acaugauauccuugcaaag

SEQ ID NO: 2429547 - RNA, 19 nt, Artificial Sequence
  Description of Artificial Sequence: Synthetic oligonucleotide
  Antisense strand to SEQ ID NO: 2429546
cuuugcaaggauaucaugu

SEQ ID NO: 2429548 - RNA, 19 nt, Artificial Sequence
  Description of Artificial Sequence: Synthetic oligonucleotide
  Sense strand starting at position 329 of SEQ ID NO: 1886833
uugcaaagggaucguuuau

SEQ ID NO: 2429549 - RNA, 19 nt, Artificial Sequence
  Description of Artificial Sequence: Synthetic oligonucleotide
  Antisense strand to SEQ ID NO: 2429548
auaaacgaucccuuugcaa

SEQ ID NO: 2429550 - RNA, 19 nt, Artificial Sequence
  Description of Artificial Sequence: Synthetic oligonucleotide
  Sense strand starting at position 442 of SEQ ID NO: 1886833
augggccaccucuauuauu

SEQ ID NO: 2429551 - RNA, 19 nt, Artificial Sequence
  Description of Artificial Sequence: Synthetic oligonucleotide
  Antisense strand to SEQ ID NO: 2429550
aauaauagagguggcccau

SEQ ID NO: 2429552 - RNA, 19 nt, Artificial Sequence
  Description of Artificial Sequence: Synthetic oligonucleotide
  Sense strand starting at position 522 of SEQ ID NO: 1886833
cugaguuuccauuacaucu

SEQ ID NO: 2429553 - RNA, 19 nt, Artificial Sequence
  Description of Artificial Sequence: Synthetic oligonucleotide
  Antisense strand to SEQ ID NO: 2429552
agauguaauggaaacucag

SEQ ID NO: 2429554 - RNA, 19 nt, Artificial Sequence
  Description of Artificial Sequence: Synthetic oligonucleotide
  Sense strand starting at position 549 of SEQ ID NO: 1886833
cagucaguggccuggugaa

SEQ ID NO: 2429555 - RNA, 19 nt, Artificial Sequence
  Description of Artificial Sequence: Synthetic oligonucleotide
  Antisense strand to SEQ ID NO: 2429554
uucaccaggccacugacug

SEQ ID NO: 2429556 - RNA, 19 nt, Artificial Sequence
  Description of Artificial Sequence: Synthetic oligonucleotide
  Sense strand starting at position 627 of SEQ ID NO: 1886833
ucaguucuccauggcagau

SEQ ID NO: 2429557 - RNA, 19 nt, Artificial Sequence
  Description of Artificial Sequence: Synthetic oligonucleotide
  Antisense strand to SEQ ID NO: 2429556
aucugccauggagaacuga

SEQ ID NO: 2429558 - RNA, 19 nt, Artificial Sequence
  Description of Artificial Sequence: Synthetic oligonucleotide
  Sense strand starting at position 1102 of SEQ ID NO: 1886833
gcacuuucugguugaguca

SEQ ID NO: 2429559 - RNA, 19 nt, Artificial Sequence
  Description of Artificial Sequence: Synthetic oligonucleotide
  Antisense strand to SEQ ID NO: 2429558
ugacucaaccagaaagugc

SEQ ID NO: 2429560 - RNA, 19 nt, Artificial Sequence
  Description of Artificial Sequence: Synthetic oligonucleotide
  Sense strand starting at position 1202 of SEQ ID NO: 1886833
cuuaauaggcucugaagga

SEQ ID NO: 2429561 - RNA, 19 nt, Artificial Sequence
  Description of Artificial Sequence: Synthetic oligonucleotide
  Antisense strand to SEQ ID NO: 2429560
uccuucagagccuauuaag

SEQ ID NO: 2429562 - RNA, 19 nt, Artificial Sequence
  Description of Artificial Sequence: Synthetic oligonucleotide
  Sense strand starting at position 1203 of SEQ ID NO: 1886833
uuaauaggcucugaaggaa

SEQ ID NO: 2429563 - RNA, 19 nt, Artificial Sequence
  Description of Artificial Sequence: Synthetic oligonucleotide
  Antisense strand to SEQ ID NO: 2429562
uuccuucagagccuauuaa

SEQ ID NO: 2429564 - RNA, 19 nt, Artificial Sequence
  Description of Artificial Sequence: Synthetic oligonucleotide
  Sense strand starting at position 1465 of SEQ ID NO: 1886833
aacuuaaccucgcugaguu

SEQ ID NO: 2429565 - RNA, 19 nt, Artificial Sequence
  Description of Artificial Sequence: Synthetic oligonucleotide
  Antisense strand to SEQ ID NO: 2429564
aacucagcgagguuaaguu

SEQ ID NO: 2429566 - RNA, 19 nt, Artificial Sequence
  Description of Artificial Sequence: Synthetic oligonucleotide
  Sense strand starting at position 1466 of SEQ ID NO: 1886833
acuuaaccucgcugaguuu

SEQ ID NO: 2429567 - RNA, 19 nt, Artificial Sequence
  Description of Artificial Sequence: Synthetic oligonucleotide
  Antisense strand to SEQ ID NO: 2429566
aaacucagcgagguuaagu

SEQ ID NO: 2429568 - RNA, 19 nt, Artificial Sequence
  Description of Artificial Sequence: Synthetic oligonucleotide
  Sense strand starting at position 1484 of SEQ ID NO: 1886833
uccgguuccucaucucuga

SEQ ID NO: 2429569 - RNA, 19 nt, Artificial Sequence
  Description of Artificial Sequence: Synthetic oligonucleotide
  Antisense strand to SEQ ID NO: 2429568
ucagagaugaggaaccgga

SEQ ID NO: 2429570 - RNA, 19 nt, Artificial Sequence
  Description of Artificial Sequence: Synthetic oligonucleotide
  Sense strand starting at position 1487 of SEQ ID NO: 1886833
gguuccucaucucugagau

SEQ ID NO: 2429571 - RNA, 19 nt, Artificial Sequence
  Description of Artificial Sequence: Synthetic oligonucleotide
  Antisense strand to SEQ ID NO: 2429570
aucucagagaugaggaacc

SEQ ID NO: 2429572 - RNA, 19 nt, Artificial Sequence
  Description of Artificial Sequence: Synthetic oligonucleotide
  Sense strand starting at position 1488 of SEQ ID NO: 1886833
guuccucaucucugagaug

SEQ ID NO: 2429573 - RNA, 19 nt, Artificial Sequence
  Description of Artificial Sequence: Synthetic oligonucleotide
  Antisense strand to SEQ ID NO: 2429572
caucucagagaugaggaac

SEQ ID NO: 2429574 - RNA, 19 nt, Artificial Sequence
  Description of Artificial Sequence: Synthetic oligonucleotide
  Sense strand starting at position 2066 of SEQ ID NO: 1886833
cagugacuggcccagaauu

SEQ ID NO: 2429575 - RNA, 19 nt, Artificial Sequence
  Description of Artificial Sequence: Synthetic oligonucleotide
  Antisense strand to SEQ ID NO: 2429574
aauucugggccagucacug

SEQ ID NO: 2429576 - RNA, 19 nt, Artificial Sequence
  Description of Artificial Sequence: Synthetic oligonucleotide
  Sense strand starting at position 2068 of SEQ ID NO: 1886833
gugacuggcccagaauugu

SEQ ID NO: 2429577 - RNA, 19 nt, Artificial Sequence
  Description of Artificial Sequence: Synthetic oligonucleotide
  Antisense strand to SEQ ID NO: 2429576
acaauucugggccagucac

SEQ ID NO: 2429578 - RNA, 19 nt, Artificial Sequence
  Description of Artificial Sequence: Synthetic oligonucleotide
  Sense strand starting at position 2295 of SEQ ID NO: 1886833
ggugcagcuaugcaaguua

SEQ ID NO: 2429579 - RNA, 19 nt, Artificial Sequence
  Description of Artificial Sequence: Synthetic oligonucleotide
  Antisense strand to SEQ ID NO: 2429578
uaacuugcauagcugcacc

SEQ ID NO: 2429580 - RNA, 19 nt, Artificial Sequence
  Description of Artificial Sequence: Synthetic oligonucleotide
  Sense strand starting at position 2629 of SEQ ID NO: 1886833
gucuuaugaucccaggaga

SEQ ID NO: 2429581 - RNA, 19 nt, Artificial Sequence
  Description of Artificial Sequence: Synthetic oligonucleotide
  Antisense strand to SEQ ID NO: 2429580
ucuccugggaucauaagac

SEQ ID NO: 2429582 - RNA, 19 nt, Artificial Sequence
  Description of Artificial Sequence: Synthetic oligonucleotide
  Sense strand starting at position 2735 of SEQ ID NO: 1886833
gcaggagaguaugaaauua

SEQ ID NO: 2429583 - RNA, 19 nt, Artificial Sequence
  Description of Artificial Sequence: Synthetic oligonucleotide
  Antisense strand to SEQ ID NO: 2429582
uaauuucauacucuccugc

SEQ ID NO: 2429584 - RNA, 19 nt, Artificial Sequence
  Description of Artificial Sequence: Synthetic oligonucleotide
  Sense strand starting at position 2989 of SEQ ID NO: 1886833
gucucaacauuugggacua

SEQ ID NO: 2429585 - RNA, 19 nt, Artificial Sequence
  Description of Artificial Sequence: Synthetic oligonucleotide
  Antisense strand to SEQ ID NO: 2429584
uagucccaaauguugagac

SEQ ID NO: 2429586 - RNA, 19 nt, Artificial Sequence
  Description of Artificial Sequence: Synthetic oligonucleotide
  Sense strand starting at position 3000 of SEQ ID NO: 1886833
ugggacuauugacuccaau

SEQ ID NO: 2429587 - RNA, 19 nt, Artificial Sequence
  Description of Artificial Sequence: Synthetic oligonucleotide
  Antisense strand to SEQ ID NO: 2429586
auuggagucaauaguccca

SEQ ID NO: 2429588 - RNA, 19 nt, Artificial Sequence
  Description of Artificial Sequence: Synthetic oligonucleotide
  Sense strand starting at position 3124 of SEQ ID NO: 1886833
ggacuuccuguuugugagu

SEQ ID NO: 2429589 - RNA, 19 nt, Artificial Sequence
  Description of Artificial Sequence: Synthetic oligonucleotide
  Antisense strand to SEQ ID NO: 2429588
acucacaaacaggaagucc

SEQ ID NO: 2429590 - RNA, 19 nt, Artificial Sequence
  Description of Artificial Sequence: Synthetic oligonucleotide
  Sense strand starting at position 3129 of SEQ ID NO: 1886833
uccuguuugugagugguua

SEQ ID NO: 2429591 - RNA, 19 nt, Artificial Sequence
  Description of Artificial Sequence: Synthetic oligonucleotide
  Antisense strand to SEQ ID NO: 2429590
uaaccacucacaaacagga

SEQ ID NO: 2429592 - RNA, 19 nt, Artificial Sequence
  Description of Artificial Sequence: Synthetic oligonucleotide
  Sense strand starting at position 3130 of SEQ ID NO: 1886833
ccuguuugugagugguuaa

SEQ ID NO: 2429593 - RNA, 19 nt, Artificial Sequence
  Description of Artificial Sequence: Synthetic oligonucleotide
  Antisense strand to SEQ ID NO: 2429592
uuaaccacucacaaacagg

SEQ ID NO: 2429594 - RNA, 19 nt, Artificial Sequence
  Description of Artificial Sequence: Synthetic oligonucleotide
  Sense strand starting at position 3131 of SEQ ID NO: 1886833
cuguuugugagugguuaag

SEQ ID NO: 2429595 - RNA, 19 nt, Artificial Sequence
  Description of Artificial Sequence: Synthetic oligonucleotide
  Antisense strand to SEQ ID NO: 2429594
cuuaaccacucacaaacag

SEQ ID NO: 2429596 - RNA, 19 nt, Artificial Sequence
  Description of Artificial Sequence: Synthetic oligonucleotide
  Sense strand starting at position 3133 of SEQ ID NO: 1886833
guuugugagugguuaaguc

SEQ ID NO: 2429597 - RNA, 19 nt, Artificial Sequence
  Description of Artificial Sequence: Synthetic oligonucleotide
  Antisense strand to SEQ ID NO: 2429596
gacuuaaccacucacaaac

SEQ ID NO: 2429598 - RNA, 19 nt, Artificial Sequence
  Description of Artificial Sequence: Synthetic oligonucleotide
  Sense strand starting at position 3164 of SEQ ID NO: 1886833
cuuguuggcucuuuguaag

SEQ ID NO: 2429599 - RNA, 19 nt, Artificial Sequence
  Description of Artificial Sequence: Synthetic oligonucleotide
  Antisense strand to SEQ ID NO: 2429598
cuuacaaagagccaacaag

SEQ ID NO: 2429600 - RNA, 19 nt, Artificial Sequence
  Description of Artificial Sequence: Synthetic oligonucleotide
  Sense strand starting at position 3283 of SEQ ID NO: 1886833
ugccuucaugugcggacaa

SEQ ID NO: 2429601 - RNA, 19 nt, Artificial Sequence
  Description of Artificial Sequence: Synthetic oligonucleotide
  Antisense strand to SEQ ID NO: 2429600
uuguccgcacaugaaggca

SEQ ID NO: 2429602 - RNA, 19 nt, Artificial Sequence
  Description of Artificial Sequence: Synthetic oligonucleotide
  Sense strand starting at position 3296 of SEQ ID NO: 1886833
ggacaaugagcuuguguca

SEQ ID NO: 2429603 - RNA, 19 nt, Artificial Sequence
  Description of Artificial Sequence: Synthetic oligonucleotide
  Antisense strand to SEQ ID NO: 2429602
ugacacaagcucauugucc

SEQ ID NO: 2429604 - RNA, 19 nt, Artificial Sequence
  Description of Artificial Sequence: Synthetic oligonucleotide
  Sense strand starting at position 3299 of SEQ ID NO: 1886833
caaugagcuugugucauuu

SEQ ID NO: 2429605 - RNA, 19 nt, Artificial Sequence
  Description of Artificial Sequence: Synthetic oligonucleotide
  Antisense strand to SEQ ID NO: 2429604
aaaugacacaagcucauug

SEQ ID NO: 2429606 - RNA, 19 nt, Artificial Sequence
  Description of Artificial Sequence: Synthetic oligonucleotide
  Sense strand starting at position 3303 of SEQ ID NO: 1886833
gagcuugugucauuucuuc

SEQ ID NO: 2429607 - RNA, 19 nt, Artificial Sequence
  Description of Artificial Sequence: Synthetic oligonucleotide
  Antisense strand to SEQ ID NO: 2429606
gaagaaaugacacaagcuc

SEQ ID NO: 2429608 - RNA, 19 nt, Artificial Sequence
  Description of Artificial Sequence: Synthetic oligonucleotide
  Sense strand starting at position 3545 of SEQ ID NO: 1886833
gugccuguugccguuacua

SEQ ID NO: 2429609 - RNA, 19 nt, Artificial Sequence
  Description of Artificial Sequence: Synthetic oligonucleotide
  Antisense strand to SEQ ID NO: 2429608
uaguaacggcaacaggcac

SEQ ID NO: 2429610 - RNA, 19 nt, Artificial Sequence
  Description of Artificial Sequence: Synthetic oligonucleotide
  Sense strand starting at position 3553 of SEQ ID NO: 1886833
ugccguuacuauguuaaau

SEQ ID NO: 2429611 - RNA, 19 nt, Artificial Sequence
  Description of Artificial Sequence: Synthetic oligonucleotide
  Antisense strand to SEQ ID NO: 2429610
auuuaacauaguaacggca

SEQ ID NO: 2429612 - RNA, 19 nt, Artificial Sequence
  Description of Artificial Sequence: Synthetic oligonucleotide
  Sense strand starting at position 3561 of SEQ ID NO: 1886833
cuauguuaaauguagaugu

SEQ ID NO: 2429613 - RNA, 19 nt, Artificial Sequence
  Description of Artificial Sequence: Synthetic oligonucleotide
  Antisense strand to SEQ ID NO: 2429612
acaucuacauuuaacauag

SEQ ID NO: 2429614 - RNA, 19 nt, Artificial Sequence
  Description of Artificial Sequence: Synthetic oligonucleotide
  Sense strand starting at position 3563 of SEQ ID NO: 1886833
auguuaaauguagaugugu

SEQ ID NO: 2429615 - RNA, 19 nt, Artificial Sequence
  Description of Artificial Sequence: Synthetic oligonucleotide
  Antisense strand to SEQ ID NO: 2429614
acacaucuacauuuaacau

SEQ ID NO: 2429616 - RNA, 19 nt, Artificial Sequence
  Description of Artificial Sequence: Synthetic oligonucleotide
  Sense strand starting at position 3565 of SEQ ID NO: 1886833
guuaaauguagaugugugu

SEQ ID NO: 2429617 - RNA, 19 nt, Artificial Sequence
  Description of Artificial Sequence: Synthetic oligonucleotide
  Antisense strand to SEQ ID NO: 2429616
acacacaucuacauuuaac

SEQ ID NO: 2429618 - RNA, 19 nt, Artificial Sequence
  Description of Artificial Sequence: Synthetic oligonucleotide
  Sense strand starting at position 3858 of SEQ ID NO: 1886833
ccuggagcccuccaggauu

SEQ ID NO: 2429619 - RNA, 19 nt, Artificial Sequence
  Description of Artificial Sequence: Synthetic oligonucleotide
  Antisense strand to SEQ ID NO: 2429618
aauccuggagggcuccagg

SEQ ID NO: 2429620 - RNA, 19 nt, Artificial Sequence
  Description of Artificial Sequence: Synthetic oligonucleotide
  Sense strand starting at position 3944 of SEQ ID NO: 1886833
acuuccucugagcaagaau

SEQ ID NO: 2429621 - RNA, 19 nt, Artificial Sequence
  Description of Artificial Sequence: Synthetic oligonucleotide
  Antisense strand to SEQ ID NO: 2429620
auucuugcucagaggaagu

SEQ ID NO: 2429622 - RNA, 19 nt, Artificial Sequence
  Description of Artificial Sequence: Synthetic oligonucleotide
  Sense strand starting at position 3953 of SEQ ID NO: 1886833
gagcaagaaucugaauguc

SEQ ID NO: 2429623 - RNA, 19 nt, Artificial Sequence
  Description of Artificial Sequence: Synthetic oligonucleotide
  Antisense strand to SEQ ID NO: 2429622
gacauucagauucuugcuc

SEQ ID NO: 2429624 - RNA, 19 nt, Artificial Sequence
  Description of Artificial Sequence: Synthetic oligonucleotide
  Sense strand starting at position 103 of SEQ ID NO: 1886834
gcucauagaguauauuaaa

SEQ ID NO: 2429625 - RNA, 19 nt, Artificial Sequence
  Description of Artificial Sequence: Synthetic oligonucleotide
  Antisense strand to SEQ ID NO: 2429624
uuuaauauacucuaugagc

SEQ ID NO: 2429626 - RNA, 19 nt, Artificial Sequence
  Description of Artificial Sequence: Synthetic oligonucleotide
  Sense strand starting at position 117 of SEQ ID NO: 1886834
uuaaauacgcuggguguua

SEQ ID NO: 2429627 - RNA, 19 nt, Artificial Sequence
  Description of Artificial Sequence: Synthetic oligonucleotide
  Antisense strand to SEQ ID NO: 2429626
uaacacccagcguauuuaa

SEQ ID NO: 2429628 - RNA, 19 nt, Artificial Sequence
  Description of Artificial Sequence: Synthetic oligonucleotide
  Sense strand starting at position 126 of SEQ ID NO: 1886834
cuggguguuagugauuaaa

SEQ ID NO: 2429629 - RNA, 19 nt, Artificial Sequence
  Description of Artificial Sequence: Synthetic oligonucleotide
  Antisense strand to SEQ ID NO: 2429628
uuuaaucacuaacacccag

SEQ ID NO: 2429630 - RNA, 19 nt, Artificial Sequence
  Description of Artificial Sequence: Synthetic oligonucleotide
  Sense strand starting at position 157 of SEQ ID NO: 1886834
agacaugcauuaucuguaa

SEQ ID NO: 2429631 - RNA, 19 nt, Artificial Sequence
  Description of Artificial Sequence: Synthetic oligonucleotide
  Antisense strand to SEQ ID NO: 2429630
uuacagauaaugcaugucu

SEQ ID NO: 2429632 - RNA, 19 nt, Artificial Sequence
  Description of Artificial Sequence: Synthetic oligonucleotide
  Sense strand starting at position 643 of SEQ ID NO: 1886834
ccguuuccuguguaaggaa

SEQ ID NO: 2429633 - RNA, 19 nt, Artificial Sequence
  Description of Artificial Sequence: Synthetic oligonucleotide
  Antisense strand to SEQ ID NO: 2429632
uuccuuacacaggaaacgg

SEQ ID NO: 2429634 - RNA, 19 nt, Artificial Sequence
  Description of Artificial Sequence: Synthetic oligonucleotide
  Sense strand starting at position 700 of SEQ ID NO: 1886834
gcuguuucccgcucagacu

SEQ ID NO: 2429635 - RNA, 19 nt, Artificial Sequence
  Description of Artificial Sequence: Synthetic oligonucleotide
  Antisense strand to SEQ ID NO: 2429634
agucugagcgggaaacagc

SEQ ID NO: 2429636 - RNA, 19 nt, Artificial Sequence
  Description of Artificial Sequence: Synthetic oligonucleotide
  Sense strand starting at position 1015 of SEQ ID NO: 1886834
gcuaaucuuccacagcgga

SEQ ID NO: 2429637 - RNA, 19 nt, Artificial Sequence
  Description of Artificial Sequence: Synthetic oligonucleotide
  Antisense strand to SEQ ID NO: 2429636
uccgcuguggaagauuagc

SEQ ID NO: 2429638 - RNA, 19 nt, Artificial Sequence
  Description of Artificial Sequence: Synthetic oligonucleotide
  Sense strand starting at position 1115 of SEQ ID NO: 1886834
cagggcuuucccugugaag

SEQ ID NO: 2429639 - RNA, 19 nt, Artificial Sequence
  Description of Artificial Sequence: Synthetic oligonucleotide
  Antisense strand to SEQ ID NO: 2429638
cuucacagggaaagcccug

SEQ ID NO: 2429640 - RNA, 19 nt, Artificial Sequence
  Description of Artificial Sequence: Synthetic oligonucleotide
  Sense strand starting at position 1227 of SEQ ID NO: 1886834
gauuguuugagucacggag

SEQ ID NO: 2429641 - RNA, 19 nt, Artificial Sequence
  Description of Artificial Sequence: Synthetic oligonucleotide
  Antisense strand to SEQ ID NO: 2429640
cuccgugacucaaacaauc

SEQ ID NO: 2429642 - RNA, 19 nt, Artificial Sequence
  Description of Artificial Sequence: Synthetic oligonucleotide
  Sense strand starting at position 1490 of SEQ ID NO: 1886834
auccuagaugcugguauau

SEQ ID NO: 2429643 - RNA, 19 nt, Artificial Sequence
  Description of Artificial Sequence: Synthetic oligonucleotide
  Antisense strand to SEQ ID NO: 2429642
auauaccagcaucuaggau

SEQ ID NO: 2429644 - RNA, 19 nt, Artificial Sequence
  Description of Artificial Sequence: Synthetic oligonucleotide
  Sense strand starting at position 1538 of SEQ ID NO: 1886834
cucauugcucccgaaacac

SEQ ID NO: 2429645 - RNA, 19 nt, Artificial Sequence
  Description of Artificial Sequence: Synthetic oligonucleotide
  Antisense strand to SEQ ID NO: 2429644
guguuucgggagcaaugag

SEQ ID NO: 2429646 - RNA, 19 nt, Artificial Sequence
  Description of Artificial Sequence: Synthetic oligonucleotide
  Sense strand starting at position 1930 of SEQ ID NO: 1886834
gcgcacuuccgggauugga

SEQ ID NO: 2429647 - RNA, 19 nt, Artificial Sequence
  Description of Artificial Sequence: Synthetic oligonucleotide
  Antisense strand to SEQ ID NO: 2429646
uccaaucccggaagugcgc

SEQ ID NO: 2429648 - RNA, 19 nt, Artificial Sequence
  Description of Artificial Sequence: Synthetic oligonucleotide
  Sense strand starting at position 2162 of SEQ ID NO: 1886834
aaacguauccgacagcaaa

SEQ ID NO: 2429649 - RNA, 19 nt, Artificial Sequence
  Description of Artificial Sequence: Synthetic oligonucleotide
  Antisense strand to SEQ ID NO: 2429648
uuugcugucggauacguuu

SEQ ID NO: 2429650 - RNA, 19 nt, Artificial Sequence
  Description of Artificial Sequence: Synthetic oligonucleotide
  Sense strand starting at position 2197 of SEQ ID NO: 1886834
augaacgucuugcuaacau

SEQ ID NO: 2429651 - RNA, 19 nt, Artificial Sequence
  Description of Artificial Sequence: Synthetic oligonucleotide
  Antisense strand to SEQ ID NO: 2429650
auguuagcaagacguucau

SEQ ID NO: 2429652 - RNA, 19 nt, Artificial Sequence
  Description of Artificial Sequence: Synthetic oligonucleotide
  Sense strand starting at position 2304 of SEQ ID NO: 1886834
gaugcuccagucuguaauu

SEQ ID NO: 2429653 - RNA, 19 nt, Artificial Sequence
  Description of Artificial Sequence: Synthetic oligonucleotide
  Antisense strand to SEQ ID NO: 2429652
aauuacagacuggagcauc

SEQ ID NO: 2429654 - RNA, 19 nt, Artificial Sequence
  Description of Artificial Sequence: Synthetic oligonucleotide
  Sense strand starting at position 2420 of SEQ ID NO: 1886834
uuguccugccuuuaugaaa

SEQ ID NO: 2429655 - RNA, 19 nt, Artificial Sequence
  Description of Artificial Sequence: Synthetic oligonucleotide
  Antisense strand to SEQ ID NO: 2429654
uuucauaaaggcaggacaa

SEQ ID NO: 2429656 - RNA, 19 nt, Artificial Sequence
  Description of Artificial Sequence: Synthetic oligonucleotide
  Sense strand starting at position 2431 of SEQ ID NO: 1886834
uuaugaaauuuacagcaga

SEQ ID NO: 2429657 - RNA, 19 nt, Artificial Sequence
  Description of Artificial Sequence: Synthetic oligonucleotide
  Antisense strand to SEQ ID NO: 2429656
ucugcuguaaauuucauaa

SEQ ID NO: 2429658 - RNA, 19 nt, Artificial Sequence
  Description of Artificial Sequence: Synthetic oligonucleotide
  Sense strand starting at position 2454 of SEQ ID NO: 1886834
ccaaauacugcaugagaag

SEQ ID NO: 2429659 - RNA, 19 nt, Artificial Sequence
  Description of Artificial Sequence: Synthetic oligonucleotide
  Antisense strand to SEQ ID NO: 2429658
cuucucaugcaguauuugg

SEQ ID NO: 2429660 - RNA, 19 nt, Artificial Sequence
  Description of Artificial Sequence: Synthetic oligonucleotide
  Sense strand starting at position 2556 of SEQ ID NO: 1886834
uaggcaaugucaucaauga

SEQ ID NO: 2429661 - RNA, 19 nt, Artificial Sequence
  Description of Artificial Sequence: Synthetic oligonucleotide
  Antisense strand to SEQ ID NO: 2429660
ucauugaugacauugccua

SEQ ID NO: 2429662 - RNA, 19 nt, Artificial Sequence
  Description of Artificial Sequence: Synthetic oligonucleotide
  Sense strand starting at position 2557 of SEQ ID NO: 1886834
aggcaaugucaucaaugac

SEQ ID NO: 2429663 - RNA, 19 nt, Artificial Sequence
  Description of Artificial Sequence: Synthetic oligonucleotide
  Antisense strand to SEQ ID NO: 2429662
gucauugaugacauugccu

SEQ ID NO: 2429664 - RNA, 19 nt, Artificial Sequence
  Description of Artificial Sequence: Synthetic oligonucleotide
  Sense strand starting at position 2563 of SEQ ID NO: 1886834
ugucaucaaugacugcuaa

SEQ ID NO: 2429665 - RNA, 19 nt, Artificial Sequence
  Description of Artificial Sequence: Synthetic oligonucleotide
  Antisense strand to SEQ ID NO: 2429664
uuagcagucauugaugaca

SEQ ID NO: 2429666 - RNA, 19 nt, Artificial Sequence
  Description of Artificial Sequence: Synthetic oligonucleotide
  Sense strand starting at position 2564 of SEQ ID NO: 1886834
gucaucaaugacugcuaau

SEQ ID NO: 2429667 - RNA, 19 nt, Artificial Sequence
  Description of Artificial Sequence: Synthetic oligonucleotide
  Antisense strand to SEQ ID NO: 2429666
auuagcagucauugaugac

SEQ ID NO: 2429668 - RNA, 19 nt, Artificial Sequence
  Description of Artificial Sequence: Synthetic oligonucleotide
  Sense strand starting at position 2657 of SEQ ID NO: 1886834
ccugaaugugaacaagcuu

SEQ ID NO: 2429669 - RNA, 19 nt, Artificial Sequence
  Description of Artificial Sequence: Synthetic oligonucleotide
  Antisense strand to SEQ ID NO: 2429668
aagcuuguucacauucagg

SEQ ID NO: 2429670 - RNA, 19 nt, Artificial Sequence
  Description of Artificial Sequence: Synthetic oligonucleotide
  Sense strand starting at position 2670 of SEQ ID NO: 1886834
aagcuucuagagugaauua

SEQ ID NO: 2429671 - RNA, 19 nt, Artificial Sequence
  Description of Artificial Sequence: Synthetic oligonucleotide
  Antisense strand to SEQ ID NO: 2429670
uaauucacucuagaagcuu

SEQ ID NO: 2429672 - RNA, 19 nt, Artificial Sequence
  Description of Artificial Sequence: Synthetic oligonucleotide
  Sense strand starting at position 2704 of SEQ ID NO: 1886834
acaagacuguacuaaagga

SEQ ID NO: 2429673 - RNA, 19 nt, Artificial Sequence
  Description of Artificial Sequence: Synthetic oligonucleotide
  Antisense strand to SEQ ID NO: 2429672
uccuuuaguacagucuugu

SEQ ID NO: 2429674 - RNA, 19 nt, Artificial Sequence
  Description of Artificial Sequence: Synthetic oligonucleotide
  Sense strand starting at position 2785 of SEQ ID NO: 1886834
ccaagagcauucccaaguu

SEQ ID NO: 2429675 - RNA, 19 nt, Artificial Sequence
  Description of Artificial Sequence: Synthetic oligonucleotide
  Antisense strand to SEQ ID NO: 2429674
aacuugggaaugcucuugg

SEQ ID NO: 2429676 - RNA, 19 nt, Artificial Sequence
  Description of Artificial Sequence: Synthetic oligonucleotide
  Sense strand starting at position 3252 of SEQ ID NO: 1886834
caaaguagacucuguagca

SEQ ID NO: 2429677 - RNA, 19 nt, Artificial Sequence
  Description of Artificial Sequence: Synthetic oligonucleotide
  Antisense strand to SEQ ID NO: 2429676
ugcuacagagucuacuuug

SEQ ID NO: 2429678 - RNA, 19 nt, Artificial Sequence
  Description of Artificial Sequence: Synthetic oligonucleotide
  Sense strand starting at position 3253 of SEQ ID NO: 1886834
aaaguagacucuguagcaa

SEQ ID NO: 2429679 - RNA, 19 nt, Artificial Sequence
  Description of Artificial Sequence: Synthetic oligonucleotide
  Antisense strand to SEQ ID NO: 2429678
uugcuacagagucuacuuu

SEQ ID NO: 2429680 - RNA, 19 nt, Artificial Sequence
  Description of Artificial Sequence: Synthetic oligonucleotide
  Sense strand starting at position 3318 of SEQ ID NO: 1886834
uaggaagccuuggaagaaa

SEQ ID NO: 2429681 - RNA, 19 nt, Artificial Sequence
  Description of Artificial Sequence: Synthetic oligonucleotide
  Antisense strand to SEQ ID NO: 2429680
uuucuuccaaggcuuccua

SEQ ID NO: 2429682 - RNA, 19 nt, Artificial Sequence
  Description of Artificial Sequence: Synthetic oligonucleotide
  Sense strand starting at position 3392 of SEQ ID NO: 1886834
aaagcugucccuugugaag

SEQ ID NO: 2429683 - RNA, 19 nt, Artificial Sequence
  Description of Artificial Sequence: Synthetic oligonucleotide
  Antisense strand to SEQ ID NO: 2429682
cuucacaagggacagcuuu

SEQ ID NO: 2429684 - RNA, 19 nt, Artificial Sequence
  Description of Artificial Sequence: Synthetic oligonucleotide
  Sense strand starting at position 3414 of SEQ ID NO: 1886834
aucuacauucuguagcgaa

SEQ ID NO: 2429685 - RNA, 19 nt, Artificial Sequence
  Description of Artificial Sequence: Synthetic oligonucleotide
  Antisense strand to SEQ ID NO: 2429684
uucgcuacagaauguagau

SEQ ID NO: 2429686 - RNA, 19 nt, Artificial Sequence
  Description of Artificial Sequence: Synthetic oligonucleotide
  Sense strand starting at position 3468 of SEQ ID NO: 1886834
ggagaacucugauaagaag

SEQ ID NO: 2429687 - RNA, 19 nt, Artificial Sequence
  Description of Artificial Sequence: Synthetic oligonucleotide
  Antisense strand to SEQ ID NO: 2429686
cuucuuaucagaguucucc

SEQ ID NO: 2429688 - RNA, 19 nt, Artificial Sequence
  Description of Artificial Sequence: Synthetic oligonucleotide
  Sense strand starting at position 3522 of SEQ ID NO: 1886834
ggagacuuccucugcuuaa

SEQ ID NO: 2429689 - RNA, 19 nt, Artificial Sequence
  Description of Artificial Sequence: Synthetic oligonucleotide
  Antisense strand to SEQ ID NO: 2429688
uuaagcagaggaagucucc

SEQ ID NO: 2429690 - RNA, 19 nt, Artificial Sequence
  Description of Artificial Sequence: Synthetic oligonucleotide
  Sense strand starting at position 3540 of SEQ ID NO: 1886834
auggaaaucuuggucucca

SEQ ID NO: 2429691 - RNA, 19 nt, Artificial Sequence
  Description of Artificial Sequence: Synthetic oligonucleotide
  Antisense strand to SEQ ID NO: 2429690
uggagaccaagauuuccau

SEQ ID NO: 2429692 - RNA, 19 nt, Artificial Sequence
  Description of Artificial Sequence: Synthetic oligonucleotide
  Sense strand starting at position 3541 of SEQ ID NO: 1886834
uggaaaucuuggucuccac

SEQ ID NO: 2429693 - RNA, 19 nt, Artificial Sequence
  Description of Artificial Sequence: Synthetic oligonucleotide
  Antisense strand to SEQ ID NO: 2429692
guggagaccaagauuucca

SEQ ID NO: 2429694 - RNA, 19 nt, Artificial Sequence
  Description of Artificial Sequence: Synthetic oligonucleotide
  Sense strand starting at position 3718 of SEQ ID NO: 1886834
aauguacaucuacguguau

SEQ ID NO: 2429695 - RNA, 19 nt, Artificial Sequence
  Description of Artificial Sequence: Synthetic oligonucleotide
  Antisense strand to SEQ ID NO: 2429694
auacacguagauguacauu

SEQ ID NO: 2429696 - RNA, 19 nt, Artificial Sequence
  Description of Artificial Sequence: Synthetic oligonucleotide
  Sense strand starting at position 3732 of SEQ ID NO: 1886834
uguauugacugucuuaugu

SEQ ID NO: 2429697 - RNA, 19 nt, Artificial Sequence
  Description of Artificial Sequence: Synthetic oligonucleotide
  Antisense strand to SEQ ID NO: 2429696
acauaagacagucaauaca

SEQ ID NO: 2429698 - RNA, 19 nt, Artificial Sequence
  Description of Artificial Sequence: Synthetic oligonucleotide
  Sense strand starting at position 3739 of SEQ ID NO: 1886834
acugucuuaugucuuccaa

SEQ ID NO: 2429699 - RNA, 19 nt, Artificial Sequence
  Description of Artificial Sequence: Synthetic oligonucleotide
  Antisense strand to SEQ ID NO: 2429698
uuggaagacauaagacagu

SEQ ID NO: 2429700 - RNA, 19 nt, Artificial Sequence
  Description of Artificial Sequence: Synthetic oligonucleotide
  Sense strand starting at position 3782 of SEQ ID NO: 1886834
ggguacguguucuuaggau

SEQ ID NO: 2429701 - RNA, 19 nt, Artificial Sequence
  Description of Artificial Sequence: Synthetic oligonucleotide
  Antisense strand to SEQ ID NO: 2429700
auccuaagaacacguaccc

SEQ ID NO: 2429702 - RNA, 19 nt, Artificial Sequence
  Description of Artificial Sequence: Synthetic oligonucleotide
  Sense strand starting at position 3821 of SEQ ID NO: 1886834
ggcccuuggucacucauau

SEQ ID NO: 2429703 - RNA, 19 nt, Artificial Sequence
  Description of Artificial Sequence: Synthetic oligonucleotide
  Antisense strand to SEQ ID NO: 2429702
auaugagugaccaagggcc

SEQ ID NO: 2429704 - RNA, 19 nt, Artificial Sequence
  Description of Artificial Sequence: Synthetic oligonucleotide
  Sense strand starting at position 268 of SEQ ID NO: 1886835
ggaucuugacaagggcauu

SEQ ID NO: 2429705 - RNA, 19 nt, Artificial Sequence
  Description of Artificial Sequence: Synthetic oligonucleotide
  Antisense strand to SEQ ID NO: 2429704
aaugcccuugucaagaucc

SEQ ID NO: 2429706 - RNA, 19 nt, Artificial Sequence
  Description of Artificial Sequence: Synthetic oligonucleotide
  Sense strand starting at position 421 of SEQ ID NO: 1886835
gggcguccuccagcgugaa

SEQ ID NO: 2429707 - RNA, 19 nt, Artificial Sequence
  Description of Artificial Sequence: Synthetic oligonucleotide
  Antisense strand to SEQ ID NO: 2429706
uucacgcuggaggacgccc

SEQ ID NO: 2429708 - RNA, 19 nt, Artificial Sequence
  Description of Artificial Sequence: Synthetic oligonucleotide
  Sense strand starting at position 779 of SEQ ID NO: 1886835
ccugucauccuggcucgua

SEQ ID NO: 2429709 - RNA, 19 nt, Artificial Sequence
  Description of Artificial Sequence: Synthetic oligonucleotide
  Antisense strand to SEQ ID NO: 2429708
uacgagccaggaugacagg

SEQ ID NO: 2429710 - RNA, 19 nt, Artificial Sequence
  Description of Artificial Sequence: Synthetic oligonucleotide
  Sense strand starting at position 792 of SEQ ID NO: 1886835
cucguagaccuuugagaac

SEQ ID NO: 2429711 - RNA, 19 nt, Artificial Sequence
  Description of Artificial Sequence: Synthetic oligonucleotide
  Antisense strand to SEQ ID NO: 2429710
guucucaaaggucuacgag

SEQ ID NO: 2429712 - RNA, 19 nt, Artificial Sequence
  Description of Artificial Sequence: Synthetic oligonucleotide
  Sense strand starting at position 1011 of SEQ ID NO: 1886835
gacaccugucagcauagaa

SEQ ID NO: 2429713 - RNA, 19 nt, Artificial Sequence
  Description of Artificial Sequence: Synthetic oligonucleotide
  Antisense strand to SEQ ID NO: 2429712
uucuaugcugacagguguc

SEQ ID NO: 2429714 - RNA, 19 nt, Artificial Sequence
  Description of Artificial Sequence: Synthetic oligonucleotide
  Sense strand starting at position 1156 of SEQ ID NO: 1886835
ccagaugguguccacugau

SEQ ID NO: 2429715 - RNA, 19 nt, Artificial Sequence
  Description of Artificial Sequence: Synthetic oligonucleotide
  Antisense strand to SEQ ID NO: 2429714
aucaguggacaccaucugg

SEQ ID NO: 2429716 - RNA, 19 nt, Artificial Sequence
  Description of Artificial Sequence: Synthetic oligonucleotide
  Sense strand starting at position 1159 of SEQ ID NO: 1886835
gaugguguccacugaucac

SEQ ID NO: 2429717 - RNA, 19 nt, Artificial Sequence
  Description of Artificial Sequence: Synthetic oligonucleotide
  Antisense strand to SEQ ID NO: 2429716
gugaucaguggacaccauc

SEQ ID NO: 2429718 - RNA, 19 nt, Artificial Sequence
  Description of Artificial Sequence: Synthetic oligonucleotide
  Sense strand starting at position 1236 of SEQ ID NO: 1886835
gggcgugucucaccagaca

SEQ ID NO: 2429719 - RNA, 19 nt, Artificial Sequence
  Description of Artificial Sequence: Synthetic oligonucleotide
  Antisense strand to SEQ ID NO: 2429718
ugucuggugagacacgccc

SEQ ID NO: 2429720 - RNA, 19 nt, Artificial Sequence
  Description of Artificial Sequence: Synthetic oligonucleotide
  Sense strand starting at position 1301 of SEQ ID NO: 1886835
ugggcuuaaccaugugaac

SEQ ID NO: 2429721 - RNA, 19 nt, Artificial Sequence
  Description of Artificial Sequence: Synthetic oligonucleotide
  Antisense strand to SEQ ID NO: 2429720
guucacaugguuaagccca

SEQ ID NO: 2429722 - RNA, 19 nt, Artificial Sequence
  Description of Artificial Sequence: Synthetic oligonucleotide
  Sense strand starting at position 1326 of SEQ ID NO: 1886835
uacuaaggacugugagcaa

SEQ ID NO: 2429723 - RNA, 19 nt, Artificial Sequence
  Description of Artificial Sequence: Synthetic oligonucleotide
  Antisense strand to SEQ ID NO: 2429722
uugcucacaguccuuagua

SEQ ID NO: 2429724 - RNA, 19 nt, Artificial Sequence
  Description of Artificial Sequence: Synthetic oligonucleotide
  Sense strand starting at position 2315 of SEQ ID NO: 1886835
uugcguaaacgccucgauu

SEQ ID NO: 2429725 - RNA, 19 nt, Artificial Sequence
  Description of Artificial Sequence: Synthetic oligonucleotide
  Antisense strand to SEQ ID NO: 2429724
aaucgaggcguuuacgcaa

SEQ ID NO: 2429726 - RNA, 19 nt, Artificial Sequence
  Description of Artificial Sequence: Synthetic oligonucleotide
  Sense strand starting at position 2317 of SEQ ID NO: 1886835
gcguaaacgccucgauucu

SEQ ID NO: 2429727 - RNA, 19 nt, Artificial Sequence
  Description of Artificial Sequence: Synthetic oligonucleotide
  Antisense strand to SEQ ID NO: 2429726
agaaucgaggcguuuacgc

SEQ ID NO: 2429728 - RNA, 19 nt, Artificial Sequence
  Description of Artificial Sequence: Synthetic oligonucleotide
  Sense strand starting at position 2643 of SEQ ID NO: 1886835
ccacuuccuccaggagaga

SEQ ID NO: 2429729 - RNA, 19 nt, Artificial Sequence
  Description of Artificial Sequence: Synthetic oligonucleotide
  Antisense strand to SEQ ID NO: 2429728
ucucuccuggaggaagugg

SEQ ID NO: 2429730 - RNA, 19 nt, Artificial Sequence
  Description of Artificial Sequence: Synthetic oligonucleotide
  Sense strand starting at position 2710 of SEQ ID NO: 1886835
gcuccaugcccggaagaga

SEQ ID NO: 2429731 - RNA, 19 nt, Artificial Sequence
  Description of Artificial Sequence: Synthetic oligonucleotide
  Antisense strand to SEQ ID NO: 2429730
ucucuuccgggcauggagc

SEQ ID NO: 2429732 - RNA, 19 nt, Artificial Sequence
  Description of Artificial Sequence: Synthetic oligonucleotide
  Sense strand starting at position 2996 of SEQ ID NO: 1886835
gaugucugauucugaaugu

SEQ ID NO: 2429733 - RNA, 19 nt, Artificial Sequence
  Description of Artificial Sequence: Synthetic oligonucleotide
  Antisense strand to SEQ ID NO: 2429732
acauucagaaucagacauc

SEQ ID NO: 2429734 - RNA, 19 nt, Artificial Sequence
  Description of Artificial Sequence: Synthetic oligonucleotide
  Sense strand starting at position 2997 of SEQ ID NO: 1886835
augucugauucugaauguu

SEQ ID NO: 2429735 - RNA, 19 nt, Artificial Sequence
  Description of Artificial Sequence: Synthetic oligonucleotide
  Antisense strand to SEQ ID NO: 2429734
aacauucagaaucagacau

SEQ ID NO: 2429736 - RNA, 19 nt, Artificial Sequence
  Description of Artificial Sequence: Synthetic oligonucleotide
  Sense strand starting at position 3003 of SEQ ID NO: 1886835
gauucugaauguuggguua

SEQ ID NO: 2429737 - RNA, 19 nt, Artificial Sequence
  Description of Artificial Sequence: Synthetic oligonucleotide
  Antisense strand to SEQ ID NO: 2429736
uaacccaacauucagaauc

SEQ ID NO: 2429738 - RNA, 19 nt, Artificial Sequence
  Description of Artificial Sequence: Synthetic oligonucleotide
  Sense strand starting at position 3005 of SEQ ID NO: 1886835
uucugaauguuggguuaga

SEQ ID NO: 2429739 - RNA, 19 nt, Artificial Sequence
  Description of Artificial Sequence: Synthetic oligonucleotide
  Antisense strand to SEQ ID NO: 2429738
ucuaacccaacauucagaa

SEQ ID NO: 2429740 - RNA, 19 nt, Artificial Sequence
  Description of Artificial Sequence: Synthetic oligonucleotide
  Sense strand starting at position 3006 of SEQ ID NO: 1886835
ucugaauguuggguuagac

SEQ ID NO: 2429741 - RNA, 19 nt, Artificial Sequence
  Description of Artificial Sequence: Synthetic oligonucleotide
  Antisense strand to SEQ ID NO: 2429740
gucuaacccaacauucaga

SEQ ID NO: 2429742 - RNA, 19 nt, Artificial Sequence
  Description of Artificial Sequence: Synthetic oligonucleotide
  Sense strand starting at position 3086 of SEQ ID NO: 1886835
gaagguguuugggcuggaa

SEQ ID NO: 2429743 - RNA, 19 nt, Artificial Sequence
  Description of Artificial Sequence: Synthetic oligonucleotide
  Antisense strand to SEQ ID NO: 2429742
uuccagcccaaacaccuuc

SEQ ID NO: 2429744 - RNA, 19 nt, Artificial Sequence
  Description of Artificial Sequence: Synthetic oligonucleotide
  Sense strand starting at position 3183 of SEQ ID NO: 1886835
ugccgcaucguugugaauu

SEQ ID NO: 2429745 - RNA, 19 nt, Artificial Sequence
  Description of Artificial Sequence: Synthetic oligonucleotide
  Antisense strand to SEQ ID NO: 2429744
aauucacaacgaugcggca

SEQ ID NO: 2429746 - RNA, 19 nt, Artificial Sequence
  Description of Artificial Sequence: Synthetic oligonucleotide
  Sense strand starting at position 3184 of SEQ ID NO: 1886835
gccgcaucguugugaauuu

SEQ ID NO: 2429747 - RNA, 19 nt, Artificial Sequence
  Description of Artificial Sequence: Synthetic oligonucleotide
  Antisense strand to SEQ ID NO: 2429746
aaauucacaacgaugcggc

SEQ ID NO: 2429748 - RNA, 19 nt, Artificial Sequence
  Description of Artificial Sequence: Synthetic oligonucleotide
  Sense strand starting at position 3221 of SEQ ID NO: 1886835
cuggucuucugaccgaauu

SEQ ID NO: 2429749 - RNA, 19 nt, Artificial Sequence
  Description of Artificial Sequence: Synthetic oligonucleotide
  Antisense strand to SEQ ID NO: 2429748
aauucggucagaagaccag

SEQ ID NO: 2429750 - RNA, 19 nt, Artificial Sequence
  Description of Artificial Sequence: Synthetic oligonucleotide
  Sense strand starting at position 3257 of SEQ ID NO: 1886835
aggucuucugacugcuagu

SEQ ID NO: 2429751 - RNA, 19 nt, Artificial Sequence
  Description of Artificial Sequence: Synthetic oligonucleotide
  Antisense strand to SEQ ID NO: 2429750
acuagcagucagaagaccu

SEQ ID NO: 2429752 - RNA, 19 nt, Artificial Sequence
  Description of Artificial Sequence: Synthetic oligonucleotide
  Sense strand starting at position 3284 of SEQ ID NO: 1886835
ucugaagccuugugaguca

SEQ ID NO: 2429753 - RNA, 19 nt, Artificial Sequence
  Description of Artificial Sequence: Synthetic oligonucleotide
  Antisense strand to SEQ ID NO: 2429752
ugacucacaaggcuucaga

SEQ ID NO: 2429754 - RNA, 19 nt, Artificial Sequence
  Description of Artificial Sequence: Synthetic oligonucleotide
  Sense strand starting at position 3341 of SEQ ID NO: 1886835
ccaucucuuccauacggau

SEQ ID NO: 2429755 - RNA, 19 nt, Artificial Sequence
  Description of Artificial Sequence: Synthetic oligonucleotide
  Antisense strand to SEQ ID NO: 2429754
auccguauggaagagaugg

SEQ ID NO: 2429756 - RNA, 19 nt, Artificial Sequence
  Description of Artificial Sequence: Synthetic oligonucleotide
  Sense strand starting at position 3369 of SEQ ID NO: 1886835
ccaagacuguccuagagga

SEQ ID NO: 2429757 - RNA, 19 nt, Artificial Sequence
  Description of Artificial Sequence: Synthetic oligonucleotide
  Antisense strand to SEQ ID NO: 2429756
uccucuaggacagucuugg

SEQ ID NO: 2429758 - RNA, 19 nt, Artificial Sequence
  Description of Artificial Sequence: Synthetic oligonucleotide
  Sense strand starting at position 3384 of SEQ ID NO: 1886835
aggaaaugaucacgaucac

SEQ ID NO: 2429759 - RNA, 19 nt, Artificial Sequence
  Description of Artificial Sequence: Synthetic oligonucleotide
  Antisense strand to SEQ ID NO: 2429758
gugaucgugaucauuuccu

SEQ ID NO: 2429760 - RNA, 19 nt, Artificial Sequence
  Description of Artificial Sequence: Synthetic oligonucleotide
  Sense strand starting at position 3601 of SEQ ID NO: 1886835
gugaguuagacacaagcga

SEQ ID NO: 2429761 - RNA, 19 nt, Artificial Sequence
  Description of Artificial Sequence: Synthetic oligonucleotide
  Antisense strand to SEQ ID NO: 2429760
ucgcuugugucuaacucac

SEQ ID NO: 2429762 - RNA, 19 nt, Artificial Sequence
  Description of Artificial Sequence: Synthetic oligonucleotide
  Sense strand starting at position 3669 of SEQ ID NO: 1886835
ccuguacuuggcgaagagu

SEQ ID NO: 2429763 - RNA, 19 nt, Artificial Sequence
  Description of Artificial Sequence: Synthetic oligonucleotide
  Antisense strand to SEQ ID NO: 2429762
acucuucgccaaguacagg

SEQ ID NO: 2429764 - RNA, 19 nt, Artificial Sequence
  Description of Artificial Sequence: Synthetic oligonucleotide
  Sense strand starting at position 3672 of SEQ ID NO: 1886835
guacuuggcgaagagugau

SEQ ID NO: 2429765 - RNA, 19 nt, Artificial Sequence
  Description of Artificial Sequence: Synthetic oligonucleotide
  Antisense strand to SEQ ID NO: 2429764
aucacucuucgccaaguac

SEQ ID NO: 2429766 - RNA, 19 nt, Artificial Sequence
  Description of Artificial Sequence: Synthetic oligonucleotide
  Sense strand starting at position 3743 of SEQ ID NO: 1886835
agcggaagccuucgagaca

SEQ ID NO: 2429767 - RNA, 19 nt, Artificial Sequence
  Description of Artificial Sequence: Synthetic oligonucleotide
  Antisense strand to SEQ ID NO: 2429766
ugucucgaaggcuuccgcu

SEQ ID NO: 2429768 - RNA, 19 nt, Artificial Sequence
  Description of Artificial Sequence: Synthetic oligonucleotide
  Sense strand starting at position 3794 of SEQ ID NO: 1886835
gcccaacuuggagguguua

SEQ ID NO: 2429769 - RNA, 19 nt, Artificial Sequence
  Description of Artificial Sequence: Synthetic oligonucleotide
  Antisense strand to SEQ ID NO: 2429768
uaacaccuccaaguugggc

SEQ ID NO: 2429770 - RNA, 19 nt, Artificial Sequence
  Description of Artificial Sequence: Synthetic oligonucleotide
  Sense strand starting at position 3796 of SEQ ID NO: 1886835
ccaacuuggagguguuauc

SEQ ID NO: 2429771 - RNA, 19 nt, Artificial Sequence
  Description of Artificial Sequence: Synthetic oligonucleotide
  Antisense strand to SEQ ID NO: 2429770
gauaacaccuccaaguugg

SEQ ID NO: 2429772 - RNA, 19 nt, Artificial Sequence
  Description of Artificial Sequence: Synthetic oligonucleotide
  Sense strand starting at position 3807 of SEQ ID NO: 1886835
guguuaucaucucccuaag

SEQ ID NO: 2429773 - RNA, 19 nt, Artificial Sequence
  Description of Artificial Sequence: Synthetic oligonucleotide
  Antisense strand to SEQ ID NO: 2429772
cuuagggagaugauaacac

SEQ ID NO: 2429774 - RNA, 19 nt, Artificial Sequence
  Description of Artificial Sequence: Synthetic oligonucleotide
  Sense strand starting at position 3825 of SEQ ID NO: 1886835
gcacgaaguauaugaagga

SEQ ID NO: 2429775 - RNA, 19 nt, Artificial Sequence
  Description of Artificial Sequence: Synthetic oligonucleotide
  Antisense strand to SEQ ID NO: 2429774
uccuucauauacuucgugc

SEQ ID NO: 2429776 - RNA, 19 nt, Artificial Sequence
  Description of Artificial Sequence: Synthetic oligonucleotide
  Sense strand starting at position 3841 of SEQ ID NO: 1886835
ggagucaauuuaggucaga

SEQ ID NO: 2429777 - RNA, 19 nt, Artificial Sequence
  Description of Artificial Sequence: Synthetic oligonucleotide
  Antisense strand to SEQ ID NO: 2429776
ucugaccuaaauugacucc

SEQ ID NO: 2429778 - RNA, 19 nt, Artificial Sequence
  Description of Artificial Sequence: Synthetic oligonucleotide
  Sense strand starting at position 244 of SEQ ID NO: 1886836
ggcaaauuaguuugacauc

SEQ ID NO: 2429779 - RNA, 19 nt, Artificial Sequence
  Description of Artificial Sequence: Synthetic oligonucleotide
  Antisense strand to SEQ ID NO: 2429778
gaugucaaacuaauuugcc

SEQ ID NO: 2429780 - RNA, 19 nt, Artificial Sequence
  Description of Artificial Sequence: Synthetic oligonucleotide
  Sense strand starting at position 253 of SEQ ID NO: 1886836
guuugacaucuuuguuaaa

SEQ ID NO: 2429781 - RNA, 19 nt, Artificial Sequence
  Description of Artificial Sequence: Synthetic oligonucleotide
  Antisense strand to SEQ ID NO: 2429780
uuuaacaaagaugucaaac

SEQ ID NO: 2429782 - RNA, 19 nt, Artificial Sequence
  Description of Artificial Sequence: Synthetic oligonucleotide
  Sense strand starting at position 314 of SEQ ID NO: 1886836
guauauuuguaccuguuau

SEQ ID NO: 2429783 - RNA, 19 nt, Artificial Sequence
  Description of Artificial Sequence: Synthetic oligonucleotide
  Antisense strand to SEQ ID NO: 2429782
auaacagguacaaauauac

SEQ ID NO: 2429784 - RNA, 19 nt, Artificial Sequence
  Description of Artificial Sequence: Synthetic oligonucleotide
  Sense strand starting at position 324 of SEQ ID NO: 1886836
accuguuauucuuuagagu

SEQ ID NO: 2429785 - RNA, 19 nt, Artificial Sequence
  Description of Artificial Sequence: Synthetic oligonucleotide
  Antisense strand to SEQ ID NO: 2429784
acucuaaagaauaacaggu

SEQ ID NO: 2429786 - RNA, 19 nt, Artificial Sequence
  Description of Artificial Sequence: Synthetic oligonucleotide
  Sense strand starting at position 325 of SEQ ID NO: 1886836
ccuguuauucuuuagaguc

SEQ ID NO: 2429787 - RNA, 19 nt, Artificial Sequence
  Description of Artificial Sequence: Synthetic oligonucleotide
  Antisense strand to SEQ ID NO: 2429786
gacucuaaagaauaacagg

SEQ ID NO: 2429788 - RNA, 19 nt, Artificial Sequence
  Description of Artificial Sequence: Synthetic oligonucleotide
  Sense strand starting at position 357 of SEQ ID NO: 1886836
guuuaauuccaauguuuag

SEQ ID NO: 2429789 - RNA, 19 nt, Artificial Sequence
  Description of Artificial Sequence: Synthetic oligonucleotide
  Antisense strand to SEQ ID NO: 2429788
cuaaacauuggaauuaaac

SEQ ID NO: 2429790 - RNA, 19 nt, Artificial Sequence
  Description of Artificial Sequence: Synthetic oligonucleotide
  Sense strand starting at position 363 of SEQ ID NO: 1886836
uuccaauguuuaguugaaa

SEQ ID NO: 2429791 - RNA, 19 nt, Artificial Sequence
  Description of Artificial Sequence: Synthetic oligonucleotide
  Antisense strand to SEQ ID NO: 2429790
uuucaacuaaacauuggaa

SEQ ID NO: 2429792 - RNA, 19 nt, Artificial Sequence
  Description of Artificial Sequence: Synthetic oligonucleotide
  Sense strand starting at position 364 of SEQ ID NO: 1886836
uccaauguuuaguugaaag

SEQ ID NO: 2429793 - RNA, 19 nt, Artificial Sequence
  Description of Artificial Sequence: Synthetic oligonucleotide
  Antisense strand to SEQ ID NO: 2429792
cuuucaacuaaacauugga

SEQ ID NO: 2429794 - RNA, 19 nt, Artificial Sequence
  Description of Artificial Sequence: Synthetic oligonucleotide
  Sense strand starting at position 366 of SEQ ID NO: 1886836
caauguuuaguugaaaguu

SEQ ID NO: 2429795 - RNA, 19 nt, Artificial Sequence
  Description of Artificial Sequence: Synthetic oligonucleotide
  Antisense strand to SEQ ID NO: 2429794
aacuuucaacuaaacauug

SEQ ID NO: 2429796 - RNA, 19 nt, Artificial Sequence
  Description of Artificial Sequence: Synthetic oligonucleotide
  Sense strand starting at position 652 of SEQ ID NO: 1886836
caccuuauccuguacgaag

SEQ ID NO: 2429797 - RNA, 19 nt, Artificial Sequence
  Description of Artificial Sequence: Synthetic oligonucleotide
  Antisense strand to SEQ ID NO: 2429796
cuucguacaggauaaggug

SEQ ID NO: 2429798 - RNA, 19 nt, Artificial Sequence
  Description of Artificial Sequence: Synthetic oligonucleotide
  Sense strand starting at position 865 of SEQ ID NO: 1886836
ugggauuacugggauuaag

SEQ ID NO: 2429799 - RNA, 19 nt, Artificial Sequence
  Description of Artificial Sequence: Synthetic oligonucleotide
  Antisense strand to SEQ ID NO: 2429798
cuuaaucccaguaauccca

SEQ ID NO: 2429800 - RNA, 19 nt, Artificial Sequence
  Description of Artificial Sequence: Synthetic oligonucleotide
  Sense strand starting at position 1111 of SEQ ID NO: 1886836
acagacuguuuguuuacaa

SEQ ID NO: 2429801 - RNA, 19 nt, Artificial Sequence
  Description of Artificial Sequence: Synthetic oligonucleotide
  Antisense strand to SEQ ID NO: 2429800
uuguaaacaaacagucugu

SEQ ID NO: 2429802 - RNA, 19 nt, Artificial Sequence
  Description of Artificial Sequence: Synthetic oligonucleotide
  Sense strand starting at position 1183 of SEQ ID NO: 1886836
gggcuugacaccugcuaga

SEQ ID NO: 2429803 - RNA, 19 nt, Artificial Sequence
  Description of Artificial Sequence: Synthetic oligonucleotide
  Antisense strand to SEQ ID NO: 2429802
ucuagcaggugucaagccc

SEQ ID NO: 2429804 - RNA, 19 nt, Artificial Sequence
  Description of Artificial Sequence: Synthetic oligonucleotide
  Sense strand starting at position 1239 of SEQ ID NO: 1886836
uugaaagaucccgguacau

SEQ ID NO: 2429805 - RNA, 19 nt, Artificial Sequence
  Description of Artificial Sequence: Synthetic oligonucleotide
  Antisense strand to SEQ ID NO: 2429804
auguaccgggaucuuucaa

SEQ ID NO: 2429806 - RNA, 19 nt, Artificial Sequence
  Description of Artificial Sequence: Synthetic oligonucleotide
  Sense strand starting at position 1241 of SEQ ID NO: 1886836
gaaagaucccgguacauuc

SEQ ID NO: 2429807 - RNA, 19 nt, Artificial Sequence
  Description of Artificial Sequence: Synthetic oligonucleotide
  Antisense strand to SEQ ID NO: 2429806
gaauguaccgggaucuuuc

SEQ ID NO: 2429808 - RNA, 19 nt, Artificial Sequence
  Description of Artificial Sequence: Synthetic oligonucleotide
  Sense strand starting at position 1251 of SEQ ID NO: 1886836
gguacauucccacgauaac

SEQ ID NO: 2429809 - RNA, 19 nt, Artificial Sequence
  Description of Artificial Sequence: Synthetic oligonucleotide
  Antisense strand to SEQ ID NO: 2429808
guuaucgugggaauguacc

SEQ ID NO: 2429810 - RNA, 19 nt, Artificial Sequence
  Description of Artificial Sequence: Synthetic oligonucleotide
  Sense strand starting at position 1261 of SEQ ID NO: 1886836
cacgauaacgucuauacgu

SEQ ID NO: 2429811 - RNA, 19 nt, Artificial Sequence
  Description of Artificial Sequence: Synthetic oligonucleotide
  Antisense strand to SEQ ID NO: 2429810
acguauagacguuaucgug

SEQ ID NO: 2429812 - RNA, 19 nt, Artificial Sequence
  Description of Artificial Sequence: Synthetic oligonucleotide
  Sense strand starting at position 1648 of SEQ ID NO: 1886836
ccugaaagcuguucugauu

SEQ ID NO: 2429813 - RNA, 19 nt, Artificial Sequence
  Description of Artificial Sequence: Synthetic oligonucleotide
  Antisense strand to SEQ ID NO: 2429812
aaucagaacagcuuucagg

SEQ ID NO: 2429814 - RNA, 19 nt, Artificial Sequence
  Description of Artificial Sequence: Synthetic oligonucleotide
  Sense strand starting at position 1678 of SEQ ID NO: 1886836
ucugauucugcggagugga

SEQ ID NO: 2429815 - RNA, 19 nt, Artificial Sequence
  Description of Artificial Sequence: Synthetic oligonucleotide
  Antisense strand to SEQ ID NO: 2429814
uccacuccgcagaaucaga

SEQ ID NO: 2429816 - RNA, 19 nt, Artificial Sequence
  Description of Artificial Sequence: Synthetic oligonucleotide
  Sense strand starting at position 2019 of SEQ ID NO: 1886836
cggauagguccgccuguuu

SEQ ID NO: 2429817 - RNA, 19 nt, Artificial Sequence
  Description of Artificial Sequence: Synthetic oligonucleotide
  Antisense strand to SEQ ID NO: 2429816
aaacaggcggaccuauccg

SEQ ID NO: 2429818 - RNA, 19 nt, Artificial Sequence
  Description of Artificial Sequence: Synthetic oligonucleotide
  Sense strand starting at position 2103 of SEQ ID NO: 1886836
uuugaaaccuggcuugacu

SEQ ID NO: 2429819 - RNA, 19 nt, Artificial Sequence
  Description of Artificial Sequence: Synthetic oligonucleotide
  Antisense strand to SEQ ID NO: 2429818
agucaagccagguuucaaa

SEQ ID NO: 2429820 - RNA, 19 nt, Artificial Sequence
  Description of Artificial Sequence: Synthetic oligonucleotide
  Sense strand starting at position 2682 of SEQ ID NO: 1886836
gagggaugcgcgagugauc

SEQ ID NO: 2429821 - RNA, 19 nt, Artificial Sequence
  Description of Artificial Sequence: Synthetic oligonucleotide
  Antisense strand to SEQ ID NO: 2429820
gaucacucgcgcaucccuc

SEQ ID NO: 2429822 - RNA, 19 nt, Artificial Sequence
  Description of Artificial Sequence: Synthetic oligonucleotide
  Sense strand starting at position 2960 of SEQ ID NO: 1886836
gaaagaaagguugggcuua

SEQ ID NO: 2429823 - RNA, 19 nt, Artificial Sequence
  Description of Artificial Sequence: Synthetic oligonucleotide
  Antisense strand to SEQ ID NO: 2429822
uaagcccaaccuuucuuuc

SEQ ID NO: 2429824 - RNA, 19 nt, Artificial Sequence
  Description of Artificial Sequence: Synthetic oligonucleotide
  Sense strand starting at position 2990 of SEQ ID NO: 1886836
gggaaagauucgguuagac

SEQ ID NO: 2429825 - RNA, 19 nt, Artificial Sequence
  Description of Artificial Sequence: Synthetic oligonucleotide
  Antisense strand to SEQ ID NO: 2429824
gucuaaccgaaucuuuccc

SEQ ID NO: 2429826 - RNA, 19 nt, Artificial Sequence
  Description of Artificial Sequence: Synthetic oligonucleotide
  Sense strand starting at position 3107 of SEQ ID NO: 1886836
auucuaaacuguuuggauu

SEQ ID NO: 2429827 - RNA, 19 nt, Artificial Sequence
  Description of Artificial Sequence: Synthetic oligonucleotide
  Antisense strand to SEQ ID NO: 2429826
aauccaaacaguuuagaau

SEQ ID NO: 2429828 - RNA, 19 nt, Artificial Sequence
  Description of Artificial Sequence: Synthetic oligonucleotide
  Sense strand starting at position 3260 of SEQ ID NO: 1886836
ggacuaaguugggauuucu

SEQ ID NO: 2429829 - RNA, 19 nt, Artificial Sequence
  Description of Artificial Sequence: Synthetic oligonucleotide
  Antisense strand to SEQ ID NO: 2429828
agaaaucccaacuuagucc

SEQ ID NO: 2429830 - RNA, 19 nt, Artificial Sequence
  Description of Artificial Sequence: Synthetic oligonucleotide
  Sense strand starting at position 3365 of SEQ ID NO: 1886836
acggucuuuccacaaggau

SEQ ID NO: 2429831 - RNA, 19 nt, Artificial Sequence
  Description of Artificial Sequence: Synthetic oligonucleotide
  Antisense strand to SEQ ID NO: 2429830
auccuuguggaaagaccgu

SEQ ID NO: 2429832 - RNA, 19 nt, Artificial Sequence
  Description of Artificial Sequence: Synthetic oligonucleotide
  Sense strand starting at position 3379 of SEQ ID NO: 1886836
aggauccuucucugaaaua

SEQ ID NO: 2429833 - RNA, 19 nt, Artificial Sequence
  Description of Artificial Sequence: Synthetic oligonucleotide
  Antisense strand to SEQ ID NO: 2429832
uauuucagagaaggauccu

SEQ ID NO: 2429834 - RNA, 19 nt, Artificial Sequence
  Description of Artificial Sequence: Synthetic oligonucleotide
  Sense strand starting at position 3478 of SEQ ID NO: 1886836
gcugcauuggauuauugau

SEQ ID NO: 2429835 - RNA, 19 nt, Artificial Sequence
  Description of Artificial Sequence: Synthetic oligonucleotide
  Antisense strand to SEQ ID NO: 2429834
aucaauaauccaaugcagc

SEQ ID NO: 2429836 - RNA, 19 nt, Artificial Sequence
  Description of Artificial Sequence: Synthetic oligonucleotide
  Sense strand starting at position 3582 of SEQ ID NO: 1886836
cagacaugccaucggaauu

SEQ ID NO: 2429837 - RNA, 19 nt, Artificial Sequence
  Description of Artificial Sequence: Synthetic oligonucleotide
  Antisense strand to SEQ ID NO: 2429836
aauuccgauggcaugucug

SEQ ID NO: 2429838 - RNA, 19 nt, Artificial Sequence
  Description of Artificial Sequence: Synthetic oligonucleotide
  Sense strand starting at position 3583 of SEQ ID NO: 1886836
agacaugccaucggaauua

SEQ ID NO: 2429839 - RNA, 19 nt, Artificial Sequence
  Description of Artificial Sequence: Synthetic oligonucleotide
  Antisense strand to SEQ ID NO: 2429838
uaauuccgauggcaugucu

SEQ ID NO: 2429840 - RNA, 19 nt, Artificial Sequence
  Description of Artificial Sequence: Synthetic oligonucleotide
  Sense strand starting at position 3602 of SEQ ID NO: 1886836
ggagcaagaucuuuagaua

SEQ ID NO: 2429841 - RNA, 19 nt, Artificial Sequence
  Description of Artificial Sequence: Synthetic oligonucleotide
  Antisense strand to SEQ ID NO: 2429840
uaucuaaagaucuugcucc

SEQ ID NO: 2429842 - RNA, 19 nt, Artificial Sequence
  Description of Artificial Sequence: Synthetic oligonucleotide
  Sense strand starting at position 3621 of SEQ ID NO: 1886836
cagugaaucugacccgacu

SEQ ID NO: 2429843 - RNA, 19 nt, Artificial Sequence
  Description of Artificial Sequence: Synthetic oligonucleotide
  Antisense strand to SEQ ID NO: 2429842
agucgggucagauucacug

SEQ ID NO: 2429844 - RNA, 19 nt, Artificial Sequence
  Description of Artificial Sequence: Synthetic oligonucleotide
  Sense strand starting at position 3632 of SEQ ID NO: 1886836
acccgacugccauauuauu

SEQ ID NO: 2429845 - RNA, 19 nt, Artificial Sequence
  Description of Artificial Sequence: Synthetic oligonucleotide
  Antisense strand to SEQ ID NO: 2429844
aauaauauggcagucgggu

SEQ ID NO: 2429846 - RNA, 19 nt, Artificial Sequence
  Description of Artificial Sequence: Synthetic oligonucleotide
  Sense strand starting at position 3661 of SEQ ID NO: 1886836
cccaguuuauacuuacgau

SEQ ID NO: 2429847 - RNA, 19 nt, Artificial Sequence
  Description of Artificial Sequence: Synthetic oligonucleotide
  Antisense strand to SEQ ID NO: 2429846
aucguaaguauaaacuggg

SEQ ID NO: 2429848 - RNA, 19 nt, Artificial Sequence
  Description of Artificial Sequence: Synthetic oligonucleotide
  Sense strand starting at position 3689 of SEQ ID NO: 1886836
gggugucucacauaucuga

SEQ ID NO: 2429849 - RNA, 19 nt, Artificial Sequence
  Description of Artificial Sequence: Synthetic oligonucleotide
  Antisense strand to SEQ ID NO: 2429848
ucagauaugugagacaccc

SEQ ID NO: 2429850 - RNA, 19 nt, Artificial Sequence
  Description of Artificial Sequence: Synthetic oligonucleotide
  Sense strand starting at position 3767 of SEQ ID NO: 1886836
cauuuauacuggcaguaga

SEQ ID NO: 2429851 - RNA, 19 nt, Artificial Sequence
  Description of Artificial Sequence: Synthetic oligonucleotide
  Antisense strand to SEQ ID NO: 2429850
ucuacugccaguauaaaug

SEQ ID NO: 2429852 - RNA, 19 nt, Artificial Sequence
  Description of Artificial Sequence: Synthetic oligonucleotide
  Sense strand starting at position 3860 of SEQ ID NO: 1886836
caguguuuaauggaguaug

SEQ ID NO: 2429853 - RNA, 19 nt, Artificial Sequence
  Description of Artificial Sequence: Synthetic oligonucleotide
  Antisense strand to SEQ ID NO: 2429852
cauacuccauuaaacacug

SEQ ID NO: 2429854 - RNA, 19 nt, Artificial Sequence
  Description of Artificial Sequence: Synthetic oligonucleotide
  Sense strand starting at position 3863 of SEQ ID NO: 1886836
uguuuaauggaguaugaug

SEQ ID NO: 2429855 - RNA, 19 nt, Artificial Sequence
  Description of Artificial Sequence: Synthetic oligonucleotide
  Antisense strand to SEQ ID NO: 2429854
caucauacuccauuaaaca

SEQ ID NO: 2429856 - RNA, 19 nt, Artificial Sequence
  Description of Artificial Sequence: Synthetic oligonucleotide
  Sense strand starting at position 3896 of SEQ ID NO: 1886836
gcucuaggauggucuaaga

SEQ ID NO: 2429857 - RNA, 19 nt, Artificial Sequence
  Description of Artificial Sequence: Synthetic oligonucleotide
  Antisense strand to SEQ ID NO: 2429856
ucuuagaccauccuagagc

SEQ ID NO: 2429858 - RNA, 19 nt, Artificial Sequence
  Description of Artificial Sequence: Synthetic oligonucleotide
  Sense strand starting at position 93 of SEQ ID NO: 1886837
ccugcaugucccugcuuaa

SEQ ID NO: 2429859 - RNA, 19 nt, Artificial Sequence
  Description of Artificial Sequence: Synthetic oligonucleotide
  Antisense strand to SEQ ID NO: 2429858
uuaagcagggacaugcagg

SEQ ID NO: 2429860 - RNA, 19 nt, Artificial Sequence
  Description of Artificial Sequence: Synthetic oligonucleotide
  Sense strand starting at position 172 of SEQ ID NO: 1886837
ggaucccuggcucaugaga

SEQ ID NO: 2429861 - RNA, 19 nt, Artificial Sequence
  Description of Artificial Sequence: Synthetic oligonucleotide
  Antisense strand to SEQ ID NO: 2429860
ucucaugagccagggaucc

SEQ ID NO: 2429862 - RNA, 19 nt, Artificial Sequence
  Description of Artificial Sequence: Synthetic oligonucleotide
  Sense strand starting at position 250 of SEQ ID NO: 1886837
cgucgcuguuucuuccaga

SEQ ID NO: 2429863 - RNA, 19 nt, Artificial Sequence
  Description of Artificial Sequence: Synthetic oligonucleotide
  Antisense strand to SEQ ID NO: 2429862
ucuggaagaaacagcgacg

SEQ ID NO: 2429864 - RNA, 19 nt, Artificial Sequence
  Description of Artificial Sequence: Synthetic oligonucleotide
  Sense strand starting at position 264 of SEQ ID NO: 1886837
ccagacugcucucuaaagu

SEQ ID NO: 2429865 - RNA, 19 nt, Artificial Sequence
  Description of Artificial Sequence: Synthetic oligonucleotide
  Antisense strand to SEQ ID NO: 2429864
acuuuagagagcagucugg

SEQ ID NO: 2429866 - RNA, 19 nt, Artificial Sequence
  Description of Artificial Sequence: Synthetic oligonucleotide
  Sense strand starting at position 265 of SEQ ID NO: 1886837
cagacugcucucuaaagug

SEQ ID NO: 2429867 - RNA, 19 nt, Artificial Sequence
  Description of Artificial Sequence: Synthetic oligonucleotide
  Antisense strand to SEQ ID NO: 2429866
cacuuuagagagcagucug

SEQ ID NO: 2429868 - RNA, 19 nt, Artificial Sequence
  Description of Artificial Sequence: Synthetic oligonucleotide
  Sense strand starting at position 289 of SEQ ID NO: 1886837
gugaguucuugcccuguau

SEQ ID NO: 2429869 - RNA, 19 nt, Artificial Sequence
  Description of Artificial Sequence: Synthetic oligonucleotide
  Antisense strand to SEQ ID NO: 2429868
auacagggcaagaacucac

SEQ ID NO: 2429870 - RNA, 19 nt, Artificial Sequence
  Description of Artificial Sequence: Synthetic oligonucleotide
  Sense strand starting at position 291 of SEQ ID NO: 1886837
gaguucuugcccuguauga

SEQ ID NO: 2429871 - RNA, 19 nt, Artificial Sequence
  Description of Artificial Sequence: Synthetic oligonucleotide
  Antisense strand to SEQ ID NO: 2429870
ucauacagggcaagaacuc

SEQ ID NO: 2429872 - RNA, 19 nt, Artificial Sequence
  Description of Artificial Sequence: Synthetic oligonucleotide
  Sense strand starting at position 293 of SEQ ID NO: 1886837
guucuugcccuguaugaag

SEQ ID NO: 2429873 - RNA, 19 nt, Artificial Sequence
  Description of Artificial Sequence: Synthetic oligonucleotide
  Antisense strand to SEQ ID NO: 2429872
cuucauacagggcaagaac

SEQ ID NO: 2429874 - RNA, 19 nt, Artificial Sequence
  Description of Artificial Sequence: Synthetic oligonucleotide
  Sense strand starting at position 453 of SEQ ID NO: 1886837
uacugauugucaggcagag

SEQ ID NO: 2429875 - RNA, 19 nt, Artificial Sequence
  Description of Artificial Sequence: Synthetic oligonucleotide
  Antisense strand to SEQ ID NO: 2429874
cucugccugacaaucagua

SEQ ID NO: 2429876 - RNA, 19 nt, Artificial Sequence
  Description of Artificial Sequence: Synthetic oligonucleotide
  Sense strand starting at position 455 of SEQ ID NO: 1886837
cugauugucaggcagaggu

SEQ ID NO: 2429877 - RNA, 19 nt, Artificial Sequence
  Description of Artificial Sequence: Synthetic oligonucleotide
  Antisense strand to SEQ ID NO: 2429876
accucugccugacaaucag

SEQ ID NO: 2429878 - RNA, 19 nt, Artificial Sequence
  Description of Artificial Sequence: Synthetic oligonucleotide
  Sense strand starting at position 491 of SEQ ID NO: 1886837
gguguaaccugcuacuucu

SEQ ID NO: 2429879 - RNA, 19 nt, Artificial Sequence
  Description of Artificial Sequence: Synthetic oligonucleotide
  Antisense strand to SEQ ID NO: 2429878
agaaguagcagguuacacc

SEQ ID NO: 2429880 - RNA, 19 nt, Artificial Sequence
  Description of Artificial Sequence: Synthetic oligonucleotide
  Sense strand starting at position 695 of SEQ ID NO: 1886837
gccagaauauuugguuuau

SEQ ID NO: 2429881 - RNA, 19 nt, Artificial Sequence
  Description of Artificial Sequence: Synthetic oligonucleotide
  Antisense strand to SEQ ID NO: 2429880
auaaaccaaauauucuggc

SEQ ID NO: 2429882 - RNA, 19 nt, Artificial Sequence
  Description of Artificial Sequence: Synthetic oligonucleotide
  Sense strand starting at position 701 of SEQ ID NO: 1886837
auauuugguuuaugaguca

SEQ ID NO: 2429883 - RNA, 19 nt, Artificial Sequence
  Description of Artificial Sequence: Synthetic oligonucleotide
  Antisense strand to SEQ ID NO: 2429882
ugacucauaaaccaaauau

SEQ ID NO: 2429884 - RNA, 19 nt, Artificial Sequence
  Description of Artificial Sequence: Synthetic oligonucleotide
  Sense strand starting at position 706 of SEQ ID NO: 1886837
ugguuuaugagucaugcua

SEQ ID NO: 2429885 - RNA, 19 nt, Artificial Sequence
  Description of Artificial Sequence: Synthetic oligonucleotide
  Antisense strand to SEQ ID NO: 2429884
uagcaugacucauaaacca

SEQ ID NO: 2429886 - RNA, 19 nt, Artificial Sequence
  Description of Artificial Sequence: Synthetic oligonucleotide
  Sense strand starting at position 708 of SEQ ID NO: 1886837
guuuaugagucaugcuaau

SEQ ID NO: 2429887 - RNA, 19 nt, Artificial Sequence
  Description of Artificial Sequence: Synthetic oligonucleotide
  Antisense strand to SEQ ID NO: 2429886
auuagcaugacucauaaac

SEQ ID NO: 2429888 - RNA, 19 nt, Artificial Sequence
  Description of Artificial Sequence: Synthetic oligonucleotide
  Sense strand starting at position 789 of SEQ ID NO: 1886837
uguccugguugcccugaaa

SEQ ID NO: 2429889 - RNA, 19 nt, Artificial Sequence
  Description of Artificial Sequence: Synthetic oligonucleotide
  Antisense strand to SEQ ID NO: 2429888
uuucagggcaaccaggaca

SEQ ID NO: 2429890 - RNA, 19 nt, Artificial Sequence
  Description of Artificial Sequence: Synthetic oligonucleotide
  Sense strand starting at position 813 of SEQ ID NO: 1886837
ggucacuuccuaggaacaa

SEQ ID NO: 2429891 - RNA, 19 nt, Artificial Sequence
  Description of Artificial Sequence: Synthetic oligonucleotide
  Antisense strand to SEQ ID NO: 2429890
uuguuccuaggaagugacc

SEQ ID NO: 2429892 - RNA, 19 nt, Artificial Sequence
  Description of Artificial Sequence: Synthetic oligonucleotide
  Sense strand starting at position 1058 of SEQ ID NO: 1886837
aguagagagucccugggua

SEQ ID NO: 2429893 - RNA, 19 nt, Artificial Sequence
  Description of Artificial Sequence: Synthetic oligonucleotide
  Antisense strand to SEQ ID NO: 2429892
uacccagggacucucuacu

SEQ ID NO: 2429894 - RNA, 19 nt, Artificial Sequence
  Description of Artificial Sequence: Synthetic oligonucleotide
  Sense strand starting at position 1101 of SEQ ID NO: 1886837
ugggcauucucuguuagca

SEQ ID NO: 2429895 - RNA, 19 nt, Artificial Sequence
  Description of Artificial Sequence: Synthetic oligonucleotide
  Antisense strand to SEQ ID NO: 2429894
ugcuaacagagaaugccca

SEQ ID NO: 2429896 - RNA, 19 nt, Artificial Sequence
  Description of Artificial Sequence: Synthetic oligonucleotide
  Sense strand starting at position 1127 of SEQ ID NO: 1886837
gagagaaguucccagcauc

SEQ ID NO: 2429897 - RNA, 19 nt, Artificial Sequence
  Description of Artificial Sequence: Synthetic oligonucleotide
  Antisense strand to SEQ ID NO: 2429896
gaugcugggaacuucucuc

SEQ ID NO: 2429898 - RNA, 19 nt, Artificial Sequence
  Description of Artificial Sequence: Synthetic oligonucleotide
  Sense strand starting at position 1440 of SEQ ID NO: 1886837
gagauuuggccuugcacuc

SEQ ID NO: 2429899 - RNA, 19 nt, Artificial Sequence
  Description of Artificial Sequence: Synthetic oligonucleotide
  Antisense strand to SEQ ID NO: 2429898
gagugcaaggccaaaucuc

SEQ ID NO: 2429900 - RNA, 19 nt, Artificial Sequence
  Description of Artificial Sequence: Synthetic oligonucleotide
  Sense strand starting at position 1507 of SEQ ID NO: 1886837
auaugacgcacuugggaua

SEQ ID NO: 2429901 - RNA, 19 nt, Artificial Sequence
  Description of Artificial Sequence: Synthetic oligonucleotide
  Antisense strand to SEQ ID NO: 2429900
uaucccaagugcgucauau

SEQ ID NO: 2429902 - RNA, 19 nt, Artificial Sequence
  Description of Artificial Sequence: Synthetic oligonucleotide
  Sense strand starting at position 1582 of SEQ ID NO: 1886837
ccgugagccucuugagcuu

SEQ ID NO: 2429903 - RNA, 19 nt, Artificial Sequence
  Description of Artificial Sequence: Synthetic oligonucleotide
  Antisense strand to SEQ ID NO: 2429902
aagcucaagaggcucacgg

SEQ ID NO: 2429904 - RNA, 19 nt, Artificial Sequence
  Description of Artificial Sequence: Synthetic oligonucleotide
  Sense strand starting at position 1608 of SEQ ID NO: 1886837
cugcucuuuccacaaguga

SEQ ID NO: 2429905 - RNA, 19 nt, Artificial Sequence
  Description of Artificial Sequence: Synthetic oligonucleotide
  Antisense strand to SEQ ID NO: 2429904
ucacuuguggaaagagcag

SEQ ID NO: 2429906 - RNA, 19 nt, Artificial Sequence
  Description of Artificial Sequence: Synthetic oligonucleotide
  Sense strand starting at position 1621 of SEQ ID NO: 1886837
aagugagaguucccuugau

SEQ ID NO: 2429907 - RNA, 19 nt, Artificial Sequence
  Description of Artificial Sequence: Synthetic oligonucleotide
  Antisense strand to SEQ ID NO: 2429906
aucaagggaacucucacuu

SEQ ID NO: 2429908 - RNA, 19 nt, Artificial Sequence
  Description of Artificial Sequence: Synthetic oligonucleotide
  Sense strand starting at position 1627 of SEQ ID NO: 1886837
gaguucccuugauagaagu

SEQ ID NO: 2429909 - RNA, 19 nt, Artificial Sequence
  Description of Artificial Sequence: Synthetic oligonucleotide
  Antisense strand to SEQ ID NO: 2429908
acuucuaucaagggaacuc

SEQ ID NO: 2429910 - RNA, 19 nt, Artificial Sequence
  Description of Artificial Sequence: Synthetic oligonucleotide
  Sense strand starting at position 1633 of SEQ ID NO: 1886837
ccuugauagaaguguugag

SEQ ID NO: 2429911 - RNA, 19 nt, Artificial Sequence
  Description of Artificial Sequence: Synthetic oligonucleotide
  Antisense strand to SEQ ID NO: 2429910
cucaacacuucuaucaagg

SEQ ID NO: 2429912 - RNA, 19 nt, Artificial Sequence
  Description of Artificial Sequence: Synthetic oligonucleotide
  Sense strand starting at position 2043 of SEQ ID NO: 1886837
guguguacuuuccugcacu

SEQ ID NO: 2429913 - RNA, 19 nt, Artificial Sequence
  Description of Artificial Sequence: Synthetic oligonucleotide
  Antisense strand to SEQ ID NO: 2429912
agugcaggaaaguacacac

SEQ ID NO: 2429914 - RNA, 19 nt, Artificial Sequence
  Description of Artificial Sequence: Synthetic oligonucleotide
  Sense strand starting at position 2044 of SEQ ID NO: 1886837
uguguacuuuccugcacua

SEQ ID NO: 2429915 - RNA, 19 nt, Artificial Sequence
  Description of Artificial Sequence: Synthetic oligonucleotide
  Antisense strand to SEQ ID NO: 2429914
uagugcaggaaaguacaca

SEQ ID NO: 2429916 - RNA, 19 nt, Artificial Sequence
  Description of Artificial Sequence: Synthetic oligonucleotide
  Sense strand starting at position 2046 of SEQ ID NO: 1886837
uguacuuuccugcacuaua

SEQ ID NO: 2429917 - RNA, 19 nt, Artificial Sequence
  Description of Artificial Sequence: Synthetic oligonucleotide
  Antisense strand to SEQ ID NO: 2429916
uauagugcaggaaaguaca

SEQ ID NO: 2429918 - RNA, 19 nt, Artificial Sequence
  Description of Artificial Sequence: Synthetic oligonucleotide
  Sense strand starting at position 2139 of SEQ ID NO: 1886837
aacaguuucucacggcauu

SEQ ID NO: 2429919 - RNA, 19 nt, Artificial Sequence
  Description of Artificial Sequence: Synthetic oligonucleotide
  Antisense strand to SEQ ID NO: 2429918
aaugccgugagaaacuguu

SEQ ID NO: 2429920 - RNA, 19 nt, Artificial Sequence
  Description of Artificial Sequence: Synthetic oligonucleotide
  Sense strand starting at position 2202 of SEQ ID NO: 1886837
guugccuccuuuccuagaa

SEQ ID NO: 2429921 - RNA, 19 nt, Artificial Sequence
  Description of Artificial Sequence: Synthetic oligonucleotide
  Antisense strand to SEQ ID NO: 2429920
uucuaggaaaggaggcaac

SEQ ID NO: 2429922 - RNA, 19 nt, Artificial Sequence
  Description of Artificial Sequence: Synthetic oligonucleotide
  Sense strand starting at position 2653 of SEQ ID NO: 1886837
gcgcuuccuauuccgugaa

SEQ ID NO: 2429923 - RNA, 19 nt, Artificial Sequence
  Description of Artificial Sequence: Synthetic oligonucleotide
  Antisense strand to SEQ ID NO: 2429922
uucacggaauaggaagcgc

SEQ ID NO: 2429924 - RNA, 19 nt, Artificial Sequence
  Description of Artificial Sequence: Synthetic oligonucleotide
  Sense strand starting at position 2656 of SEQ ID NO: 1886837
cuuccuauuccgugaaggu

SEQ ID NO: 2429925 - RNA, 19 nt, Artificial Sequence
  Description of Artificial Sequence: Synthetic oligonucleotide
  Antisense strand to SEQ ID NO: 2429924
accuucacggaauaggaag

SEQ ID NO: 2429926 - RNA, 19 nt, Artificial Sequence
  Description of Artificial Sequence: Synthetic oligonucleotide
  Sense strand starting at position 2657 of SEQ ID NO: 1886837
uuccuauuccgugaagguc

SEQ ID NO: 2429927 - RNA, 19 nt, Artificial Sequence
  Description of Artificial Sequence: Synthetic oligonucleotide
  Antisense strand to SEQ ID NO: 2429926
gaccuucacggaauaggaa

SEQ ID NO: 2429928 - RNA, 19 nt, Artificial Sequence
  Description of Artificial Sequence: Synthetic oligonucleotide
  Sense strand starting at position 2866 of SEQ ID NO: 1886837
ugcaauuccucccguuagu

SEQ ID NO: 2429929 - RNA, 19 nt, Artificial Sequence
  Description of Artificial Sequence: Synthetic oligonucleotide
  Antisense strand to SEQ ID NO: 2429928
acuaacgggaggaauugca

SEQ ID NO: 2429930 - RNA, 19 nt, Artificial Sequence
  Description of Artificial Sequence: Synthetic oligonucleotide
  Sense strand starting at position 2880 of SEQ ID NO: 1886837
uuaguauccacgugcagaa

SEQ ID NO: 2429931 - RNA, 19 nt, Artificial Sequence
  Description of Artificial Sequence: Synthetic oligonucleotide
  Antisense strand to SEQ ID NO: 2429930
uucugcacguggauacuaa

SEQ ID NO: 2429932 - RNA, 19 nt, Artificial Sequence
  Description of Artificial Sequence: Synthetic oligonucleotide
  Sense strand starting at position 3651 of SEQ ID NO: 1886837
ggcagauuccgugagucug

SEQ ID NO: 2429933 - RNA, 19 nt, Artificial Sequence
  Description of Artificial Sequence: Synthetic oligonucleotide
  Antisense strand to SEQ ID NO: 2429932
cagacucacggaaucugcc

SEQ ID NO: 2429934 - RNA, 19 nt, Artificial Sequence
  Description of Artificial Sequence: Synthetic oligonucleotide
  Sense strand starting at position 3756 of SEQ ID NO: 1886837
cuagucacuugguagcaga

SEQ ID NO: 2429935 - RNA, 19 nt, Artificial Sequence
  Description of Artificial Sequence: Synthetic oligonucleotide
  Antisense strand to SEQ ID NO: 2429934
ucugcuaccaagugacuag

SEQ ID NO: 2429936 - RNA, 19 nt, Artificial Sequence
  Description of Artificial Sequence: Synthetic oligonucleotide
  Sense strand starting at position 3965 of SEQ ID NO: 1886837
gcgcgcaucaccuuuggaa

SEQ ID NO: 2429937 - RNA, 19 nt, Artificial Sequence
  Description of Artificial Sequence: Synthetic oligonucleotide
  Antisense strand to SEQ ID NO: 2429936
uuccaaaggugaugcgcgc

SEQ ID NO: 2429938 - RNA, 19 nt, Artificial Sequence
  Description of Artificial Sequence: Synthetic oligonucleotide
  Sense strand starting at position 266 of SEQ ID NO: 1886838
ugaugucagccacagguuu

SEQ ID NO: 2429939 - RNA, 19 nt, Artificial Sequence
  Description of Artificial Sequence: Synthetic oligonucleotide
  Antisense strand to SEQ ID NO: 2429938
aaaccuguggcugacauca

SEQ ID NO: 2429940 - RNA, 19 nt, Artificial Sequence
  Description of Artificial Sequence: Synthetic oligonucleotide
  Sense strand starting at position 285 of SEQ ID NO: 1886838
gugugucugcuucucacau

SEQ ID NO: 2429941 - RNA, 19 nt, Artificial Sequence
  Description of Artificial Sequence: Synthetic oligonucleotide
  Antisense strand to SEQ ID NO: 2429940
augugagaagcagacacac

SEQ ID NO: 2429942 - RNA, 19 nt, Artificial Sequence
  Description of Artificial Sequence: Synthetic oligonucleotide
  Sense strand starting at position 305 of SEQ ID NO: 1886838
gcaggcgcucaacauuaua

SEQ ID NO: 2429943 - RNA, 19 nt, Artificial Sequence
  Description of Artificial Sequence: Synthetic oligonucleotide
  Antisense strand to SEQ ID NO: 2429942
uauaauguugagcgccugc

SEQ ID NO: 2429944 - RNA, 19 nt, Artificial Sequence
  Description of Artificial Sequence: Synthetic oligonucleotide
  Sense strand starting at position 308 of SEQ ID NO: 1886838
ggcgcucaacauuauauua

SEQ ID NO: 2429945 - RNA, 19 nt, Artificial Sequence
  Description of Artificial Sequence: Synthetic oligonucleotide
  Antisense strand to SEQ ID NO: 2429944
uaauauaauguugagcgcc

SEQ ID NO: 2429946 - RNA, 19 nt, Artificial Sequence
  Description of Artificial Sequence: Synthetic oligonucleotide
  Sense strand starting at position 376 of SEQ ID NO: 1886838
ggaacucucacuuguggaa

SEQ ID NO: 2429947 - RNA, 19 nt, Artificial Sequence
  Description of Artificial Sequence: Synthetic oligonucleotide
  Antisense strand to SEQ ID NO: 2429946
uuccacaagugagaguucc

SEQ ID NO: 2429948 - RNA, 19 nt, Artificial Sequence
  Description of Artificial Sequence: Synthetic oligonucleotide
  Sense strand starting at position 467 of SEQ ID NO: 1886838
acuccaaucugugucuuua

SEQ ID NO: 2429949 - RNA, 19 nt, Artificial Sequence
  Description of Artificial Sequence: Synthetic oligonucleotide
  Antisense strand to SEQ ID NO: 2429948
uaaagacacagauuggagu

SEQ ID NO: 2429950 - RNA, 19 nt, Artificial Sequence
  Description of Artificial Sequence: Synthetic oligonucleotide
  Sense strand starting at position 492 of SEQ ID NO: 1886838
gugcgucauaugcuucuuu

SEQ ID NO: 2429951 - RNA, 19 nt, Artificial Sequence
  Description of Artificial Sequence: Synthetic oligonucleotide
  Antisense strand to SEQ ID NO: 2429950
aaagaagcauaugacgcac

SEQ ID NO: 2429952 - RNA, 19 nt, Artificial Sequence
  Description of Artificial Sequence: Synthetic oligonucleotide
  Sense strand starting at position 632 of SEQ ID NO: 1886838
cuggauuagagguguguac

SEQ ID NO: 2429953 - RNA, 19 nt, Artificial Sequence
  Description of Artificial Sequence: Synthetic oligonucleotide
  Antisense strand to SEQ ID NO: 2429952
guacacaccucuaauccag

SEQ ID NO: 2429954 - RNA, 19 nt, Artificial Sequence
  Description of Artificial Sequence: Synthetic oligonucleotide
  Sense strand starting at position 1234 of SEQ ID NO: 1886838
ggaacaugcuccuuucugu

SEQ ID NO: 2429955 - RNA, 19 nt, Artificial Sequence
  Description of Artificial Sequence: Synthetic oligonucleotide
  Antisense strand to SEQ ID NO: 2429954
acagaaaggagcauguucc

SEQ ID NO: 2429956 - RNA, 19 nt, Artificial Sequence
  Description of Artificial Sequence: Synthetic oligonucleotide
  Sense strand starting at position 1278 of SEQ ID NO: 1886838
cuguaauuagcaugacuca

SEQ ID NO: 2429957 - RNA, 19 nt, Artificial Sequence
  Description of Artificial Sequence: Synthetic oligonucleotide
  Antisense strand to SEQ ID NO: 2429956
ugagucaugcuaauuacag

SEQ ID NO: 2429958 - RNA, 19 nt, Artificial Sequence
  Description of Artificial Sequence: Synthetic oligonucleotide
  Sense strand starting at position 1279 of SEQ ID NO: 1886838
uguaauuagcaugacucau

SEQ ID NO: 2429959 - RNA, 19 nt, Artificial Sequence
  Description of Artificial Sequence: Synthetic oligonucleotide
  Antisense strand to SEQ ID NO: 2429958
augagucaugcuaauuaca

SEQ ID NO: 2429960 - RNA, 19 nt, Artificial Sequence
  Description of Artificial Sequence: Synthetic oligonucleotide
  Sense strand starting at position 1305 of SEQ ID NO: 1886838
auauucuggcauugaacuu

SEQ ID NO: 2429961 - RNA, 19 nt, Artificial Sequence
  Description of Artificial Sequence: Synthetic oligonucleotide
  Antisense strand to SEQ ID NO: 2429960
aaguucaaugccagaauau

SEQ ID NO: 2429962 - RNA, 19 nt, Artificial Sequence
  Description of Artificial Sequence: Synthetic oligonucleotide
  Sense strand starting at position 1312 of SEQ ID NO: 1886838
ggcauugaacuuugcucau

SEQ ID NO: 2429963 - RNA, 19 nt, Artificial Sequence
  Description of Artificial Sequence: Synthetic oligonucleotide
  Antisense strand to SEQ ID NO: 2429962
augagcaaaguucaaugcc

SEQ ID NO: 2429964 - RNA, 19 nt, Artificial Sequence
  Description of Artificial Sequence: Synthetic oligonucleotide
  Sense strand starting at position 1550 of SEQ ID NO: 1886838
aucaguagccucuagagau

SEQ ID NO: 2429965 - RNA, 19 nt, Artificial Sequence
  Description of Artificial Sequence: Synthetic oligonucleotide
  Antisense strand to SEQ ID NO: 2429964
aucucuagaggcuacugau

SEQ ID NO: 2429966 - RNA, 19 nt, Artificial Sequence
  Description of Artificial Sequence: Synthetic oligonucleotide
  Sense strand starting at position 1731 of SEQ ID NO: 1886838
uagagagcagucuggaaga

SEQ ID NO: 2429967 - RNA, 19 nt, Artificial Sequence
  Description of Artificial Sequence: Synthetic oligonucleotide
  Antisense strand to SEQ ID NO: 2429966
ucuuccagacugcucucua

SEQ ID NO: 2429968 - RNA, 19 nt, Artificial Sequence
  Description of Artificial Sequence: Synthetic oligonucleotide
  Sense strand starting at position 1759 of SEQ ID NO: 1886838
gucagcucagcucaacaau

SEQ ID NO: 2429969 - RNA, 19 nt, Artificial Sequence
  Description of Artificial Sequence: Synthetic oligonucleotide
  Antisense strand to SEQ ID NO: 2429968
auuguugagcugagcugac

SEQ ID NO: 2429970 - RNA, 19 nt, Artificial Sequence
  Description of Artificial Sequence: Synthetic oligonucleotide
  Sense strand starting at position 1817 of SEQ ID NO: 1886838
gcucucaugagccagggau

SEQ ID NO: 2429971 - RNA, 19 nt, Artificial Sequence
  Description of Artificial Sequence: Synthetic oligonucleotide
  Antisense strand to SEQ ID NO: 2429970
aucccuggcucaugagagc

SEQ ID NO: 2429972 - RNA, 19 nt, Artificial Sequence
  Description of Artificial Sequence: Synthetic oligonucleotide
  Sense strand starting at position 1988 of SEQ ID NO: 1886838
ccucuaguucucugggaga

SEQ ID NO: 2429973 - RNA, 19 nt, Artificial Sequence
  Description of Artificial Sequence: Synthetic oligonucleotide
  Antisense strand to SEQ ID NO: 2429972
ucucccagagaacuagagg

SEQ ID NO: 2429974 - RNA, 19 nt, Artificial Sequence
  Description of Artificial Sequence: Synthetic oligonucleotide
  Sense strand starting at position 2049 of SEQ ID NO: 1886838
ugggaaggaucuuuaucuc

SEQ ID NO: 2429975 - RNA, 19 nt, Artificial Sequence
  Description of Artificial Sequence: Synthetic oligonucleotide
  Antisense strand to SEQ ID NO: 2429974
gagauaaagauccuuccca

SEQ ID NO: 2429976 - RNA, 19 nt, Artificial Sequence
  Description of Artificial Sequence: Synthetic oligonucleotide
  Sense strand starting at position 2063 of SEQ ID NO: 1886838
aucucuggguccuugucaa

SEQ ID NO: 2429977 - RNA, 19 nt, Artificial Sequence
  Description of Artificial Sequence: Synthetic oligonucleotide
  Antisense strand to SEQ ID NO: 2429976
uugacaaggacccagagau

SEQ ID NO: 2429978 - RNA, 19 nt, Artificial Sequence
  Description of Artificial Sequence: Synthetic oligonucleotide
  Sense strand starting at position 2109 of SEQ ID NO: 1886838
gggugauaugaguggcucu

SEQ ID NO: 2429979 - RNA, 19 nt, Artificial Sequence
  Description of Artificial Sequence: Synthetic oligonucleotide
  Antisense strand to SEQ ID NO: 2429978
agagccacucauaucaccc

SEQ ID NO: 2429980 - RNA, 19 nt, Artificial Sequence
  Description of Artificial Sequence: Synthetic oligonucleotide
  Sense strand starting at position 2153 of SEQ ID NO: 1886838
ccuguucuugccuacauuu

SEQ ID NO: 2429981 - RNA, 19 nt, Artificial Sequence
  Description of Artificial Sequence: Synthetic oligonucleotide
  Antisense strand to SEQ ID NO: 2429980
aaauguaggcaagaacagg

SEQ ID NO: 2429982 - RNA, 19 nt, Artificial Sequence
  Description of Artificial Sequence: Synthetic oligonucleotide
  Sense strand starting at position 2877 of SEQ ID NO: 1886838
ggaaggaucuggguggguu

SEQ ID NO: 2429983 - RNA, 19 nt, Artificial Sequence
  Description of Artificial Sequence: Synthetic oligonucleotide
  Antisense strand to SEQ ID NO: 2429982
aacccacccagauccuucc

SEQ ID NO: 2429984 - RNA, 19 nt, Artificial Sequence
  Description of Artificial Sequence: Synthetic oligonucleotide
  Sense strand starting at position 2878 of SEQ ID NO: 1886838
gaaggaucuggguggguua

SEQ ID NO: 2429985 - RNA, 19 nt, Artificial Sequence
  Description of Artificial Sequence: Synthetic oligonucleotide
  Antisense strand to SEQ ID NO: 2429984
uaacccacccagauccuuc

SEQ ID NO: 2429986 - RNA, 19 nt, Artificial Sequence
  Description of Artificial Sequence: Synthetic oligonucleotide
  Sense strand starting at position 3003 of SEQ ID NO: 1886838
uguggugcgugaacuuaga

SEQ ID NO: 2429987 - RNA, 19 nt, Artificial Sequence
  Description of Artificial Sequence: Synthetic oligonucleotide
  Antisense strand to SEQ ID NO: 2429986
ucuaaguucacgcaccaca

SEQ ID NO: 2429988 - RNA, 19 nt, Artificial Sequence
  Description of Artificial Sequence: Synthetic oligonucleotide
  Sense strand starting at position 3066 of SEQ ID NO: 1886838
ggcacuggucgggagagaa

SEQ ID NO: 2429989 - RNA, 19 nt, Artificial Sequence
  Description of Artificial Sequence: Synthetic oligonucleotide
  Antisense strand to SEQ ID NO: 2429988
uucucucccgaccagugcc

SEQ ID NO: 2429990 - RNA, 19 nt, Artificial Sequence
  Description of Artificial Sequence: Synthetic oligonucleotide
  Sense strand starting at position 3351 of SEQ ID NO: 1886838
agggauaucuuagcacauu

SEQ ID NO: 2429991 - RNA, 19 nt, Artificial Sequence
  Description of Artificial Sequence: Synthetic oligonucleotide
  Antisense strand to SEQ ID NO: 2429990
aaugugcuaagauaucccu

SEQ ID NO: 2429992 - RNA, 19 nt, Artificial Sequence
  Description of Artificial Sequence: Synthetic oligonucleotide
  Sense strand starting at position 3362 of SEQ ID NO: 1886838
agcacauugcaucaaggaa

SEQ ID NO: 2429993 - RNA, 19 nt, Artificial Sequence
  Description of Artificial Sequence: Synthetic oligonucleotide
  Antisense strand to SEQ ID NO: 2429992
uuccuugaugcaaugugcu

SEQ ID NO: 2429994 - RNA, 19 nt, Artificial Sequence
  Description of Artificial Sequence: Synthetic oligonucleotide
  Sense strand starting at position 3436 of SEQ ID NO: 1886838
cgguaauccucuguugaau

SEQ ID NO: 2429995 - RNA, 19 nt, Artificial Sequence
  Description of Artificial Sequence: Synthetic oligonucleotide
  Antisense strand to SEQ ID NO: 2429994
auucaacagaggauuaccg

SEQ ID NO: 2429996 - RNA, 19 nt, Artificial Sequence
  Description of Artificial Sequence: Synthetic oligonucleotide
  Sense strand starting at position 3442 of SEQ ID NO: 1886838
uccucuguugaaugaugaa

SEQ ID NO: 2429997 - RNA, 19 nt, Artificial Sequence
  Description of Artificial Sequence: Synthetic oligonucleotide
  Antisense strand to SEQ ID NO: 2429996
uucaucauucaacagagga

SEQ ID NO: 2429998 - RNA, 19 nt, Artificial Sequence
  Description of Artificial Sequence: Synthetic oligonucleotide
  Sense strand starting at position 3480 of SEQ ID NO: 1886838
gauacaguccucgaagcca

SEQ ID NO: 2429999 - RNA, 19 nt, Artificial Sequence
  Description of Artificial Sequence: Synthetic oligonucleotide
  Antisense strand to SEQ ID NO: 2429998
uggcuucgaggacuguauc

SEQ ID NO: 2430000 - RNA, 19 nt, Artificial Sequence
  Description of Artificial Sequence: Synthetic oligonucleotide
  Sense strand starting at position 3512 of SEQ ID NO: 1886838
cgguuccaccuauaaacaa

SEQ ID NO: 2430001 - RNA, 19 nt, Artificial Sequence
  Description of Artificial Sequence: Synthetic oligonucleotide
  Antisense strand to SEQ ID NO: 2430000
uuguuuauagguggaaccg

SEQ ID NO: 2430002 - RNA, 19 nt, Artificial Sequence
  Description of Artificial Sequence: Synthetic oligonucleotide
  Sense strand starting at position 3654 of SEQ ID NO: 1886838
guguaaugugcuuugcugu

SEQ ID NO: 2430003 - RNA, 19 nt, Artificial Sequence
  Description of Artificial Sequence: Synthetic oligonucleotide
  Antisense strand to SEQ ID NO: 2430002
acagcaaagcacauuacac

SEQ ID NO: 2430004 - RNA, 19 nt, Artificial Sequence
  Description of Artificial Sequence: Synthetic oligonucleotide
  Sense strand starting at position 3660 of SEQ ID NO: 1886838
ugugcuuugcugucggaca

SEQ ID NO: 2430005 - RNA, 19 nt, Artificial Sequence
  Description of Artificial Sequence: Synthetic oligonucleotide
  Antisense strand to SEQ ID NO: 2430004
uguccgacagcaaagcaca

SEQ ID NO: 2430006 - RNA, 19 nt, Artificial Sequence
  Description of Artificial Sequence: Synthetic oligonucleotide
  Sense strand starting at position 3674 of SEQ ID NO: 1886838
ggacacaccuaggucuaau

SEQ ID NO: 2430007 - RNA, 19 nt, Artificial Sequence
  Description of Artificial Sequence: Synthetic oligonucleotide
  Antisense strand to SEQ ID NO: 2430006
auuagaccuaggugugucc

SEQ ID NO: 2430008 - RNA, 19 nt, Artificial Sequence
  Description of Artificial Sequence: Synthetic oligonucleotide
  Sense strand starting at position 3685 of SEQ ID NO: 1886838
ggucuaaucugagcuccag

SEQ ID NO: 2430009 - RNA, 19 nt, Artificial Sequence
  Description of Artificial Sequence: Synthetic oligonucleotide
  Antisense strand to SEQ ID NO: 2430008
cuggagcucagauuagacc

SEQ ID NO: 2430010 - RNA, 19 nt, Artificial Sequence
  Description of Artificial Sequence: Synthetic oligonucleotide
  Sense strand starting at position 3751 of SEQ ID NO: 1886838
gcuguuugcgcauucuaag

SEQ ID NO: 2430011 - RNA, 19 nt, Artificial Sequence
  Description of Artificial Sequence: Synthetic oligonucleotide
  Antisense strand to SEQ ID NO: 2430010
cuuagaaugcgcaaacagc

SEQ ID NO: 2430012 - RNA, 19 nt, Artificial Sequence
  Description of Artificial Sequence: Synthetic oligonucleotide
  Sense strand starting at position 3801 of SEQ ID NO: 1886838
ggaucaagcuuucuaagga

SEQ ID NO: 2430013 - RNA, 19 nt, Artificial Sequence
  Description of Artificial Sequence: Synthetic oligonucleotide
  Antisense strand to SEQ ID NO: 2430012
uccuuagaaagcuugaucc

SEQ ID NO: 2430014 - RNA, 19 nt, Artificial Sequence
  Description of Artificial Sequence: Synthetic oligonucleotide
  Sense strand starting at position 3905 of SEQ ID NO: 1886838
aggaaucucugauaaacau

SEQ ID NO: 2430015 - RNA, 19 nt, Artificial Sequence
  Description of Artificial Sequence: Synthetic oligonucleotide
  Antisense strand to SEQ ID NO: 2430014
auguuuaucagagauuccu

SEQ ID NO: 2430016 - RNA, 19 nt, Artificial Sequence
  Description of Artificial Sequence: Synthetic oligonucleotide
  Sense strand starting at position 3912 of SEQ ID NO: 1886838
ucugauaaacauugggcua

SEQ ID NO: 2430017 - RNA, 19 nt, Artificial Sequence
  Description of Artificial Sequence: Synthetic oligonucleotide
  Antisense strand to SEQ ID NO: 2430016
uagcccaauguuuaucaga

SEQ ID NO: 2430018 - RNA, 19 nt, Artificial Sequence
  Description of Artificial Sequence: Synthetic oligonucleotide
  Sense strand starting at position 297 of SEQ ID NO: 1886839
aaccuaucugcggagucua

SEQ ID NO: 2430019 - RNA, 19 nt, Artificial Sequence
  Description of Artificial Sequence: Synthetic oligonucleotide
  Antisense strand to SEQ ID NO: 2430018
uagacuccgcagauagguu

SEQ ID NO: 2430020 - RNA, 19 nt, Artificial Sequence
  Description of Artificial Sequence: Synthetic oligonucleotide
  Sense strand starting at position 332 of SEQ ID NO: 1886839
ccgaguccuccuuagugaa

SEQ ID NO: 2430021 - RNA, 19 nt, Artificial Sequence
  Description of Artificial Sequence: Synthetic oligonucleotide
  Antisense strand to SEQ ID NO: 2430020
uucacuaaggaggacucgg

SEQ ID NO: 2430022 - RNA, 19 nt, Artificial Sequence
  Description of Artificial Sequence: Synthetic oligonucleotide
  Sense strand starting at position 334 of SEQ ID NO: 1886839
gaguccuccuuagugaaca

SEQ ID NO: 2430023 - RNA, 19 nt, Artificial Sequence
  Description of Artificial Sequence: Synthetic oligonucleotide
  Antisense strand to SEQ ID NO: 2430022
uguucacuaaggaggacuc

SEQ ID NO: 2430024 - RNA, 19 nt, Artificial Sequence
  Description of Artificial Sequence: Synthetic oligonucleotide
  Sense strand starting at position 347 of SEQ ID NO: 1886839
ugaacacacugacaguauu

SEQ ID NO: 2430025 - RNA, 19 nt, Artificial Sequence
  Description of Artificial Sequence: Synthetic oligonucleotide
  Antisense strand to SEQ ID NO: 2430024
aauacugucaguguguuca

SEQ ID NO: 2430026 - RNA, 19 nt, Artificial Sequence
  Description of Artificial Sequence: Synthetic oligonucleotide
  Sense strand starting at position 423 of SEQ ID NO: 1886839
acucuuuauuugugaaagg

SEQ ID NO: 2430027 - RNA, 19 nt, Artificial Sequence
  Description of Artificial Sequence: Synthetic oligonucleotide
  Antisense strand to SEQ ID NO: 2430026
ccuuucacaaauaaagagu

SEQ ID NO: 2430028 - RNA, 19 nt, Artificial Sequence
  Description of Artificial Sequence: Synthetic oligonucleotide
  Sense strand starting at position 559 of SEQ ID NO: 1886839
cccugcaucgaauggagau

SEQ ID NO: 2430029 - RNA, 19 nt, Artificial Sequence
  Description of Artificial Sequence: Synthetic oligonucleotide
  Antisense strand to SEQ ID NO: 2430028
aucuccauucgaugcaggg

SEQ ID NO: 2430030 - RNA, 19 nt, Artificial Sequence
  Description of Artificial Sequence: Synthetic oligonucleotide
  Sense strand starting at position 700 of SEQ ID NO: 1886839
gccggaaucuccuuguugu

SEQ ID NO: 2430031 - RNA, 19 nt, Artificial Sequence
  Description of Artificial Sequence: Synthetic oligonucleotide
  Antisense strand to SEQ ID NO: 2430030
acaacaaggagauuccggc

SEQ ID NO: 2430032 - RNA, 19 nt, Artificial Sequence
  Description of Artificial Sequence: Synthetic oligonucleotide
  Sense strand starting at position 701 of SEQ ID NO: 1886839
ccggaaucuccuuguugug

SEQ ID NO: 2430033 - RNA, 19 nt, Artificial Sequence
  Description of Artificial Sequence: Synthetic oligonucleotide
  Antisense strand to SEQ ID NO: 2430032
cacaacaaggagauuccgg

SEQ ID NO: 2430034 - RNA, 19 nt, Artificial Sequence
  Description of Artificial Sequence: Synthetic oligonucleotide
  Sense strand starting at position 837 of SEQ ID NO: 1886839
uagaauccgccgcaaacuu

SEQ ID NO: 2430035 - RNA, 19 nt, Artificial Sequence
  Description of Artificial Sequence: Synthetic oligonucleotide
  Antisense strand to SEQ ID NO: 2430034
aaguuugcggcggauucua

SEQ ID NO: 2430036 - RNA, 19 nt, Artificial Sequence
  Description of Artificial Sequence: Synthetic oligonucleotide
  Sense strand starting at position 2664 of SEQ ID NO: 1886839
cccgaagaaucagaguauu

SEQ ID NO: 2430037 - RNA, 19 nt, Artificial Sequence
  Description of Artificial Sequence: Synthetic oligonucleotide
  Antisense strand to SEQ ID NO: 2430036
aauacucugauucuucggg

SEQ ID NO: 2430038 - RNA, 19 nt, Artificial Sequence
  Description of Artificial Sequence: Synthetic oligonucleotide
  Sense strand starting at position 2854 of SEQ ID NO: 1886839
aggucuccaccugguuaau

SEQ ID NO: 2430039 - RNA, 19 nt, Artificial Sequence
  Description of Artificial Sequence: Synthetic oligonucleotide
  Antisense strand to SEQ ID NO: 2430038
auuaaccagguggagaccu

SEQ ID NO: 2430040 - RNA, 19 nt, Artificial Sequence
  Description of Artificial Sequence: Synthetic oligonucleotide
  Sense strand starting at position 2961 of SEQ ID NO: 1886839
gggcccagucuuggagaaa

SEQ ID NO: 2430041 - RNA, 19 nt, Artificial Sequence
  Description of Artificial Sequence: Synthetic oligonucleotide
  Antisense strand to SEQ ID NO: 2430040
uuucuccaagacugggccc

SEQ ID NO: 2430042 - RNA, 19 nt, Artificial Sequence
  Description of Artificial Sequence: Synthetic oligonucleotide
  Sense strand starting at position 2962 of SEQ ID NO: 1886839
ggcccagucuuggagaaac

SEQ ID NO: 2430043 - RNA, 19 nt, Artificial Sequence
  Description of Artificial Sequence: Synthetic oligonucleotide
  Antisense strand to SEQ ID NO: 2430042
guuucuccaagacugggcc

SEQ ID NO: 2430044 - RNA, 19 nt, Artificial Sequence
  Description of Artificial Sequence: Synthetic oligonucleotide
  Sense strand starting at position 3018 of SEQ ID NO: 1886839
gggcguggccuccacaaau

SEQ ID NO: 2430045 - RNA, 19 nt, Artificial Sequence
  Description of Artificial Sequence: Synthetic oligonucleotide
  Antisense strand to SEQ ID NO: 2430044
auuuguggaggccacgccc

SEQ ID NO: 2430046 - RNA, 19 nt, Artificial Sequence
  Description of Artificial Sequence: Synthetic oligonucleotide
  Sense strand starting at position 3029 of SEQ ID NO: 1886839
ccacaaaucucuugggcuu

SEQ ID NO: 2430047 - RNA, 19 nt, Artificial Sequence
  Description of Artificial Sequence: Synthetic oligonucleotide
  Antisense strand to SEQ ID NO: 2430046
aagcccaagagauuugugg

SEQ ID NO: 2430048 - RNA, 19 nt, Artificial Sequence
  Description of Artificial Sequence: Synthetic oligonucleotide
  Sense strand starting at position 3031 of SEQ ID NO: 1886839
acaaaucucuugggcuuau

SEQ ID NO: 2430049 - RNA, 19 nt, Artificial Sequence
  Description of Artificial Sequence: Synthetic oligonucleotide
  Antisense strand to SEQ ID NO: 2430048
auaagcccaagagauuugu

SEQ ID NO: 2430050 - RNA, 19 nt, Artificial Sequence
  Description of Artificial Sequence: Synthetic oligonucleotide
  Sense strand starting at position 3041 of SEQ ID NO: 1886839
ugggcuuauuggucauacu

SEQ ID NO: 2430051 - RNA, 19 nt, Artificial Sequence
  Description of Artificial Sequence: Synthetic oligonucleotide
  Antisense strand to SEQ ID NO: 2430050
aguaugaccaauaagccca

SEQ ID NO: 2430052 - RNA, 19 nt, Artificial Sequence
  Description of Artificial Sequence: Synthetic oligonucleotide
  Sense strand starting at position 3050 of SEQ ID NO: 1886839
uggucauacucccgaguca

SEQ ID NO: 2430053 - RNA, 19 nt, Artificial Sequence
  Description of Artificial Sequence: Synthetic oligonucleotide
  Antisense strand to SEQ ID NO: 2430052
ugacucgggaguaugacca

SEQ ID NO: 2430054 - RNA, 19 nt, Artificial Sequence
  Description of Artificial Sequence: Synthetic oligonucleotide
  Sense strand starting at position 3051 of SEQ ID NO: 1886839
ggucauacucccgagucaa

SEQ ID NO: 2430055 - RNA, 19 nt, Artificial Sequence
  Description of Artificial Sequence: Synthetic oligonucleotide
  Antisense strand to SEQ ID NO: 2430054
uugacucgggaguaugacc

SEQ ID NO: 2430056 - RNA, 19 nt, Artificial Sequence
  Description of Artificial Sequence: Synthetic oligonucleotide
  Sense strand starting at position 3061 of SEQ ID NO: 1886839
ccgagucaauucugagacu

SEQ ID NO: 2430057 - RNA, 19 nt, Artificial Sequence
  Description of Artificial Sequence: Synthetic oligonucleotide
  Antisense strand to SEQ ID NO: 2430056
agucucagaauugacucgg

SEQ ID NO: 2430058 - RNA, 19 nt, Artificial Sequence
  Description of Artificial Sequence: Synthetic oligonucleotide
  Sense strand starting at position 3062 of SEQ ID NO: 1886839
cgagucaauucugagacuu

SEQ ID NO: 2430059 - RNA, 19 nt, Artificial Sequence
  Description of Artificial Sequence: Synthetic oligonucleotide
  Antisense strand to SEQ ID NO: 2430058
aagucucagaauugacucg

SEQ ID NO: 2430060 - RNA, 19 nt, Artificial Sequence
  Description of Artificial Sequence: Synthetic oligonucleotide
  Sense strand starting at position 3342 of SEQ ID NO: 1886839
gcuuuaucgacucgaccuu

SEQ ID NO: 2430061 - RNA, 19 nt, Artificial Sequence
  Description of Artificial Sequence: Synthetic oligonucleotide
  Antisense strand to SEQ ID NO: 2430060
aaggucgagucgauaaagc

SEQ ID NO: 2430062 - RNA, 19 nt, Artificial Sequence
  Description of Artificial Sequence: Synthetic oligonucleotide
  Sense strand starting at position 3395 of SEQ ID NO: 1886839
gccucaguuucucuuaagu

SEQ ID NO: 2430063 - RNA, 19 nt, Artificial Sequence
  Description of Artificial Sequence: Synthetic oligonucleotide
  Antisense strand to SEQ ID NO: 2430062
acuuaagagaaacugaggc

SEQ ID NO: 2430064 - RNA, 19 nt, Artificial Sequence
  Description of Artificial Sequence: Synthetic oligonucleotide
  Sense strand starting at position 3414 of SEQ ID NO: 1886839
cccuauguggcuuagggaa

SEQ ID NO: 2430065 - RNA, 19 nt, Artificial Sequence
  Description of Artificial Sequence: Synthetic oligonucleotide
  Antisense strand to SEQ ID NO: 2430064
uucccuaagccacauaggg

SEQ ID NO: 2430066 - RNA, 19 nt, Artificial Sequence
  Description of Artificial Sequence: Synthetic oligonucleotide
  Sense strand starting at position 3430 of SEQ ID NO: 1886839
gaaagaguguccgcggaac

SEQ ID NO: 2430067 - RNA, 19 nt, Artificial Sequence
  Description of Artificial Sequence: Synthetic oligonucleotide
  Antisense strand to SEQ ID NO: 2430066
guuccgcggacacucuuuc

SEQ ID NO: 2430068 - RNA, 19 nt, Artificial Sequence
  Description of Artificial Sequence: Synthetic oligonucleotide
  Sense strand starting at position 3772 of SEQ ID NO: 1886839
aguucccucuccggagauu

SEQ ID NO: 2430069 - RNA, 19 nt, Artificial Sequence
  Description of Artificial Sequence: Synthetic oligonucleotide
  Antisense strand to SEQ ID NO: 2430068
aaucuccggagagggaacu

SEQ ID NO: 2430070 - RNA, 19 nt, Artificial Sequence
  Description of Artificial Sequence: Synthetic oligonucleotide
  Sense strand starting at position 274 of SEQ ID NO: 1886840
cgccgaauacucugauucu

SEQ ID NO: 2430071 - RNA, 19 nt, Artificial Sequence
  Description of Artificial Sequence: Synthetic oligonucleotide
  Antisense strand to SEQ ID NO: 2430070
agaaucagaguauucggcg

SEQ ID NO: 2430072 - RNA, 19 nt, Artificial Sequence
  Description of Artificial Sequence: Synthetic oligonucleotide
  Sense strand starting at position 275 of SEQ ID NO: 1886840
gccgaauacucugauucuu

SEQ ID NO: 2430073 - RNA, 19 nt, Artificial Sequence
  Description of Artificial Sequence: Synthetic oligonucleotide
  Antisense strand to SEQ ID NO: 2430072
aagaaucagaguauucggc

SEQ ID NO: 2430074 - RNA, 19 nt, Artificial Sequence
  Description of Artificial Sequence: Synthetic oligonucleotide
  Sense strand starting at position 1583 of SEQ ID NO: 1886840
gucuguaacccauauccuu

SEQ ID NO: 2430075 - RNA, 19 nt, Artificial Sequence
  Description of Artificial Sequence: Synthetic oligonucleotide
  Antisense strand to SEQ ID NO: 2430074
aaggauauggguuacagac

SEQ ID NO: 2430076 - RNA, 19 nt, Artificial Sequence
  Description of Artificial Sequence: Synthetic oligonucleotide
  Sense strand starting at position 1922 of SEQ ID NO: 1886840
gucgucauccuccagaugu

SEQ ID NO: 2430077 - RNA, 19 nt, Artificial Sequence
  Description of Artificial Sequence: Synthetic oligonucleotide
  Antisense strand to SEQ ID NO: 2430076
acaucuggaggaugacgac

SEQ ID NO: 2430078 - RNA, 19 nt, Artificial Sequence
  Description of Artificial Sequence: Synthetic oligonucleotide
  Sense strand starting at position 1993 of SEQ ID NO: 1886840
uggguuugguuuccgaguu

SEQ ID NO: 2430079 - RNA, 19 nt, Artificial Sequence
  Description of Artificial Sequence: Synthetic oligonucleotide
  Antisense strand to SEQ ID NO: 2430078
aacucggaaaccaaaccca

SEQ ID NO: 2430080 - RNA, 19 nt, Artificial Sequence
  Description of Artificial Sequence: Synthetic oligonucleotide
  Sense strand starting at position 1994 of SEQ ID NO: 1886840
ggguuugguuuccgaguuu

SEQ ID NO: 2430081 - RNA, 19 nt, Artificial Sequence
  Description of Artificial Sequence: Synthetic oligonucleotide
  Antisense strand to SEQ ID NO: 2430080
aaacucggaaaccaaaccc

SEQ ID NO: 2430082 - RNA, 19 nt, Artificial Sequence
  Description of Artificial Sequence: Synthetic oligonucleotide
  Sense strand starting at position 2068 of SEQ ID NO: 1886840
accgcaaucuccuggguuu

SEQ ID NO: 2430083 - RNA, 19 nt, Artificial Sequence
  Description of Artificial Sequence: Synthetic oligonucleotide
  Antisense strand to SEQ ID NO: 2430082
aaacccaggagauugcggu

SEQ ID NO: 2430084 - RNA, 19 nt, Artificial Sequence
  Description of Artificial Sequence: Synthetic oligonucleotide
  Sense strand starting at position 2114 of SEQ ID NO: 1886840
ggcggauucuagggucuga

SEQ ID NO: 2430085 - RNA, 19 nt, Artificial Sequence
  Description of Artificial Sequence: Synthetic oligonucleotide
  Antisense strand to SEQ ID NO: 2430084
ucagacccuagaauccgcc

SEQ ID NO: 2430086 - RNA, 19 nt, Artificial Sequence
  Description of Artificial Sequence: Synthetic oligonucleotide
  Sense strand starting at position 2394 of SEQ ID NO: 1886840
gaugcagggugcuuaagau

SEQ ID NO: 2430087 - RNA, 19 nt, Artificial Sequence
  Description of Artificial Sequence: Synthetic oligonucleotide
  Antisense strand to SEQ ID NO: 2430086
aucuuaagcacccugcauc

SEQ ID NO: 2430088 - RNA, 19 nt, Artificial Sequence
  Description of Artificial Sequence: Synthetic oligonucleotide
  Sense strand starting at position 2449 of SEQ ID NO: 1886840
agggaaagacugugucaag

SEQ ID NO: 2430089 - RNA, 19 nt, Artificial Sequence
  Description of Artificial Sequence: Synthetic oligonucleotide
  Antisense strand to SEQ ID NO: 2430088
cuugacacagucuuucccu

SEQ ID NO: 2430090 - RNA, 19 nt, Artificial Sequence
  Description of Artificial Sequence: Synthetic oligonucleotide
  Sense strand starting at position 2592 of SEQ ID NO: 1886840
caguaauacugucagugug

SEQ ID NO: 2430091 - RNA, 19 nt, Artificial Sequence
  Description of Artificial Sequence: Synthetic oligonucleotide
  Antisense strand to SEQ ID NO: 2430090
cacacugacaguauuacug

SEQ ID NO: 2430092 - RNA, 19 nt, Artificial Sequence
  Description of Artificial Sequence: Synthetic oligonucleotide
  Sense strand starting at position 2594 of SEQ ID NO: 1886840
guaauacugucaguguguu

SEQ ID NO: 2430093 - RNA, 19 nt, Artificial Sequence
  Description of Artificial Sequence: Synthetic oligonucleotide
  Antisense strand to SEQ ID NO: 2430092
aacacacugacaguauuac

SEQ ID NO: 2430094 - RNA, 19 nt, Artificial Sequence
  Description of Artificial Sequence: Synthetic oligonucleotide
  Sense strand starting at position 2642 of SEQ ID NO: 1886840
agcguagacuccgcagaua

SEQ ID NO: 2430095 - RNA, 19 nt, Artificial Sequence
  Description of Artificial Sequence: Synthetic oligonucleotide
  Antisense strand to SEQ ID NO: 2430094
uaucugcggagucuacgcu

SEQ ID NO: 2430096 - RNA, 19 nt, Artificial Sequence
  Description of Artificial Sequence: Synthetic oligonucleotide
  Sense strand starting at position 2900 of SEQ ID NO: 1886840
cucagagguucuuauagac

SEQ ID NO: 2430097 - RNA, 19 nt, Artificial Sequence
  Description of Artificial Sequence: Synthetic oligonucleotide
  Antisense strand to SEQ ID NO: 2430096
gucuauaagaaccucugag

SEQ ID NO: 2430098 - RNA, 19 nt, Artificial Sequence
  Description of Artificial Sequence: Synthetic oligonucleotide
  Sense strand starting at position 3089 of SEQ ID NO: 1886840
ccuugugggucuuuaggaa

SEQ ID NO: 2430099 - RNA, 19 nt, Artificial Sequence
  Description of Artificial Sequence: Synthetic oligonucleotide
  Antisense strand to SEQ ID NO: 2430098
uuccuaaagacccacaagg

SEQ ID NO: 2430100 - RNA, 19 nt, Artificial Sequence
  Description of Artificial Sequence: Synthetic oligonucleotide
  Sense strand starting at position 3186 of SEQ ID NO: 1886840
cucagaggucuguguucuu

SEQ ID NO: 2430101 - RNA, 19 nt, Artificial Sequence
  Description of Artificial Sequence: Synthetic oligonucleotide
  Antisense strand to SEQ ID NO: 2430100
aagaacacagaccucugag

SEQ ID NO: 2430102 - RNA, 19 nt, Artificial Sequence
  Description of Artificial Sequence: Synthetic oligonucleotide
  Sense strand starting at position 3191 of SEQ ID NO: 1886840
aggucuguguucuugcuga

SEQ ID NO: 2430103 - RNA, 19 nt, Artificial Sequence
  Description of Artificial Sequence: Synthetic oligonucleotide
  Antisense strand to SEQ ID NO: 2430102
ucagcaagaacacagaccu

SEQ ID NO: 2430104 - RNA, 19 nt, Artificial Sequence
  Description of Artificial Sequence: Synthetic oligonucleotide
  Sense strand starting at position 3195 of SEQ ID NO: 1886840
cuguguucuugcugaauag

SEQ ID NO: 2430105 - RNA, 19 nt, Artificial Sequence
  Description of Artificial Sequence: Synthetic oligonucleotide
  Antisense strand to SEQ ID NO: 2430104
cuauucagcaagaacacag

SEQ ID NO: 2430106 - RNA, 19 nt, Artificial Sequence
  Description of Artificial Sequence: Synthetic oligonucleotide
  Sense strand starting at position 3205 of SEQ ID NO: 1886840
gcugaauaggcacaaucuu

SEQ ID NO: 2430107 - RNA, 19 nt, Artificial Sequence
  Description of Artificial Sequence: Synthetic oligonucleotide
  Antisense strand to SEQ ID NO: 2430106
aagauugugccuauucagc

SEQ ID NO: 2430108 - RNA, 19 nt, Artificial Sequence
  Description of Artificial Sequence: Synthetic oligonucleotide
  Sense strand starting at position 3211 of SEQ ID NO: 1886840
uaggcacaaucuugagguu

SEQ ID NO: 2430109 - RNA, 19 nt, Artificial Sequence
  Description of Artificial Sequence: Synthetic oligonucleotide
  Antisense strand to SEQ ID NO: 2430108
aaccucaagauugugccua

SEQ ID NO: 2430110 - RNA, 19 nt, Artificial Sequence
  Description of Artificial Sequence: Synthetic oligonucleotide
  Sense strand starting at position 3212 of SEQ ID NO: 1886840
aggcacaaucuugagguuu

SEQ ID NO: 2430111 - RNA, 19 nt, Artificial Sequence
  Description of Artificial Sequence: Synthetic oligonucleotide
  Antisense strand to SEQ ID NO: 2430110
aaaccucaagauugugccu

SEQ ID NO: 2430112 - RNA, 19 nt, Artificial Sequence
  Description of Artificial Sequence: Synthetic oligonucleotide
  Sense strand starting at position 3214 of SEQ ID NO: 1886840
gcacaaucuugagguuuga

SEQ ID NO: 2430113 - RNA, 19 nt, Artificial Sequence
  Description of Artificial Sequence: Synthetic oligonucleotide
  Antisense strand to SEQ ID NO: 2430112
ucaaaccucaagauugugc

SEQ ID NO: 2430114 - RNA, 19 nt, Artificial Sequence
  Description of Artificial Sequence: Synthetic oligonucleotide
  Sense strand starting at position 3296 of SEQ ID NO: 1886840
aaggauggguuccgagcaa

SEQ ID NO: 2430115 - RNA, 19 nt, Artificial Sequence
  Description of Artificial Sequence: Synthetic oligonucleotide
  Antisense strand to SEQ ID NO: 2430114
uugcucggaacccauccuu

SEQ ID NO: 2430116 - RNA, 19 nt, Artificial Sequence
  Description of Artificial Sequence: Synthetic oligonucleotide
  Sense strand starting at position 3471 of SEQ ID NO: 1886840
gcccuaucuccaggugcua

SEQ ID NO: 2430117 - RNA, 19 nt, Artificial Sequence
  Description of Artificial Sequence: Synthetic oligonucleotide
  Antisense strand to SEQ ID NO: 2430116
uagcaccuggagauagggc

SEQ ID NO: 2430118 - RNA, 19 nt, Artificial Sequence
  Description of Artificial Sequence: Synthetic oligonucleotide
  Sense strand starting at position 3647 of SEQ ID NO: 1886840
cauuacuaggucuggagaa

SEQ ID NO: 2430119 - RNA, 19 nt, Artificial Sequence
  Description of Artificial Sequence: Synthetic oligonucleotide
  Antisense strand to SEQ ID NO: 2430118
uucuccagaccuaguaaug

SEQ ID NO: 2430120 - RNA, 19 nt, Artificial Sequence
  Description of Artificial Sequence: Synthetic oligonucleotide
  Sense strand starting at position 3648 of SEQ ID NO: 1886840
auuacuaggucuggagaag

SEQ ID NO: 2430121 - RNA, 19 nt, Artificial Sequence
  Description of Artificial Sequence: Synthetic oligonucleotide
  Antisense strand to SEQ ID NO: 2430120
cuucuccagaccuaguaau

SEQ ID NO: 2430122 - RNA, 19 nt, Artificial Sequence
  Description of Artificial Sequence: Synthetic oligonucleotide
  Sense strand starting at position 3813 of SEQ ID NO: 1886840
ccucuuucucuuuguggua

SEQ ID NO: 2430123 - RNA, 19 nt, Artificial Sequence
  Description of Artificial Sequence: Synthetic oligonucleotide
  Antisense strand to SEQ ID NO: 2430122
uaccacaaagagaaagagg

SEQ ID NO: 2430124 - RNA, 19 nt, Artificial Sequence
  Description of Artificial Sequence: Synthetic oligonucleotide
  Sense strand starting at position 3814 of SEQ ID NO: 1886840
cucuuucucuuugugguau

SEQ ID NO: 2430125 - RNA, 19 nt, Artificial Sequence
  Description of Artificial Sequence: Synthetic oligonucleotide
  Antisense strand to SEQ ID NO: 2430124
auaccacaaagagaaagag

SEQ ID NO: 2430126 - RNA, 19 nt, Artificial Sequence
  Description of Artificial Sequence: Synthetic oligonucleotide
  Sense strand starting at position 3822 of SEQ ID NO: 1886840
cuuugugguaucugugacu

SEQ ID NO: 2430127 - RNA, 19 nt, Artificial Sequence
  Description of Artificial Sequence: Synthetic oligonucleotide
  Antisense strand to SEQ ID NO: 2430126
agucacagauaccacaaag

SEQ ID NO: 2430128 - RNA, 19 nt, Artificial Sequence
  Description of Artificial Sequence: Synthetic oligonucleotide
  Sense strand starting at position 3976 of SEQ ID NO: 1886840
ggaccagguuuccuagaga

SEQ ID NO: 2430129 - RNA, 19 nt, Artificial Sequence
  Description of Artificial Sequence: Synthetic oligonucleotide
  Antisense strand to SEQ ID NO: 2430128
ucucuaggaaaccuggucc

SEQ ID NO: 2430130 - RNA, 19 nt, Artificial Sequence
  Description of Artificial Sequence: Synthetic oligonucleotide
  Sense strand starting at position 77 of SEQ ID NO: 1886841
cugggaggguccucuaguu

SEQ ID NO: 2430131 - RNA, 19 nt, Artificial Sequence
  Description of Artificial Sequence: Synthetic oligonucleotide
  Antisense strand to SEQ ID NO: 2430130
aacuagaggacccucccag

SEQ ID NO: 2430132 - RNA, 19 nt, Artificial Sequence
  Description of Artificial Sequence: Synthetic oligonucleotide
  Sense strand starting at position 82 of SEQ ID NO: 1886841
aggguccucuaguuggauu

SEQ ID NO: 2430133 - RNA, 19 nt, Artificial Sequence
  Description of Artificial Sequence: Synthetic oligonucleotide
  Antisense strand to SEQ ID NO: 2430132
aauccaacuagaggacccu

SEQ ID NO: 2430134 - RNA, 19 nt, Artificial Sequence
  Description of Artificial Sequence: Synthetic oligonucleotide
  Sense strand starting at position 342 of SEQ ID NO: 1886841
gguggagcuaaauagaagu

SEQ ID NO: 2430135 - RNA, 19 nt, Artificial Sequence
  Description of Artificial Sequence: Synthetic oligonucleotide
  Antisense strand to SEQ ID NO: 2430134
acuucuauuuagcuccacc

SEQ ID NO: 2430136 - RNA, 19 nt, Artificial Sequence
  Description of Artificial Sequence: Synthetic oligonucleotide
  Sense strand starting at position 374 of SEQ ID NO: 1886841
ugcaguugccaugaagcaa

SEQ ID NO: 2430137 - RNA, 19 nt, Artificial Sequence
  Description of Artificial Sequence: Synthetic oligonucleotide
  Antisense strand to SEQ ID NO: 2430136
uugcuucauggcaacugca

SEQ ID NO: 2430138 - RNA, 19 nt, Artificial Sequence
  Description of Artificial Sequence: Synthetic oligonucleotide
  Sense strand starting at position 412 of SEQ ID NO: 1886841
gcaguuaacaauugcagga

SEQ ID NO: 2430139 - RNA, 19 nt, Artificial Sequence
  Description of Artificial Sequence: Synthetic oligonucleotide
  Antisense strand to SEQ ID NO: 2430138
uccugcaauuguuaacugc

SEQ ID NO: 2430140 - RNA, 19 nt, Artificial Sequence
  Description of Artificial Sequence: Synthetic oligonucleotide
  Sense strand starting at position 416 of SEQ ID NO: 1886841
uuaacaauugcaggaguuu

SEQ ID NO: 2430141 - RNA, 19 nt, Artificial Sequence
  Description of Artificial Sequence: Synthetic oligonucleotide
  Antisense strand to SEQ ID NO: 2430140
aaacuccugcaauuguuaa

SEQ ID NO: 2430142 - RNA, 19 nt, Artificial Sequence
  Description of Artificial Sequence: Synthetic oligonucleotide
  Sense strand starting at position 425 of SEQ ID NO: 1886841
gcaggaguuucuuuguaac

SEQ ID NO: 2430143 - RNA, 19 nt, Artificial Sequence
  Description of Artificial Sequence: Synthetic oligonucleotide
  Antisense strand to SEQ ID NO: 2430142
guuacaaagaaacuccugc

SEQ ID NO: 2430144 - RNA, 19 nt, Artificial Sequence
  Description of Artificial Sequence: Synthetic oligonucleotide
  Sense strand starting at position 427 of SEQ ID NO: 1886841
aggaguuucuuuguaacuu

SEQ ID NO: 2430145 - RNA, 19 nt, Artificial Sequence
  Description of Artificial Sequence: Synthetic oligonucleotide
  Antisense strand to SEQ ID NO: 2430144
aaguuacaaagaaacuccu

SEQ ID NO: 2430146 - RNA, 19 nt, Artificial Sequence
  Description of Artificial Sequence: Synthetic oligonucleotide
  Sense strand starting at position 443 of SEQ ID NO: 1886841
cuugucccaguguaaauaa

SEQ ID NO: 2430147 - RNA, 19 nt, Artificial Sequence
  Description of Artificial Sequence: Synthetic oligonucleotide
  Antisense strand to SEQ ID NO: 2430146
uuauuuacacugggacaag

SEQ ID NO: 2430148 - RNA, 19 nt, Artificial Sequence
  Description of Artificial Sequence: Synthetic oligonucleotide
  Sense strand starting at position 451 of SEQ ID NO: 1886841
aguguaaauaaggguuagu

SEQ ID NO: 2430149 - RNA, 19 nt, Artificial Sequence
  Description of Artificial Sequence: Synthetic oligonucleotide
  Antisense strand to SEQ ID NO: 2430148
acuaacccuuauuuacacu

SEQ ID NO: 2430150 - RNA, 19 nt, Artificial Sequence
  Description of Artificial Sequence: Synthetic oligonucleotide
  Sense strand starting at position 1272 of SEQ ID NO: 1886841
gcaauucuagaagagccua

SEQ ID NO: 2430151 - RNA, 19 nt, Artificial Sequence
  Description of Artificial Sequence: Synthetic oligonucleotide
  Antisense strand to SEQ ID NO: 2430150
uaggcucuucuagaauugc

SEQ ID NO: 2430152 - RNA, 19 nt, Artificial Sequence
  Description of Artificial Sequence: Synthetic oligonucleotide
  Sense strand starting at position 1315 of SEQ ID NO: 1886841
agauguggguucuccuuau

SEQ ID NO: 2430153 - RNA, 19 nt, Artificial Sequence
  Description of Artificial Sequence: Synthetic oligonucleotide
  Antisense strand to SEQ ID NO: 2430152
auaaggagaacccacaucu

SEQ ID NO: 2430154 - RNA, 19 nt, Artificial Sequence
  Description of Artificial Sequence: Synthetic oligonucleotide
  Sense strand starting at position 1626 of SEQ ID NO: 1886841
ggcaauagcgaagagauga

SEQ ID NO: 2430155 - RNA, 19 nt, Artificial Sequence
  Description of Artificial Sequence: Synthetic oligonucleotide
  Antisense strand to SEQ ID NO: 2430154
ucaucucuucgcuauugcc

SEQ ID NO: 2430156 - RNA, 19 nt, Artificial Sequence
  Description of Artificial Sequence: Synthetic oligonucleotide
  Sense strand starting at position 1757 of SEQ ID NO: 1886841
ucuguucucuaguccacau

SEQ ID NO: 2430157 - RNA, 19 nt, Artificial Sequence
  Description of Artificial Sequence: Synthetic oligonucleotide
  Antisense strand to SEQ ID NO: 2430156
auguggacuagagaacaga

SEQ ID NO: 2430158 - RNA, 19 nt, Artificial Sequence
  Description of Artificial Sequence: Synthetic oligonucleotide
  Sense strand starting at position 2007 of SEQ ID NO: 1886841
gcagguuugacaggcacau

SEQ ID NO: 2430159 - RNA, 19 nt, Artificial Sequence
  Description of Artificial Sequence: Synthetic oligonucleotide
  Antisense strand to SEQ ID NO: 2430158
augugccugucaaaccugc

SEQ ID NO: 2430160 - RNA, 19 nt, Artificial Sequence
  Description of Artificial Sequence: Synthetic oligonucleotide
  Sense strand starting at position 2052 of SEQ ID NO: 1886841
gcuucuaugagccaucgaa

SEQ ID NO: 2430161 - RNA, 19 nt, Artificial Sequence
  Description of Artificial Sequence: Synthetic oligonucleotide
  Antisense strand to SEQ ID NO: 2430160
uucgauggcucauagaagc

SEQ ID NO: 2430162 - RNA, 19 nt, Artificial Sequence
  Description of Artificial Sequence: Synthetic oligonucleotide
  Sense strand starting at position 2092 of SEQ ID NO: 1886841
uagacauugccguaagaac

SEQ ID NO: 2430163 - RNA, 19 nt, Artificial Sequence
  Description of Artificial Sequence: Synthetic oligonucleotide
  Antisense strand to SEQ ID NO: 2430162
guucuuacggcaaugucua

SEQ ID NO: 2430164 - RNA, 19 nt, Artificial Sequence
  Description of Artificial Sequence: Synthetic oligonucleotide
  Sense strand starting at position 2161 of SEQ ID NO: 1886841
ggugauugagggugauuga

SEQ ID NO: 2430165 - RNA, 19 nt, Artificial Sequence
  Description of Artificial Sequence: Synthetic oligonucleotide
  Antisense strand to SEQ ID NO: 2430164
ucaaucacccucaaucacc

SEQ ID NO: 2430166 - RNA, 19 nt, Artificial Sequence
  Description of Artificial Sequence: Synthetic oligonucleotide
  Sense strand starting at position 2281 of SEQ ID NO: 1886841
ggauaaauucuagggccuu

SEQ ID NO: 2430167 - RNA, 19 nt, Artificial Sequence
  Description of Artificial Sequence: Synthetic oligonucleotide
  Antisense strand to SEQ ID NO: 2430166
aaggcccuagaauuuaucc

SEQ ID NO: 2430168 - RNA, 19 nt, Artificial Sequence
  Description of Artificial Sequence: Synthetic oligonucleotide
  Sense strand starting at position 2297 of SEQ ID NO: 1886841
cuuucuugguucucaugau

SEQ ID NO: 2430169 - RNA, 19 nt, Artificial Sequence
  Description of Artificial Sequence: Synthetic oligonucleotide
  Antisense strand to SEQ ID NO: 2430168
aucaugagaaccaagaaag

SEQ ID NO: 2430170 - RNA, 19 nt, Artificial Sequence
  Description of Artificial Sequence: Synthetic oligonucleotide
  Sense strand starting at position 2301 of SEQ ID NO: 1886841
cuugguucucaugauccau

SEQ ID NO: 2430171 - RNA, 19 nt, Artificial Sequence
  Description of Artificial Sequence: Synthetic oligonucleotide
  Antisense strand to SEQ ID NO: 2430170
auggaucaugagaaccaag

SEQ ID NO: 2430172 - RNA, 19 nt, Artificial Sequence
  Description of Artificial Sequence: Synthetic oligonucleotide
  Sense strand starting at position 2303 of SEQ ID NO: 1886841
ugguucucaugauccauua

SEQ ID NO: 2430173 - RNA, 19 nt, Artificial Sequence
  Description of Artificial Sequence: Synthetic oligonucleotide
  Antisense strand to SEQ ID NO: 2430172
uaauggaucaugagaacca

SEQ ID NO: 2430174 - RNA, 19 nt, Artificial Sequence
  Description of Artificial Sequence: Synthetic oligonucleotide
  Sense strand starting at position 2403 of SEQ ID NO: 1886841
gguccuccaccuugagaua

SEQ ID NO: 2430175 - RNA, 19 nt, Artificial Sequence
  Description of Artificial Sequence: Synthetic oligonucleotide
  Antisense strand to SEQ ID NO: 2430174
uaucucaagguggaggacc

SEQ ID NO: 2430176 - RNA, 19 nt, Artificial Sequence
  Description of Artificial Sequence: Synthetic oligonucleotide
  Sense strand starting at position 2404 of SEQ ID NO: 1886841
guccuccaccuugagauau

SEQ ID NO: 2430177 - RNA, 19 nt, Artificial Sequence
  Description of Artificial Sequence: Synthetic oligonucleotide
  Antisense strand to SEQ ID NO: 2430176
auaucucaagguggaggac

SEQ ID NO: 2430178 - RNA, 19 nt, Artificial Sequence
  Description of Artificial Sequence: Synthetic oligonucleotide
  Sense strand starting at position 2864 of SEQ ID NO: 1886841
uuccaucuucucuguggga

SEQ ID NO: 2430179 - RNA, 19 nt, Artificial Sequence
  Description of Artificial Sequence: Synthetic oligonucleotide
  Antisense strand to SEQ ID NO: 2430178
ucccacagagaagauggaa

SEQ ID NO: 2430180 - RNA, 19 nt, Artificial Sequence
  Description of Artificial Sequence: Synthetic oligonucleotide
  Sense strand starting at position 2865 of SEQ ID NO: 1886841
uccaucuucucugugggaa

SEQ ID NO: 2430181 - RNA, 19 nt, Artificial Sequence
  Description of Artificial Sequence: Synthetic oligonucleotide
  Antisense strand to SEQ ID NO: 2430180
uucccacagagaagaugga

SEQ ID NO: 2430182 - RNA, 19 nt, Artificial Sequence
  Description of Artificial Sequence: Synthetic oligonucleotide
  Sense strand starting at position 2866 of SEQ ID NO: 1886841
ccaucuucucugugggaau

SEQ ID NO: 2430183 - RNA, 19 nt, Artificial Sequence
  Description of Artificial Sequence: Synthetic oligonucleotide
  Antisense strand to SEQ ID NO: 2430182
auucccacagagaagaugg

SEQ ID NO: 2430184 - RNA, 19 nt, Artificial Sequence
  Description of Artificial Sequence: Synthetic oligonucleotide
  Sense strand starting at position 2880 of SEQ ID NO: 1886841
ggaauacugccuugaccua

SEQ ID NO: 2430185 - RNA, 19 nt, Artificial Sequence
  Description of Artificial Sequence: Synthetic oligonucleotide
  Antisense strand to SEQ ID NO: 2430184
uaggucaaggcaguauucc

SEQ ID NO: 2430186 - RNA, 19 nt, Artificial Sequence
  Description of Artificial Sequence: Synthetic oligonucleotide
  Sense strand starting at position 2892 of SEQ ID NO: 1886841
ugaccuaacguguauucua

SEQ ID NO: 2430187 - RNA, 19 nt, Artificial Sequence
  Description of Artificial Sequence: Synthetic oligonucleotide
  Antisense strand to SEQ ID NO: 2430186
uagaauacacguuagguca

SEQ ID NO: 2430188 - RNA, 19 nt, Artificial Sequence
  Description of Artificial Sequence: Synthetic oligonucleotide
  Sense strand starting at position 2899 of SEQ ID NO: 1886841
acguguauucuaguuacgu

SEQ ID NO: 2430189 - RNA, 19 nt, Artificial Sequence
  Description of Artificial Sequence: Synthetic oligonucleotide
  Antisense strand to SEQ ID NO: 2430188
acguaacuagaauacacgu

SEQ ID NO: 2430190 - RNA, 19 nt, Artificial Sequence
  Description of Artificial Sequence: Synthetic oligonucleotide
  Sense strand starting at position 3021 of SEQ ID NO: 1886841
acaaauauugguugagcga

SEQ ID NO: 2430191 - RNA, 19 nt, Artificial Sequence
  Description of Artificial Sequence: Synthetic oligonucleotide
  Antisense strand to SEQ ID NO: 2430190
ucgcucaaccaauauuugu

SEQ ID NO: 2430192 - RNA, 19 nt, Artificial Sequence
  Description of Artificial Sequence: Synthetic oligonucleotide
  Sense strand starting at position 3022 of SEQ ID NO: 1886841
caaauauugguugagcgaa

SEQ ID NO: 2430193 - RNA, 19 nt, Artificial Sequence
  Description of Artificial Sequence: Synthetic oligonucleotide
  Antisense strand to SEQ ID NO: 2430192
uucgcucaaccaauauuug

SEQ ID NO: 2430194 - RNA, 19 nt, Artificial Sequence
  Description of Artificial Sequence: Synthetic oligonucleotide
  Sense strand starting at position 3062 of SEQ ID NO: 1886841
cuugguucccaaugaugca

SEQ ID NO: 2430195 - RNA, 19 nt, Artificial Sequence
  Description of Artificial Sequence: Synthetic oligonucleotide
  Antisense strand to SEQ ID NO: 2430194
ugcaucauugggaaccaag

SEQ ID NO: 2430196 - RNA, 19 nt, Artificial Sequence
  Description of Artificial Sequence: Synthetic oligonucleotide
  Sense strand starting at position 3128 of SEQ ID NO: 1886841
aggauuauccugcggacaa

SEQ ID NO: 2430197 - RNA, 19 nt, Artificial Sequence
  Description of Artificial Sequence: Synthetic oligonucleotide
  Antisense strand to SEQ ID NO: 2430196
uuguccgcaggauaauccu

SEQ ID NO: 2430198 - RNA, 19 nt, Artificial Sequence
  Description of Artificial Sequence: Synthetic oligonucleotide
  Sense strand starting at position 3202 of SEQ ID NO: 1886841
cccaaaucuccuggugaug

SEQ ID NO: 2430199 - RNA, 19 nt, Artificial Sequence
  Description of Artificial Sequence: Synthetic oligonucleotide
  Antisense strand to SEQ ID NO: 2430198
caucaccaggagauuuggg

SEQ ID NO: 2430200 - RNA, 19 nt, Artificial Sequence
  Description of Artificial Sequence: Synthetic oligonucleotide
  Sense strand starting at position 3371 of SEQ ID NO: 1886841
cuuaguuuccuccagcaga

SEQ ID NO: 2430201 - RNA, 19 nt, Artificial Sequence
  Description of Artificial Sequence: Synthetic oligonucleotide
  Antisense strand to SEQ ID NO: 2430200
ucugcuggaggaaacuaag

SEQ ID NO: 2430202 - RNA, 19 nt, Artificial Sequence
  Description of Artificial Sequence: Synthetic oligonucleotide
  Sense strand starting at position 3381 of SEQ ID NO: 1886841
uccagcagaccucaugaua

SEQ ID NO: 2430203 - RNA, 19 nt, Artificial Sequence
  Description of Artificial Sequence: Synthetic oligonucleotide
  Antisense strand to SEQ ID NO: 2430202
uaucaugaggucugcugga

SEQ ID NO: 2430204 - RNA, 19 nt, Artificial Sequence
  Description of Artificial Sequence: Synthetic oligonucleotide
  Sense strand starting at position 3536 of SEQ ID NO: 1886841
ggaggagccucccuaagaa

SEQ ID NO: 2430205 - RNA, 19 nt, Artificial Sequence
  Description of Artificial Sequence: Synthetic oligonucleotide
  Antisense strand to SEQ ID NO: 2430204
uucuuagggaggcuccucc

SEQ ID NO: 2430206 - RNA, 19 nt, Artificial Sequence
  Description of Artificial Sequence: Synthetic oligonucleotide
  Sense strand starting at position 3603 of SEQ ID NO: 1886841
agggccuuugcagagacau

SEQ ID NO: 2430207 - RNA, 19 nt, Artificial Sequence
  Description of Artificial Sequence: Synthetic oligonucleotide
  Antisense strand to SEQ ID NO: 2430206
augucucugcaaaggcccu

SEQ ID NO: 2430208 - RNA, 19 nt, Artificial Sequence
  Description of Artificial Sequence: Synthetic oligonucleotide
  Sense strand starting at position 3959 of SEQ ID NO: 1886841
ccugaaggacccuguguuu

SEQ ID NO: 2430209 - RNA, 19 nt, Artificial Sequence
  Description of Artificial Sequence: Synthetic oligonucleotide
  Antisense strand to SEQ ID NO: 2430208
aaacacaggguccuucagg

SEQ ID NO: 2430210 - RNA, 19 nt, Artificial Sequence
  Description of Artificial Sequence: Synthetic oligonucleotide
  Sense strand starting at position 149 of SEQ ID NO: 1886842
cuaagccuccauuagagua

SEQ ID NO: 2430211 - RNA, 19 nt, Artificial Sequence
  Description of Artificial Sequence: Synthetic oligonucleotide
  Antisense strand to SEQ ID NO: 2430210
uacucuaauggaggcuuag

SEQ ID NO: 2430212 - RNA, 19 nt, Artificial Sequence
  Description of Artificial Sequence: Synthetic oligonucleotide
  Sense strand starting at position 277 of SEQ ID NO: 1886842
agcccaucucuggaugagu

SEQ ID NO: 2430213 - RNA, 19 nt, Artificial Sequence
  Description of Artificial Sequence: Synthetic oligonucleotide
  Antisense strand to SEQ ID NO: 2430212
acucauccagagaugggcu

SEQ ID NO: 2430214 - RNA, 19 nt, Artificial Sequence
  Description of Artificial Sequence: Synthetic oligonucleotide
  Sense strand starting at position 286 of SEQ ID NO: 1886842
cuggaugaguuucuaauaa

SEQ ID NO: 2430215 - RNA, 19 nt, Artificial Sequence
  Description of Artificial Sequence: Synthetic oligonucleotide
  Antisense strand to SEQ ID NO: 2430214
uuauuagaaacucauccag

SEQ ID NO: 2430216 - RNA, 19 nt, Artificial Sequence
  Description of Artificial Sequence: Synthetic oligonucleotide
  Sense strand starting at position 390 of SEQ ID NO: 1886842
cuauucugugcccagaaag

SEQ ID NO: 2430217 - RNA, 19 nt, Artificial Sequence
  Description of Artificial Sequence: Synthetic oligonucleotide
  Antisense strand to SEQ ID NO: 2430216
cuuucugggcacagaauag

SEQ ID NO: 2430218 - RNA, 19 nt, Artificial Sequence
  Description of Artificial Sequence: Synthetic oligonucleotide
  Sense strand starting at position 402 of SEQ ID NO: 1886842
cagaaaggcugaccuguaa

SEQ ID NO: 2430219 - RNA, 19 nt, Artificial Sequence
  Description of Artificial Sequence: Synthetic oligonucleotide
  Antisense strand to SEQ ID NO: 2430218
uuacaggucagccuuucug

SEQ ID NO: 2430220 - RNA, 19 nt, Artificial Sequence
  Description of Artificial Sequence: Synthetic oligonucleotide
  Sense strand starting at position 413 of SEQ ID NO: 1886842
accuguaaggauuguaaca

SEQ ID NO: 2430221 - RNA, 19 nt, Artificial Sequence
  Description of Artificial Sequence: Synthetic oligonucleotide
  Antisense strand to SEQ ID NO: 2430220
uguuacaauccuuacaggu

SEQ ID NO: 2430222 - RNA, 19 nt, Artificial Sequence
  Description of Artificial Sequence: Synthetic oligonucleotide
  Sense strand starting at position 565 of SEQ ID NO: 1886842
cacugauguuaucugaaga

SEQ ID NO: 2430223 - RNA, 19 nt, Artificial Sequence
  Description of Artificial Sequence: Synthetic oligonucleotide
  Antisense strand to SEQ ID NO: 2430222
ucuucagauaacaucagug

SEQ ID NO: 2430224 - RNA, 19 nt, Artificial Sequence
  Description of Artificial Sequence: Synthetic oligonucleotide
  Sense strand starting at position 601 of SEQ ID NO: 1886842
cuuucucuugguuacagaa

SEQ ID NO: 2430225 - RNA, 19 nt, Artificial Sequence
  Description of Artificial Sequence: Synthetic oligonucleotide
  Antisense strand to SEQ ID NO: 2430224
uucuguaaccaagagaaag

SEQ ID NO: 2430226 - RNA, 19 nt, Artificial Sequence
  Description of Artificial Sequence: Synthetic oligonucleotide
  Sense strand starting at position 862 of SEQ ID NO: 1886842
aaagaucagucuguugaga

SEQ ID NO: 2430227 - RNA, 19 nt, Artificial Sequence
  Description of Artificial Sequence: Synthetic oligonucleotide
  Antisense strand to SEQ ID NO: 2430226
ucucaacagacugaucuuu

SEQ ID NO: 2430228 - RNA, 19 nt, Artificial Sequence
  Description of Artificial Sequence: Synthetic oligonucleotide
  Sense strand starting at position 900 of SEQ ID NO: 1886842
guacaacugcaguauuaau

SEQ ID NO: 2430229 - RNA, 19 nt, Artificial Sequence
  Description of Artificial Sequence: Synthetic oligonucleotide
  Antisense strand to SEQ ID NO: 2430228
auuaauacugcaguuguac

SEQ ID NO: 2430230 - RNA, 19 nt, Artificial Sequence
  Description of Artificial Sequence: Synthetic oligonucleotide
  Sense strand starting at position 1201 of SEQ ID NO: 1886842
uuaucaugccaggacuuua

SEQ ID NO: 2430231 - RNA, 19 nt, Artificial Sequence
  Description of Artificial Sequence: Synthetic oligonucleotide
  Antisense strand to SEQ ID NO: 2430230
uaaaguccuggcaugauaa

SEQ ID NO: 2430232 - RNA, 19 nt, Artificial Sequence
  Description of Artificial Sequence: Synthetic oligonucleotide
  Sense strand starting at position 1206 of SEQ ID NO: 1886842
augccaggacuuuaauauu

SEQ ID NO: 2430233 - RNA, 19 nt, Artificial Sequence
  Description of Artificial Sequence: Synthetic oligonucleotide
  Antisense strand to SEQ ID NO: 2430232
aauauuaaaguccuggcau

SEQ ID NO: 2430234 - RNA, 19 nt, Artificial Sequence
  Description of Artificial Sequence: Synthetic oligonucleotide
  Sense strand starting at position 1380 of SEQ ID NO: 1886842
ugguuucuacuguacaacu

SEQ ID NO: 2430235 - RNA, 19 nt, Artificial Sequence
  Description of Artificial Sequence: Synthetic oligonucleotide
  Antisense strand to SEQ ID NO: 2430234
aguuguacaguagaaacca

SEQ ID NO: 2430236 - RNA, 19 nt, Artificial Sequence
  Description of Artificial Sequence: Synthetic oligonucleotide
  Sense strand starting at position 1547 of SEQ ID NO: 1886842
cagcuaaauguaggacuua

SEQ ID NO: 2430237 - RNA, 19 nt, Artificial Sequence
  Description of Artificial Sequence: Synthetic oligonucleotide
  Antisense strand to SEQ ID NO: 2430236
uaaguccuacauuuagcug

SEQ ID NO: 2430238 - RNA, 19 nt, Artificial Sequence
  Description of Artificial Sequence: Synthetic oligonucleotide
  Sense strand starting at position 1637 of SEQ ID NO: 1886842
aucaguaaauuccuaagua

SEQ ID NO: 2430239 - RNA, 19 nt, Artificial Sequence
  Description of Artificial Sequence: Synthetic oligonucleotide
  Antisense strand to SEQ ID NO: 2430238
uacuuaggaauuuacugau

SEQ ID NO: 2430240 - RNA, 19 nt, Artificial Sequence
  Description of Artificial Sequence: Synthetic oligonucleotide
  Sense strand starting at position 1647 of SEQ ID NO: 1886842
uccuaaguauagucaauag

SEQ ID NO: 2430241 - RNA, 19 nt, Artificial Sequence
  Description of Artificial Sequence: Synthetic oligonucleotide
  Antisense strand to SEQ ID NO: 2430240
cuauugacuauacuuagga

SEQ ID NO: 2430242 - RNA, 19 nt, Artificial Sequence
  Description of Artificial Sequence: Synthetic oligonucleotide
  Sense strand starting at position 1806 of SEQ ID NO: 1886842
cgucuaugaaaugaguauu

SEQ ID NO: 2430243 - RNA, 19 nt, Artificial Sequence
  Description of Artificial Sequence: Synthetic oligonucleotide
  Antisense strand to SEQ ID NO: 2430242
aauacucauuucauagacg

SEQ ID NO: 2430244 - RNA, 19 nt, Artificial Sequence
  Description of Artificial Sequence: Synthetic oligonucleotide
  Sense strand starting at position 1814 of SEQ ID NO: 1886842
aaaugaguauuugacugau

SEQ ID NO: 2430245 - RNA, 19 nt, Artificial Sequence
  Description of Artificial Sequence: Synthetic oligonucleotide
  Antisense strand to SEQ ID NO: 2430244
aucagucaaauacucauuu

SEQ ID NO: 2430246 - RNA, 19 nt, Artificial Sequence
  Description of Artificial Sequence: Synthetic oligonucleotide
  Sense strand starting at position 1820 of SEQ ID NO: 1886842
guauuugacugauaaauac

SEQ ID NO: 2430247 - RNA, 19 nt, Artificial Sequence
  Description of Artificial Sequence: Synthetic oligonucleotide
  Antisense strand to SEQ ID NO: 2430246
guauuuaucagucaaauac

SEQ ID NO: 2430248 - RNA, 19 nt, Artificial Sequence
  Description of Artificial Sequence: Synthetic oligonucleotide
  Sense strand starting at position 2053 of SEQ ID NO: 1886842
uuaugaugugacugugaag

SEQ ID NO: 2430249 - RNA, 19 nt, Artificial Sequence
  Description of Artificial Sequence: Synthetic oligonucleotide
  Antisense strand to SEQ ID NO: 2430248
cuucacagucacaucauaa

SEQ ID NO: 2430250 - RNA, 19 nt, Artificial Sequence
  Description of Artificial Sequence: Synthetic oligonucleotide
  Sense strand starting at position 2107 of SEQ ID NO: 1886842
uggacauuacccugugaca

SEQ ID NO: 2430251 - RNA, 19 nt, Artificial Sequence
  Description of Artificial Sequence: Synthetic oligonucleotide
  Antisense strand to SEQ ID NO: 2430250
ugucacaggguaaugucca

SEQ ID NO: 2430252 - RNA, 19 nt, Artificial Sequence
  Description of Artificial Sequence: Synthetic oligonucleotide
  Sense strand starting at position 2241 of SEQ ID NO: 1886842
aggacaaguucuccuacaa

SEQ ID NO: 2430253 - RNA, 19 nt, Artificial Sequence
  Description of Artificial Sequence: Synthetic oligonucleotide
  Antisense strand to SEQ ID NO: 2430252
uuguaggagaacuuguccu

SEQ ID NO: 2430254 - RNA, 19 nt, Artificial Sequence
  Description of Artificial Sequence: Synthetic oligonucleotide
  Sense strand starting at position 2469 of SEQ ID NO: 1886842
caaguaaugcaagaggcau

SEQ ID NO: 2430255 - RNA, 19 nt, Artificial Sequence
  Description of Artificial Sequence: Synthetic oligonucleotide
  Antisense strand to SEQ ID NO: 2430254
augccucuugcauuacuug

SEQ ID NO: 2430256 - RNA, 19 nt, Artificial Sequence
  Description of Artificial Sequence: Synthetic oligonucleotide
  Sense strand starting at position 2589 of SEQ ID NO: 1886842
aggucaucucaaugauccu

SEQ ID NO: 2430257 - RNA, 19 nt, Artificial Sequence
  Description of Artificial Sequence: Synthetic oligonucleotide
  Antisense strand to SEQ ID NO: 2430256
aggaucauugagaugaccu

SEQ ID NO: 2430258 - RNA, 19 nt, Artificial Sequence
  Description of Artificial Sequence: Synthetic oligonucleotide
  Sense strand starting at position 2634 of SEQ ID NO: 1886842
agaugacucuuugcacaau

SEQ ID NO: 2430259 - RNA, 19 nt, Artificial Sequence
  Description of Artificial Sequence: Synthetic oligonucleotide
  Antisense strand to SEQ ID NO: 2430258
auugugcaaagagucaucu

SEQ ID NO: 2430260 - RNA, 19 nt, Artificial Sequence
  Description of Artificial Sequence: Synthetic oligonucleotide
  Sense strand starting at position 2637 of SEQ ID NO: 1886842
ugacucuuugcacaaugaa

SEQ ID NO: 2430261 - RNA, 19 nt, Artificial Sequence
  Description of Artificial Sequence: Synthetic oligonucleotide
  Antisense strand to SEQ ID NO: 2430260
uucauugugcaaagaguca

SEQ ID NO: 2430262 - RNA, 19 nt, Artificial Sequence
  Description of Artificial Sequence: Synthetic oligonucleotide
  Sense strand starting at position 2722 of SEQ ID NO: 1886842
auacuagauucucuugaug

SEQ ID NO: 2430263 - RNA, 19 nt, Artificial Sequence
  Description of Artificial Sequence: Synthetic oligonucleotide
  Antisense strand to SEQ ID NO: 2430262
caucaagagaaucuaguau

SEQ ID NO: 2430264 - RNA, 19 nt, Artificial Sequence
  Description of Artificial Sequence: Synthetic oligonucleotide
  Sense strand starting at position 2725 of SEQ ID NO: 1886842
cuagauucucuugaugugu

SEQ ID NO: 2430265 - RNA, 19 nt, Artificial Sequence
  Description of Artificial Sequence: Synthetic oligonucleotide
  Antisense strand to SEQ ID NO: 2430264
acacaucaagagaaucuag

SEQ ID NO: 2430266 - RNA, 19 nt, Artificial Sequence
  Description of Artificial Sequence: Synthetic oligonucleotide
  Sense strand starting at position 2731 of SEQ ID NO: 1886842
ucucuugauguguaucaua

SEQ ID NO: 2430267 - RNA, 19 nt, Artificial Sequence
  Description of Artificial Sequence: Synthetic oligonucleotide
  Antisense strand to SEQ ID NO: 2430266
uaugauacacaucaagaga

SEQ ID NO: 2430268 - RNA, 19 nt, Artificial Sequence
  Description of Artificial Sequence: Synthetic oligonucleotide
  Sense strand starting at position 2829 of SEQ ID NO: 1886842
gucuguucgccacuuaguu

SEQ ID NO: 2430269 - RNA, 19 nt, Artificial Sequence
  Description of Artificial Sequence: Synthetic oligonucleotide
  Antisense strand to SEQ ID NO: 2430268
aacuaaguggcgaacagac

SEQ ID NO: 2430270 - RNA, 19 nt, Artificial Sequence
  Description of Artificial Sequence: Synthetic oligonucleotide
  Sense strand starting at position 2830 of SEQ ID NO: 1886842
ucuguucgccacuuaguuu

SEQ ID NO: 2430271 - RNA, 19 nt, Artificial Sequence
  Description of Artificial Sequence: Synthetic oligonucleotide
  Antisense strand to SEQ ID NO: 2430270
aaacuaaguggcgaacaga

SEQ ID NO: 2430272 - RNA, 19 nt, Artificial Sequence
  Description of Artificial Sequence: Synthetic oligonucleotide
  Sense strand starting at position 2884 of SEQ ID NO: 1886842
guacauuucuggcauuucu

SEQ ID NO: 2430273 - RNA, 19 nt, Artificial Sequence
  Description of Artificial Sequence: Synthetic oligonucleotide
  Antisense strand to SEQ ID NO: 2430272
agaaaugccagaaauguac

SEQ ID NO: 2430274 - RNA, 19 nt, Artificial Sequence
  Description of Artificial Sequence: Synthetic oligonucleotide
  Sense strand starting at position 3075 of SEQ ID NO: 1886842
aggaguaauuauuccacca

SEQ ID NO: 2430275 - RNA, 19 nt, Artificial Sequence
  Description of Artificial Sequence: Synthetic oligonucleotide
  Antisense strand to SEQ ID NO: 2430274
ugguggaauaauuacuccu

SEQ ID NO: 2430276 - RNA, 19 nt, Artificial Sequence
  Description of Artificial Sequence: Synthetic oligonucleotide
  Sense strand starting at position 3228 of SEQ ID NO: 1886842
cuggguucacgaugacaga

SEQ ID NO: 2430277 - RNA, 19 nt, Artificial Sequence
  Description of Artificial Sequence: Synthetic oligonucleotide
  Antisense strand to SEQ ID NO: 2430276
ucugucaucgugaacccag

SEQ ID NO: 2430278 - RNA, 19 nt, Artificial Sequence
  Description of Artificial Sequence: Synthetic oligonucleotide
  Sense strand starting at position 3590 of SEQ ID NO: 1886842
cugaaaguuguagaguaag

SEQ ID NO: 2430279 - RNA, 19 nt, Artificial Sequence
  Description of Artificial Sequence: Synthetic oligonucleotide
  Antisense strand to SEQ ID NO: 2430278
cuuacucuacaacuuucag

SEQ ID NO: 2430280 - RNA, 19 nt, Artificial Sequence
  Description of Artificial Sequence: Synthetic oligonucleotide
  Sense strand starting at position 3673 of SEQ ID NO: 1886842
ccacuaagugaauaacgua

SEQ ID NO: 2430281 - RNA, 19 nt, Artificial Sequence
  Description of Artificial Sequence: Synthetic oligonucleotide
  Antisense strand to SEQ ID NO: 2430280
uacguuauucacuuagugg

SEQ ID NO: 2430282 - RNA, 19 nt, Artificial Sequence
  Description of Artificial Sequence: Synthetic oligonucleotide
  Sense strand starting at position 3746 of SEQ ID NO: 1886842
agccauaucgaauauauua

SEQ ID NO: 2430283 - RNA, 19 nt, Artificial Sequence
  Description of Artificial Sequence: Synthetic oligonucleotide
  Antisense strand to SEQ ID NO: 2430282
uaauauauucgauauggcu

SEQ ID NO: 2430284 - RNA, 19 nt, Artificial Sequence
  Description of Artificial Sequence: Synthetic oligonucleotide
  Sense strand starting at position 3908 of SEQ ID NO: 1886842
ggaaguuguagaggacaug

SEQ ID NO: 2430285 - RNA, 19 nt, Artificial Sequence
  Description of Artificial Sequence: Synthetic oligonucleotide
  Antisense strand to SEQ ID NO: 2430284
cauguccucuacaacuucc

SEQ ID NO: 2430286 - RNA, 19 nt, Artificial Sequence
  Description of Artificial Sequence: Synthetic oligonucleotide
  Sense strand starting at position 3955 of SEQ ID NO: 1886842
ugaugaacugguugacuca

SEQ ID NO: 2430287 - RNA, 19 nt, Artificial Sequence
  Description of Artificial Sequence: Synthetic oligonucleotide
  Antisense strand to SEQ ID NO: 2430286
ugagucaaccaguucauca

SEQ ID NO: 2430288 - RNA, 19 nt, Artificial Sequence
  Description of Artificial Sequence: Synthetic oligonucleotide
  Sense strand starting at position 3958 of SEQ ID NO: 1886842
ugaacugguugacucagaa

SEQ ID NO: 2430289 - RNA, 19 nt, Artificial Sequence
  Description of Artificial Sequence: Synthetic oligonucleotide
  Antisense strand to SEQ ID NO: 2430288
uucugagucaaccaguuca

SEQ ID NO: 2430290 - RNA, 19 nt, Artificial Sequence
  Description of Artificial Sequence: Synthetic oligonucleotide
  Sense strand starting at position 50 of SEQ ID NO: 1886843
ugugcaucauccuuaugca

SEQ ID NO: 2430291 - RNA, 19 nt, Artificial Sequence
  Description of Artificial Sequence: Synthetic oligonucleotide
  Antisense strand to SEQ ID NO: 2430290
ugcauaaggaugaugcaca

SEQ ID NO: 2430292 - RNA, 19 nt, Artificial Sequence
  Description of Artificial Sequence: Synthetic oligonucleotide
  Sense strand starting at position 468 of SEQ ID NO: 1886843
ggaugagacuuggcucugu

SEQ ID NO: 2430293 - RNA, 19 nt, Artificial Sequence
  Description of Artificial Sequence: Synthetic oligonucleotide
  Antisense strand to SEQ ID NO: 2430292
acagagccaagucucaucc

SEQ ID NO: 2430294 - RNA, 19 nt, Artificial Sequence
  Description of Artificial Sequence: Synthetic oligonucleotide
  Sense strand starting at position 472 of SEQ ID NO: 1886843
gagacuuggcucuguuaaa

SEQ ID NO: 2430295 - RNA, 19 nt, Artificial Sequence
  Description of Artificial Sequence: Synthetic oligonucleotide
  Antisense strand to SEQ ID NO: 2430294
uuuaacagagccaagucuc

SEQ ID NO: 2430296 - RNA, 19 nt, Artificial Sequence
  Description of Artificial Sequence: Synthetic oligonucleotide
  Sense strand starting at position 473 of SEQ ID NO: 1886843
agacuuggcucuguuaaau

SEQ ID NO: 2430297 - RNA, 19 nt, Artificial Sequence
  Description of Artificial Sequence: Synthetic oligonucleotide
  Antisense strand to SEQ ID NO: 2430296
auuuaacagagccaagucu

SEQ ID NO: 2430298 - RNA, 19 nt, Artificial Sequence
  Description of Artificial Sequence: Synthetic oligonucleotide
  Sense strand starting at position 526 of SEQ ID NO: 1886843
agggcuuccugucacaaau

SEQ ID NO: 2430299 - RNA, 19 nt, Artificial Sequence
  Description of Artificial Sequence: Synthetic oligonucleotide
  Antisense strand to SEQ ID NO: 2430298
auuugugacaggaagcccu

SEQ ID NO: 2430300 - RNA, 19 nt, Artificial Sequence
  Description of Artificial Sequence: Synthetic oligonucleotide
  Sense strand starting at position 528 of SEQ ID NO: 1886843
ggcuuccugucacaaaucu

SEQ ID NO: 2430301 - RNA, 19 nt, Artificial Sequence
  Description of Artificial Sequence: Synthetic oligonucleotide
  Antisense strand to SEQ ID NO: 2430300
agauuugugacaggaagcc

SEQ ID NO: 2430302 - RNA, 19 nt, Artificial Sequence
  Description of Artificial Sequence: Synthetic oligonucleotide
  Sense strand starting at position 537 of SEQ ID NO: 1886843
ucacaaaucugggaaacga

SEQ ID NO: 2430303 - RNA, 19 nt, Artificial Sequence
  Description of Artificial Sequence: Synthetic oligonucleotide
  Antisense strand to SEQ ID NO: 2430302
ucguuucccagauuuguga

SEQ ID NO: 2430304 - RNA, 19 nt, Artificial Sequence
  Description of Artificial Sequence: Synthetic oligonucleotide
  Sense strand starting at position 550 of SEQ ID NO: 1886843
aaacgauaauaugggacau

SEQ ID NO: 2430305 - RNA, 19 nt, Artificial Sequence
  Description of Artificial Sequence: Synthetic oligonucleotide
  Antisense strand to SEQ ID NO: 2430304
augucccauauuaucguuu

SEQ ID NO: 2430306 - RNA, 19 nt, Artificial Sequence
  Description of Artificial Sequence: Synthetic oligonucleotide
  Sense strand starting at position 1159 of SEQ ID NO: 1886843
acaugaaguucuuaagggu

SEQ ID NO: 2430307 - RNA, 19 nt, Artificial Sequence
  Description of Artificial Sequence: Synthetic oligonucleotide
  Antisense strand to SEQ ID NO: 2430306
acccuuaagaacuucaugu

SEQ ID NO: 2430308 - RNA, 19 nt, Artificial Sequence
  Description of Artificial Sequence: Synthetic oligonucleotide
  Sense strand starting at position 1162 of SEQ ID NO: 1886843
ugaaguucuuaagggugga

SEQ ID NO: 2430309 - RNA, 19 nt, Artificial Sequence
  Description of Artificial Sequence: Synthetic oligonucleotide
  Antisense strand to SEQ ID NO: 2430308
uccacccuuaagaacuuca

SEQ ID NO: 2430310 - RNA, 19 nt, Artificial Sequence
  Description of Artificial Sequence: Synthetic oligonucleotide
  Sense strand starting at position 1163 of SEQ ID NO: 1886843
gaaguucuuaaggguggaa

SEQ ID NO: 2430311 - RNA, 19 nt, Artificial Sequence
  Description of Artificial Sequence: Synthetic oligonucleotide
  Antisense strand to SEQ ID NO: 2430310
uuccacccuuaagaacuuc

SEQ ID NO: 2430312 - RNA, 19 nt, Artificial Sequence
  Description of Artificial Sequence: Synthetic oligonucleotide
  Sense strand starting at position 1166 of SEQ ID NO: 1886843
guucuuaaggguggaagga

SEQ ID NO: 2430313 - RNA, 19 nt, Artificial Sequence
  Description of Artificial Sequence: Synthetic oligonucleotide
  Antisense strand to SEQ ID NO: 2430312
uccuuccacccuuaagaac

SEQ ID NO: 2430314 - RNA, 19 nt, Artificial Sequence
  Description of Artificial Sequence: Synthetic oligonucleotide
  Sense strand starting at position 1198 of SEQ ID NO: 1886843
uagaauaugucugcuguau

SEQ ID NO: 2430315 - RNA, 19 nt, Artificial Sequence
  Description of Artificial Sequence: Synthetic oligonucleotide
  Antisense strand to SEQ ID NO: 2430314
auacagcagacauauucua

SEQ ID NO: 2430316 - RNA, 19 nt, Artificial Sequence
  Description of Artificial Sequence: Synthetic oligonucleotide
  Sense strand starting at position 1202 of SEQ ID NO: 1886843
auaugucugcuguauaaua

SEQ ID NO: 2430317 - RNA, 19 nt, Artificial Sequence
  Description of Artificial Sequence: Synthetic oligonucleotide
  Antisense strand to SEQ ID NO: 2430316
uauuauacagcagacauau

SEQ ID NO: 2430318 - RNA, 19 nt, Artificial Sequence
  Description of Artificial Sequence: Synthetic oligonucleotide
  Sense strand starting at position 2287 of SEQ ID NO: 1886843
gccugucaugagugcuguu

SEQ ID NO: 2430319 - RNA, 19 nt, Artificial Sequence
  Description of Artificial Sequence: Synthetic oligonucleotide
  Antisense strand to SEQ ID NO: 2430318
aacagcacucaugacaggc

SEQ ID NO: 2430320 - RNA, 19 nt, Artificial Sequence
  Description of Artificial Sequence: Synthetic oligonucleotide
  Sense strand starting at position 2451 of SEQ ID NO: 1886843
augacaugauugcuuagaa

SEQ ID NO: 2430321 - RNA, 19 nt, Artificial Sequence
  Description of Artificial Sequence: Synthetic oligonucleotide
  Antisense strand to SEQ ID NO: 2430320
uucuaagcaaucaugucau

SEQ ID NO: 2430322 - RNA, 19 nt, Artificial Sequence
  Description of Artificial Sequence: Synthetic oligonucleotide
  Sense strand starting at position 2452 of SEQ ID NO: 1886843
ugacaugauugcuuagaaa

SEQ ID NO: 2430323 - RNA, 19 nt, Artificial Sequence
  Description of Artificial Sequence: Synthetic oligonucleotide
  Antisense strand to SEQ ID NO: 2430322
uuucuaagcaaucauguca

SEQ ID NO: 2430324 - RNA, 19 nt, Artificial Sequence
  Description of Artificial Sequence: Synthetic oligonucleotide
  Sense strand starting at position 2471 of SEQ ID NO: 1886843
aucccaaaguguuuguuua

SEQ ID NO: 2430325 - RNA, 19 nt, Artificial Sequence
  Description of Artificial Sequence: Synthetic oligonucleotide
  Antisense strand to SEQ ID NO: 2430324
uaaacaaacacuuugggau

SEQ ID NO: 2430326 - RNA, 19 nt, Artificial Sequence
  Description of Artificial Sequence: Synthetic oligonucleotide
  Sense strand starting at position 2472 of SEQ ID NO: 1886843
ucccaaaguguuuguuuac

SEQ ID NO: 2430327 - RNA, 19 nt, Artificial Sequence
  Description of Artificial Sequence: Synthetic oligonucleotide
  Antisense strand to SEQ ID NO: 2430326
guaaacaaacacuuuggga

SEQ ID NO: 2430328 - RNA, 19 nt, Artificial Sequence
  Description of Artificial Sequence: Synthetic oligonucleotide
  Sense strand starting at position 2473 of SEQ ID NO: 1886843
cccaaaguguuuguuuaca

SEQ ID NO: 2430329 - RNA, 19 nt, Artificial Sequence
  Description of Artificial Sequence: Synthetic oligonucleotide
  Antisense strand to SEQ ID NO: 2430328
uguaaacaaacacuuuggg

SEQ ID NO: 2430330 - RNA, 19 nt, Artificial Sequence
  Description of Artificial Sequence: Synthetic oligonucleotide
  Sense strand starting at position 2475 of SEQ ID NO: 1886843
caaaguguuuguuuacaug

SEQ ID NO: 2430331 - RNA, 19 nt, Artificial Sequence
  Description of Artificial Sequence: Synthetic oligonucleotide
  Antisense strand to SEQ ID NO: 2430330
cauguaaacaaacacuuug

SEQ ID NO: 2430332 - RNA, 19 nt, Artificial Sequence
  Description of Artificial Sequence: Synthetic oligonucleotide
  Sense strand starting at position 2499 of SEQ ID NO: 1886843
uuagcuaagucucaggaua

SEQ ID NO: 2430333 - RNA, 19 nt, Artificial Sequence
  Description of Artificial Sequence: Synthetic oligonucleotide
  Antisense strand to SEQ ID NO: 2430332
uauccugagacuuagcuaa

SEQ ID NO: 2430334 - RNA, 19 nt, Artificial Sequence
  Description of Artificial Sequence: Synthetic oligonucleotide
  Sense strand starting at position 2536 of SEQ ID NO: 1886843
gucaauugcugucccauau

SEQ ID NO: 2430335 - RNA, 19 nt, Artificial Sequence
  Description of Artificial Sequence: Synthetic oligonucleotide
  Antisense strand to SEQ ID NO: 2430334
auaugggacagcaauugac

SEQ ID NO: 2430336 - RNA, 19 nt, Artificial Sequence
  Description of Artificial Sequence: Synthetic oligonucleotide
  Sense strand starting at position 2549 of SEQ ID NO: 1886843
ccauauaccgauugaacaa

SEQ ID NO: 2430337 - RNA, 19 nt, Artificial Sequence
  Description of Artificial Sequence: Synthetic oligonucleotide
  Antisense strand to SEQ ID NO: 2430336
uuguucaaucgguauaugg

SEQ ID NO: 2430338 - RNA, 19 nt, Artificial Sequence
  Description of Artificial Sequence: Synthetic oligonucleotide
  Sense strand starting at position 2564 of SEQ ID NO: 1886843
acaauuggauuugguaaua

SEQ ID NO: 2430339 - RNA, 19 nt, Artificial Sequence
  Description of Artificial Sequence: Synthetic oligonucleotide
  Antisense strand to SEQ ID NO: 2430338
uauuaccaaauccaauugu

SEQ ID NO: 2430340 - RNA, 19 nt, Artificial Sequence
  Description of Artificial Sequence: Synthetic oligonucleotide
  Sense strand starting at position 2569 of SEQ ID NO: 1886843
uggauuugguaauaagaaa

SEQ ID NO: 2430341 - RNA, 19 nt, Artificial Sequence
  Description of Artificial Sequence: Synthetic oligonucleotide
  Antisense strand to SEQ ID NO: 2430340
uuucuuauuaccaaaucca

SEQ ID NO: 2430342 - RNA, 19 nt, Artificial Sequence
  Description of Artificial Sequence: Synthetic oligonucleotide
  Sense strand starting at position 2646 of SEQ ID NO: 1886843
ccgacuaaggucuaaaucu

SEQ ID NO: 2430343 - RNA, 19 nt, Artificial Sequence
  Description of Artificial Sequence: Synthetic oligonucleotide
  Antisense strand to SEQ ID NO: 2430342
agauuuagaccuuagucgg

SEQ ID NO: 2430344 - RNA, 19 nt, Artificial Sequence
  Description of Artificial Sequence: Synthetic oligonucleotide
  Sense strand starting at position 2668 of SEQ ID NO: 1886843
cagauaugugcagaaggua

SEQ ID NO: 2430345 - RNA, 19 nt, Artificial Sequence
  Description of Artificial Sequence: Synthetic oligonucleotide
  Antisense strand to SEQ ID NO: 2430344
uaccuucugcacauaucug

SEQ ID NO: 2430346 - RNA, 19 nt, Artificial Sequence
  Description of Artificial Sequence: Synthetic oligonucleotide
  Sense strand starting at position 2745 of SEQ ID NO: 1886843
ugccuuuccugcucauaag

SEQ ID NO: 2430347 - RNA, 19 nt, Artificial Sequence
  Description of Artificial Sequence: Synthetic oligonucleotide
  Antisense strand to SEQ ID NO: 2430346
cuuaugagcaggaaaggca

SEQ ID NO: 2430348 - RNA, 19 nt, Artificial Sequence
  Description of Artificial Sequence: Synthetic oligonucleotide
  Sense strand starting at position 2755 of SEQ ID NO: 1886843
gcucauaagccaugugucu

SEQ ID NO: 2430349 - RNA, 19 nt, Artificial Sequence
  Description of Artificial Sequence: Synthetic oligonucleotide
  Antisense strand to SEQ ID NO: 2430348
agacacauggcuuaugagc

SEQ ID NO: 2430350 - RNA, 19 nt, Artificial Sequence
  Description of Artificial Sequence: Synthetic oligonucleotide
  Sense strand starting at position 2943 of SEQ ID NO: 1886843
aguuuacacuugcagagua

SEQ ID NO: 2430351 - RNA, 19 nt, Artificial Sequence
  Description of Artificial Sequence: Synthetic oligonucleotide
  Antisense strand to SEQ ID NO: 2430350
uacucugcaaguguaaacu

SEQ ID NO: 2430352 - RNA, 19 nt, Artificial Sequence
  Description of Artificial Sequence: Synthetic oligonucleotide
  Sense strand starting at position 2965 of SEQ ID NO: 1886843
ccagccaugccucaggaau

SEQ ID NO: 2430353 - RNA, 19 nt, Artificial Sequence
  Description of Artificial Sequence: Synthetic oligonucleotide
  Antisense strand to SEQ ID NO: 2430352
auuccugaggcauggcugg

SEQ ID NO: 2430354 - RNA, 19 nt, Artificial Sequence
  Description of Artificial Sequence: Synthetic oligonucleotide
  Sense strand starting at position 2977 of SEQ ID NO: 1886843
caggaauugcuguguggug

SEQ ID NO: 2430355 - RNA, 19 nt, Artificial Sequence
  Description of Artificial Sequence: Synthetic oligonucleotide
  Antisense strand to SEQ ID NO: 2430354
caccacacagcaauuccug

SEQ ID NO: 2430356 - RNA, 19 nt, Artificial Sequence
  Description of Artificial Sequence: Synthetic oligonucleotide
  Sense strand starting at position 2978 of SEQ ID NO: 1886843
aggaauugcugugugguga

SEQ ID NO: 2430357 - RNA, 19 nt, Artificial Sequence
  Description of Artificial Sequence: Synthetic oligonucleotide
  Antisense strand to SEQ ID NO: 2430356
ucaccacacagcaauuccu

SEQ ID NO: 2430358 - RNA, 19 nt, Artificial Sequence
  Description of Artificial Sequence: Synthetic oligonucleotide
  Sense strand starting at position 3112 of SEQ ID NO: 1886843
gcccuagggacacauguua

SEQ ID NO: 2430359 - RNA, 19 nt, Artificial Sequence
  Description of Artificial Sequence: Synthetic oligonucleotide
  Antisense strand to SEQ ID NO: 2430358
uaacaugugucccuagggc

SEQ ID NO: 2430360 - RNA, 19 nt, Artificial Sequence
  Description of Artificial Sequence: Synthetic oligonucleotide
  Sense strand starting at position 3119 of SEQ ID NO: 1886843
ggacacauguuauggccau

SEQ ID NO: 2430361 - RNA, 19 nt, Artificial Sequence
  Description of Artificial Sequence: Synthetic oligonucleotide
  Antisense strand to SEQ ID NO: 2430360
auggccauaacaugugucc

SEQ ID NO: 2430362 - RNA, 19 nt, Artificial Sequence
  Description of Artificial Sequence: Synthetic oligonucleotide
  Sense strand starting at position 3140 of SEQ ID NO: 1886843
uuaugacagcgaugucaca

SEQ ID NO: 2430363 - RNA, 19 nt, Artificial Sequence
  Description of Artificial Sequence: Synthetic oligonucleotide
  Antisense strand to SEQ ID NO: 2430362
ugugacaucgcugucauaa

SEQ ID NO: 2430364 - RNA, 19 nt, Artificial Sequence
  Description of Artificial Sequence: Synthetic oligonucleotide
  Sense strand starting at position 3202 of SEQ ID NO: 1886843
cugcaauugggcuggcuaa

SEQ ID NO: 2430365 - RNA, 19 nt, Artificial Sequence
  Description of Artificial Sequence: Synthetic oligonucleotide
  Antisense strand to SEQ ID NO: 2430364
uuagccagcccaauugcag

SEQ ID NO: 2430366 - RNA, 19 nt, Artificial Sequence
  Description of Artificial Sequence: Synthetic oligonucleotide
  Sense strand starting at position 3319 of SEQ ID NO: 1886843
cagaacggcuauugauaaa

SEQ ID NO: 2430367 - RNA, 19 nt, Artificial Sequence
  Description of Artificial Sequence: Synthetic oligonucleotide
  Antisense strand to SEQ ID NO: 2430366
uuuaucaauagccguucug

SEQ ID NO: 2430368 - RNA, 19 nt, Artificial Sequence
  Description of Artificial Sequence: Synthetic oligonucleotide
  Sense strand starting at position 3935 of SEQ ID NO: 1886843
cugacauuccuuugagcca

SEQ ID NO: 2430369 - RNA, 19 nt, Artificial Sequence
  Description of Artificial Sequence: Synthetic oligonucleotide
  Antisense strand to SEQ ID NO: 2430368
uggcucaaaggaaugucag

SEQ ID NO: 2430370 - RNA, 19 nt, Artificial Sequence
  Description of Artificial Sequence: Synthetic oligonucleotide
  Sense strand starting at position 552 of SEQ ID NO: 1886844
gcuugagacucagaauucu

SEQ ID NO: 2430371 - RNA, 19 nt, Artificial Sequence
  Description of Artificial Sequence: Synthetic oligonucleotide
  Antisense strand to SEQ ID NO: 2430370
agaauucugagucucaagc

SEQ ID NO: 2430372 - RNA, 19 nt, Artificial Sequence
  Description of Artificial Sequence: Synthetic oligonucleotide
  Sense strand starting at position 724 of SEQ ID NO: 1886844
aggauaauuugucaugaag

SEQ ID NO: 2430373 - RNA, 19 nt, Artificial Sequence
  Description of Artificial Sequence: Synthetic oligonucleotide
  Antisense strand to SEQ ID NO: 2430372
cuucaugacaaauuauccu

SEQ ID NO: 2430374 - RNA, 19 nt, Artificial Sequence
  Description of Artificial Sequence: Synthetic oligonucleotide
  Sense strand starting at position 726 of SEQ ID NO: 1886844
gauaauuugucaugaaggu

SEQ ID NO: 2430375 - RNA, 19 nt, Artificial Sequence
  Description of Artificial Sequence: Synthetic oligonucleotide
  Antisense strand to SEQ ID NO: 2430374
accuucaugacaaauuauc

SEQ ID NO: 2430376 - RNA, 19 nt, Artificial Sequence
  Description of Artificial Sequence: Synthetic oligonucleotide
  Sense strand starting at position 1253 of SEQ ID NO: 1886844
cggcccuuauguuugauga

SEQ ID NO: 2430377 - RNA, 19 nt, Artificial Sequence
  Description of Artificial Sequence: Synthetic oligonucleotide
  Antisense strand to SEQ ID NO: 2430376
ucaucaaacauaagggccg

SEQ ID NO: 2430378 - RNA, 19 nt, Artificial Sequence
  Description of Artificial Sequence: Synthetic oligonucleotide
  Sense strand starting at position 1254 of SEQ ID NO: 1886844
ggcccuuauguuugaugaa

SEQ ID NO: 2430379 - RNA, 19 nt, Artificial Sequence
  Description of Artificial Sequence: Synthetic oligonucleotide
  Antisense strand to SEQ ID NO: 2430378
uucaucaaacauaagggcc

SEQ ID NO: 2430380 - RNA, 19 nt, Artificial Sequence
  Description of Artificial Sequence: Synthetic oligonucleotide
  Sense strand starting at position 1255 of SEQ ID NO: 1886844
gcccuuauguuugaugaau

SEQ ID NO: 2430381 - RNA, 19 nt, Artificial Sequence
  Description of Artificial Sequence: Synthetic oligonucleotide
  Antisense strand to SEQ ID NO: 2430380
auucaucaaacauaagggc

SEQ ID NO: 2430382 - RNA, 19 nt, Artificial Sequence
  Description of Artificial Sequence: Synthetic oligonucleotide
  Sense strand starting at position 1257 of SEQ ID NO: 1886844
ccuuauguuugaugaauaa

SEQ ID NO: 2430383 - RNA, 19 nt, Artificial Sequence
  Description of Artificial Sequence: Synthetic oligonucleotide
  Antisense strand to SEQ ID NO: 2430382
uuauucaucaaacauaagg

SEQ ID NO: 2430384 - RNA, 19 nt, Artificial Sequence
  Description of Artificial Sequence: Synthetic oligonucleotide
  Sense strand starting at position 2034 of SEQ ID NO: 1886844
gccaauccguuacagacua

SEQ ID NO: 2430385 - RNA, 19 nt, Artificial Sequence
  Description of Artificial Sequence: Synthetic oligonucleotide
  Antisense strand to SEQ ID NO: 2430384
uagucuguaacggauuggc

SEQ ID NO: 2430386 - RNA, 19 nt, Artificial Sequence
  Description of Artificial Sequence: Synthetic oligonucleotide
  Sense strand starting at position 2459 of SEQ ID NO: 1886844
gucugauggcugggucaga

SEQ ID NO: 2430387 - RNA, 19 nt, Artificial Sequence
  Description of Artificial Sequence: Synthetic oligonucleotide
  Antisense strand to SEQ ID NO: 2430386
ucugacccagccaucagac

SEQ ID NO: 2430388 - RNA, 19 nt, Artificial Sequence
  Description of Artificial Sequence: Synthetic oligonucleotide
  Sense strand starting at position 2695 of SEQ ID NO: 1886844
ccgggauugcucgccucua

SEQ ID NO: 2430389 - RNA, 19 nt, Artificial Sequence
  Description of Artificial Sequence: Synthetic oligonucleotide
  Antisense strand to SEQ ID NO: 2430388
uagaggcgagcaaucccgg

SEQ ID NO: 2430390 - RNA, 19 nt, Artificial Sequence
  Description of Artificial Sequence: Synthetic oligonucleotide
  Sense strand starting at position 3392 of SEQ ID NO: 1886844
gaagaaauguaacuauguu

SEQ ID NO: 2430391 - RNA, 19 nt, Artificial Sequence
  Description of Artificial Sequence: Synthetic oligonucleotide
  Antisense strand to SEQ ID NO: 2430390
aacauaguuacauuucuuc

SEQ ID NO: 2430392 - RNA, 19 nt, Artificial Sequence
  Description of Artificial Sequence: Synthetic oligonucleotide
  Sense strand starting at position 3842 of SEQ ID NO: 1886844
guuggcauuuagucacaca

SEQ ID NO: 2430393 - RNA, 19 nt, Artificial Sequence
  Description of Artificial Sequence: Synthetic oligonucleotide
  Antisense strand to SEQ ID NO: 2430392
ugugugacuaaaugccaac

SEQ ID NO: 2430394 - RNA, 19 nt, Artificial Sequence
  Description of Artificial Sequence: Synthetic oligonucleotide
  Sense strand starting at position 3845 of SEQ ID NO: 1886844
ggcauuuagucacacauug

SEQ ID NO: 2430395 - RNA, 19 nt, Artificial Sequence
  Description of Artificial Sequence: Synthetic oligonucleotide
  Antisense strand to SEQ ID NO: 2430394
caaugugugacuaaaugcc

SEQ ID NO: 2430396 - RNA, 19 nt, Artificial Sequence
  Description of Artificial Sequence: Synthetic oligonucleotide
  Sense strand starting at position 2021 of SEQ ID NO: 1886845
uggacuuuaugaucauguu

SEQ ID NO: 2430397 - RNA, 19 nt, Artificial Sequence
  Description of Artificial Sequence: Synthetic oligonucleotide
  Antisense strand to SEQ ID NO: 2430396
aacaugaucauaaagucca

SEQ ID NO: 2430398 - RNA, 19 nt, Artificial Sequence
  Description of Artificial Sequence: Synthetic oligonucleotide
  Sense strand starting at position 2022 of SEQ ID NO: 1886845
ggacuuuaugaucauguuc

SEQ ID NO: 2430399 - RNA, 19 nt, Artificial Sequence
  Description of Artificial Sequence: Synthetic oligonucleotide
  Antisense strand to SEQ ID NO: 2430398
gaacaugaucauaaagucc

SEQ ID NO: 2430400 - RNA, 19 nt, Artificial Sequence
  Description of Artificial Sequence: Synthetic oligonucleotide
  Sense strand starting at position 2240 of SEQ ID NO: 1886845
cuguguccagcuuagagaa

SEQ ID NO: 2430401 - RNA, 19 nt, Artificial Sequence
  Description of Artificial Sequence: Synthetic oligonucleotide
  Antisense strand to SEQ ID NO: 2430400
uucucuaagcuggacacag

SEQ ID NO: 2430402 - RNA, 19 nt, Artificial Sequence
  Description of Artificial Sequence: Synthetic oligonucleotide
  Sense strand starting at position 2338 of SEQ ID NO: 1886845
gguugguaguggcgauaga

SEQ ID NO: 2430403 - RNA, 19 nt, Artificial Sequence
  Description of Artificial Sequence: Synthetic oligonucleotide
  Antisense strand to SEQ ID NO: 2430402
ucuaucgccacuaccaacc

SEQ ID NO: 2430404 - RNA, 19 nt, Artificial Sequence
  Description of Artificial Sequence: Synthetic oligonucleotide
  Sense strand starting at position 2570 of SEQ ID NO: 1886845
gcaaguguuggguguccua

SEQ ID NO: 2430405 - RNA, 19 nt, Artificial Sequence
  Description of Artificial Sequence: Synthetic oligonucleotide
  Antisense strand to SEQ ID NO: 2430404
uaggacacccaacacuugc

SEQ ID NO: 2430406 - RNA, 19 nt, Artificial Sequence
  Description of Artificial Sequence: Synthetic oligonucleotide
  Sense strand starting at position 2782 of SEQ ID NO: 1886845
ggcguuaucuucugcugca

SEQ ID NO: 2430407 - RNA, 19 nt, Artificial Sequence
  Description of Artificial Sequence: Synthetic oligonucleotide
  Antisense strand to SEQ ID NO: 2430406
ugcagcagaagauaacgcc

SEQ ID NO: 2430408 - RNA, 19 nt, Artificial Sequence
  Description of Artificial Sequence: Synthetic oligonucleotide
  Sense strand starting at position 2783 of SEQ ID NO: 1886845
gcguuaucuucugcugcac

SEQ ID NO: 2430409 - RNA, 19 nt, Artificial Sequence
  Description of Artificial Sequence: Synthetic oligonucleotide
  Antisense strand to SEQ ID NO: 2430408
gugcagcagaagauaacgc

SEQ ID NO: 2430410 - RNA, 19 nt, Artificial Sequence
  Description of Artificial Sequence: Synthetic oligonucleotide
  Sense strand starting at position 2817 of SEQ ID NO: 1886845
guggguuggguggaguuaa

SEQ ID NO: 2430411 - RNA, 19 nt, Artificial Sequence
  Description of Artificial Sequence: Synthetic oligonucleotide
  Antisense strand to SEQ ID NO: 2430410
uuaacuccacccaacccac

SEQ ID NO: 2430412 - RNA, 19 nt, Artificial Sequence
  Description of Artificial Sequence: Synthetic oligonucleotide
  Sense strand starting at position 3025 of SEQ ID NO: 1886845
ccugaaacuguaggaugua

SEQ ID NO: 2430413 - RNA, 19 nt, Artificial Sequence
  Description of Artificial Sequence: Synthetic oligonucleotide
  Antisense strand to SEQ ID NO: 2430412
uacauccuacaguuucagg

SEQ ID NO: 2430414 - RNA, 19 nt, Artificial Sequence
  Description of Artificial Sequence: Synthetic oligonucleotide
  Sense strand starting at position 3026 of SEQ ID NO: 1886845
cugaaacuguaggauguau

SEQ ID NO: 2430415 - RNA, 19 nt, Artificial Sequence
  Description of Artificial Sequence: Synthetic oligonucleotide
  Antisense strand to SEQ ID NO: 2430414
auacauccuacaguuucag

SEQ ID NO: 2430416 - RNA, 19 nt, Artificial Sequence
  Description of Artificial Sequence: Synthetic oligonucleotide
  Sense strand starting at position 3037 of SEQ ID NO: 1886845
ggauguauuggaugugcua

SEQ ID NO: 2430417 - RNA, 19 nt, Artificial Sequence
  Description of Artificial Sequence: Synthetic oligonucleotide
  Antisense strand to SEQ ID NO: 2430416
uagcacauccaauacaucc

SEQ ID NO: 2430418 - RNA, 19 nt, Artificial Sequence
  Description of Artificial Sequence: Synthetic oligonucleotide
  Sense strand starting at position 3303 of SEQ ID NO: 1886845
ucaugcuuuguguugcgaa

SEQ ID NO: 2430419 - RNA, 19 nt, Artificial Sequence
  Description of Artificial Sequence: Synthetic oligonucleotide
  Antisense strand to SEQ ID NO: 2430418
uucgcaacacaaagcauga

SEQ ID NO: 2430420 - RNA, 19 nt, Artificial Sequence
  Description of Artificial Sequence: Synthetic oligonucleotide
  Sense strand starting at position 3304 of SEQ ID NO: 1886845
caugcuuuguguugcgaag

SEQ ID NO: 2430421 - RNA, 19 nt, Artificial Sequence
  Description of Artificial Sequence: Synthetic oligonucleotide
  Antisense strand to SEQ ID NO: 2430420
cuucgcaacacaaagcaug

SEQ ID NO: 2430422 - RNA, 19 nt, Artificial Sequence
  Description of Artificial Sequence: Synthetic oligonucleotide
  Sense strand starting at position 3306 of SEQ ID NO: 1886845
ugcuuuguguugcgaagac

SEQ ID NO: 2430423 - RNA, 19 nt, Artificial Sequence
  Description of Artificial Sequence: Synthetic oligonucleotide
  Antisense strand to SEQ ID NO: 2430422
gucuucgcaacacaaagca

SEQ ID NO: 2430424 - RNA, 19 nt, Artificial Sequence
  Description of Artificial Sequence: Synthetic oligonucleotide
  Sense strand starting at position 638 of SEQ ID NO: 1886846
gcuagagacuaucccuaua

SEQ ID NO: 2430425 - RNA, 19 nt, Artificial Sequence
  Description of Artificial Sequence: Synthetic oligonucleotide
  Antisense strand to SEQ ID NO: 2430424
uauagggauagucucuagc

SEQ ID NO: 2430426 - RNA, 19 nt, Artificial Sequence
  Description of Artificial Sequence: Synthetic oligonucleotide
  Sense strand starting at position 856 of SEQ ID NO: 1886846
ccuccuucucuugggaaau

SEQ ID NO: 2430427 - RNA, 19 nt, Artificial Sequence
  Description of Artificial Sequence: Synthetic oligonucleotide
  Antisense strand to SEQ ID NO: 2430426
auuucccaagagaaggagg

SEQ ID NO: 2430428 - RNA, 19 nt, Artificial Sequence
  Description of Artificial Sequence: Synthetic oligonucleotide
  Sense strand starting at position 964 of SEQ ID NO: 1886846
cagugaucuugggugaguc

SEQ ID NO: 2430429 - RNA, 19 nt, Artificial Sequence
  Description of Artificial Sequence: Synthetic oligonucleotide
  Antisense strand to SEQ ID NO: 2430428
gacucacccaagaucacug

SEQ ID NO: 2430430 - RNA, 19 nt, Artificial Sequence
  Description of Artificial Sequence: Synthetic oligonucleotide
  Sense strand starting at position 965 of SEQ ID NO: 1886846
agugaucuugggugaguca

SEQ ID NO: 2430431 - RNA, 19 nt, Artificial Sequence
  Description of Artificial Sequence: Synthetic oligonucleotide
  Antisense strand to SEQ ID NO: 2430430
ugacucacccaagaucacu

SEQ ID NO: 2430432 - RNA, 19 nt, Artificial Sequence
  Description of Artificial Sequence: Synthetic oligonucleotide
  Sense strand starting at position 1190 of SEQ ID NO: 1886846
cagucaucuguguaccuuu

SEQ ID NO: 2430433 - RNA, 19 nt, Artificial Sequence
  Description of Artificial Sequence: Synthetic oligonucleotide
  Antisense strand to SEQ ID NO: 2430432
aaagguacacagaugacug

SEQ ID NO: 2430434 - RNA, 19 nt, Artificial Sequence
  Description of Artificial Sequence: Synthetic oligonucleotide
  Sense strand starting at position 1231 of SEQ ID NO: 1886846
cagacagagccaggucuau

SEQ ID NO: 2430435 - RNA, 19 nt, Artificial Sequence
  Description of Artificial Sequence: Synthetic oligonucleotide
  Antisense strand to SEQ ID NO: 2430434
auagaccuggcucugucug

SEQ ID NO: 2430436 - RNA, 19 nt, Artificial Sequence
  Description of Artificial Sequence: Synthetic oligonucleotide
  Sense strand starting at position 1293 of SEQ ID NO: 1886846
gcuggagaguagucacaac

SEQ ID NO: 2430437 - RNA, 19 nt, Artificial Sequence
  Description of Artificial Sequence: Synthetic oligonucleotide
  Antisense strand to SEQ ID NO: 2430436
guugugacuacucuccagc

SEQ ID NO: 2430438 - RNA, 19 nt, Artificial Sequence
  Description of Artificial Sequence: Synthetic oligonucleotide
  Sense strand starting at position 1345 of SEQ ID NO: 1886846
ccuggucaccugggagaaa

SEQ ID NO: 2430439 - RNA, 19 nt, Artificial Sequence
  Description of Artificial Sequence: Synthetic oligonucleotide
  Antisense strand to SEQ ID NO: 2430438
uuucucccaggugaccagg

SEQ ID NO: 2430440 - RNA, 19 nt, Artificial Sequence
  Description of Artificial Sequence: Synthetic oligonucleotide
  Sense strand starting at position 1357 of SEQ ID NO: 1886846
ggagaaagcucacuggacu

SEQ ID NO: 2430441 - RNA, 19 nt, Artificial Sequence
  Description of Artificial Sequence: Synthetic oligonucleotide
  Antisense strand to SEQ ID NO: 2430440
aguccagugagcuuucucc

SEQ ID NO: 2430442 - RNA, 19 nt, Artificial Sequence
  Description of Artificial Sequence: Synthetic oligonucleotide
  Sense strand starting at position 1577 of SEQ ID NO: 1886846
aggucagaaugcucuucuu

SEQ ID NO: 2430443 - RNA, 19 nt, Artificial Sequence
  Description of Artificial Sequence: Synthetic oligonucleotide
  Antisense strand to SEQ ID NO: 2430442
aagaagagcauucugaccu

SEQ ID NO: 2430444 - RNA, 19 nt, Artificial Sequence
  Description of Artificial Sequence: Synthetic oligonucleotide
  Sense strand starting at position 1580 of SEQ ID NO: 1886846
ucagaaugcucuucuuuag

SEQ ID NO: 2430445 - RNA, 19 nt, Artificial Sequence
  Description of Artificial Sequence: Synthetic oligonucleotide
  Antisense strand to SEQ ID NO: 2430444
cuaaagaagagcauucuga

SEQ ID NO: 2430446 - RNA, 19 nt, Artificial Sequence
  Description of Artificial Sequence: Synthetic oligonucleotide
  Sense strand starting at position 1677 of SEQ ID NO: 1886846
uugaacugucccuguggau

SEQ ID NO: 2430447 - RNA, 19 nt, Artificial Sequence
  Description of Artificial Sequence: Synthetic oligonucleotide
  Antisense strand to SEQ ID NO: 2430446
auccacagggacaguucaa

SEQ ID NO: 2430448 - RNA, 19 nt, Artificial Sequence
  Description of Artificial Sequence: Synthetic oligonucleotide
  Sense strand starting at position 1745 of SEQ ID NO: 1886846
ggaagagucuucccuccag

SEQ ID NO: 2430449 - RNA, 19 nt, Artificial Sequence
  Description of Artificial Sequence: Synthetic oligonucleotide
  Antisense strand to SEQ ID NO: 2430448
cuggagggaagacucuucc

SEQ ID NO: 2430450 - RNA, 19 nt, Artificial Sequence
  Description of Artificial Sequence: Synthetic oligonucleotide
  Sense strand starting at position 1751 of SEQ ID NO: 1886846
gucuucccuccaggagauu

SEQ ID NO: 2430451 - RNA, 19 nt, Artificial Sequence
  Description of Artificial Sequence: Synthetic oligonucleotide
  Antisense strand to SEQ ID NO: 2430450
aaucuccuggagggaagac

SEQ ID NO: 2430452 - RNA, 19 nt, Artificial Sequence
  Description of Artificial Sequence: Synthetic oligonucleotide
  Sense strand starting at position 1776 of SEQ ID NO: 1886846
auccucuaagccugagaua

SEQ ID NO: 2430453 - RNA, 19 nt, Artificial Sequence
  Description of Artificial Sequence: Synthetic oligonucleotide
  Antisense strand to SEQ ID NO: 2430452
uaucucaggcuuagaggau

SEQ ID NO: 2430454 - RNA, 19 nt, Artificial Sequence
  Description of Artificial Sequence: Synthetic oligonucleotide
  Sense strand starting at position 1827 of SEQ ID NO: 1886846
aggauugggauguggugaa

SEQ ID NO: 2430455 - RNA, 19 nt, Artificial Sequence
  Description of Artificial Sequence: Synthetic oligonucleotide
  Antisense strand to SEQ ID NO: 2430454
uucaccacaucccaauccu

SEQ ID NO: 2430456 - RNA, 19 nt, Artificial Sequence
  Description of Artificial Sequence: Synthetic oligonucleotide
  Sense strand starting at position 2050 of SEQ ID NO: 1886846
gcaggugacuggagagauu

SEQ ID NO: 2430457 - RNA, 19 nt, Artificial Sequence
  Description of Artificial Sequence: Synthetic oligonucleotide
  Antisense strand to SEQ ID NO: 2430456
aaucucuccagucaccugc

SEQ ID NO: 2430458 - RNA, 19 nt, Artificial Sequence
  Description of Artificial Sequence: Synthetic oligonucleotide
  Sense strand starting at position 2197 of SEQ ID NO: 1886846
aggcauuccuucuugacca

SEQ ID NO: 2430459 - RNA, 19 nt, Artificial Sequence
  Description of Artificial Sequence: Synthetic oligonucleotide
  Antisense strand to SEQ ID NO: 2430458
uggucaagaaggaaugccu

SEQ ID NO: 2430460 - RNA, 19 nt, Artificial Sequence
  Description of Artificial Sequence: Synthetic oligonucleotide
  Sense strand starting at position 2219 of SEQ ID NO: 1886846
aaguguuccuaggucacau

SEQ ID NO: 2430461 - RNA, 19 nt, Artificial Sequence
  Description of Artificial Sequence: Synthetic oligonucleotide
  Antisense strand to SEQ ID NO: 2430460
augugaccuaggaacacuu

SEQ ID NO: 2430462 - RNA, 19 nt, Artificial Sequence
  Description of Artificial Sequence: Synthetic oligonucleotide
  Sense strand starting at position 2314 of SEQ ID NO: 1886846
gaaacuguugaucaccagu

SEQ ID NO: 2430463 - RNA, 19 nt, Artificial Sequence
  Description of Artificial Sequence: Synthetic oligonucleotide
  Antisense strand to SEQ ID NO: 2430462
acuggugaucaacaguuuc

SEQ ID NO: 2430464 - RNA, 19 nt, Artificial Sequence
  Description of Artificial Sequence: Synthetic oligonucleotide
  Sense strand starting at position 2322 of SEQ ID NO: 1886846
ugaucaccaguuugagaua

SEQ ID NO: 2430465 - RNA, 19 nt, Artificial Sequence
  Description of Artificial Sequence: Synthetic oligonucleotide
  Antisense strand to SEQ ID NO: 2430464
uaucucaaacuggugauca

SEQ ID NO: 2430466 - RNA, 19 nt, Artificial Sequence
  Description of Artificial Sequence: Synthetic oligonucleotide
  Sense strand starting at position 2325 of SEQ ID NO: 1886846
ucaccaguuugagauauuu

SEQ ID NO: 2430467 - RNA, 19 nt, Artificial Sequence
  Description of Artificial Sequence: Synthetic oligonucleotide
  Antisense strand to SEQ ID NO: 2430466
aaauaucucaaacugguga

SEQ ID NO: 2430468 - RNA, 19 nt, Artificial Sequence
  Description of Artificial Sequence: Synthetic oligonucleotide
  Sense strand starting at position 2427 of SEQ ID NO: 1886846
ucaucugaugguugucuga

SEQ ID NO: 2430469 - RNA, 19 nt, Artificial Sequence
  Description of Artificial Sequence: Synthetic oligonucleotide
  Antisense strand to SEQ ID NO: 2430468
ucagacaaccaucagauga

SEQ ID NO: 2430470 - RNA, 19 nt, Artificial Sequence
  Description of Artificial Sequence: Synthetic oligonucleotide
  Sense strand starting at position 2429 of SEQ ID NO: 1886846
aucugaugguugucugaca

SEQ ID NO: 2430471 - RNA, 19 nt, Artificial Sequence
  Description of Artificial Sequence: Synthetic oligonucleotide
  Antisense strand to SEQ ID NO: 2430470
ugucagacaaccaucagau

SEQ ID NO: 2430472 - RNA, 19 nt, Artificial Sequence
  Description of Artificial Sequence: Synthetic oligonucleotide
  Sense strand starting at position 2430 of SEQ ID NO: 1886846
ucugaugguugucugacau

SEQ ID NO: 2430473 - RNA, 19 nt, Artificial Sequence
  Description of Artificial Sequence: Synthetic oligonucleotide
  Antisense strand to SEQ ID NO: 2430472
augucagacaaccaucaga

SEQ ID NO: 2430474 - RNA, 19 nt, Artificial Sequence
  Description of Artificial Sequence: Synthetic oligonucleotide
  Sense strand starting at position 2476 of SEQ ID NO: 1886846
ccugcucaugucugaauaa

SEQ ID NO: 2430475 - RNA, 19 nt, Artificial Sequence
  Description of Artificial Sequence: Synthetic oligonucleotide
  Antisense strand to SEQ ID NO: 2430474
uuauucagacaugagcagg

SEQ ID NO: 2430476 - RNA, 19 nt, Artificial Sequence
  Description of Artificial Sequence: Synthetic oligonucleotide
  Sense strand starting at position 2792 of SEQ ID NO: 1886846
guaagaaugagucaagcug

SEQ ID NO: 2430477 - RNA, 19 nt, Artificial Sequence
  Description of Artificial Sequence: Synthetic oligonucleotide
  Antisense strand to SEQ ID NO: 2430476
cagcuugacucauucuuac

SEQ ID NO: 2430478 - RNA, 19 nt, Artificial Sequence
  Description of Artificial Sequence: Synthetic oligonucleotide
  Sense strand starting at position 2920 of SEQ ID NO: 1886846
gccuccaaagccuaugaua

SEQ ID NO: 2430479 - RNA, 19 nt, Artificial Sequence
  Description of Artificial Sequence: Synthetic oligonucleotide
  Antisense strand to SEQ ID NO: 2430478
uaucauaggcuuuggaggc

SEQ ID NO: 2430480 - RNA, 19 nt, Artificial Sequence
  Description of Artificial Sequence: Synthetic oligonucleotide
  Sense strand starting at position 2956 of SEQ ID NO: 1886846
ggaauucucuaaucugcga

SEQ ID NO: 2430481 - RNA, 19 nt, Artificial Sequence
  Description of Artificial Sequence: Synthetic oligonucleotide
  Antisense strand to SEQ ID NO: 2430480
ucgcagauuagagaauucc

SEQ ID NO: 2430482 - RNA, 19 nt, Artificial Sequence
  Description of Artificial Sequence: Synthetic oligonucleotide
  Sense strand starting at position 3024 of SEQ ID NO: 1886846
uugagucaacuccaagguu

SEQ ID NO: 2430483 - RNA, 19 nt, Artificial Sequence
  Description of Artificial Sequence: Synthetic oligonucleotide
  Antisense strand to SEQ ID NO: 2430482
aaccuuggaguugacucaa

SEQ ID NO: 2430484 - RNA, 19 nt, Artificial Sequence
  Description of Artificial Sequence: Synthetic oligonucleotide
  Sense strand starting at position 3043 of SEQ ID NO: 1886846
uguguaugaguguagaaag

SEQ ID NO: 2430485 - RNA, 19 nt, Artificial Sequence
  Description of Artificial Sequence: Synthetic oligonucleotide
  Antisense strand to SEQ ID NO: 2430484
cuuucuacacucauacaca

SEQ ID NO: 2430486 - RNA, 19 nt, Artificial Sequence
  Description of Artificial Sequence: Synthetic oligonucleotide
  Sense strand starting at position 3068 of SEQ ID NO: 1886846
agaauaggguucuccuuau

SEQ ID NO: 2430487 - RNA, 19 nt, Artificial Sequence
  Description of Artificial Sequence: Synthetic oligonucleotide
  Antisense strand to SEQ ID NO: 2430486
auaaggagaacccuauucu

SEQ ID NO: 2430488 - RNA, 19 nt, Artificial Sequence
  Description of Artificial Sequence: Synthetic oligonucleotide
  Sense strand starting at position 3240 of SEQ ID NO: 1886846
ggcccugugcaauacuaau

SEQ ID NO: 2430489 - RNA, 19 nt, Artificial Sequence
  Description of Artificial Sequence: Synthetic oligonucleotide
  Antisense strand to SEQ ID NO: 2430488
auuaguauugcacagggcc

SEQ ID NO: 2430490 - RNA, 19 nt, Artificial Sequence
  Description of Artificial Sequence: Synthetic oligonucleotide
  Sense strand starting at position 3552 of SEQ ID NO: 1886846
gcacuuaagcuugagcuca

SEQ ID NO: 2430491 - RNA, 19 nt, Artificial Sequence
  Description of Artificial Sequence: Synthetic oligonucleotide
  Antisense strand to SEQ ID NO: 2430490
ugagcucaagcuuaagugc

SEQ ID NO: 2430492 - RNA, 19 nt, Artificial Sequence
  Description of Artificial Sequence: Synthetic oligonucleotide
  Sense strand starting at position 3839 of SEQ ID NO: 1886846
guuacaagguccuugaaga

SEQ ID NO: 2430493 - RNA, 19 nt, Artificial Sequence
  Description of Artificial Sequence: Synthetic oligonucleotide
  Antisense strand to SEQ ID NO: 2430492
ucuucaaggaccuuguaac

SEQ ID NO: 2430494 - RNA, 19 nt, Artificial Sequence
  Description of Artificial Sequence: Synthetic oligonucleotide
  Sense strand starting at position 3840 of SEQ ID NO: 1886846
uuacaagguccuugaagaa

SEQ ID NO: 2430495 - RNA, 19 nt, Artificial Sequence
  Description of Artificial Sequence: Synthetic oligonucleotide
  Antisense strand to SEQ ID NO: 2430494
uucuucaaggaccuuguaa

SEQ ID NO: 2430496 - RNA, 19 nt, Artificial Sequence
  Description of Artificial Sequence: Synthetic oligonucleotide
  Sense strand starting at position 3853 of SEQ ID NO: 1886846
gaagaaugucuccaacggu

SEQ ID NO: 2430497 - RNA, 19 nt, Artificial Sequence
  Description of Artificial Sequence: Synthetic oligonucleotide
  Antisense strand to SEQ ID NO: 2430496
accguuggagacauucuuc

SEQ ID NO: 2430498 - RNA, 19 nt, Artificial Sequence
  Description of Artificial Sequence: Synthetic oligonucleotide
  Sense strand starting at position 3859 of SEQ ID NO: 1886846
ugucuccaacggugagaua

SEQ ID NO: 2430499 - RNA, 19 nt, Artificial Sequence
  Description of Artificial Sequence: Synthetic oligonucleotide
  Antisense strand to SEQ ID NO: 2430498
uaucucaccguuggagaca

SEQ ID NO: 2430500 - RNA, 19 nt, Artificial Sequence
  Description of Artificial Sequence: Synthetic oligonucleotide
  Sense strand starting at position 3868 of SEQ ID NO: 1886846
cggugagauagauaccgua

SEQ ID NO: 2430501 - RNA, 19 nt, Artificial Sequence
  Description of Artificial Sequence: Synthetic oligonucleotide
  Antisense strand to SEQ ID NO: 2430500
uacgguaucuaucucaccg

SEQ ID NO: 2430502 - RNA, 19 nt, Artificial Sequence
  Description of Artificial Sequence: Synthetic oligonucleotide
  Sense strand starting at position 3914 of SEQ ID NO: 1886846
aguaaagaguuauuacuca

SEQ ID NO: 2430503 - RNA, 19 nt, Artificial Sequence
  Description of Artificial Sequence: Synthetic oligonucleotide
  Antisense strand to SEQ ID NO: 2430502
ugaguaauaacucuuuacu

SEQ ID NO: 2430504 - RNA, 19 nt, Artificial Sequence
  Description of Artificial Sequence: Synthetic oligonucleotide
  Sense strand starting at position 748 of SEQ ID NO: 1886847
gccuaucucugucuagaga

SEQ ID NO: 2430505 - RNA, 19 nt, Artificial Sequence
  Description of Artificial Sequence: Synthetic oligonucleotide
  Antisense strand to SEQ ID NO: 2430504
ucucuagacagagauaggc

SEQ ID NO: 2430506 - RNA, 19 nt, Artificial Sequence
  Description of Artificial Sequence: Synthetic oligonucleotide
  Sense strand starting at position 766 of SEQ ID NO: 1886847
agcuucucucagugacuca

SEQ ID NO: 2430507 - RNA, 19 nt, Artificial Sequence
  Description of Artificial Sequence: Synthetic oligonucleotide
  Antisense strand to SEQ ID NO: 2430506
ugagucacugagagaagcu

SEQ ID NO: 2430508 - RNA, 19 nt, Artificial Sequence
  Description of Artificial Sequence: Synthetic oligonucleotide
  Sense strand starting at position 1169 of SEQ ID NO: 1886847
agagaaugagcccgaguca

SEQ ID NO: 2430509 - RNA, 19 nt, Artificial Sequence
  Description of Artificial Sequence: Synthetic oligonucleotide
  Antisense strand to SEQ ID NO: 2430508
ugacucgggcucauucucu

SEQ ID NO: 2430510 - RNA, 19 nt, Artificial Sequence
  Description of Artificial Sequence: Synthetic oligonucleotide
  Sense strand starting at position 1356 of SEQ ID NO: 1886847
uucucugugugauccagau

SEQ ID NO: 2430511 - RNA, 19 nt, Artificial Sequence
  Description of Artificial Sequence: Synthetic oligonucleotide
  Antisense strand to SEQ ID NO: 2430510
aucuggaucacacagagaa

SEQ ID NO: 2430512 - RNA, 19 nt, Artificial Sequence
  Description of Artificial Sequence: Synthetic oligonucleotide
  Sense strand starting at position 1360 of SEQ ID NO: 1886847
cugugugauccagauaccu

SEQ ID NO: 2430513 - RNA, 19 nt, Artificial Sequence
  Description of Artificial Sequence: Synthetic oligonucleotide
  Antisense strand to SEQ ID NO: 2430512
agguaucuggaucacacag

SEQ ID NO: 2430514 - RNA, 19 nt, Artificial Sequence
  Description of Artificial Sequence: Synthetic oligonucleotide
  Sense strand starting at position 1362 of SEQ ID NO: 1886847
gugugauccagauaccuga

SEQ ID NO: 2430515 - RNA, 19 nt, Artificial Sequence
  Description of Artificial Sequence: Synthetic oligonucleotide
  Antisense strand to SEQ ID NO: 2430514
ucagguaucuggaucacac

SEQ ID NO: 2430516 - RNA, 19 nt, Artificial Sequence
  Description of Artificial Sequence: Synthetic oligonucleotide
  Sense strand starting at position 1450 of SEQ ID NO: 1886847
aagagaagccuuggacauc

SEQ ID NO: 2430517 - RNA, 19 nt, Artificial Sequence
  Description of Artificial Sequence: Synthetic oligonucleotide
  Antisense strand to SEQ ID NO: 2430516
gauguccaaggcuucucuu

SEQ ID NO: 2430518 - RNA, 19 nt, Artificial Sequence
  Description of Artificial Sequence: Synthetic oligonucleotide
  Sense strand starting at position 1575 of SEQ ID NO: 1886847
cuaacugauucguuucgaa

SEQ ID NO: 2430519 - RNA, 19 nt, Artificial Sequence
  Description of Artificial Sequence: Synthetic oligonucleotide
  Antisense strand to SEQ ID NO: 2430518
uucgaaacgaaucaguuag

SEQ ID NO: 2430520 - RNA, 19 nt, Artificial Sequence
  Description of Artificial Sequence: Synthetic oligonucleotide
  Sense strand starting at position 1783 of SEQ ID NO: 1886847
auugauguggucuaaccau

SEQ ID NO: 2430521 - RNA, 19 nt, Artificial Sequence
  Description of Artificial Sequence: Synthetic oligonucleotide
  Antisense strand to SEQ ID NO: 2430520
augguuagaccacaucaau

SEQ ID NO: 2430522 - RNA, 19 nt, Artificial Sequence
  Description of Artificial Sequence: Synthetic oligonucleotide
  Sense strand starting at position 1839 of SEQ ID NO: 1886847
ucacgugaugcagagaacu

SEQ ID NO: 2430523 - RNA, 19 nt, Artificial Sequence
  Description of Artificial Sequence: Synthetic oligonucleotide
  Antisense strand to SEQ ID NO: 2430522
aguucucugcaucacguga

SEQ ID NO: 2430524 - RNA, 19 nt, Artificial Sequence
  Description of Artificial Sequence: Synthetic oligonucleotide
  Sense strand starting at position 1903 of SEQ ID NO: 1886847
uggagaccugcaugauucu

SEQ ID NO: 2430525 - RNA, 19 nt, Artificial Sequence
  Description of Artificial Sequence: Synthetic oligonucleotide
  Antisense strand to SEQ ID NO: 2430524
agaaucaugcaggucucca

SEQ ID NO: 2430526 - RNA, 19 nt, Artificial Sequence
  Description of Artificial Sequence: Synthetic oligonucleotide
  Sense strand starting at position 1912 of SEQ ID NO: 1886847
gcaugauucugagcaggug

SEQ ID NO: 2430527 - RNA, 19 nt, Artificial Sequence
  Description of Artificial Sequence: Synthetic oligonucleotide
  Antisense strand to SEQ ID NO: 2430526
caccugcucagaaucaugc

SEQ ID NO: 2430528 - RNA, 19 nt, Artificial Sequence
  Description of Artificial Sequence: Synthetic oligonucleotide
  Sense strand starting at position 1913 of SEQ ID NO: 1886847
caugauucugagcagguga

SEQ ID NO: 2430529 - RNA, 19 nt, Artificial Sequence
  Description of Artificial Sequence: Synthetic oligonucleotide
  Antisense strand to SEQ ID NO: 2430528
ucaccugcucagaaucaug

SEQ ID NO: 2430530 - RNA, 19 nt, Artificial Sequence
  Description of Artificial Sequence: Synthetic oligonucleotide
  Sense strand starting at position 1987 of SEQ ID NO: 1886847
gcccguguccuucugaagu

SEQ ID NO: 2430531 - RNA, 19 nt, Artificial Sequence
  Description of Artificial Sequence: Synthetic oligonucleotide
  Antisense strand to SEQ ID NO: 2430530
acuucagaaggacacgggc

SEQ ID NO: 2430532 - RNA, 19 nt, Artificial Sequence
  Description of Artificial Sequence: Synthetic oligonucleotide
  Sense strand starting at position 2084 of SEQ ID NO: 1886847
agcguagugaugcugucau

SEQ ID NO: 2430533 - RNA, 19 nt, Artificial Sequence
  Description of Artificial Sequence: Synthetic oligonucleotide
  Antisense strand to SEQ ID NO: 2430532
augacagcaucacuacgcu

SEQ ID NO: 2430534 - RNA, 19 nt, Artificial Sequence
  Description of Artificial Sequence: Synthetic oligonucleotide
  Sense strand starting at position 2156 of SEQ ID NO: 1886847
agaauagcaucuuugagcu

SEQ ID NO: 2430535 - RNA, 19 nt, Artificial Sequence
  Description of Artificial Sequence: Synthetic oligonucleotide
  Antisense strand to SEQ ID NO: 2430534
agcucaaagaugcuauucu

SEQ ID NO: 2430536 - RNA, 19 nt, Artificial Sequence
  Description of Artificial Sequence: Synthetic oligonucleotide
  Sense strand starting at position 2197 of SEQ ID NO: 1886847
acucaugacuuguuauagu

SEQ ID NO: 2430537 - RNA, 19 nt, Artificial Sequence
  Description of Artificial Sequence: Synthetic oligonucleotide
  Antisense strand to SEQ ID NO: 2430536
acuauaacaagucaugagu

SEQ ID NO: 2430538 - RNA, 19 nt, Artificial Sequence
  Description of Artificial Sequence: Synthetic oligonucleotide
  Sense strand starting at position 2222 of SEQ ID NO: 1886847
gggaaaugguuucuccugu

SEQ ID NO: 2430539 - RNA, 19 nt, Artificial Sequence
  Description of Artificial Sequence: Synthetic oligonucleotide
  Antisense strand to SEQ ID NO: 2430538
acaggagaaaccauuuccc

SEQ ID NO: 2430540 - RNA, 19 nt, Artificial Sequence
  Description of Artificial Sequence: Synthetic oligonucleotide
  Sense strand starting at position 2282 of SEQ ID NO: 1886847
gucagucccuucucauaag

SEQ ID NO: 2430541 - RNA, 19 nt, Artificial Sequence
  Description of Artificial Sequence: Synthetic oligonucleotide
  Antisense strand to SEQ ID NO: 2430540
cuuaugagaagggacugac

SEQ ID NO: 2430542 - RNA, 19 nt, Artificial Sequence
  Description of Artificial Sequence: Synthetic oligonucleotide
  Sense strand starting at position 2297 of SEQ ID NO: 1886847
uaagaacuggucugugcau

SEQ ID NO: 2430543 - RNA, 19 nt, Artificial Sequence
  Description of Artificial Sequence: Synthetic oligonucleotide
  Antisense strand to SEQ ID NO: 2430542
augcacagaccaguucuua

SEQ ID NO: 2430544 - RNA, 19 nt, Artificial Sequence
  Description of Artificial Sequence: Synthetic oligonucleotide
  Sense strand starting at position 2299 of SEQ ID NO: 1886847
agaacuggucugugcauga

SEQ ID NO: 2430545 - RNA, 19 nt, Artificial Sequence
  Description of Artificial Sequence: Synthetic oligonucleotide
  Antisense strand to SEQ ID NO: 2430544
ucaugcacagaccaguucu

SEQ ID NO: 2430546 - RNA, 19 nt, Artificial Sequence
  Description of Artificial Sequence: Synthetic oligonucleotide
  Sense strand starting at position 2471 of SEQ ID NO: 1886847
aaagcaugaggucauguuu

SEQ ID NO: 2430547 - RNA, 19 nt, Artificial Sequence
  Description of Artificial Sequence: Synthetic oligonucleotide
  Antisense strand to SEQ ID NO: 2430546
aaacaugaccucaugcuuu

SEQ ID NO: 2430548 - RNA, 19 nt, Artificial Sequence
  Description of Artificial Sequence: Synthetic oligonucleotide
  Sense strand starting at position 2499 of SEQ ID NO: 1886847
gucuauuuauuagucaugu

SEQ ID NO: 2430549 - RNA, 19 nt, Artificial Sequence
  Description of Artificial Sequence: Synthetic oligonucleotide
  Antisense strand to SEQ ID NO: 2430548
acaugacuaauaaauagac

SEQ ID NO: 2430550 - RNA, 19 nt, Artificial Sequence
  Description of Artificial Sequence: Synthetic oligonucleotide
  Sense strand starting at position 2505 of SEQ ID NO: 1886847
uuauuagucauguagugac

SEQ ID NO: 2430551 - RNA, 19 nt, Artificial Sequence
  Description of Artificial Sequence: Synthetic oligonucleotide
  Antisense strand to SEQ ID NO: 2430550
gucacuacaugacuaauaa

SEQ ID NO: 2430552 - RNA, 19 nt, Artificial Sequence
  Description of Artificial Sequence: Synthetic oligonucleotide
  Sense strand starting at position 2566 of SEQ ID NO: 1886847
uuuagaggugggugucaau

SEQ ID NO: 2430553 - RNA, 19 nt, Artificial Sequence
  Description of Artificial Sequence: Synthetic oligonucleotide
  Antisense strand to SEQ ID NO: 2430552
auugacacccaccucuaaa

SEQ ID NO: 2430554 - RNA, 19 nt, Artificial Sequence
  Description of Artificial Sequence: Synthetic oligonucleotide
  Sense strand starting at position 2596 of SEQ ID NO: 1886847
cuagaaauaucuguagcca

SEQ ID NO: 2430555 - RNA, 19 nt, Artificial Sequence
  Description of Artificial Sequence: Synthetic oligonucleotide
  Antisense strand to SEQ ID NO: 2430554
uggcuacagauauuucuag

SEQ ID NO: 2430556 - RNA, 19 nt, Artificial Sequence
  Description of Artificial Sequence: Synthetic oligonucleotide
  Sense strand starting at position 2627 of SEQ ID NO: 1886847
aagcauuucuaggaaagag

SEQ ID NO: 2430557 - RNA, 19 nt, Artificial Sequence
  Description of Artificial Sequence: Synthetic oligonucleotide
  Antisense strand to SEQ ID NO: 2430556
cucuuuccuagaaaugcuu

SEQ ID NO: 2430558 - RNA, 19 nt, Artificial Sequence
  Description of Artificial Sequence: Synthetic oligonucleotide
  Sense strand starting at position 2697 of SEQ ID NO: 1886847
gacccagcaucguuuauaa

SEQ ID NO: 2430559 - RNA, 19 nt, Artificial Sequence
  Description of Artificial Sequence: Synthetic oligonucleotide
  Antisense strand to SEQ ID NO: 2430558
uuauaaacgaugcuggguc

SEQ ID NO: 2430560 - RNA, 19 nt, Artificial Sequence
  Description of Artificial Sequence: Synthetic oligonucleotide
  Sense strand starting at position 2699 of SEQ ID NO: 1886847
cccagcaucguuuauaacu

SEQ ID NO: 2430561 - RNA, 19 nt, Artificial Sequence
  Description of Artificial Sequence: Synthetic oligonucleotide
  Antisense strand to SEQ ID NO: 2430560
aguuauaaacgaugcuggg

SEQ ID NO: 2430562 - RNA, 19 nt, Artificial Sequence
  Description of Artificial Sequence: Synthetic oligonucleotide
  Sense strand starting at position 2869 of SEQ ID NO: 1886847
ucuacaaagucugaagaau

SEQ ID NO: 2430563 - RNA, 19 nt, Artificial Sequence
  Description of Artificial Sequence: Synthetic oligonucleotide
  Antisense strand to SEQ ID NO: 2430562
auucuucagacuuuguaga

SEQ ID NO: 2430564 - RNA, 19 nt, Artificial Sequence
  Description of Artificial Sequence: Synthetic oligonucleotide
  Sense strand starting at position 3038 of SEQ ID NO: 1886847
aguucuuauauuuguguga

SEQ ID NO: 2430565 - RNA, 19 nt, Artificial Sequence
  Description of Artificial Sequence: Synthetic oligonucleotide
  Antisense strand to SEQ ID NO: 2430564
ucacacaaauauaagaacu

SEQ ID NO: 2430566 - RNA, 19 nt, Artificial Sequence
  Description of Artificial Sequence: Synthetic oligonucleotide
  Sense strand starting at position 3039 of SEQ ID NO: 1886847
guucuuauauuugugugau

SEQ ID NO: 2430567 - RNA, 19 nt, Artificial Sequence
  Description of Artificial Sequence: Synthetic oligonucleotide
  Antisense strand to SEQ ID NO: 2430566
aucacacaaauauaagaac

SEQ ID NO: 2430568 - RNA, 19 nt, Artificial Sequence
  Description of Artificial Sequence: Synthetic oligonucleotide
  Sense strand starting at position 3053 of SEQ ID NO: 1886847
gugauaggucccuggguga

SEQ ID NO: 2430569 - RNA, 19 nt, Artificial Sequence
  Description of Artificial Sequence: Synthetic oligonucleotide
  Antisense strand to SEQ ID NO: 2430568
ucacccagggaccuaucac

SEQ ID NO: 2430570 - RNA, 19 nt, Artificial Sequence
  Description of Artificial Sequence: Synthetic oligonucleotide
  Sense strand starting at position 3243 of SEQ ID NO: 1886847
gauaaauaugcugaaguuu

SEQ ID NO: 2430571 - RNA, 19 nt, Artificial Sequence
  Description of Artificial Sequence: Synthetic oligonucleotide
  Antisense strand to SEQ ID NO: 2430570
aaacuucagcauauuuauc

SEQ ID NO: 2430572 - RNA, 19 nt, Artificial Sequence
  Description of Artificial Sequence: Synthetic oligonucleotide
  Sense strand starting at position 3598 of SEQ ID NO: 1886847
guagcauuuagccgaaagu

SEQ ID NO: 2430573 - RNA, 19 nt, Artificial Sequence
  Description of Artificial Sequence: Synthetic oligonucleotide
  Antisense strand to SEQ ID NO: 2430572
acuuucggcuaaaugcuac

SEQ ID NO: 2430574 - RNA, 19 nt, Artificial Sequence
  Description of Artificial Sequence: Synthetic oligonucleotide
  Sense strand starting at position 3784 of SEQ ID NO: 1886847
cagaguccugagugugaca

SEQ ID NO: 2430575 - RNA, 19 nt, Artificial Sequence
  Description of Artificial Sequence: Synthetic oligonucleotide
  Antisense strand to SEQ ID NO: 2430574
ugucacacucaggacucug

SEQ ID NO: 2430576 - RNA, 19 nt, Artificial Sequence
  Description of Artificial Sequence: Synthetic oligonucleotide
  Sense strand starting at position 3786 of SEQ ID NO: 1886847
gaguccugagugugacauu

SEQ ID NO: 2430577 - RNA, 19 nt, Artificial Sequence
  Description of Artificial Sequence: Synthetic oligonucleotide
  Antisense strand to SEQ ID NO: 2430576
aaugucacacucaggacuc

SEQ ID NO: 2430578 - RNA, 19 nt, Artificial Sequence
  Description of Artificial Sequence: Synthetic oligonucleotide
  Sense strand starting at position 3797 of SEQ ID NO: 1886847
gugacauuguggguucaga

SEQ ID NO: 2430579 - RNA, 19 nt, Artificial Sequence
  Description of Artificial Sequence: Synthetic oligonucleotide
  Antisense strand to SEQ ID NO: 2430578
ucugaacccacaaugucac

SEQ ID NO: 2430580 - RNA, 19 nt, Artificial Sequence
  Description of Artificial Sequence: Synthetic oligonucleotide
  Sense strand starting at position 3934 of SEQ ID NO: 1886847
uacauuugaugcuggagaa

SEQ ID NO: 2430581 - RNA, 19 nt, Artificial Sequence
  Description of Artificial Sequence: Synthetic oligonucleotide
  Antisense strand to SEQ ID NO: 2430580
uucuccagcaucaaaugua

SEQ ID NO: 2430582 - RNA, 19 nt, Artificial Sequence
  Description of Artificial Sequence: Synthetic oligonucleotide
  Sense strand starting at position 3976 of SEQ ID NO: 1886847
cgaccaugccuuuggaauu

SEQ ID NO: 2430583 - RNA, 19 nt, Artificial Sequence
  Description of Artificial Sequence: Synthetic oligonucleotide
  Antisense strand to SEQ ID NO: 2430582
aauuccaaaggcauggucg

SEQ ID NO: 2430584 - RNA, 19 nt, Artificial Sequence
  Description of Artificial Sequence: Synthetic oligonucleotide
  Sense strand starting at position 470 of SEQ ID NO: 1886848
agauuagaaucucaugaga

SEQ ID NO: 2430585 - RNA, 19 nt, Artificial Sequence
  Description of Artificial Sequence: Synthetic oligonucleotide
  Antisense strand to SEQ ID NO: 2430584
ucucaugagauucuaaucu

SEQ ID NO: 2430586 - RNA, 19 nt, Artificial Sequence
  Description of Artificial Sequence: Synthetic oligonucleotide
  Sense strand starting at position 472 of SEQ ID NO: 1886848
auuagaaucucaugagacc

SEQ ID NO: 2430587 - RNA, 19 nt, Artificial Sequence
  Description of Artificial Sequence: Synthetic oligonucleotide
  Antisense strand to SEQ ID NO: 2430586
ggucucaugagauucuaau

SEQ ID NO: 2430588 - RNA, 19 nt, Artificial Sequence
  Description of Artificial Sequence: Synthetic oligonucleotide
  Sense strand starting at position 475 of SEQ ID NO: 1886848
agaaucucaugagaccuuu

SEQ ID NO: 2430589 - RNA, 19 nt, Artificial Sequence
  Description of Artificial Sequence: Synthetic oligonucleotide
  Antisense strand to SEQ ID NO: 2430588
aaaggucucaugagauucu

SEQ ID NO: 2430590 - RNA, 19 nt, Artificial Sequence
  Description of Artificial Sequence: Synthetic oligonucleotide
  Sense strand starting at position 481 of SEQ ID NO: 1886848
ucaugagaccuuugagguc

SEQ ID NO: 2430591 - RNA, 19 nt, Artificial Sequence
  Description of Artificial Sequence: Synthetic oligonucleotide
  Antisense strand to SEQ ID NO: 2430590
gaccucaaaggucucauga

SEQ ID NO: 2430592 - RNA, 19 nt, Artificial Sequence
  Description of Artificial Sequence: Synthetic oligonucleotide
  Sense strand starting at position 502 of SEQ ID NO: 1886848
cuggcuuuauccuuugcau

SEQ ID NO: 2430593 - RNA, 19 nt, Artificial Sequence
  Description of Artificial Sequence: Synthetic oligonucleotide
  Antisense strand to SEQ ID NO: 2430592
augcaaaggauaaagccag

SEQ ID NO: 2430594 - RNA, 19 nt, Artificial Sequence
  Description of Artificial Sequence: Synthetic oligonucleotide
  Sense strand starting at position 504 of SEQ ID NO: 1886848
ggcuuuauccuuugcaucu

SEQ ID NO: 2430595 - RNA, 19 nt, Artificial Sequence
  Description of Artificial Sequence: Synthetic oligonucleotide
  Antisense strand to SEQ ID NO: 2430594
agaugcaaaggauaaagcc

SEQ ID NO: 2430596 - RNA, 19 nt, Artificial Sequence
  Description of Artificial Sequence: Synthetic oligonucleotide
  Sense strand starting at position 731 of SEQ ID NO: 1886848
gucuuucuagcacgguuua

SEQ ID NO: 2430597 - RNA, 19 nt, Artificial Sequence
  Description of Artificial Sequence: Synthetic oligonucleotide
  Antisense strand to SEQ ID NO: 2430596
uaaaccgugcuagaaagac

SEQ ID NO: 2430598 - RNA, 19 nt, Artificial Sequence
  Description of Artificial Sequence: Synthetic oligonucleotide
  Sense strand starting at position 732 of SEQ ID NO: 1886848
ucuuucuagcacgguuuaa

SEQ ID NO: 2430599 - RNA, 19 nt, Artificial Sequence
  Description of Artificial Sequence: Synthetic oligonucleotide
  Antisense strand to SEQ ID NO: 2430598
uuaaaccgugcuagaaaga

SEQ ID NO: 2430600 - RNA, 19 nt, Artificial Sequence
  Description of Artificial Sequence: Synthetic oligonucleotide
  Sense strand starting at position 1179 of SEQ ID NO: 1886848
gcccgugggagcuguuuau

SEQ ID NO: 2430601 - RNA, 19 nt, Artificial Sequence
  Description of Artificial Sequence: Synthetic oligonucleotide
  Antisense strand to SEQ ID NO: 2430600
auaaacagcucccacgggc

SEQ ID NO: 2430602 - RNA, 19 nt, Artificial Sequence
  Description of Artificial Sequence: Synthetic oligonucleotide
  Sense strand starting at position 1515 of SEQ ID NO: 1886848
uaggaacuugaauguuauu

SEQ ID NO: 2430603 - RNA, 19 nt, Artificial Sequence
  Description of Artificial Sequence: Synthetic oligonucleotide
  Antisense strand to SEQ ID NO: 2430602
aauaacauucaaguuccua

SEQ ID NO: 2430604 - RNA, 19 nt, Artificial Sequence
  Description of Artificial Sequence: Synthetic oligonucleotide
  Sense strand starting at position 1943 of SEQ ID NO: 1886848
acgucaugcuccugaagcu

SEQ ID NO: 2430605 - RNA, 19 nt, Artificial Sequence
  Description of Artificial Sequence: Synthetic oligonucleotide
  Antisense strand to SEQ ID NO: 2430604
agcuucaggagcaugacgu

SEQ ID NO: 2430606 - RNA, 19 nt, Artificial Sequence
  Description of Artificial Sequence: Synthetic oligonucleotide
  Sense strand starting at position 1944 of SEQ ID NO: 1886848
cgucaugcuccugaagcua

SEQ ID NO: 2430607 - RNA, 19 nt, Artificial Sequence
  Description of Artificial Sequence: Synthetic oligonucleotide
  Antisense strand to SEQ ID NO: 2430606
uagcuucaggagcaugacg

SEQ ID NO: 2430608 - RNA, 19 nt, Artificial Sequence
  Description of Artificial Sequence: Synthetic oligonucleotide
  Sense strand starting at position 2322 of SEQ ID NO: 1886848
uuauauguuuccuugggca

SEQ ID NO: 2430609 - RNA, 19 nt, Artificial Sequence
  Description of Artificial Sequence: Synthetic oligonucleotide
  Antisense strand to SEQ ID NO: 2430608
ugcccaaggaaacauauaa

SEQ ID NO: 2430610 - RNA, 19 nt, Artificial Sequence
  Description of Artificial Sequence: Synthetic oligonucleotide
  Sense strand starting at position 2395 of SEQ ID NO: 1886848
uuuguaacuucuuauugga

SEQ ID NO: 2430611 - RNA, 19 nt, Artificial Sequence
  Description of Artificial Sequence: Synthetic oligonucleotide
  Antisense strand to SEQ ID NO: 2430610
uccaauaagaaguuacaaa

SEQ ID NO: 2430612 - RNA, 19 nt, Artificial Sequence
  Description of Artificial Sequence: Synthetic oligonucleotide
  Sense strand starting at position 2397 of SEQ ID NO: 1886848
uguaacuucuuauuggaca

SEQ ID NO: 2430613 - RNA, 19 nt, Artificial Sequence
  Description of Artificial Sequence: Synthetic oligonucleotide
  Antisense strand to SEQ ID NO: 2430612
uguccaauaagaaguuaca

SEQ ID NO: 2430614 - RNA, 19 nt, Artificial Sequence
  Description of Artificial Sequence: Synthetic oligonucleotide
  Sense strand starting at position 2632 of SEQ ID NO: 1886848
gcuguagucuccugaauaa

SEQ ID NO: 2430615 - RNA, 19 nt, Artificial Sequence
  Description of Artificial Sequence: Synthetic oligonucleotide
  Antisense strand to SEQ ID NO: 2430614
uuauucaggagacuacagc

SEQ ID NO: 2430616 - RNA, 19 nt, Artificial Sequence
  Description of Artificial Sequence: Synthetic oligonucleotide
  Sense strand starting at position 2669 of SEQ ID NO: 1886848
aagagaacccguugacuga

SEQ ID NO: 2430617 - RNA, 19 nt, Artificial Sequence
  Description of Artificial Sequence: Synthetic oligonucleotide
  Antisense strand to SEQ ID NO: 2430616
ucagucaacggguucucuu

SEQ ID NO: 2430618 - RNA, 19 nt, Artificial Sequence
  Description of Artificial Sequence: Synthetic oligonucleotide
  Sense strand starting at position 2673 of SEQ ID NO: 1886848
gaacccguugacugauaga

SEQ ID NO: 2430619 - RNA, 19 nt, Artificial Sequence
  Description of Artificial Sequence: Synthetic oligonucleotide
  Antisense strand to SEQ ID NO: 2430618
ucuaucagucaacggguuc

SEQ ID NO: 2430620 - RNA, 19 nt, Artificial Sequence
  Description of Artificial Sequence: Synthetic oligonucleotide
  Sense strand starting at position 2720 of SEQ ID NO: 1886848
cugacuauauucggacuua

SEQ ID NO: 2430621 - RNA, 19 nt, Artificial Sequence
  Description of Artificial Sequence: Synthetic oligonucleotide
  Antisense strand to SEQ ID NO: 2430620
uaaguccgaauauagucag

SEQ ID NO: 2430622 - RNA, 19 nt, Artificial Sequence
  Description of Artificial Sequence: Synthetic oligonucleotide
  Sense strand starting at position 2721 of SEQ ID NO: 1886848
ugacuauauucggacuuaa

SEQ ID NO: 2430623 - RNA, 19 nt, Artificial Sequence
  Description of Artificial Sequence: Synthetic oligonucleotide
  Antisense strand to SEQ ID NO: 2430622
uuaaguccgaauauaguca

SEQ ID NO: 2430624 - RNA, 19 nt, Artificial Sequence
  Description of Artificial Sequence: Synthetic oligonucleotide
  Sense strand starting at position 2903 of SEQ ID NO: 1886848
caggauugagcuggguaca

SEQ ID NO: 2430625 - RNA, 19 nt, Artificial Sequence
  Description of Artificial Sequence: Synthetic oligonucleotide
  Antisense strand to SEQ ID NO: 2430624
uguacccagcucaauccug

SEQ ID NO: 2430626 - RNA, 19 nt, Artificial Sequence
  Description of Artificial Sequence: Synthetic oligonucleotide
  Sense strand starting at position 3158 of SEQ ID NO: 1886848
ucccgcuuguuugacagaa

SEQ ID NO: 2430627 - RNA, 19 nt, Artificial Sequence
  Description of Artificial Sequence: Synthetic oligonucleotide
  Antisense strand to SEQ ID NO: 2430626
uucugucaaacaagcggga

SEQ ID NO: 2430628 - RNA, 19 nt, Artificial Sequence
  Description of Artificial Sequence: Synthetic oligonucleotide
  Sense strand starting at position 3160 of SEQ ID NO: 1886848
ccgcuuguuugacagaaug

SEQ ID NO: 2430629 - RNA, 19 nt, Artificial Sequence
  Description of Artificial Sequence: Synthetic oligonucleotide
  Antisense strand to SEQ ID NO: 2430628
cauucugucaaacaagcgg

SEQ ID NO: 2430630 - RNA, 19 nt, Artificial Sequence
  Description of Artificial Sequence: Synthetic oligonucleotide
  Sense strand starting at position 3233 of SEQ ID NO: 1886848
ccuaguaauuaguuuaucu

SEQ ID NO: 2430631 - RNA, 19 nt, Artificial Sequence
  Description of Artificial Sequence: Synthetic oligonucleotide
  Antisense strand to SEQ ID NO: 2430630
agauaaacuaauuacuagg

SEQ ID NO: 2430632 - RNA, 19 nt, Artificial Sequence
  Description of Artificial Sequence: Synthetic oligonucleotide
  Sense strand starting at position 1166 of SEQ ID NO: 1886849
gcccaugggagcuguuuau

SEQ ID NO: 2430633 - RNA, 19 nt, Artificial Sequence
  Description of Artificial Sequence: Synthetic oligonucleotide
  Antisense strand to SEQ ID NO: 2430632
auaaacagcucccaugggc

SEQ ID NO: 2430634 - RNA, 19 nt, Artificial Sequence
  Description of Artificial Sequence: Synthetic oligonucleotide
  Sense strand starting at position 1278 of SEQ ID NO: 1886849
gcaggagucuuauucugaa

SEQ ID NO: 2430635 - RNA, 19 nt, Artificial Sequence
  Description of Artificial Sequence: Synthetic oligonucleotide
  Antisense strand to SEQ ID NO: 2430634
uucagaauaagacuccugc

SEQ ID NO: 2430636 - RNA, 19 nt, Artificial Sequence
  Description of Artificial Sequence: Synthetic oligonucleotide
  Sense strand starting at position 1281 of SEQ ID NO: 1886849
ggagucuuauucugaauag

SEQ ID NO: 2430637 - RNA, 19 nt, Artificial Sequence
  Description of Artificial Sequence: Synthetic oligonucleotide
  Antisense strand to SEQ ID NO: 2430636
cuauucagaauaagacucc

SEQ ID NO: 2430638 - RNA, 19 nt, Artificial Sequence
  Description of Artificial Sequence: Synthetic oligonucleotide
  Sense strand starting at position 1282 of SEQ ID NO: 1886849
gagucuuauucugaauagu

SEQ ID NO: 2430639 - RNA, 19 nt, Artificial Sequence
  Description of Artificial Sequence: Synthetic oligonucleotide
  Antisense strand to SEQ ID NO: 2430638
acuauucagaauaagacuc

SEQ ID NO: 2430640 - RNA, 19 nt, Artificial Sequence
  Description of Artificial Sequence: Synthetic oligonucleotide
  Sense strand starting at position 1514 of SEQ ID NO: 1886849
uaggaacuugaauguuacu

SEQ ID NO: 2430641 - RNA, 19 nt, Artificial Sequence
  Description of Artificial Sequence: Synthetic oligonucleotide
  Antisense strand to SEQ ID NO: 2430640
aguaacauucaaguuccua

SEQ ID NO: 2430642 - RNA, 19 nt, Artificial Sequence
  Description of Artificial Sequence: Synthetic oligonucleotide
  Sense strand starting at position 1519 of SEQ ID NO: 1886849
acuugaauguuacugaaua

SEQ ID NO: 2430643 - RNA, 19 nt, Artificial Sequence
  Description of Artificial Sequence: Synthetic oligonucleotide
  Antisense strand to SEQ ID NO: 2430642
uauucaguaacauucaagu

SEQ ID NO: 2430644 - RNA, 19 nt, Artificial Sequence
  Description of Artificial Sequence: Synthetic oligonucleotide
  Sense strand starting at position 1520 of SEQ ID NO: 1886849
cuugaauguuacugaauau

SEQ ID NO: 2430645 - RNA, 19 nt, Artificial Sequence
  Description of Artificial Sequence: Synthetic oligonucleotide
  Antisense strand to SEQ ID NO: 2430644
auauucaguaacauucaag

SEQ ID NO: 2430646 - RNA, 19 nt, Artificial Sequence
  Description of Artificial Sequence: Synthetic oligonucleotide
  Sense strand starting at position 1687 of SEQ ID NO: 1886849
cuuacuuggugcugagagu

SEQ ID NO: 2430647 - RNA, 19 nt, Artificial Sequence
  Description of Artificial Sequence: Synthetic oligonucleotide
  Antisense strand to SEQ ID NO: 2430646
acucucagcaccaaguaag

SEQ ID NO: 2430648 - RNA, 19 nt, Artificial Sequence
  Description of Artificial Sequence: Synthetic oligonucleotide
  Sense strand starting at position 2322 of SEQ ID NO: 1886849
cuauauguuuccuugggca

SEQ ID NO: 2430649 - RNA, 19 nt, Artificial Sequence
  Description of Artificial Sequence: Synthetic oligonucleotide
  Antisense strand to SEQ ID NO: 2430648
ugcccaaggaaacauauag

SEQ ID NO: 2430650 - RNA, 19 nt, Artificial Sequence
  Description of Artificial Sequence: Synthetic oligonucleotide
  Sense strand starting at position 2395 of SEQ ID NO: 1886849
uuuguaaguucuuauugga

SEQ ID NO: 2430651 - RNA, 19 nt, Artificial Sequence
  Description of Artificial Sequence: Synthetic oligonucleotide
  Antisense strand to SEQ ID NO: 2430650
uccaauaagaacuuacaaa

SEQ ID NO: 2430652 - RNA, 19 nt, Artificial Sequence
  Description of Artificial Sequence: Synthetic oligonucleotide
  Sense strand starting at position 2398 of SEQ ID NO: 1886849
guaaguucuuauuggacac

SEQ ID NO: 2430653 - RNA, 19 nt, Artificial Sequence
  Description of Artificial Sequence: Synthetic oligonucleotide
  Antisense strand to SEQ ID NO: 2430652
guguccaauaagaacuuac

SEQ ID NO: 2430654 - RNA, 19 nt, Artificial Sequence
  Description of Artificial Sequence: Synthetic oligonucleotide
  Sense strand starting at position 2434 of SEQ ID NO: 1886849
cugggaaagcuguguuaca

SEQ ID NO: 2430655 - RNA, 19 nt, Artificial Sequence
  Description of Artificial Sequence: Synthetic oligonucleotide
  Antisense strand to SEQ ID NO: 2430654
uguaacacagcuuucccag

SEQ ID NO: 2430656 - RNA, 19 nt, Artificial Sequence
  Description of Artificial Sequence: Synthetic oligonucleotide
  Sense strand starting at position 2435 of SEQ ID NO: 1886849
ugggaaagcuguguuacac

SEQ ID NO: 2430657 - RNA, 19 nt, Artificial Sequence
  Description of Artificial Sequence: Synthetic oligonucleotide
  Antisense strand to SEQ ID NO: 2430656
guguaacacagcuuuccca

SEQ ID NO: 2430658 - RNA, 19 nt, Artificial Sequence
  Description of Artificial Sequence: Synthetic oligonucleotide
  Sense strand starting at position 2644 of SEQ ID NO: 1886849
ugcuguagucuccagaaua

SEQ ID NO: 2430659 - RNA, 19 nt, Artificial Sequence
  Description of Artificial Sequence: Synthetic oligonucleotide
  Antisense strand to SEQ ID NO: 2430658
uauucuggagacuacagca

SEQ ID NO: 2430660 - RNA, 19 nt, Artificial Sequence
  Description of Artificial Sequence: Synthetic oligonucleotide
  Sense strand starting at position 2665 of SEQ ID NO: 1886849
cauagagugugaccacaaa

SEQ ID NO: 2430661 - RNA, 19 nt, Artificial Sequence
  Description of Artificial Sequence: Synthetic oligonucleotide
  Antisense strand to SEQ ID NO: 2430660
uuuguggucacacucuaug

SEQ ID NO: 2430662 - RNA, 19 nt, Artificial Sequence
  Description of Artificial Sequence: Synthetic oligonucleotide
  Sense strand starting at position 2731 of SEQ ID NO: 1886849
gaccgauuauacucagacu

SEQ ID NO: 2430663 - RNA, 19 nt, Artificial Sequence
  Description of Artificial Sequence: Synthetic oligonucleotide
  Antisense strand to SEQ ID NO: 2430662
agucugaguauaaucgguc

SEQ ID NO: 2430664 - RNA, 19 nt, Artificial Sequence
  Description of Artificial Sequence: Synthetic oligonucleotide
  Sense strand starting at position 2734 of SEQ ID NO: 1886849
cgauuauacucagacuuaa

SEQ ID NO: 2430665 - RNA, 19 nt, Artificial Sequence
  Description of Artificial Sequence: Synthetic oligonucleotide
  Antisense strand to SEQ ID NO: 2430664
uuaagucugaguauaaucg

SEQ ID NO: 2430666 - RNA, 19 nt, Artificial Sequence
  Description of Artificial Sequence: Synthetic oligonucleotide
  Sense strand starting at position 2915 of SEQ ID NO: 1886849
acagaauugagcuggguac

SEQ ID NO: 2430667 - RNA, 19 nt, Artificial Sequence
  Description of Artificial Sequence: Synthetic oligonucleotide
  Antisense strand to SEQ ID NO: 2430666
guacccagcucaauucugu

SEQ ID NO: 2430668 - RNA, 19 nt, Artificial Sequence
  Description of Artificial Sequence: Synthetic oligonucleotide
  Sense strand starting at position 2916 of SEQ ID NO: 1886849
cagaauugagcuggguaca

SEQ ID NO: 2430669 - RNA, 19 nt, Artificial Sequence
  Description of Artificial Sequence: Synthetic oligonucleotide
  Antisense strand to SEQ ID NO: 2430668
uguacccagcucaauucug

SEQ ID NO: 2430670 - RNA, 19 nt, Artificial Sequence
  Description of Artificial Sequence: Synthetic oligonucleotide
  Sense strand starting at position 3069 of SEQ ID NO: 1886849
uugacugggaguggugaua

SEQ ID NO: 2430671 - RNA, 19 nt, Artificial Sequence
  Description of Artificial Sequence: Synthetic oligonucleotide
  Antisense strand to SEQ ID NO: 2430670
uaucaccacucccagucaa

SEQ ID NO: 2430672 - RNA, 19 nt, Artificial Sequence
  Description of Artificial Sequence: Synthetic oligonucleotide
  Sense strand starting at position 3186 of SEQ ID NO: 1886849
uccagcuuguuugacagaa

SEQ ID NO: 2430673 - RNA, 19 nt, Artificial Sequence
  Description of Artificial Sequence: Synthetic oligonucleotide
  Antisense strand to SEQ ID NO: 2430672
uucugucaaacaagcugga

SEQ ID NO: 2430674 - RNA, 19 nt, Artificial Sequence
  Description of Artificial Sequence: Synthetic oligonucleotide
  Sense strand starting at position 3188 of SEQ ID NO: 1886849
cagcuuguuugacagaaug

SEQ ID NO: 2430675 - RNA, 19 nt, Artificial Sequence
  Description of Artificial Sequence: Synthetic oligonucleotide
  Antisense strand to SEQ ID NO: 2430674
cauucugucaaacaagcug

SEQ ID NO: 2430676 - RNA, 19 nt, Artificial Sequence
  Description of Artificial Sequence: Synthetic oligonucleotide
  Sense strand starting at position 3279 of SEQ ID NO: 1886849
uuauauaccuaguaaugag

SEQ ID NO: 2430677 - RNA, 19 nt, Artificial Sequence
  Description of Artificial Sequence: Synthetic oligonucleotide
  Antisense strand to SEQ ID NO: 2430676
cucauuacuagguauauaa

SEQ ID NO: 2430678 - RNA, 19 nt, Artificial Sequence
  Description of Artificial Sequence: Synthetic oligonucleotide
  Sense strand starting at position 3294 of SEQ ID NO: 1886849
ugaguuuaucuauguuaca

SEQ ID NO: 2430679 - RNA, 19 nt, Artificial Sequence
  Description of Artificial Sequence: Synthetic oligonucleotide
  Antisense strand to SEQ ID NO: 2430678
uguaacauagauaaacuca

SEQ ID NO: 2430680 - RNA, 19 nt, Artificial Sequence
  Description of Artificial Sequence: Synthetic oligonucleotide
  Sense strand starting at position 3295 of SEQ ID NO: 1886849
gaguuuaucuauguuacag

SEQ ID NO: 2430681 - RNA, 19 nt, Artificial Sequence
  Description of Artificial Sequence: Synthetic oligonucleotide
  Antisense strand to SEQ ID NO: 2430680
cuguaacauagauaaacuc

SEQ ID NO: 2430682 - RNA, 19 nt, Artificial Sequence
  Description of Artificial Sequence: Synthetic oligonucleotide
  Sense strand starting at position 52 of SEQ ID NO: 1886850
cgcagugagaucguguauu

SEQ ID NO: 2430683 - RNA, 19 nt, Artificial Sequence
  Description of Artificial Sequence: Synthetic oligonucleotide
  Antisense strand to SEQ ID NO: 2430682
aauacacgaucucacugcg

SEQ ID NO: 2430684 - RNA, 19 nt, Artificial Sequence
  Description of Artificial Sequence: Synthetic oligonucleotide
  Sense strand starting at position 58 of SEQ ID NO: 1886850
gagaucguguauuaagagu

SEQ ID NO: 2430685 - RNA, 19 nt, Artificial Sequence
  Description of Artificial Sequence: Synthetic oligonucleotide
  Antisense strand to SEQ ID NO: 2430684
acucuuaauacacgaucuc

SEQ ID NO: 2430686 - RNA, 19 nt, Artificial Sequence
  Description of Artificial Sequence: Synthetic oligonucleotide
  Sense strand starting at position 64 of SEQ ID NO: 1886850
guguauuaagaguguucag

SEQ ID NO: 2430687 - RNA, 19 nt, Artificial Sequence
  Description of Artificial Sequence: Synthetic oligonucleotide
  Antisense strand to SEQ ID NO: 2430686
cugaacacucuuaauacac

SEQ ID NO: 2430688 - RNA, 19 nt, Artificial Sequence
  Description of Artificial Sequence: Synthetic oligonucleotide
  Sense strand starting at position 138 of SEQ ID NO: 1886850
uguaguuugucccucccaa

SEQ ID NO: 2430689 - RNA, 19 nt, Artificial Sequence
  Description of Artificial Sequence: Synthetic oligonucleotide
  Antisense strand to SEQ ID NO: 2430688
uugggagggacaaacuaca

SEQ ID NO: 2430690 - RNA, 19 nt, Artificial Sequence
  Description of Artificial Sequence: Synthetic oligonucleotide
  Sense strand starting at position 624 of SEQ ID NO: 1886850
agauuagaaucucaugaga

SEQ ID NO: 2430691 - RNA, 19 nt, Artificial Sequence
  Description of Artificial Sequence: Synthetic oligonucleotide
  Antisense strand to SEQ ID NO: 2430690
ucucaugagauucuaaucu

SEQ ID NO: 2430692 - RNA, 19 nt, Artificial Sequence
  Description of Artificial Sequence: Synthetic oligonucleotide
  Sense strand starting at position 626 of SEQ ID NO: 1886850
auuagaaucucaugagacc

SEQ ID NO: 2430693 - RNA, 19 nt, Artificial Sequence
  Description of Artificial Sequence: Synthetic oligonucleotide
  Antisense strand to SEQ ID NO: 2430692
ggucucaugagauucuaau

SEQ ID NO: 2430694 - RNA, 19 nt, Artificial Sequence
  Description of Artificial Sequence: Synthetic oligonucleotide
  Sense strand starting at position 629 of SEQ ID NO: 1886850
agaaucucaugagaccuuu

SEQ ID NO: 2430695 - RNA, 19 nt, Artificial Sequence
  Description of Artificial Sequence: Synthetic oligonucleotide
  Antisense strand to SEQ ID NO: 2430694
aaaggucucaugagauucu

SEQ ID NO: 2430696 - RNA, 19 nt, Artificial Sequence
  Description of Artificial Sequence: Synthetic oligonucleotide
  Sense strand starting at position 635 of SEQ ID NO: 1886850
ucaugagaccuuugagguc

SEQ ID NO: 2430697 - RNA, 19 nt, Artificial Sequence
  Description of Artificial Sequence: Synthetic oligonucleotide
  Antisense strand to SEQ ID NO: 2430696
gaccucaaaggucucauga

SEQ ID NO: 2430698 - RNA, 19 nt, Artificial Sequence
  Description of Artificial Sequence: Synthetic oligonucleotide
  Sense strand starting at position 656 of SEQ ID NO: 1886850
cuggcuuuauccuuugcau

SEQ ID NO: 2430699 - RNA, 19 nt, Artificial Sequence
  Description of Artificial Sequence: Synthetic oligonucleotide
  Antisense strand to SEQ ID NO: 2430698
augcaaaggauaaagccag

SEQ ID NO: 2430700 - RNA, 19 nt, Artificial Sequence
  Description of Artificial Sequence: Synthetic oligonucleotide
  Sense strand starting at position 658 of SEQ ID NO: 1886850
ggcuuuauccuuugcaucu

SEQ ID NO: 2430701 - RNA, 19 nt, Artificial Sequence
  Description of Artificial Sequence: Synthetic oligonucleotide
  Antisense strand to SEQ ID NO: 2430700
agaugcaaaggauaaagcc

SEQ ID NO: 2430702 - RNA, 19 nt, Artificial Sequence
  Description of Artificial Sequence: Synthetic oligonucleotide
  Sense strand starting at position 885 of SEQ ID NO: 1886850
gucuuucuagcacgguuua

SEQ ID NO: 2430703 - RNA, 19 nt, Artificial Sequence
  Description of Artificial Sequence: Synthetic oligonucleotide
  Antisense strand to SEQ ID NO: 2430702
uaaaccgugcuagaaagac

SEQ ID NO: 2430704 - RNA, 19 nt, Artificial Sequence
  Description of Artificial Sequence: Synthetic oligonucleotide
  Sense strand starting at position 886 of SEQ ID NO: 1886850
ucuuucuagcacgguuuaa

SEQ ID NO: 2430705 - RNA, 19 nt, Artificial Sequence
  Description of Artificial Sequence: Synthetic oligonucleotide
  Antisense strand to SEQ ID NO: 2430704
uuaaaccgugcuagaaaga

SEQ ID NO: 2430706 - RNA, 19 nt, Artificial Sequence
  Description of Artificial Sequence: Synthetic oligonucleotide
  Sense strand starting at position 1333 of SEQ ID NO: 1886850
gcccgugggagcuguuuau

SEQ ID NO: 2430707 - RNA, 19 nt, Artificial Sequence
  Description of Artificial Sequence: Synthetic oligonucleotide
  Antisense strand to SEQ ID NO: 2430706
auaaacagcucccacgggc

SEQ ID NO: 2430708 - RNA, 19 nt, Artificial Sequence
  Description of Artificial Sequence: Synthetic oligonucleotide
  Sense strand starting at position 1669 of SEQ ID NO: 1886850
uaggaacuugaauguuauu

SEQ ID NO: 2430709 - RNA, 19 nt, Artificial Sequence
  Description of Artificial Sequence: Synthetic oligonucleotide
  Antisense strand to SEQ ID NO: 2430708
aauaacauucaaguuccua

SEQ ID NO: 2430710 - RNA, 19 nt, Artificial Sequence
  Description of Artificial Sequence: Synthetic oligonucleotide
  Sense strand starting at position 2097 of SEQ ID NO: 1886850
acgucaugcuccugaagcu

SEQ ID NO: 2430711 - RNA, 19 nt, Artificial Sequence
  Description of Artificial Sequence: Synthetic oligonucleotide
  Antisense strand to SEQ ID NO: 2430710
agcuucaggagcaugacgu

SEQ ID NO: 2430712 - RNA, 19 nt, Artificial Sequence
  Description of Artificial Sequence: Synthetic oligonucleotide
  Sense strand starting at position 2098 of SEQ ID NO: 1886850
cgucaugcuccugaagcua

SEQ ID NO: 2430713 - RNA, 19 nt, Artificial Sequence
  Description of Artificial Sequence: Synthetic oligonucleotide
  Antisense strand to SEQ ID NO: 2430712
uagcuucaggagcaugacg

SEQ ID NO: 2430714 - RNA, 19 nt, Artificial Sequence
  Description of Artificial Sequence: Synthetic oligonucleotide
  Sense strand starting at position 2476 of SEQ ID NO: 1886850
uuauauguuuccuugggca

SEQ ID NO: 2430715 - RNA, 19 nt, Artificial Sequence
  Description of Artificial Sequence: Synthetic oligonucleotide
  Antisense strand to SEQ ID NO: 2430714
ugcccaaggaaacauauaa

SEQ ID NO: 2430716 - RNA, 19 nt, Artificial Sequence
  Description of Artificial Sequence: Synthetic oligonucleotide
  Sense strand starting at position 2549 of SEQ ID NO: 1886850
uuuguaacuucuuauugga

SEQ ID NO: 2430717 - RNA, 19 nt, Artificial Sequence
  Description of Artificial Sequence: Synthetic oligonucleotide
  Antisense strand to SEQ ID NO: 2430716
uccaauaagaaguuacaaa

SEQ ID NO: 2430718 - RNA, 19 nt, Artificial Sequence
  Description of Artificial Sequence: Synthetic oligonucleotide
  Sense strand starting at position 2551 of SEQ ID NO: 1886850
uguaacuucuuauuggaca

SEQ ID NO: 2430719 - RNA, 19 nt, Artificial Sequence
  Description of Artificial Sequence: Synthetic oligonucleotide
  Antisense strand to SEQ ID NO: 2430718
uguccaauaagaaguuaca

SEQ ID NO: 2430720 - RNA, 19 nt, Artificial Sequence
  Description of Artificial Sequence: Synthetic oligonucleotide
  Sense strand starting at position 2786 of SEQ ID NO: 1886850
gcuguagucuccugaauaa

SEQ ID NO: 2430721 - RNA, 19 nt, Artificial Sequence
  Description of Artificial Sequence: Synthetic oligonucleotide
  Antisense strand to SEQ ID NO: 2430720
uuauucaggagacuacagc

SEQ ID NO: 2430722 - RNA, 19 nt, Artificial Sequence
  Description of Artificial Sequence: Synthetic oligonucleotide
  Sense strand starting at position 2823 of SEQ ID NO: 1886850
aagagaacccguugacuga

SEQ ID NO: 2430723 - RNA, 19 nt, Artificial Sequence
  Description of Artificial Sequence: Synthetic oligonucleotide
  Antisense strand to SEQ ID NO: 2430722
ucagucaacggguucucuu

SEQ ID NO: 2430724 - RNA, 19 nt, Artificial Sequence
  Description of Artificial Sequence: Synthetic oligonucleotide
  Sense strand starting at position 2827 of SEQ ID NO: 1886850
gaacccguugacugauaga

SEQ ID NO: 2430725 - RNA, 19 nt, Artificial Sequence
  Description of Artificial Sequence: Synthetic oligonucleotide
  Antisense strand to SEQ ID NO: 2430724
ucuaucagucaacggguuc

SEQ ID NO: 2430726 - RNA, 19 nt, Artificial Sequence
  Description of Artificial Sequence: Synthetic oligonucleotide
  Sense strand starting at position 2874 of SEQ ID NO: 1886850
cugacuauauucggacuua

SEQ ID NO: 2430727 - RNA, 19 nt, Artificial Sequence
  Description of Artificial Sequence: Synthetic oligonucleotide
  Antisense strand to SEQ ID NO: 2430726
uaaguccgaauauagucag

SEQ ID NO: 2430728 - RNA, 19 nt, Artificial Sequence
  Description of Artificial Sequence: Synthetic oligonucleotide
  Sense strand starting at position 2875 of SEQ ID NO: 1886850
ugacuauauucggacuuaa

SEQ ID NO: 2430729 - RNA, 19 nt, Artificial Sequence
  Description of Artificial Sequence: Synthetic oligonucleotide
  Antisense strand to SEQ ID NO: 2430728
uuaaguccgaauauaguca

SEQ ID NO: 2430730 - RNA, 19 nt, Artificial Sequence
  Description of Artificial Sequence: Synthetic oligonucleotide
  Sense strand starting at position 3057 of SEQ ID NO: 1886850
caggauugagcuggguaca

SEQ ID NO: 2430731 - RNA, 19 nt, Artificial Sequence
  Description of Artificial Sequence: Synthetic oligonucleotide
  Antisense strand to SEQ ID NO: 2430730
uguacccagcucaauccug

SEQ ID NO: 2430732 - RNA, 19 nt, Artificial Sequence
  Description of Artificial Sequence: Synthetic oligonucleotide
  Sense strand starting at position 3312 of SEQ ID NO: 1886850
ucccgcuuguuugacagaa

SEQ ID NO: 2430733 - RNA, 19 nt, Artificial Sequence
  Description of Artificial Sequence: Synthetic oligonucleotide
  Antisense strand to SEQ ID NO: 2430732
uucugucaaacaagcggga

SEQ ID NO: 2430734 - RNA, 19 nt, Artificial Sequence
  Description of Artificial Sequence: Synthetic oligonucleotide
  Sense strand starting at position 3314 of SEQ ID NO: 1886850
ccgcuuguuugacagaaug

SEQ ID NO: 2430735 - RNA, 19 nt, Artificial Sequence
  Description of Artificial Sequence: Synthetic oligonucleotide
  Antisense strand to SEQ ID NO: 2430734
cauucugucaaacaagcgg

SEQ ID NO: 2430736 - RNA, 19 nt, Artificial Sequence
  Description of Artificial Sequence: Synthetic oligonucleotide
  Sense strand starting at position 3387 of SEQ ID NO: 1886850
ccuaguaauuaguuuaucu

SEQ ID NO: 2430737 - RNA, 19 nt, Artificial Sequence
  Description of Artificial Sequence: Synthetic oligonucleotide
  Antisense strand to SEQ ID NO: 2430736
agauaaacuaauuacuagg

SEQ ID NO: 2430738 - RNA, 19 nt, Artificial Sequence
  Description of Artificial Sequence: Synthetic oligonucleotide
  Sense strand starting at position 34 of SEQ ID NO: 1886851
gagaucauguauuaagagu

SEQ ID NO: 2430739 - RNA, 19 nt, Artificial Sequence
  Description of Artificial Sequence: Synthetic oligonucleotide
  Antisense strand to SEQ ID NO: 2430738
acucuuaauacaugaucuc

SEQ ID NO: 2430740 - RNA, 19 nt, Artificial Sequence
  Description of Artificial Sequence: Synthetic oligonucleotide
  Sense strand starting at position 80 of SEQ ID NO: 1886851
ucagcaauugcgcauucuu

SEQ ID NO: 2430741 - RNA, 19 nt, Artificial Sequence
  Description of Artificial Sequence: Synthetic oligonucleotide
  Antisense strand to SEQ ID NO: 2430740
aagaaugcgcaauugcuga

SEQ ID NO: 2430742 - RNA, 19 nt, Artificial Sequence
  Description of Artificial Sequence: Synthetic oligonucleotide
  Sense strand starting at position 83 of SEQ ID NO: 1886851
gcaauugcgcauucuuacu

SEQ ID NO: 2430743 - RNA, 19 nt, Artificial Sequence
  Description of Artificial Sequence: Synthetic oligonucleotide
  Antisense strand to SEQ ID NO: 2430742
aguaagaaugcgcaauugc

SEQ ID NO: 2430744 - RNA, 19 nt, Artificial Sequence
  Description of Artificial Sequence: Synthetic oligonucleotide
  Sense strand starting at position 88 of SEQ ID NO: 1886851
ugcgcauucuuacugcuuu

SEQ ID NO: 2430745 - RNA, 19 nt, Artificial Sequence
  Description of Artificial Sequence: Synthetic oligonucleotide
  Antisense strand to SEQ ID NO: 2430744
aaagcaguaagaaugcgca

SEQ ID NO: 2430746 - RNA, 19 nt, Artificial Sequence
  Description of Artificial Sequence: Synthetic oligonucleotide
  Sense strand starting at position 1321 of SEQ ID NO: 1886851
gcccaugggagcuguuuau

SEQ ID NO: 2430747 - RNA, 19 nt, Artificial Sequence
  Description of Artificial Sequence: Synthetic oligonucleotide
  Antisense strand to SEQ ID NO: 2430746
auaaacagcucccaugggc

SEQ ID NO: 2430748 - RNA, 19 nt, Artificial Sequence
  Description of Artificial Sequence: Synthetic oligonucleotide
  Sense strand starting at position 1433 of SEQ ID NO: 1886851
gcaggagucuuauucugaa

SEQ ID NO: 2430749 - RNA, 19 nt, Artificial Sequence
  Description of Artificial Sequence: Synthetic oligonucleotide
  Antisense strand to SEQ ID NO: 2430748
uucagaauaagacuccugc

SEQ ID NO: 2430750 - RNA, 19 nt, Artificial Sequence
  Description of Artificial Sequence: Synthetic oligonucleotide
  Sense strand starting at position 1436 of SEQ ID NO: 1886851
ggagucuuauucugaauag

SEQ ID NO: 2430751 - RNA, 19 nt, Artificial Sequence
  Description of Artificial Sequence: Synthetic oligonucleotide
  Antisense strand to SEQ ID NO: 2430750
cuauucagaauaagacucc

SEQ ID NO: 2430752 - RNA, 19 nt, Artificial Sequence
  Description of Artificial Sequence: Synthetic oligonucleotide
  Sense strand starting at position 1437 of SEQ ID NO: 1886851
gagucuuauucugaauagu

SEQ ID NO: 2430753 - RNA, 19 nt, Artificial Sequence
  Description of Artificial Sequence: Synthetic oligonucleotide
  Antisense strand to SEQ ID NO: 2430752
acuauucagaauaagacuc

SEQ ID NO: 2430754 - RNA, 19 nt, Artificial Sequence
  Description of Artificial Sequence: Synthetic oligonucleotide
  Sense strand starting at position 1669 of SEQ ID NO: 1886851
uaggaacuugaauguuacu

SEQ ID NO: 2430755 - RNA, 19 nt, Artificial Sequence
  Description of Artificial Sequence: Synthetic oligonucleotide
  Antisense strand to SEQ ID NO: 2430754
aguaacauucaaguuccua

SEQ ID NO: 2430756 - RNA, 19 nt, Artificial Sequence
  Description of Artificial Sequence: Synthetic oligonucleotide
  Sense strand starting at position 1674 of SEQ ID NO: 1886851
acuugaauguuacugaaua

SEQ ID NO: 2430757 - RNA, 19 nt, Artificial Sequence
  Description of Artificial Sequence: Synthetic oligonucleotide
  Antisense strand to SEQ ID NO: 2430756
uauucaguaacauucaagu

SEQ ID NO: 2430758 - RNA, 19 nt, Artificial Sequence
  Description of Artificial Sequence: Synthetic oligonucleotide
  Sense strand starting at position 1675 of SEQ ID NO: 1886851
cuugaauguuacugaauau

SEQ ID NO: 2430759 - RNA, 19 nt, Artificial Sequence
  Description of Artificial Sequence: Synthetic oligonucleotide
  Antisense strand to SEQ ID NO: 2430758
auauucaguaacauucaag

SEQ ID NO: 2430760 - RNA, 19 nt, Artificial Sequence
  Description of Artificial Sequence: Synthetic oligonucleotide
  Sense strand starting at position 1842 of SEQ ID NO: 1886851
cuuacuuggugcugagagu

SEQ ID NO: 2430761 - RNA, 19 nt, Artificial Sequence
  Description of Artificial Sequence: Synthetic oligonucleotide
  Antisense strand to SEQ ID NO: 2430760
acucucagcaccaaguaag

SEQ ID NO: 2430762 - RNA, 19 nt, Artificial Sequence
  Description of Artificial Sequence: Synthetic oligonucleotide
  Sense strand starting at position 2477 of SEQ ID NO: 1886851
cuauauguuuccuugggca

SEQ ID NO: 2430763 - RNA, 19 nt, Artificial Sequence
  Description of Artificial Sequence: Synthetic oligonucleotide
  Antisense strand to SEQ ID NO: 2430762
ugcccaaggaaacauauag

SEQ ID NO: 2430764 - RNA, 19 nt, Artificial Sequence
  Description of Artificial Sequence: Synthetic oligonucleotide
  Sense strand starting at position 2550 of SEQ ID NO: 1886851
uuuguaaguucuuauugga

SEQ ID NO: 2430765 - RNA, 19 nt, Artificial Sequence
  Description of Artificial Sequence: Synthetic oligonucleotide
  Antisense strand to SEQ ID NO: 2430764
uccaauaagaacuuacaaa

SEQ ID NO: 2430766 - RNA, 19 nt, Artificial Sequence
  Description of Artificial Sequence: Synthetic oligonucleotide
  Sense strand starting at position 2553 of SEQ ID NO: 1886851
guaaguucuuauuggacac

SEQ ID NO: 2430767 - RNA, 19 nt, Artificial Sequence
  Description of Artificial Sequence: Synthetic oligonucleotide
  Antisense strand to SEQ ID NO: 2430766
guguccaauaagaacuuac

SEQ ID NO: 2430768 - RNA, 19 nt, Artificial Sequence
  Description of Artificial Sequence: Synthetic oligonucleotide
  Sense strand starting at position 2589 of SEQ ID NO: 1886851
cugggaaagcuguguuaca

SEQ ID NO: 2430769 - RNA, 19 nt, Artificial Sequence
  Description of Artificial Sequence: Synthetic oligonucleotide
  Antisense strand to SEQ ID NO: 2430768
uguaacacagcuuucccag

SEQ ID NO: 2430770 - RNA, 19 nt, Artificial Sequence
  Description of Artificial Sequence: Synthetic oligonucleotide
  Sense strand starting at position 2590 of SEQ ID NO: 1886851
ugggaaagcuguguuacac

SEQ ID NO: 2430771 - RNA, 19 nt, Artificial Sequence
  Description of Artificial Sequence: Synthetic oligonucleotide
  Antisense strand to SEQ ID NO: 2430770
guguaacacagcuuuccca

SEQ ID NO: 2430772 - RNA, 19 nt, Artificial Sequence
  Description of Artificial Sequence: Synthetic oligonucleotide
  Sense strand starting at position 2799 of SEQ ID NO: 1886851
ugcuguagucuccagaaua

SEQ ID NO: 2430773 - RNA, 19 nt, Artificial Sequence
  Description of Artificial Sequence: Synthetic oligonucleotide
  Antisense strand to SEQ ID NO: 2430772
uauucuggagacuacagca

SEQ ID NO: 2430774 - RNA, 19 nt, Artificial Sequence
  Description of Artificial Sequence: Synthetic oligonucleotide
  Sense strand starting at position 2820 of SEQ ID NO: 1886851
cauagagugugaccacaaa

SEQ ID NO: 2430775 - RNA, 19 nt, Artificial Sequence
  Description of Artificial Sequence: Synthetic oligonucleotide
  Antisense strand to SEQ ID NO: 2430774
uuuguggucacacucuaug

SEQ ID NO: 2430776 - RNA, 19 nt, Artificial Sequence
  Description of Artificial Sequence: Synthetic oligonucleotide
  Sense strand starting at position 2886 of SEQ ID NO: 1886851
gaccgauuauacucagacu

SEQ ID NO: 2430777 - RNA, 19 nt, Artificial Sequence
  Description of Artificial Sequence: Synthetic oligonucleotide
  Antisense strand to SEQ ID NO: 2430776
agucugaguauaaucgguc

SEQ ID NO: 2430778 - RNA, 19 nt, Artificial Sequence
  Description of Artificial Sequence: Synthetic oligonucleotide
  Sense strand starting at position 2889 of SEQ ID NO: 1886851
cgauuauacucagacuuaa

SEQ ID NO: 2430779 - RNA, 19 nt, Artificial Sequence
  Description of Artificial Sequence: Synthetic oligonucleotide
  Antisense strand to SEQ ID NO: 2430778
uuaagucugaguauaaucg

SEQ ID NO: 2430780 - RNA, 19 nt, Artificial Sequence
  Description of Artificial Sequence: Synthetic oligonucleotide
  Sense strand starting at position 3070 of SEQ ID NO: 1886851
acagaauugagcuggguac

SEQ ID NO: 2430781 - RNA, 19 nt, Artificial Sequence
  Description of Artificial Sequence: Synthetic oligonucleotide
  Antisense strand to SEQ ID NO: 2430780
guacccagcucaauucugu

SEQ ID NO: 2430782 - RNA, 19 nt, Artificial Sequence
  Description of Artificial Sequence: Synthetic oligonucleotide
  Sense strand starting at position 3071 of SEQ ID NO: 1886851
cagaauugagcuggguaca

SEQ ID NO: 2430783 - RNA, 19 nt, Artificial Sequence
  Description of Artificial Sequence: Synthetic oligonucleotide
  Antisense strand to SEQ ID NO: 2430782
uguacccagcucaauucug

SEQ ID NO: 2430784 - RNA, 19 nt, Artificial Sequence
  Description of Artificial Sequence: Synthetic oligonucleotide
  Sense strand starting at position 3224 of SEQ ID NO: 1886851
uugacugggaguggugaua

SEQ ID NO: 2430785 - RNA, 19 nt, Artificial Sequence
  Description of Artificial Sequence: Synthetic oligonucleotide
  Antisense strand to SEQ ID NO: 2430784
uaucaccacucccagucaa

SEQ ID NO: 2430786 - RNA, 19 nt, Artificial Sequence
  Description of Artificial Sequence: Synthetic oligonucleotide
  Sense strand starting at position 3341 of SEQ ID NO: 1886851
uccagcuuguuugacagaa

SEQ ID NO: 2430787 - RNA, 19 nt, Artificial Sequence
  Description of Artificial Sequence: Synthetic oligonucleotide
  Antisense strand to SEQ ID NO: 2430786
uucugucaaacaagcugga

SEQ ID NO: 2430788 - RNA, 19 nt, Artificial Sequence
  Description of Artificial Sequence: Synthetic oligonucleotide
  Sense strand starting at position 3343 of SEQ ID NO: 1886851
cagcuuguuugacagaaug

SEQ ID NO: 2430789 - RNA, 19 nt, Artificial Sequence
  Description of Artificial Sequence: Synthetic oligonucleotide
  Antisense strand to SEQ ID NO: 2430788
cauucugucaaacaagcug

SEQ ID NO: 2430790 - RNA, 19 nt, Artificial Sequence
  Description of Artificial Sequence: Synthetic oligonucleotide
  Sense strand starting at position 3434 of SEQ ID NO: 1886851
uuauauaccuaguaaugag

SEQ ID NO: 2430791 - RNA, 19 nt, Artificial Sequence
  Description of Artificial Sequence: Synthetic oligonucleotide
  Antisense strand to SEQ ID NO: 2430790
cucauuacuagguauauaa

SEQ ID NO: 2430792 - RNA, 19 nt, Artificial Sequence
  Description of Artificial Sequence: Synthetic oligonucleotide
  Sense strand starting at position 3449 of SEQ ID NO: 1886851
ugaguuuaucuauguuaca

SEQ ID NO: 2430793 - RNA, 19 nt, Artificial Sequence
  Description of Artificial Sequence: Synthetic oligonucleotide
  Antisense strand to SEQ ID NO: 2430792
uguaacauagauaaacuca

SEQ ID NO: 2430794 - RNA, 19 nt, Artificial Sequence
  Description of Artificial Sequence: Synthetic oligonucleotide
  Sense strand starting at position 3450 of SEQ ID NO: 1886851
gaguuuaucuauguuacag

SEQ ID NO: 2430795 - RNA, 19 nt, Artificial Sequence
  Description of Artificial Sequence: Synthetic oligonucleotide
  Antisense strand to SEQ ID NO: 2430794
cuguaacauagauaaacuc

SEQ ID NO: 2430796 - RNA, 19 nt, Artificial Sequence
  Description of Artificial Sequence: Synthetic oligonucleotide
  Sense strand starting at position 74 of SEQ ID NO: 1886852
caaacuuccggauggguau

SEQ ID NO: 2430797 - RNA, 19 nt, Artificial Sequence
  Description of Artificial Sequence: Synthetic oligonucleotide
  Antisense strand to SEQ ID NO: 2430796
auacccauccggaaguuug

SEQ ID NO: 2430798 - RNA, 19 nt, Artificial Sequence
  Description of Artificial Sequence: Synthetic oligonucleotide
  Sense strand starting at position 168 of SEQ ID NO: 1886852
guggaaguucugcaggaga

SEQ ID NO: 2430799 - RNA, 19 nt, Artificial Sequence
  Description of Artificial Sequence: Synthetic oligonucleotide
  Antisense strand to SEQ ID NO: 2430798
ucuccugcagaacuuccac

SEQ ID NO: 2430800 - RNA, 19 nt, Artificial Sequence
  Description of Artificial Sequence: Synthetic oligonucleotide
  Sense strand starting at position 208 of SEQ ID NO: 1886852
gcagguucacagugguauc

SEQ ID NO: 2430801 - RNA, 19 nt, Artificial Sequence
  Description of Artificial Sequence: Synthetic oligonucleotide
  Antisense strand to SEQ ID NO: 2430800
gauaccacugugaaccugc

SEQ ID NO: 2430802 - RNA, 19 nt, Artificial Sequence
  Description of Artificial Sequence: Synthetic oligonucleotide
  Sense strand starting at position 343 of SEQ ID NO: 1886852
cucucauuuccagguguca

SEQ ID NO: 2430803 - RNA, 19 nt, Artificial Sequence
  Description of Artificial Sequence: Synthetic oligonucleotide
  Antisense strand to SEQ ID NO: 2430802
ugacaccuggaaaugagag

SEQ ID NO: 2430804 - RNA, 19 nt, Artificial Sequence
  Description of Artificial Sequence: Synthetic oligonucleotide
  Sense strand starting at position 504 of SEQ ID NO: 1886852
cuagcaguccuggacaagu

SEQ ID NO: 2430805 - RNA, 19 nt, Artificial Sequence
  Description of Artificial Sequence: Synthetic oligonucleotide
  Antisense strand to SEQ ID NO: 2430804
acuuguccaggacugcuag

SEQ ID NO: 2430806 - RNA, 19 nt, Artificial Sequence
  Description of Artificial Sequence: Synthetic oligonucleotide
  Sense strand starting at position 561 of SEQ ID NO: 1886852
ccaggaucuucugaagcau

SEQ ID NO: 2430807 - RNA, 19 nt, Artificial Sequence
  Description of Artificial Sequence: Synthetic oligonucleotide
  Antisense strand to SEQ ID NO: 2430806
augcuucagaagauccugg

SEQ ID NO: 2430808 - RNA, 19 nt, Artificial Sequence
  Description of Artificial Sequence: Synthetic oligonucleotide
  Sense strand starting at position 673 of SEQ ID NO: 1886852
cuggaaagcuggucccgau

SEQ ID NO: 2430809 - RNA, 19 nt, Artificial Sequence
  Description of Artificial Sequence: Synthetic oligonucleotide
  Antisense strand to SEQ ID NO: 2430808
aucgggaccagcuuuccag

SEQ ID NO: 2430810 - RNA, 19 nt, Artificial Sequence
  Description of Artificial Sequence: Synthetic oligonucleotide
  Sense strand starting at position 685 of SEQ ID NO: 1886852
ucccgauccugugucugau

SEQ ID NO: 2430811 - RNA, 19 nt, Artificial Sequence
  Description of Artificial Sequence: Synthetic oligonucleotide
  Antisense strand to SEQ ID NO: 2430810
aucagacacaggaucggga

SEQ ID NO: 2430812 - RNA, 19 nt, Artificial Sequence
  Description of Artificial Sequence: Synthetic oligonucleotide
  Sense strand starting at position 689 of SEQ ID NO: 1886852
gauccugugucugauccuu

SEQ ID NO: 2430813 - RNA, 19 nt, Artificial Sequence
  Description of Artificial Sequence: Synthetic oligonucleotide
  Antisense strand to SEQ ID NO: 2430812
aaggaucagacacaggauc

SEQ ID NO: 2430814 - RNA, 19 nt, Artificial Sequence
  Description of Artificial Sequence: Synthetic oligonucleotide
  Sense strand starting at position 803 of SEQ ID NO: 1886852
uguaacauaucaucuuguu

SEQ ID NO: 2430815 - RNA, 19 nt, Artificial Sequence
  Description of Artificial Sequence: Synthetic oligonucleotide
  Antisense strand to SEQ ID NO: 2430814
aacaagaugauauguuaca

SEQ ID NO: 2430816 - RNA, 19 nt, Artificial Sequence
  Description of Artificial Sequence: Synthetic oligonucleotide
  Sense strand starting at position 809 of SEQ ID NO: 1886852
auaucaucuuguucuguuu

SEQ ID NO: 2430817 - RNA, 19 nt, Artificial Sequence
  Description of Artificial Sequence: Synthetic oligonucleotide
  Antisense strand to SEQ ID NO: 2430816
aaacagaacaagaugauau

SEQ ID NO: 2430818 - RNA, 19 nt, Artificial Sequence
  Description of Artificial Sequence: Synthetic oligonucleotide
  Sense strand starting at position 958 of SEQ ID NO: 1886852
gcaguagugugauuacagg

SEQ ID NO: 2430819 - RNA, 19 nt, Artificial Sequence
  Description of Artificial Sequence: Synthetic oligonucleotide
  Antisense strand to SEQ ID NO: 2430818
ccuguaaucacacuacugc

SEQ ID NO: 2430820 - RNA, 19 nt, Artificial Sequence
  Description of Artificial Sequence: Synthetic oligonucleotide
  Sense strand starting at position 1303 of SEQ ID NO: 1886852
agucuuaucuccucuugac

SEQ ID NO: 2430821 - RNA, 19 nt, Artificial Sequence
  Description of Artificial Sequence: Synthetic oligonucleotide
  Antisense strand to SEQ ID NO: 2430820
gucaagaggagauaagacu

SEQ ID NO: 2430822 - RNA, 19 nt, Artificial Sequence
  Description of Artificial Sequence: Synthetic oligonucleotide
  Sense strand starting at position 1611 of SEQ ID NO: 1886852
ggaauucugccuugcacug

SEQ ID NO: 2430823 - RNA, 19 nt, Artificial Sequence
  Description of Artificial Sequence: Synthetic oligonucleotide
  Antisense strand to SEQ ID NO: 2430822
cagugcaaggcagaauucc

SEQ ID NO: 2430824 - RNA, 19 nt, Artificial Sequence
  Description of Artificial Sequence: Synthetic oligonucleotide
  Sense strand starting at position 1660 of SEQ ID NO: 1886852
cugccuuggcaacggaaau

SEQ ID NO: 2430825 - RNA, 19 nt, Artificial Sequence
  Description of Artificial Sequence: Synthetic oligonucleotide
  Antisense strand to SEQ ID NO: 2430824
auuuccguugccaaggcag

SEQ ID NO: 2430826 - RNA, 19 nt, Artificial Sequence
  Description of Artificial Sequence: Synthetic oligonucleotide
  Sense strand starting at position 1671 of SEQ ID NO: 1886852
acggaaaugcuaggugaau

SEQ ID NO: 2430827 - RNA, 19 nt, Artificial Sequence
  Description of Artificial Sequence: Synthetic oligonucleotide
  Antisense strand to SEQ ID NO: 2430826
auucaccuagcauuuccgu

SEQ ID NO: 2430828 - RNA, 19 nt, Artificial Sequence
  Description of Artificial Sequence: Synthetic oligonucleotide
  Sense strand starting at position 1672 of SEQ ID NO: 1886852
cggaaaugcuaggugaaug

SEQ ID NO: 2430829 - RNA, 19 nt, Artificial Sequence
  Description of Artificial Sequence: Synthetic oligonucleotide
  Antisense strand to SEQ ID NO: 2430828
cauucaccuagcauuuccg

SEQ ID NO: 2430830 - RNA, 19 nt, Artificial Sequence
  Description of Artificial Sequence: Synthetic oligonucleotide
  Sense strand starting at position 1682 of SEQ ID NO: 1886852
aggugaaugguggguaugu

SEQ ID NO: 2430831 - RNA, 19 nt, Artificial Sequence
  Description of Artificial Sequence: Synthetic oligonucleotide
  Antisense strand to SEQ ID NO: 2430830
acauacccaccauucaccu

SEQ ID NO: 2430832 - RNA, 19 nt, Artificial Sequence
  Description of Artificial Sequence: Synthetic oligonucleotide
  Sense strand starting at position 1690 of SEQ ID NO: 1886852
gguggguauguggaugaaa

SEQ ID NO: 2430833 - RNA, 19 nt, Artificial Sequence
  Description of Artificial Sequence: Synthetic oligonucleotide
  Antisense strand to SEQ ID NO: 2430832
uuucauccacauacccacc

SEQ ID NO: 2430834 - RNA, 19 nt, Artificial Sequence
  Description of Artificial Sequence: Synthetic oligonucleotide
  Sense strand starting at position 1978 of SEQ ID NO: 1886852
agucacuucccauggguga

SEQ ID NO: 2430835 - RNA, 19 nt, Artificial Sequence
  Description of Artificial Sequence: Synthetic oligonucleotide
  Antisense strand to SEQ ID NO: 2430834
ucacccaugggaagugacu

SEQ ID NO: 2430836 - RNA, 19 nt, Artificial Sequence
  Description of Artificial Sequence: Synthetic oligonucleotide
  Sense strand starting at position 1979 of SEQ ID NO: 1886852
gucacuucccaugggugaa

SEQ ID NO: 2430837 - RNA, 19 nt, Artificial Sequence
  Description of Artificial Sequence: Synthetic oligonucleotide
  Antisense strand to SEQ ID NO: 2430836
uucacccaugggaagugac

SEQ ID NO: 2430838 - RNA, 19 nt, Artificial Sequence
  Description of Artificial Sequence: Synthetic oligonucleotide
  Sense strand starting at position 2350 of SEQ ID NO: 1886852
gggugaaauuucgaggcag

SEQ ID NO: 2430839 - RNA, 19 nt, Artificial Sequence
  Description of Artificial Sequence: Synthetic oligonucleotide
  Antisense strand to SEQ ID NO: 2430838
cugccucgaaauuucaccc

SEQ ID NO: 2430840 - RNA, 19 nt, Artificial Sequence
  Description of Artificial Sequence: Synthetic oligonucleotide
  Sense strand starting at position 2351 of SEQ ID NO: 1886852
ggugaaauuucgaggcagu

SEQ ID NO: 2430841 - RNA, 19 nt, Artificial Sequence
  Description of Artificial Sequence: Synthetic oligonucleotide
  Antisense strand to SEQ ID NO: 2430840
acugccucgaaauuucacc

SEQ ID NO: 2430842 - RNA, 19 nt, Artificial Sequence
  Description of Artificial Sequence: Synthetic oligonucleotide
  Sense strand starting at position 2352 of SEQ ID NO: 1886852
gugaaauuucgaggcaguu

SEQ ID NO: 2430843 - RNA, 19 nt, Artificial Sequence
  Description of Artificial Sequence: Synthetic oligonucleotide
  Antisense strand to SEQ ID NO: 2430842
aacugccucgaaauuucac

SEQ ID NO: 2430844 - RNA, 19 nt, Artificial Sequence
  Description of Artificial Sequence: Synthetic oligonucleotide
  Sense strand starting at position 2358 of SEQ ID NO: 1886852
uuucgaggcaguugacaau

SEQ ID NO: 2430845 - RNA, 19 nt, Artificial Sequence
  Description of Artificial Sequence: Synthetic oligonucleotide
  Antisense strand to SEQ ID NO: 2430844
auugucaacugccucgaaa

SEQ ID NO: 2430846 - RNA, 19 nt, Artificial Sequence
  Description of Artificial Sequence: Synthetic oligonucleotide
  Sense strand starting at position 2394 of SEQ ID NO: 1886852
ucaucagcuucugagaagu

SEQ ID NO: 2430847 - RNA, 19 nt, Artificial Sequence
  Description of Artificial Sequence: Synthetic oligonucleotide
  Antisense strand to SEQ ID NO: 2430846
acuucucagaagcugauga

SEQ ID NO: 2430848 - RNA, 19 nt, Artificial Sequence
  Description of Artificial Sequence: Synthetic oligonucleotide
  Sense strand starting at position 2407 of SEQ ID NO: 1886852
agaaguaccucucuguaca

SEQ ID NO: 2430849 - RNA, 19 nt, Artificial Sequence
  Description of Artificial Sequence: Synthetic oligonucleotide
  Antisense strand to SEQ ID NO: 2430848
uguacagagagguacuucu

SEQ ID NO: 2430850 - RNA, 19 nt, Artificial Sequence
  Description of Artificial Sequence: Synthetic oligonucleotide
  Sense strand starting at position 2462 of SEQ ID NO: 1886852
gcuccucugucauguggaa

SEQ ID NO: 2430851 - RNA, 19 nt, Artificial Sequence
  Description of Artificial Sequence: Synthetic oligonucleotide
  Antisense strand to SEQ ID NO: 2430850
uuccacaugacagaggagc

SEQ ID NO: 2430852 - RNA, 19 nt, Artificial Sequence
  Description of Artificial Sequence: Synthetic oligonucleotide
  Sense strand starting at position 2682 of SEQ ID NO: 1886852
gggcacuuguggccaaagu

SEQ ID NO: 2430853 - RNA, 19 nt, Artificial Sequence
  Description of Artificial Sequence: Synthetic oligonucleotide
  Antisense strand to SEQ ID NO: 2430852
acuuuggccacaagugccc

SEQ ID NO: 2430854 - RNA, 19 nt, Artificial Sequence
  Description of Artificial Sequence: Synthetic oligonucleotide
  Sense strand starting at position 2745 of SEQ ID NO: 1886852
cuaugaggagauuggguau

SEQ ID NO: 2430855 - RNA, 19 nt, Artificial Sequence
  Description of Artificial Sequence: Synthetic oligonucleotide
  Antisense strand to SEQ ID NO: 2430854
auacccaaucuccucauag

SEQ ID NO: 2430856 - RNA, 19 nt, Artificial Sequence
  Description of Artificial Sequence: Synthetic oligonucleotide
  Sense strand starting at position 3232 of SEQ ID NO: 1886852
aauaauuaguucugcagag

SEQ ID NO: 2430857 - RNA, 19 nt, Artificial Sequence
  Description of Artificial Sequence: Synthetic oligonucleotide
  Antisense strand to SEQ ID NO: 2430856
cucugcagaacuaauuauu

SEQ ID NO: 2430858 - RNA, 19 nt, Artificial Sequence
  Description of Artificial Sequence: Synthetic oligonucleotide
  Sense strand starting at position 3233 of SEQ ID NO: 1886852
auaauuaguucugcagagu

SEQ ID NO: 2430859 - RNA, 19 nt, Artificial Sequence
  Description of Artificial Sequence: Synthetic oligonucleotide
  Antisense strand to SEQ ID NO: 2430858
acucugcagaacuaauuau

SEQ ID NO: 2430860 - RNA, 19 nt, Artificial Sequence
  Description of Artificial Sequence: Synthetic oligonucleotide
  Sense strand starting at position 3234 of SEQ ID NO: 1886852
uaauuaguucugcagaguc

SEQ ID NO: 2430861 - RNA, 19 nt, Artificial Sequence
  Description of Artificial Sequence: Synthetic oligonucleotide
  Antisense strand to SEQ ID NO: 2430860
gacucugcagaacuaauua

SEQ ID NO: 2430862 - RNA, 19 nt, Artificial Sequence
  Description of Artificial Sequence: Synthetic oligonucleotide
  Sense strand starting at position 3236 of SEQ ID NO: 1886852
auuaguucugcagagucau

SEQ ID NO: 2430863 - RNA, 19 nt, Artificial Sequence
  Description of Artificial Sequence: Synthetic oligonucleotide
  Antisense strand to SEQ ID NO: 2430862
augacucugcagaacuaau

SEQ ID NO: 2430864 - RNA, 19 nt, Artificial Sequence
  Description of Artificial Sequence: Synthetic oligonucleotide
  Sense strand starting at position 3269 of SEQ ID NO: 1886852
caagcaaucugggaagcua

SEQ ID NO: 2430865 - RNA, 19 nt, Artificial Sequence
  Description of Artificial Sequence: Synthetic oligonucleotide
  Antisense strand to SEQ ID NO: 2430864
uagcuucccagauugcuug

SEQ ID NO: 2430866 - RNA, 19 nt, Artificial Sequence
  Description of Artificial Sequence: Synthetic oligonucleotide
  Sense strand starting at position 3281 of SEQ ID NO: 1886852
gaagcuaaggccugaggau

SEQ ID NO: 2430867 - RNA, 19 nt, Artificial Sequence
  Description of Artificial Sequence: Synthetic oligonucleotide
  Antisense strand to SEQ ID NO: 2430866
auccucaggccuuagcuuc

SEQ ID NO: 2430868 - RNA, 19 nt, Artificial Sequence
  Description of Artificial Sequence: Synthetic oligonucleotide
  Sense strand starting at position 3282 of SEQ ID NO: 1886852
aagcuaaggccugaggauu

SEQ ID NO: 2430869 - RNA, 19 nt, Artificial Sequence
  Description of Artificial Sequence: Synthetic oligonucleotide
  Antisense strand to SEQ ID NO: 2430868
aauccucaggccuuagcuu

SEQ ID NO: 2430870 - RNA, 19 nt, Artificial Sequence
  Description of Artificial Sequence: Synthetic oligonucleotide
  Sense strand starting at position 3381 of SEQ ID NO: 1886852
gacgcugucucuuuaaaca

SEQ ID NO: 2430871 - RNA, 19 nt, Artificial Sequence
  Description of Artificial Sequence: Synthetic oligonucleotide
  Antisense strand to SEQ ID NO: 2430870
uguuuaaagagacagcguc

SEQ ID NO: 2430872 - RNA, 19 nt, Artificial Sequence
  Description of Artificial Sequence: Synthetic oligonucleotide
  Sense strand starting at position 3501 of SEQ ID NO: 1886852
gcgcuuuguccugagaaca

SEQ ID NO: 2430873 - RNA, 19 nt, Artificial Sequence
  Description of Artificial Sequence: Synthetic oligonucleotide
  Antisense strand to SEQ ID NO: 2430872
uguucucaggacaaagcgc

SEQ ID NO: 2430874 - RNA, 19 nt, Artificial Sequence
  Description of Artificial Sequence: Synthetic oligonucleotide
  Sense strand starting at position 3591 of SEQ ID NO: 1886852
ccagaaaccuguccauugu

SEQ ID NO: 2430875 - RNA, 19 nt, Artificial Sequence
  Description of Artificial Sequence: Synthetic oligonucleotide
  Antisense strand to SEQ ID NO: 2430874
acaauggacagguuucugg

SEQ ID NO: 2430876 - RNA, 19 nt, Artificial Sequence
  Description of Artificial Sequence: Synthetic oligonucleotide
  Sense strand starting at position 115 of SEQ ID NO: 1886853
gcaaauacuuaacaggaga

SEQ ID NO: 2430877 - RNA, 19 nt, Artificial Sequence
  Description of Artificial Sequence: Synthetic oligonucleotide
  Antisense strand to SEQ ID NO: 2430876
ucuccuguuaaguauuugc

SEQ ID NO: 2430878 - RNA, 19 nt, Artificial Sequence
  Description of Artificial Sequence: Synthetic oligonucleotide
  Sense strand starting at position 136 of SEQ ID NO: 1886853
agagauuuccugugagugc

SEQ ID NO: 2430879 - RNA, 19 nt, Artificial Sequence
  Description of Artificial Sequence: Synthetic oligonucleotide
  Antisense strand to SEQ ID NO: 2430878
gcacucacaggaaaucucu

SEQ ID NO: 2430880 - RNA, 19 nt, Artificial Sequence
  Description of Artificial Sequence: Synthetic oligonucleotide
  Sense strand starting at position 137 of SEQ ID NO: 1886853
gagauuuccugugagugca

SEQ ID NO: 2430881 - RNA, 19 nt, Artificial Sequence
  Description of Artificial Sequence: Synthetic oligonucleotide
  Antisense strand to SEQ ID NO: 2430880
ugcacucacaggaaaucuc

SEQ ID NO: 2430882 - RNA, 19 nt, Artificial Sequence
  Description of Artificial Sequence: Synthetic oligonucleotide
  Sense strand starting at position 170 of SEQ ID NO: 1886853
accugauucugugaagcaa

SEQ ID NO: 2430883 - RNA, 19 nt, Artificial Sequence
  Description of Artificial Sequence: Synthetic oligonucleotide
  Antisense strand to SEQ ID NO: 2430882
uugcuucacagaaucaggu

SEQ ID NO: 2430884 - RNA, 19 nt, Artificial Sequence
  Description of Artificial Sequence: Synthetic oligonucleotide
  Sense strand starting at position 189 of SEQ ID NO: 1886853
auguuauuguccuccuuaa

SEQ ID NO: 2430885 - RNA, 19 nt, Artificial Sequence
  Description of Artificial Sequence: Synthetic oligonucleotide
  Antisense strand to SEQ ID NO: 2430884
uuaaggaggacaauaacau

SEQ ID NO: 2430886 - RNA, 19 nt, Artificial Sequence
  Description of Artificial Sequence: Synthetic oligonucleotide
  Sense strand starting at position 216 of SEQ ID NO: 1886853
guugaauucuaauucuaug

SEQ ID NO: 2430887 - RNA, 19 nt, Artificial Sequence
  Description of Artificial Sequence: Synthetic oligonucleotide
  Antisense strand to SEQ ID NO: 2430886
cauagaauuagaauucaac

SEQ ID NO: 2430888 - RNA, 19 nt, Artificial Sequence
  Description of Artificial Sequence: Synthetic oligonucleotide
  Sense strand starting at position 221 of SEQ ID NO: 1886853
auucuaauucuaugugaug

SEQ ID NO: 2430889 - RNA, 19 nt, Artificial Sequence
  Description of Artificial Sequence: Synthetic oligonucleotide
  Antisense strand to SEQ ID NO: 2430888
caucacauagaauuagaau

SEQ ID NO: 2430890 - RNA, 19 nt, Artificial Sequence
  Description of Artificial Sequence: Synthetic oligonucleotide
  Sense strand starting at position 224 of SEQ ID NO: 1886853
cuaauucuaugugauggua

SEQ ID NO: 2430891 - RNA, 19 nt, Artificial Sequence
  Description of Artificial Sequence: Synthetic oligonucleotide
  Antisense strand to SEQ ID NO: 2430890
uaccaucacauagaauuag

SEQ ID NO: 2430892 - RNA, 19 nt, Artificial Sequence
  Description of Artificial Sequence: Synthetic oligonucleotide
  Sense strand starting at position 371 of SEQ ID NO: 1886853
aaagguggcugucuaugaa

SEQ ID NO: 2430893 - RNA, 19 nt, Artificial Sequence
  Description of Artificial Sequence: Synthetic oligonucleotide
  Antisense strand to SEQ ID NO: 2430892
uucauagacagccaccuuu

SEQ ID NO: 2430894 - RNA, 19 nt, Artificial Sequence
  Description of Artificial Sequence: Synthetic oligonucleotide
  Sense strand starting at position 374 of SEQ ID NO: 1886853
gguggcugucuaugaacca

SEQ ID NO: 2430895 - RNA, 19 nt, Artificial Sequence
  Description of Artificial Sequence: Synthetic oligonucleotide
  Antisense strand to SEQ ID NO: 2430894
ugguucauagacagccacc

SEQ ID NO: 2430896 - RNA, 19 nt, Artificial Sequence
  Description of Artificial Sequence: Synthetic oligonucleotide
  Sense strand starting at position 405 of SEQ ID NO: 1886853
cacggaauccgcugacaau

SEQ ID NO: 2430897 - RNA, 19 nt, Artificial Sequence
  Description of Artificial Sequence: Synthetic oligonucleotide
  Antisense strand to SEQ ID NO: 2430896
auugucagcggauuccgug

SEQ ID NO: 2430898 - RNA, 19 nt, Artificial Sequence
  Description of Artificial Sequence: Synthetic oligonucleotide
  Sense strand starting at position 406 of SEQ ID NO: 1886853
acggaauccgcugacaauu

SEQ ID NO: 2430899 - RNA, 19 nt, Artificial Sequence
  Description of Artificial Sequence: Synthetic oligonucleotide
  Antisense strand to SEQ ID NO: 2430898
aauugucagcggauuccgu

SEQ ID NO: 2430900 - RNA, 19 nt, Artificial Sequence
  Description of Artificial Sequence: Synthetic oligonucleotide
  Sense strand starting at position 585 of SEQ ID NO: 1886853
aggugaaugaucugccgga

SEQ ID NO: 2430901 - RNA, 19 nt, Artificial Sequence
  Description of Artificial Sequence: Synthetic oligonucleotide
  Antisense strand to SEQ ID NO: 2430900
uccggcagaucauucaccu

SEQ ID NO: 2430902 - RNA, 19 nt, Artificial Sequence
  Description of Artificial Sequence: Synthetic oligonucleotide
  Sense strand starting at position 589 of SEQ ID NO: 1886853
gaaugaucugccggagaca

SEQ ID NO: 2430903 - RNA, 19 nt, Artificial Sequence
  Description of Artificial Sequence: Synthetic oligonucleotide
  Antisense strand to SEQ ID NO: 2430902
ugucuccggcagaucauuc

SEQ ID NO: 2430904 - RNA, 19 nt, Artificial Sequence
  Description of Artificial Sequence: Synthetic oligonucleotide
  Sense strand starting at position 590 of SEQ ID NO: 1886853
aaugaucugccggagacau

SEQ ID NO: 2430905 - RNA, 19 nt, Artificial Sequence
  Description of Artificial Sequence: Synthetic oligonucleotide
  Antisense strand to SEQ ID NO: 2430904
augucuccggcagaucauu

SEQ ID NO: 2430906 - RNA, 19 nt, Artificial Sequence
  Description of Artificial Sequence: Synthetic oligonucleotide
  Sense strand starting at position 843 of SEQ ID NO: 1886853
acuuuauuguaaucucguu

SEQ ID NO: 2430907 - RNA, 19 nt, Artificial Sequence
  Description of Artificial Sequence: Synthetic oligonucleotide
  Antisense strand to SEQ ID NO: 2430906
aacgagauuacaauaaagu

SEQ ID NO: 2430908 - RNA, 19 nt, Artificial Sequence
  Description of Artificial Sequence: Synthetic oligonucleotide
  Sense strand starting at position 2069 of SEQ ID NO: 1886853
aguucuguucgugugguca

SEQ ID NO: 2430909 - RNA, 19 nt, Artificial Sequence
  Description of Artificial Sequence: Synthetic oligonucleotide
  Antisense strand to SEQ ID NO: 2430908
ugaccacacgaacagaacu

SEQ ID NO: 2430910 - RNA, 19 nt, Artificial Sequence
  Description of Artificial Sequence: Synthetic oligonucleotide
  Sense strand starting at position 2073 of SEQ ID NO: 1886853
cuguucguguggucaucau

SEQ ID NO: 2430911 - RNA, 19 nt, Artificial Sequence
  Description of Artificial Sequence: Synthetic oligonucleotide
  Antisense strand to SEQ ID NO: 2430910
augaugaccacacgaacag

SEQ ID NO: 2430912 - RNA, 19 nt, Artificial Sequence
  Description of Artificial Sequence: Synthetic oligonucleotide
  Sense strand starting at position 2083 of SEQ ID NO: 1886853
ggucaucauccaggaagug

SEQ ID NO: 2430913 - RNA, 19 nt, Artificial Sequence
  Description of Artificial Sequence: Synthetic oligonucleotide
  Antisense strand to SEQ ID NO: 2430912
cacuuccuggaugaugacc

SEQ ID NO: 2430914 - RNA, 19 nt, Artificial Sequence
  Description of Artificial Sequence: Synthetic oligonucleotide
  Sense strand starting at position 2097 of SEQ ID NO: 1886853
aagugacgucgcuucuuua

SEQ ID NO: 2430915 - RNA, 19 nt, Artificial Sequence
  Description of Artificial Sequence: Synthetic oligonucleotide
  Antisense strand to SEQ ID NO: 2430914
uaaagaagcgacgucacuu

SEQ ID NO: 2430916 - RNA, 19 nt, Artificial Sequence
  Description of Artificial Sequence: Synthetic oligonucleotide
  Sense strand starting at position 2616 of SEQ ID NO: 1886853
gccugauguccucaugagu

SEQ ID NO: 2430917 - RNA, 19 nt, Artificial Sequence
  Description of Artificial Sequence: Synthetic oligonucleotide
  Antisense strand to SEQ ID NO: 2430916
acucaugaggacaucaggc

SEQ ID NO: 2430918 - RNA, 19 nt, Artificial Sequence
  Description of Artificial Sequence: Synthetic oligonucleotide
  Sense strand starting at position 2624 of SEQ ID NO: 1886853
uccucaugagucugguguu

SEQ ID NO: 2430919 - RNA, 19 nt, Artificial Sequence
  Description of Artificial Sequence: Synthetic oligonucleotide
  Antisense strand to SEQ ID NO: 2430918
aacaccagacucaugagga

SEQ ID NO: 2430920 - RNA, 19 nt, Artificial Sequence
  Description of Artificial Sequence: Synthetic oligonucleotide
  Sense strand starting at position 3023 of SEQ ID NO: 1886853
gacacuuucgccuaaggcu

SEQ ID NO: 2430921 - RNA, 19 nt, Artificial Sequence
  Description of Artificial Sequence: Synthetic oligonucleotide
  Antisense strand to SEQ ID NO: 2430920
agccuuaggcgaaaguguc

SEQ ID NO: 2430922 - RNA, 19 nt, Artificial Sequence
  Description of Artificial Sequence: Synthetic oligonucleotide
  Sense strand starting at position 3131 of SEQ ID NO: 1886853
cugucaucuccuugauaag

SEQ ID NO: 2430923 - RNA, 19 nt, Artificial Sequence
  Description of Artificial Sequence: Synthetic oligonucleotide
  Antisense strand to SEQ ID NO: 2430922
cuuaucaaggagaugacag

SEQ ID NO: 2430924 - RNA, 19 nt, Artificial Sequence
  Description of Artificial Sequence: Synthetic oligonucleotide
  Sense strand starting at position 3132 of SEQ ID NO: 1886853
ugucaucuccuugauaaga

SEQ ID NO: 2430925 - RNA, 19 nt, Artificial Sequence
  Description of Artificial Sequence: Synthetic oligonucleotide
  Antisense strand to SEQ ID NO: 2430924
ucuuaucaaggagaugaca

SEQ ID NO: 2430926 - RNA, 19 nt, Artificial Sequence
  Description of Artificial Sequence: Synthetic oligonucleotide
  Sense strand starting at position 3305 of SEQ ID NO: 1886853
agcauuaugcacugucgau

SEQ ID NO: 2430927 - RNA, 19 nt, Artificial Sequence
  Description of Artificial Sequence: Synthetic oligonucleotide
  Antisense strand to SEQ ID NO: 2430926
aucgacagugcauaaugcu

SEQ ID NO: 2430928 - RNA, 19 nt, Artificial Sequence
  Description of Artificial Sequence: Synthetic oligonucleotide
  Sense strand starting at position 3363 of SEQ ID NO: 1886853
cucugugguguccaaugaa

SEQ ID NO: 2430929 - RNA, 19 nt, Artificial Sequence
  Description of Artificial Sequence: Synthetic oligonucleotide
  Antisense strand to SEQ ID NO: 2430928
uucauuggacaccacagag

SEQ ID NO: 2430930 - RNA, 19 nt, Artificial Sequence
  Description of Artificial Sequence: Synthetic oligonucleotide
  Sense strand starting at position 3366 of SEQ ID NO: 1886853
ugugguguccaaugaaucu

SEQ ID NO: 2430931 - RNA, 19 nt, Artificial Sequence
  Description of Artificial Sequence: Synthetic oligonucleotide
  Antisense strand to SEQ ID NO: 2430930
agauucauuggacaccaca

SEQ ID NO: 2430932 - RNA, 19 nt, Artificial Sequence
  Description of Artificial Sequence: Synthetic oligonucleotide
  Sense strand starting at position 3501 of SEQ ID NO: 1886853
ggaaauauucccugaggcc

SEQ ID NO: 2430933 - RNA, 19 nt, Artificial Sequence
  Description of Artificial Sequence: Synthetic oligonucleotide
  Antisense strand to SEQ ID NO: 2430932
ggccucagggaauauuucc

SEQ ID NO: 2430934 - RNA, 19 nt, Artificial Sequence
  Description of Artificial Sequence: Synthetic oligonucleotide
  Sense strand starting at position 3750 of SEQ ID NO: 1886853
ggaggcugccuugagacua

SEQ ID NO: 2430935 - RNA, 19 nt, Artificial Sequence
  Description of Artificial Sequence: Synthetic oligonucleotide
  Antisense strand to SEQ ID NO: 2430934
uagucucaaggcagccucc

SEQ ID NO: 2430936 - RNA, 19 nt, Artificial Sequence
  Description of Artificial Sequence: Synthetic oligonucleotide
  Sense strand starting at position 3814 of SEQ ID NO: 1886853
accagagauugccuggacu

SEQ ID NO: 2430937 - RNA, 19 nt, Artificial Sequence
  Description of Artificial Sequence: Synthetic oligonucleotide
  Antisense strand to SEQ ID NO: 2430936
aguccaggcaaucucuggu

SEQ ID NO: 2430938 - RNA, 19 nt, Artificial Sequence
  Description of Artificial Sequence: Synthetic oligonucleotide
  Sense strand starting at position 3836 of SEQ ID NO: 1886853
cguuuaauccaucacuuug

SEQ ID NO: 2430939 - RNA, 19 nt, Artificial Sequence
  Description of Artificial Sequence: Synthetic oligonucleotide
  Antisense strand to SEQ ID NO: 2430938
caaagugauggauuaaacg

SEQ ID NO: 2430940 - RNA, 19 nt, Artificial Sequence
  Description of Artificial Sequence: Synthetic oligonucleotide
  Sense strand starting at position 3848 of SEQ ID NO: 1886853
cacuuuggcccuugaguua

SEQ ID NO: 2430941 - RNA, 19 nt, Artificial Sequence
  Description of Artificial Sequence: Synthetic oligonucleotide
  Antisense strand to SEQ ID NO: 2430940
uaacucaagggccaaagug

SEQ ID NO: 2430942 - RNA, 19 nt, Artificial Sequence
  Description of Artificial Sequence: Synthetic oligonucleotide
  Sense strand starting at position 3855 of SEQ ID NO: 1886853
gcccuugaguuacuaacau

SEQ ID NO: 2430943 - RNA, 19 nt, Artificial Sequence
  Description of Artificial Sequence: Synthetic oligonucleotide
  Antisense strand to SEQ ID NO: 2430942
auguuaguaacucaagggc

SEQ ID NO: 2430944 - RNA, 19 nt, Artificial Sequence
  Description of Artificial Sequence: Synthetic oligonucleotide
  Sense strand starting at position 3874 of SEQ ID NO: 1886853
uguugcaacuguccaaagu

SEQ ID NO: 2430945 - RNA, 19 nt, Artificial Sequence
  Description of Artificial Sequence: Synthetic oligonucleotide
  Antisense strand to SEQ ID NO: 2430944
acuuuggacaguugcaaca

SEQ ID NO: 2430946 - RNA, 19 nt, Artificial Sequence
  Description of Artificial Sequence: Synthetic oligonucleotide
  Sense strand starting at position 3932 of SEQ ID NO: 1886853
cuaagauggcaacaucagu

SEQ ID NO: 2430947 - RNA, 19 nt, Artificial Sequence
  Description of Artificial Sequence: Synthetic oligonucleotide
  Antisense strand to SEQ ID NO: 2430946
acugauguugccaucuuag

SEQ ID NO: 2430948 - RNA, 19 nt, Artificial Sequence
  Description of Artificial Sequence: Synthetic oligonucleotide
  Sense strand starting at position 3938 of SEQ ID NO: 1886853
uggcaacaucaguaucagu

SEQ ID NO: 2430949 - RNA, 19 nt, Artificial Sequence
  Description of Artificial Sequence: Synthetic oligonucleotide
  Antisense strand to SEQ ID NO: 2430948
acugauacugauguugcca

SEQ ID NO: 2430950 - RNA, 19 nt, Artificial Sequence
  Description of Artificial Sequence: Synthetic oligonucleotide
  Sense strand starting at position 3943 of SEQ ID NO: 1886853
acaucaguaucagucaaau

SEQ ID NO: 2430951 - RNA, 19 nt, Artificial Sequence
  Description of Artificial Sequence: Synthetic oligonucleotide
  Antisense strand to SEQ ID NO: 2430950
auuugacugauacugaugu

SEQ ID NO: 2430952 - RNA, 19 nt, Artificial Sequence
  Description of Artificial Sequence: Synthetic oligonucleotide
  Sense strand starting at position 3964 of SEQ ID NO: 1886853
agcaacacgcguuaacuua

SEQ ID NO: 2430953 - RNA, 19 nt, Artificial Sequence
  Description of Artificial Sequence: Synthetic oligonucleotide
  Antisense strand to SEQ ID NO: 2430952
uaaguuaacgcguguugcu

SEQ ID NO: 2430954 - RNA, 19 nt, Artificial Sequence
  Description of Artificial Sequence: Synthetic oligonucleotide
  Sense strand starting at position 3971 of SEQ ID NO: 1886853
cgcguuaacuuagugacca

SEQ ID NO: 2430955 - RNA, 19 nt, Artificial Sequence
  Description of Artificial Sequence: Synthetic oligonucleotide
  Antisense strand to SEQ ID NO: 2430954
uggucacuaaguuaacgcg

SEQ ID NO: 2430956 - RNA, 19 nt, Artificial Sequence
  Description of Artificial Sequence: Synthetic oligonucleotide
  Sense strand starting at position 80 of SEQ ID NO: 1886854
uuagacaauucuguuuaga

SEQ ID NO: 2430957 - RNA, 19 nt, Artificial Sequence
  Description of Artificial Sequence: Synthetic oligonucleotide
  Antisense strand to SEQ ID NO: 2430956
ucuaaacagaauugucuaa

SEQ ID NO: 2430958 - RNA, 19 nt, Artificial Sequence
  Description of Artificial Sequence: Synthetic oligonucleotide
  Sense strand starting at position 82 of SEQ ID NO: 1886854
agacaauucuguuuagaca

SEQ ID NO: 2430959 - RNA, 19 nt, Artificial Sequence
  Description of Artificial Sequence: Synthetic oligonucleotide
  Antisense strand to SEQ ID NO: 2430958
ugucuaaacagaauugucu

SEQ ID NO: 2430960 - RNA, 19 nt, Artificial Sequence
  Description of Artificial Sequence: Synthetic oligonucleotide
  Sense strand starting at position 216 of SEQ ID NO: 1886854
ugcauuggauucuauguga

SEQ ID NO: 2430961 - RNA, 19 nt, Artificial Sequence
  Description of Artificial Sequence: Synthetic oligonucleotide
  Antisense strand to SEQ ID NO: 2430960
ucacauagaauccaaugca

SEQ ID NO: 2430962 - RNA, 19 nt, Artificial Sequence
  Description of Artificial Sequence: Synthetic oligonucleotide
  Sense strand starting at position 482 of SEQ ID NO: 1886854
acaccuagucuauggcauu

SEQ ID NO: 2430963 - RNA, 19 nt, Artificial Sequence
  Description of Artificial Sequence: Synthetic oligonucleotide
  Antisense strand to SEQ ID NO: 2430962
aaugccauagacuaggugu

SEQ ID NO: 2430964 - RNA, 19 nt, Artificial Sequence
  Description of Artificial Sequence: Synthetic oligonucleotide
  Sense strand starting at position 2041 of SEQ ID NO: 1886854
cagcgcugacucuaggaua

SEQ ID NO: 2430965 - RNA, 19 nt, Artificial Sequence
  Description of Artificial Sequence: Synthetic oligonucleotide
  Antisense strand to SEQ ID NO: 2430964
uauccuagagucagcgcug

SEQ ID NO: 2430966 - RNA, 19 nt, Artificial Sequence
  Description of Artificial Sequence: Synthetic oligonucleotide
  Sense strand starting at position 2082 of SEQ ID NO: 1886854
cuaaguucuguucgugugu

SEQ ID NO: 2430967 - RNA, 19 nt, Artificial Sequence
  Description of Artificial Sequence: Synthetic oligonucleotide
  Antisense strand to SEQ ID NO: 2430966
acacacgaacagaacuuag

SEQ ID NO: 2430968 - RNA, 19 nt, Artificial Sequence
  Description of Artificial Sequence: Synthetic oligonucleotide
  Sense strand starting at position 2328 of SEQ ID NO: 1886854
ugaugacugccuuggccua

SEQ ID NO: 2430969 - RNA, 19 nt, Artificial Sequence
  Description of Artificial Sequence: Synthetic oligonucleotide
  Antisense strand to SEQ ID NO: 2430968
uaggccaaggcagucauca

SEQ ID NO: 2430970 - RNA, 19 nt, Artificial Sequence
  Description of Artificial Sequence: Synthetic oligonucleotide
  Sense strand starting at position 227 of SEQ ID NO: 1886855
gugaguuagcccuguauuu

SEQ ID NO: 2430971 - RNA, 19 nt, Artificial Sequence
  Description of Artificial Sequence: Synthetic oligonucleotide
  Antisense strand to SEQ ID NO: 2430970
aaauacagggcuaacucac

SEQ ID NO: 2430972 - RNA, 19 nt, Artificial Sequence
  Description of Artificial Sequence: Synthetic oligonucleotide
  Sense strand starting at position 294 of SEQ ID NO: 1886855
ugugauaauauuggaguaa

SEQ ID NO: 2430973 - RNA, 19 nt, Artificial Sequence
  Description of Artificial Sequence: Synthetic oligonucleotide
  Antisense strand to SEQ ID NO: 2430972
uuacuccaauauuaucaca

SEQ ID NO: 2430974 - RNA, 19 nt, Artificial Sequence
  Description of Artificial Sequence: Synthetic oligonucleotide
  Sense strand starting at position 331 of SEQ ID NO: 1886855
ggauuugaauugggaauug

SEQ ID NO: 2430975 - RNA, 19 nt, Artificial Sequence
  Description of Artificial Sequence: Synthetic oligonucleotide
  Antisense strand to SEQ ID NO: 2430974
caauucccaauucaaaucc

SEQ ID NO: 2430976 - RNA, 19 nt, Artificial Sequence
  Description of Artificial Sequence: Synthetic oligonucleotide
  Sense strand starting at position 342 of SEQ ID NO: 1886855
gggaauugcuggaaacgag

SEQ ID NO: 2430977 - RNA, 19 nt, Artificial Sequence
  Description of Artificial Sequence: Synthetic oligonucleotide
  Antisense strand to SEQ ID NO: 2430976
cucguuuccagcaauuccc

SEQ ID NO: 2430978 - RNA, 19 nt, Artificial Sequence
  Description of Artificial Sequence: Synthetic oligonucleotide
  Sense strand starting at position 511 of SEQ ID NO: 1886855
caggauaaaugcuuguaag

SEQ ID NO: 2430979 - RNA, 19 nt, Artificial Sequence
  Description of Artificial Sequence: Synthetic oligonucleotide
  Antisense strand to SEQ ID NO: 2430978
cuuacaagcauuuauccug

SEQ ID NO: 2430980 - RNA, 19 nt, Artificial Sequence
  Description of Artificial Sequence: Synthetic oligonucleotide
  Sense strand starting at position 512 of SEQ ID NO: 1886855
aggauaaaugcuuguaaga

SEQ ID NO: 2430981 - RNA, 19 nt, Artificial Sequence
  Description of Artificial Sequence: Synthetic oligonucleotide
  Antisense strand to SEQ ID NO: 2430980
ucuuacaagcauuuauccu

SEQ ID NO: 2430982 - RNA, 19 nt, Artificial Sequence
  Description of Artificial Sequence: Synthetic oligonucleotide
  Sense strand starting at position 545 of SEQ ID NO: 1886855
uugauuaaucgauggagcu

SEQ ID NO: 2430983 - RNA, 19 nt, Artificial Sequence
  Description of Artificial Sequence: Synthetic oligonucleotide
  Antisense strand to SEQ ID NO: 2430982
agcuccaucgauuaaucaa

SEQ ID NO: 2430984 - RNA, 19 nt, Artificial Sequence
  Description of Artificial Sequence: Synthetic oligonucleotide
  Sense strand starting at position 546 of SEQ ID NO: 1886855
ugauuaaucgauggagcug

SEQ ID NO: 2430985 - RNA, 19 nt, Artificial Sequence
  Description of Artificial Sequence: Synthetic oligonucleotide
  Antisense strand to SEQ ID NO: 2430984
cagcuccaucgauuaauca

SEQ ID NO: 2430986 - RNA, 19 nt, Artificial Sequence
  Description of Artificial Sequence: Synthetic oligonucleotide
  Sense strand starting at position 802 of SEQ ID NO: 1886855
ggaauaggcuguuucuuag

SEQ ID NO: 2430987 - RNA, 19 nt, Artificial Sequence
  Description of Artificial Sequence: Synthetic oligonucleotide
  Antisense strand to SEQ ID NO: 2430986
cuaagaaacagccuauucc

SEQ ID NO: 2430988 - RNA, 19 nt, Artificial Sequence
  Description of Artificial Sequence: Synthetic oligonucleotide
  Sense strand starting at position 812 of SEQ ID NO: 1886855
guuucuuaggcauaacauu

SEQ ID NO: 2430989 - RNA, 19 nt, Artificial Sequence
  Description of Artificial Sequence: Synthetic oligonucleotide
  Antisense strand to SEQ ID NO: 2430988
aauguuaugccuaagaaac

SEQ ID NO: 2430990 - RNA, 19 nt, Artificial Sequence
  Description of Artificial Sequence: Synthetic oligonucleotide
  Sense strand starting at position 1754 of SEQ ID NO: 1886855
ucugguacuguugaaguga

SEQ ID NO: 2430991 - RNA, 19 nt, Artificial Sequence
  Description of Artificial Sequence: Synthetic oligonucleotide
  Antisense strand to SEQ ID NO: 2430990
ucacuucaacaguaccaga

SEQ ID NO: 2430992 - RNA, 19 nt, Artificial Sequence
  Description of Artificial Sequence: Synthetic oligonucleotide
  Sense strand starting at position 1817 of SEQ ID NO: 1886855
ggcagauaauggagugaga

SEQ ID NO: 2430993 - RNA, 19 nt, Artificial Sequence
  Description of Artificial Sequence: Synthetic oligonucleotide
  Antisense strand to SEQ ID NO: 2430992
ucucacuccauuaucugcc

SEQ ID NO: 2430994 - RNA, 19 nt, Artificial Sequence
  Description of Artificial Sequence: Synthetic oligonucleotide
  Sense strand starting at position 2008 of SEQ ID NO: 1886855
gucuauuugggaggccgua

SEQ ID NO: 2430995 - RNA, 19 nt, Artificial Sequence
  Description of Artificial Sequence: Synthetic oligonucleotide
  Antisense strand to SEQ ID NO: 2430994
uacggccucccaaauagac

SEQ ID NO: 2430996 - RNA, 19 nt, Artificial Sequence
  Description of Artificial Sequence: Synthetic oligonucleotide
  Sense strand starting at position 2112 of SEQ ID NO: 1886855
uguugugaagauuaacuca

SEQ ID NO: 2430997 - RNA, 19 nt, Artificial Sequence
  Description of Artificial Sequence: Synthetic oligonucleotide
  Antisense strand to SEQ ID NO: 2430996
ugaguuaaucuucacaaca

SEQ ID NO: 2430998 - RNA, 19 nt, Artificial Sequence
  Description of Artificial Sequence: Synthetic oligonucleotide
  Sense strand starting at position 2148 of SEQ ID NO: 1886855
gggcauaauggccaugaau

SEQ ID NO: 2430999 - RNA, 19 nt, Artificial Sequence
  Description of Artificial Sequence: Synthetic oligonucleotide
  Antisense strand to SEQ ID NO: 2430998
auucauggccauuaugccc

SEQ ID NO: 2431000 - RNA, 19 nt, Artificial Sequence
  Description of Artificial Sequence: Synthetic oligonucleotide
  Sense strand starting at position 2150 of SEQ ID NO: 1886855
gcauaauggccaugaauga

SEQ ID NO: 2431001 - RNA, 19 nt, Artificial Sequence
  Description of Artificial Sequence: Synthetic oligonucleotide
  Antisense strand to SEQ ID NO: 2431000
ucauucauggccauuaugc

SEQ ID NO: 2431002 - RNA, 19 nt, Artificial Sequence
  Description of Artificial Sequence: Synthetic oligonucleotide
  Sense strand starting at position 2210 of SEQ ID NO: 1886855
gcaguuauugucuauggga

SEQ ID NO: 2431003 - RNA, 19 nt, Artificial Sequence
  Description of Artificial Sequence: Synthetic oligonucleotide
  Antisense strand to SEQ ID NO: 2431002
ucccauagacaauaacugc

SEQ ID NO: 2431004 - RNA, 19 nt, Artificial Sequence
  Description of Artificial Sequence: Synthetic oligonucleotide
  Sense strand starting at position 2317 of SEQ ID NO: 1886855
agaaucauaugaguuacuu

SEQ ID NO: 2431005 - RNA, 19 nt, Artificial Sequence
  Description of Artificial Sequence: Synthetic oligonucleotide
  Antisense strand to SEQ ID NO: 2431004
aaguaacucauaugauucu

SEQ ID NO: 2431006 - RNA, 19 nt, Artificial Sequence
  Description of Artificial Sequence: Synthetic oligonucleotide
  Sense strand starting at position 2321 of SEQ ID NO: 1886855
ucauaugaguuacuuauag

SEQ ID NO: 2431007 - RNA, 19 nt, Artificial Sequence
  Description of Artificial Sequence: Synthetic oligonucleotide
  Antisense strand to SEQ ID NO: 2431006
cuauaaguaacucauauga

SEQ ID NO: 2431008 - RNA, 19 nt, Artificial Sequence
  Description of Artificial Sequence: Synthetic oligonucleotide
  Sense strand starting at position 2330 of SEQ ID NO: 1886855
uuacuuauagcuuauagag

SEQ ID NO: 2431009 - RNA, 19 nt, Artificial Sequence
  Description of Artificial Sequence: Synthetic oligonucleotide
  Antisense strand to SEQ ID NO: 2431008
cucuauaagcuauaaguaa

SEQ ID NO: 2431010 - RNA, 19 nt, Artificial Sequence
  Description of Artificial Sequence: Synthetic oligonucleotide
  Sense strand starting at position 2338 of SEQ ID NO: 1886855
agcuuauagaguuaaagug

SEQ ID NO: 2431011 - RNA, 19 nt, Artificial Sequence
  Description of Artificial Sequence: Synthetic oligonucleotide
  Antisense strand to SEQ ID NO: 2431010
cacuuuaacucuauaagcu

SEQ ID NO: 2431012 - RNA, 19 nt, Artificial Sequence
  Description of Artificial Sequence: Synthetic oligonucleotide
  Sense strand starting at position 2445 of SEQ ID NO: 1886855
gaguuaaagugguuauaua

SEQ ID NO: 2431013 - RNA, 19 nt, Artificial Sequence
  Description of Artificial Sequence: Synthetic oligonucleotide
  Antisense strand to SEQ ID NO: 2431012
uauauaaccacuuuaacuc

SEQ ID NO: 2431014 - RNA, 19 nt, Artificial Sequence
  Description of Artificial Sequence: Synthetic oligonucleotide
  Sense strand starting at position 2541 of SEQ ID NO: 1886855
gagguaaagugguuauuac

SEQ ID NO: 2431015 - RNA, 19 nt, Artificial Sequence
  Description of Artificial Sequence: Synthetic oligonucleotide
  Antisense strand to SEQ ID NO: 2431014
guaauaaccacuuuaccuc

SEQ ID NO: 2431016 - RNA, 19 nt, Artificial Sequence
  Description of Artificial Sequence: Synthetic oligonucleotide
  Sense strand starting at position 2542 of SEQ ID NO: 1886855
agguaaagugguuauuaca

SEQ ID NO: 2431017 - RNA, 19 nt, Artificial Sequence
  Description of Artificial Sequence: Synthetic oligonucleotide
  Antisense strand to SEQ ID NO: 2431016
uguaauaaccacuuuaccu

SEQ ID NO: 2431018 - RNA, 19 nt, Artificial Sequence
  Description of Artificial Sequence: Synthetic oligonucleotide
  Sense strand starting at position 2601 of SEQ ID NO: 1886855
agcaauaguuguguauuua

SEQ ID NO: 2431019 - RNA, 19 nt, Artificial Sequence
  Description of Artificial Sequence: Synthetic oligonucleotide
  Antisense strand to SEQ ID NO: 2431018
uaaauacacaacuauugcu

SEQ ID NO: 2431020 - RNA, 19 nt, Artificial Sequence
  Description of Artificial Sequence: Synthetic oligonucleotide
  Sense strand starting at position 2620 of SEQ ID NO: 1886855
gcagaauguuaggcaaaua

SEQ ID NO: 2431021 - RNA, 19 nt, Artificial Sequence
  Description of Artificial Sequence: Synthetic oligonucleotide
  Antisense strand to SEQ ID NO: 2431020
uauuugccuaacauucugc

SEQ ID NO: 2431022 - RNA, 19 nt, Artificial Sequence
  Description of Artificial Sequence: Synthetic oligonucleotide
  Sense strand starting at position 2642 of SEQ ID NO: 1886855
gauacuagauagucauuag

SEQ ID NO: 2431023 - RNA, 19 nt, Artificial Sequence
  Description of Artificial Sequence: Synthetic oligonucleotide
  Antisense strand to SEQ ID NO: 2431022
cuaaugacuaucuaguauc

SEQ ID NO: 2431024 - RNA, 19 nt, Artificial Sequence
  Description of Artificial Sequence: Synthetic oligonucleotide
  Sense strand starting at position 2645 of SEQ ID NO: 1886855
acuagauagucauuagcua

SEQ ID NO: 2431025 - RNA, 19 nt, Artificial Sequence
  Description of Artificial Sequence: Synthetic oligonucleotide
  Antisense strand to SEQ ID NO: 2431024
uagcuaaugacuaucuagu

SEQ ID NO: 2431026 - RNA, 19 nt, Artificial Sequence
  Description of Artificial Sequence: Synthetic oligonucleotide
  Sense strand starting at position 2646 of SEQ ID NO: 1886855
cuagauagucauuagcuac

SEQ ID NO: 2431027 - RNA, 19 nt, Artificial Sequence
  Description of Artificial Sequence: Synthetic oligonucleotide
  Antisense strand to SEQ ID NO: 2431026
guagcuaaugacuaucuag

SEQ ID NO: 2431028 - RNA, 19 nt, Artificial Sequence
  Description of Artificial Sequence: Synthetic oligonucleotide
  Sense strand starting at position 2652 of SEQ ID NO: 1886855
agucauuagcuacacuuau

SEQ ID NO: 2431029 - RNA, 19 nt, Artificial Sequence
  Description of Artificial Sequence: Synthetic oligonucleotide
  Antisense strand to SEQ ID NO: 2431028
auaaguguagcuaaugacu

SEQ ID NO: 2431030 - RNA, 19 nt, Artificial Sequence
  Description of Artificial Sequence: Synthetic oligonucleotide
  Sense strand starting at position 2926 of SEQ ID NO: 1886855
gcaggacugagugggaaau

SEQ ID NO: 2431031 - RNA, 19 nt, Artificial Sequence
  Description of Artificial Sequence: Synthetic oligonucleotide
  Antisense strand to SEQ ID NO: 2431030
auuucccacucaguccugc

SEQ ID NO: 2431032 - RNA, 19 nt, Artificial Sequence
  Description of Artificial Sequence: Synthetic oligonucleotide
  Sense strand starting at position 3055 of SEQ ID NO: 1886855
gcucacauucuugaaguga

SEQ ID NO: 2431033 - RNA, 19 nt, Artificial Sequence
  Description of Artificial Sequence: Synthetic oligonucleotide
  Antisense strand to SEQ ID NO: 2431032
ucacuucaagaaugugagc

SEQ ID NO: 2431034 - RNA, 19 nt, Artificial Sequence
  Description of Artificial Sequence: Synthetic oligonucleotide
  Sense strand starting at position 3118 of SEQ ID NO: 1886855
uuuauugugucaccaagga

SEQ ID NO: 2431035 - RNA, 19 nt, Artificial Sequence
  Description of Artificial Sequence: Synthetic oligonucleotide
  Antisense strand to SEQ ID NO: 2431034
uccuuggugacacaauaaa

SEQ ID NO: 2431036 - RNA, 19 nt, Artificial Sequence
  Description of Artificial Sequence: Synthetic oligonucleotide
  Sense strand starting at position 3137 of SEQ ID NO: 1886855
gcuccuggaucacuaagaa

SEQ ID NO: 2431037 - RNA, 19 nt, Artificial Sequence
  Description of Artificial Sequence: Synthetic oligonucleotide
  Antisense strand to SEQ ID NO: 2431036
uucuuagugauccaggagc

SEQ ID NO: 2431038 - RNA, 19 nt, Artificial Sequence
  Description of Artificial Sequence: Synthetic oligonucleotide
  Sense strand starting at position 3261 of SEQ ID NO: 1886855
aaagaaugggcuuguguau

SEQ ID NO: 2431039 - RNA, 19 nt, Artificial Sequence
  Description of Artificial Sequence: Synthetic oligonucleotide
  Antisense strand to SEQ ID NO: 2431038
auacacaagcccauucuuu

SEQ ID NO: 2431040 - RNA, 19 nt, Artificial Sequence
  Description of Artificial Sequence: Synthetic oligonucleotide
  Sense strand starting at position 3454 of SEQ ID NO: 1886855
guguuacuucccuaaguga

SEQ ID NO: 2431041 - RNA, 19 nt, Artificial Sequence
  Description of Artificial Sequence: Synthetic oligonucleotide
  Antisense strand to SEQ ID NO: 2431040
ucacuuagggaaguaacac

SEQ ID NO: 2431042 - RNA, 19 nt, Artificial Sequence
  Description of Artificial Sequence: Synthetic oligonucleotide
  Sense strand starting at position 3457 of SEQ ID NO: 1886855
uuacuucccuaagugauga

SEQ ID NO: 2431043 - RNA, 19 nt, Artificial Sequence
  Description of Artificial Sequence: Synthetic oligonucleotide
  Antisense strand to SEQ ID NO: 2431042
ucaucacuuagggaaguaa

SEQ ID NO: 2431044 - RNA, 19 nt, Artificial Sequence
  Description of Artificial Sequence: Synthetic oligonucleotide
  Sense strand starting at position 3711 of SEQ ID NO: 1886855
ggacucaguccucagaggu

SEQ ID NO: 2431045 - RNA, 19 nt, Artificial Sequence
  Description of Artificial Sequence: Synthetic oligonucleotide
  Antisense strand to SEQ ID NO: 2431044
accucugaggacugagucc

SEQ ID NO: 2431046 - RNA, 19 nt, Artificial Sequence
  Description of Artificial Sequence: Synthetic oligonucleotide
  Sense strand starting at position 3764 of SEQ ID NO: 1886855
gagaauggauaacaugaau

SEQ ID NO: 2431047 - RNA, 19 nt, Artificial Sequence
  Description of Artificial Sequence: Synthetic oligonucleotide
  Antisense strand to SEQ ID NO: 2431046
auucauguuauccauucuc

SEQ ID NO: 2431048 - RNA, 19 nt, Artificial Sequence
  Description of Artificial Sequence: Synthetic oligonucleotide
  Sense strand starting at position 3899 of SEQ ID NO: 1886855
ucaaaucuaguguguauuu

SEQ ID NO: 2431049 - RNA, 19 nt, Artificial Sequence
  Description of Artificial Sequence: Synthetic oligonucleotide
  Antisense strand to SEQ ID NO: 2431048
aaauacacacuagauuuga

SEQ ID NO: 2431050 - RNA, 19 nt, Artificial Sequence
  Description of Artificial Sequence: Synthetic oligonucleotide
  Sense strand starting at position 186 of SEQ ID NO: 1886856
ugaagccaggcucaauaau

SEQ ID NO: 2431051 - RNA, 19 nt, Artificial Sequence
  Description of Artificial Sequence: Synthetic oligonucleotide
  Antisense strand to SEQ ID NO: 2431050
auuauugagccuggcuuca

SEQ ID NO: 2431052 - RNA, 19 nt, Artificial Sequence
  Description of Artificial Sequence: Synthetic oligonucleotide
  Sense strand starting at position 319 of SEQ ID NO: 1886856
acaggaguguccucaaccu

SEQ ID NO: 2431053 - RNA, 19 nt, Artificial Sequence
  Description of Artificial Sequence: Synthetic oligonucleotide
  Antisense strand to SEQ ID NO: 2431052
agguugaggacacuccugu

SEQ ID NO: 2431054 - RNA, 19 nt, Artificial Sequence
  Description of Artificial Sequence: Synthetic oligonucleotide
  Sense strand starting at position 394 of SEQ ID NO: 1886856
accaaucaugaaugagcau

SEQ ID NO: 2431055 - RNA, 19 nt, Artificial Sequence
  Description of Artificial Sequence: Synthetic oligonucleotide
  Antisense strand to SEQ ID NO: 2431054
augcucauucaugauuggu

SEQ ID NO: 2431056 - RNA, 19 nt, Artificial Sequence
  Description of Artificial Sequence: Synthetic oligonucleotide
  Sense strand starting at position 470 of SEQ ID NO: 1886856
ggcagaagucccgauggga

SEQ ID NO: 2431057 - RNA, 19 nt, Artificial Sequence
  Description of Artificial Sequence: Synthetic oligonucleotide
  Antisense strand to SEQ ID NO: 2431056
ucccaucgggacuucugcc

SEQ ID NO: 2431058 - RNA, 19 nt, Artificial Sequence
  Description of Artificial Sequence: Synthetic oligonucleotide
  Sense strand starting at position 495 of SEQ ID NO: 1886856
accagugcucucugacaua

SEQ ID NO: 2431059 - RNA, 19 nt, Artificial Sequence
  Description of Artificial Sequence: Synthetic oligonucleotide
  Antisense strand to SEQ ID NO: 2431058
uaugucagagagcacuggu

SEQ ID NO: 2431060 - RNA, 19 nt, Artificial Sequence
  Description of Artificial Sequence: Synthetic oligonucleotide
  Sense strand starting at position 760 of SEQ ID NO: 1886856
uucggaaguguuuagaaau

SEQ ID NO: 2431061 - RNA, 19 nt, Artificial Sequence
  Description of Artificial Sequence: Synthetic oligonucleotide
  Antisense strand to SEQ ID NO: 2431060
auuucuaaacacuuccgaa

SEQ ID NO: 2431062 - RNA, 19 nt, Artificial Sequence
  Description of Artificial Sequence: Synthetic oligonucleotide
  Sense strand starting at position 848 of SEQ ID NO: 1886856
uccauuuaaucuuaggaga

SEQ ID NO: 2431063 - RNA, 19 nt, Artificial Sequence
  Description of Artificial Sequence: Synthetic oligonucleotide
  Antisense strand to SEQ ID NO: 2431062
ucuccuaagauuaaaugga

SEQ ID NO: 2431064 - RNA, 19 nt, Artificial Sequence
  Description of Artificial Sequence: Synthetic oligonucleotide
  Sense strand starting at position 851 of SEQ ID NO: 1886856
auuuaaucuuaggagacaa

SEQ ID NO: 2431065 - RNA, 19 nt, Artificial Sequence
  Description of Artificial Sequence: Synthetic oligonucleotide
  Antisense strand to SEQ ID NO: 2431064
uugucuccuaagauuaaau

SEQ ID NO: 2431066 - RNA, 19 nt, Artificial Sequence
  Description of Artificial Sequence: Synthetic oligonucleotide
  Sense strand starting at position 901 of SEQ ID NO: 1886856
ugaugaggccuucaacgga

SEQ ID NO: 2431067 - RNA, 19 nt, Artificial Sequence
  Description of Artificial Sequence: Synthetic oligonucleotide
  Antisense strand to SEQ ID NO: 2431066
uccguugaaggccucauca

SEQ ID NO: 2431068 - RNA, 19 nt, Artificial Sequence
  Description of Artificial Sequence: Synthetic oligonucleotide
  Sense strand starting at position 1015 of SEQ ID NO: 1886856
uggaaauugugaccagucu

SEQ ID NO: 2431069 - RNA, 19 nt, Artificial Sequence
  Description of Artificial Sequence: Synthetic oligonucleotide
  Antisense strand to SEQ ID NO: 2431068
agacuggucacaauuucca

SEQ ID NO: 2431070 - RNA, 19 nt, Artificial Sequence
  Description of Artificial Sequence: Synthetic oligonucleotide
  Sense strand starting at position 1022 of SEQ ID NO: 1886856
ugugaccagucuccuaaga

SEQ ID NO: 2431071 - RNA, 19 nt, Artificial Sequence
  Description of Artificial Sequence: Synthetic oligonucleotide
  Antisense strand to SEQ ID NO: 2431070
ucuuaggagacuggucaca

SEQ ID NO: 2431072 - RNA, 19 nt, Artificial Sequence
  Description of Artificial Sequence: Synthetic oligonucleotide
  Sense strand starting at position 1100 of SEQ ID NO: 1886856
cuugucugccuugauggaa

SEQ ID NO: 2431073 - RNA, 19 nt, Artificial Sequence
  Description of Artificial Sequence: Synthetic oligonucleotide
  Antisense strand to SEQ ID NO: 2431072
uuccaucaaggcagacaag

SEQ ID NO: 2431074 - RNA, 19 nt, Artificial Sequence
  Description of Artificial Sequence: Synthetic oligonucleotide
  Sense strand starting at position 1333 of SEQ ID NO: 1886856
gccaacgaaugcuuugaaa

SEQ ID NO: 2431075 - RNA, 19 nt, Artificial Sequence
  Description of Artificial Sequence: Synthetic oligonucleotide
  Antisense strand to SEQ ID NO: 2431074
uuucaaagcauucguuggc

SEQ ID NO: 2431076 - RNA, 19 nt, Artificial Sequence
  Description of Artificial Sequence: Synthetic oligonucleotide
  Sense strand starting at position 1382 of SEQ ID NO: 1886856
uauguuguugugucugcau

SEQ ID NO: 2431077 - RNA, 19 nt, Artificial Sequence
  Description of Artificial Sequence: Synthetic oligonucleotide
  Antisense strand to SEQ ID NO: 2431076
augcagacacaacaacaua

SEQ ID NO: 2431078 - RNA, 19 nt, Artificial Sequence
  Description of Artificial Sequence: Synthetic oligonucleotide
  Sense strand starting at position 1553 of SEQ ID NO: 1886856
aaauaugugccaggcauau

SEQ ID NO: 2431079 - RNA, 19 nt, Artificial Sequence
  Description of Artificial Sequence: Synthetic oligonucleotide
  Antisense strand to SEQ ID NO: 2431078
auaugccuggcacauauuu

SEQ ID NO: 2431080 - RNA, 19 nt, Artificial Sequence
  Description of Artificial Sequence: Synthetic oligonucleotide
  Sense strand starting at position 1564 of SEQ ID NO: 1886856
aggcauauccuaggcacua

SEQ ID NO: 2431081 - RNA, 19 nt, Artificial Sequence
  Description of Artificial Sequence: Synthetic oligonucleotide
  Antisense strand to SEQ ID NO: 2431080
uagugccuaggauaugccu

SEQ ID NO: 2431082 - RNA, 19 nt, Artificial Sequence
  Description of Artificial Sequence: Synthetic oligonucleotide
  Sense strand starting at position 1565 of SEQ ID NO: 1886856
ggcauauccuaggcacuaa

SEQ ID NO: 2431083 - RNA, 19 nt, Artificial Sequence
  Description of Artificial Sequence: Synthetic oligonucleotide
  Antisense strand to SEQ ID NO: 2431082
uuagugccuaggauaugcc

SEQ ID NO: 2431084 - RNA, 19 nt, Artificial Sequence
  Description of Artificial Sequence: Synthetic oligonucleotide
  Sense strand starting at position 1687 of SEQ ID NO: 1886856
ucaggucucggugaauguu

SEQ ID NO: 2431085 - RNA, 19 nt, Artificial Sequence
  Description of Artificial Sequence: Synthetic oligonucleotide
  Antisense strand to SEQ ID NO: 2431084
aacauucaccgagaccuga

SEQ ID NO: 2431086 - RNA, 19 nt, Artificial Sequence
  Description of Artificial Sequence: Synthetic oligonucleotide
  Sense strand starting at position 1696 of SEQ ID NO: 1886856
ggugaauguuggaggaaca

SEQ ID NO: 2431087 - RNA, 19 nt, Artificial Sequence
  Description of Artificial Sequence: Synthetic oligonucleotide
  Antisense strand to SEQ ID NO: 2431086
uguuccuccaacauucacc

SEQ ID NO: 2431088 - RNA, 19 nt, Artificial Sequence
  Description of Artificial Sequence: Synthetic oligonucleotide
  Sense strand starting at position 1732 of SEQ ID NO: 1886856
auaggugacccagguagau

SEQ ID NO: 2431089 - RNA, 19 nt, Artificial Sequence
  Description of Artificial Sequence: Synthetic oligonucleotide
  Antisense strand to SEQ ID NO: 2431088
aucuaccugggucaccuau

SEQ ID NO: 2431090 - RNA, 19 nt, Artificial Sequence
  Description of Artificial Sequence: Synthetic oligonucleotide
  Sense strand starting at position 1744 of SEQ ID NO: 1886856
gguagaucaugugcaaaug

SEQ ID NO: 2431091 - RNA, 19 nt, Artificial Sequence
  Description of Artificial Sequence: Synthetic oligonucleotide
  Antisense strand to SEQ ID NO: 2431090
cauuugcacaugaucuacc

SEQ ID NO: 2431092 - RNA, 19 nt, Artificial Sequence
  Description of Artificial Sequence: Synthetic oligonucleotide
  Sense strand starting at position 1912 of SEQ ID NO: 1886856
cuaguuuccagauggcuga

SEQ ID NO: 2431093 - RNA, 19 nt, Artificial Sequence
  Description of Artificial Sequence: Synthetic oligonucleotide
  Antisense strand to SEQ ID NO: 2431092
ucagccaucuggaaacuag

SEQ ID NO: 2431094 - RNA, 19 nt, Artificial Sequence
  Description of Artificial Sequence: Synthetic oligonucleotide
  Sense strand starting at position 1919 of SEQ ID NO: 1886856
ccagauggcugacuucuua

SEQ ID NO: 2431095 - RNA, 19 nt, Artificial Sequence
  Description of Artificial Sequence: Synthetic oligonucleotide
  Antisense strand to SEQ ID NO: 2431094
uaagaagucagccaucugg

SEQ ID NO: 2431096 - RNA, 19 nt, Artificial Sequence
  Description of Artificial Sequence: Synthetic oligonucleotide
  Sense strand starting at position 2491 of SEQ ID NO: 1886856
ccaugaucaccgugacuug

SEQ ID NO: 2431097 - RNA, 19 nt, Artificial Sequence
  Description of Artificial Sequence: Synthetic oligonucleotide
  Antisense strand to SEQ ID NO: 2431096
caagucacggugaucaugg

SEQ ID NO: 2431098 - RNA, 19 nt, Artificial Sequence
  Description of Artificial Sequence: Synthetic oligonucleotide
  Sense strand starting at position 2611 of SEQ ID NO: 1886856
guguuuaggacccagaguu

SEQ ID NO: 2431099 - RNA, 19 nt, Artificial Sequence
  Description of Artificial Sequence: Synthetic oligonucleotide
  Antisense strand to SEQ ID NO: 2431098
aacucuggguccuaaacac

SEQ ID NO: 2431100 - RNA, 19 nt, Artificial Sequence
  Description of Artificial Sequence: Synthetic oligonucleotide
  Sense strand starting at position 2639 of SEQ ID NO: 1886856
cagcauguugaggaagagu

SEQ ID NO: 2431101 - RNA, 19 nt, Artificial Sequence
  Description of Artificial Sequence: Synthetic oligonucleotide
  Antisense strand to SEQ ID NO: 2431100
acucuuccucaacaugcug

SEQ ID NO: 2431102 - RNA, 19 nt, Artificial Sequence
  Description of Artificial Sequence: Synthetic oligonucleotide
  Sense strand starting at position 2648 of SEQ ID NO: 1886856
gaggaagaguugcugaagu

SEQ ID NO: 2431103 - RNA, 19 nt, Artificial Sequence
  Description of Artificial Sequence: Synthetic oligonucleotide
  Antisense strand to SEQ ID NO: 2431102
acuucagcaacucuuccuc

SEQ ID NO: 2431104 - RNA, 19 nt, Artificial Sequence
  Description of Artificial Sequence: Synthetic oligonucleotide
  Sense strand starting at position 2650 of SEQ ID NO: 1886856
ggaagaguugcugaaguuc

SEQ ID NO: 2431105 - RNA, 19 nt, Artificial Sequence
  Description of Artificial Sequence: Synthetic oligonucleotide
  Antisense strand to SEQ ID NO: 2431104
gaacuucagcaacucuucc

SEQ ID NO: 2431106 - RNA, 19 nt, Artificial Sequence
  Description of Artificial Sequence: Synthetic oligonucleotide
  Sense strand starting at position 2691 of SEQ ID NO: 1886856
accacuguugaauguuauu

SEQ ID NO: 2431107 - RNA, 19 nt, Artificial Sequence
  Description of Artificial Sequence: Synthetic oligonucleotide
  Antisense strand to SEQ ID NO: 2431106
aauaacauucaacaguggu

SEQ ID NO: 2431108 - RNA, 19 nt, Artificial Sequence
  Description of Artificial Sequence: Synthetic oligonucleotide
  Sense strand starting at position 2778 of SEQ ID NO: 1886856
uggaaacggcgggaucaau

SEQ ID NO: 2431109 - RNA, 19 nt, Artificial Sequence
  Description of Artificial Sequence: Synthetic oligonucleotide
  Antisense strand to SEQ ID NO: 2431108
auugaucccgccguuucca

SEQ ID NO: 2431110 - RNA, 19 nt, Artificial Sequence
  Description of Artificial Sequence: Synthetic oligonucleotide
  Sense strand starting at position 2904 of SEQ ID NO: 1886856
acacaacaguucucaguga

SEQ ID NO: 2431111 - RNA, 19 nt, Artificial Sequence
  Description of Artificial Sequence: Synthetic oligonucleotide
  Antisense strand to SEQ ID NO: 2431110
ucacugagaacuguugugu

SEQ ID NO: 2431112 - RNA, 19 nt, Artificial Sequence
  Description of Artificial Sequence: Synthetic oligonucleotide
  Sense strand starting at position 3041 of SEQ ID NO: 1886856
aagaguucaggugguggaa

SEQ ID NO: 2431113 - RNA, 19 nt, Artificial Sequence
  Description of Artificial Sequence: Synthetic oligonucleotide
  Antisense strand to SEQ ID NO: 2431112
uuccaccaccugaacucuu

SEQ ID NO: 2431114 - RNA, 19 nt, Artificial Sequence
  Description of Artificial Sequence: Synthetic oligonucleotide
  Sense strand starting at position 3060 of SEQ ID NO: 1886856
cuggaauaguugcuauaaa

SEQ ID NO: 2431115 - RNA, 19 nt, Artificial Sequence
  Description of Artificial Sequence: Synthetic oligonucleotide
  Antisense strand to SEQ ID NO: 2431114
uuuauagcaacuauuccag

SEQ ID NO: 2431116 - RNA, 19 nt, Artificial Sequence
  Description of Artificial Sequence: Synthetic oligonucleotide
  Sense strand starting at position 3111 of SEQ ID NO: 1886856
gcuagaauuuaacagaaag

SEQ ID NO: 2431117 - RNA, 19 nt, Artificial Sequence
  Description of Artificial Sequence: Synthetic oligonucleotide
  Antisense strand to SEQ ID NO: 2431116
cuuucuguuaaauucuagc

SEQ ID NO: 2431118 - RNA, 19 nt, Artificial Sequence
  Description of Artificial Sequence: Synthetic oligonucleotide
  Sense strand starting at position 3133 of SEQ ID NO: 1886856
cugcguucugcaguugaaa

SEQ ID NO: 2431119 - RNA, 19 nt, Artificial Sequence
  Description of Artificial Sequence: Synthetic oligonucleotide
  Antisense strand to SEQ ID NO: 2431118
uuucaacugcagaacgcag

SEQ ID NO: 2431120 - RNA, 19 nt, Artificial Sequence
  Description of Artificial Sequence: Synthetic oligonucleotide
  Sense strand starting at position 3192 of SEQ ID NO: 1886856
uggagaaguggguguggaa

SEQ ID NO: 2431121 - RNA, 19 nt, Artificial Sequence
  Description of Artificial Sequence: Synthetic oligonucleotide
  Antisense strand to SEQ ID NO: 2431120
uuccacacccacuucucca

SEQ ID NO: 2431122 - RNA, 19 nt, Artificial Sequence
  Description of Artificial Sequence: Synthetic oligonucleotide
  Sense strand starting at position 3388 of SEQ ID NO: 1886856
ucuugagugcccuacuuau

SEQ ID NO: 2431123 - RNA, 19 nt, Artificial Sequence
  Description of Artificial Sequence: Synthetic oligonucleotide
  Antisense strand to SEQ ID NO: 2431122
auaaguagggcacucaaga

SEQ ID NO: 2431124 - RNA, 19 nt, Artificial Sequence
  Description of Artificial Sequence: Synthetic oligonucleotide
  Sense strand starting at position 3811 of SEQ ID NO: 1886856
ggaugcuguugggucagaa

SEQ ID NO: 2431125 - RNA, 19 nt, Artificial Sequence
  Description of Artificial Sequence: Synthetic oligonucleotide
  Antisense strand to SEQ ID NO: 2431124
uucugacccaacagcaucc

SEQ ID NO: 2431126 - RNA, 19 nt, Artificial Sequence
  Description of Artificial Sequence: Synthetic oligonucleotide
  Sense strand starting at position 3870 of SEQ ID NO: 1886856
aagugacagguauguguaa

SEQ ID NO: 2431127 - RNA, 19 nt, Artificial Sequence
  Description of Artificial Sequence: Synthetic oligonucleotide
  Antisense strand to SEQ ID NO: 2431126
uuacacauaccugucacuu

SEQ ID NO: 2431128 - RNA, 19 nt, Artificial Sequence
  Description of Artificial Sequence: Synthetic oligonucleotide
  Sense strand starting at position 3872 of SEQ ID NO: 1886856
gugacagguauguguaaga

SEQ ID NO: 2431129 - RNA, 19 nt, Artificial Sequence
  Description of Artificial Sequence: Synthetic oligonucleotide
  Antisense strand to SEQ ID NO: 2431128
ucuuacacauaccugucac

SEQ ID NO: 2431130 - RNA, 19 nt, Artificial Sequence
  Description of Artificial Sequence: Synthetic oligonucleotide
  Sense strand starting at position 7 of SEQ ID NO: 1886857
aaugaagaguuagaggaau

SEQ ID NO: 2431131 - RNA, 19 nt, Artificial Sequence
  Description of Artificial Sequence: Synthetic oligonucleotide
  Antisense strand to SEQ ID NO: 2431130
auuccucuaacucuucauu

SEQ ID NO: 2431132 - RNA, 19 nt, Artificial Sequence
  Description of Artificial Sequence: Synthetic oligonucleotide
  Sense strand starting at position 49 of SEQ ID NO: 1886857
ugaguugguguggaaagga

SEQ ID NO: 2431133 - RNA, 19 nt, Artificial Sequence
  Description of Artificial Sequence: Synthetic oligonucleotide
  Antisense strand to SEQ ID NO: 2431132
uccuuuccacaccaacuca

SEQ ID NO: 2431134 - RNA, 19 nt, Artificial Sequence
  Description of Artificial Sequence: Synthetic oligonucleotide
  Sense strand starting at position 142 of SEQ ID NO: 1886857
gccacaaacggagauuguu

SEQ ID NO: 2431135 - RNA, 19 nt, Artificial Sequence
  Description of Artificial Sequence: Synthetic oligonucleotide
  Antisense strand to SEQ ID NO: 2431134
aacaaucuccguuuguggc

SEQ ID NO: 2431136 - RNA, 19 nt, Artificial Sequence
  Description of Artificial Sequence: Synthetic oligonucleotide
  Sense strand starting at position 179 of SEQ ID NO: 1886857
aacagaguugucugggagu

SEQ ID NO: 2431137 - RNA, 19 nt, Artificial Sequence
  Description of Artificial Sequence: Synthetic oligonucleotide
  Antisense strand to SEQ ID NO: 2431136
acucccagacaacucuguu

SEQ ID NO: 2431138 - RNA, 19 nt, Artificial Sequence
  Description of Artificial Sequence: Synthetic oligonucleotide
  Sense strand starting at position 215 of SEQ ID NO: 1886857
uuaucuguggugggagaga

SEQ ID NO: 2431139 - RNA, 19 nt, Artificial Sequence
  Description of Artificial Sequence: Synthetic oligonucleotide
  Antisense strand to SEQ ID NO: 2431138
ucucucccaccacagauaa

SEQ ID NO: 2431140 - RNA, 19 nt, Artificial Sequence
  Description of Artificial Sequence: Synthetic oligonucleotide
  Sense strand starting at position 277 of SEQ ID NO: 1886857
gguuauuauaaacaguguu

SEQ ID NO: 2431141 - RNA, 19 nt, Artificial Sequence
  Description of Artificial Sequence: Synthetic oligonucleotide
  Antisense strand to SEQ ID NO: 2431140
aacacuguuuauaauaacc

SEQ ID NO: 2431142 - RNA, 19 nt, Artificial Sequence
  Description of Artificial Sequence: Synthetic oligonucleotide
  Sense strand starting at position 294 of SEQ ID NO: 1886857
uuggcaaucauguggagaa

SEQ ID NO: 2431143 - RNA, 19 nt, Artificial Sequence
  Description of Artificial Sequence: Synthetic oligonucleotide
  Antisense strand to SEQ ID NO: 2431142
uucuccacaugauugccaa

SEQ ID NO: 2431144 - RNA, 19 nt, Artificial Sequence
  Description of Artificial Sequence: Synthetic oligonucleotide
  Sense strand starting at position 572 of SEQ ID NO: 1886857
gugguauacacaugcaaug

SEQ ID NO: 2431145 - RNA, 19 nt, Artificial Sequence
  Description of Artificial Sequence: Synthetic oligonucleotide
  Antisense strand to SEQ ID NO: 2431144
cauugcauguguauaccac

SEQ ID NO: 2431146 - RNA, 19 nt, Artificial Sequence
  Description of Artificial Sequence: Synthetic oligonucleotide
  Sense strand starting at position 1219 of SEQ ID NO: 1886857
gcaaaucuuuggccagaca

SEQ ID NO: 2431147 - RNA, 19 nt, Artificial Sequence
  Description of Artificial Sequence: Synthetic oligonucleotide
  Antisense strand to SEQ ID NO: 2431146
ugucuggccaaagauuugc

SEQ ID NO: 2431148 - RNA, 19 nt, Artificial Sequence
  Description of Artificial Sequence: Synthetic oligonucleotide
  Sense strand starting at position 1336 of SEQ ID NO: 1886857
ccagaaaguucugccagau

SEQ ID NO: 2431149 - RNA, 19 nt, Artificial Sequence
  Description of Artificial Sequence: Synthetic oligonucleotide
  Antisense strand to SEQ ID NO: 2431148
aucuggcagaacuuucugg

SEQ ID NO: 2431150 - RNA, 19 nt, Artificial Sequence
  Description of Artificial Sequence: Synthetic oligonucleotide
  Sense strand starting at position 1522 of SEQ ID NO: 1886857
ucagcucagcaaugagauu

SEQ ID NO: 2431151 - RNA, 19 nt, Artificial Sequence
  Description of Artificial Sequence: Synthetic oligonucleotide
  Antisense strand to SEQ ID NO: 2431150
aaucucauugcugagcuga

SEQ ID NO: 2431152 - RNA, 19 nt, Artificial Sequence
  Description of Artificial Sequence: Synthetic oligonucleotide
  Sense strand starting at position 1551 of SEQ ID NO: 1886857
gcaagaucccuaugucagg

SEQ ID NO: 2431153 - RNA, 19 nt, Artificial Sequence
  Description of Artificial Sequence: Synthetic oligonucleotide
  Antisense strand to SEQ ID NO: 2431152
ccugacauagggaucuugc

SEQ ID NO: 2431154 - RNA, 19 nt, Artificial Sequence
  Description of Artificial Sequence: Synthetic oligonucleotide
  Sense strand starting at position 1572 of SEQ ID NO: 1886857
gacagagguugucuuguuc

SEQ ID NO: 2431155 - RNA, 19 nt, Artificial Sequence
  Description of Artificial Sequence: Synthetic oligonucleotide
  Antisense strand to SEQ ID NO: 2431154
gaacaagacaaccucuguc

SEQ ID NO: 2431156 - RNA, 19 nt, Artificial Sequence
  Description of Artificial Sequence: Synthetic oligonucleotide
  Sense strand starting at position 1722 of SEQ ID NO: 1886857
gcagauggauggucuaaac

SEQ ID NO: 2431157 - RNA, 19 nt, Artificial Sequence
  Description of Artificial Sequence: Synthetic oligonucleotide
  Antisense strand to SEQ ID NO: 2431156
guuuagaccauccaucugc

SEQ ID NO: 2431158 - RNA, 19 nt, Artificial Sequence
  Description of Artificial Sequence: Synthetic oligonucleotide
  Sense strand starting at position 1866 of SEQ ID NO: 1886857
cccugauagaaaggugacu

SEQ ID NO: 2431159 - RNA, 19 nt, Artificial Sequence
  Description of Artificial Sequence: Synthetic oligonucleotide
  Antisense strand to SEQ ID NO: 2431158
agucaccuuucuaucaggg

SEQ ID NO: 2431160 - RNA, 19 nt, Artificial Sequence
  Description of Artificial Sequence: Synthetic oligonucleotide
  Sense strand starting at position 1895 of SEQ ID NO: 1886857
ggguuagagugucugagau

SEQ ID NO: 2431161 - RNA, 19 nt, Artificial Sequence
  Description of Artificial Sequence: Synthetic oligonucleotide
  Antisense strand to SEQ ID NO: 2431160
aucucagacacucuaaccc

SEQ ID NO: 2431162 - RNA, 19 nt, Artificial Sequence
  Description of Artificial Sequence: Synthetic oligonucleotide
  Sense strand starting at position 1976 of SEQ ID NO: 1886857
ggcucaguuccugauguca

SEQ ID NO: 2431163 - RNA, 19 nt, Artificial Sequence
  Description of Artificial Sequence: Synthetic oligonucleotide
  Antisense strand to SEQ ID NO: 2431162
ugacaucaggaacugagcc

SEQ ID NO: 2431164 - RNA, 19 nt, Artificial Sequence
  Description of Artificial Sequence: Synthetic oligonucleotide
  Sense strand starting at position 1999 of SEQ ID NO: 1886857
augugaugccagggcuaaa

SEQ ID NO: 2431165 - RNA, 19 nt, Artificial Sequence
  Description of Artificial Sequence: Synthetic oligonucleotide
  Antisense strand to SEQ ID NO: 2431164
uuuagcccuggcaucacau

SEQ ID NO: 2431166 - RNA, 19 nt, Artificial Sequence
  Description of Artificial Sequence: Synthetic oligonucleotide
  Sense strand starting at position 2023 of SEQ ID NO: 1886857
agcacaccuucuuugugau

SEQ ID NO: 2431167 - RNA, 19 nt, Artificial Sequence
  Description of Artificial Sequence: Synthetic oligonucleotide
  Antisense strand to SEQ ID NO: 2431166
aucacaaagaaggugugcu

SEQ ID NO: 2431168 - RNA, 19 nt, Artificial Sequence
  Description of Artificial Sequence: Synthetic oligonucleotide
  Sense strand starting at position 2148 of SEQ ID NO: 1886857
gcuuacaaagugcauaaua

SEQ ID NO: 2431169 - RNA, 19 nt, Artificial Sequence
  Description of Artificial Sequence: Synthetic oligonucleotide
  Antisense strand to SEQ ID NO: 2431168
uauuaugcacuuuguaagc

SEQ ID NO: 2431170 - RNA, 19 nt, Artificial Sequence
  Description of Artificial Sequence: Synthetic oligonucleotide
  Sense strand starting at position 2166 of SEQ ID NO: 1886857
agagaacauuucgaaauac

SEQ ID NO: 2431171 - RNA, 19 nt, Artificial Sequence
  Description of Artificial Sequence: Synthetic oligonucleotide
  Antisense strand to SEQ ID NO: 2431170
guauuucgaaauguucucu

SEQ ID NO: 2431172 - RNA, 19 nt, Artificial Sequence
  Description of Artificial Sequence: Synthetic oligonucleotide
  Sense strand starting at position 3036 of SEQ ID NO: 1886857
uuuaaagccuaagucagau

SEQ ID NO: 2431173 - RNA, 19 nt, Artificial Sequence
  Description of Artificial Sequence: Synthetic oligonucleotide
  Antisense strand to SEQ ID NO: 2431172
aucugacuuaggcuuuaaa

SEQ ID NO: 2431174 - RNA, 19 nt, Artificial Sequence
  Description of Artificial Sequence: Synthetic oligonucleotide
  Sense strand starting at position 3085 of SEQ ID NO: 1886857
cucucucauuacucagagu

SEQ ID NO: 2431175 - RNA, 19 nt, Artificial Sequence
  Description of Artificial Sequence: Synthetic oligonucleotide
  Antisense strand to SEQ ID NO: 2431174
acucugaguaaugagagag

SEQ ID NO: 2431176 - RNA, 19 nt, Artificial Sequence
  Description of Artificial Sequence: Synthetic oligonucleotide
  Sense strand starting at position 3106 of SEQ ID NO: 1886857
aagucaaagucauuggaac

SEQ ID NO: 2431177 - RNA, 19 nt, Artificial Sequence
  Description of Artificial Sequence: Synthetic oligonucleotide
  Antisense strand to SEQ ID NO: 2431176
guuccaaugacuuugacuu

SEQ ID NO: 2431178 - RNA, 19 nt, Artificial Sequence
  Description of Artificial Sequence: Synthetic oligonucleotide
  Sense strand starting at position 3107 of SEQ ID NO: 1886857
agucaaagucauuggaaca

SEQ ID NO: 2431179 - RNA, 19 nt, Artificial Sequence
  Description of Artificial Sequence: Synthetic oligonucleotide
  Antisense strand to SEQ ID NO: 2431178
uguuccaaugacuuugacu

SEQ ID NO: 2431180 - RNA, 19 nt, Artificial Sequence
  Description of Artificial Sequence: Synthetic oligonucleotide
  Sense strand starting at position 3108 of SEQ ID NO: 1886857
gucaaagucauuggaacag

SEQ ID NO: 2431181 - RNA, 19 nt, Artificial Sequence
  Description of Artificial Sequence: Synthetic oligonucleotide
  Antisense strand to SEQ ID NO: 2431180
cuguuccaaugacuuugac

SEQ ID NO: 2431182 - RNA, 19 nt, Artificial Sequence
  Description of Artificial Sequence: Synthetic oligonucleotide
  Sense strand starting at position 3153 of SEQ ID NO: 1886857
uuggaaugccucuaauguc

SEQ ID NO: 2431183 - RNA, 19 nt, Artificial Sequence
  Description of Artificial Sequence: Synthetic oligonucleotide
  Antisense strand to SEQ ID NO: 2431182
gacauuagaggcauuccaa

SEQ ID NO: 2431184 - RNA, 19 nt, Artificial Sequence
  Description of Artificial Sequence: Synthetic oligonucleotide
  Sense strand starting at position 3287 of SEQ ID NO: 1886857
gcaauuucuuccuccgaau

SEQ ID NO: 2431185 - RNA, 19 nt, Artificial Sequence
  Description of Artificial Sequence: Synthetic oligonucleotide
  Antisense strand to SEQ ID NO: 2431184
auucggaggaagaaauugc

SEQ ID NO: 2431186 - RNA, 19 nt, Artificial Sequence
  Description of Artificial Sequence: Synthetic oligonucleotide
  Sense strand starting at position 3338 of SEQ ID NO: 1886857
guuugaauguuaccuucuu

SEQ ID NO: 2431187 - RNA, 19 nt, Artificial Sequence
  Description of Artificial Sequence: Synthetic oligonucleotide
  Antisense strand to SEQ ID NO: 2431186
aagaagguaacauucaaac

SEQ ID NO: 2431188 - RNA, 19 nt, Artificial Sequence
  Description of Artificial Sequence: Synthetic oligonucleotide
  Sense strand starting at position 3404 of SEQ ID NO: 1886857
acucgagagucucccugaa

SEQ ID NO: 2431189 - RNA, 19 nt, Artificial Sequence
  Description of Artificial Sequence: Synthetic oligonucleotide
  Antisense strand to SEQ ID NO: 2431188
uucagggagacucucgagu

SEQ ID NO: 2431190 - RNA, 19 nt, Artificial Sequence
  Description of Artificial Sequence: Synthetic oligonucleotide
  Sense strand starting at position 3406 of SEQ ID NO: 1886857
ucgagagucucccugaauc

SEQ ID NO: 2431191 - RNA, 19 nt, Artificial Sequence
  Description of Artificial Sequence: Synthetic oligonucleotide
  Antisense strand to SEQ ID NO: 2431190
gauucagggagacucucga

SEQ ID NO: 2431192 - RNA, 19 nt, Artificial Sequence
  Description of Artificial Sequence: Synthetic oligonucleotide
  Sense strand starting at position 3408 of SEQ ID NO: 1886857
gagagucucccugaaucuu

SEQ ID NO: 2431193 - RNA, 19 nt, Artificial Sequence
  Description of Artificial Sequence: Synthetic oligonucleotide
  Antisense strand to SEQ ID NO: 2431192
aagauucagggagacucuc

SEQ ID NO: 2431194 - RNA, 19 nt, Artificial Sequence
  Description of Artificial Sequence: Synthetic oligonucleotide
  Sense strand starting at position 3632 of SEQ ID NO: 1886857
gggugugugccauuagucu

SEQ ID NO: 2431195 - RNA, 19 nt, Artificial Sequence
  Description of Artificial Sequence: Synthetic oligonucleotide
  Antisense strand to SEQ ID NO: 2431194
agacuaauggcacacaccc

SEQ ID NO: 2431196 - RNA, 19 nt, Artificial Sequence
  Description of Artificial Sequence: Synthetic oligonucleotide
  Sense strand starting at position 3794 of SEQ ID NO: 1886857
gcacaacuuccauggcaau

SEQ ID NO: 2431197 - RNA, 19 nt, Artificial Sequence
  Description of Artificial Sequence: Synthetic oligonucleotide
  Antisense strand to SEQ ID NO: 2431196
auugccauggaaguugugc

SEQ ID NO: 2431198 - RNA, 19 nt, Artificial Sequence
  Description of Artificial Sequence: Synthetic oligonucleotide
  Sense strand starting at position 3853 of SEQ ID NO: 1886857
ucuuccugcugguuaagaa

SEQ ID NO: 2431199 - RNA, 19 nt, Artificial Sequence
  Description of Artificial Sequence: Synthetic oligonucleotide
  Antisense strand to SEQ ID NO: 2431198
uucuuaaccagcaggaaga

SEQ ID NO: 2431200 - RNA, 19 nt, Artificial Sequence
  Description of Artificial Sequence: Synthetic oligonucleotide
  Sense strand starting at position 3854 of SEQ ID NO: 1886857
cuuccugcugguuaagaaa

SEQ ID NO: 2431201 - RNA, 19 nt, Artificial Sequence
  Description of Artificial Sequence: Synthetic oligonucleotide
  Antisense strand to SEQ ID NO: 2431200
uuucuuaaccagcaggaag

SEQ ID NO: 2431202 - RNA, 19 nt, Artificial Sequence
  Description of Artificial Sequence: Synthetic oligonucleotide
  Sense strand starting at position 3915 of SEQ ID NO: 1886857
caguauguugaggaugacu

SEQ ID NO: 2431203 - RNA, 19 nt, Artificial Sequence
  Description of Artificial Sequence: Synthetic oligonucleotide
  Antisense strand to SEQ ID NO: 2431202
agucauccucaacauacug

SEQ ID NO: 2431204 - RNA, 19 nt, Artificial Sequence
  Description of Artificial Sequence: Synthetic oligonucleotide
  Sense strand starting at position 3917 of SEQ ID NO: 1886857
guauguugaggaugacuga

SEQ ID NO: 2431205 - RNA, 19 nt, Artificial Sequence
  Description of Artificial Sequence: Synthetic oligonucleotide
  Antisense strand to SEQ ID NO: 2431204
ucagucauccucaacauac

SEQ ID NO: 2431206 - RNA, 19 nt, Artificial Sequence
  Description of Artificial Sequence: Synthetic oligonucleotide
  Sense strand starting at position 3933 of SEQ ID NO: 1886857
ugaggaaucucacuaguca

SEQ ID NO: 2431207 - RNA, 19 nt, Artificial Sequence
  Description of Artificial Sequence: Synthetic oligonucleotide
  Antisense strand to SEQ ID NO: 2431206
ugacuagugagauuccuca

SEQ ID NO: 2431208 - RNA, 19 nt, Artificial Sequence
  Description of Artificial Sequence: Synthetic oligonucleotide
  Sense strand starting at position 3979 of SEQ ID NO: 1886857
agagaaccauuugauccua

SEQ ID NO: 2431209 - RNA, 19 nt, Artificial Sequence
  Description of Artificial Sequence: Synthetic oligonucleotide
  Antisense strand to SEQ ID NO: 2431208
uaggaucaaaugguucucu

SEQ ID NO: 2431210 - RNA, 19 nt, Artificial Sequence
  Description of Artificial Sequence: Synthetic oligonucleotide
  Sense strand starting at position 55 of SEQ ID NO: 1886858
agaugcuuaggugaguaau

SEQ ID NO: 2431211 - RNA, 19 nt, Artificial Sequence
  Description of Artificial Sequence: Synthetic oligonucleotide
  Antisense strand to SEQ ID NO: 2431210
auuacucaccuaagcaucu

SEQ ID NO: 2431212 - RNA, 19 nt, Artificial Sequence
  Description of Artificial Sequence: Synthetic oligonucleotide
  Sense strand starting at position 148 of SEQ ID NO: 1886858
agguaacuuugaucagauu

SEQ ID NO: 2431213 - RNA, 19 nt, Artificial Sequence
  Description of Artificial Sequence: Synthetic oligonucleotide
  Antisense strand to SEQ ID NO: 2431212
aaucugaucaaaguuaccu

SEQ ID NO: 2431214 - RNA, 19 nt, Artificial Sequence
  Description of Artificial Sequence: Synthetic oligonucleotide
  Sense strand starting at position 185 of SEQ ID NO: 1886858
cuuaaugugccagacuuag

SEQ ID NO: 2431215 - RNA, 19 nt, Artificial Sequence
  Description of Artificial Sequence: Synthetic oligonucleotide
  Antisense strand to SEQ ID NO: 2431214
cuaagucuggcacauuaag

SEQ ID NO: 2431216 - RNA, 19 nt, Artificial Sequence
  Description of Artificial Sequence: Synthetic oligonucleotide
  Sense strand starting at position 216 of SEQ ID NO: 1886858
uugcucuagguuuaaacaa

SEQ ID NO: 2431217 - RNA, 19 nt, Artificial Sequence
  Description of Artificial Sequence: Synthetic oligonucleotide
  Antisense strand to SEQ ID NO: 2431216
uuguuuaaaccuagagcaa

SEQ ID NO: 2431218 - RNA, 19 nt, Artificial Sequence
  Description of Artificial Sequence: Synthetic oligonucleotide
  Sense strand starting at position 657 of SEQ ID NO: 1886858
aauguuaccucaucagggu

SEQ ID NO: 2431219 - RNA, 19 nt, Artificial Sequence
  Description of Artificial Sequence: Synthetic oligonucleotide
  Antisense strand to SEQ ID NO: 2431218
acccugaugagguaacauu

SEQ ID NO: 2431220 - RNA, 19 nt, Artificial Sequence
  Description of Artificial Sequence: Synthetic oligonucleotide
  Sense strand starting at position 810 of SEQ ID NO: 1886858
gugccuagcaauguuaguu

SEQ ID NO: 2431221 - RNA, 19 nt, Artificial Sequence
  Description of Artificial Sequence: Synthetic oligonucleotide
  Antisense strand to SEQ ID NO: 2431220
aacuaacauugcuaggcac

SEQ ID NO: 2431222 - RNA, 19 nt, Artificial Sequence
  Description of Artificial Sequence: Synthetic oligonucleotide
  Sense strand starting at position 822 of SEQ ID NO: 1886858
guuaguugaggugaaccaa

SEQ ID NO: 2431223 - RNA, 19 nt, Artificial Sequence
  Description of Artificial Sequence: Synthetic oligonucleotide
  Antisense strand to SEQ ID NO: 2431222
uugguucaccucaacuaac

SEQ ID NO: 2431224 - RNA, 19 nt, Artificial Sequence
  Description of Artificial Sequence: Synthetic oligonucleotide
  Sense strand starting at position 1003 of SEQ ID NO: 1886858
ugagaucuacccugguaau

SEQ ID NO: 2431225 - RNA, 19 nt, Artificial Sequence
  Description of Artificial Sequence: Synthetic oligonucleotide
  Antisense strand to SEQ ID NO: 2431224
auuaccaggguagaucuca

SEQ ID NO: 2431226 - RNA, 19 nt, Artificial Sequence
  Description of Artificial Sequence: Synthetic oligonucleotide
  Sense strand starting at position 1004 of SEQ ID NO: 1886858
gagaucuacccugguaauc

SEQ ID NO: 2431227 - RNA, 19 nt, Artificial Sequence
  Description of Artificial Sequence: Synthetic oligonucleotide
  Antisense strand to SEQ ID NO: 2431226
gauuaccaggguagaucuc

SEQ ID NO: 2431228 - RNA, 19 nt, Artificial Sequence
  Description of Artificial Sequence: Synthetic oligonucleotide
  Sense strand starting at position 1078 of SEQ ID NO: 1886858
ucuggcuacccaugaaaca

SEQ ID NO: 2431229 - RNA, 19 nt, Artificial Sequence
  Description of Artificial Sequence: Synthetic oligonucleotide
  Antisense strand to SEQ ID NO: 2431228
uguuucauggguagccaga

SEQ ID NO: 2431230 - RNA, 19 nt, Artificial Sequence
  Description of Artificial Sequence: Synthetic oligonucleotide
  Sense strand starting at position 1148 of SEQ ID NO: 1886858
auuguauugcuagauaacu

SEQ ID NO: 2431231 - RNA, 19 nt, Artificial Sequence
  Description of Artificial Sequence: Synthetic oligonucleotide
  Antisense strand to SEQ ID NO: 2431230
aguuaucuagcaauacaau

SEQ ID NO: 2431232 - RNA, 19 nt, Artificial Sequence
  Description of Artificial Sequence: Synthetic oligonucleotide
  Sense strand starting at position 1297 of SEQ ID NO: 1886858
uuuaguguggcucagaaac

SEQ ID NO: 2431233 - RNA, 19 nt, Artificial Sequence
  Description of Artificial Sequence: Synthetic oligonucleotide
  Antisense strand to SEQ ID NO: 2431232
guuucugagccacacuaaa

SEQ ID NO: 2431234 - RNA, 19 nt, Artificial Sequence
  Description of Artificial Sequence: Synthetic oligonucleotide
  Sense strand starting at position 1357 of SEQ ID NO: 1886858
uacgguaaaguguaauuga

SEQ ID NO: 2431235 - RNA, 19 nt, Artificial Sequence
  Description of Artificial Sequence: Synthetic oligonucleotide
  Antisense strand to SEQ ID NO: 2431234
ucaauuacacuuuaccgua

SEQ ID NO: 2431236 - RNA, 19 nt, Artificial Sequence
  Description of Artificial Sequence: Synthetic oligonucleotide
  Sense strand starting at position 1360 of SEQ ID NO: 1886858
gguaaaguguaauugauua

SEQ ID NO: 2431237 - RNA, 19 nt, Artificial Sequence
  Description of Artificial Sequence: Synthetic oligonucleotide
  Antisense strand to SEQ ID NO: 2431236
uaaucaauuacacuuuacc

SEQ ID NO: 2431238 - RNA, 19 nt, Artificial Sequence
  Description of Artificial Sequence: Synthetic oligonucleotide
  Sense strand starting at position 1365 of SEQ ID NO: 1886858
aguguaauugauuagacgu

SEQ ID NO: 2431239 - RNA, 19 nt, Artificial Sequence
  Description of Artificial Sequence: Synthetic oligonucleotide
  Antisense strand to SEQ ID NO: 2431238
acgucuaaucaauuacacu

SEQ ID NO: 2431240 - RNA, 19 nt, Artificial Sequence
  Description of Artificial Sequence: Synthetic oligonucleotide
  Sense strand starting at position 1371 of SEQ ID NO: 1886858
auugauuagacguggaggu

SEQ ID NO: 2431241 - RNA, 19 nt, Artificial Sequence
  Description of Artificial Sequence: Synthetic oligonucleotide
  Antisense strand to SEQ ID NO: 2431240
accuccacgucuaaucaau

SEQ ID NO: 2431242 - RNA, 19 nt, Artificial Sequence
  Description of Artificial Sequence: Synthetic oligonucleotide
  Sense strand starting at position 1677 of SEQ ID NO: 1886858
ucgaguucccaggaucaag

SEQ ID NO: 2431243 - RNA, 19 nt, Artificial Sequence
  Description of Artificial Sequence: Synthetic oligonucleotide
  Antisense strand to SEQ ID NO: 2431242
cuugauccugggaacucga

SEQ ID NO: 2431244 - RNA, 19 nt, Artificial Sequence
  Description of Artificial Sequence: Synthetic oligonucleotide
  Sense strand starting at position 1767 of SEQ ID NO: 1886858
uuuaaauugcccgggagga

SEQ ID NO: 2431245 - RNA, 19 nt, Artificial Sequence
  Description of Artificial Sequence: Synthetic oligonucleotide
  Antisense strand to SEQ ID NO: 2431244
uccucccgggcaauuuaaa

SEQ ID NO: 2431246 - RNA, 19 nt, Artificial Sequence
  Description of Artificial Sequence: Synthetic oligonucleotide
  Sense strand starting at position 2221 of SEQ ID NO: 1886858
gggaaauucuucucuuauu

SEQ ID NO: 2431247 - RNA, 19 nt, Artificial Sequence
  Description of Artificial Sequence: Synthetic oligonucleotide
  Antisense strand to SEQ ID NO: 2431246
aauaagagaagaauuuccc

SEQ ID NO: 2431248 - RNA, 19 nt, Artificial Sequence
  Description of Artificial Sequence: Synthetic oligonucleotide
  Sense strand starting at position 2608 of SEQ ID NO: 1886858
ucaugaugacaacguugau

SEQ ID NO: 2431249 - RNA, 19 nt, Artificial Sequence
  Description of Artificial Sequence: Synthetic oligonucleotide
  Antisense strand to SEQ ID NO: 2431248
aucaacguugucaucauga

SEQ ID NO: 2431250 - RNA, 19 nt, Artificial Sequence
  Description of Artificial Sequence: Synthetic oligonucleotide
  Sense strand starting at position 2611 of SEQ ID NO: 1886858
ugaugacaacguugaugau

SEQ ID NO: 2431251 - RNA, 19 nt, Artificial Sequence
  Description of Artificial Sequence: Synthetic oligonucleotide
  Antisense strand to SEQ ID NO: 2431250
aucaucaacguugucauca

SEQ ID NO: 2431252 - RNA, 19 nt, Artificial Sequence
  Description of Artificial Sequence: Synthetic oligonucleotide
  Sense strand starting at position 2687 of SEQ ID NO: 1886858
cagaguggucuuuaauauc

SEQ ID NO: 2431253 - RNA, 19 nt, Artificial Sequence
  Description of Artificial Sequence: Synthetic oligonucleotide
  Antisense strand to SEQ ID NO: 2431252
gauauuaaagaccacucug

SEQ ID NO: 2431254 - RNA, 19 nt, Artificial Sequence
  Description of Artificial Sequence: Synthetic oligonucleotide
  Sense strand starting at position 2734 of SEQ ID NO: 1886858
guauauuggagcuggaaug

SEQ ID NO: 2431255 - RNA, 19 nt, Artificial Sequence
  Description of Artificial Sequence: Synthetic oligonucleotide
  Antisense strand to SEQ ID NO: 2431254
cauuccagcuccaauauac

SEQ ID NO: 2431256 - RNA, 19 nt, Artificial Sequence
  Description of Artificial Sequence: Synthetic oligonucleotide
  Sense strand starting at position 2767 of SEQ ID NO: 1886858
uugguaauggcucaucuca

SEQ ID NO: 2431257 - RNA, 19 nt, Artificial Sequence
  Description of Artificial Sequence: Synthetic oligonucleotide
  Antisense strand to SEQ ID NO: 2431256
ugagaugagccauuaccaa

SEQ ID NO: 2431258 - RNA, 19 nt, Artificial Sequence
  Description of Artificial Sequence: Synthetic oligonucleotide
  Sense strand starting at position 2769 of SEQ ID NO: 1886858
gguaauggcucaucucaaa

SEQ ID NO: 2431259 - RNA, 19 nt, Artificial Sequence
  Description of Artificial Sequence: Synthetic oligonucleotide
  Antisense strand to SEQ ID NO: 2431258
uuugagaugagccauuacc

SEQ ID NO: 2431260 - RNA, 19 nt, Artificial Sequence
  Description of Artificial Sequence: Synthetic oligonucleotide
  Sense strand starting at position 2948 of SEQ ID NO: 1886858
gaauauaaaccuugugaug

SEQ ID NO: 2431261 - RNA, 19 nt, Artificial Sequence
  Description of Artificial Sequence: Synthetic oligonucleotide
  Antisense strand to SEQ ID NO: 2431260
caucacaagguuuauauuc

SEQ ID NO: 2431262 - RNA, 19 nt, Artificial Sequence
  Description of Artificial Sequence: Synthetic oligonucleotide
  Sense strand starting at position 3094 of SEQ ID NO: 1886858
gaggacguuagaugauuaa

SEQ ID NO: 2431263 - RNA, 19 nt, Artificial Sequence
  Description of Artificial Sequence: Synthetic oligonucleotide
  Antisense strand to SEQ ID NO: 2431262
uuaaucaucuaacguccuc

SEQ ID NO: 2431264 - RNA, 19 nt, Artificial Sequence
  Description of Artificial Sequence: Synthetic oligonucleotide
  Sense strand starting at position 3097 of SEQ ID NO: 1886858
gacguuagaugauuaacua

SEQ ID NO: 2431265 - RNA, 19 nt, Artificial Sequence
  Description of Artificial Sequence: Synthetic oligonucleotide
  Antisense strand to SEQ ID NO: 2431264
uaguuaaucaucuaacguc

SEQ ID NO: 2431266 - RNA, 19 nt, Artificial Sequence
  Description of Artificial Sequence: Synthetic oligonucleotide
  Sense strand starting at position 3112 of SEQ ID NO: 1886858
acuaaugguugugugagga

SEQ ID NO: 2431267 - RNA, 19 nt, Artificial Sequence
  Description of Artificial Sequence: Synthetic oligonucleotide
  Antisense strand to SEQ ID NO: 2431266
uccucacacaaccauuagu

SEQ ID NO: 2431268 - RNA, 19 nt, Artificial Sequence
  Description of Artificial Sequence: Synthetic oligonucleotide
  Sense strand starting at position 3275 of SEQ ID NO: 1886858
ugaaauugcguucuucguu

SEQ ID NO: 2431269 - RNA, 19 nt, Artificial Sequence
  Description of Artificial Sequence: Synthetic oligonucleotide
  Antisense strand to SEQ ID NO: 2431268
aacgaagaacgcaauuuca

SEQ ID NO: 2431270 - RNA, 19 nt, Artificial Sequence
  Description of Artificial Sequence: Synthetic oligonucleotide
  Sense strand starting at position 3393 of SEQ ID NO: 1886858
acguaauugaaguagguga

SEQ ID NO: 2431271 - RNA, 19 nt, Artificial Sequence
  Description of Artificial Sequence: Synthetic oligonucleotide
  Antisense strand to SEQ ID NO: 2431270
ucaccuacuucaauuacgu

SEQ ID NO: 2431272 - RNA, 19 nt, Artificial Sequence
  Description of Artificial Sequence: Synthetic oligonucleotide
  Sense strand starting at position 3400 of SEQ ID NO: 1886858
ugaaguaggugaucucaaa

SEQ ID NO: 2431273 - RNA, 19 nt, Artificial Sequence
  Description of Artificial Sequence: Synthetic oligonucleotide
  Antisense strand to SEQ ID NO: 2431272
uuugagaucaccuacuuca

SEQ ID NO: 2431274 - RNA, 19 nt, Artificial Sequence
  Description of Artificial Sequence: Synthetic oligonucleotide
  Sense strand starting at position 3621 of SEQ ID NO: 1886858
accauaccugacugugaau

SEQ ID NO: 2431275 - RNA, 19 nt, Artificial Sequence
  Description of Artificial Sequence: Synthetic oligonucleotide
  Antisense strand to SEQ ID NO: 2431274
auucacagucagguauggu

SEQ ID NO: 2431276 - RNA, 19 nt, Artificial Sequence
  Description of Artificial Sequence: Synthetic oligonucleotide
  Sense strand starting at position 3623 of SEQ ID NO: 1886858
cauaccugacugugaaugu

SEQ ID NO: 2431277 - RNA, 19 nt, Artificial Sequence
  Description of Artificial Sequence: Synthetic oligonucleotide
  Antisense strand to SEQ ID NO: 2431276
acauucacagucagguaug

SEQ ID NO: 2431278 - RNA, 19 nt, Artificial Sequence
  Description of Artificial Sequence: Synthetic oligonucleotide
  Sense strand starting at position 3630 of SEQ ID NO: 1886858
gacugugaauguucuuuga

SEQ ID NO: 2431279 - RNA, 19 nt, Artificial Sequence
  Description of Artificial Sequence: Synthetic oligonucleotide
  Antisense strand to SEQ ID NO: 2431278
ucaaagaacauucacaguc

SEQ ID NO: 2431280 - RNA, 19 nt, Artificial Sequence
  Description of Artificial Sequence: Synthetic oligonucleotide
  Sense strand starting at position 3659 of SEQ ID NO: 1886858
gggcacucauucucagaga

SEQ ID NO: 2431281 - RNA, 19 nt, Artificial Sequence
  Description of Artificial Sequence: Synthetic oligonucleotide
  Antisense strand to SEQ ID NO: 2431280
ucucugagaaugagugccc

SEQ ID NO: 2431282 - RNA, 19 nt, Artificial Sequence
  Description of Artificial Sequence: Synthetic oligonucleotide
  Sense strand starting at position 3774 of SEQ ID NO: 1886858
uauugucagcuauaggaca

SEQ ID NO: 2431283 - RNA, 19 nt, Artificial Sequence
  Description of Artificial Sequence: Synthetic oligonucleotide
  Antisense strand to SEQ ID NO: 2431282
uguccuauagcugacaaua

SEQ ID NO: 2431284 - RNA, 19 nt, Artificial Sequence
  Description of Artificial Sequence: Synthetic oligonucleotide
  Sense strand starting at position 3788 of SEQ ID NO: 1886858
ggacaauucugcuugacua

SEQ ID NO: 2431285 - RNA, 19 nt, Artificial Sequence
  Description of Artificial Sequence: Synthetic oligonucleotide
  Antisense strand to SEQ ID NO: 2431284
uagucaagcagaauugucc

SEQ ID NO: 2431286 - RNA, 19 nt, Artificial Sequence
  Description of Artificial Sequence: Synthetic oligonucleotide
  Sense strand starting at position 3881 of SEQ ID NO: 1886858
ggugguauggaaggaauua

SEQ ID NO: 2431287 - RNA, 19 nt, Artificial Sequence
  Description of Artificial Sequence: Synthetic oligonucleotide
  Antisense strand to SEQ ID NO: 2431286
uaauuccuuccauaccacc

SEQ ID NO: 2431288 - RNA, 19 nt, Artificial Sequence
  Description of Artificial Sequence: Synthetic oligonucleotide
  Sense strand starting at position 3917 of SEQ ID NO: 1886858
ugaagcugugaacauaauu

SEQ ID NO: 2431289 - RNA, 19 nt, Artificial Sequence
  Description of Artificial Sequence: Synthetic oligonucleotide
  Antisense strand to SEQ ID NO: 2431288
aauuauguucacagcuuca

SEQ ID NO: 2431290 - RNA, 19 nt, Artificial Sequence
  Description of Artificial Sequence: Synthetic oligonucleotide
  Sense strand starting at position 553 of SEQ ID NO: 1886859
aauguugcuguacaaugaa

SEQ ID NO: 2431291 - RNA, 19 nt, Artificial Sequence
  Description of Artificial Sequence: Synthetic oligonucleotide
  Antisense strand to SEQ ID NO: 2431290
uucauuguacagcaacauu

SEQ ID NO: 2431292 - RNA, 19 nt, Artificial Sequence
  Description of Artificial Sequence: Synthetic oligonucleotide
  Sense strand starting at position 556 of SEQ ID NO: 1886859
guugcuguacaaugaauuu

SEQ ID NO: 2431293 - RNA, 19 nt, Artificial Sequence
  Description of Artificial Sequence: Synthetic oligonucleotide
  Antisense strand to SEQ ID NO: 2431292
aaauucauuguacagcaac

SEQ ID NO: 2431294 - RNA, 19 nt, Artificial Sequence
  Description of Artificial Sequence: Synthetic oligonucleotide
  Sense strand starting at position 710 of SEQ ID NO: 1886859
cuccauaggugauccuaau

SEQ ID NO: 2431295 - RNA, 19 nt, Artificial Sequence
  Description of Artificial Sequence: Synthetic oligonucleotide
  Antisense strand to SEQ ID NO: 2431294
auuaggaucaccuauggag

SEQ ID NO: 2431296 - RNA, 19 nt, Artificial Sequence
  Description of Artificial Sequence: Synthetic oligonucleotide
  Sense strand starting at position 925 of SEQ ID NO: 1886859
ggagucgggcccuagaauu

SEQ ID NO: 2431297 - RNA, 19 nt, Artificial Sequence
  Description of Artificial Sequence: Synthetic oligonucleotide
  Antisense strand to SEQ ID NO: 2431296
aauucuagggcccgacucc

SEQ ID NO: 2431298 - RNA, 19 nt, Artificial Sequence
  Description of Artificial Sequence: Synthetic oligonucleotide
  Sense strand starting at position 1032 of SEQ ID NO: 1886859
ccagguuaaguacauuaca

SEQ ID NO: 2431299 - RNA, 19 nt, Artificial Sequence
  Description of Artificial Sequence: Synthetic oligonucleotide
  Antisense strand to SEQ ID NO: 2431298
uguaauguacuuaaccugg

SEQ ID NO: 2431300 - RNA, 19 nt, Artificial Sequence
  Description of Artificial Sequence: Synthetic oligonucleotide
  Sense strand starting at position 1035 of SEQ ID NO: 1886859
gguuaaguacauuacaguu

SEQ ID NO: 2431301 - RNA, 19 nt, Artificial Sequence
  Description of Artificial Sequence: Synthetic oligonucleotide
  Antisense strand to SEQ ID NO: 2431300
aacuguaauguacuuaacc

SEQ ID NO: 2431302 - RNA, 19 nt, Artificial Sequence
  Description of Artificial Sequence: Synthetic oligonucleotide
  Sense strand starting at position 1129 of SEQ ID NO: 1886859
ccaguuuaagcccaagaaa

SEQ ID NO: 2431303 - RNA, 19 nt, Artificial Sequence
  Description of Artificial Sequence: Synthetic oligonucleotide
  Antisense strand to SEQ ID NO: 2431302
uuucuugggcuuaaacugg

SEQ ID NO: 2431304 - RNA, 19 nt, Artificial Sequence
  Description of Artificial Sequence: Synthetic oligonucleotide
  Sense strand starting at position 1145 of SEQ ID NO: 1886859
aaacacgaguaguccaauu

SEQ ID NO: 2431305 - RNA, 19 nt, Artificial Sequence
  Description of Artificial Sequence: Synthetic oligonucleotide
  Antisense strand to SEQ ID NO: 2431304
aauuggacuacucguguuu

SEQ ID NO: 2431306 - RNA, 19 nt, Artificial Sequence
  Description of Artificial Sequence: Synthetic oligonucleotide
  Sense strand starting at position 1446 of SEQ ID NO: 1886859
cucuccucuuagguagaua

SEQ ID NO: 2431307 - RNA, 19 nt, Artificial Sequence
  Description of Artificial Sequence: Synthetic oligonucleotide
  Antisense strand to SEQ ID NO: 2431306
uaucuaccuaagaggagag

SEQ ID NO: 2431308 - RNA, 19 nt, Artificial Sequence
  Description of Artificial Sequence: Synthetic oligonucleotide
  Sense strand starting at position 1502 of SEQ ID NO: 1886859
agggcuugucccgggauuu

SEQ ID NO: 2431309 - RNA, 19 nt, Artificial Sequence
  Description of Artificial Sequence: Synthetic oligonucleotide
  Antisense strand to SEQ ID NO: 2431308
aaaucccgggacaagcccu

SEQ ID NO: 2431310 - RNA, 19 nt, Artificial Sequence
  Description of Artificial Sequence: Synthetic oligonucleotide
  Sense strand starting at position 1503 of SEQ ID NO: 1886859
gggcuugucccgggauuug

SEQ ID NO: 2431311 - RNA, 19 nt, Artificial Sequence
  Description of Artificial Sequence: Synthetic oligonucleotide
  Antisense strand to SEQ ID NO: 2431310
caaaucccgggacaagccc

SEQ ID NO: 2431312 - RNA, 19 nt, Artificial Sequence
  Description of Artificial Sequence: Synthetic oligonucleotide
  Sense strand starting at position 1579 of SEQ ID NO: 1886859
uggcaauagagccgauaaa

SEQ ID NO: 2431313 - RNA, 19 nt, Artificial Sequence
  Description of Artificial Sequence: Synthetic oligonucleotide
  Antisense strand to SEQ ID NO: 2431312
uuuaucggcucuauugcca

SEQ ID NO: 2431314 - RNA, 19 nt, Artificial Sequence
  Description of Artificial Sequence: Synthetic oligonucleotide
  Sense strand starting at position 1823 of SEQ ID NO: 1886859
uccacucuggccuaagaaa

SEQ ID NO: 2431315 - RNA, 19 nt, Artificial Sequence
  Description of Artificial Sequence: Synthetic oligonucleotide
  Antisense strand to SEQ ID NO: 2431314
uuucuuaggccagagugga

SEQ ID NO: 2431316 - RNA, 19 nt, Artificial Sequence
  Description of Artificial Sequence: Synthetic oligonucleotide
  Sense strand starting at position 2102 of SEQ ID NO: 1886859
ccagauuacggguaaguuu

SEQ ID NO: 2431317 - RNA, 19 nt, Artificial Sequence
  Description of Artificial Sequence: Synthetic oligonucleotide
  Antisense strand to SEQ ID NO: 2431316
aaacuuacccguaaucugg

SEQ ID NO: 2431318 - RNA, 19 nt, Artificial Sequence
  Description of Artificial Sequence: Synthetic oligonucleotide
  Sense strand starting at position 2232 of SEQ ID NO: 1886859
ugcgccugugaucuuuauu

SEQ ID NO: 2431319 - RNA, 19 nt, Artificial Sequence
  Description of Artificial Sequence: Synthetic oligonucleotide
  Antisense strand to SEQ ID NO: 2431318
aauaaagaucacaggcgca

SEQ ID NO: 2431320 - RNA, 19 nt, Artificial Sequence
  Description of Artificial Sequence: Synthetic oligonucleotide
  Sense strand starting at position 2540 of SEQ ID NO: 1886859
guuuguucuggagagagug

SEQ ID NO: 2431321 - RNA, 19 nt, Artificial Sequence
  Description of Artificial Sequence: Synthetic oligonucleotide
  Antisense strand to SEQ ID NO: 2431320
cacucucuccagaacaaac

SEQ ID NO: 2431322 - RNA, 19 nt, Artificial Sequence
  Description of Artificial Sequence: Synthetic oligonucleotide
  Sense strand starting at position 2683 of SEQ ID NO: 1886859
cuguguuagaaggaagcau

SEQ ID NO: 2431323 - RNA, 19 nt, Artificial Sequence
  Description of Artificial Sequence: Synthetic oligonucleotide
  Antisense strand to SEQ ID NO: 2431322
augcuuccuucuaacacag

SEQ ID NO: 2431324 - RNA, 19 nt, Artificial Sequence
  Description of Artificial Sequence: Synthetic oligonucleotide
  Sense strand starting at position 2687 of SEQ ID NO: 1886859
guuagaaggaagcaucuuu

SEQ ID NO: 2431325 - RNA, 19 nt, Artificial Sequence
  Description of Artificial Sequence: Synthetic oligonucleotide
  Antisense strand to SEQ ID NO: 2431324
aaagaugcuuccuucuaac

SEQ ID NO: 2431326 - RNA, 19 nt, Artificial Sequence
  Description of Artificial Sequence: Synthetic oligonucleotide
  Sense strand starting at position 2694 of SEQ ID NO: 1886859
ggaagcaucuuucuagaaa

SEQ ID NO: 2431327 - RNA, 19 nt, Artificial Sequence
  Description of Artificial Sequence: Synthetic oligonucleotide
  Antisense strand to SEQ ID NO: 2431326
uuucuagaaagaugcuucc

SEQ ID NO: 2431328 - RNA, 19 nt, Artificial Sequence
  Description of Artificial Sequence: Synthetic oligonucleotide
  Sense strand starting at position 3025 of SEQ ID NO: 1886859
uuuaacuagucauucgaca

SEQ ID NO: 2431329 - RNA, 19 nt, Artificial Sequence
  Description of Artificial Sequence: Synthetic oligonucleotide
  Antisense strand to SEQ ID NO: 2431328
ugucgaaugacuaguuaaa

SEQ ID NO: 2431330 - RNA, 19 nt, Artificial Sequence
  Description of Artificial Sequence: Synthetic oligonucleotide
  Sense strand starting at position 3176 of SEQ ID NO: 1886859
aaguaacaguuaccgaaau

SEQ ID NO: 2431331 - RNA, 19 nt, Artificial Sequence
  Description of Artificial Sequence: Synthetic oligonucleotide
  Antisense strand to SEQ ID NO: 2431330
auuucgguaacuguuacuu

SEQ ID NO: 2431332 - RNA, 19 nt, Artificial Sequence
  Description of Artificial Sequence: Synthetic oligonucleotide
  Sense strand starting at position 3209 of SEQ ID NO: 1886859
uaacaaucagugcagugaa

SEQ ID NO: 2431333 - RNA, 19 nt, Artificial Sequence
  Description of Artificial Sequence: Synthetic oligonucleotide
  Antisense strand to SEQ ID NO: 2431332
uucacugcacugauuguua

SEQ ID NO: 2431334 - RNA, 19 nt, Artificial Sequence
  Description of Artificial Sequence: Synthetic oligonucleotide
  Sense strand starting at position 3221 of SEQ ID NO: 1886859
cagugaagacaauguaaua

SEQ ID NO: 2431335 - RNA, 19 nt, Artificial Sequence
  Description of Artificial Sequence: Synthetic oligonucleotide
  Antisense strand to SEQ ID NO: 2431334
uauuacauugucuucacug

SEQ ID NO: 2431336 - RNA, 19 nt, Artificial Sequence
  Description of Artificial Sequence: Synthetic oligonucleotide
  Sense strand starting at position 3305 of SEQ ID NO: 1886859
ugaguuuagaucugaacga

SEQ ID NO: 2431337 - RNA, 19 nt, Artificial Sequence
  Description of Artificial Sequence: Synthetic oligonucleotide
  Antisense strand to SEQ ID NO: 2431336
ucguucagaucuaaacuca

SEQ ID NO: 2431338 - RNA, 19 nt, Artificial Sequence
  Description of Artificial Sequence: Synthetic oligonucleotide
  Sense strand starting at position 3309 of SEQ ID NO: 1886859
uuuagaucugaacgaugau

SEQ ID NO: 2431339 - RNA, 19 nt, Artificial Sequence
  Description of Artificial Sequence: Synthetic oligonucleotide
  Antisense strand to SEQ ID NO: 2431338
aucaucguucagaucuaaa

SEQ ID NO: 2431340 - RNA, 19 nt, Artificial Sequence
  Description of Artificial Sequence: Synthetic oligonucleotide
  Sense strand starting at position 3330 of SEQ ID NO: 1886859
ggagcuaccuacucaauaa

SEQ ID NO: 2431341 - RNA, 19 nt, Artificial Sequence
  Description of Artificial Sequence: Synthetic oligonucleotide
  Antisense strand to SEQ ID NO: 2431340
uuauugaguagguagcucc

SEQ ID NO: 2431342 - RNA, 19 nt, Artificial Sequence
  Description of Artificial Sequence: Synthetic oligonucleotide
  Sense strand starting at position 3472 of SEQ ID NO: 1886859
guaacaaaggccugguaau

SEQ ID NO: 2431343 - RNA, 19 nt, Artificial Sequence
  Description of Artificial Sequence: Synthetic oligonucleotide
  Antisense strand to SEQ ID NO: 2431342
auuaccaggccuuuguuac

SEQ ID NO: 2431344 - RNA, 19 nt, Artificial Sequence
  Description of Artificial Sequence: Synthetic oligonucleotide
  Sense strand starting at position 3545 of SEQ ID NO: 1886859
aagcuauuggaauguuuga

SEQ ID NO: 2431345 - RNA, 19 nt, Artificial Sequence
  Description of Artificial Sequence: Synthetic oligonucleotide
  Antisense strand to SEQ ID NO: 2431344
ucaaacauuccaauagcuu

SEQ ID NO: 2431346 - RNA, 19 nt, Artificial Sequence
  Description of Artificial Sequence: Synthetic oligonucleotide
  Sense strand starting at position 3572 of SEQ ID NO: 1886859
agugaugugaucugacuca

SEQ ID NO: 2431347 - RNA, 19 nt, Artificial Sequence
  Description of Artificial Sequence: Synthetic oligonucleotide
  Antisense strand to SEQ ID NO: 2431346
ugagucagaucacaucacu

SEQ ID NO: 2431348 - RNA, 19 nt, Artificial Sequence
  Description of Artificial Sequence: Synthetic oligonucleotide
  Sense strand starting at position 3605 of SEQ ID NO: 1886859
uauugauuacuuuguggag

SEQ ID NO: 2431349 - RNA, 19 nt, Artificial Sequence
  Description of Artificial Sequence: Synthetic oligonucleotide
  Antisense strand to SEQ ID NO: 2431348
cuccacaaaguaaucaaua

SEQ ID NO: 2431350 - RNA, 19 nt, Artificial Sequence
  Description of Artificial Sequence: Synthetic oligonucleotide
  Sense strand starting at position 3606 of SEQ ID NO: 1886859
auugauuacuuuguggaga

SEQ ID NO: 2431351 - RNA, 19 nt, Artificial Sequence
  Description of Artificial Sequence: Synthetic oligonucleotide
  Antisense strand to SEQ ID NO: 2431350
ucuccacaaaguaaucaau

SEQ ID NO: 2431352 - RNA, 19 nt, Artificial Sequence
  Description of Artificial Sequence: Synthetic oligonucleotide
  Sense strand starting at position 3678 of SEQ ID NO: 1886859
aguaguccacaugagugau

SEQ ID NO: 2431353 - RNA, 19 nt, Artificial Sequence
  Description of Artificial Sequence: Synthetic oligonucleotide
  Antisense strand to SEQ ID NO: 2431352
aucacucauguggacuacu

SEQ ID NO: 2431354 - RNA, 19 nt, Artificial Sequence
  Description of Artificial Sequence: Synthetic oligonucleotide
  Sense strand starting at position 3681 of SEQ ID NO: 1886859
aguccacaugagugaugau

SEQ ID NO: 2431355 - RNA, 19 nt, Artificial Sequence
  Description of Artificial Sequence: Synthetic oligonucleotide
  Antisense strand to SEQ ID NO: 2431354
aucaucacucauguggacu

SEQ ID NO: 2431356 - RNA, 19 nt, Artificial Sequence
  Description of Artificial Sequence: Synthetic oligonucleotide
  Sense strand starting at position 3690 of SEQ ID NO: 1886859
gagugaugauggucaccuu

SEQ ID NO: 2431357 - RNA, 19 nt, Artificial Sequence
  Description of Artificial Sequence: Synthetic oligonucleotide
  Antisense strand to SEQ ID NO: 2431356
aaggugaccaucaucacuc

SEQ ID NO: 2431358 - RNA, 19 nt, Artificial Sequence
  Description of Artificial Sequence: Synthetic oligonucleotide
  Sense strand starting at position 3701 of SEQ ID NO: 1886859
gucaccuugagugaguaau

SEQ ID NO: 2431359 - RNA, 19 nt, Artificial Sequence
  Description of Artificial Sequence: Synthetic oligonucleotide
  Antisense strand to SEQ ID NO: 2431358
auuacucacucaaggugac

SEQ ID NO: 2431360 - RNA, 19 nt, Artificial Sequence
  Description of Artificial Sequence: Synthetic oligonucleotide
  Sense strand starting at position 3707 of SEQ ID NO: 1886859
uugagugaguaauugauua

SEQ ID NO: 2431361 - RNA, 19 nt, Artificial Sequence
  Description of Artificial Sequence: Synthetic oligonucleotide
  Antisense strand to SEQ ID NO: 2431360
uaaucaauuacucacucaa

SEQ ID NO: 2431362 - RNA, 19 nt, Artificial Sequence
  Description of Artificial Sequence: Synthetic oligonucleotide
  Sense strand starting at position 3711 of SEQ ID NO: 1886859
gugaguaauugauuaacuu

SEQ ID NO: 2431363 - RNA, 19 nt, Artificial Sequence
  Description of Artificial Sequence: Synthetic oligonucleotide
  Antisense strand to SEQ ID NO: 2431362
aaguuaaucaauuacucac

SEQ ID NO: 2431364 - RNA, 19 nt, Artificial Sequence
  Description of Artificial Sequence: Synthetic oligonucleotide
  Sense strand starting at position 3819 of SEQ ID NO: 1886859
ucaggucuccaugauucua

SEQ ID NO: 2431365 - RNA, 19 nt, Artificial Sequence
  Description of Artificial Sequence: Synthetic oligonucleotide
  Antisense strand to SEQ ID NO: 2431364
uagaaucauggagaccuga

SEQ ID NO: 2431366 - RNA, 19 nt, Artificial Sequence
  Description of Artificial Sequence: Synthetic oligonucleotide
  Sense strand starting at position 3821 of SEQ ID NO: 1886859
aggucuccaugauucuaca

SEQ ID NO: 2431367 - RNA, 19 nt, Artificial Sequence
  Description of Artificial Sequence: Synthetic oligonucleotide
  Antisense strand to SEQ ID NO: 2431366
uguagaaucauggagaccu

SEQ ID NO: 2431368 - RNA, 19 nt, Artificial Sequence
  Description of Artificial Sequence: Synthetic oligonucleotide
  Sense strand starting at position 3920 of SEQ ID NO: 1886859
gcucuucuaggaugagauu

SEQ ID NO: 2431369 - RNA, 19 nt, Artificial Sequence
  Description of Artificial Sequence: Synthetic oligonucleotide
  Antisense strand to SEQ ID NO: 2431368
aaucucauccuagaagagc

SEQ ID NO: 2431370 - RNA, 19 nt, Artificial Sequence
  Description of Artificial Sequence: Synthetic oligonucleotide
  Sense strand starting at position 642 of SEQ ID NO: 1886860
guguaaugcuccucaggga

SEQ ID NO: 2431371 - RNA, 19 nt, Artificial Sequence
  Description of Artificial Sequence: Synthetic oligonucleotide
  Antisense strand to SEQ ID NO: 2431370
ucccugaggagcauuacac

SEQ ID NO: 2431372 - RNA, 19 nt, Artificial Sequence
  Description of Artificial Sequence: Synthetic oligonucleotide
  Sense strand starting at position 714 of SEQ ID NO: 1886860
ggaaguaggucagugguua

SEQ ID NO: 2431373 - RNA, 19 nt, Artificial Sequence
  Description of Artificial Sequence: Synthetic oligonucleotide
  Antisense strand to SEQ ID NO: 2431372
uaaccacugaccuacuucc

SEQ ID NO: 2431374 - RNA, 19 nt, Artificial Sequence
  Description of Artificial Sequence: Synthetic oligonucleotide
  Sense strand starting at position 715 of SEQ ID NO: 1886860
gaaguaggucagugguuag

SEQ ID NO: 2431375 - RNA, 19 nt, Artificial Sequence
  Description of Artificial Sequence: Synthetic oligonucleotide
  Antisense strand to SEQ ID NO: 2431374
cuaaccacugaccuacuuc

SEQ ID NO: 2431376 - RNA, 19 nt, Artificial Sequence
  Description of Artificial Sequence: Synthetic oligonucleotide
  Sense strand starting at position 938 of SEQ ID NO: 1886860
cgucucuacuacucauaca

SEQ ID NO: 2431377 - RNA, 19 nt, Artificial Sequence
  Description of Artificial Sequence: Synthetic oligonucleotide
  Antisense strand to SEQ ID NO: 2431376
uguaugaguaguagagacg

SEQ ID NO: 2431378 - RNA, 19 nt, Artificial Sequence
  Description of Artificial Sequence: Synthetic oligonucleotide
  Sense strand starting at position 1256 of SEQ ID NO: 1886860
cucauaacucuaugaggca

SEQ ID NO: 2431379 - RNA, 19 nt, Artificial Sequence
  Description of Artificial Sequence: Synthetic oligonucleotide
  Antisense strand to SEQ ID NO: 2431378
ugccucauagaguuaugag

SEQ ID NO: 2431380 - RNA, 19 nt, Artificial Sequence
  Description of Artificial Sequence: Synthetic oligonucleotide
  Sense strand starting at position 1265 of SEQ ID NO: 1886860
cuaugaggcagguaucagu

SEQ ID NO: 2431381 - RNA, 19 nt, Artificial Sequence
  Description of Artificial Sequence: Synthetic oligonucleotide
  Antisense strand to SEQ ID NO: 2431380
acugauaccugccucauag

SEQ ID NO: 2431382 - RNA, 19 nt, Artificial Sequence
  Description of Artificial Sequence: Synthetic oligonucleotide
  Sense strand starting at position 2234 of SEQ ID NO: 1886860
uggacuuaguugccaguau

SEQ ID NO: 2431383 - RNA, 19 nt, Artificial Sequence
  Description of Artificial Sequence: Synthetic oligonucleotide
  Antisense strand to SEQ ID NO: 2431382
auacuggcaacuaagucca

SEQ ID NO: 2431384 - RNA, 19 nt, Artificial Sequence
  Description of Artificial Sequence: Synthetic oligonucleotide
  Sense strand starting at position 2235 of SEQ ID NO: 1886860
ggacuuaguugccaguauu

SEQ ID NO: 2431385 - RNA, 19 nt, Artificial Sequence
  Description of Artificial Sequence: Synthetic oligonucleotide
  Antisense strand to SEQ ID NO: 2431384
aauacuggcaacuaagucc

SEQ ID NO: 2431386 - RNA, 19 nt, Artificial Sequence
  Description of Artificial Sequence: Synthetic oligonucleotide
  Sense strand starting at position 2238 of SEQ ID NO: 1886860
cuuaguugccaguauugca

SEQ ID NO: 2431387 - RNA, 19 nt, Artificial Sequence
  Description of Artificial Sequence: Synthetic oligonucleotide
  Antisense strand to SEQ ID NO: 2431386
ugcaauacuggcaacuaag

SEQ ID NO: 2431388 - RNA, 19 nt, Artificial Sequence
  Description of Artificial Sequence: Synthetic oligonucleotide
  Sense strand starting at position 2243 of SEQ ID NO: 1886860
uugccaguauugcaaugaa

SEQ ID NO: 2431389 - RNA, 19 nt, Artificial Sequence
  Description of Artificial Sequence: Synthetic oligonucleotide
  Antisense strand to SEQ ID NO: 2431388
uucauugcaauacuggcaa

SEQ ID NO: 2431390 - RNA, 19 nt, Artificial Sequence
  Description of Artificial Sequence: Synthetic oligonucleotide
  Sense strand starting at position 2246 of SEQ ID NO: 1886860
ccaguauugcaaugaacau

SEQ ID NO: 2431391 - RNA, 19 nt, Artificial Sequence
  Description of Artificial Sequence: Synthetic oligonucleotide
  Antisense strand to SEQ ID NO: 2431390
auguucauugcaauacugg

SEQ ID NO: 2431392 - RNA, 19 nt, Artificial Sequence
  Description of Artificial Sequence: Synthetic oligonucleotide
  Sense strand starting at position 2302 of SEQ ID NO: 1886860
acacauuuaucauggaaug

SEQ ID NO: 2431393 - RNA, 19 nt, Artificial Sequence
  Description of Artificial Sequence: Synthetic oligonucleotide
  Antisense strand to SEQ ID NO: 2431392
cauuccaugauaaaugugu

SEQ ID NO: 2431394 - RNA, 19 nt, Artificial Sequence
  Description of Artificial Sequence: Synthetic oligonucleotide
  Sense strand starting at position 2394 of SEQ ID NO: 1886860
auggcccuccuguauaauu

SEQ ID NO: 2431395 - RNA, 19 nt, Artificial Sequence
  Description of Artificial Sequence: Synthetic oligonucleotide
  Antisense strand to SEQ ID NO: 2431394
aauuauacaggagggccau

SEQ ID NO: 2431396 - RNA, 19 nt, Artificial Sequence
  Description of Artificial Sequence: Synthetic oligonucleotide
  Sense strand starting at position 2951 of SEQ ID NO: 1886860
aauagaagugcuuagguac

SEQ ID NO: 2431397 - RNA, 19 nt, Artificial Sequence
  Description of Artificial Sequence: Synthetic oligonucleotide
  Antisense strand to SEQ ID NO: 2431396
guaccuaagcacuucuauu

SEQ ID NO: 2431398 - RNA, 19 nt, Artificial Sequence
  Description of Artificial Sequence: Synthetic oligonucleotide
  Sense strand starting at position 2954 of SEQ ID NO: 1886860
agaagugcuuagguacuaa

SEQ ID NO: 2431399 - RNA, 19 nt, Artificial Sequence
  Description of Artificial Sequence: Synthetic oligonucleotide
  Antisense strand to SEQ ID NO: 2431398
uuaguaccuaagcacuucu

SEQ ID NO: 2431400 - RNA, 19 nt, Artificial Sequence
  Description of Artificial Sequence: Synthetic oligonucleotide
  Sense strand starting at position 2958 of SEQ ID NO: 1886860
gugcuuagguacuaauaug

SEQ ID NO: 2431401 - RNA, 19 nt, Artificial Sequence
  Description of Artificial Sequence: Synthetic oligonucleotide
  Antisense strand to SEQ ID NO: 2431400
cauauuaguaccuaagcac

SEQ ID NO: 2431402 - RNA, 19 nt, Artificial Sequence
  Description of Artificial Sequence: Synthetic oligonucleotide
  Sense strand starting at position 2966 of SEQ ID NO: 1886860
guacuaauauggccaacaa

SEQ ID NO: 2431403 - RNA, 19 nt, Artificial Sequence
  Description of Artificial Sequence: Synthetic oligonucleotide
  Antisense strand to SEQ ID NO: 2431402
uuguuggccauauuaguac

SEQ ID NO: 2431404 - RNA, 19 nt, Artificial Sequence
  Description of Artificial Sequence: Synthetic oligonucleotide
  Sense strand starting at position 2977 of SEQ ID NO: 1886860
gccaacaauugucuggaca

SEQ ID NO: 2431405 - RNA, 19 nt, Artificial Sequence
  Description of Artificial Sequence: Synthetic oligonucleotide
  Antisense strand to SEQ ID NO: 2431404
uguccagacaauuguuggc

SEQ ID NO: 2431406 - RNA, 19 nt, Artificial Sequence
  Description of Artificial Sequence: Synthetic oligonucleotide
  Sense strand starting at position 2978 of SEQ ID NO: 1886860
ccaacaauugucuggacaa

SEQ ID NO: 2431407 - RNA, 19 nt, Artificial Sequence
  Description of Artificial Sequence: Synthetic oligonucleotide
  Antisense strand to SEQ ID NO: 2431406
uuguccagacaauuguugg

SEQ ID NO: 2431408 - RNA, 19 nt, Artificial Sequence
  Description of Artificial Sequence: Synthetic oligonucleotide
  Sense strand starting at position 3001 of SEQ ID NO: 1886860
gcucuaggcuacuuaguga

SEQ ID NO: 2431409 - RNA, 19 nt, Artificial Sequence
  Description of Artificial Sequence: Synthetic oligonucleotide
  Antisense strand to SEQ ID NO: 2431408
ucacuaaguagccuagagc

SEQ ID NO: 2431410 - RNA, 19 nt, Artificial Sequence
  Description of Artificial Sequence: Synthetic oligonucleotide
  Sense strand starting at position 68 of SEQ ID NO: 1886861
ugaaauguuagaugguauu

SEQ ID NO: 2431411 - RNA, 19 nt, Artificial Sequence
  Description of Artificial Sequence: Synthetic oligonucleotide
  Antisense strand to SEQ ID NO: 2431410
aauaccaucuaacauuuca

SEQ ID NO: 2431412 - RNA, 19 nt, Artificial Sequence
  Description of Artificial Sequence: Synthetic oligonucleotide
  Sense strand starting at position 267 of SEQ ID NO: 1886861
gcaaaugaugucuggccua

SEQ ID NO: 2431413 - RNA, 19 nt, Artificial Sequence
  Description of Artificial Sequence: Synthetic oligonucleotide
  Antisense strand to SEQ ID NO: 2431412
uaggccagacaucauuugc

SEQ ID NO: 2431414 - RNA, 19 nt, Artificial Sequence
  Description of Artificial Sequence: Synthetic oligonucleotide
  Sense strand starting at position 679 of SEQ ID NO: 1886861
cauguugagucguuaauga

SEQ ID NO: 2431415 - RNA, 19 nt, Artificial Sequence
  Description of Artificial Sequence: Synthetic oligonucleotide
  Antisense strand to SEQ ID NO: 2431414
ucauuaacgacucaacaug

SEQ ID NO: 2431416 - RNA, 19 nt, Artificial Sequence
  Description of Artificial Sequence: Synthetic oligonucleotide
  Sense strand starting at position 684 of SEQ ID NO: 1886861
ugagucguuaaugaugaga

SEQ ID NO: 2431417 - RNA, 19 nt, Artificial Sequence
  Description of Artificial Sequence: Synthetic oligonucleotide
  Antisense strand to SEQ ID NO: 2431416
ucucaucauuaacgacuca

SEQ ID NO: 2431418 - RNA, 19 nt, Artificial Sequence
  Description of Artificial Sequence: Synthetic oligonucleotide
  Sense strand starting at position 687 of SEQ ID NO: 1886861
gucguuaaugaugagaaua

SEQ ID NO: 2431419 - RNA, 19 nt, Artificial Sequence
  Description of Artificial Sequence: Synthetic oligonucleotide
  Antisense strand to SEQ ID NO: 2431418
uauucucaucauuaacgac

SEQ ID NO: 2431420 - RNA, 19 nt, Artificial Sequence
  Description of Artificial Sequence: Synthetic oligonucleotide
  Sense strand starting at position 747 of SEQ ID NO: 1886861
gguuauaugcagcaaggaa

SEQ ID NO: 2431421 - RNA, 19 nt, Artificial Sequence
  Description of Artificial Sequence: Synthetic oligonucleotide
  Antisense strand to SEQ ID NO: 2431420
uuccuugcugcauauaacc

SEQ ID NO: 2431422 - RNA, 19 nt, Artificial Sequence
  Description of Artificial Sequence: Synthetic oligonucleotide
  Sense strand starting at position 859 of SEQ ID NO: 1886861
cguuaauaguacucugaag

SEQ ID NO: 2431423 - RNA, 19 nt, Artificial Sequence
  Description of Artificial Sequence: Synthetic oligonucleotide
  Antisense strand to SEQ ID NO: 2431422
cuucagaguacuauuaacg

SEQ ID NO: 2431424 - RNA, 19 nt, Artificial Sequence
  Description of Artificial Sequence: Synthetic oligonucleotide
  Sense strand starting at position 861 of SEQ ID NO: 1886861
uuaauaguacucugaagau

SEQ ID NO: 2431425 - RNA, 19 nt, Artificial Sequence
  Description of Artificial Sequence: Synthetic oligonucleotide
  Antisense strand to SEQ ID NO: 2431424
aucuucagaguacuauuaa

SEQ ID NO: 2431426 - RNA, 19 nt, Artificial Sequence
  Description of Artificial Sequence: Synthetic oligonucleotide
  Sense strand starting at position 873 of SEQ ID NO: 1886861
ugaagauuauccguccuau

SEQ ID NO: 2431427 - RNA, 19 nt, Artificial Sequence
  Description of Artificial Sequence: Synthetic oligonucleotide
  Antisense strand to SEQ ID NO: 2431426
auaggacggauaaucuuca

SEQ ID NO: 2431428 - RNA, 19 nt, Artificial Sequence
  Description of Artificial Sequence: Synthetic oligonucleotide
  Sense strand starting at position 924 of SEQ ID NO: 1886861
uauauauucgaggguauag

SEQ ID NO: 2431429 - RNA, 19 nt, Artificial Sequence
  Description of Artificial Sequence: Synthetic oligonucleotide
  Antisense strand to SEQ ID NO: 2431428
cuauacccucgaauauaua

SEQ ID NO: 2431430 - RNA, 19 nt, Artificial Sequence
  Description of Artificial Sequence: Synthetic oligonucleotide
  Sense strand starting at position 948 of SEQ ID NO: 1886861
ccauauggcuuuccuguau

SEQ ID NO: 2431431 - RNA, 19 nt, Artificial Sequence
  Description of Artificial Sequence: Synthetic oligonucleotide
  Antisense strand to SEQ ID NO: 2431430
auacaggaaagccauaugg

SEQ ID NO: 2431432 - RNA, 19 nt, Artificial Sequence
  Description of Artificial Sequence: Synthetic oligonucleotide
  Sense strand starting at position 952 of SEQ ID NO: 1886861
auggcuuuccuguaucuuu

SEQ ID NO: 2431433 - RNA, 19 nt, Artificial Sequence
  Description of Artificial Sequence: Synthetic oligonucleotide
  Antisense strand to SEQ ID NO: 2431432
aaagauacaggaaagccau

SEQ ID NO: 2431434 - RNA, 19 nt, Artificial Sequence
  Description of Artificial Sequence: Synthetic oligonucleotide
  Sense strand starting at position 971 of SEQ ID NO: 1886861
gauaacucuugcccuguga

SEQ ID NO: 2431435 - RNA, 19 nt, Artificial Sequence
  Description of Artificial Sequence: Synthetic oligonucleotide
  Antisense strand to SEQ ID NO: 2431434
ucacagggcaagaguuauc

SEQ ID NO: 2431436 - RNA, 19 nt, Artificial Sequence
  Description of Artificial Sequence: Synthetic oligonucleotide
  Sense strand starting at position 975 of SEQ ID NO: 1886861
acucuugcccugugaaaca

SEQ ID NO: 2431437 - RNA, 19 nt, Artificial Sequence
  Description of Artificial Sequence: Synthetic oligonucleotide
  Antisense strand to SEQ ID NO: 2431436
uguuucacagggcaagagu

SEQ ID NO: 2431438 - RNA, 19 nt, Artificial Sequence
  Description of Artificial Sequence: Synthetic oligonucleotide
  Sense strand starting at position 1236 of SEQ ID NO: 1886861
ccgcauuuauugucaaaug

SEQ ID NO: 2431439 - RNA, 19 nt, Artificial Sequence
  Description of Artificial Sequence: Synthetic oligonucleotide
  Antisense strand to SEQ ID NO: 2431438
cauuugacaauaaaugcgg

SEQ ID NO: 2431440 - RNA, 19 nt, Artificial Sequence
  Description of Artificial Sequence: Synthetic oligonucleotide
  Sense strand starting at position 2236 of SEQ ID NO: 1886861
guaucuccauugcucagau

SEQ ID NO: 2431441 - RNA, 19 nt, Artificial Sequence
  Description of Artificial Sequence: Synthetic oligonucleotide
  Antisense strand to SEQ ID NO: 2431440
aucugagcaauggagauac

SEQ ID NO: 2431442 - RNA, 19 nt, Artificial Sequence
  Description of Artificial Sequence: Synthetic oligonucleotide
  Sense strand starting at position 2238 of SEQ ID NO: 1886861
aucuccauugcucagauga

SEQ ID NO: 2431443 - RNA, 19 nt, Artificial Sequence
  Description of Artificial Sequence: Synthetic oligonucleotide
  Antisense strand to SEQ ID NO: 2431442
ucaucugagcaauggagau

SEQ ID NO: 2431444 - RNA, 19 nt, Artificial Sequence
  Description of Artificial Sequence: Synthetic oligonucleotide
  Sense strand starting at position 2514 of SEQ ID NO: 1886861
ugcagugagcuguaaugga

SEQ ID NO: 2431445 - RNA, 19 nt, Artificial Sequence
  Description of Artificial Sequence: Synthetic oligonucleotide
  Antisense strand to SEQ ID NO: 2431444
uccauuacagcucacugca

SEQ ID NO: 2431446 - RNA, 19 nt, Artificial Sequence
  Description of Artificial Sequence: Synthetic oligonucleotide
  Sense strand starting at position 3137 of SEQ ID NO: 1886861
aaguguuaucuguaaggac

SEQ ID NO: 2431447 - RNA, 19 nt, Artificial Sequence
  Description of Artificial Sequence: Synthetic oligonucleotide
  Antisense strand to SEQ ID NO: 2431446
guccuuacagauaacacuu

SEQ ID NO: 2431448 - RNA, 19 nt, Artificial Sequence
  Description of Artificial Sequence: Synthetic oligonucleotide
  Sense strand starting at position 3146 of SEQ ID NO: 1886861
cuguaaggaccguagugaa

SEQ ID NO: 2431449 - RNA, 19 nt, Artificial Sequence
  Description of Artificial Sequence: Synthetic oligonucleotide
  Antisense strand to SEQ ID NO: 2431448
uucacuacgguccuuacag

SEQ ID NO: 2431450 - RNA, 19 nt, Artificial Sequence
  Description of Artificial Sequence: Synthetic oligonucleotide
  Sense strand starting at position 3189 of SEQ ID NO: 1886861
ccggaagguaucugucaca

SEQ ID NO: 2431451 - RNA, 19 nt, Artificial Sequence
  Description of Artificial Sequence: Synthetic oligonucleotide
  Antisense strand to SEQ ID NO: 2431450
ugugacagauaccuuccgg

SEQ ID NO: 2431452 - RNA, 19 nt, Artificial Sequence
  Description of Artificial Sequence: Synthetic oligonucleotide
  Sense strand starting at position 3203 of SEQ ID NO: 1886861
ucacaauaggugugacugu

SEQ ID NO: 2431453 - RNA, 19 nt, Artificial Sequence
  Description of Artificial Sequence: Synthetic oligonucleotide
  Antisense strand to SEQ ID NO: 2431452
acagucacaccuauuguga

SEQ ID NO: 2431454 - RNA, 19 nt, Artificial Sequence
  Description of Artificial Sequence: Synthetic oligonucleotide
  Sense strand starting at position 3212 of SEQ ID NO: 1886861
gugugacuguauguaauaa

SEQ ID NO: 2431455 - RNA, 19 nt, Artificial Sequence
  Description of Artificial Sequence: Synthetic oligonucleotide
  Antisense strand to SEQ ID NO: 2431454
uuauuacauacagucacac

SEQ ID NO: 2431456 - RNA, 19 nt, Artificial Sequence
  Description of Artificial Sequence: Synthetic oligonucleotide
  Sense strand starting at position 3474 of SEQ ID NO: 1886861
gcaagacccuaugucuaua

SEQ ID NO: 2431457 - RNA, 19 nt, Artificial Sequence
  Description of Artificial Sequence: Synthetic oligonucleotide
  Antisense strand to SEQ ID NO: 2431456
uauagacauagggucuugc

SEQ ID NO: 2431458 - RNA, 19 nt, Artificial Sequence
  Description of Artificial Sequence: Synthetic oligonucleotide
  Sense strand starting at position 3552 of SEQ ID NO: 1886861
acaugaaucuuggucucau

SEQ ID NO: 2431459 - RNA, 19 nt, Artificial Sequence
  Description of Artificial Sequence: Synthetic oligonucleotide
  Antisense strand to SEQ ID NO: 2431458
augagaccaagauucaugu

SEQ ID NO: 2431460 - RNA, 19 nt, Artificial Sequence
  Description of Artificial Sequence: Synthetic oligonucleotide
  Sense strand starting at position 3596 of SEQ ID NO: 1886861
gaaggcaagaaguguguau

SEQ ID NO: 2431461 - RNA, 19 nt, Artificial Sequence
  Description of Artificial Sequence: Synthetic oligonucleotide
  Antisense strand to SEQ ID NO: 2431460
auacacacuucuugccuuc

SEQ ID NO: 2431462 - RNA, 19 nt, Artificial Sequence
  Description of Artificial Sequence: Synthetic oligonucleotide
  Sense strand starting at position 3598 of SEQ ID NO: 1886861
aggcaagaaguguguaucu

SEQ ID NO: 2431463 - RNA, 19 nt, Artificial Sequence
  Description of Artificial Sequence: Synthetic oligonucleotide
  Antisense strand to SEQ ID NO: 2431462
agauacacacuucuugccu

SEQ ID NO: 2431464 - RNA, 19 nt, Artificial Sequence
  Description of Artificial Sequence: Synthetic oligonucleotide
  Sense strand starting at position 3600 of SEQ ID NO: 1886861
gcaagaaguguguaucuaa

SEQ ID NO: 2431465 - RNA, 19 nt, Artificial Sequence
  Description of Artificial Sequence: Synthetic oligonucleotide
  Antisense strand to SEQ ID NO: 2431464
uuagauacacacuucuugc

SEQ ID NO: 2431466 - RNA, 19 nt, Artificial Sequence
  Description of Artificial Sequence: Synthetic oligonucleotide
  Sense strand starting at position 3603 of SEQ ID NO: 1886861
agaaguguguaucuaacau

SEQ ID NO: 2431467 - RNA, 19 nt, Artificial Sequence
  Description of Artificial Sequence: Synthetic oligonucleotide
  Antisense strand to SEQ ID NO: 2431466
auguuagauacacacuucu

SEQ ID NO: 2431468 - RNA, 19 nt, Artificial Sequence
  Description of Artificial Sequence: Synthetic oligonucleotide
  Sense strand starting at position 3745 of SEQ ID NO: 1886861
gaguaaauguucucgagga

SEQ ID NO: 2431469 - RNA, 19 nt, Artificial Sequence
  Description of Artificial Sequence: Synthetic oligonucleotide
  Antisense strand to SEQ ID NO: 2431468
uccucgagaacauuuacuc

SEQ ID NO: 2431470 - RNA, 19 nt, Artificial Sequence
  Description of Artificial Sequence: Synthetic oligonucleotide
  Sense strand starting at position 3747 of SEQ ID NO: 1886861
guaaauguucucgaggaaa

SEQ ID NO: 2431471 - RNA, 19 nt, Artificial Sequence
  Description of Artificial Sequence: Synthetic oligonucleotide
  Antisense strand to SEQ ID NO: 2431470
uuuccucgagaacauuuac

SEQ ID NO: 2431472 - RNA, 19 nt, Artificial Sequence
  Description of Artificial Sequence: Synthetic oligonucleotide
  Sense strand starting at position 3749 of SEQ ID NO: 1886861
aaauguucucgaggaaacu

SEQ ID NO: 2431473 - RNA, 19 nt, Artificial Sequence
  Description of Artificial Sequence: Synthetic oligonucleotide
  Antisense strand to SEQ ID NO: 2431472
aguuuccucgagaacauuu

SEQ ID NO: 2431474 - RNA, 19 nt, Artificial Sequence
  Description of Artificial Sequence: Synthetic oligonucleotide
  Sense strand starting at position 3755 of SEQ ID NO: 1886861
ucucgaggaaacugguuua

SEQ ID NO: 2431475 - RNA, 19 nt, Artificial Sequence
  Description of Artificial Sequence: Synthetic oligonucleotide
  Antisense strand to SEQ ID NO: 2431474
uaaaccaguuuccucgaga

SEQ ID NO: 2431476 - RNA, 19 nt, Artificial Sequence
  Description of Artificial Sequence: Synthetic oligonucleotide
  Sense strand starting at position 3758 of SEQ ID NO: 1886861
cgaggaaacugguuuagaa

SEQ ID NO: 2431477 - RNA, 19 nt, Artificial Sequence
  Description of Artificial Sequence: Synthetic oligonucleotide
  Antisense strand to SEQ ID NO: 2431476
uucuaaaccaguuuccucg

SEQ ID NO: 2431478 - RNA, 19 nt, Artificial Sequence
  Description of Artificial Sequence: Synthetic oligonucleotide
  Sense strand starting at position 3766 of SEQ ID NO: 1886861
cugguuuagaaguagaugu

SEQ ID NO: 2431479 - RNA, 19 nt, Artificial Sequence
  Description of Artificial Sequence: Synthetic oligonucleotide
  Antisense strand to SEQ ID NO: 2431478
acaucuacuucuaaaccag

SEQ ID NO: 2431480 - RNA, 19 nt, Artificial Sequence
  Description of Artificial Sequence: Synthetic oligonucleotide
  Sense strand starting at position 3768 of SEQ ID NO: 1886861
gguuuagaaguagauguca

SEQ ID NO: 2431481 - RNA, 19 nt, Artificial Sequence
  Description of Artificial Sequence: Synthetic oligonucleotide
  Antisense strand to SEQ ID NO: 2431480
ugacaucuacuucuaaacc

SEQ ID NO: 2431482 - RNA, 19 nt, Artificial Sequence
  Description of Artificial Sequence: Synthetic oligonucleotide
  Sense strand starting at position 3777 of SEQ ID NO: 1886861
guagaugucagcuagccau

SEQ ID NO: 2431483 - RNA, 19 nt, Artificial Sequence
  Description of Artificial Sequence: Synthetic oligonucleotide
  Antisense strand to SEQ ID NO: 2431482
auggcuagcugacaucuac

SEQ ID NO: 2431484 - RNA, 19 nt, Artificial Sequence
  Description of Artificial Sequence: Synthetic oligonucleotide
  Sense strand starting at position 3812 of SEQ ID NO: 1886861
gagauaucuccauggcauc

SEQ ID NO: 2431485 - RNA, 19 nt, Artificial Sequence
  Description of Artificial Sequence: Synthetic oligonucleotide
  Antisense strand to SEQ ID NO: 2431484
gaugccauggagauaucuc

SEQ ID NO: 2431486 - RNA, 19 nt, Artificial Sequence
  Description of Artificial Sequence: Synthetic oligonucleotide
  Sense strand starting at position 3813 of SEQ ID NO: 1886861
agauaucuccauggcauca

SEQ ID NO: 2431487 - RNA, 19 nt, Artificial Sequence
  Description of Artificial Sequence: Synthetic oligonucleotide
  Antisense strand to SEQ ID NO: 2431486
ugaugccauggagauaucu

SEQ ID NO: 2431488 - RNA, 19 nt, Artificial Sequence
  Description of Artificial Sequence: Synthetic oligonucleotide
  Sense strand starting at position 3826 of SEQ ID NO: 1886861
gcaucacauugguccagaa

SEQ ID NO: 2431489 - RNA, 19 nt, Artificial Sequence
  Description of Artificial Sequence: Synthetic oligonucleotide
  Antisense strand to SEQ ID NO: 2431488
uucuggaccaaugugaugc

SEQ ID NO: 2431490 - RNA, 19 nt, Artificial Sequence
  Description of Artificial Sequence: Synthetic oligonucleotide
  Sense strand starting at position 604 of SEQ ID NO: 1886862
cugagugggcguuauuaca

SEQ ID NO: 2431491 - RNA, 19 nt, Artificial Sequence
  Description of Artificial Sequence: Synthetic oligonucleotide
  Antisense strand to SEQ ID NO: 2431490
uguaauaacgcccacucag

SEQ ID NO: 2431492 - RNA, 19 nt, Artificial Sequence
  Description of Artificial Sequence: Synthetic oligonucleotide
  Sense strand starting at position 613 of SEQ ID NO: 1886862
cguuauuacaaaugaggaa

SEQ ID NO: 2431493 - RNA, 19 nt, Artificial Sequence
  Description of Artificial Sequence: Synthetic oligonucleotide
  Antisense strand to SEQ ID NO: 2431492
uuccucauuuguaauaacg

SEQ ID NO: 2431494 - RNA, 19 nt, Artificial Sequence
  Description of Artificial Sequence: Synthetic oligonucleotide
  Sense strand starting at position 869 of SEQ ID NO: 1886862
gcagccugccugugagaca

SEQ ID NO: 2431495 - RNA, 19 nt, Artificial Sequence
  Description of Artificial Sequence: Synthetic oligonucleotide
  Antisense strand to SEQ ID NO: 2431494
ugucucacaggcaggcugc

SEQ ID NO: 2431496 - RNA, 19 nt, Artificial Sequence
  Description of Artificial Sequence: Synthetic oligonucleotide
  Sense strand starting at position 1291 of SEQ ID NO: 1886862
ugcccuuucuccugaaugu

SEQ ID NO: 2431497 - RNA, 19 nt, Artificial Sequence
  Description of Artificial Sequence: Synthetic oligonucleotide
  Antisense strand to SEQ ID NO: 2431496
acauucaggagaaagggca

SEQ ID NO: 2431498 - RNA, 19 nt, Artificial Sequence
  Description of Artificial Sequence: Synthetic oligonucleotide
  Sense strand starting at position 1292 of SEQ ID NO: 1886862
gcccuuucuccugaaugua

SEQ ID NO: 2431499 - RNA, 19 nt, Artificial Sequence
  Description of Artificial Sequence: Synthetic oligonucleotide
  Antisense strand to SEQ ID NO: 2431498
uacauucaggagaaagggc

SEQ ID NO: 2431500 - RNA, 19 nt, Artificial Sequence
  Description of Artificial Sequence: Synthetic oligonucleotide
  Sense strand starting at position 1295 of SEQ ID NO: 1886862
cuuucuccugaauguaaug

SEQ ID NO: 2431501 - RNA, 19 nt, Artificial Sequence
  Description of Artificial Sequence: Synthetic oligonucleotide
  Antisense strand to SEQ ID NO: 2431500
cauuacauucaggagaaag

SEQ ID NO: 2431502 - RNA, 19 nt, Artificial Sequence
  Description of Artificial Sequence: Synthetic oligonucleotide
  Sense strand starting at position 1996 of SEQ ID NO: 1886862
acgacuaaggcuuaguaau

SEQ ID NO: 2431503 - RNA, 19 nt, Artificial Sequence
  Description of Artificial Sequence: Synthetic oligonucleotide
  Antisense strand to SEQ ID NO: 2431502
auuacuaagccuuagucgu

SEQ ID NO: 2431504 - RNA, 19 nt, Artificial Sequence
  Description of Artificial Sequence: Synthetic oligonucleotide
  Sense strand starting at position 2009 of SEQ ID NO: 1886862
aguaauaacuucccaggau

SEQ ID NO: 2431505 - RNA, 19 nt, Artificial Sequence
  Description of Artificial Sequence: Synthetic oligonucleotide
  Antisense strand to SEQ ID NO: 2431504
auccugggaaguuauuacu

SEQ ID NO: 2431506 - RNA, 19 nt, Artificial Sequence
  Description of Artificial Sequence: Synthetic oligonucleotide
  Sense strand starting at position 2030 of SEQ ID NO: 1886862
augcaaauuugguguccaa

SEQ ID NO: 2431507 - RNA, 19 nt, Artificial Sequence
  Description of Artificial Sequence: Synthetic oligonucleotide
  Antisense strand to SEQ ID NO: 2431506
uuggacaccaaauuugcau

SEQ ID NO: 2431508 - RNA, 19 nt, Artificial Sequence
  Description of Artificial Sequence: Synthetic oligonucleotide
  Sense strand starting at position 2037 of SEQ ID NO: 1886862
uuugguguccaagacaaug

SEQ ID NO: 2431509 - RNA, 19 nt, Artificial Sequence
  Description of Artificial Sequence: Synthetic oligonucleotide
  Antisense strand to SEQ ID NO: 2431508
cauugucuuggacaccaaa

SEQ ID NO: 2431510 - RNA, 19 nt, Artificial Sequence
  Description of Artificial Sequence: Synthetic oligonucleotide
  Sense strand starting at position 2073 of SEQ ID NO: 1886862
aaagcuguuugcgaaaguu

SEQ ID NO: 2431511 - RNA, 19 nt, Artificial Sequence
  Description of Artificial Sequence: Synthetic oligonucleotide
  Antisense strand to SEQ ID NO: 2431510
aacuuucgcaaacagcuuu

SEQ ID NO: 2431512 - RNA, 19 nt, Artificial Sequence
  Description of Artificial Sequence: Synthetic oligonucleotide
  Sense strand starting at position 2092 of SEQ ID NO: 1886862
uugugaaauuguggaaucu

SEQ ID NO: 2431513 - RNA, 19 nt, Artificial Sequence
  Description of Artificial Sequence: Synthetic oligonucleotide
  Antisense strand to SEQ ID NO: 2431512
agauuccacaauuucacaa

SEQ ID NO: 2431514 - RNA, 19 nt, Artificial Sequence
  Description of Artificial Sequence: Synthetic oligonucleotide
  Sense strand starting at position 2101 of SEQ ID NO: 1886862
uguggaaucucugauccuc

SEQ ID NO: 2431515 - RNA, 19 nt, Artificial Sequence
  Description of Artificial Sequence: Synthetic oligonucleotide
  Antisense strand to SEQ ID NO: 2431514
gaggaucagagauuccaca

SEQ ID NO: 2431516 - RNA, 19 nt, Artificial Sequence
  Description of Artificial Sequence: Synthetic oligonucleotide
  Sense strand starting at position 2185 of SEQ ID NO: 1886862
cccagaguguuugaacaga

SEQ ID NO: 2431517 - RNA, 19 nt, Artificial Sequence
  Description of Artificial Sequence: Synthetic oligonucleotide
  Antisense strand to SEQ ID NO: 2431516
ucuguucaaacacucuggg

SEQ ID NO: 2431518 - RNA, 19 nt, Artificial Sequence
  Description of Artificial Sequence: Synthetic oligonucleotide
  Sense strand starting at position 2366 of SEQ ID NO: 1886862
cccaaauucuaagagagaa

SEQ ID NO: 2431519 - RNA, 19 nt, Artificial Sequence
  Description of Artificial Sequence: Synthetic oligonucleotide
  Antisense strand to SEQ ID NO: 2431518
uucucucuuagaauuuggg

SEQ ID NO: 2431520 - RNA, 19 nt, Artificial Sequence
  Description of Artificial Sequence: Synthetic oligonucleotide
  Sense strand starting at position 2550 of SEQ ID NO: 1886862
aguugauuagcugggaacu

SEQ ID NO: 2431521 - RNA, 19 nt, Artificial Sequence
  Description of Artificial Sequence: Synthetic oligonucleotide
  Antisense strand to SEQ ID NO: 2431520
aguucccagcuaaucaacu

SEQ ID NO: 2431522 - RNA, 19 nt, Artificial Sequence
  Description of Artificial Sequence: Synthetic oligonucleotide
  Sense strand starting at position 2593 of SEQ ID NO: 1886862
augacucauucggcuaaag

SEQ ID NO: 2431523 - RNA, 19 nt, Artificial Sequence
  Description of Artificial Sequence: Synthetic oligonucleotide
  Antisense strand to SEQ ID NO: 2431522
cuuuagccgaaugagucau

SEQ ID NO: 2431524 - RNA, 19 nt, Artificial Sequence
  Description of Artificial Sequence: Synthetic oligonucleotide
  Sense strand starting at position 2635 of SEQ ID NO: 1886862
gaggaaaccggaugucugu

SEQ ID NO: 2431525 - RNA, 19 nt, Artificial Sequence
  Description of Artificial Sequence: Synthetic oligonucleotide
  Antisense strand to SEQ ID NO: 2431524
acagacauccgguuuccuc

SEQ ID NO: 2431526 - RNA, 19 nt, Artificial Sequence
  Description of Artificial Sequence: Synthetic oligonucleotide
  Sense strand starting at position 2642 of SEQ ID NO: 1886862
ccggaugucugucccgaau

SEQ ID NO: 2431527 - RNA, 19 nt, Artificial Sequence
  Description of Artificial Sequence: Synthetic oligonucleotide
  Antisense strand to SEQ ID NO: 2431526
auucgggacagacauccgg

SEQ ID NO: 2431528 - RNA, 19 nt, Artificial Sequence
  Description of Artificial Sequence: Synthetic oligonucleotide
  Sense strand starting at position 2644 of SEQ ID NO: 1886862
ggaugucugucccgaauga

SEQ ID NO: 2431529 - RNA, 19 nt, Artificial Sequence
  Description of Artificial Sequence: Synthetic oligonucleotide
  Antisense strand to SEQ ID NO: 2431528
ucauucgggacagacaucc

SEQ ID NO: 2431530 - RNA, 19 nt, Artificial Sequence
  Description of Artificial Sequence: Synthetic oligonucleotide
  Sense strand starting at position 2645 of SEQ ID NO: 1886862
gaugucugucccgaaugag

SEQ ID NO: 2431531 - RNA, 19 nt, Artificial Sequence
  Description of Artificial Sequence: Synthetic oligonucleotide
  Antisense strand to SEQ ID NO: 2431530
cucauucgggacagacauc

SEQ ID NO: 2431532 - RNA, 19 nt, Artificial Sequence
  Description of Artificial Sequence: Synthetic oligonucleotide
  Sense strand starting at position 2677 of SEQ ID NO: 1886862
aggcgauuggcucaccuga

SEQ ID NO: 2431533 - RNA, 19 nt, Artificial Sequence
  Description of Artificial Sequence: Synthetic oligonucleotide
  Antisense strand to SEQ ID NO: 2431532
ucaggugagccaaucgccu

SEQ ID NO: 2431534 - RNA, 19 nt, Artificial Sequence
  Description of Artificial Sequence: Synthetic oligonucleotide
  Sense strand starting at position 2764 of SEQ ID NO: 1886862
acgugacuucccuggucau

SEQ ID NO: 2431535 - RNA, 19 nt, Artificial Sequence
  Description of Artificial Sequence: Synthetic oligonucleotide
  Antisense strand to SEQ ID NO: 2431534
augaccagggaagucacgu

SEQ ID NO: 2431536 - RNA, 19 nt, Artificial Sequence
  Description of Artificial Sequence: Synthetic oligonucleotide
  Sense strand starting at position 2765 of SEQ ID NO: 1886862
cgugacuucccuggucauu

SEQ ID NO: 2431537 - RNA, 19 nt, Artificial Sequence
  Description of Artificial Sequence: Synthetic oligonucleotide
  Antisense strand to SEQ ID NO: 2431536
aaugaccagggaagucacg

SEQ ID NO: 2431538 - RNA, 19 nt, Artificial Sequence
  Description of Artificial Sequence: Synthetic oligonucleotide
  Sense strand starting at position 2844 of SEQ ID NO: 1886862
agaaccaugcagcguuaau

SEQ ID NO: 2431539 - RNA, 19 nt, Artificial Sequence
  Description of Artificial Sequence: Synthetic oligonucleotide
  Antisense strand to SEQ ID NO: 2431538
auuaacgcugcaugguucu

SEQ ID NO: 2431540 - RNA, 19 nt, Artificial Sequence
  Description of Artificial Sequence: Synthetic oligonucleotide
  Sense strand starting at position 2855 of SEQ ID NO: 1886862
gcguuaaugcuggaaggga

SEQ ID NO: 2431541 - RNA, 19 nt, Artificial Sequence
  Description of Artificial Sequence: Synthetic oligonucleotide
  Antisense strand to SEQ ID NO: 2431540
ucccuuccagcauuaacgc

SEQ ID NO: 2431542 - RNA, 19 nt, Artificial Sequence
  Description of Artificial Sequence: Synthetic oligonucleotide
  Sense strand starting at position 2925 of SEQ ID NO: 1886862
gcccaaggucaugguaagu

SEQ ID NO: 2431543 - RNA, 19 nt, Artificial Sequence
  Description of Artificial Sequence: Synthetic oligonucleotide
  Antisense strand to SEQ ID NO: 2431542
acuuaccaugaccuugggc

SEQ ID NO: 2431544 - RNA, 19 nt, Artificial Sequence
  Description of Artificial Sequence: Synthetic oligonucleotide
  Sense strand starting at position 2931 of SEQ ID NO: 1886862
ggucaugguaagugacaga

SEQ ID NO: 2431545 - RNA, 19 nt, Artificial Sequence
  Description of Artificial Sequence: Synthetic oligonucleotide
  Antisense strand to SEQ ID NO: 2431544
ucugucacuuaccaugacc

SEQ ID NO: 2431546 - RNA, 19 nt, Artificial Sequence
  Description of Artificial Sequence: Synthetic oligonucleotide
  Sense strand starting at position 2934 of SEQ ID NO: 1886862
caugguaagugacagaauu

SEQ ID NO: 2431547 - RNA, 19 nt, Artificial Sequence
  Description of Artificial Sequence: Synthetic oligonucleotide
  Antisense strand to SEQ ID NO: 2431546
aauucugucacuuaccaug

SEQ ID NO: 2431548 - RNA, 19 nt, Artificial Sequence
  Description of Artificial Sequence: Synthetic oligonucleotide
  Sense strand starting at position 3349 of SEQ ID NO: 1886862
gucaccuucuguccuaauu

SEQ ID NO: 2431549 - RNA, 19 nt, Artificial Sequence
  Description of Artificial Sequence: Synthetic oligonucleotide
  Antisense strand to SEQ ID NO: 2431548
aauuaggacagaaggugac

SEQ ID NO: 2431550 - RNA, 19 nt, Artificial Sequence
  Description of Artificial Sequence: Synthetic oligonucleotide
  Sense strand starting at position 3473 of SEQ ID NO: 1886862
agggacgucugaucucaca

SEQ ID NO: 2431551 - RNA, 19 nt, Artificial Sequence
  Description of Artificial Sequence: Synthetic oligonucleotide
  Antisense strand to SEQ ID NO: 2431550
ugugagaucagacgucccu

SEQ ID NO: 2431552 - RNA, 19 nt, Artificial Sequence
  Description of Artificial Sequence: Synthetic oligonucleotide
  Sense strand starting at position 3637 of SEQ ID NO: 1886862
uggaguuucgcucauugcu

SEQ ID NO: 2431553 - RNA, 19 nt, Artificial Sequence
  Description of Artificial Sequence: Synthetic oligonucleotide
  Antisense strand to SEQ ID NO: 2431552
agcaaugagcgaaacucca

SEQ ID NO: 2431554 - RNA, 19 nt, Artificial Sequence
  Description of Artificial Sequence: Synthetic oligonucleotide
  Sense strand starting at position 3948 of SEQ ID NO: 1886862
gcaggagcuccacauucuu

SEQ ID NO: 2431555 - RNA, 19 nt, Artificial Sequence
  Description of Artificial Sequence: Synthetic oligonucleotide
  Antisense strand to SEQ ID NO: 2431554
aagaauguggagcuccugc

SEQ ID NO: 2431556 - RNA, 19 nt, Artificial Sequence
  Description of Artificial Sequence: Synthetic oligonucleotide
  Sense strand starting at position 3970 of SEQ ID NO: 1886862
cauguugccuggcaacuau

SEQ ID NO: 2431557 - RNA, 19 nt, Artificial Sequence
  Description of Artificial Sequence: Synthetic oligonucleotide
  Antisense strand to SEQ ID NO: 2431556
auaguugccaggcaacaug

SEQ ID NO: 2431558 - RNA, 19 nt, Artificial Sequence
  Description of Artificial Sequence: Synthetic oligonucleotide
  Sense strand starting at position 260 of SEQ ID NO: 1886863
gaauaacucgugcauugca

SEQ ID NO: 2431559 - RNA, 19 nt, Artificial Sequence
  Description of Artificial Sequence: Synthetic oligonucleotide
  Antisense strand to SEQ ID NO: 2431558
ugcaaugcacgaguuauuc

SEQ ID NO: 2431560 - RNA, 19 nt, Artificial Sequence
  Description of Artificial Sequence: Synthetic oligonucleotide
  Sense strand starting at position 655 of SEQ ID NO: 1886863
acuuguguucacgugcaua

SEQ ID NO: 2431561 - RNA, 19 nt, Artificial Sequence
  Description of Artificial Sequence: Synthetic oligonucleotide
  Antisense strand to SEQ ID NO: 2431560
uaugcacgugaacacaagu

SEQ ID NO: 2431562 - RNA, 19 nt, Artificial Sequence
  Description of Artificial Sequence: Synthetic oligonucleotide
  Sense strand starting at position 657 of SEQ ID NO: 1886863
uuguguucacgugcauauu

SEQ ID NO: 2431563 - RNA, 19 nt, Artificial Sequence
  Description of Artificial Sequence: Synthetic oligonucleotide
  Antisense strand to SEQ ID NO: 2431562
aauaugcacgugaacacaa

SEQ ID NO: 2431564 - RNA, 19 nt, Artificial Sequence
  Description of Artificial Sequence: Synthetic oligonucleotide
  Sense strand starting at position 658 of SEQ ID NO: 1886863
uguguucacgugcauauuu

SEQ ID NO: 2431565 - RNA, 19 nt, Artificial Sequence
  Description of Artificial Sequence: Synthetic oligonucleotide
  Antisense strand to SEQ ID NO: 2431564
aaauaugcacgugaacaca

SEQ ID NO: 2431566 - RNA, 19 nt, Artificial Sequence
  Description of Artificial Sequence: Synthetic oligonucleotide
  Sense strand starting at position 726 of SEQ ID NO: 1886863
ugaaaucuaccuugagacu

SEQ ID NO: 2431567 - RNA, 19 nt, Artificial Sequence
  Description of Artificial Sequence: Synthetic oligonucleotide
  Antisense strand to SEQ ID NO: 2431566
agucucaagguagauuuca

SEQ ID NO: 2431568 - RNA, 19 nt, Artificial Sequence
  Description of Artificial Sequence: Synthetic oligonucleotide
  Sense strand starting at position 732 of SEQ ID NO: 1886863
cuaccuugagacuguuaca

SEQ ID NO: 2431569 - RNA, 19 nt, Artificial Sequence
  Description of Artificial Sequence: Synthetic oligonucleotide
  Antisense strand to SEQ ID NO: 2431568
uguaacagucucaagguag

SEQ ID NO: 2431570 - RNA, 19 nt, Artificial Sequence
  Description of Artificial Sequence: Synthetic oligonucleotide
  Sense strand starting at position 806 of SEQ ID NO: 1886863
aucuuaauccugugugacu

SEQ ID NO: 2431571 - RNA, 19 nt, Artificial Sequence
  Description of Artificial Sequence: Synthetic oligonucleotide
  Antisense strand to SEQ ID NO: 2431570
agucacacaggauuaagau

SEQ ID NO: 2431572 - RNA, 19 nt, Artificial Sequence
  Description of Artificial Sequence: Synthetic oligonucleotide
  Sense strand starting at position 807 of SEQ ID NO: 1886863
ucuuaauccugugugacuu

SEQ ID NO: 2431573 - RNA, 19 nt, Artificial Sequence
  Description of Artificial Sequence: Synthetic oligonucleotide
  Antisense strand to SEQ ID NO: 2431572
aagucacacaggauuaaga

SEQ ID NO: 2431574 - RNA, 19 nt, Artificial Sequence
  Description of Artificial Sequence: Synthetic oligonucleotide
  Sense strand starting at position 815 of SEQ ID NO: 1886863
cugugugacuuucucuaca

SEQ ID NO: 2431575 - RNA, 19 nt, Artificial Sequence
  Description of Artificial Sequence: Synthetic oligonucleotide
  Antisense strand to SEQ ID NO: 2431574
uguagagaaagucacacag

SEQ ID NO: 2431576 - RNA, 19 nt, Artificial Sequence
  Description of Artificial Sequence: Synthetic oligonucleotide
  Sense strand starting at position 817 of SEQ ID NO: 1886863
gugugacuuucucuacauu

SEQ ID NO: 2431577 - RNA, 19 nt, Artificial Sequence
  Description of Artificial Sequence: Synthetic oligonucleotide
  Antisense strand to SEQ ID NO: 2431576
aauguagagaaagucacac

SEQ ID NO: 2431578 - RNA, 19 nt, Artificial Sequence
  Description of Artificial Sequence: Synthetic oligonucleotide
  Sense strand starting at position 889 of SEQ ID NO: 1886863
gggaaccguucagagagaa

SEQ ID NO: 2431579 - RNA, 19 nt, Artificial Sequence
  Description of Artificial Sequence: Synthetic oligonucleotide
  Antisense strand to SEQ ID NO: 2431578
uucucucugaacgguuccc

SEQ ID NO: 2431580 - RNA, 19 nt, Artificial Sequence
  Description of Artificial Sequence: Synthetic oligonucleotide
  Sense strand starting at position 968 of SEQ ID NO: 1886863
uugggucuuucugacauuu

SEQ ID NO: 2431581 - RNA, 19 nt, Artificial Sequence
  Description of Artificial Sequence: Synthetic oligonucleotide
  Antisense strand to SEQ ID NO: 2431580
aaaugucagaaagacccaa

SEQ ID NO: 2431582 - RNA, 19 nt, Artificial Sequence
  Description of Artificial Sequence: Synthetic oligonucleotide
  Sense strand starting at position 1555 of SEQ ID NO: 1886863
gggccucaccgagauagau

SEQ ID NO: 2431583 - RNA, 19 nt, Artificial Sequence
  Description of Artificial Sequence: Synthetic oligonucleotide
  Antisense strand to SEQ ID NO: 2431582
aucuaucucggugaggccc

SEQ ID NO: 2431584 - RNA, 19 nt, Artificial Sequence
  Description of Artificial Sequence: Synthetic oligonucleotide
  Sense strand starting at position 1564 of SEQ ID NO: 1886863
cgagauagaugucuccgaa

SEQ ID NO: 2431585 - RNA, 19 nt, Artificial Sequence
  Description of Artificial Sequence: Synthetic oligonucleotide
  Antisense strand to SEQ ID NO: 2431584
uucggagacaucuaucucg

SEQ ID NO: 2431586 - RNA, 19 nt, Artificial Sequence
  Description of Artificial Sequence: Synthetic oligonucleotide
  Sense strand starting at position 1567 of SEQ ID NO: 1886863
gauagaugucuccgaagga

SEQ ID NO: 2431587 - RNA, 19 nt, Artificial Sequence
  Description of Artificial Sequence: Synthetic oligonucleotide
  Antisense strand to SEQ ID NO: 2431586
uccuucggagacaucuauc

SEQ ID NO: 2431588 - RNA, 19 nt, Artificial Sequence
  Description of Artificial Sequence: Synthetic oligonucleotide
  Sense strand starting at position 1568 of SEQ ID NO: 1886863
auagaugucuccgaaggag

SEQ ID NO: 2431589 - RNA, 19 nt, Artificial Sequence
  Description of Artificial Sequence: Synthetic oligonucleotide
  Antisense strand to SEQ ID NO: 2431588
cuccuucggagacaucuau

SEQ ID NO: 2431590 - RNA, 19 nt, Artificial Sequence
  Description of Artificial Sequence: Synthetic oligonucleotide
  Sense strand starting at position 2180 of SEQ ID NO: 1886863
aggugaguuccucgcgaca

SEQ ID NO: 2431591 - RNA, 19 nt, Artificial Sequence
  Description of Artificial Sequence: Synthetic oligonucleotide
  Antisense strand to SEQ ID NO: 2431590
ugucgcgaggaacucaccu

SEQ ID NO: 2431592 - RNA, 19 nt, Artificial Sequence
  Description of Artificial Sequence: Synthetic oligonucleotide
  Sense strand starting at position 2396 of SEQ ID NO: 1886863
ugauguccagccugaagau

SEQ ID NO: 2431593 - RNA, 19 nt, Artificial Sequence
  Description of Artificial Sequence: Synthetic oligonucleotide
  Antisense strand to SEQ ID NO: 2431592
aucuucaggcuggacauca

SEQ ID NO: 2431594 - RNA, 19 nt, Artificial Sequence
  Description of Artificial Sequence: Synthetic oligonucleotide
  Sense strand starting at position 2397 of SEQ ID NO: 1886863
gauguccagccugaagauu

SEQ ID NO: 2431595 - RNA, 19 nt, Artificial Sequence
  Description of Artificial Sequence: Synthetic oligonucleotide
  Antisense strand to SEQ ID NO: 2431594
aaucuucaggcuggacauc

SEQ ID NO: 2431596 - RNA, 19 nt, Artificial Sequence
  Description of Artificial Sequence: Synthetic oligonucleotide
  Sense strand starting at position 2494 of SEQ ID NO: 1886863
ucaacauucuuaucugugu

SEQ ID NO: 2431597 - RNA, 19 nt, Artificial Sequence
  Description of Artificial Sequence: Synthetic oligonucleotide
  Antisense strand to SEQ ID NO: 2431596
acacagauaagaauguuga

SEQ ID NO: 2431598 - RNA, 19 nt, Artificial Sequence
  Description of Artificial Sequence: Synthetic oligonucleotide
  Sense strand starting at position 2498 of SEQ ID NO: 1886863
cauucuuaucuguguugga

SEQ ID NO: 2431599 - RNA, 19 nt, Artificial Sequence
  Description of Artificial Sequence: Synthetic oligonucleotide
  Antisense strand to SEQ ID NO: 2431598
uccaacacagauaagaaug

SEQ ID NO: 2431600 - RNA, 19 nt, Artificial Sequence
  Description of Artificial Sequence: Synthetic oligonucleotide
  Sense strand starting at position 2499 of SEQ ID NO: 1886863
auucuuaucuguguuggau

SEQ ID NO: 2431601 - RNA, 19 nt, Artificial Sequence
  Description of Artificial Sequence: Synthetic oligonucleotide
  Antisense strand to SEQ ID NO: 2431600
auccaacacagauaagaau

SEQ ID NO: 2431602 - RNA, 19 nt, Artificial Sequence
  Description of Artificial Sequence: Synthetic oligonucleotide
  Sense strand starting at position 2507 of SEQ ID NO: 1886863
cuguguuggaucugaaugu

SEQ ID NO: 2431603 - RNA, 19 nt, Artificial Sequence
  Description of Artificial Sequence: Synthetic oligonucleotide
  Antisense strand to SEQ ID NO: 2431602
acauucagauccaacacag

SEQ ID NO: 2431604 - RNA, 19 nt, Artificial Sequence
  Description of Artificial Sequence: Synthetic oligonucleotide
  Sense strand starting at position 2511 of SEQ ID NO: 1886863
guuggaucugaauguuccu

SEQ ID NO: 2431605 - RNA, 19 nt, Artificial Sequence
  Description of Artificial Sequence: Synthetic oligonucleotide
  Antisense strand to SEQ ID NO: 2431604
aggaacauucagauccaac

SEQ ID NO: 2431606 - RNA, 19 nt, Artificial Sequence
  Description of Artificial Sequence: Synthetic oligonucleotide
  Sense strand starting at position 2597 of SEQ ID NO: 1886863
ucccaucacugggaagaaa

SEQ ID NO: 2431607 - RNA, 19 nt, Artificial Sequence
  Description of Artificial Sequence: Synthetic oligonucleotide
  Antisense strand to SEQ ID NO: 2431606
uuucuucccagugauggga

SEQ ID NO: 2431608 - RNA, 19 nt, Artificial Sequence
  Description of Artificial Sequence: Synthetic oligonucleotide
  Sense strand starting at position 2705 of SEQ ID NO: 1886863
ugucgcauccucgcugaaa

SEQ ID NO: 2431609 - RNA, 19 nt, Artificial Sequence
  Description of Artificial Sequence: Synthetic oligonucleotide
  Antisense strand to SEQ ID NO: 2431608
uuucagcgaggaugcgaca

SEQ ID NO: 2431610 - RNA, 19 nt, Artificial Sequence
  Description of Artificial Sequence: Synthetic oligonucleotide
  Sense strand starting at position 2706 of SEQ ID NO: 1886863
gucgcauccucgcugaaac

SEQ ID NO: 2431611 - RNA, 19 nt, Artificial Sequence
  Description of Artificial Sequence: Synthetic oligonucleotide
  Antisense strand to SEQ ID NO: 2431610
guuucagcgaggaugcgac

SEQ ID NO: 2431612 - RNA, 19 nt, Artificial Sequence
  Description of Artificial Sequence: Synthetic oligonucleotide
  Sense strand starting at position 2707 of SEQ ID NO: 1886863
ucgcauccucgcugaaacu

SEQ ID NO: 2431613 - RNA, 19 nt, Artificial Sequence
  Description of Artificial Sequence: Synthetic oligonucleotide
  Antisense strand to SEQ ID NO: 2431612
aguuucagcgaggaugcga

SEQ ID NO: 2431614 - RNA, 19 nt, Artificial Sequence
  Description of Artificial Sequence: Synthetic oligonucleotide
  Sense strand starting at position 2950 of SEQ ID NO: 1886863
gggcguccauucccgaaau

SEQ ID NO: 2431615 - RNA, 19 nt, Artificial Sequence
  Description of Artificial Sequence: Synthetic oligonucleotide
  Antisense strand to SEQ ID NO: 2431614
auuucgggaauggacgccc

SEQ ID NO: 2431616 - RNA, 19 nt, Artificial Sequence
  Description of Artificial Sequence: Synthetic oligonucleotide
  Sense strand starting at position 2952 of SEQ ID NO: 1886863
gcguccauucccgaaauua

SEQ ID NO: 2431617 - RNA, 19 nt, Artificial Sequence
  Description of Artificial Sequence: Synthetic oligonucleotide
  Antisense strand to SEQ ID NO: 2431616
uaauuucgggaauggacgc

SEQ ID NO: 2431618 - RNA, 19 nt, Artificial Sequence
  Description of Artificial Sequence: Synthetic oligonucleotide
  Sense strand starting at position 3050 of SEQ ID NO: 1886863
cccaguuucugaguuacag

SEQ ID NO: 2431619 - RNA, 19 nt, Artificial Sequence
  Description of Artificial Sequence: Synthetic oligonucleotide
  Antisense strand to SEQ ID NO: 2431618
cuguaacucagaaacuggg

SEQ ID NO: 2431620 - RNA, 19 nt, Artificial Sequence
  Description of Artificial Sequence: Synthetic oligonucleotide
  Sense strand starting at position 3356 of SEQ ID NO: 1886863
uuguguguuugugucuuga

SEQ ID NO: 2431621 - RNA, 19 nt, Artificial Sequence
  Description of Artificial Sequence: Synthetic oligonucleotide
  Antisense strand to SEQ ID NO: 2431620
ucaagacacaaacacacaa

SEQ ID NO: 2431622 - RNA, 19 nt, Artificial Sequence
  Description of Artificial Sequence: Synthetic oligonucleotide
  Sense strand starting at position 3358 of SEQ ID NO: 1886863
guguguuugugucuugacu

SEQ ID NO: 2431623 - RNA, 19 nt, Artificial Sequence
  Description of Artificial Sequence: Synthetic oligonucleotide
  Antisense strand to SEQ ID NO: 2431622
agucaagacacaaacacac

SEQ ID NO: 2431624 - RNA, 19 nt, Artificial Sequence
  Description of Artificial Sequence: Synthetic oligonucleotide
  Sense strand starting at position 3421 of SEQ ID NO: 1886863
gcaggagcccugggaacau

SEQ ID NO: 2431625 - RNA, 19 nt, Artificial Sequence
  Description of Artificial Sequence: Synthetic oligonucleotide
  Antisense strand to SEQ ID NO: 2431624
auguucccagggcuccugc

SEQ ID NO: 2431626 - RNA, 19 nt, Artificial Sequence
  Description of Artificial Sequence: Synthetic oligonucleotide
  Sense strand starting at position 3673 of SEQ ID NO: 1886863
ugaggauagucauugccaa

SEQ ID NO: 2431627 - RNA, 19 nt, Artificial Sequence
  Description of Artificial Sequence: Synthetic oligonucleotide
  Antisense strand to SEQ ID NO: 2431626
uuggcaaugacuauccuca

SEQ ID NO: 2431628 - RNA, 19 nt, Artificial Sequence
  Description of Artificial Sequence: Synthetic oligonucleotide
  Sense strand starting at position 3674 of SEQ ID NO: 1886863
gaggauagucauugccaag

SEQ ID NO: 2431629 - RNA, 19 nt, Artificial Sequence
  Description of Artificial Sequence: Synthetic oligonucleotide
  Antisense strand to SEQ ID NO: 2431628
cuuggcaaugacuauccuc

SEQ ID NO: 2431630 - RNA, 19 nt, Artificial Sequence
  Description of Artificial Sequence: Synthetic oligonucleotide
  Sense strand starting at position 3677 of SEQ ID NO: 1886863
gauagucauugccaaggaa

SEQ ID NO: 2431631 - RNA, 19 nt, Artificial Sequence
  Description of Artificial Sequence: Synthetic oligonucleotide
  Antisense strand to SEQ ID NO: 2431630
uuccuuggcaaugacuauc

SEQ ID NO: 2431632 - RNA, 19 nt, Artificial Sequence
  Description of Artificial Sequence: Synthetic oligonucleotide
  Sense strand starting at position 3810 of SEQ ID NO: 1886863
guuugaugauacuagaaca

SEQ ID NO: 2431633 - RNA, 19 nt, Artificial Sequence
  Description of Artificial Sequence: Synthetic oligonucleotide
  Antisense strand to SEQ ID NO: 2431632
uguucuaguaucaucaaac

SEQ ID NO: 2431634 - RNA, 19 nt, Artificial Sequence
  Description of Artificial Sequence: Synthetic oligonucleotide
  Sense strand starting at position 3820 of SEQ ID NO: 1886863
acuagaacaucucagagua

SEQ ID NO: 2431635 - RNA, 19 nt, Artificial Sequence
  Description of Artificial Sequence: Synthetic oligonucleotide
  Antisense strand to SEQ ID NO: 2431634
uacucugagauguucuagu

SEQ ID NO: 2431636 - RNA, 19 nt, Artificial Sequence
  Description of Artificial Sequence: Synthetic oligonucleotide
  Sense strand starting at position 3822 of SEQ ID NO: 1886863
uagaacaucucagaguaga

SEQ ID NO: 2431637 - RNA, 19 nt, Artificial Sequence
  Description of Artificial Sequence: Synthetic oligonucleotide
  Antisense strand to SEQ ID NO: 2431636
ucuacucugagauguucua

SEQ ID NO: 2431638 - RNA, 19 nt, Artificial Sequence
  Description of Artificial Sequence: Synthetic oligonucleotide
  Sense strand starting at position 169 of SEQ ID NO: 1886864
gcugaaguuuaagaacaca

SEQ ID NO: 2431639 - RNA, 19 nt, Artificial Sequence
  Description of Artificial Sequence: Synthetic oligonucleotide
  Antisense strand to SEQ ID NO: 2431638
uguguucuuaaacuucagc

SEQ ID NO: 2431640 - RNA, 19 nt, Artificial Sequence
  Description of Artificial Sequence: Synthetic oligonucleotide
  Sense strand starting at position 244 of SEQ ID NO: 1886864
ugaugauuguuccuguaug

SEQ ID NO: 2431641 - RNA, 19 nt, Artificial Sequence
  Description of Artificial Sequence: Synthetic oligonucleotide
  Antisense strand to SEQ ID NO: 2431640
cauacaggaacaaucauca

SEQ ID NO: 2431642 - RNA, 19 nt, Artificial Sequence
  Description of Artificial Sequence: Synthetic oligonucleotide
  Sense strand starting at position 258 of SEQ ID NO: 1886864
guaugucuacuuuagcuga

SEQ ID NO: 2431643 - RNA, 19 nt, Artificial Sequence
  Description of Artificial Sequence: Synthetic oligonucleotide
  Antisense strand to SEQ ID NO: 2431642
ucagcuaaaguagacauac

SEQ ID NO: 2431644 - RNA, 19 nt, Artificial Sequence
  Description of Artificial Sequence: Synthetic oligonucleotide
  Sense strand starting at position 260 of SEQ ID NO: 1886864
augucuacuuuagcugaga

SEQ ID NO: 2431645 - RNA, 19 nt, Artificial Sequence
  Description of Artificial Sequence: Synthetic oligonucleotide
  Antisense strand to SEQ ID NO: 2431644
ucucagcuaaaguagacau

SEQ ID NO: 2431646 - RNA, 19 nt, Artificial Sequence
  Description of Artificial Sequence: Synthetic oligonucleotide
  Sense strand starting at position 261 of SEQ ID NO: 1886864
ugucuacuuuagcugagau

SEQ ID NO: 2431647 - RNA, 19 nt, Artificial Sequence
  Description of Artificial Sequence: Synthetic oligonucleotide
  Antisense strand to SEQ ID NO: 2431646
aucucagcuaaaguagaca

SEQ ID NO: 2431648 - RNA, 19 nt, Artificial Sequence
  Description of Artificial Sequence: Synthetic oligonucleotide
  Sense strand starting at position 263 of SEQ ID NO: 1886864
ucuacuuuagcugagaucu

SEQ ID NO: 2431649 - RNA, 19 nt, Artificial Sequence
  Description of Artificial Sequence: Synthetic oligonucleotide
  Antisense strand to SEQ ID NO: 2431648
agaucucagcuaaaguaga

SEQ ID NO: 2431650 - RNA, 19 nt, Artificial Sequence
  Description of Artificial Sequence: Synthetic oligonucleotide
  Sense strand starting at position 285 of SEQ ID NO: 1886864
uccugagcuuuaguccuau

SEQ ID NO: 2431651 - RNA, 19 nt, Artificial Sequence
  Description of Artificial Sequence: Synthetic oligonucleotide
  Antisense strand to SEQ ID NO: 2431650
auaggacuaaagcucagga

SEQ ID NO: 2431652 - RNA, 19 nt, Artificial Sequence
  Description of Artificial Sequence: Synthetic oligonucleotide
  Sense strand starting at position 385 of SEQ ID NO: 1886864
cuagaacucuucuaguguu

SEQ ID NO: 2431653 - RNA, 19 nt, Artificial Sequence
  Description of Artificial Sequence: Synthetic oligonucleotide
  Antisense strand to SEQ ID NO: 2431652
aacacuagaagaguucuag

SEQ ID NO: 2431654 - RNA, 19 nt, Artificial Sequence
  Description of Artificial Sequence: Synthetic oligonucleotide
  Sense strand starting at position 674 of SEQ ID NO: 1886864
gugccuguaugccuguaau

SEQ ID NO: 2431655 - RNA, 19 nt, Artificial Sequence
  Description of Artificial Sequence: Synthetic oligonucleotide
  Antisense strand to SEQ ID NO: 2431654
auuacaggcauacaggcac

SEQ ID NO: 2431656 - RNA, 19 nt, Artificial Sequence
  Description of Artificial Sequence: Synthetic oligonucleotide
  Sense strand starting at position 676 of SEQ ID NO: 1886864
gccuguaugccuguaauuc

SEQ ID NO: 2431657 - RNA, 19 nt, Artificial Sequence
  Description of Artificial Sequence: Synthetic oligonucleotide
  Antisense strand to SEQ ID NO: 2431656
gaauuacaggcauacaggc

SEQ ID NO: 2431658 - RNA, 19 nt, Artificial Sequence
  Description of Artificial Sequence: Synthetic oligonucleotide
  Sense strand starting at position 1059 of SEQ ID NO: 1886864
auguuaaagucgcugcuua

SEQ ID NO: 2431659 - RNA, 19 nt, Artificial Sequence
  Description of Artificial Sequence: Synthetic oligonucleotide
  Antisense strand to SEQ ID NO: 2431658
uaagcagcgacuuuaacau

SEQ ID NO: 2431660 - RNA, 19 nt, Artificial Sequence
  Description of Artificial Sequence: Synthetic oligonucleotide
  Sense strand starting at position 1177 of SEQ ID NO: 1886864
guguuugcuuccguccuga

SEQ ID NO: 2431661 - RNA, 19 nt, Artificial Sequence
  Description of Artificial Sequence: Synthetic oligonucleotide
  Antisense strand to SEQ ID NO: 2431660
ucaggacggaagcaaacac

SEQ ID NO: 2431662 - RNA, 19 nt, Artificial Sequence
  Description of Artificial Sequence: Synthetic oligonucleotide
  Sense strand starting at position 1656 of SEQ ID NO: 1886864
gguuucccaccaggauuaa

SEQ ID NO: 2431663 - RNA, 19 nt, Artificial Sequence
  Description of Artificial Sequence: Synthetic oligonucleotide
  Antisense strand to SEQ ID NO: 2431662
uuaauccuggugggaaacc

SEQ ID NO: 2431664 - RNA, 19 nt, Artificial Sequence
  Description of Artificial Sequence: Synthetic oligonucleotide
  Sense strand starting at position 1850 of SEQ ID NO: 1886864
gaaagaguaucugugacaa

SEQ ID NO: 2431665 - RNA, 19 nt, Artificial Sequence
  Description of Artificial Sequence: Synthetic oligonucleotide
  Antisense strand to SEQ ID NO: 2431664
uugucacagauacucuuuc

SEQ ID NO: 2431666 - RNA, 19 nt, Artificial Sequence
  Description of Artificial Sequence: Synthetic oligonucleotide
  Sense strand starting at position 1852 of SEQ ID NO: 1886864
aagaguaucugugacaaac

SEQ ID NO: 2431667 - RNA, 19 nt, Artificial Sequence
  Description of Artificial Sequence: Synthetic oligonucleotide
  Antisense strand to SEQ ID NO: 2431666
guuugucacagauacucuu

SEQ ID NO: 2431668 - RNA, 19 nt, Artificial Sequence
  Description of Artificial Sequence: Synthetic oligonucleotide
  Sense strand starting at position 1854 of SEQ ID NO: 1886864
gaguaucugugacaaacaa

SEQ ID NO: 2431669 - RNA, 19 nt, Artificial Sequence
  Description of Artificial Sequence: Synthetic oligonucleotide
  Antisense strand to SEQ ID NO: 2431668
uuguuugucacagauacuc

SEQ ID NO: 2431670 - RNA, 19 nt, Artificial Sequence
  Description of Artificial Sequence: Synthetic oligonucleotide
  Sense strand starting at position 2780 of SEQ ID NO: 1886864
gugacauccuguccggcau

SEQ ID NO: 2431671 - RNA, 19 nt, Artificial Sequence
  Description of Artificial Sequence: Synthetic oligonucleotide
  Antisense strand to SEQ ID NO: 2431670
augccggacaggaugucac

SEQ ID NO: 2431672 - RNA, 19 nt, Artificial Sequence
  Description of Artificial Sequence: Synthetic oligonucleotide
  Sense strand starting at position 2855 of SEQ ID NO: 1886864
ccugguggaugacuucuaa

SEQ ID NO: 2431673 - RNA, 19 nt, Artificial Sequence
  Description of Artificial Sequence: Synthetic oligonucleotide
  Antisense strand to SEQ ID NO: 2431672
uuagaagucauccaccagg

SEQ ID NO: 2431674 - RNA, 19 nt, Artificial Sequence
  Description of Artificial Sequence: Synthetic oligonucleotide
  Sense strand starting at position 2859 of SEQ ID NO: 1886864
guggaugacuucuaagcau

SEQ ID NO: 2431675 - RNA, 19 nt, Artificial Sequence
  Description of Artificial Sequence: Synthetic oligonucleotide
  Antisense strand to SEQ ID NO: 2431674
augcuuagaagucauccac

SEQ ID NO: 2431676 - RNA, 19 nt, Artificial Sequence
  Description of Artificial Sequence: Synthetic oligonucleotide
  Sense strand starting at position 2954 of SEQ ID NO: 1886864
gcuuuauggccuuaacuaa

SEQ ID NO: 2431677 - RNA, 19 nt, Artificial Sequence
  Description of Artificial Sequence: Synthetic oligonucleotide
  Antisense strand to SEQ ID NO: 2431676
uuaguuaaggccauaaagc

SEQ ID NO: 2431678 - RNA, 19 nt, Artificial Sequence
  Description of Artificial Sequence: Synthetic oligonucleotide
  Sense strand starting at position 2961 of SEQ ID NO: 1886864
ggccuuaacuaacugaugu

SEQ ID NO: 2431679 - RNA, 19 nt, Artificial Sequence
  Description of Artificial Sequence: Synthetic oligonucleotide
  Antisense strand to SEQ ID NO: 2431678
acaucaguuaguuaaggcc

SEQ ID NO: 2431680 - RNA, 19 nt, Artificial Sequence
  Description of Artificial Sequence: Synthetic oligonucleotide
  Sense strand starting at position 3040 of SEQ ID NO: 1886864
aagacagauuugugggaga

SEQ ID NO: 2431681 - RNA, 19 nt, Artificial Sequence
  Description of Artificial Sequence: Synthetic oligonucleotide
  Antisense strand to SEQ ID NO: 2431680
ucucccacaaaucugucuu

SEQ ID NO: 2431682 - RNA, 19 nt, Artificial Sequence
  Description of Artificial Sequence: Synthetic oligonucleotide
  Sense strand starting at position 3043 of SEQ ID NO: 1886864
acagauuugugggagaaac

SEQ ID NO: 2431683 - RNA, 19 nt, Artificial Sequence
  Description of Artificial Sequence: Synthetic oligonucleotide
  Antisense strand to SEQ ID NO: 2431682
guuucucccacaaaucugu

SEQ ID NO: 2431684 - RNA, 19 nt, Artificial Sequence
  Description of Artificial Sequence: Synthetic oligonucleotide
  Sense strand starting at position 3232 of SEQ ID NO: 1886864
gugcaucuuccacgugagu

SEQ ID NO: 2431685 - RNA, 19 nt, Artificial Sequence
  Description of Artificial Sequence: Synthetic oligonucleotide
  Antisense strand to SEQ ID NO: 2431684
acucacguggaagaugcac

SEQ ID NO: 2431686 - RNA, 19 nt, Artificial Sequence
  Description of Artificial Sequence: Synthetic oligonucleotide
  Sense strand starting at position 3234 of SEQ ID NO: 1886864
gcaucuuccacgugaguau

SEQ ID NO: 2431687 - RNA, 19 nt, Artificial Sequence
  Description of Artificial Sequence: Synthetic oligonucleotide
  Antisense strand to SEQ ID NO: 2431686
auacucacguggaagaugc

SEQ ID NO: 2431688 - RNA, 19 nt, Artificial Sequence
  Description of Artificial Sequence: Synthetic oligonucleotide
  Sense strand starting at position 3235 of SEQ ID NO: 1886864
caucuuccacgugaguaua

SEQ ID NO: 2431689 - RNA, 19 nt, Artificial Sequence
  Description of Artificial Sequence: Synthetic oligonucleotide
  Antisense strand to SEQ ID NO: 2431688
uauacucacguggaagaug

SEQ ID NO: 2431690 - RNA, 19 nt, Artificial Sequence
  Description of Artificial Sequence: Synthetic oligonucleotide
  Sense strand starting at position 3238 of SEQ ID NO: 1886864
cuuccacgugaguauaguu

SEQ ID NO: 2431691 - RNA, 19 nt, Artificial Sequence
  Description of Artificial Sequence: Synthetic oligonucleotide
  Antisense strand to SEQ ID NO: 2431690
aacuauacucacguggaag

SEQ ID NO: 2431692 - RNA, 19 nt, Artificial Sequence
  Description of Artificial Sequence: Synthetic oligonucleotide
  Sense strand starting at position 3343 of SEQ ID NO: 1886864
ggccgagcugugucuacuu

SEQ ID NO: 2431693 - RNA, 19 nt, Artificial Sequence
  Description of Artificial Sequence: Synthetic oligonucleotide
  Antisense strand to SEQ ID NO: 2431692
aaguagacacagcucggcc

SEQ ID NO: 2431694 - RNA, 19 nt, Artificial Sequence
  Description of Artificial Sequence: Synthetic oligonucleotide
  Sense strand starting at position 3369 of SEQ ID NO: 1886864
gcguauuugcuuuagugga

SEQ ID NO: 2431695 - RNA, 19 nt, Artificial Sequence
  Description of Artificial Sequence: Synthetic oligonucleotide
  Antisense strand to SEQ ID NO: 2431694
uccacuaaagcaaauacgc

SEQ ID NO: 2431696 - RNA, 19 nt, Artificial Sequence
  Description of Artificial Sequence: Synthetic oligonucleotide
  Sense strand starting at position 3390 of SEQ ID NO: 1886864
cguccauucguccuaucuu

SEQ ID NO: 2431697 - RNA, 19 nt, Artificial Sequence
  Description of Artificial Sequence: Synthetic oligonucleotide
  Antisense strand to SEQ ID NO: 2431696
aagauaggacgaauggacg

SEQ ID NO: 2431698 - RNA, 19 nt, Artificial Sequence
  Description of Artificial Sequence: Synthetic oligonucleotide
  Sense strand starting at position 3568 of SEQ ID NO: 1886864
cucugagcucuugaagcuu

SEQ ID NO: 2431699 - RNA, 19 nt, Artificial Sequence
  Description of Artificial Sequence: Synthetic oligonucleotide
  Antisense strand to SEQ ID NO: 2431698
aagcuucaagagcucagag

SEQ ID NO: 2431700 - RNA, 19 nt, Artificial Sequence
  Description of Artificial Sequence: Synthetic oligonucleotide
  Sense strand starting at position 3608 of SEQ ID NO: 1886864
acggaaaucaaguggcuua

SEQ ID NO: 2431701 - RNA, 19 nt, Artificial Sequence
  Description of Artificial Sequence: Synthetic oligonucleotide
  Antisense strand to SEQ ID NO: 2431700
uaagccacuugauuuccgu

SEQ ID NO: 2431702 - RNA, 19 nt, Artificial Sequence
  Description of Artificial Sequence: Synthetic oligonucleotide
  Sense strand starting at position 3609 of SEQ ID NO: 1886864
cggaaaucaaguggcuuaa

SEQ ID NO: 2431703 - RNA, 19 nt, Artificial Sequence
  Description of Artificial Sequence: Synthetic oligonucleotide
  Antisense strand to SEQ ID NO: 2431702
uuaagccacuugauuuccg

SEQ ID NO: 2431704 - RNA, 19 nt, Artificial Sequence
  Description of Artificial Sequence: Synthetic oligonucleotide
  Sense strand starting at position 3645 of SEQ ID NO: 1886864
ggaagacuguccugaaagu

SEQ ID NO: 2431705 - RNA, 19 nt, Artificial Sequence
  Description of Artificial Sequence: Synthetic oligonucleotide
  Antisense strand to SEQ ID NO: 2431704
acuuucaggacagucuucc

SEQ ID NO: 2431706 - RNA, 19 nt, Artificial Sequence
  Description of Artificial Sequence: Synthetic oligonucleotide
  Sense strand starting at position 3673 of SEQ ID NO: 1886864
gcugaagaguggugagaau

SEQ ID NO: 2431707 - RNA, 19 nt, Artificial Sequence
  Description of Artificial Sequence: Synthetic oligonucleotide
  Antisense strand to SEQ ID NO: 2431706
auucucaccacucuucagc

SEQ ID NO: 2431708 - RNA, 19 nt, Artificial Sequence
  Description of Artificial Sequence: Synthetic oligonucleotide
  Sense strand starting at position 3753 of SEQ ID NO: 1886864
uguucuaagccuugguaau

SEQ ID NO: 2431709 - RNA, 19 nt, Artificial Sequence
  Description of Artificial Sequence: Synthetic oligonucleotide
  Antisense strand to SEQ ID NO: 2431708
auuaccaaggcuuagaaca

SEQ ID NO: 2431710 - RNA, 19 nt, Artificial Sequence
  Description of Artificial Sequence: Synthetic oligonucleotide
  Sense strand starting at position 3754 of SEQ ID NO: 1886864
guucuaagccuugguaauu

SEQ ID NO: 2431711 - RNA, 19 nt, Artificial Sequence
  Description of Artificial Sequence: Synthetic oligonucleotide
  Antisense strand to SEQ ID NO: 2431710
aauuaccaaggcuuagaac

SEQ ID NO: 2431712 - RNA, 19 nt, Artificial Sequence
  Description of Artificial Sequence: Synthetic oligonucleotide
  Sense strand starting at position 3863 of SEQ ID NO: 1886864
ugauaagcgcuuuacagga

SEQ ID NO: 2431713 - RNA, 19 nt, Artificial Sequence
  Description of Artificial Sequence: Synthetic oligonucleotide
  Antisense strand to SEQ ID NO: 2431712
uccuguaaagcgcuuauca

SEQ ID NO: 2431714 - RNA, 19 nt, Artificial Sequence
  Description of Artificial Sequence: Synthetic oligonucleotide
  Sense strand starting at position 3868 of SEQ ID NO: 1886864
agcgcuuuacaggaaauua

SEQ ID NO: 2431715 - RNA, 19 nt, Artificial Sequence
  Description of Artificial Sequence: Synthetic oligonucleotide
  Antisense strand to SEQ ID NO: 2431714
uaauuuccuguaaagcgcu

SEQ ID NO: 2431716 - RNA, 19 nt, Artificial Sequence
  Description of Artificial Sequence: Synthetic oligonucleotide
  Sense strand starting at position 3947 of SEQ ID NO: 1886864
ggcgaaucaccagaaaucu

SEQ ID NO: 2431717 - RNA, 19 nt, Artificial Sequence
  Description of Artificial Sequence: Synthetic oligonucleotide
  Antisense strand to SEQ ID NO: 2431716
agauuucuggugauucgcc

SEQ ID NO: 2431718 - RNA, 19 nt, Artificial Sequence
  Description of Artificial Sequence: Synthetic oligonucleotide
  Sense strand starting at position 194 of SEQ ID NO: 1886865
agguacuuggcauguggaa

SEQ ID NO: 2431719 - RNA, 19 nt, Artificial Sequence
  Description of Artificial Sequence: Synthetic oligonucleotide
  Antisense strand to SEQ ID NO: 2431718
uuccacaugccaaguaccu

SEQ ID NO: 2431720 - RNA, 19 nt, Artificial Sequence
  Description of Artificial Sequence: Synthetic oligonucleotide
  Sense strand starting at position 409 of SEQ ID NO: 1886865
cugccucaagcauagauua

SEQ ID NO: 2431721 - RNA, 19 nt, Artificial Sequence
  Description of Artificial Sequence: Synthetic oligonucleotide
  Antisense strand to SEQ ID NO: 2431720
uaaucuaugcuugaggcag

SEQ ID NO: 2431722 - RNA, 19 nt, Artificial Sequence
  Description of Artificial Sequence: Synthetic oligonucleotide
  Sense strand starting at position 480 of SEQ ID NO: 1886865
gguggagacggguguuagu

SEQ ID NO: 2431723 - RNA, 19 nt, Artificial Sequence
  Description of Artificial Sequence: Synthetic oligonucleotide
  Antisense strand to SEQ ID NO: 2431722
acuaacacccgucuccacc

SEQ ID NO: 2431724 - RNA, 19 nt, Artificial Sequence
  Description of Artificial Sequence: Synthetic oligonucleotide
  Sense strand starting at position 485 of SEQ ID NO: 1886865
agacggguguuaguggaua

SEQ ID NO: 2431725 - RNA, 19 nt, Artificial Sequence
  Description of Artificial Sequence: Synthetic oligonucleotide
  Antisense strand to SEQ ID NO: 2431724
uauccacuaacacccgucu

SEQ ID NO: 2431726 - RNA, 19 nt, Artificial Sequence
  Description of Artificial Sequence: Synthetic oligonucleotide
  Sense strand starting at position 496 of SEQ ID NO: 1886865
aguggauagcuccagucua

SEQ ID NO: 2431727 - RNA, 19 nt, Artificial Sequence
  Description of Artificial Sequence: Synthetic oligonucleotide
  Antisense strand to SEQ ID NO: 2431726
uagacuggagcuauccacu

SEQ ID NO: 2431728 - RNA, 19 nt, Artificial Sequence
  Description of Artificial Sequence: Synthetic oligonucleotide
  Sense strand starting at position 596 of SEQ ID NO: 1886865
agaauuaucuaggccaaac

SEQ ID NO: 2431729 - RNA, 19 nt, Artificial Sequence
  Description of Artificial Sequence: Synthetic oligonucleotide
  Antisense strand to SEQ ID NO: 2431728
guuuggccuagauaauucu

SEQ ID NO: 2431730 - RNA, 19 nt, Artificial Sequence
  Description of Artificial Sequence: Synthetic oligonucleotide
  Sense strand starting at position 615 of SEQ ID NO: 1886865
ugucaagagcgcuaauguu

SEQ ID NO: 2431731 - RNA, 19 nt, Artificial Sequence
  Description of Artificial Sequence: Synthetic oligonucleotide
  Antisense strand to SEQ ID NO: 2431730
aacauuagcgcucuugaca

SEQ ID NO: 2431732 - RNA, 19 nt, Artificial Sequence
  Description of Artificial Sequence: Synthetic oligonucleotide
  Sense strand starting at position 621 of SEQ ID NO: 1886865
gagcgcuaauguugagaaa

SEQ ID NO: 2431733 - RNA, 19 nt, Artificial Sequence
  Description of Artificial Sequence: Synthetic oligonucleotide
  Antisense strand to SEQ ID NO: 2431732
uuucucaacauuagcgcuc

SEQ ID NO: 2431734 - RNA, 19 nt, Artificial Sequence
  Description of Artificial Sequence: Synthetic oligonucleotide
  Sense strand starting at position 652 of SEQ ID NO: 1886865
gcuuuccuguccuuaaaug

SEQ ID NO: 2431735 - RNA, 19 nt, Artificial Sequence
  Description of Artificial Sequence: Synthetic oligonucleotide
  Antisense strand to SEQ ID NO: 2431734
cauuuaaggacaggaaagc

SEQ ID NO: 2431736 - RNA, 19 nt, Artificial Sequence
  Description of Artificial Sequence: Synthetic oligonucleotide
  Sense strand starting at position 666 of SEQ ID NO: 1886865
aaaugcaguuaugugaaga

SEQ ID NO: 2431737 - RNA, 19 nt, Artificial Sequence
  Description of Artificial Sequence: Synthetic oligonucleotide
  Antisense strand to SEQ ID NO: 2431736
ucuucacauaacugcauuu

SEQ ID NO: 2431738 - RNA, 19 nt, Artificial Sequence
  Description of Artificial Sequence: Synthetic oligonucleotide
  Sense strand starting at position 716 of SEQ ID NO: 1886865
ccuggcacucacugugauu

SEQ ID NO: 2431739 - RNA, 19 nt, Artificial Sequence
  Description of Artificial Sequence: Synthetic oligonucleotide
  Antisense strand to SEQ ID NO: 2431738
aaucacagugagugccagg

SEQ ID NO: 2431740 - RNA, 19 nt, Artificial Sequence
  Description of Artificial Sequence: Synthetic oligonucleotide
  Sense strand starting at position 718 of SEQ ID NO: 1886865
uggcacucacugugauuga

SEQ ID NO: 2431741 - RNA, 19 nt, Artificial Sequence
  Description of Artificial Sequence: Synthetic oligonucleotide
  Antisense strand to SEQ ID NO: 2431740
ucaaucacagugagugcca

SEQ ID NO: 2431742 - RNA, 19 nt, Artificial Sequence
  Description of Artificial Sequence: Synthetic oligonucleotide
  Sense strand starting at position 721 of SEQ ID NO: 1886865
cacucacugugauugagaa

SEQ ID NO: 2431743 - RNA, 19 nt, Artificial Sequence
  Description of Artificial Sequence: Synthetic oligonucleotide
  Antisense strand to SEQ ID NO: 2431742
uucucaaucacagugagug

SEQ ID NO: 2431744 - RNA, 19 nt, Artificial Sequence
  Description of Artificial Sequence: Synthetic oligonucleotide
  Sense strand starting at position 725 of SEQ ID NO: 1886865
cacugugauugagaacaca

SEQ ID NO: 2431745 - RNA, 19 nt, Artificial Sequence
  Description of Artificial Sequence: Synthetic oligonucleotide
  Antisense strand to SEQ ID NO: 2431744
uguguucucaaucacagug

SEQ ID NO: 2431746 - RNA, 19 nt, Artificial Sequence
  Description of Artificial Sequence: Synthetic oligonucleotide
  Sense strand starting at position 772 of SEQ ID NO: 1886865
cggcuaagcugaucuacuu

SEQ ID NO: 2431747 - RNA, 19 nt, Artificial Sequence
  Description of Artificial Sequence: Synthetic oligonucleotide
  Antisense strand to SEQ ID NO: 2431746
aaguagaucagcuuagccg

SEQ ID NO: 2431748 - RNA, 19 nt, Artificial Sequence
  Description of Artificial Sequence: Synthetic oligonucleotide
  Sense strand starting at position 877 of SEQ ID NO: 1886865
gccuuagcgcuuuacaaau

SEQ ID NO: 2431749 - RNA, 19 nt, Artificial Sequence
  Description of Artificial Sequence: Synthetic oligonucleotide
  Antisense strand to SEQ ID NO: 2431748
auuuguaaagcgcuaaggc

SEQ ID NO: 2431750 - RNA, 19 nt, Artificial Sequence
  Description of Artificial Sequence: Synthetic oligonucleotide
  Sense strand starting at position 883 of SEQ ID NO: 1886865
gcgcuuuacaaaugaacgu

SEQ ID NO: 2431751 - RNA, 19 nt, Artificial Sequence
  Description of Artificial Sequence: Synthetic oligonucleotide
  Antisense strand to SEQ ID NO: 2431750
acguucauuuguaaagcgc

SEQ ID NO: 2431752 - RNA, 19 nt, Artificial Sequence
  Description of Artificial Sequence: Synthetic oligonucleotide
  Sense strand starting at position 933 of SEQ ID NO: 1886865
uauuaagugguaugaauuc

SEQ ID NO: 2431753 - RNA, 19 nt, Artificial Sequence
  Description of Artificial Sequence: Synthetic oligonucleotide
  Antisense strand to SEQ ID NO: 2431752
gaauucauaccacuuaaua

SEQ ID NO: 2431754 - RNA, 19 nt, Artificial Sequence
  Description of Artificial Sequence: Synthetic oligonucleotide
  Sense strand starting at position 1068 of SEQ ID NO: 1886865
ggcuaacccuuguaauccu

SEQ ID NO: 2431755 - RNA, 19 nt, Artificial Sequence
  Description of Artificial Sequence: Synthetic oligonucleotide
  Antisense strand to SEQ ID NO: 2431754
aggauuacaaggguuagcc

SEQ ID NO: 2431756 - RNA, 19 nt, Artificial Sequence
  Description of Artificial Sequence: Synthetic oligonucleotide
  Sense strand starting at position 1368 of SEQ ID NO: 1886865
ggcuuaggguagggagaau

SEQ ID NO: 2431757 - RNA, 19 nt, Artificial Sequence
  Description of Artificial Sequence: Synthetic oligonucleotide
  Antisense strand to SEQ ID NO: 2431756
auucucccuacccuaagcc

SEQ ID NO: 2431758 - RNA, 19 nt, Artificial Sequence
  Description of Artificial Sequence: Synthetic oligonucleotide
  Sense strand starting at position 1416 of SEQ ID NO: 1886865
ggacaugacucugaacucu

SEQ ID NO: 2431759 - RNA, 19 nt, Artificial Sequence
  Description of Artificial Sequence: Synthetic oligonucleotide
  Antisense strand to SEQ ID NO: 2431758
agaguucagagucaugucc

SEQ ID NO: 2431760 - RNA, 19 nt, Artificial Sequence
  Description of Artificial Sequence: Synthetic oligonucleotide
  Sense strand starting at position 1447 of SEQ ID NO: 1886865
agagguguguggcaagaca

SEQ ID NO: 2431761 - RNA, 19 nt, Artificial Sequence
  Description of Artificial Sequence: Synthetic oligonucleotide
  Antisense strand to SEQ ID NO: 2431760
ugucuugccacacaccucu

SEQ ID NO: 2431762 - RNA, 19 nt, Artificial Sequence
  Description of Artificial Sequence: Synthetic oligonucleotide
  Sense strand starting at position 1486 of SEQ ID NO: 1886865
ggugacacguccuccauau

SEQ ID NO: 2431763 - RNA, 19 nt, Artificial Sequence
  Description of Artificial Sequence: Synthetic oligonucleotide
  Antisense strand to SEQ ID NO: 2431762
auauggaggacgugucacc

SEQ ID NO: 2431764 - RNA, 19 nt, Artificial Sequence
  Description of Artificial Sequence: Synthetic oligonucleotide
  Sense strand starting at position 1624 of SEQ ID NO: 1886865
cucggacuuucccaaaucu

SEQ ID NO: 2431765 - RNA, 19 nt, Artificial Sequence
  Description of Artificial Sequence: Synthetic oligonucleotide
  Antisense strand to SEQ ID NO: 2431764
agauuugggaaaguccgag

SEQ ID NO: 2431766 - RNA, 19 nt, Artificial Sequence
  Description of Artificial Sequence: Synthetic oligonucleotide
  Sense strand starting at position 1653 of SEQ ID NO: 1886865
ccuccauugcccuaaggau

SEQ ID NO: 2431767 - RNA, 19 nt, Artificial Sequence
  Description of Artificial Sequence: Synthetic oligonucleotide
  Antisense strand to SEQ ID NO: 2431766
auccuuagggcaauggagg

SEQ ID NO: 2431768 - RNA, 19 nt, Artificial Sequence
  Description of Artificial Sequence: Synthetic oligonucleotide
  Sense strand starting at position 1839 of SEQ ID NO: 1886865
uggagacgauuccucacua

SEQ ID NO: 2431769 - RNA, 19 nt, Artificial Sequence
  Description of Artificial Sequence: Synthetic oligonucleotide
  Antisense strand to SEQ ID NO: 2431768
uagugaggaaucgucucca

SEQ ID NO: 2431770 - RNA, 19 nt, Artificial Sequence
  Description of Artificial Sequence: Synthetic oligonucleotide
  Sense strand starting at position 2055 of SEQ ID NO: 1886865
guuggcguuacuugcagau

SEQ ID NO: 2431771 - RNA, 19 nt, Artificial Sequence
  Description of Artificial Sequence: Synthetic oligonucleotide
  Antisense strand to SEQ ID NO: 2431770
aucugcaaguaacgccaac

SEQ ID NO: 2431772 - RNA, 19 nt, Artificial Sequence
  Description of Artificial Sequence: Synthetic oligonucleotide
  Sense strand starting at position 2057 of SEQ ID NO: 1886865
uggcguuacuugcagauuu

SEQ ID NO: 2431773 - RNA, 19 nt, Artificial Sequence
  Description of Artificial Sequence: Synthetic oligonucleotide
  Antisense strand to SEQ ID NO: 2431772
aaaucugcaaguaacgcca

SEQ ID NO: 2431774 - RNA, 19 nt, Artificial Sequence
  Description of Artificial Sequence: Synthetic oligonucleotide
  Sense strand starting at position 2159 of SEQ ID NO: 1886865
cccagacucucuguugaaa

SEQ ID NO: 2431775 - RNA, 19 nt, Artificial Sequence
  Description of Artificial Sequence: Synthetic oligonucleotide
  Antisense strand to SEQ ID NO: 2431774
uuucaacagagagucuggg

SEQ ID NO: 2431776 - RNA, 19 nt, Artificial Sequence
  Description of Artificial Sequence: Synthetic oligonucleotide
  Sense strand starting at position 2250 of SEQ ID NO: 1886865
gggcauucggcucaaagcu

SEQ ID NO: 2431777 - RNA, 19 nt, Artificial Sequence
  Description of Artificial Sequence: Synthetic oligonucleotide
  Antisense strand to SEQ ID NO: 2431776
agcuuugagccgaaugccc

SEQ ID NO: 2431778 - RNA, 19 nt, Artificial Sequence
  Description of Artificial Sequence: Synthetic oligonucleotide
  Sense strand starting at position 2269 of SEQ ID NO: 1886865
ccacguagucucugcuaga

SEQ ID NO: 2431779 - RNA, 19 nt, Artificial Sequence
  Description of Artificial Sequence: Synthetic oligonucleotide
  Antisense strand to SEQ ID NO: 2431778
ucuagcagagacuacgugg

SEQ ID NO: 2431780 - RNA, 19 nt, Artificial Sequence
  Description of Artificial Sequence: Synthetic oligonucleotide
  Sense strand starting at position 2270 of SEQ ID NO: 1886865
cacguagucucugcuagac

SEQ ID NO: 2431781 - RNA, 19 nt, Artificial Sequence
  Description of Artificial Sequence: Synthetic oligonucleotide
  Antisense strand to SEQ ID NO: 2431780
gucuagcagagacuacgug

SEQ ID NO: 2431782 - RNA, 19 nt, Artificial Sequence
  Description of Artificial Sequence: Synthetic oligonucleotide
  Sense strand starting at position 2462 of SEQ ID NO: 1886865
ucagcuuccguuugccaaa

SEQ ID NO: 2431783 - RNA, 19 nt, Artificial Sequence
  Description of Artificial Sequence: Synthetic oligonucleotide
  Antisense strand to SEQ ID NO: 2431782
uuuggcaaacggaagcuga

SEQ ID NO: 2431784 - RNA, 19 nt, Artificial Sequence
  Description of Artificial Sequence: Synthetic oligonucleotide
  Sense strand starting at position 2465 of SEQ ID NO: 1886865
gcuuccguuugccaaacuu

SEQ ID NO: 2431785 - RNA, 19 nt, Artificial Sequence
  Description of Artificial Sequence: Synthetic oligonucleotide
  Antisense strand to SEQ ID NO: 2431784
aaguuuggcaaacggaagc

SEQ ID NO: 2431786 - RNA, 19 nt, Artificial Sequence
  Description of Artificial Sequence: Synthetic oligonucleotide
  Sense strand starting at position 3310 of SEQ ID NO: 1886865
uuguguuuguaguaaagau

SEQ ID NO: 2431787 - RNA, 19 nt, Artificial Sequence
  Description of Artificial Sequence: Synthetic oligonucleotide
  Antisense strand to SEQ ID NO: 2431786
aucuuuacuacaaacacaa

SEQ ID NO: 2431788 - RNA, 19 nt, Artificial Sequence
  Description of Artificial Sequence: Synthetic oligonucleotide
  Sense strand starting at position 3314 of SEQ ID NO: 1886865
guuuguaguaaagauggga

SEQ ID NO: 2431789 - RNA, 19 nt, Artificial Sequence
  Description of Artificial Sequence: Synthetic oligonucleotide
  Antisense strand to SEQ ID NO: 2431788
ucccaucuuuacuacaaac

SEQ ID NO: 2431790 - RNA, 19 nt, Artificial Sequence
  Description of Artificial Sequence: Synthetic oligonucleotide
  Sense strand starting at position 3471 of SEQ ID NO: 1886865
auuguuugcuacuaauaga

SEQ ID NO: 2431791 - RNA, 19 nt, Artificial Sequence
  Description of Artificial Sequence: Synthetic oligonucleotide
  Antisense strand to SEQ ID NO: 2431790
ucuauuaguagcaaacaau

SEQ ID NO: 2431792 - RNA, 19 nt, Artificial Sequence
  Description of Artificial Sequence: Synthetic oligonucleotide
  Sense strand starting at position 3474 of SEQ ID NO: 1886865
guuugcuacuaauagauaa

SEQ ID NO: 2431793 - RNA, 19 nt, Artificial Sequence
  Description of Artificial Sequence: Synthetic oligonucleotide
  Antisense strand to SEQ ID NO: 2431792
uuaucuauuaguagcaaac

SEQ ID NO: 2431794 - RNA, 19 nt, Artificial Sequence
  Description of Artificial Sequence: Synthetic oligonucleotide
  Sense strand starting at position 3502 of SEQ ID NO: 1886865
uuuguauaguaaccuucua

SEQ ID NO: 2431795 - RNA, 19 nt, Artificial Sequence
  Description of Artificial Sequence: Synthetic oligonucleotide
  Antisense strand to SEQ ID NO: 2431794
uagaagguuacuauacaaa

SEQ ID NO: 2431796 - RNA, 19 nt, Artificial Sequence
  Description of Artificial Sequence: Synthetic oligonucleotide
  Sense strand starting at position 3522 of SEQ ID NO: 1886865
uuuacaggcuugcuaaauu

SEQ ID NO: 2431797 - RNA, 19 nt, Artificial Sequence
  Description of Artificial Sequence: Synthetic oligonucleotide
  Antisense strand to SEQ ID NO: 2431796
aauuuagcaagccuguaaa

SEQ ID NO: 2431798 - RNA, 19 nt, Artificial Sequence
  Description of Artificial Sequence: Synthetic oligonucleotide
  Sense strand starting at position 204 of SEQ ID NO: 1886866
uuacuacaaggcugaaaua

SEQ ID NO: 2431799 - RNA, 19 nt, Artificial Sequence
  Description of Artificial Sequence: Synthetic oligonucleotide
  Antisense strand to SEQ ID NO: 2431798
uauuucagccuuguaguaa

SEQ ID NO: 2431800 - RNA, 19 nt, Artificial Sequence
  Description of Artificial Sequence: Synthetic oligonucleotide
  Sense strand starting at position 267 of SEQ ID NO: 1886866
ucuugaaguucuccagaga

SEQ ID NO: 2431801 - RNA, 19 nt, Artificial Sequence
  Description of Artificial Sequence: Synthetic oligonucleotide
  Antisense strand to SEQ ID NO: 2431800
ucucuggagaacuucaaga

SEQ ID NO: 2431802 - RNA, 19 nt, Artificial Sequence
  Description of Artificial Sequence: Synthetic oligonucleotide
  Sense strand starting at position 342 of SEQ ID NO: 1886866
ugaaguggauuacuguuua

SEQ ID NO: 2431803 - RNA, 19 nt, Artificial Sequence
  Description of Artificial Sequence: Synthetic oligonucleotide
  Antisense strand to SEQ ID NO: 2431802
uaaacaguaauccacuuca

SEQ ID NO: 2431804 - RNA, 19 nt, Artificial Sequence
  Description of Artificial Sequence: Synthetic oligonucleotide
  Sense strand starting at position 375 of SEQ ID NO: 1886866
gauggcauaucuguuaaca

SEQ ID NO: 2431805 - RNA, 19 nt, Artificial Sequence
  Description of Artificial Sequence: Synthetic oligonucleotide
  Antisense strand to SEQ ID NO: 2431804
uguuaacagauaugccauc

SEQ ID NO: 2431806 - RNA, 19 nt, Artificial Sequence
  Description of Artificial Sequence: Synthetic oligonucleotide
  Sense strand starting at position 713 of SEQ ID NO: 1886866
cggccaacuagaugauauu

SEQ ID NO: 2431807 - RNA, 19 nt, Artificial Sequence
  Description of Artificial Sequence: Synthetic oligonucleotide
  Antisense strand to SEQ ID NO: 2431806
aauaucaucuaguuggccg

SEQ ID NO: 2431808 - RNA, 19 nt, Artificial Sequence
  Description of Artificial Sequence: Synthetic oligonucleotide
  Sense strand starting at position 751 of SEQ ID NO: 1886866
agggaagugccaugugcua

SEQ ID NO: 2431809 - RNA, 19 nt, Artificial Sequence
  Description of Artificial Sequence: Synthetic oligonucleotide
  Antisense strand to SEQ ID NO: 2431808
uagcacauggcacuucccu

SEQ ID NO: 2431810 - RNA, 19 nt, Artificial Sequence
  Description of Artificial Sequence: Synthetic oligonucleotide
  Sense strand starting at position 753 of SEQ ID NO: 1886866
ggaagugccaugugcuaaa

SEQ ID NO: 2431811 - RNA, 19 nt, Artificial Sequence
  Description of Artificial Sequence: Synthetic oligonucleotide
  Antisense strand to SEQ ID NO: 2431810
uuuagcacauggcacuucc

SEQ ID NO: 2431812 - RNA, 19 nt, Artificial Sequence
  Description of Artificial Sequence: Synthetic oligonucleotide
  Sense strand starting at position 787 of SEQ ID NO: 1886866
gguagcaguguuuaacuua

SEQ ID NO: 2431813 - RNA, 19 nt, Artificial Sequence
  Description of Artificial Sequence: Synthetic oligonucleotide
  Antisense strand to SEQ ID NO: 2431812
uaaguuaaacacugcuacc

SEQ ID NO: 2431814 - RNA, 19 nt, Artificial Sequence
  Description of Artificial Sequence: Synthetic oligonucleotide
  Sense strand starting at position 816 of SEQ ID NO: 1886866
uguaaacaacuaugaaugu

SEQ ID NO: 2431815 - RNA, 19 nt, Artificial Sequence
  Description of Artificial Sequence: Synthetic oligonucleotide
  Antisense strand to SEQ ID NO: 2431814
acauucauaguuguuuaca

SEQ ID NO: 2431816 - RNA, 19 nt, Artificial Sequence
  Description of Artificial Sequence: Synthetic oligonucleotide
  Sense strand starting at position 871 of SEQ ID NO: 1886866
cuccacaucugucuguuaa

SEQ ID NO: 2431817 - RNA, 19 nt, Artificial Sequence
  Description of Artificial Sequence: Synthetic oligonucleotide
  Antisense strand to SEQ ID NO: 2431816
uuaacagacagauguggag

SEQ ID NO: 2431818 - RNA, 19 nt, Artificial Sequence
  Description of Artificial Sequence: Synthetic oligonucleotide
  Sense strand starting at position 872 of SEQ ID NO: 1886866
uccacaucugucuguuaau

SEQ ID NO: 2431819 - RNA, 19 nt, Artificial Sequence
  Description of Artificial Sequence: Synthetic oligonucleotide
  Antisense strand to SEQ ID NO: 2431818
auuaacagacagaugugga

SEQ ID NO: 2431820 - RNA, 19 nt, Artificial Sequence
  Description of Artificial Sequence: Synthetic oligonucleotide
  Sense strand starting at position 873 of SEQ ID NO: 1886866
ccacaucugucuguuaauc

SEQ ID NO: 2431821 - RNA, 19 nt, Artificial Sequence
  Description of Artificial Sequence: Synthetic oligonucleotide
  Antisense strand to SEQ ID NO: 2431820
gauuaacagacagaugugg

SEQ ID NO: 2431822 - RNA, 19 nt, Artificial Sequence
  Description of Artificial Sequence: Synthetic oligonucleotide
  Sense strand starting at position 1175 of SEQ ID NO: 1886866
uucggucuucuccaagaga

SEQ ID NO: 2431823 - RNA, 19 nt, Artificial Sequence
  Description of Artificial Sequence: Synthetic oligonucleotide
  Antisense strand to SEQ ID NO: 2431822
ucucuuggagaagaccgaa

SEQ ID NO: 2431824 - RNA, 19 nt, Artificial Sequence
  Description of Artificial Sequence: Synthetic oligonucleotide
  Sense strand starting at position 1293 of SEQ ID NO: 1886866
aggcaaucgucuccugaga

SEQ ID NO: 2431825 - RNA, 19 nt, Artificial Sequence
  Description of Artificial Sequence: Synthetic oligonucleotide
  Antisense strand to SEQ ID NO: 2431824
ucucaggagacgauugccu

SEQ ID NO: 2431826 - RNA, 19 nt, Artificial Sequence
  Description of Artificial Sequence: Synthetic oligonucleotide
  Sense strand starting at position 1999 of SEQ ID NO: 1886866
uacgguguccuuggaagga

SEQ ID NO: 2431827 - RNA, 19 nt, Artificial Sequence
  Description of Artificial Sequence: Synthetic oligonucleotide
  Antisense strand to SEQ ID NO: 2431826
uccuuccaaggacaccgua

SEQ ID NO: 2431828 - RNA, 19 nt, Artificial Sequence
  Description of Artificial Sequence: Synthetic oligonucleotide
  Sense strand starting at position 2001 of SEQ ID NO: 1886866
cgguguccuuggaaggaca

SEQ ID NO: 2431829 - RNA, 19 nt, Artificial Sequence
  Description of Artificial Sequence: Synthetic oligonucleotide
  Antisense strand to SEQ ID NO: 2431828
uguccuuccaaggacaccg

SEQ ID NO: 2431830 - RNA, 19 nt, Artificial Sequence
  Description of Artificial Sequence: Synthetic oligonucleotide
  Sense strand starting at position 2003 of SEQ ID NO: 1886866
guguccuuggaaggacaau

SEQ ID NO: 2431831 - RNA, 19 nt, Artificial Sequence
  Description of Artificial Sequence: Synthetic oligonucleotide
  Antisense strand to SEQ ID NO: 2431830
auuguccuuccaaggacac

SEQ ID NO: 2431832 - RNA, 19 nt, Artificial Sequence
  Description of Artificial Sequence: Synthetic oligonucleotide
  Sense strand starting at position 2023 of SEQ ID NO: 1886866
uuaguuucgcgauuccucu

SEQ ID NO: 2431833 - RNA, 19 nt, Artificial Sequence
  Description of Artificial Sequence: Synthetic oligonucleotide
  Antisense strand to SEQ ID NO: 2431832
agaggaaucgcgaaacuaa

SEQ ID NO: 2431834 - RNA, 19 nt, Artificial Sequence
  Description of Artificial Sequence: Synthetic oligonucleotide
  Sense strand starting at position 2029 of SEQ ID NO: 1886866
ucgcgauuccucuuuccgu

SEQ ID NO: 2431835 - RNA, 19 nt, Artificial Sequence
  Description of Artificial Sequence: Synthetic oligonucleotide
  Antisense strand to SEQ ID NO: 2431834
acggaaagaggaaucgcga

SEQ ID NO: 2431836 - RNA, 19 nt, Artificial Sequence
  Description of Artificial Sequence: Synthetic oligonucleotide
  Sense strand starting at position 2189 of SEQ ID NO: 1886866
uuccuagaaguuugaauac

SEQ ID NO: 2431837 - RNA, 19 nt, Artificial Sequence
  Description of Artificial Sequence: Synthetic oligonucleotide
  Antisense strand to SEQ ID NO: 2431836
guauucaaacuucuaggaa

SEQ ID NO: 2431838 - RNA, 19 nt, Artificial Sequence
  Description of Artificial Sequence: Synthetic oligonucleotide
  Sense strand starting at position 2225 of SEQ ID NO: 1886866
cuaacacuugcagagcauu

SEQ ID NO: 2431839 - RNA, 19 nt, Artificial Sequence
  Description of Artificial Sequence: Synthetic oligonucleotide
  Antisense strand to SEQ ID NO: 2431838
aaugcucugcaaguguuag

SEQ ID NO: 2431840 - RNA, 19 nt, Artificial Sequence
  Description of Artificial Sequence: Synthetic oligonucleotide
  Sense strand starting at position 2392 of SEQ ID NO: 1886866
uuagacugcuaauuagaga

SEQ ID NO: 2431841 - RNA, 19 nt, Artificial Sequence
  Description of Artificial Sequence: Synthetic oligonucleotide
  Antisense strand to SEQ ID NO: 2431840
ucucuaauuagcagucuaa

SEQ ID NO: 2431842 - RNA, 19 nt, Artificial Sequence
  Description of Artificial Sequence: Synthetic oligonucleotide
  Sense strand starting at position 2470 of SEQ ID NO: 1886866
uguacuuauccaggucaac

SEQ ID NO: 2431843 - RNA, 19 nt, Artificial Sequence
  Description of Artificial Sequence: Synthetic oligonucleotide
  Antisense strand to SEQ ID NO: 2431842
guugaccuggauaaguaca

SEQ ID NO: 2431844 - RNA, 19 nt, Artificial Sequence
  Description of Artificial Sequence: Synthetic oligonucleotide
  Sense strand starting at position 2710 of SEQ ID NO: 1886866
cuuaucucccuaggagauc

SEQ ID NO: 2431845 - RNA, 19 nt, Artificial Sequence
  Description of Artificial Sequence: Synthetic oligonucleotide
  Antisense strand to SEQ ID NO: 2431844
gaucuccuagggagauaag

SEQ ID NO: 2431846 - RNA, 19 nt, Artificial Sequence
  Description of Artificial Sequence: Synthetic oligonucleotide
  Sense strand starting at position 2792 of SEQ ID NO: 1886866
ccugucugaucuccagacu

SEQ ID NO: 2431847 - RNA, 19 nt, Artificial Sequence
  Description of Artificial Sequence: Synthetic oligonucleotide
  Antisense strand to SEQ ID NO: 2431846
agucuggagaucagacagg

SEQ ID NO: 2431848 - RNA, 19 nt, Artificial Sequence
  Description of Artificial Sequence: Synthetic oligonucleotide
  Sense strand starting at position 2795 of SEQ ID NO: 1886866
gucugaucuccagacucac

SEQ ID NO: 2431849 - RNA, 19 nt, Artificial Sequence
  Description of Artificial Sequence: Synthetic oligonucleotide
  Antisense strand to SEQ ID NO: 2431848
gugagucuggagaucagac

SEQ ID NO: 2431850 - RNA, 19 nt, Artificial Sequence
  Description of Artificial Sequence: Synthetic oligonucleotide
  Sense strand starting at position 2956 of SEQ ID NO: 1886866
uguuacuguuuacucaaau

SEQ ID NO: 2431851 - RNA, 19 nt, Artificial Sequence
  Description of Artificial Sequence: Synthetic oligonucleotide
  Antisense strand to SEQ ID NO: 2431850
auuugaguaaacaguaaca

SEQ ID NO: 2431852 - RNA, 19 nt, Artificial Sequence
  Description of Artificial Sequence: Synthetic oligonucleotide
  Sense strand starting at position 2957 of SEQ ID NO: 1886866
guuacuguuuacucaaaug

SEQ ID NO: 2431853 - RNA, 19 nt, Artificial Sequence
  Description of Artificial Sequence: Synthetic oligonucleotide
  Antisense strand to SEQ ID NO: 2431852
cauuugaguaaacaguaac

SEQ ID NO: 2431854 - RNA, 19 nt, Artificial Sequence
  Description of Artificial Sequence: Synthetic oligonucleotide
  Sense strand starting at position 3222 of SEQ ID NO: 1886866
cagcaaccagagugauagu

SEQ ID NO: 2431855 - RNA, 19 nt, Artificial Sequence
  Description of Artificial Sequence: Synthetic oligonucleotide
  Antisense strand to SEQ ID NO: 2431854
acuaucacucugguugcug

SEQ ID NO: 2431856 - RNA, 19 nt, Artificial Sequence
  Description of Artificial Sequence: Synthetic oligonucleotide
  Sense strand starting at position 3570 of SEQ ID NO: 1886866
gguagagguauauacagua

SEQ ID NO: 2431857 - RNA, 19 nt, Artificial Sequence
  Description of Artificial Sequence: Synthetic oligonucleotide
  Antisense strand to SEQ ID NO: 2431856
uacuguauauaccucuacc

SEQ ID NO: 2431858 - RNA, 19 nt, Artificial Sequence
  Description of Artificial Sequence: Synthetic oligonucleotide
  Sense strand starting at position 3600 of SEQ ID NO: 1886866
uaucucuuccagugggacu

SEQ ID NO: 2431859 - RNA, 19 nt, Artificial Sequence
  Description of Artificial Sequence: Synthetic oligonucleotide
  Antisense strand to SEQ ID NO: 2431858
agucccacuggaagagaua

SEQ ID NO: 2431860 - RNA, 19 nt, Artificial Sequence
  Description of Artificial Sequence: Synthetic oligonucleotide
  Sense strand starting at position 3638 of SEQ ID NO: 1886866
acaucucagcccugaugaa

SEQ ID NO: 2431861 - RNA, 19 nt, Artificial Sequence
  Description of Artificial Sequence: Synthetic oligonucleotide
  Antisense strand to SEQ ID NO: 2431860
uucaucagggcugagaugu

SEQ ID NO: 2431862 - RNA, 19 nt, Artificial Sequence
  Description of Artificial Sequence: Synthetic oligonucleotide
  Sense strand starting at position 3658 of SEQ ID NO: 1886866
gaacgaagccuuggccaua

SEQ ID NO: 2431863 - RNA, 19 nt, Artificial Sequence
  Description of Artificial Sequence: Synthetic oligonucleotide
  Antisense strand to SEQ ID NO: 2431862
uauggccaaggcuucguuc

SEQ ID NO: 2431864 - RNA, 19 nt, Artificial Sequence
  Description of Artificial Sequence: Synthetic oligonucleotide
  Sense strand starting at position 3680 of SEQ ID NO: 1886866
cuugcuuuggcucaugaaa

SEQ ID NO: 2431865 - RNA, 19 nt, Artificial Sequence
  Description of Artificial Sequence: Synthetic oligonucleotide
  Antisense strand to SEQ ID NO: 2431864
uuucaugagccaaagcaag

SEQ ID NO: 2431866 - RNA, 19 nt, Artificial Sequence
  Description of Artificial Sequence: Synthetic oligonucleotide
  Sense strand starting at position 3794 of SEQ ID NO: 1886866
aaagguaucugccucagca

SEQ ID NO: 2431867 - RNA, 19 nt, Artificial Sequence
  Description of Artificial Sequence: Synthetic oligonucleotide
  Antisense strand to SEQ ID NO: 2431866
ugcugaggcagauaccuuu

SEQ ID NO: 2431868 - RNA, 19 nt, Artificial Sequence
  Description of Artificial Sequence: Synthetic oligonucleotide
  Sense strand starting at position 3796 of SEQ ID NO: 1886866
agguaucugccucagcauu

SEQ ID NO: 2431869 - RNA, 19 nt, Artificial Sequence
  Description of Artificial Sequence: Synthetic oligonucleotide
  Antisense strand to SEQ ID NO: 2431868
aaugcugaggcagauaccu

SEQ ID NO: 2431870 - RNA, 19 nt, Artificial Sequence
  Description of Artificial Sequence: Synthetic oligonucleotide
  Sense strand starting at position 3807 of SEQ ID NO: 1886866
ucagcauuguuugcaauac

SEQ ID NO: 2431871 - RNA, 19 nt, Artificial Sequence
  Description of Artificial Sequence: Synthetic oligonucleotide
  Antisense strand to SEQ ID NO: 2431870
guauugcaaacaaugcuga

SEQ ID NO: 2431872 - RNA, 19 nt, Artificial Sequence
  Description of Artificial Sequence: Synthetic oligonucleotide
  Sense strand starting at position 3862 of SEQ ID NO: 1886866
cgggcaguagguuaaauaa

SEQ ID NO: 2431873 - RNA, 19 nt, Artificial Sequence
  Description of Artificial Sequence: Synthetic oligonucleotide
  Antisense strand to SEQ ID NO: 2431872
uuauuuaaccuacugcccg

SEQ ID NO: 2431874 - RNA, 19 nt, Artificial Sequence
  Description of Artificial Sequence: Synthetic oligonucleotide
  Sense strand starting at position 3878 of SEQ ID NO: 1886866
uaaauuaugguguagucau

SEQ ID NO: 2431875 - RNA, 19 nt, Artificial Sequence
  Description of Artificial Sequence: Synthetic oligonucleotide
  Antisense strand to SEQ ID NO: 2431874
augacuacaccauaauuua

SEQ ID NO: 2431876 - RNA, 19 nt, Artificial Sequence
  Description of Artificial Sequence: Synthetic oligonucleotide
  Sense strand starting at position 3889 of SEQ ID NO: 1886866
guagucauacugugcaaca

SEQ ID NO: 2431877 - RNA, 19 nt, Artificial Sequence
  Description of Artificial Sequence: Synthetic oligonucleotide
  Antisense strand to SEQ ID NO: 2431876
uguugcacaguaugacuac

SEQ ID NO: 2431878 - RNA, 19 nt, Artificial Sequence
  Description of Artificial Sequence: Synthetic oligonucleotide
  Sense strand starting at position 2130 of SEQ ID NO: 1886867
ccgcguucgaguucucgga

SEQ ID NO: 2431879 - RNA, 19 nt, Artificial Sequence
  Description of Artificial Sequence: Synthetic oligonucleotide
  Antisense strand to SEQ ID NO: 2431878
uccgagaacucgaacgcgg

SEQ ID NO: 2431880 - RNA, 19 nt, Artificial Sequence
  Description of Artificial Sequence: Synthetic oligonucleotide
  Sense strand starting at position 2477 of SEQ ID NO: 1886867
gcgcacgugcuuugggaaa

SEQ ID NO: 2431881 - RNA, 19 nt, Artificial Sequence
  Description of Artificial Sequence: Synthetic oligonucleotide
  Antisense strand to SEQ ID NO: 2431880
uuucccaaagcacgugcgc

SEQ ID NO: 2431882 - RNA, 19 nt, Artificial Sequence
  Description of Artificial Sequence: Synthetic oligonucleotide
  Sense strand starting at position 2553 of SEQ ID NO: 1886867
ugcguucuugagcaagugu

SEQ ID NO: 2431883 - RNA, 19 nt, Artificial Sequence
  Description of Artificial Sequence: Synthetic oligonucleotide
  Antisense strand to SEQ ID NO: 2431882
acacuugcucaagaacgca

SEQ ID NO: 2431884 - RNA, 19 nt, Artificial Sequence
  Description of Artificial Sequence: Synthetic oligonucleotide
  Sense strand starting at position 2562 of SEQ ID NO: 1886867
gagcaagugucuuaacgcu

SEQ ID NO: 2431885 - RNA, 19 nt, Artificial Sequence
  Description of Artificial Sequence: Synthetic oligonucleotide
  Antisense strand to SEQ ID NO: 2431884
agcguuaagacacuugcuc

SEQ ID NO: 2431886 - RNA, 19 nt, Artificial Sequence
  Description of Artificial Sequence: Synthetic oligonucleotide
  Sense strand starting at position 2568 of SEQ ID NO: 1886867
gugucuuaacgcuccaagu

SEQ ID NO: 2431887 - RNA, 19 nt, Artificial Sequence
  Description of Artificial Sequence: Synthetic oligonucleotide
  Antisense strand to SEQ ID NO: 2431886
acuuggagcguuaagacac

SEQ ID NO: 2431888 - RNA, 19 nt, Artificial Sequence
  Description of Artificial Sequence: Synthetic oligonucleotide
  Sense strand starting at position 2570 of SEQ ID NO: 1886867
gucuuaacgcuccaagugu

SEQ ID NO: 2431889 - RNA, 19 nt, Artificial Sequence
  Description of Artificial Sequence: Synthetic oligonucleotide
  Antisense strand to SEQ ID NO: 2431888
acacuuggagcguuaagac

SEQ ID NO: 2431890 - RNA, 19 nt, Artificial Sequence
  Description of Artificial Sequence: Synthetic oligonucleotide
  Sense strand starting at position 2600 of SEQ ID NO: 1886867
gacguuuccucaucgacag

SEQ ID NO: 2431891 - RNA, 19 nt, Artificial Sequence
  Description of Artificial Sequence: Synthetic oligonucleotide
  Antisense strand to SEQ ID NO: 2431890
cugucgaugaggaaacguc

SEQ ID NO: 2431892 - RNA, 19 nt, Artificial Sequence
  Description of Artificial Sequence: Synthetic oligonucleotide
  Sense strand starting at position 2601 of SEQ ID NO: 1886867
acguuuccucaucgacaga

SEQ ID NO: 2431893 - RNA, 19 nt, Artificial Sequence
  Description of Artificial Sequence: Synthetic oligonucleotide
  Antisense strand to SEQ ID NO: 2431892
ucugucgaugaggaaacgu

SEQ ID NO: 2431894 - RNA, 19 nt, Artificial Sequence
  Description of Artificial Sequence: Synthetic oligonucleotide
  Sense strand starting at position 2624 of SEQ ID NO: 1886867
ggagaauggaagugugucu

SEQ ID NO: 2431895 - RNA, 19 nt, Artificial Sequence
  Description of Artificial Sequence: Synthetic oligonucleotide
  Antisense strand to SEQ ID NO: 2431894
agacacacuuccauucucc

SEQ ID NO: 2431896 - RNA, 19 nt, Artificial Sequence
  Description of Artificial Sequence: Synthetic oligonucleotide
  Sense strand starting at position 2659 of SEQ ID NO: 1886867
gcgacuuugcauugagauc

SEQ ID NO: 2431897 - RNA, 19 nt, Artificial Sequence
  Description of Artificial Sequence: Synthetic oligonucleotide
  Antisense strand to SEQ ID NO: 2431896
gaucucaaugcaaagucgc

SEQ ID NO: 2431898 - RNA, 19 nt, Artificial Sequence
  Description of Artificial Sequence: Synthetic oligonucleotide
  Sense strand starting at position 2668 of SEQ ID NO: 1886867
cauugagaucgccgaggua

SEQ ID NO: 2431899 - RNA, 19 nt, Artificial Sequence
  Description of Artificial Sequence: Synthetic oligonucleotide
  Antisense strand to SEQ ID NO: 2431898
uaccucggcgaucucaaug

SEQ ID NO: 2431900 - RNA, 19 nt, Artificial Sequence
  Description of Artificial Sequence: Synthetic oligonucleotide
  Sense strand starting at position 2732 of SEQ ID NO: 1886867
ggcugcgcuccugagguau

SEQ ID NO: 2431901 - RNA, 19 nt, Artificial Sequence
  Description of Artificial Sequence: Synthetic oligonucleotide
  Antisense strand to SEQ ID NO: 2431900
auaccucaggagcgcagcc

SEQ ID NO: 2431902 - RNA, 19 nt, Artificial Sequence
  Description of Artificial Sequence: Synthetic oligonucleotide
  Sense strand starting at position 2744 of SEQ ID NO: 1886867
gagguaucacuuugugaac

SEQ ID NO: 2431903 - RNA, 19 nt, Artificial Sequence
  Description of Artificial Sequence: Synthetic oligonucleotide
  Antisense strand to SEQ ID NO: 2431902
guucacaaagugauaccuc

SEQ ID NO: 2431904 - RNA, 19 nt, Artificial Sequence
  Description of Artificial Sequence: Synthetic oligonucleotide
  Sense strand starting at position 2746 of SEQ ID NO: 1886867
gguaucacuuugugaaccu

SEQ ID NO: 2431905 - RNA, 19 nt, Artificial Sequence
  Description of Artificial Sequence: Synthetic oligonucleotide
  Antisense strand to SEQ ID NO: 2431904
agguucacaaagugauacc

SEQ ID NO: 2431906 - RNA, 19 nt, Artificial Sequence
  Description of Artificial Sequence: Synthetic oligonucleotide
  Sense strand starting at position 2820 of SEQ ID NO: 1886867
acuagaugcucccugcuaa

SEQ ID NO: 2431907 - RNA, 19 nt, Artificial Sequence
  Description of Artificial Sequence: Synthetic oligonucleotide
  Antisense strand to SEQ ID NO: 2431906
uuagcagggagcaucuagu

SEQ ID NO: 2431908 - RNA, 19 nt, Artificial Sequence
  Description of Artificial Sequence: Synthetic oligonucleotide
  Sense strand starting at position 2821 of SEQ ID NO: 1886867
cuagaugcucccugcuaaa

SEQ ID NO: 2431909 - RNA, 19 nt, Artificial Sequence
  Description of Artificial Sequence: Synthetic oligonucleotide
  Antisense strand to SEQ ID NO: 2431908
uuuagcagggagcaucuag

SEQ ID NO: 2431910 - RNA, 19 nt, Artificial Sequence
  Description of Artificial Sequence: Synthetic oligonucleotide
  Sense strand starting at position 2831 of SEQ ID NO: 1886867
ccugcuaaaucuuggcaca

SEQ ID NO: 2431911 - RNA, 19 nt, Artificial Sequence
  Description of Artificial Sequence: Synthetic oligonucleotide
  Antisense strand to SEQ ID NO: 2431910
ugugccaagauuuagcagg

SEQ ID NO: 2431912 - RNA, 19 nt, Artificial Sequence
  Description of Artificial Sequence: Synthetic oligonucleotide
  Sense strand starting at position 2900 of SEQ ID NO: 1886867
cgagaugugucagcaguag

SEQ ID NO: 2431913 - RNA, 19 nt, Artificial Sequence
  Description of Artificial Sequence: Synthetic oligonucleotide
  Antisense strand to SEQ ID NO: 2431912
cuacugcugacacaucucg

SEQ ID NO: 2431914 - RNA, 19 nt, Artificial Sequence
  Description of Artificial Sequence: Synthetic oligonucleotide
  Sense strand starting at position 3076 of SEQ ID NO: 1886867
uguccuuaucucuagagca

SEQ ID NO: 2431915 - RNA, 19 nt, Artificial Sequence
  Description of Artificial Sequence: Synthetic oligonucleotide
  Antisense strand to SEQ ID NO: 2431914
ugcucuagagauaaggaca

SEQ ID NO: 2431916 - RNA, 19 nt, Artificial Sequence
  Description of Artificial Sequence: Synthetic oligonucleotide
  Sense strand starting at position 3111 of SEQ ID NO: 1886867
aaaggugauugugaauaga

SEQ ID NO: 2431917 - RNA, 19 nt, Artificial Sequence
  Description of Artificial Sequence: Synthetic oligonucleotide
  Antisense strand to SEQ ID NO: 2431916
ucuauucacaaucaccuuu

SEQ ID NO: 2431918 - RNA, 19 nt, Artificial Sequence
  Description of Artificial Sequence: Synthetic oligonucleotide
  Sense strand starting at position 3129 of SEQ ID NO: 1886867
aagagaucuuaccugugua

SEQ ID NO: 2431919 - RNA, 19 nt, Artificial Sequence
  Description of Artificial Sequence: Synthetic oligonucleotide
  Antisense strand to SEQ ID NO: 2431918
uacacagguaagaucucuu

SEQ ID NO: 2431920 - RNA, 19 nt, Artificial Sequence
  Description of Artificial Sequence: Synthetic oligonucleotide
  Sense strand starting at position 3132 of SEQ ID NO: 1886867
agaucuuaccuguguacca

SEQ ID NO: 2431921 - RNA, 19 nt, Artificial Sequence
  Description of Artificial Sequence: Synthetic oligonucleotide
  Antisense strand to SEQ ID NO: 2431920
ugguacacagguaagaucu

SEQ ID NO: 2431922 - RNA, 19 nt, Artificial Sequence
  Description of Artificial Sequence: Synthetic oligonucleotide
  Sense strand starting at position 3158 of SEQ ID NO: 1886867
cagugucuggcauggagua

SEQ ID NO: 2431923 - RNA, 19 nt, Artificial Sequence
  Description of Artificial Sequence: Synthetic oligonucleotide
  Antisense strand to SEQ ID NO: 2431922
uacuccaugccagacacug

SEQ ID NO: 2431924 - RNA, 19 nt, Artificial Sequence
  Description of Artificial Sequence: Synthetic oligonucleotide
  Sense strand starting at position 3204 of SEQ ID NO: 1886867
uguggcaagcacuaguuaa

SEQ ID NO: 2431925 - RNA, 19 nt, Artificial Sequence
  Description of Artificial Sequence: Synthetic oligonucleotide
  Antisense strand to SEQ ID NO: 2431924
uuaacuagugcuugccaca

SEQ ID NO: 2431926 - RNA, 19 nt, Artificial Sequence
  Description of Artificial Sequence: Synthetic oligonucleotide
  Sense strand starting at position 3218 of SEQ ID NO: 1886867
guuaaccauccaugauaga

SEQ ID NO: 2431927 - RNA, 19 nt, Artificial Sequence
  Description of Artificial Sequence: Synthetic oligonucleotide
  Antisense strand to SEQ ID NO: 2431926
ucuaucauggaugguuaac

SEQ ID NO: 2431928 - RNA, 19 nt, Artificial Sequence
  Description of Artificial Sequence: Synthetic oligonucleotide
  Sense strand starting at position 3231 of SEQ ID NO: 1886867
gauagaguaccggaguauu

SEQ ID NO: 2431929 - RNA, 19 nt, Artificial Sequence
  Description of Artificial Sequence: Synthetic oligonucleotide
  Antisense strand to SEQ ID NO: 2431928
aauacuccgguacucuauc

SEQ ID NO: 2431930 - RNA, 19 nt, Artificial Sequence
  Description of Artificial Sequence: Synthetic oligonucleotide
  Sense strand starting at position 3283 of SEQ ID NO: 1886867
ucaaacugugcguacuuaa

SEQ ID NO: 2431931 - RNA, 19 nt, Artificial Sequence
  Description of Artificial Sequence: Synthetic oligonucleotide
  Antisense strand to SEQ ID NO: 2431930
uuaaguacgcacaguuuga

SEQ ID NO: 2431932 - RNA, 19 nt, Artificial Sequence
  Description of Artificial Sequence: Synthetic oligonucleotide
  Sense strand starting at position 3314 of SEQ ID NO: 1886867
gcagguguuuagggccaaa

SEQ ID NO: 2431933 - RNA, 19 nt, Artificial Sequence
  Description of Artificial Sequence: Synthetic oligonucleotide
  Antisense strand to SEQ ID NO: 2431932
uuuggcccuaaacaccugc

SEQ ID NO: 2431934 - RNA, 19 nt, Artificial Sequence
  Description of Artificial Sequence: Synthetic oligonucleotide
  Sense strand starting at position 3317 of SEQ ID NO: 1886867
gguguuuagggccaaacau

SEQ ID NO: 2431935 - RNA, 19 nt, Artificial Sequence
  Description of Artificial Sequence: Synthetic oligonucleotide
  Antisense strand to SEQ ID NO: 2431934
auguuuggcccuaaacacc

SEQ ID NO: 2431936 - RNA, 19 nt, Artificial Sequence
  Description of Artificial Sequence: Synthetic oligonucleotide
  Sense strand starting at position 3486 of SEQ ID NO: 1886867
ggucucagccacugugaga

SEQ ID NO: 2431937 - RNA, 19 nt, Artificial Sequence
  Description of Artificial Sequence: Synthetic oligonucleotide
  Antisense strand to SEQ ID NO: 2431936
ucucacaguggcugagacc

SEQ ID NO: 2431938 - RNA, 19 nt, Artificial Sequence
  Description of Artificial Sequence: Synthetic oligonucleotide
  Sense strand starting at position 3509 of SEQ ID NO: 1886867
auggauugccuccacaagu

SEQ ID NO: 2431939 - RNA, 19 nt, Artificial Sequence
  Description of Artificial Sequence: Synthetic oligonucleotide
  Antisense strand to SEQ ID NO: 2431938
acuuguggaggcaauccau

SEQ ID NO: 2431940 - RNA, 19 nt, Artificial Sequence
  Description of Artificial Sequence: Synthetic oligonucleotide
  Sense strand starting at position 3555 of SEQ ID NO: 1886867
ugcugccgcucccauaaau

SEQ ID NO: 2431941 - RNA, 19 nt, Artificial Sequence
  Description of Artificial Sequence: Synthetic oligonucleotide
  Antisense strand to SEQ ID NO: 2431940
auuuaugggagcggcagca

SEQ ID NO: 2431942 - RNA, 19 nt, Artificial Sequence
  Description of Artificial Sequence: Synthetic oligonucleotide
  Sense strand starting at position 3584 of SEQ ID NO: 1886867
guaagaugguccuuagucu

SEQ ID NO: 2431943 - RNA, 19 nt, Artificial Sequence
  Description of Artificial Sequence: Synthetic oligonucleotide
  Antisense strand to SEQ ID NO: 2431942
agacuaaggaccaucuuac

SEQ ID NO: 2431944 - RNA, 19 nt, Artificial Sequence
  Description of Artificial Sequence: Synthetic oligonucleotide
  Sense strand starting at position 3626 of SEQ ID NO: 1886867
uggugucuggccugugaaa

SEQ ID NO: 2431945 - RNA, 19 nt, Artificial Sequence
  Description of Artificial Sequence: Synthetic oligonucleotide
  Antisense strand to SEQ ID NO: 2431944
uuucacaggccagacacca

SEQ ID NO: 2431946 - RNA, 19 nt, Artificial Sequence
  Description of Artificial Sequence: Synthetic oligonucleotide
  Sense strand starting at position 3694 of SEQ ID NO: 1886867
aucucucacuccugggaaa

SEQ ID NO: 2431947 - RNA, 19 nt, Artificial Sequence
  Description of Artificial Sequence: Synthetic oligonucleotide
  Antisense strand to SEQ ID NO: 2431946
uuucccaggagugagagau

SEQ ID NO: 2431948 - RNA, 19 nt, Artificial Sequence
  Description of Artificial Sequence: Synthetic oligonucleotide
  Sense strand starting at position 3715 of SEQ ID NO: 1886867
ggagaugacucaggaauga

SEQ ID NO: 2431949 - RNA, 19 nt, Artificial Sequence
  Description of Artificial Sequence: Synthetic oligonucleotide
  Antisense strand to SEQ ID NO: 2431948
ucauuccugagucaucucc

SEQ ID NO: 2431950 - RNA, 19 nt, Artificial Sequence
  Description of Artificial Sequence: Synthetic oligonucleotide
  Sense strand starting at position 3800 of SEQ ID NO: 1886867
accuacauccuuugauguu

SEQ ID NO: 2431951 - RNA, 19 nt, Artificial Sequence
  Description of Artificial Sequence: Synthetic oligonucleotide
  Antisense strand to SEQ ID NO: 2431950
aacaucaaaggauguaggu

SEQ ID NO: 2431952 - RNA, 19 nt, Artificial Sequence
  Description of Artificial Sequence: Synthetic oligonucleotide
  Sense strand starting at position 3801 of SEQ ID NO: 1886867
ccuacauccuuugauguuu

SEQ ID NO: 2431953 - RNA, 19 nt, Artificial Sequence
  Description of Artificial Sequence: Synthetic oligonucleotide
  Antisense strand to SEQ ID NO: 2431952
aaacaucaaaggauguagg

SEQ ID NO: 2431954 - RNA, 19 nt, Artificial Sequence
  Description of Artificial Sequence: Synthetic oligonucleotide
  Sense strand starting at position 3844 of SEQ ID NO: 1886867
gugacaagauucuggucuu

SEQ ID NO: 2431955 - RNA, 19 nt, Artificial Sequence
  Description of Artificial Sequence: Synthetic oligonucleotide
  Antisense strand to SEQ ID NO: 2431954
aagaccagaaucuugucac

SEQ ID NO: 2431956 - RNA, 19 nt, Artificial Sequence
  Description of Artificial Sequence: Synthetic oligonucleotide
  Sense strand starting at position 3937 of SEQ ID NO: 1886867
guagcucuaucucauuuau

SEQ ID NO: 2431957 - RNA, 19 nt, Artificial Sequence
  Description of Artificial Sequence: Synthetic oligonucleotide
  Antisense strand to SEQ ID NO: 2431956
auaaaugagauagagcuac

SEQ ID NO: 2431958 - RNA, 19 nt, Artificial Sequence
  Description of Artificial Sequence: Synthetic oligonucleotide
  Sense strand starting at position 8 of SEQ ID NO: 1886868
agugcauauuccuuggauu

SEQ ID NO: 2431959 - RNA, 19 nt, Artificial Sequence
  Description of Artificial Sequence: Synthetic oligonucleotide
  Antisense strand to SEQ ID NO: 2431958
aauccaaggaauaugcacu

SEQ ID NO: 2431960 - RNA, 19 nt, Artificial Sequence
  Description of Artificial Sequence: Synthetic oligonucleotide
  Sense strand starting at position 9 of SEQ ID NO: 1886868
gugcauauuccuuggauuu

SEQ ID NO: 2431961 - RNA, 19 nt, Artificial Sequence
  Description of Artificial Sequence: Synthetic oligonucleotide
  Antisense strand to SEQ ID NO: 2431960
aaauccaaggaauaugcac

SEQ ID NO: 2431962 - RNA, 19 nt, Artificial Sequence
  Description of Artificial Sequence: Synthetic oligonucleotide
  Sense strand starting at position 21 of SEQ ID NO: 1886868
uggauuuguuuguaaauug

SEQ ID NO: 2431963 - RNA, 19 nt, Artificial Sequence
  Description of Artificial Sequence: Synthetic oligonucleotide
  Antisense strand to SEQ ID NO: 2431962
caauuuacaaacaaaucca

SEQ ID NO: 2431964 - RNA, 19 nt, Artificial Sequence
  Description of Artificial Sequence: Synthetic oligonucleotide
  Sense strand starting at position 47 of SEQ ID NO: 1886868
auguguaaugucuggacaa

SEQ ID NO: 2431965 - RNA, 19 nt, Artificial Sequence
  Description of Artificial Sequence: Synthetic oligonucleotide
  Antisense strand to SEQ ID NO: 2431964
uuguccagacauuacacau

SEQ ID NO: 2431966 - RNA, 19 nt, Artificial Sequence
  Description of Artificial Sequence: Synthetic oligonucleotide
  Sense strand starting at position 49 of SEQ ID NO: 1886868
guguaaugucuggacaaug

SEQ ID NO: 2431967 - RNA, 19 nt, Artificial Sequence
  Description of Artificial Sequence: Synthetic oligonucleotide
  Antisense strand to SEQ ID NO: 2431966
cauuguccagacauuacac

SEQ ID NO: 2431968 - RNA, 19 nt, Artificial Sequence
  Description of Artificial Sequence: Synthetic oligonucleotide
  Sense strand starting at position 317 of SEQ ID NO: 1886868
ucagccuugucacugaaca

SEQ ID NO: 2431969 - RNA, 19 nt, Artificial Sequence
  Description of Artificial Sequence: Synthetic oligonucleotide
  Antisense strand to SEQ ID NO: 2431968
uguucagugacaaggcuga

SEQ ID NO: 2431970 - RNA, 19 nt, Artificial Sequence
  Description of Artificial Sequence: Synthetic oligonucleotide
  Sense strand starting at position 702 of SEQ ID NO: 1886868
ggcauaaagcaggaguagu

SEQ ID NO: 2431971 - RNA, 19 nt, Artificial Sequence
  Description of Artificial Sequence: Synthetic oligonucleotide
  Antisense strand to SEQ ID NO: 2431970
acuacuccugcuuuaugcc

SEQ ID NO: 2431972 - RNA, 19 nt, Artificial Sequence
  Description of Artificial Sequence: Synthetic oligonucleotide
  Sense strand starting at position 900 of SEQ ID NO: 1886868
auugauguauguccagcaa

SEQ ID NO: 2431973 - RNA, 19 nt, Artificial Sequence
  Description of Artificial Sequence: Synthetic oligonucleotide
  Antisense strand to SEQ ID NO: 2431972
uugcuggacauacaucaau

SEQ ID NO: 2431974 - RNA, 19 nt, Artificial Sequence
  Description of Artificial Sequence: Synthetic oligonucleotide
  Sense strand starting at position 904 of SEQ ID NO: 1886868
auguauguccagcaagacu

SEQ ID NO: 2431975 - RNA, 19 nt, Artificial Sequence
  Description of Artificial Sequence: Synthetic oligonucleotide
  Antisense strand to SEQ ID NO: 2431974
agucuugcuggacauacau

SEQ ID NO: 2431976 - RNA, 19 nt, Artificial Sequence
  Description of Artificial Sequence: Synthetic oligonucleotide
  Sense strand starting at position 967 of SEQ ID NO: 1886868
gagauaaggcccugucauc

SEQ ID NO: 2431977 - RNA, 19 nt, Artificial Sequence
  Description of Artificial Sequence: Synthetic oligonucleotide
  Antisense strand to SEQ ID NO: 2431976
gaugacagggccuuaucuc

SEQ ID NO: 2431978 - RNA, 19 nt, Artificial Sequence
  Description of Artificial Sequence: Synthetic oligonucleotide
  Sense strand starting at position 1024 of SEQ ID NO: 1886868
ggccaagauuuccaaagag

SEQ ID NO: 2431979 - RNA, 19 nt, Artificial Sequence
  Description of Artificial Sequence: Synthetic oligonucleotide
  Antisense strand to SEQ ID NO: 2431978
cucuuuggaaaucuuggcc

SEQ ID NO: 2431980 - RNA, 19 nt, Artificial Sequence
  Description of Artificial Sequence: Synthetic oligonucleotide
  Sense strand starting at position 1033 of SEQ ID NO: 1886868
uuccaaagagauugcuuua

SEQ ID NO: 2431981 - RNA, 19 nt, Artificial Sequence
  Description of Artificial Sequence: Synthetic oligonucleotide
  Antisense strand to SEQ ID NO: 2431980
uaaagcaaucucuuuggaa

SEQ ID NO: 2431982 - RNA, 19 nt, Artificial Sequence
  Description of Artificial Sequence: Synthetic oligonucleotide
  Sense strand starting at position 1036 of SEQ ID NO: 1886868
caaagagauugcuuuagag

SEQ ID NO: 2431983 - RNA, 19 nt, Artificial Sequence
  Description of Artificial Sequence: Synthetic oligonucleotide
  Antisense strand to SEQ ID NO: 2431982
cucuaaagcaaucucuuug

SEQ ID NO: 2431984 - RNA, 19 nt, Artificial Sequence
  Description of Artificial Sequence: Synthetic oligonucleotide
  Sense strand starting at position 1152 of SEQ ID NO: 1886868
uguacaauagaucgucuua

SEQ ID NO: 2431985 - RNA, 19 nt, Artificial Sequence
  Description of Artificial Sequence: Synthetic oligonucleotide
  Antisense strand to SEQ ID NO: 2431984
uaagacgaucuauuguaca

SEQ ID NO: 2431986 - RNA, 19 nt, Artificial Sequence
  Description of Artificial Sequence: Synthetic oligonucleotide
  Sense strand starting at position 1207 of SEQ ID NO: 1886868
aauagaagcgccugcauuu

SEQ ID NO: 2431987 - RNA, 19 nt, Artificial Sequence
  Description of Artificial Sequence: Synthetic oligonucleotide
  Antisense strand to SEQ ID NO: 2431986
aaaugcaggcgcuucuauu

SEQ ID NO: 2431988 - RNA, 19 nt, Artificial Sequence
  Description of Artificial Sequence: Synthetic oligonucleotide
  Sense strand starting at position 1429 of SEQ ID NO: 1886868
caagaaugcugccuggauu

SEQ ID NO: 2431989 - RNA, 19 nt, Artificial Sequence
  Description of Artificial Sequence: Synthetic oligonucleotide
  Antisense strand to SEQ ID NO: 2431988
aauccaggcagcauucuug

SEQ ID NO: 2431990 - RNA, 19 nt, Artificial Sequence
  Description of Artificial Sequence: Synthetic oligonucleotide
  Sense strand starting at position 1430 of SEQ ID NO: 1886868
aagaaugcugccuggauua

SEQ ID NO: 2431991 - RNA, 19 nt, Artificial Sequence
  Description of Artificial Sequence: Synthetic oligonucleotide
  Antisense strand to SEQ ID NO: 2431990
uaauccaggcagcauucuu

SEQ ID NO: 2431992 - RNA, 19 nt, Artificial Sequence
  Description of Artificial Sequence: Synthetic oligonucleotide
  Sense strand starting at position 1432 of SEQ ID NO: 1886868
gaaugcugccuggauuaaa

SEQ ID NO: 2431993 - RNA, 19 nt, Artificial Sequence
  Description of Artificial Sequence: Synthetic oligonucleotide
  Antisense strand to SEQ ID NO: 2431992
uuuaauccaggcagcauuc

SEQ ID NO: 2431994 - RNA, 19 nt, Artificial Sequence
  Description of Artificial Sequence: Synthetic oligonucleotide
  Sense strand starting at position 2051 of SEQ ID NO: 1886868
guccuuucgaaaggauucu

SEQ ID NO: 2431995 - RNA, 19 nt, Artificial Sequence
  Description of Artificial Sequence: Synthetic oligonucleotide
  Antisense strand to SEQ ID NO: 2431994
agaauccuuucgaaaggac

SEQ ID NO: 2431996 - RNA, 19 nt, Artificial Sequence
  Description of Artificial Sequence: Synthetic oligonucleotide
  Sense strand starting at position 2089 of SEQ ID NO: 1886868
cggccguagcgucugaaau

SEQ ID NO: 2431997 - RNA, 19 nt, Artificial Sequence
  Description of Artificial Sequence: Synthetic oligonucleotide
  Antisense strand to SEQ ID NO: 2431996
auuucagacgcuacggccg

SEQ ID NO: 2431998 - RNA, 19 nt, Artificial Sequence
  Description of Artificial Sequence: Synthetic oligonucleotide
  Sense strand starting at position 2112 of SEQ ID NO: 1886868
ucgcuauuggguuaaaugu

SEQ ID NO: 2431999 - RNA, 19 nt, Artificial Sequence
  Description of Artificial Sequence: Synthetic oligonucleotide
  Antisense strand to SEQ ID NO: 2431998
acauuuaacccaauagcga

SEQ ID NO: 2432000 - RNA, 19 nt, Artificial Sequence
  Description of Artificial Sequence: Synthetic oligonucleotide
  Sense strand starting at position 2119 of SEQ ID NO: 1886868
uggguuaaauguuugucau

SEQ ID NO: 2432001 - RNA, 19 nt, Artificial Sequence
  Description of Artificial Sequence: Synthetic oligonucleotide
  Antisense strand to SEQ ID NO: 2432000
augacaaacauuuaaccca

SEQ ID NO: 2432002 - RNA, 19 nt, Artificial Sequence
  Description of Artificial Sequence: Synthetic oligonucleotide
  Sense strand starting at position 2120 of SEQ ID NO: 1886868
ggguuaaauguuugucauu

SEQ ID NO: 2432003 - RNA, 19 nt, Artificial Sequence
  Description of Artificial Sequence: Synthetic oligonucleotide
  Antisense strand to SEQ ID NO: 2432002
aaugacaaacauuuaaccc

SEQ ID NO: 2432004 - RNA, 19 nt, Artificial Sequence
  Description of Artificial Sequence: Synthetic oligonucleotide
  Sense strand starting at position 2121 of SEQ ID NO: 1886868
gguuaaauguuugucauug

SEQ ID NO: 2432005 - RNA, 19 nt, Artificial Sequence
  Description of Artificial Sequence: Synthetic oligonucleotide
  Antisense strand to SEQ ID NO: 2432004
caaugacaaacauuuaacc

SEQ ID NO: 2432006 - RNA, 19 nt, Artificial Sequence
  Description of Artificial Sequence: Synthetic oligonucleotide
  Sense strand starting at position 2192 of SEQ ID NO: 1886868
ggucauugguuggccaaga

SEQ ID NO: 2432007 - RNA, 19 nt, Artificial Sequence
  Description of Artificial Sequence: Synthetic oligonucleotide
  Antisense strand to SEQ ID NO: 2432006
ucuuggccaaccaaugacc

SEQ ID NO: 2432008 - RNA, 19 nt, Artificial Sequence
  Description of Artificial Sequence: Synthetic oligonucleotide
  Sense strand starting at position 2193 of SEQ ID NO: 1886868
gucauugguuggccaagau

SEQ ID NO: 2432009 - RNA, 19 nt, Artificial Sequence
  Description of Artificial Sequence: Synthetic oligonucleotide
  Antisense strand to SEQ ID NO: 2432008
aucuuggccaaccaaugac

SEQ ID NO: 2432010 - RNA, 19 nt, Artificial Sequence
  Description of Artificial Sequence: Synthetic oligonucleotide
  Sense strand starting at position 2210 of SEQ ID NO: 1886868
augucagucaggcagauaa

SEQ ID NO: 2432011 - RNA, 19 nt, Artificial Sequence
  Description of Artificial Sequence: Synthetic oligonucleotide
  Antisense strand to SEQ ID NO: 2432010
uuaucugccugacugacau

SEQ ID NO: 2432012 - RNA, 19 nt, Artificial Sequence
  Description of Artificial Sequence: Synthetic oligonucleotide
  Sense strand starting at position 2302 of SEQ ID NO: 1886868
aggccaagucucugagagu

SEQ ID NO: 2432013 - RNA, 19 nt, Artificial Sequence
  Description of Artificial Sequence: Synthetic oligonucleotide
  Antisense strand to SEQ ID NO: 2432012
acucucagagacuuggccu

SEQ ID NO: 2432014 - RNA, 19 nt, Artificial Sequence
  Description of Artificial Sequence: Synthetic oligonucleotide
  Sense strand starting at position 2400 of SEQ ID NO: 1886868
acaauucugccuuagugga

SEQ ID NO: 2432015 - RNA, 19 nt, Artificial Sequence
  Description of Artificial Sequence: Synthetic oligonucleotide
  Antisense strand to SEQ ID NO: 2432014
uccacuaaggcagaauugu

SEQ ID NO: 2432016 - RNA, 19 nt, Artificial Sequence
  Description of Artificial Sequence: Synthetic oligonucleotide
  Sense strand starting at position 2426 of SEQ ID NO: 1886868
cugacuuucgcgggacaga

SEQ ID NO: 2432017 - RNA, 19 nt, Artificial Sequence
  Description of Artificial Sequence: Synthetic oligonucleotide
  Antisense strand to SEQ ID NO: 2432016
ucugucccgcgaaagucag

SEQ ID NO: 2432018 - RNA, 19 nt, Artificial Sequence
  Description of Artificial Sequence: Synthetic oligonucleotide
  Sense strand starting at position 2751 of SEQ ID NO: 1886868
guaucugugccugugaguu

SEQ ID NO: 2432019 - RNA, 19 nt, Artificial Sequence
  Description of Artificial Sequence: Synthetic oligonucleotide
  Antisense strand to SEQ ID NO: 2432018
aacucacaggcacagauac

SEQ ID NO: 2432020 - RNA, 19 nt, Artificial Sequence
  Description of Artificial Sequence: Synthetic oligonucleotide
  Sense strand starting at position 2849 of SEQ ID NO: 1886868
gagguuuguauugaauugu

SEQ ID NO: 2432021 - RNA, 19 nt, Artificial Sequence
  Description of Artificial Sequence: Synthetic oligonucleotide
  Antisense strand to SEQ ID NO: 2432020
acaauucaauacaaaccuc

SEQ ID NO: 2432022 - RNA, 19 nt, Artificial Sequence
  Description of Artificial Sequence: Synthetic oligonucleotide
  Sense strand starting at position 2853 of SEQ ID NO: 1886868
uuuguauugaauuguugga

SEQ ID NO: 2432023 - RNA, 19 nt, Artificial Sequence
  Description of Artificial Sequence: Synthetic oligonucleotide
  Antisense strand to SEQ ID NO: 2432022
uccaacaauucaauacaaa

SEQ ID NO: 2432024 - RNA, 19 nt, Artificial Sequence
  Description of Artificial Sequence: Synthetic oligonucleotide
  Sense strand starting at position 2857 of SEQ ID NO: 1886868
uauugaauuguuggaugau

SEQ ID NO: 2432025 - RNA, 19 nt, Artificial Sequence
  Description of Artificial Sequence: Synthetic oligonucleotide
  Antisense strand to SEQ ID NO: 2432024
aucauccaacaauucaaua

SEQ ID NO: 2432026 - RNA, 19 nt, Artificial Sequence
  Description of Artificial Sequence: Synthetic oligonucleotide
  Sense strand starting at position 2860 of SEQ ID NO: 1886868
ugaauuguuggaugauaac

SEQ ID NO: 2432027 - RNA, 19 nt, Artificial Sequence
  Description of Artificial Sequence: Synthetic oligonucleotide
  Antisense strand to SEQ ID NO: 2432026
guuaucauccaacaauuca

SEQ ID NO: 2432028 - RNA, 19 nt, Artificial Sequence
  Description of Artificial Sequence: Synthetic oligonucleotide
  Sense strand starting at position 2949 of SEQ ID NO: 1886868
gugauaagggcucacugua

SEQ ID NO: 2432029 - RNA, 19 nt, Artificial Sequence
  Description of Artificial Sequence: Synthetic oligonucleotide
  Antisense strand to SEQ ID NO: 2432028
uacagugagcccuuaucac

SEQ ID NO: 2432030 - RNA, 19 nt, Artificial Sequence
  Description of Artificial Sequence: Synthetic oligonucleotide
  Sense strand starting at position 3077 of SEQ ID NO: 1886868
augagaucucuccauguug

SEQ ID NO: 2432031 - RNA, 19 nt, Artificial Sequence
  Description of Artificial Sequence: Synthetic oligonucleotide
  Antisense strand to SEQ ID NO: 2432030
caacauggagagaucucau

SEQ ID NO: 2432032 - RNA, 19 nt, Artificial Sequence
  Description of Artificial Sequence: Synthetic oligonucleotide
  Sense strand starting at position 3175 of SEQ ID NO: 1886868
ccaccauucugggcacuaa

SEQ ID NO: 2432033 - RNA, 19 nt, Artificial Sequence
  Description of Artificial Sequence: Synthetic oligonucleotide
  Antisense strand to SEQ ID NO: 2432032
uuagugcccagaauggugg

SEQ ID NO: 2432034 - RNA, 19 nt, Artificial Sequence
  Description of Artificial Sequence: Synthetic oligonucleotide
  Sense strand starting at position 3425 of SEQ ID NO: 1886868
accgcaucuggccaagaaa

SEQ ID NO: 2432035 - RNA, 19 nt, Artificial Sequence
  Description of Artificial Sequence: Synthetic oligonucleotide
  Antisense strand to SEQ ID NO: 2432034
uuucuuggccagaugcggu

SEQ ID NO: 2432036 - RNA, 19 nt, Artificial Sequence
  Description of Artificial Sequence: Synthetic oligonucleotide
  Sense strand starting at position 3875 of SEQ ID NO: 1886868
cuuaaagccuuauuaaggu

SEQ ID NO: 2432037 - RNA, 19 nt, Artificial Sequence
  Description of Artificial Sequence: Synthetic oligonucleotide
  Antisense strand to SEQ ID NO: 2432036
accuuaauaaggcuuuaag

SEQ ID NO: 2432038 - RNA, 19 nt, Artificial Sequence
  Description of Artificial Sequence: Synthetic oligonucleotide
  Sense strand starting at position 48 of SEQ ID NO: 1886869
augacaucaugagaucuuu

SEQ ID NO: 2432039 - RNA, 19 nt, Artificial Sequence
  Description of Artificial Sequence: Synthetic oligonucleotide
  Antisense strand to SEQ ID NO: 2432038
aaagaucucaugaugucau

SEQ ID NO: 2432040 - RNA, 19 nt, Artificial Sequence
  Description of Artificial Sequence: Synthetic oligonucleotide
  Sense strand starting at position 306 of SEQ ID NO: 1886869
gcagaauuggguggaggua

SEQ ID NO: 2432041 - RNA, 19 nt, Artificial Sequence
  Description of Artificial Sequence: Synthetic oligonucleotide
  Antisense strand to SEQ ID NO: 2432040
uaccuccacccaauucugc

SEQ ID NO: 2432042 - RNA, 19 nt, Artificial Sequence
  Description of Artificial Sequence: Synthetic oligonucleotide
  Sense strand starting at position 455 of SEQ ID NO: 1886869
accugaugauccucuuuga

SEQ ID NO: 2432043 - RNA, 19 nt, Artificial Sequence
  Description of Artificial Sequence: Synthetic oligonucleotide
  Antisense strand to SEQ ID NO: 2432042
ucaaagaggaucaucaggu

SEQ ID NO: 2432044 - RNA, 19 nt, Artificial Sequence
  Description of Artificial Sequence: Synthetic oligonucleotide
  Sense strand starting at position 458 of SEQ ID NO: 1886869
ugaugauccucuuugacaa

SEQ ID NO: 2432045 - RNA, 19 nt, Artificial Sequence
  Description of Artificial Sequence: Synthetic oligonucleotide
  Antisense strand to SEQ ID NO: 2432044
uugucaaagaggaucauca

SEQ ID NO: 2432046 - RNA, 19 nt, Artificial Sequence
  Description of Artificial Sequence: Synthetic oligonucleotide
  Sense strand starting at position 504 of SEQ ID NO: 1886869
gcgcuuuggguucaagaag

SEQ ID NO: 2432047 - RNA, 19 nt, Artificial Sequence
  Description of Artificial Sequence: Synthetic oligonucleotide
  Antisense strand to SEQ ID NO: 2432046
cuucuugaacccaaagcgc

SEQ ID NO: 2432048 - RNA, 19 nt, Artificial Sequence
  Description of Artificial Sequence: Synthetic oligonucleotide
  Sense strand starting at position 536 of SEQ ID NO: 1886869
cggagaucacggugaucca

SEQ ID NO: 2432049 - RNA, 19 nt, Artificial Sequence
  Description of Artificial Sequence: Synthetic oligonucleotide
  Antisense strand to SEQ ID NO: 2432048
uggaucaccgugaucuccg

SEQ ID NO: 2432050 - RNA, 19 nt, Artificial Sequence
  Description of Artificial Sequence: Synthetic oligonucleotide
  Sense strand starting at position 545 of SEQ ID NO: 1886869
cggugauccaaacgauucu

SEQ ID NO: 2432051 - RNA, 19 nt, Artificial Sequence
  Description of Artificial Sequence: Synthetic oligonucleotide
  Antisense strand to SEQ ID NO: 2432050
agaaucguuuggaucaccg

SEQ ID NO: 2432052 - RNA, 19 nt, Artificial Sequence
  Description of Artificial Sequence: Synthetic oligonucleotide
  Sense strand starting at position 758 of SEQ ID NO: 1886869
uuacuucugugucucaaca

SEQ ID NO: 2432053 - RNA, 19 nt, Artificial Sequence
  Description of Artificial Sequence: Synthetic oligonucleotide
  Antisense strand to SEQ ID NO: 2432052
uguugagacacagaaguaa

SEQ ID NO: 2432054 - RNA, 19 nt, Artificial Sequence
  Description of Artificial Sequence: Synthetic oligonucleotide
  Sense strand starting at position 768 of SEQ ID NO: 1886869
gucucaacagcuuguggau

SEQ ID NO: 2432055 - RNA, 19 nt, Artificial Sequence
  Description of Artificial Sequence: Synthetic oligonucleotide
  Antisense strand to SEQ ID NO: 2432054
auccacaagcuguugagac

SEQ ID NO: 2432056 - RNA, 19 nt, Artificial Sequence
  Description of Artificial Sequence: Synthetic oligonucleotide
  Sense strand starting at position 780 of SEQ ID NO: 1886869
uguggauuaucgaguggag

SEQ ID NO: 2432057 - RNA, 19 nt, Artificial Sequence
  Description of Artificial Sequence: Synthetic oligonucleotide
  Antisense strand to SEQ ID NO: 2432056
cuccacucgauaauccaca

SEQ ID NO: 2432058 - RNA, 19 nt, Artificial Sequence
  Description of Artificial Sequence: Synthetic oligonucleotide
  Sense strand starting at position 782 of SEQ ID NO: 1886869
uggauuaucgaguggaguu

SEQ ID NO: 2432059 - RNA, 19 nt, Artificial Sequence
  Description of Artificial Sequence: Synthetic oligonucleotide
  Antisense strand to SEQ ID NO: 2432058
aacuccacucgauaaucca

SEQ ID NO: 2432060 - RNA, 19 nt, Artificial Sequence
  Description of Artificial Sequence: Synthetic oligonucleotide
  Sense strand starting at position 783 of SEQ ID NO: 1886869
ggauuaucgaguggaguuc

SEQ ID NO: 2432061 - RNA, 19 nt, Artificial Sequence
  Description of Artificial Sequence: Synthetic oligonucleotide
  Antisense strand to SEQ ID NO: 2432060
gaacuccacucgauaaucc

SEQ ID NO: 2432062 - RNA, 19 nt, Artificial Sequence
  Description of Artificial Sequence: Synthetic oligonucleotide
  Sense strand starting at position 789 of SEQ ID NO: 1886869
ucgaguggaguucaguaaa

SEQ ID NO: 2432063 - RNA, 19 nt, Artificial Sequence
  Description of Artificial Sequence: Synthetic oligonucleotide
  Antisense strand to SEQ ID NO: 2432062
uuuacugaacuccacucga

SEQ ID NO: 2432064 - RNA, 19 nt, Artificial Sequence
  Description of Artificial Sequence: Synthetic oligonucleotide
  Sense strand starting at position 800 of SEQ ID NO: 1886869
ucaguaaaugguggaucaa

SEQ ID NO: 2432065 - RNA, 19 nt, Artificial Sequence
  Description of Artificial Sequence: Synthetic oligonucleotide
  Antisense strand to SEQ ID NO: 2432064
uugauccaccauuuacuga

SEQ ID NO: 2432066 - RNA, 19 nt, Artificial Sequence
  Description of Artificial Sequence: Synthetic oligonucleotide
  Sense strand starting at position 891 of SEQ ID NO: 1886869
guuccugcccuggacagau

SEQ ID NO: 2432067 - RNA, 19 nt, Artificial Sequence
  Description of Artificial Sequence: Synthetic oligonucleotide
  Antisense strand to SEQ ID NO: 2432066
aucuguccagggcaggaac

SEQ ID NO: 2432068 - RNA, 19 nt, Artificial Sequence
  Description of Artificial Sequence: Synthetic oligonucleotide
  Sense strand starting at position 993 of SEQ ID NO: 1886869
ggcaggaaucggugcagua

SEQ ID NO: 2432069 - RNA, 19 nt, Artificial Sequence
  Description of Artificial Sequence: Synthetic oligonucleotide
  Antisense strand to SEQ ID NO: 2432068
uacugcaccgauuccugcc

SEQ ID NO: 2432070 - RNA, 19 nt, Artificial Sequence
  Description of Artificial Sequence: Synthetic oligonucleotide
  Sense strand starting at position 1063 of SEQ ID NO: 1886869
ggaccuguucgguagaaca

SEQ ID NO: 2432071 - RNA, 19 nt, Artificial Sequence
  Description of Artificial Sequence: Synthetic oligonucleotide
  Antisense strand to SEQ ID NO: 2432070
uguucuaccgaacaggucc

SEQ ID NO: 2432072 - RNA, 19 nt, Artificial Sequence
  Description of Artificial Sequence: Synthetic oligonucleotide
  Sense strand starting at position 1102 of SEQ ID NO: 1886869
ggcagaagugucugagaau

SEQ ID NO: 2432073 - RNA, 19 nt, Artificial Sequence
  Description of Artificial Sequence: Synthetic oligonucleotide
  Antisense strand to SEQ ID NO: 2432072
auucucagacacuucugcc

SEQ ID NO: 2432074 - RNA, 19 nt, Artificial Sequence
  Description of Artificial Sequence: Synthetic oligonucleotide
  Sense strand starting at position 1613 of SEQ ID NO: 1886869
gggagugucucagccaauc

SEQ ID NO: 2432075 - RNA, 19 nt, Artificial Sequence
  Description of Artificial Sequence: Synthetic oligonucleotide
  Antisense strand to SEQ ID NO: 2432074
gauuggcugagacacuccc

SEQ ID NO: 2432076 - RNA, 19 nt, Artificial Sequence
  Description of Artificial Sequence: Synthetic oligonucleotide
  Sense strand starting at position 1677 of SEQ ID NO: 1886869
gccucugaucgcucuguuu

SEQ ID NO: 2432077 - RNA, 19 nt, Artificial Sequence
  Description of Artificial Sequence: Synthetic oligonucleotide
  Antisense strand to SEQ ID NO: 2432076
aaacagagcgaucagaggc

SEQ ID NO: 2432078 - RNA, 19 nt, Artificial Sequence
  Description of Artificial Sequence: Synthetic oligonucleotide
  Sense strand starting at position 1742 of SEQ ID NO: 1886869
cagguaccuuugguaaacu

SEQ ID NO: 2432079 - RNA, 19 nt, Artificial Sequence
  Description of Artificial Sequence: Synthetic oligonucleotide
  Antisense strand to SEQ ID NO: 2432078
aguuuaccaaagguaccug

SEQ ID NO: 2432080 - RNA, 19 nt, Artificial Sequence
  Description of Artificial Sequence: Synthetic oligonucleotide
  Sense strand starting at position 2227 of SEQ ID NO: 1886869
gccacaaggcauugaggua

SEQ ID NO: 2432081 - RNA, 19 nt, Artificial Sequence
  Description of Artificial Sequence: Synthetic oligonucleotide
  Antisense strand to SEQ ID NO: 2432080
uaccucaaugccuuguggc

SEQ ID NO: 2432082 - RNA, 19 nt, Artificial Sequence
  Description of Artificial Sequence: Synthetic oligonucleotide
  Sense strand starting at position 2268 of SEQ ID NO: 1886869
cuaucaguuucguccauca

SEQ ID NO: 2432083 - RNA, 19 nt, Artificial Sequence
  Description of Artificial Sequence: Synthetic oligonucleotide
  Antisense strand to SEQ ID NO: 2432082
ugauggacgaaacugauag

SEQ ID NO: 2432084 - RNA, 19 nt, Artificial Sequence
  Description of Artificial Sequence: Synthetic oligonucleotide
  Sense strand starting at position 2547 of SEQ ID NO: 1886869
agagcauucuggguggaga

SEQ ID NO: 2432085 - RNA, 19 nt, Artificial Sequence
  Description of Artificial Sequence: Synthetic oligonucleotide
  Antisense strand to SEQ ID NO: 2432084
ucuccacccagaaugcucu

SEQ ID NO: 2432086 - RNA, 19 nt, Artificial Sequence
  Description of Artificial Sequence: Synthetic oligonucleotide
  Sense strand starting at position 2548 of SEQ ID NO: 1886869
gagcauucuggguggagag

SEQ ID NO: 2432087 - RNA, 19 nt, Artificial Sequence
  Description of Artificial Sequence: Synthetic oligonucleotide
  Antisense strand to SEQ ID NO: 2432086
cucuccacccagaaugcuc

SEQ ID NO: 2432088 - RNA, 19 nt, Artificial Sequence
  Description of Artificial Sequence: Synthetic oligonucleotide
  Sense strand starting at position 2549 of SEQ ID NO: 1886869
agcauucuggguggagaga

SEQ ID NO: 2432089 - RNA, 19 nt, Artificial Sequence
  Description of Artificial Sequence: Synthetic oligonucleotide
  Antisense strand to SEQ ID NO: 2432088
ucucuccacccagaaugcu

SEQ ID NO: 2432090 - RNA, 19 nt, Artificial Sequence
  Description of Artificial Sequence: Synthetic oligonucleotide
  Sense strand starting at position 2550 of SEQ ID NO: 1886869
gcauucuggguggagagau

SEQ ID NO: 2432091 - RNA, 19 nt, Artificial Sequence
  Description of Artificial Sequence: Synthetic oligonucleotide
  Antisense strand to SEQ ID NO: 2432090
aucucuccacccagaaugc

SEQ ID NO: 2432092 - RNA, 19 nt, Artificial Sequence
  Description of Artificial Sequence: Synthetic oligonucleotide
  Sense strand starting at position 2562 of SEQ ID NO: 1886869
gagagauugccacguguaa

SEQ ID NO: 2432093 - RNA, 19 nt, Artificial Sequence
  Description of Artificial Sequence: Synthetic oligonucleotide
  Antisense strand to SEQ ID NO: 2432092
uuacacguggcaaucucuc

SEQ ID NO: 2432094 - RNA, 19 nt, Artificial Sequence
  Description of Artificial Sequence: Synthetic oligonucleotide
  Sense strand starting at position 2564 of SEQ ID NO: 1886869
gagauugccacguguaaau

SEQ ID NO: 2432095 - RNA, 19 nt, Artificial Sequence
  Description of Artificial Sequence: Synthetic oligonucleotide
  Antisense strand to SEQ ID NO: 2432094
auuuacacguggcaaucuc

SEQ ID NO: 2432096 - RNA, 19 nt, Artificial Sequence
  Description of Artificial Sequence: Synthetic oligonucleotide
  Sense strand starting at position 2754 of SEQ ID NO: 1886869
uuggaaagaugagaacauu

SEQ ID NO: 2432097 - RNA, 19 nt, Artificial Sequence
  Description of Artificial Sequence: Synthetic oligonucleotide
  Antisense strand to SEQ ID NO: 2432096
aauguucucaucuuuccaa

SEQ ID NO: 2432098 - RNA, 19 nt, Artificial Sequence
  Description of Artificial Sequence: Synthetic oligonucleotide
  Sense strand starting at position 2818 of SEQ ID NO: 1886869
ggagaaaucucgcucuguc

SEQ ID NO: 2432099 - RNA, 19 nt, Artificial Sequence
  Description of Artificial Sequence: Synthetic oligonucleotide
  Antisense strand to SEQ ID NO: 2432098
gacagagcgagauuucucc

SEQ ID NO: 2432100 - RNA, 19 nt, Artificial Sequence
  Description of Artificial Sequence: Synthetic oligonucleotide
  Sense strand starting at position 3093 of SEQ ID NO: 1886869
agccauaguugucucuuaa

SEQ ID NO: 2432101 - RNA, 19 nt, Artificial Sequence
  Description of Artificial Sequence: Synthetic oligonucleotide
  Antisense strand to SEQ ID NO: 2432100
uuaagagacaacuauggcu

SEQ ID NO: 2432102 - RNA, 19 nt, Artificial Sequence
  Description of Artificial Sequence: Synthetic oligonucleotide
  Sense strand starting at position 3207 of SEQ ID NO: 1886869
gguagucuacuugagguca

SEQ ID NO: 2432103 - RNA, 19 nt, Artificial Sequence
  Description of Artificial Sequence: Synthetic oligonucleotide
  Antisense strand to SEQ ID NO: 2432102
ugaccucaaguagacuacc

SEQ ID NO: 2432104 - RNA, 19 nt, Artificial Sequence
  Description of Artificial Sequence: Synthetic oligonucleotide
  Sense strand starting at position 3243 of SEQ ID NO: 1886869
ggagcuggguuauuauuau

SEQ ID NO: 2432105 - RNA, 19 nt, Artificial Sequence
  Description of Artificial Sequence: Synthetic oligonucleotide
  Antisense strand to SEQ ID NO: 2432104
auaauaauaacccagcucc

SEQ ID NO: 2432106 - RNA, 19 nt, Artificial Sequence
  Description of Artificial Sequence: Synthetic oligonucleotide
  Sense strand starting at position 3583 of SEQ ID NO: 1886869
agauaugucugacuccauc

SEQ ID NO: 2432107 - RNA, 19 nt, Artificial Sequence
  Description of Artificial Sequence: Synthetic oligonucleotide
  Antisense strand to SEQ ID NO: 2432106
gauggagucagacauaucu

SEQ ID NO: 2432108 - RNA, 19 nt, Artificial Sequence
  Description of Artificial Sequence: Synthetic oligonucleotide
  Sense strand starting at position 3630 of SEQ ID NO: 1886869
cccagagcucacgacuaua

SEQ ID NO: 2432109 - RNA, 19 nt, Artificial Sequence
  Description of Artificial Sequence: Synthetic oligonucleotide
  Antisense strand to SEQ ID NO: 2432108
uauagucgugagcucuggg

SEQ ID NO: 2432110 - RNA, 19 nt, Artificial Sequence
  Description of Artificial Sequence: Synthetic oligonucleotide
  Sense strand starting at position 3748 of SEQ ID NO: 1886869
uggagagaguuugacauca

SEQ ID NO: 2432111 - RNA, 19 nt, Artificial Sequence
  Description of Artificial Sequence: Synthetic oligonucleotide
  Antisense strand to SEQ ID NO: 2432110
ugaugucaaacucucucca

SEQ ID NO: 2432112 - RNA, 19 nt, Artificial Sequence
  Description of Artificial Sequence: Synthetic oligonucleotide
  Sense strand starting at position 3758 of SEQ ID NO: 1886869
uugacaucauuugaggaga

SEQ ID NO: 2432113 - RNA, 19 nt, Artificial Sequence
  Description of Artificial Sequence: Synthetic oligonucleotide
  Antisense strand to SEQ ID NO: 2432112
ucuccucaaaugaugucaa

SEQ ID NO: 2432114 - RNA, 19 nt, Artificial Sequence
  Description of Artificial Sequence: Synthetic oligonucleotide
  Sense strand starting at position 3760 of SEQ ID NO: 1886869
gacaucauuugaggagaac

SEQ ID NO: 2432115 - RNA, 19 nt, Artificial Sequence
  Description of Artificial Sequence: Synthetic oligonucleotide
  Antisense strand to SEQ ID NO: 2432114
guucuccucaaaugauguc

SEQ ID NO: 2432116 - RNA, 19 nt, Artificial Sequence
  Description of Artificial Sequence: Synthetic oligonucleotide
  Sense strand starting at position 3948 of SEQ ID NO: 1886869
cggucaugugcccuuguaa

SEQ ID NO: 2432117 - RNA, 19 nt, Artificial Sequence
  Description of Artificial Sequence: Synthetic oligonucleotide
  Antisense strand to SEQ ID NO: 2432116
uuacaagggcacaugaccg

SEQ ID NO: 2432118 - RNA, 19 nt, Artificial Sequence
  Description of Artificial Sequence: Synthetic oligonucleotide
  Sense strand starting at position 310 of SEQ ID NO: 1886870
auguauaaggguugaugau

SEQ ID NO: 2432119 - RNA, 19 nt, Artificial Sequence
  Description of Artificial Sequence: Synthetic oligonucleotide
  Antisense strand to SEQ ID NO: 2432118
aucaucaacccuuauacau

SEQ ID NO: 2432120 - RNA, 19 nt, Artificial Sequence
  Description of Artificial Sequence: Synthetic oligonucleotide
  Sense strand starting at position 333 of SEQ ID NO: 1886870
agcuuuaaauaucuaggaa

SEQ ID NO: 2432121 - RNA, 19 nt, Artificial Sequence
  Description of Artificial Sequence: Synthetic oligonucleotide
  Antisense strand to SEQ ID NO: 2432120
uuccuagauauuuaaagcu

SEQ ID NO: 2432122 - RNA, 19 nt, Artificial Sequence
  Description of Artificial Sequence: Synthetic oligonucleotide
  Sense strand starting at position 337 of SEQ ID NO: 1886870
uuaaauaucuaggaagaag

SEQ ID NO: 2432123 - RNA, 19 nt, Artificial Sequence
  Description of Artificial Sequence: Synthetic oligonucleotide
  Antisense strand to SEQ ID NO: 2432122
cuucuuccuagauauuuaa

SEQ ID NO: 2432124 - RNA, 19 nt, Artificial Sequence
  Description of Artificial Sequence: Synthetic oligonucleotide
  Sense strand starting at position 517 of SEQ ID NO: 1886870
cuauucauugcguccgagu

SEQ ID NO: 2432125 - RNA, 19 nt, Artificial Sequence
  Description of Artificial Sequence: Synthetic oligonucleotide
  Antisense strand to SEQ ID NO: 2432124
acucggacgcaaugaauag

SEQ ID NO: 2432126 - RNA, 19 nt, Artificial Sequence
  Description of Artificial Sequence: Synthetic oligonucleotide
  Sense strand starting at position 645 of SEQ ID NO: 1886870
acgggcuugguaugaagau

SEQ ID NO: 2432127 - RNA, 19 nt, Artificial Sequence
  Description of Artificial Sequence: Synthetic oligonucleotide
  Antisense strand to SEQ ID NO: 2432126
aucuucauaccaagcccgu

SEQ ID NO: 2432128 - RNA, 19 nt, Artificial Sequence
  Description of Artificial Sequence: Synthetic oligonucleotide
  Sense strand starting at position 660 of SEQ ID NO: 1886870
agauauaaaguauguugca

SEQ ID NO: 2432129 - RNA, 19 nt, Artificial Sequence
  Description of Artificial Sequence: Synthetic oligonucleotide
  Antisense strand to SEQ ID NO: 2432128
ugcaacauacuuuauaucu

SEQ ID NO: 2432130 - RNA, 19 nt, Artificial Sequence
  Description of Artificial Sequence: Synthetic oligonucleotide
  Sense strand starting at position 661 of SEQ ID NO: 1886870
gauauaaaguauguugcaa

SEQ ID NO: 2432131 - RNA, 19 nt, Artificial Sequence
  Description of Artificial Sequence: Synthetic oligonucleotide
  Antisense strand to SEQ ID NO: 2432130
uugcaacauacuuuauauc

SEQ ID NO: 2432132 - RNA, 19 nt, Artificial Sequence
  Description of Artificial Sequence: Synthetic oligonucleotide
  Sense strand starting at position 683 of SEQ ID NO: 1886870
gacugagggcacuguagau

SEQ ID NO: 2432133 - RNA, 19 nt, Artificial Sequence
  Description of Artificial Sequence: Synthetic oligonucleotide
  Antisense strand to SEQ ID NO: 2432132
aucuacagugcccucaguc

SEQ ID NO: 2432134 - RNA, 19 nt, Artificial Sequence
  Description of Artificial Sequence: Synthetic oligonucleotide
  Sense strand starting at position 773 of SEQ ID NO: 1886870
ucaauucugcuuuaggauu

SEQ ID NO: 2432135 - RNA, 19 nt, Artificial Sequence
  Description of Artificial Sequence: Synthetic oligonucleotide
  Antisense strand to SEQ ID NO: 2432134
aauccuaaagcagaauuga

SEQ ID NO: 2432136 - RNA, 19 nt, Artificial Sequence
  Description of Artificial Sequence: Synthetic oligonucleotide
  Sense strand starting at position 977 of SEQ ID NO: 1886870
uuccuuggugcuuaacuua

SEQ ID NO: 2432137 - RNA, 19 nt, Artificial Sequence
  Description of Artificial Sequence: Synthetic oligonucleotide
  Antisense strand to SEQ ID NO: 2432136
uaaguuaagcaccaaggaa

SEQ ID NO: 2432138 - RNA, 19 nt, Artificial Sequence
  Description of Artificial Sequence: Synthetic oligonucleotide
  Sense strand starting at position 980 of SEQ ID NO: 1886870
cuuggugcuuaacuuaaga

SEQ ID NO: 2432139 - RNA, 19 nt, Artificial Sequence
  Description of Artificial Sequence: Synthetic oligonucleotide
  Antisense strand to SEQ ID NO: 2432138
ucuuaaguuaagcaccaag

SEQ ID NO: 2432140 - RNA, 19 nt, Artificial Sequence
  Description of Artificial Sequence: Synthetic oligonucleotide
  Sense strand starting at position 1004 of SEQ ID NO: 1886870
cagugcugggaaggauaaa

SEQ ID NO: 2432141 - RNA, 19 nt, Artificial Sequence
  Description of Artificial Sequence: Synthetic oligonucleotide
  Antisense strand to SEQ ID NO: 2432140
uuuauccuucccagcacug

SEQ ID NO: 2432142 - RNA, 19 nt, Artificial Sequence
  Description of Artificial Sequence: Synthetic oligonucleotide
  Sense strand starting at position 1043 of SEQ ID NO: 1886870
ggaagaggagucugacgua

SEQ ID NO: 2432143 - RNA, 19 nt, Artificial Sequence
  Description of Artificial Sequence: Synthetic oligonucleotide
  Antisense strand to SEQ ID NO: 2432142
uacgucagacuccucuucc

SEQ ID NO: 2432144 - RNA, 19 nt, Artificial Sequence
  Description of Artificial Sequence: Synthetic oligonucleotide
  Sense strand starting at position 1050 of SEQ ID NO: 1886870
gagucugacguagagaaca

SEQ ID NO: 2432145 - RNA, 19 nt, Artificial Sequence
  Description of Artificial Sequence: Synthetic oligonucleotide
  Antisense strand to SEQ ID NO: 2432144
uguucucuacgucagacuc

SEQ ID NO: 2432146 - RNA, 19 nt, Artificial Sequence
  Description of Artificial Sequence: Synthetic oligonucleotide
  Sense strand starting at position 1108 of SEQ ID NO: 1886870
cuuugacuucugggauaac

SEQ ID NO: 2432147 - RNA, 19 nt, Artificial Sequence
  Description of Artificial Sequence: Synthetic oligonucleotide
  Antisense strand to SEQ ID NO: 2432146
guuaucccagaagucaaag

SEQ ID NO: 2432148 - RNA, 19 nt, Artificial Sequence
  Description of Artificial Sequence: Synthetic oligonucleotide
  Sense strand starting at position 1130 of SEQ ID NO: 1886870
gggcaaccaggucaauuau

SEQ ID NO: 2432149 - RNA, 19 nt, Artificial Sequence
  Description of Artificial Sequence: Synthetic oligonucleotide
  Antisense strand to SEQ ID NO: 2432148
auaauugaccugguugccc

SEQ ID NO: 2432150 - RNA, 19 nt, Artificial Sequence
  Description of Artificial Sequence: Synthetic oligonucleotide
  Sense strand starting at position 1346 of SEQ ID NO: 1886870
gcaccagaccucugaaauu

SEQ ID NO: 2432151 - RNA, 19 nt, Artificial Sequence
  Description of Artificial Sequence: Synthetic oligonucleotide
  Antisense strand to SEQ ID NO: 2432150
aauuucagaggucuggugc

SEQ ID NO: 2432152 - RNA, 19 nt, Artificial Sequence
  Description of Artificial Sequence: Synthetic oligonucleotide
  Sense strand starting at position 1358 of SEQ ID NO: 1886870
ugaaauugcccucggagac

SEQ ID NO: 2432153 - RNA, 19 nt, Artificial Sequence
  Description of Artificial Sequence: Synthetic oligonucleotide
  Antisense strand to SEQ ID NO: 2432152
gucuccgagggcaauuuca

SEQ ID NO: 2432154 - RNA, 19 nt, Artificial Sequence
  Description of Artificial Sequence: Synthetic oligonucleotide
  Sense strand starting at position 1359 of SEQ ID NO: 1886870
gaaauugcccucggagacu

SEQ ID NO: 2432155 - RNA, 19 nt, Artificial Sequence
  Description of Artificial Sequence: Synthetic oligonucleotide
  Antisense strand to SEQ ID NO: 2432154
agucuccgagggcaauuuc

SEQ ID NO: 2432156 - RNA, 19 nt, Artificial Sequence
  Description of Artificial Sequence: Synthetic oligonucleotide
  Sense strand starting at position 2041 of SEQ ID NO: 1886870
cuuccaauccuagagaguc

SEQ ID NO: 2432157 - RNA, 19 nt, Artificial Sequence
  Description of Artificial Sequence: Synthetic oligonucleotide
  Antisense strand to SEQ ID NO: 2432156
gacucucuaggauuggaag

SEQ ID NO: 2432158 - RNA, 19 nt, Artificial Sequence
  Description of Artificial Sequence: Synthetic oligonucleotide
  Sense strand starting at position 2049 of SEQ ID NO: 1886870
ccuagagagucuuccugaa

SEQ ID NO: 2432159 - RNA, 19 nt, Artificial Sequence
  Description of Artificial Sequence: Synthetic oligonucleotide
  Antisense strand to SEQ ID NO: 2432158
uucaggaagacucucuagg

SEQ ID NO: 2432160 - RNA, 19 nt, Artificial Sequence
  Description of Artificial Sequence: Synthetic oligonucleotide
  Sense strand starting at position 2051 of SEQ ID NO: 1886870
uagagagucuuccugaaag

SEQ ID NO: 2432161 - RNA, 19 nt, Artificial Sequence
  Description of Artificial Sequence: Synthetic oligonucleotide
  Antisense strand to SEQ ID NO: 2432160
cuuucaggaagacucucua

SEQ ID NO: 2432162 - RNA, 19 nt, Artificial Sequence
  Description of Artificial Sequence: Synthetic oligonucleotide
  Sense strand starting at position 2053 of SEQ ID NO: 1886870
gagagucuuccugaaaggc

SEQ ID NO: 2432163 - RNA, 19 nt, Artificial Sequence
  Description of Artificial Sequence: Synthetic oligonucleotide
  Antisense strand to SEQ ID NO: 2432162
gccuuucaggaagacucuc

SEQ ID NO: 2432164 - RNA, 19 nt, Artificial Sequence
  Description of Artificial Sequence: Synthetic oligonucleotide
  Sense strand starting at position 2166 of SEQ ID NO: 1886870
cagcuucuucccgggaaag

SEQ ID NO: 2432165 - RNA, 19 nt, Artificial Sequence
  Description of Artificial Sequence: Synthetic oligonucleotide
  Antisense strand to SEQ ID NO: 2432164
cuuucccgggaagaagcug

SEQ ID NO: 2432166 - RNA, 19 nt, Artificial Sequence
  Description of Artificial Sequence: Synthetic oligonucleotide
  Sense strand starting at position 2189 of SEQ ID NO: 1886870
gagacacuuugagcucagu

SEQ ID NO: 2432167 - RNA, 19 nt, Artificial Sequence
  Description of Artificial Sequence: Synthetic oligonucleotide
  Antisense strand to SEQ ID NO: 2432166
acugagcucaaagugucuc

SEQ ID NO: 2432168 - RNA, 19 nt, Artificial Sequence
  Description of Artificial Sequence: Synthetic oligonucleotide
  Sense strand starting at position 2378 of SEQ ID NO: 1886870
gugccaucucagcauuaag

SEQ ID NO: 2432169 - RNA, 19 nt, Artificial Sequence
  Description of Artificial Sequence: Synthetic oligonucleotide
  Antisense strand to SEQ ID NO: 2432168
cuuaaugcugagauggcac

SEQ ID NO: 2432170 - RNA, 19 nt, Artificial Sequence
  Description of Artificial Sequence: Synthetic oligonucleotide
  Sense strand starting at position 2539 of SEQ ID NO: 1886870
gcggucuggauugagaauu

SEQ ID NO: 2432171 - RNA, 19 nt, Artificial Sequence
  Description of Artificial Sequence: Synthetic oligonucleotide
  Antisense strand to SEQ ID NO: 2432170
aauucucaauccagaccgc

SEQ ID NO: 2432172 - RNA, 19 nt, Artificial Sequence
  Description of Artificial Sequence: Synthetic oligonucleotide
  Sense strand starting at position 2650 of SEQ ID NO: 1886870
ggguuaaauuggaggagua

SEQ ID NO: 2432173 - RNA, 19 nt, Artificial Sequence
  Description of Artificial Sequence: Synthetic oligonucleotide
  Antisense strand to SEQ ID NO: 2432172
uacuccuccaauuuaaccc

SEQ ID NO: 2432174 - RNA, 19 nt, Artificial Sequence
  Description of Artificial Sequence: Synthetic oligonucleotide
  Sense strand starting at position 2651 of SEQ ID NO: 1886870
gguuaaauuggaggaguau

SEQ ID NO: 2432175 - RNA, 19 nt, Artificial Sequence
  Description of Artificial Sequence: Synthetic oligonucleotide
  Antisense strand to SEQ ID NO: 2432174
auacuccuccaauuuaacc

SEQ ID NO: 2432176 - RNA, 19 nt, Artificial Sequence
  Description of Artificial Sequence: Synthetic oligonucleotide
  Sense strand starting at position 2664 of SEQ ID NO: 1886870
gaguaugaggaguagcuuu

SEQ ID NO: 2432177 - RNA, 19 nt, Artificial Sequence
  Description of Artificial Sequence: Synthetic oligonucleotide
  Antisense strand to SEQ ID NO: 2432176
aaagcuacuccucauacuc

SEQ ID NO: 2432178 - RNA, 19 nt, Artificial Sequence
  Description of Artificial Sequence: Synthetic oligonucleotide
  Sense strand starting at position 2675 of SEQ ID NO: 1886870
guagcuuuacaauguaaag

SEQ ID NO: 2432179 - RNA, 19 nt, Artificial Sequence
  Description of Artificial Sequence: Synthetic oligonucleotide
  Antisense strand to SEQ ID NO: 2432178
cuuuacauuguaaagcuac

SEQ ID NO: 2432180 - RNA, 19 nt, Artificial Sequence
  Description of Artificial Sequence: Synthetic oligonucleotide
  Sense strand starting at position 3063 of SEQ ID NO: 1886870
cuuccaucuguugaugacu

SEQ ID NO: 2432181 - RNA, 19 nt, Artificial Sequence
  Description of Artificial Sequence: Synthetic oligonucleotide
  Antisense strand to SEQ ID NO: 2432180
agucaucaacagauggaag

SEQ ID NO: 2432182 - RNA, 19 nt, Artificial Sequence
  Description of Artificial Sequence: Synthetic oligonucleotide
  Sense strand starting at position 3068 of SEQ ID NO: 1886870
aucuguugaugacucucaa

SEQ ID NO: 2432183 - RNA, 19 nt, Artificial Sequence
  Description of Artificial Sequence: Synthetic oligonucleotide
  Antisense strand to SEQ ID NO: 2432182
uugagagucaucaacagau

SEQ ID NO: 2432184 - RNA, 19 nt, Artificial Sequence
  Description of Artificial Sequence: Synthetic oligonucleotide
  Sense strand starting at position 3242 of SEQ ID NO: 1886870
acaaauguuggauguaauu

SEQ ID NO: 2432185 - RNA, 19 nt, Artificial Sequence
  Description of Artificial Sequence: Synthetic oligonucleotide
  Antisense strand to SEQ ID NO: 2432184
aauuacauccaacauuugu

SEQ ID NO: 2432186 - RNA, 19 nt, Artificial Sequence
  Description of Artificial Sequence: Synthetic oligonucleotide
  Sense strand starting at position 3269 of SEQ ID NO: 1886870
uccuaaauuccguaucuug

SEQ ID NO: 2432187 - RNA, 19 nt, Artificial Sequence
  Description of Artificial Sequence: Synthetic oligonucleotide
  Antisense strand to SEQ ID NO: 2432186
caagauacggaauuuagga

SEQ ID NO: 2432188 - RNA, 19 nt, Artificial Sequence
  Description of Artificial Sequence: Synthetic oligonucleotide
  Sense strand starting at position 3320 of SEQ ID NO: 1886870
uccaauuuguugccaaguu

SEQ ID NO: 2432189 - RNA, 19 nt, Artificial Sequence
  Description of Artificial Sequence: Synthetic oligonucleotide
  Antisense strand to SEQ ID NO: 2432188
aacuuggcaacaaauugga

SEQ ID NO: 2432190 - RNA, 19 nt, Artificial Sequence
  Description of Artificial Sequence: Synthetic oligonucleotide
  Sense strand starting at position 3538 of SEQ ID NO: 1886870
uguacuccagcauggagaa

SEQ ID NO: 2432191 - RNA, 19 nt, Artificial Sequence
  Description of Artificial Sequence: Synthetic oligonucleotide
  Antisense strand to SEQ ID NO: 2432190
uucuccaugcuggaguaca

SEQ ID NO: 2432192 - RNA, 19 nt, Artificial Sequence
  Description of Artificial Sequence: Synthetic oligonucleotide
  Sense strand starting at position 3539 of SEQ ID NO: 1886870
guacuccagcauggagaaa

SEQ ID NO: 2432193 - RNA, 19 nt, Artificial Sequence
  Description of Artificial Sequence: Synthetic oligonucleotide
  Antisense strand to SEQ ID NO: 2432192
uuucuccaugcuggaguac

SEQ ID NO: 2432194 - RNA, 19 nt, Artificial Sequence
  Description of Artificial Sequence: Synthetic oligonucleotide
  Sense strand starting at position 3689 of SEQ ID NO: 1886870
gagugaccuuccucaggga

SEQ ID NO: 2432195 - RNA, 19 nt, Artificial Sequence
  Description of Artificial Sequence: Synthetic oligonucleotide
  Antisense strand to SEQ ID NO: 2432194
ucccugaggaaggucacuc

SEQ ID NO: 2432196 - RNA, 19 nt, Artificial Sequence
  Description of Artificial Sequence: Synthetic oligonucleotide
  Sense strand starting at position 3745 of SEQ ID NO: 1886870
ccgucaauuugaucucuuu

SEQ ID NO: 2432197 - RNA, 19 nt, Artificial Sequence
  Description of Artificial Sequence: Synthetic oligonucleotide
  Antisense strand to SEQ ID NO: 2432196
aaagagaucaaauugacgg

SEQ ID NO: 2432198 - RNA, 19 nt, Artificial Sequence
  Description of Artificial Sequence: Synthetic oligonucleotide
  Sense strand starting at position 183 of SEQ ID NO: 1886871
auaagauacuacuugcaag

SEQ ID NO: 2432199 - RNA, 19 nt, Artificial Sequence
  Description of Artificial Sequence: Synthetic oligonucleotide
  Antisense strand to SEQ ID NO: 2432198
cuugcaaguaguaucuuau

SEQ ID NO: 2432200 - RNA, 19 nt, Artificial Sequence
  Description of Artificial Sequence: Synthetic oligonucleotide
  Sense strand starting at position 372 of SEQ ID NO: 1886871
uggcaagaauuacuuauca

SEQ ID NO: 2432201 - RNA, 19 nt, Artificial Sequence
  Description of Artificial Sequence: Synthetic oligonucleotide
  Antisense strand to SEQ ID NO: 2432200
ugauaaguaauucuugcca

SEQ ID NO: 2432202 - RNA, 19 nt, Artificial Sequence
  Description of Artificial Sequence: Synthetic oligonucleotide
  Sense strand starting at position 435 of SEQ ID NO: 1886871
cagagugguugacuggaua

SEQ ID NO: 2432203 - RNA, 19 nt, Artificial Sequence
  Description of Artificial Sequence: Synthetic oligonucleotide
  Antisense strand to SEQ ID NO: 2432202
uauccagucaaccacucug

SEQ ID NO: 2432204 - RNA, 19 nt, Artificial Sequence
  Description of Artificial Sequence: Synthetic oligonucleotide
  Sense strand starting at position 633 of SEQ ID NO: 1886871
caaaguuuauaaugaugga

SEQ ID NO: 2432205 - RNA, 19 nt, Artificial Sequence
  Description of Artificial Sequence: Synthetic oligonucleotide
  Antisense strand to SEQ ID NO: 2432204
uccaucauuauaaacuuug

SEQ ID NO: 2432206 - RNA, 19 nt, Artificial Sequence
  Description of Artificial Sequence: Synthetic oligonucleotide
  Sense strand starting at position 637 of SEQ ID NO: 1886871
guuuauaaugauggaguca

SEQ ID NO: 2432207 - RNA, 19 nt, Artificial Sequence
  Description of Artificial Sequence: Synthetic oligonucleotide
  Antisense strand to SEQ ID NO: 2432206
ugacuccaucauuauaaac

SEQ ID NO: 2432208 - RNA, 19 nt, Artificial Sequence
  Description of Artificial Sequence: Synthetic oligonucleotide
  Sense strand starting at position 845 of SEQ ID NO: 1886871
cuuaaucuguacuguagau

SEQ ID NO: 2432209 - RNA, 19 nt, Artificial Sequence
  Description of Artificial Sequence: Synthetic oligonucleotide
  Antisense strand to SEQ ID NO: 2432208
aucuacaguacagauuaag

SEQ ID NO: 2432210 - RNA, 19 nt, Artificial Sequence
  Description of Artificial Sequence: Synthetic oligonucleotide
  Sense strand starting at position 849 of SEQ ID NO: 1886871
aucuguacuguagaucaaa

SEQ ID NO: 2432211 - RNA, 19 nt, Artificial Sequence
  Description of Artificial Sequence: Synthetic oligonucleotide
  Antisense strand to SEQ ID NO: 2432210
uuugaucuacaguacagau

SEQ ID NO: 2432212 - RNA, 19 nt, Artificial Sequence
  Description of Artificial Sequence: Synthetic oligonucleotide
  Sense strand starting at position 876 of SEQ ID NO: 1886871
auggauauuuauggaacau

SEQ ID NO: 2432213 - RNA, 19 nt, Artificial Sequence
  Description of Artificial Sequence: Synthetic oligonucleotide
  Antisense strand to SEQ ID NO: 2432212
auguuccauaaauauccau

SEQ ID NO: 2432214 - RNA, 19 nt, Artificial Sequence
  Description of Artificial Sequence: Synthetic oligonucleotide
  Sense strand starting at position 1985 of SEQ ID NO: 1886871
aggcauaaguagcaauauu

SEQ ID NO: 2432215 - RNA, 19 nt, Artificial Sequence
  Description of Artificial Sequence: Synthetic oligonucleotide
  Antisense strand to SEQ ID NO: 2432214
aauauugcuacuuaugccu

SEQ ID NO: 2432216 - RNA, 19 nt, Artificial Sequence
  Description of Artificial Sequence: Synthetic oligonucleotide
  Sense strand starting at position 2089 of SEQ ID NO: 1886871
ggauucaaguguucuucgu

SEQ ID NO: 2432217 - RNA, 19 nt, Artificial Sequence
  Description of Artificial Sequence: Synthetic oligonucleotide
  Antisense strand to SEQ ID NO: 2432216
acgaagaacacuugaaucc

SEQ ID NO: 2432218 - RNA, 19 nt, Artificial Sequence
  Description of Artificial Sequence: Synthetic oligonucleotide
  Sense strand starting at position 2093 of SEQ ID NO: 1886871
ucaaguguucuucguaccu

SEQ ID NO: 2432219 - RNA, 19 nt, Artificial Sequence
  Description of Artificial Sequence: Synthetic oligonucleotide
  Antisense strand to SEQ ID NO: 2432218
agguacgaagaacacuuga

SEQ ID NO: 2432220 - RNA, 19 nt, Artificial Sequence
  Description of Artificial Sequence: Synthetic oligonucleotide
  Sense strand starting at position 2095 of SEQ ID NO: 1886871
aaguguucuucguaccuca

SEQ ID NO: 2432221 - RNA, 19 nt, Artificial Sequence
  Description of Artificial Sequence: Synthetic oligonucleotide
  Antisense strand to SEQ ID NO: 2432220
ugagguacgaagaacacuu

SEQ ID NO: 2432222 - RNA, 19 nt, Artificial Sequence
  Description of Artificial Sequence: Synthetic oligonucleotide
  Sense strand starting at position 2097 of SEQ ID NO: 1886871
guguucuucguaccucagu

SEQ ID NO: 2432223 - RNA, 19 nt, Artificial Sequence
  Description of Artificial Sequence: Synthetic oligonucleotide
  Antisense strand to SEQ ID NO: 2432222
acugagguacgaagaacac

SEQ ID NO: 2432224 - RNA, 19 nt, Artificial Sequence
  Description of Artificial Sequence: Synthetic oligonucleotide
  Sense strand starting at position 2304 of SEQ ID NO: 1886871
guaagugugagccaugaca

SEQ ID NO: 2432225 - RNA, 19 nt, Artificial Sequence
  Description of Artificial Sequence: Synthetic oligonucleotide
  Antisense strand to SEQ ID NO: 2432224
ugucauggcucacacuuac

SEQ ID NO: 2432226 - RNA, 19 nt, Artificial Sequence
  Description of Artificial Sequence: Synthetic oligonucleotide
  Sense strand starting at position 2306 of SEQ ID NO: 1886871
aagugugagccaugacaau

SEQ ID NO: 2432227 - RNA, 19 nt, Artificial Sequence
  Description of Artificial Sequence: Synthetic oligonucleotide
  Antisense strand to SEQ ID NO: 2432226
auugucauggcucacacuu

SEQ ID NO: 2432228 - RNA, 19 nt, Artificial Sequence
  Description of Artificial Sequence: Synthetic oligonucleotide
  Sense strand starting at position 2315 of SEQ ID NO: 1886871
ccaugacaaucugccugaa

SEQ ID NO: 2432229 - RNA, 19 nt, Artificial Sequence
  Description of Artificial Sequence: Synthetic oligonucleotide
  Antisense strand to SEQ ID NO: 2432228
uucaggcagauugucaugg

SEQ ID NO: 2432230 - RNA, 19 nt, Artificial Sequence
  Description of Artificial Sequence: Synthetic oligonucleotide
  Sense strand starting at position 2708 of SEQ ID NO: 1886871
gugaaagacuuauacacuu

SEQ ID NO: 2432231 - RNA, 19 nt, Artificial Sequence
  Description of Artificial Sequence: Synthetic oligonucleotide
  Antisense strand to SEQ ID NO: 2432230
aaguguauaagucuuucac

SEQ ID NO: 2432232 - RNA, 19 nt, Artificial Sequence
  Description of Artificial Sequence: Synthetic oligonucleotide
  Sense strand starting at position 2886 of SEQ ID NO: 1886871
acagccuacuuuguagaaa

SEQ ID NO: 2432233 - RNA, 19 nt, Artificial Sequence
  Description of Artificial Sequence: Synthetic oligonucleotide
  Antisense strand to SEQ ID NO: 2432232
uuucuacaaaguaggcugu

SEQ ID NO: 2432234 - RNA, 19 nt, Artificial Sequence
  Description of Artificial Sequence: Synthetic oligonucleotide
  Sense strand starting at position 3214 of SEQ ID NO: 1886871
ggugauuucuccuaccuca

SEQ ID NO: 2432235 - RNA, 19 nt, Artificial Sequence
  Description of Artificial Sequence: Synthetic oligonucleotide
  Antisense strand to SEQ ID NO: 2432234
ugagguaggagaaaucacc

SEQ ID NO: 2432236 - RNA, 19 nt, Artificial Sequence
  Description of Artificial Sequence: Synthetic oligonucleotide
  Sense strand starting at position 3379 of SEQ ID NO: 1886871
gccaaaugauuguugacaa

SEQ ID NO: 2432237 - RNA, 19 nt, Artificial Sequence
  Description of Artificial Sequence: Synthetic oligonucleotide
  Antisense strand to SEQ ID NO: 2432236
uugucaacaaucauuuggc

SEQ ID NO: 2432238 - RNA, 19 nt, Artificial Sequence
  Description of Artificial Sequence: Synthetic oligonucleotide
  Sense strand starting at position 3380 of SEQ ID NO: 1886871
ccaaaugauuguugacaag

SEQ ID NO: 2432239 - RNA, 19 nt, Artificial Sequence
  Description of Artificial Sequence: Synthetic oligonucleotide
  Antisense strand to SEQ ID NO: 2432238
cuugucaacaaucauuugg

SEQ ID NO: 2432240 - RNA, 19 nt, Artificial Sequence
  Description of Artificial Sequence: Synthetic oligonucleotide
  Sense strand starting at position 3398 of SEQ ID NO: 1886871
ggaugccaagucuaaucaa

SEQ ID NO: 2432241 - RNA, 19 nt, Artificial Sequence
  Description of Artificial Sequence: Synthetic oligonucleotide
  Antisense strand to SEQ ID NO: 2432240
uugauuagacuuggcaucc

SEQ ID NO: 2432242 - RNA, 19 nt, Artificial Sequence
  Description of Artificial Sequence: Synthetic oligonucleotide
  Sense strand starting at position 3814 of SEQ ID NO: 1886871
gcacuccaucccugggaaa

SEQ ID NO: 2432243 - RNA, 19 nt, Artificial Sequence
  Description of Artificial Sequence: Synthetic oligonucleotide
  Antisense strand to SEQ ID NO: 2432242
uuucccagggauggagugc

SEQ ID NO: 2432244 - RNA, 19 nt, Artificial Sequence
  Description of Artificial Sequence: Synthetic oligonucleotide
  Sense strand starting at position 121 of SEQ ID NO: 1886872
gaaaguuaauugcuuugua

SEQ ID NO: 2432245 - RNA, 19 nt, Artificial Sequence
  Description of Artificial Sequence: Synthetic oligonucleotide
  Antisense strand to SEQ ID NO: 2432244
uacaaagcaauuaacuuuc

SEQ ID NO: 2432246 - RNA, 19 nt, Artificial Sequence
  Description of Artificial Sequence: Synthetic oligonucleotide
  Sense strand starting at position 124 of SEQ ID NO: 1886872
aguuaauugcuuuguaaga

SEQ ID NO: 2432247 - RNA, 19 nt, Artificial Sequence
  Description of Artificial Sequence: Synthetic oligonucleotide
  Antisense strand to SEQ ID NO: 2432246
ucuuacaaagcaauuaacu

SEQ ID NO: 2432248 - RNA, 19 nt, Artificial Sequence
  Description of Artificial Sequence: Synthetic oligonucleotide
  Sense strand starting at position 125 of SEQ ID NO: 1886872
guuaauugcuuuguaagag

SEQ ID NO: 2432249 - RNA, 19 nt, Artificial Sequence
  Description of Artificial Sequence: Synthetic oligonucleotide
  Antisense strand to SEQ ID NO: 2432248
cucuuacaaagcaauuaac

SEQ ID NO: 2432250 - RNA, 19 nt, Artificial Sequence
  Description of Artificial Sequence: Synthetic oligonucleotide
  Sense strand starting at position 177 of SEQ ID NO: 1886872
ucuaaugcuguauauuaga

SEQ ID NO: 2432251 - RNA, 19 nt, Artificial Sequence
  Description of Artificial Sequence: Synthetic oligonucleotide
  Antisense strand to SEQ ID NO: 2432250
ucuaauauacagcauuaga

SEQ ID NO: 2432252 - RNA, 19 nt, Artificial Sequence
  Description of Artificial Sequence: Synthetic oligonucleotide
  Sense strand starting at position 285 of SEQ ID NO: 1886872
aguaauaugcuaggaauau

SEQ ID NO: 2432253 - RNA, 19 nt, Artificial Sequence
  Description of Artificial Sequence: Synthetic oligonucleotide
  Antisense strand to SEQ ID NO: 2432252
auauuccuagcauauuacu

SEQ ID NO: 2432254 - RNA, 19 nt, Artificial Sequence
  Description of Artificial Sequence: Synthetic oligonucleotide
  Sense strand starting at position 644 of SEQ ID NO: 1886872
ggguuaaagugauuaucuu

SEQ ID NO: 2432255 - RNA, 19 nt, Artificial Sequence
  Description of Artificial Sequence: Synthetic oligonucleotide
  Antisense strand to SEQ ID NO: 2432254
aagauaaucacuuuaaccc

SEQ ID NO: 2432256 - RNA, 19 nt, Artificial Sequence
  Description of Artificial Sequence: Synthetic oligonucleotide
  Sense strand starting at position 645 of SEQ ID NO: 1886872
gguuaaagugauuaucuug

SEQ ID NO: 2432257 - RNA, 19 nt, Artificial Sequence
  Description of Artificial Sequence: Synthetic oligonucleotide
  Antisense strand to SEQ ID NO: 2432256
caagauaaucacuuuaacc

SEQ ID NO: 2432258 - RNA, 19 nt, Artificial Sequence
  Description of Artificial Sequence: Synthetic oligonucleotide
  Sense strand starting at position 825 of SEQ ID NO: 1886872
gugugagccaucgacaauc

SEQ ID NO: 2432259 - RNA, 19 nt, Artificial Sequence
  Description of Artificial Sequence: Synthetic oligonucleotide
  Antisense strand to SEQ ID NO: 2432258
gauugucgauggcucacac

SEQ ID NO: 2432260 - RNA, 19 nt, Artificial Sequence
  Description of Artificial Sequence: Synthetic oligonucleotide
  Sense strand starting at position 827 of SEQ ID NO: 1886872
gugagccaucgacaaucaa

SEQ ID NO: 2432261 - RNA, 19 nt, Artificial Sequence
  Description of Artificial Sequence: Synthetic oligonucleotide
  Antisense strand to SEQ ID NO: 2432260
uugauugucgauggcucac

SEQ ID NO: 2432262 - RNA, 19 nt, Artificial Sequence
  Description of Artificial Sequence: Synthetic oligonucleotide
  Sense strand starting at position 868 of SEQ ID NO: 1886872
uuagucaacucacuuguga

SEQ ID NO: 2432263 - RNA, 19 nt, Artificial Sequence
  Description of Artificial Sequence: Synthetic oligonucleotide
  Antisense strand to SEQ ID NO: 2432262
ucacaagugaguugacuaa

SEQ ID NO: 2432264 - RNA, 19 nt, Artificial Sequence
  Description of Artificial Sequence: Synthetic oligonucleotide
  Sense strand starting at position 923 of SEQ ID NO: 1886872
augaaacguucuucuuuau

SEQ ID NO: 2432265 - RNA, 19 nt, Artificial Sequence
  Description of Artificial Sequence: Synthetic oligonucleotide
  Antisense strand to SEQ ID NO: 2432264
auaaagaagaacguuucau

SEQ ID NO: 2432266 - RNA, 19 nt, Artificial Sequence
  Description of Artificial Sequence: Synthetic oligonucleotide
  Sense strand starting at position 1011 of SEQ ID NO: 1886872
auaguaaagugacccuaaa

SEQ ID NO: 2432267 - RNA, 19 nt, Artificial Sequence
  Description of Artificial Sequence: Synthetic oligonucleotide
  Antisense strand to SEQ ID NO: 2432266
uuuagggucacuuuacuau

SEQ ID NO: 2432268 - RNA, 19 nt, Artificial Sequence
  Description of Artificial Sequence: Synthetic oligonucleotide
  Sense strand starting at position 1111 of SEQ ID NO: 1886872
uuuaccuguccauggaagu

SEQ ID NO: 2432269 - RNA, 19 nt, Artificial Sequence
  Description of Artificial Sequence: Synthetic oligonucleotide
  Antisense strand to SEQ ID NO: 2432268
acuuccauggacagguaaa

SEQ ID NO: 2432270 - RNA, 19 nt, Artificial Sequence
  Description of Artificial Sequence: Synthetic oligonucleotide
  Sense strand starting at position 1112 of SEQ ID NO: 1886872
uuaccuguccauggaaguu

SEQ ID NO: 2432271 - RNA, 19 nt, Artificial Sequence
  Description of Artificial Sequence: Synthetic oligonucleotide
  Antisense strand to SEQ ID NO: 2432270
aacuuccauggacagguaa

SEQ ID NO: 2432272 - RNA, 19 nt, Artificial Sequence
  Description of Artificial Sequence: Synthetic oligonucleotide
  Sense strand starting at position 1124 of SEQ ID NO: 1886872
ggaaguuuccugcaacuua

SEQ ID NO: 2432273 - RNA, 19 nt, Artificial Sequence
  Description of Artificial Sequence: Synthetic oligonucleotide
  Antisense strand to SEQ ID NO: 2432272
uaaguugcaggaaacuucc

SEQ ID NO: 2432274 - RNA, 19 nt, Artificial Sequence
  Description of Artificial Sequence: Synthetic oligonucleotide
  Sense strand starting at position 1165 of SEQ ID NO: 1886872
ucaacaugaguuuguccuu

SEQ ID NO: 2432275 - RNA, 19 nt, Artificial Sequence
  Description of Artificial Sequence: Synthetic oligonucleotide
  Antisense strand to SEQ ID NO: 2432274
aaggacaaacucauguuga

SEQ ID NO: 2432276 - RNA, 19 nt, Artificial Sequence
  Description of Artificial Sequence: Synthetic oligonucleotide
  Sense strand starting at position 1375 of SEQ ID NO: 1886872
caaacaguguuaguaaaug

SEQ ID NO: 2432277 - RNA, 19 nt, Artificial Sequence
  Description of Artificial Sequence: Synthetic oligonucleotide
  Antisense strand to SEQ ID NO: 2432276
cauuuacuaacacuguuug

SEQ ID NO: 2432278 - RNA, 19 nt, Artificial Sequence
  Description of Artificial Sequence: Synthetic oligonucleotide
  Sense strand starting at position 1742 of SEQ ID NO: 1886872
gugauaaaccuauguagga

SEQ ID NO: 2432279 - RNA, 19 nt, Artificial Sequence
  Description of Artificial Sequence: Synthetic oligonucleotide
  Antisense strand to SEQ ID NO: 2432278
uccuacauagguuuaucac

SEQ ID NO: 2432280 - RNA, 19 nt, Artificial Sequence
  Description of Artificial Sequence: Synthetic oligonucleotide
  Sense strand starting at position 1747 of SEQ ID NO: 1886872
aaaccuauguaggacaaga

SEQ ID NO: 2432281 - RNA, 19 nt, Artificial Sequence
  Description of Artificial Sequence: Synthetic oligonucleotide
  Antisense strand to SEQ ID NO: 2432280
ucuuguccuacauagguuu

SEQ ID NO: 2432282 - RNA, 19 nt, Artificial Sequence
  Description of Artificial Sequence: Synthetic oligonucleotide
  Sense strand starting at position 1996 of SEQ ID NO: 1886872
ccaacuguauuacuguuau

SEQ ID NO: 2432283 - RNA, 19 nt, Artificial Sequence
  Description of Artificial Sequence: Synthetic oligonucleotide
  Antisense strand to SEQ ID NO: 2432282
auaacaguaauacaguugg

SEQ ID NO: 2432284 - RNA, 19 nt, Artificial Sequence
  Description of Artificial Sequence: Synthetic oligonucleotide
  Sense strand starting at position 2011 of SEQ ID NO: 1886872
uuaugacuguugcuacuga

SEQ ID NO: 2432285 - RNA, 19 nt, Artificial Sequence
  Description of Artificial Sequence: Synthetic oligonucleotide
  Antisense strand to SEQ ID NO: 2432284
ucaguagcaacagucauaa

SEQ ID NO: 2432286 - RNA, 19 nt, Artificial Sequence
  Description of Artificial Sequence: Synthetic oligonucleotide
  Sense strand starting at position 2036 of SEQ ID NO: 1886872
cuagaucauugcucaggga

SEQ ID NO: 2432287 - RNA, 19 nt, Artificial Sequence
  Description of Artificial Sequence: Synthetic oligonucleotide
  Antisense strand to SEQ ID NO: 2432286
ucccugagcaaugaucuag

SEQ ID NO: 2432288 - RNA, 19 nt, Artificial Sequence
  Description of Artificial Sequence: Synthetic oligonucleotide
  Sense strand starting at position 2040 of SEQ ID NO: 1886872
aucauugcucagggagaca

SEQ ID NO: 2432289 - RNA, 19 nt, Artificial Sequence
  Description of Artificial Sequence: Synthetic oligonucleotide
  Antisense strand to SEQ ID NO: 2432288
ugucucccugagcaaugau

SEQ ID NO: 2432290 - RNA, 19 nt, Artificial Sequence
  Description of Artificial Sequence: Synthetic oligonucleotide
  Sense strand starting at position 2135 of SEQ ID NO: 1886872
acgugauugucauccucau

SEQ ID NO: 2432291 - RNA, 19 nt, Artificial Sequence
  Description of Artificial Sequence: Synthetic oligonucleotide
  Antisense strand to SEQ ID NO: 2432290
augaggaugacaaucacgu

SEQ ID NO: 2432292 - RNA, 19 nt, Artificial Sequence
  Description of Artificial Sequence: Synthetic oligonucleotide
  Sense strand starting at position 2277 of SEQ ID NO: 1886872
uccagaggaaugugacuua

SEQ ID NO: 2432293 - RNA, 19 nt, Artificial Sequence
  Description of Artificial Sequence: Synthetic oligonucleotide
  Antisense strand to SEQ ID NO: 2432292
uaagucacauuccucugga

SEQ ID NO: 2432294 - RNA, 19 nt, Artificial Sequence
  Description of Artificial Sequence: Synthetic oligonucleotide
  Sense strand starting at position 2280 of SEQ ID NO: 1886872
agaggaaugugacuuaucu

SEQ ID NO: 2432295 - RNA, 19 nt, Artificial Sequence
  Description of Artificial Sequence: Synthetic oligonucleotide
  Antisense strand to SEQ ID NO: 2432294
agauaagucacauuccucu

SEQ ID NO: 2432296 - RNA, 19 nt, Artificial Sequence
  Description of Artificial Sequence: Synthetic oligonucleotide
  Sense strand starting at position 2284 of SEQ ID NO: 1886872
gaaugugacuuaucugguu

SEQ ID NO: 2432297 - RNA, 19 nt, Artificial Sequence
  Description of Artificial Sequence: Synthetic oligonucleotide
  Antisense strand to SEQ ID NO: 2432296
aaccagauaagucacauuc

SEQ ID NO: 2432298 - RNA, 19 nt, Artificial Sequence
  Description of Artificial Sequence: Synthetic oligonucleotide
  Sense strand starting at position 2289 of SEQ ID NO: 1886872
ugacuuaucugguuuauuc

SEQ ID NO: 2432299 - RNA, 19 nt, Artificial Sequence
  Description of Artificial Sequence: Synthetic oligonucleotide
  Antisense strand to SEQ ID NO: 2432298
gaauaaaccagauaaguca

SEQ ID NO: 2432300 - RNA, 19 nt, Artificial Sequence
  Description of Artificial Sequence: Synthetic oligonucleotide
  Sense strand starting at position 2354 of SEQ ID NO: 1886872
acugcaaaugacuguagau

SEQ ID NO: 2432301 - RNA, 19 nt, Artificial Sequence
  Description of Artificial Sequence: Synthetic oligonucleotide
  Antisense strand to SEQ ID NO: 2432300
aucuacagucauuugcagu

SEQ ID NO: 2432302 - RNA, 19 nt, Artificial Sequence
  Description of Artificial Sequence: Synthetic oligonucleotide
  Sense strand starting at position 2356 of SEQ ID NO: 1886872
ugcaaaugacuguagauuc

SEQ ID NO: 2432303 - RNA, 19 nt, Artificial Sequence
  Description of Artificial Sequence: Synthetic oligonucleotide
  Antisense strand to SEQ ID NO: 2432302
gaaucuacagucauuugca

SEQ ID NO: 2432304 - RNA, 19 nt, Artificial Sequence
  Description of Artificial Sequence: Synthetic oligonucleotide
  Sense strand starting at position 2433 of SEQ ID NO: 1886872
cuagguguuguguaaagag

SEQ ID NO: 2432305 - RNA, 19 nt, Artificial Sequence
  Description of Artificial Sequence: Synthetic oligonucleotide
  Antisense strand to SEQ ID NO: 2432304
cucuuuacacaacaccuag

SEQ ID NO: 2432306 - RNA, 19 nt, Artificial Sequence
  Description of Artificial Sequence: Synthetic oligonucleotide
  Sense strand starting at position 2519 of SEQ ID NO: 1886872
guaucuaaugcucuagcgu

SEQ ID NO: 2432307 - RNA, 19 nt, Artificial Sequence
  Description of Artificial Sequence: Synthetic oligonucleotide
  Antisense strand to SEQ ID NO: 2432306
acgcuagagcauuagauac

SEQ ID NO: 2432308 - RNA, 19 nt, Artificial Sequence
  Description of Artificial Sequence: Synthetic oligonucleotide
  Sense strand starting at position 2520 of SEQ ID NO: 1886872
uaucuaaugcucuagcgua

SEQ ID NO: 2432309 - RNA, 19 nt, Artificial Sequence
  Description of Artificial Sequence: Synthetic oligonucleotide
  Antisense strand to SEQ ID NO: 2432308
uacgcuagagcauuagaua

SEQ ID NO: 2432310 - RNA, 19 nt, Artificial Sequence
  Description of Artificial Sequence: Synthetic oligonucleotide
  Sense strand starting at position 2906 of SEQ ID NO: 1886872
ugccuuuggagagaagagu

SEQ ID NO: 2432311 - RNA, 19 nt, Artificial Sequence
  Description of Artificial Sequence: Synthetic oligonucleotide
  Antisense strand to SEQ ID NO: 2432310
acucuucucuccaaaggca

SEQ ID NO: 2432312 - RNA, 19 nt, Artificial Sequence
  Description of Artificial Sequence: Synthetic oligonucleotide
  Sense strand starting at position 3051 of SEQ ID NO: 1886872
ugguguccaucuccugaaa

SEQ ID NO: 2432313 - RNA, 19 nt, Artificial Sequence
  Description of Artificial Sequence: Synthetic oligonucleotide
  Antisense strand to SEQ ID NO: 2432312
uuucaggagauggacacca

SEQ ID NO: 2432314 - RNA, 19 nt, Artificial Sequence
  Description of Artificial Sequence: Synthetic oligonucleotide
  Sense strand starting at position 3054 of SEQ ID NO: 1886872
uguccaucuccugaaauug

SEQ ID NO: 2432315 - RNA, 19 nt, Artificial Sequence
  Description of Artificial Sequence: Synthetic oligonucleotide
  Antisense strand to SEQ ID NO: 2432314
caauuucaggagauggaca

SEQ ID NO: 2432316 - RNA, 19 nt, Artificial Sequence
  Description of Artificial Sequence: Synthetic oligonucleotide
  Sense strand starting at position 3073 of SEQ ID NO: 1886872
cugagaagcuuccuuccau

SEQ ID NO: 2432317 - RNA, 19 nt, Artificial Sequence
  Description of Artificial Sequence: Synthetic oligonucleotide
  Antisense strand to SEQ ID NO: 2432316
auggaaggaagcuucucag

SEQ ID NO: 2432318 - RNA, 19 nt, Artificial Sequence
  Description of Artificial Sequence: Synthetic oligonucleotide
  Sense strand starting at position 3074 of SEQ ID NO: 1886872
ugagaagcuuccuuccauu

SEQ ID NO: 2432319 - RNA, 19 nt, Artificial Sequence
  Description of Artificial Sequence: Synthetic oligonucleotide
  Antisense strand to SEQ ID NO: 2432318
aauggaaggaagcuucuca

SEQ ID NO: 2432320 - RNA, 19 nt, Artificial Sequence
  Description of Artificial Sequence: Synthetic oligonucleotide
  Sense strand starting at position 3172 of SEQ ID NO: 1886872
ggcaaagguuaggucuuaa

SEQ ID NO: 2432321 - RNA, 19 nt, Artificial Sequence
  Description of Artificial Sequence: Synthetic oligonucleotide
  Antisense strand to SEQ ID NO: 2432320
uuaagaccuaaccuuugcc

SEQ ID NO: 2432322 - RNA, 19 nt, Artificial Sequence
  Description of Artificial Sequence: Synthetic oligonucleotide
  Sense strand starting at position 3210 of SEQ ID NO: 1886872
cuuaaagaguucccaguuu

SEQ ID NO: 2432323 - RNA, 19 nt, Artificial Sequence
  Description of Artificial Sequence: Synthetic oligonucleotide
  Antisense strand to SEQ ID NO: 2432322
aaacugggaacucuuuaag

SEQ ID NO: 2432324 - RNA, 19 nt, Artificial Sequence
  Description of Artificial Sequence: Synthetic oligonucleotide
  Sense strand starting at position 9 of SEQ ID NO: 1886873
ggucauugcugauucagga

SEQ ID NO: 2432325 - RNA, 19 nt, Artificial Sequence
  Description of Artificial Sequence: Synthetic oligonucleotide
  Antisense strand to SEQ ID NO: 2432324
uccugaaucagcaaugacc

SEQ ID NO: 2432326 - RNA, 19 nt, Artificial Sequence
  Description of Artificial Sequence: Synthetic oligonucleotide
  Sense strand starting at position 273 of SEQ ID NO: 1886873
gggugucugaaggagcuua

SEQ ID NO: 2432327 - RNA, 19 nt, Artificial Sequence
  Description of Artificial Sequence: Synthetic oligonucleotide
  Antisense strand to SEQ ID NO: 2432326
uaagcuccuucagacaccc

SEQ ID NO: 2432328 - RNA, 19 nt, Artificial Sequence
  Description of Artificial Sequence: Synthetic oligonucleotide
  Sense strand starting at position 520 of SEQ ID NO: 1886873
caagauuuguccguccagu

SEQ ID NO: 2432329 - RNA, 19 nt, Artificial Sequence
  Description of Artificial Sequence: Synthetic oligonucleotide
  Antisense strand to SEQ ID NO: 2432328
acuggacggacaaaucuug

SEQ ID NO: 2432330 - RNA, 19 nt, Artificial Sequence
  Description of Artificial Sequence: Synthetic oligonucleotide
  Sense strand starting at position 1205 of SEQ ID NO: 1886873
uugaccuauccaugcagau

SEQ ID NO: 2432331 - RNA, 19 nt, Artificial Sequence
  Description of Artificial Sequence: Synthetic oligonucleotide
  Antisense strand to SEQ ID NO: 2432330
aucugcauggauaggucaa

SEQ ID NO: 2432332 - RNA, 19 nt, Artificial Sequence
  Description of Artificial Sequence: Synthetic oligonucleotide
  Sense strand starting at position 1209 of SEQ ID NO: 1886873
ccuauccaugcagauuaga

SEQ ID NO: 2432333 - RNA, 19 nt, Artificial Sequence
  Description of Artificial Sequence: Synthetic oligonucleotide
  Antisense strand to SEQ ID NO: 2432332
ucuaaucugcauggauagg

SEQ ID NO: 2432334 - RNA, 19 nt, Artificial Sequence
  Description of Artificial Sequence: Synthetic oligonucleotide
  Sense strand starting at position 1236 of SEQ ID NO: 1886873
uuuaaucagcacuauguga

SEQ ID NO: 2432335 - RNA, 19 nt, Artificial Sequence
  Description of Artificial Sequence: Synthetic oligonucleotide
  Antisense strand to SEQ ID NO: 2432334
ucacauagugcugauuaaa

SEQ ID NO: 2432336 - RNA, 19 nt, Artificial Sequence
  Description of Artificial Sequence: Synthetic oligonucleotide
  Sense strand starting at position 1576 of SEQ ID NO: 1886873
gagggaaauguugggcuuu

SEQ ID NO: 2432337 - RNA, 19 nt, Artificial Sequence
  Description of Artificial Sequence: Synthetic oligonucleotide
  Antisense strand to SEQ ID NO: 2432336
aaagcccaacauuucccuc

SEQ ID NO: 2432338 - RNA, 19 nt, Artificial Sequence
  Description of Artificial Sequence: Synthetic oligonucleotide
  Sense strand starting at position 1681 of SEQ ID NO: 1886873
ugguuacaguucuugacca

SEQ ID NO: 2432339 - RNA, 19 nt, Artificial Sequence
  Description of Artificial Sequence: Synthetic oligonucleotide
  Antisense strand to SEQ ID NO: 2432338
uggucaagaacuguaacca

SEQ ID NO: 2432340 - RNA, 19 nt, Artificial Sequence
  Description of Artificial Sequence: Synthetic oligonucleotide
  Sense strand starting at position 1761 of SEQ ID NO: 1886873
ggagaagguccgugcauuu

SEQ ID NO: 2432341 - RNA, 19 nt, Artificial Sequence
  Description of Artificial Sequence: Synthetic oligonucleotide
  Antisense strand to SEQ ID NO: 2432340
aaaugcacggaccuucucc

SEQ ID NO: 2432342 - RNA, 19 nt, Artificial Sequence
  Description of Artificial Sequence: Synthetic oligonucleotide
  Sense strand starting at position 1772 of SEQ ID NO: 1886873
gugcauuugaugcgacuuu

SEQ ID NO: 2432343 - RNA, 19 nt, Artificial Sequence
  Description of Artificial Sequence: Synthetic oligonucleotide
  Antisense strand to SEQ ID NO: 2432342
aaagucgcaucaaaugcac

SEQ ID NO: 2432344 - RNA, 19 nt, Artificial Sequence
  Description of Artificial Sequence: Synthetic oligonucleotide
  Sense strand starting at position 1785 of SEQ ID NO: 1886873
gacuuuagugaugagcuua

SEQ ID NO: 2432345 - RNA, 19 nt, Artificial Sequence
  Description of Artificial Sequence: Synthetic oligonucleotide
  Antisense strand to SEQ ID NO: 2432344
uaagcucaucacuaaaguc

SEQ ID NO: 2432346 - RNA, 19 nt, Artificial Sequence
  Description of Artificial Sequence: Synthetic oligonucleotide
  Sense strand starting at position 1790 of SEQ ID NO: 1886873
uagugaugagcuuaaacua

SEQ ID NO: 2432347 - RNA, 19 nt, Artificial Sequence
  Description of Artificial Sequence: Synthetic oligonucleotide
  Antisense strand to SEQ ID NO: 2432346
uaguuuaagcucaucacua

SEQ ID NO: 2432348 - RNA, 19 nt, Artificial Sequence
  Description of Artificial Sequence: Synthetic oligonucleotide
  Sense strand starting at position 2079 of SEQ ID NO: 1886873
cuggaauccucccucgaag

SEQ ID NO: 2432349 - RNA, 19 nt, Artificial Sequence
  Description of Artificial Sequence: Synthetic oligonucleotide
  Antisense strand to SEQ ID NO: 2432348
cuucgagggaggauuccag

SEQ ID NO: 2432350 - RNA, 19 nt, Artificial Sequence
  Description of Artificial Sequence: Synthetic oligonucleotide
  Sense strand starting at position 2132 of SEQ ID NO: 1886873
aaugguugguggccaagaa

SEQ ID NO: 2432351 - RNA, 19 nt, Artificial Sequence
  Description of Artificial Sequence: Synthetic oligonucleotide
  Antisense strand to SEQ ID NO: 2432350
uucuuggccaccaaccauu

SEQ ID NO: 2432352 - RNA, 19 nt, Artificial Sequence
  Description of Artificial Sequence: Synthetic oligonucleotide
  Sense strand starting at position 2133 of SEQ ID NO: 1886873
augguugguggccaagaau

SEQ ID NO: 2432353 - RNA, 19 nt, Artificial Sequence
  Description of Artificial Sequence: Synthetic oligonucleotide
  Antisense strand to SEQ ID NO: 2432352
auucuuggccaccaaccau

SEQ ID NO: 2432354 - RNA, 19 nt, Artificial Sequence
  Description of Artificial Sequence: Synthetic oligonucleotide
  Sense strand starting at position 2153 of SEQ ID NO: 1886873
cugccaucugcagaacuga

SEQ ID NO: 2432355 - RNA, 19 nt, Artificial Sequence
  Description of Artificial Sequence: Synthetic oligonucleotide
  Antisense strand to SEQ ID NO: 2432354
ucaguucugcagauggcag

SEQ ID NO: 2432356 - RNA, 19 nt, Artificial Sequence
  Description of Artificial Sequence: Synthetic oligonucleotide
  Sense strand starting at position 2176 of SEQ ID NO: 1886873
uguacauccguuuaugaaa

SEQ ID NO: 2432357 - RNA, 19 nt, Artificial Sequence
  Description of Artificial Sequence: Synthetic oligonucleotide
  Antisense strand to SEQ ID NO: 2432356
uuucauaaacggauguaca

SEQ ID NO: 2432358 - RNA, 19 nt, Artificial Sequence
  Description of Artificial Sequence: Synthetic oligonucleotide
  Sense strand starting at position 2209 of SEQ ID NO: 1886873
gggaauacccauugucuuu

SEQ ID NO: 2432359 - RNA, 19 nt, Artificial Sequence
  Description of Artificial Sequence: Synthetic oligonucleotide
  Antisense strand to SEQ ID NO: 2432358
aaagacaauggguauuccc

SEQ ID NO: 2432360 - RNA, 19 nt, Artificial Sequence
  Description of Artificial Sequence: Synthetic oligonucleotide
  Sense strand starting at position 2236 of SEQ ID NO: 1886873
cauugaugugacgagcuau

SEQ ID NO: 2432361 - RNA, 19 nt, Artificial Sequence
  Description of Artificial Sequence: Synthetic oligonucleotide
  Antisense strand to SEQ ID NO: 2432360
auagcucgucacaucaaug

SEQ ID NO: 2432362 - RNA, 19 nt, Artificial Sequence
  Description of Artificial Sequence: Synthetic oligonucleotide
  Sense strand starting at position 2275 of SEQ ID NO: 1886873
gccagcugugcguuauucu

SEQ ID NO: 2432363 - RNA, 19 nt, Artificial Sequence
  Description of Artificial Sequence: Synthetic oligonucleotide
  Antisense strand to SEQ ID NO: 2432362
agaauaacgcacagcuggc

SEQ ID NO: 2432364 - RNA, 19 nt, Artificial Sequence
  Description of Artificial Sequence: Synthetic oligonucleotide
  Sense strand starting at position 2300 of SEQ ID NO: 1886873
gucaguuaugguagacgua

SEQ ID NO: 2432365 - RNA, 19 nt, Artificial Sequence
  Description of Artificial Sequence: Synthetic oligonucleotide
  Antisense strand to SEQ ID NO: 2432364
uacgucuaccauaacugac

SEQ ID NO: 2432366 - RNA, 19 nt, Artificial Sequence
  Description of Artificial Sequence: Synthetic oligonucleotide
  Sense strand starting at position 2301 of SEQ ID NO: 1886873
ucaguuaugguagacguaa

SEQ ID NO: 2432367 - RNA, 19 nt, Artificial Sequence
  Description of Artificial Sequence: Synthetic oligonucleotide
  Antisense strand to SEQ ID NO: 2432366
uuacgucuaccauaacuga

SEQ ID NO: 2432368 - RNA, 19 nt, Artificial Sequence
  Description of Artificial Sequence: Synthetic oligonucleotide
  Sense strand starting at position 2303 of SEQ ID NO: 1886873
aguuaugguagacguaaac

SEQ ID NO: 2432369 - RNA, 19 nt, Artificial Sequence
  Description of Artificial Sequence: Synthetic oligonucleotide
  Antisense strand to SEQ ID NO: 2432368
guuuacgucuaccauaacu

SEQ ID NO: 2432370 - RNA, 19 nt, Artificial Sequence
  Description of Artificial Sequence: Synthetic oligonucleotide
  Sense strand starting at position 2355 of SEQ ID NO: 1886873
gcagaugugcuagaaagcu

SEQ ID NO: 2432371 - RNA, 19 nt, Artificial Sequence
  Description of Artificial Sequence: Synthetic oligonucleotide
  Antisense strand to SEQ ID NO: 2432370
agcuuucuagcacaucugc

SEQ ID NO: 2432372 - RNA, 19 nt, Artificial Sequence
  Description of Artificial Sequence: Synthetic oligonucleotide
  Sense strand starting at position 2569 of SEQ ID NO: 1886873
gugguuuccauuugguagu

SEQ ID NO: 2432373 - RNA, 19 nt, Artificial Sequence
  Description of Artificial Sequence: Synthetic oligonucleotide
  Antisense strand to SEQ ID NO: 2432372
acuaccaaauggaaaccac

SEQ ID NO: 2432374 - RNA, 19 nt, Artificial Sequence
  Description of Artificial Sequence: Synthetic oligonucleotide
  Sense strand starting at position 2575 of SEQ ID NO: 1886873
uccauuugguaguaaauga

SEQ ID NO: 2432375 - RNA, 19 nt, Artificial Sequence
  Description of Artificial Sequence: Synthetic oligonucleotide
  Antisense strand to SEQ ID NO: 2432374
ucauuuacuaccaaaugga

SEQ ID NO: 2432376 - RNA, 19 nt, Artificial Sequence
  Description of Artificial Sequence: Synthetic oligonucleotide
  Sense strand starting at position 2579 of SEQ ID NO: 1886873
uuugguaguaaaugaagga

SEQ ID NO: 2432377 - RNA, 19 nt, Artificial Sequence
  Description of Artificial Sequence: Synthetic oligonucleotide
  Antisense strand to SEQ ID NO: 2432376
uccuucauuuacuaccaaa

SEQ ID NO: 2432378 - RNA, 19 nt, Artificial Sequence
  Description of Artificial Sequence: Synthetic oligonucleotide
  Sense strand starting at position 2586 of SEQ ID NO: 1886873
guaaaugaaggaugucgua

SEQ ID NO: 2432379 - RNA, 19 nt, Artificial Sequence
  Description of Artificial Sequence: Synthetic oligonucleotide
  Antisense strand to SEQ ID NO: 2432378
uacgacauccuucauuuac

SEQ ID NO: 2432380 - RNA, 19 nt, Artificial Sequence
  Description of Artificial Sequence: Synthetic oligonucleotide
  Sense strand starting at position 2605 of SEQ ID NO: 1886873
agugcaauauuugcuuuau

SEQ ID NO: 2432381 - RNA, 19 nt, Artificial Sequence
  Description of Artificial Sequence: Synthetic oligonucleotide
  Antisense strand to SEQ ID NO: 2432380
auaaagcaaauauugcacu

SEQ ID NO: 2432382 - RNA, 19 nt, Artificial Sequence
  Description of Artificial Sequence: Synthetic oligonucleotide
  Sense strand starting at position 2606 of SEQ ID NO: 1886873
gugcaauauuugcuuuaua

SEQ ID NO: 2432383 - RNA, 19 nt, Artificial Sequence
  Description of Artificial Sequence: Synthetic oligonucleotide
  Antisense strand to SEQ ID NO: 2432382
uauaaagcaaauauugcac

SEQ ID NO: 2432384 - RNA, 19 nt, Artificial Sequence
  Description of Artificial Sequence: Synthetic oligonucleotide
  Sense strand starting at position 2647 of SEQ ID NO: 1886873
cucagagauuccuuaucag

SEQ ID NO: 2432385 - RNA, 19 nt, Artificial Sequence
  Description of Artificial Sequence: Synthetic oligonucleotide
  Antisense strand to SEQ ID NO: 2432384
cugauaaggaaucucugag

SEQ ID NO: 2432386 - RNA, 19 nt, Artificial Sequence
  Description of Artificial Sequence: Synthetic oligonucleotide
  Sense strand starting at position 2818 of SEQ ID NO: 1886873
gagaguucugauuggcaua

SEQ ID NO: 2432387 - RNA, 19 nt, Artificial Sequence
  Description of Artificial Sequence: Synthetic oligonucleotide
  Antisense strand to SEQ ID NO: 2432386
uaugccaaucagaacucuc

SEQ ID NO: 2432388 - RNA, 19 nt, Artificial Sequence
  Description of Artificial Sequence: Synthetic oligonucleotide
  Sense strand starting at position 2819 of SEQ ID NO: 1886873
agaguucugauuggcauag

SEQ ID NO: 2432389 - RNA, 19 nt, Artificial Sequence
  Description of Artificial Sequence: Synthetic oligonucleotide
  Antisense strand to SEQ ID NO: 2432388
cuaugccaaucagaacucu

SEQ ID NO: 2432390 - RNA, 19 nt, Artificial Sequence
  Description of Artificial Sequence: Synthetic oligonucleotide
  Sense strand starting at position 2823 of SEQ ID NO: 1886873
uucugauuggcauagguga

SEQ ID NO: 2432391 - RNA, 19 nt, Artificial Sequence
  Description of Artificial Sequence: Synthetic oligonucleotide
  Antisense strand to SEQ ID NO: 2432390
ucaccuaugccaaucagaa

SEQ ID NO: 2432392 - RNA, 19 nt, Artificial Sequence
  Description of Artificial Sequence: Synthetic oligonucleotide
  Sense strand starting at position 2897 of SEQ ID NO: 1886873
gaaaucaaguuguuaaggu

SEQ ID NO: 2432393 - RNA, 19 nt, Artificial Sequence
  Description of Artificial Sequence: Synthetic oligonucleotide
  Antisense strand to SEQ ID NO: 2432392
accuuaacaacuugauuuc

SEQ ID NO: 2432394 - RNA, 19 nt, Artificial Sequence
  Description of Artificial Sequence: Synthetic oligonucleotide
  Sense strand starting at position 2942 of SEQ ID NO: 1886873
agcuuuauuucugaagaga

SEQ ID NO: 2432395 - RNA, 19 nt, Artificial Sequence
  Description of Artificial Sequence: Synthetic oligonucleotide
  Antisense strand to SEQ ID NO: 2432394
ucucuucagaaauaaagcu

SEQ ID NO: 2432396 - RNA, 19 nt, Artificial Sequence
  Description of Artificial Sequence: Synthetic oligonucleotide
  Sense strand starting at position 2957 of SEQ ID NO: 1886873
gagauacuuugggaaauau

SEQ ID NO: 2432397 - RNA, 19 nt, Artificial Sequence
  Description of Artificial Sequence: Synthetic oligonucleotide
  Antisense strand to SEQ ID NO: 2432396
auauuucccaaaguaucuc

SEQ ID NO: 2432398 - RNA, 19 nt, Artificial Sequence
  Description of Artificial Sequence: Synthetic oligonucleotide
  Sense strand starting at position 3634 of SEQ ID NO: 1886873
aagccuccuuugucaggaa

SEQ ID NO: 2432399 - RNA, 19 nt, Artificial Sequence
  Description of Artificial Sequence: Synthetic oligonucleotide
  Antisense strand to SEQ ID NO: 2432398
uuccugacaaaggaggcuu

SEQ ID NO: 2432400 - RNA, 19 nt, Artificial Sequence
  Description of Artificial Sequence: Synthetic oligonucleotide
  Sense strand starting at position 3638 of SEQ ID NO: 1886873
cuccuuugucaggaauuau

SEQ ID NO: 2432401 - RNA, 19 nt, Artificial Sequence
  Description of Artificial Sequence: Synthetic oligonucleotide
  Antisense strand to SEQ ID NO: 2432400
auaauuccugacaaaggag

SEQ ID NO: 2432402 - RNA, 19 nt, Artificial Sequence
  Description of Artificial Sequence: Synthetic oligonucleotide
  Sense strand starting at position 3696 of SEQ ID NO: 1886873
gaagcaaauuuagauugga

SEQ ID NO: 2432403 - RNA, 19 nt, Artificial Sequence
  Description of Artificial Sequence: Synthetic oligonucleotide
  Antisense strand to SEQ ID NO: 2432402
uccaaucuaaauuugcuuc

SEQ ID NO: 2432404 - RNA, 19 nt, Artificial Sequence
  Description of Artificial Sequence: Synthetic oligonucleotide
  Sense strand starting at position 40 of SEQ ID NO: 1886874
aagaaagaucccugcaggu

SEQ ID NO: 2432405 - RNA, 19 nt, Artificial Sequence
  Description of Artificial Sequence: Synthetic oligonucleotide
  Antisense strand to SEQ ID NO: 2432404
accugcagggaucuuucuu

SEQ ID NO: 2432406 - RNA, 19 nt, Artificial Sequence
  Description of Artificial Sequence: Synthetic oligonucleotide
  Sense strand starting at position 42 of SEQ ID NO: 1886874
gaaagaucccugcaggugu

SEQ ID NO: 2432407 - RNA, 19 nt, Artificial Sequence
  Description of Artificial Sequence: Synthetic oligonucleotide
  Antisense strand to SEQ ID NO: 2432406
acaccugcagggaucuuuc

SEQ ID NO: 2432408 - RNA, 19 nt, Artificial Sequence
  Description of Artificial Sequence: Synthetic oligonucleotide
  Sense strand starting at position 53 of SEQ ID NO: 1886874
gcaggugucaguuaaccua

SEQ ID NO: 2432409 - RNA, 19 nt, Artificial Sequence
  Description of Artificial Sequence: Synthetic oligonucleotide
  Antisense strand to SEQ ID NO: 2432408
uagguuaacugacaccugc

SEQ ID NO: 2432410 - RNA, 19 nt, Artificial Sequence
  Description of Artificial Sequence: Synthetic oligonucleotide
  Sense strand starting at position 303 of SEQ ID NO: 1886874
cuccuagaacuugauaugu

SEQ ID NO: 2432411 - RNA, 19 nt, Artificial Sequence
  Description of Artificial Sequence: Synthetic oligonucleotide
  Antisense strand to SEQ ID NO: 2432410
acauaucaaguucuaggag

SEQ ID NO: 2432412 - RNA, 19 nt, Artificial Sequence
  Description of Artificial Sequence: Synthetic oligonucleotide
  Sense strand starting at position 308 of SEQ ID NO: 1886874
agaacuugauauguacuca

SEQ ID NO: 2432413 - RNA, 19 nt, Artificial Sequence
  Description of Artificial Sequence: Synthetic oligonucleotide
  Antisense strand to SEQ ID NO: 2432412
ugaguacauaucaaguucu

SEQ ID NO: 2432414 - RNA, 19 nt, Artificial Sequence
  Description of Artificial Sequence: Synthetic oligonucleotide
  Sense strand starting at position 468 of SEQ ID NO: 1886874
uuuaaagacugugugaaga

SEQ ID NO: 2432415 - RNA, 19 nt, Artificial Sequence
  Description of Artificial Sequence: Synthetic oligonucleotide
  Antisense strand to SEQ ID NO: 2432414
ucuucacacagucuuuaaa

SEQ ID NO: 2432416 - RNA, 19 nt, Artificial Sequence
  Description of Artificial Sequence: Synthetic oligonucleotide
  Sense strand starting at position 630 of SEQ ID NO: 1886874
gcaaaugagaauuguugaa

SEQ ID NO: 2432417 - RNA, 19 nt, Artificial Sequence
  Description of Artificial Sequence: Synthetic oligonucleotide
  Antisense strand to SEQ ID NO: 2432416
uucaacaauucucauuugc

SEQ ID NO: 2432418 - RNA, 19 nt, Artificial Sequence
  Description of Artificial Sequence: Synthetic oligonucleotide
  Sense strand starting at position 634 of SEQ ID NO: 1886874
augagaauuguugaaugcu

SEQ ID NO: 2432419 - RNA, 19 nt, Artificial Sequence
  Description of Artificial Sequence: Synthetic oligonucleotide
  Antisense strand to SEQ ID NO: 2432418
agcauucaacaauucucau

SEQ ID NO: 2432420 - RNA, 19 nt, Artificial Sequence
  Description of Artificial Sequence: Synthetic oligonucleotide
  Sense strand starting at position 1041 of SEQ ID NO: 1886874
gggcuucauggugggcaaa

SEQ ID NO: 2432421 - RNA, 19 nt, Artificial Sequence
  Description of Artificial Sequence: Synthetic oligonucleotide
  Antisense strand to SEQ ID NO: 2432420
uuugcccaccaugaagccc

SEQ ID NO: 2432422 - RNA, 19 nt, Artificial Sequence
  Description of Artificial Sequence: Synthetic oligonucleotide
  Sense strand starting at position 1289 of SEQ ID NO: 1886874
cgagcuauggacuaccauu

SEQ ID NO: 2432423 - RNA, 19 nt, Artificial Sequence
  Description of Artificial Sequence: Synthetic oligonucleotide
  Antisense strand to SEQ ID NO: 2432422
aaugguaguccauagcucg

SEQ ID NO: 2432424 - RNA, 19 nt, Artificial Sequence
  Description of Artificial Sequence: Synthetic oligonucleotide
  Sense strand starting at position 1348 of SEQ ID NO: 1886874
ugcagagcugcaugggaaa

SEQ ID NO: 2432425 - RNA, 19 nt, Artificial Sequence
  Description of Artificial Sequence: Synthetic oligonucleotide
  Antisense strand to SEQ ID NO: 2432424
uuucccaugcagcucugca

SEQ ID NO: 2432426 - RNA, 19 nt, Artificial Sequence
  Description of Artificial Sequence: Synthetic oligonucleotide
  Sense strand starting at position 1379 of SEQ ID NO: 1886874
augaucucguguuuaauuu

SEQ ID NO: 2432427 - RNA, 19 nt, Artificial Sequence
  Description of Artificial Sequence: Synthetic oligonucleotide
  Antisense strand to SEQ ID NO: 2432426
aaauuaaacacgagaucau

SEQ ID NO: 2432428 - RNA, 19 nt, Artificial Sequence
  Description of Artificial Sequence: Synthetic oligonucleotide
  Sense strand starting at position 1383 of SEQ ID NO: 1886874
ucucguguuuaauuuagac

SEQ ID NO: 2432429 - RNA, 19 nt, Artificial Sequence
  Description of Artificial Sequence: Synthetic oligonucleotide
  Antisense strand to SEQ ID NO: 2432428
gucuaaauuaaacacgaga

SEQ ID NO: 2432430 - RNA, 19 nt, Artificial Sequence
  Description of Artificial Sequence: Synthetic oligonucleotide
  Sense strand starting at position 1460 of SEQ ID NO: 1886874
gcgagaguguggaaauaaa

SEQ ID NO: 2432431 - RNA, 19 nt, Artificial Sequence
  Description of Artificial Sequence: Synthetic oligonucleotide
  Antisense strand to SEQ ID NO: 2432430
uuuauuuccacacucucgc

SEQ ID NO: 2432432 - RNA, 19 nt, Artificial Sequence
  Description of Artificial Sequence: Synthetic oligonucleotide
  Sense strand starting at position 1518 of SEQ ID NO: 1886874
uuggguuucgggcacagua

SEQ ID NO: 2432433 - RNA, 19 nt, Artificial Sequence
  Description of Artificial Sequence: Synthetic oligonucleotide
  Antisense strand to SEQ ID NO: 2432432
uacugugcccgaaacccaa

SEQ ID NO: 2432434 - RNA, 19 nt, Artificial Sequence
  Description of Artificial Sequence: Synthetic oligonucleotide
  Sense strand starting at position 1527 of SEQ ID NO: 1886874
gggcacaguagugauguaa

SEQ ID NO: 2432435 - RNA, 19 nt, Artificial Sequence
  Description of Artificial Sequence: Synthetic oligonucleotide
  Antisense strand to SEQ ID NO: 2432434
uuacaucacuacugugccc

SEQ ID NO: 2432436 - RNA, 19 nt, Artificial Sequence
  Description of Artificial Sequence: Synthetic oligonucleotide
  Sense strand starting at position 1531 of SEQ ID NO: 1886874
acaguagugauguaacaua

SEQ ID NO: 2432437 - RNA, 19 nt, Artificial Sequence
  Description of Artificial Sequence: Synthetic oligonucleotide
  Antisense strand to SEQ ID NO: 2432436
uauguuacaucacuacugu

SEQ ID NO: 2432438 - RNA, 19 nt, Artificial Sequence
  Description of Artificial Sequence: Synthetic oligonucleotide
  Sense strand starting at position 2063 of SEQ ID NO: 1886874
cucuaucugucacuagacu

SEQ ID NO: 2432439 - RNA, 19 nt, Artificial Sequence
  Description of Artificial Sequence: Synthetic oligonucleotide
  Antisense strand to SEQ ID NO: 2432438
agucuagugacagauagag

SEQ ID NO: 2432440 - RNA, 19 nt, Artificial Sequence
  Description of Artificial Sequence: Synthetic oligonucleotide
  Sense strand starting at position 2148 of SEQ ID NO: 1886874
agcugucaucuggaacaga

SEQ ID NO: 2432441 - RNA, 19 nt, Artificial Sequence
  Description of Artificial Sequence: Synthetic oligonucleotide
  Antisense strand to SEQ ID NO: 2432440
ucuguuccagaugacagcu

SEQ ID NO: 2432442 - RNA, 19 nt, Artificial Sequence
  Description of Artificial Sequence: Synthetic oligonucleotide
  Sense strand starting at position 2429 of SEQ ID NO: 1886874
ggucuccauuucuugaguu

SEQ ID NO: 2432443 - RNA, 19 nt, Artificial Sequence
  Description of Artificial Sequence: Synthetic oligonucleotide
  Antisense strand to SEQ ID NO: 2432442
aacucaagaaauggagacc

SEQ ID NO: 2432444 - RNA, 19 nt, Artificial Sequence
  Description of Artificial Sequence: Synthetic oligonucleotide
  Sense strand starting at position 2632 of SEQ ID NO: 1886874
gcagccuagggcugaaaua

SEQ ID NO: 2432445 - RNA, 19 nt, Artificial Sequence
  Description of Artificial Sequence: Synthetic oligonucleotide
  Antisense strand to SEQ ID NO: 2432444
uauuucagcccuaggcugc

SEQ ID NO: 2432446 - RNA, 19 nt, Artificial Sequence
  Description of Artificial Sequence: Synthetic oligonucleotide
  Sense strand starting at position 2633 of SEQ ID NO: 1886874
cagccuagggcugaaauau

SEQ ID NO: 2432447 - RNA, 19 nt, Artificial Sequence
  Description of Artificial Sequence: Synthetic oligonucleotide
  Antisense strand to SEQ ID NO: 2432446
auauuucagcccuaggcug

SEQ ID NO: 2432448 - RNA, 19 nt, Artificial Sequence
  Description of Artificial Sequence: Synthetic oligonucleotide
  Sense strand starting at position 2641 of SEQ ID NO: 1886874
ggcugaaauauguaguucu

SEQ ID NO: 2432449 - RNA, 19 nt, Artificial Sequence
  Description of Artificial Sequence: Synthetic oligonucleotide
  Antisense strand to SEQ ID NO: 2432448
agaacuacauauuucagcc

SEQ ID NO: 2432450 - RNA, 19 nt, Artificial Sequence
  Description of Artificial Sequence: Synthetic oligonucleotide
  Sense strand starting at position 2808 of SEQ ID NO: 1886874
gcaaauaagagguguccaa

SEQ ID NO: 2432451 - RNA, 19 nt, Artificial Sequence
  Description of Artificial Sequence: Synthetic oligonucleotide
  Antisense strand to SEQ ID NO: 2432450
uuggacaccucuuauuugc

SEQ ID NO: 2432452 - RNA, 19 nt, Artificial Sequence
  Description of Artificial Sequence: Synthetic oligonucleotide
  Sense strand starting at position 2927 of SEQ ID NO: 1886874
gaggcaucccuaugagaac

SEQ ID NO: 2432453 - RNA, 19 nt, Artificial Sequence
  Description of Artificial Sequence: Synthetic oligonucleotide
  Antisense strand to SEQ ID NO: 2432452
guucucauagggaugccuc

SEQ ID NO: 2432454 - RNA, 19 nt, Artificial Sequence
  Description of Artificial Sequence: Synthetic oligonucleotide
  Sense strand starting at position 2980 of SEQ ID NO: 1886874
uggcauuguccacaagcau

SEQ ID NO: 2432455 - RNA, 19 nt, Artificial Sequence
  Description of Artificial Sequence: Synthetic oligonucleotide
  Antisense strand to SEQ ID NO: 2432454
augcuuguggacaaugcca

SEQ ID NO: 2432456 - RNA, 19 nt, Artificial Sequence
  Description of Artificial Sequence: Synthetic oligonucleotide
  Sense strand starting at position 3091 of SEQ ID NO: 1886874
agaugugcucuuugauacu

SEQ ID NO: 2432457 - RNA, 19 nt, Artificial Sequence
  Description of Artificial Sequence: Synthetic oligonucleotide
  Antisense strand to SEQ ID NO: 2432456
aguaucaaagagcacaucu

SEQ ID NO: 2432458 - RNA, 19 nt, Artificial Sequence
  Description of Artificial Sequence: Synthetic oligonucleotide
  Sense strand starting at position 3170 of SEQ ID NO: 1886874
agugaauacuaacugagca

SEQ ID NO: 2432459 - RNA, 19 nt, Artificial Sequence
  Description of Artificial Sequence: Synthetic oligonucleotide
  Antisense strand to SEQ ID NO: 2432458
ugcucaguuaguauucacu

SEQ ID NO: 2432460 - RNA, 19 nt, Artificial Sequence
  Description of Artificial Sequence: Synthetic oligonucleotide
  Sense strand starting at position 3190 of SEQ ID NO: 1886874
gucacauguguccacugau

SEQ ID NO: 2432461 - RNA, 19 nt, Artificial Sequence
  Description of Artificial Sequence: Synthetic oligonucleotide
  Antisense strand to SEQ ID NO: 2432460
aucaguggacacaugugac

SEQ ID NO: 2432462 - RNA, 19 nt, Artificial Sequence
  Description of Artificial Sequence: Synthetic oligonucleotide
  Sense strand starting at position 3222 of SEQ ID NO: 1886874
caauccuauggaggaguua

SEQ ID NO: 2432463 - RNA, 19 nt, Artificial Sequence
  Description of Artificial Sequence: Synthetic oligonucleotide
  Antisense strand to SEQ ID NO: 2432462
uaacuccuccauaggauug

SEQ ID NO: 2432464 - RNA, 19 nt, Artificial Sequence
  Description of Artificial Sequence: Synthetic oligonucleotide
  Sense strand starting at position 3233 of SEQ ID NO: 1886874
aggaguuauucuucuuauu

SEQ ID NO: 2432465 - RNA, 19 nt, Artificial Sequence
  Description of Artificial Sequence: Synthetic oligonucleotide
  Antisense strand to SEQ ID NO: 2432464
aauaagaagaauaacuccu

SEQ ID NO: 2432466 - RNA, 19 nt, Artificial Sequence
  Description of Artificial Sequence: Synthetic oligonucleotide
  Sense strand starting at position 3335 of SEQ ID NO: 1886874
aggauuugcucucagacuc

SEQ ID NO: 2432467 - RNA, 19 nt, Artificial Sequence
  Description of Artificial Sequence: Synthetic oligonucleotide
  Antisense strand to SEQ ID NO: 2432466
gagucugagagcaaauccu

SEQ ID NO: 2432468 - RNA, 19 nt, Artificial Sequence
  Description of Artificial Sequence: Synthetic oligonucleotide
  Sense strand starting at position 3477 of SEQ ID NO: 1886874
aggucccucuugucuagau

SEQ ID NO: 2432469 - RNA, 19 nt, Artificial Sequence
  Description of Artificial Sequence: Synthetic oligonucleotide
  Antisense strand to SEQ ID NO: 2432468
aucuagacaagagggaccu

SEQ ID NO: 2432470 - RNA, 19 nt, Artificial Sequence
  Description of Artificial Sequence: Synthetic oligonucleotide
  Sense strand starting at position 3479 of SEQ ID NO: 1886874
gucccucuugucuagaugu

SEQ ID NO: 2432471 - RNA, 19 nt, Artificial Sequence
  Description of Artificial Sequence: Synthetic oligonucleotide
  Antisense strand to SEQ ID NO: 2432470
acaucuagacaagagggac

SEQ ID NO: 2432472 - RNA, 19 nt, Artificial Sequence
  Description of Artificial Sequence: Synthetic oligonucleotide
  Sense strand starting at position 3481 of SEQ ID NO: 1886874
cccucuugucuagauguuu

SEQ ID NO: 2432473 - RNA, 19 nt, Artificial Sequence
  Description of Artificial Sequence: Synthetic oligonucleotide
  Antisense strand to SEQ ID NO: 2432472
aaacaucuagacaagaggg

SEQ ID NO: 2432474 - RNA, 19 nt, Artificial Sequence
  Description of Artificial Sequence: Synthetic oligonucleotide
  Sense strand starting at position 3764 of SEQ ID NO: 1886874
ccuugaaauguggaagguu

SEQ ID NO: 2432475 - RNA, 19 nt, Artificial Sequence
  Description of Artificial Sequence: Synthetic oligonucleotide
  Antisense strand to SEQ ID NO: 2432474
aaccuuccacauuucaagg

SEQ ID NO: 2432476 - RNA, 19 nt, Artificial Sequence
  Description of Artificial Sequence: Synthetic oligonucleotide
  Sense strand starting at position 3767 of SEQ ID NO: 1886874
ugaaauguggaagguucua

SEQ ID NO: 2432477 - RNA, 19 nt, Artificial Sequence
  Description of Artificial Sequence: Synthetic oligonucleotide
  Antisense strand to SEQ ID NO: 2432476
uagaaccuuccacauuuca

SEQ ID NO: 2432478 - RNA, 19 nt, Artificial Sequence
  Description of Artificial Sequence: Synthetic oligonucleotide
  Sense strand starting at position 3913 of SEQ ID NO: 1886874
uuaacagugucuucuacua

SEQ ID NO: 2432479 - RNA, 19 nt, Artificial Sequence
  Description of Artificial Sequence: Synthetic oligonucleotide
  Antisense strand to SEQ ID NO: 2432478
uaguagaagacacuguuaa

SEQ ID NO: 2432480 - RNA, 19 nt, Artificial Sequence
  Description of Artificial Sequence: Synthetic oligonucleotide
  Sense strand starting at position 3957 of SEQ ID NO: 1886874
cugagaaaccugcacuguu

SEQ ID NO: 2432481 - RNA, 19 nt, Artificial Sequence
  Description of Artificial Sequence: Synthetic oligonucleotide
  Antisense strand to SEQ ID NO: 2432480
aacagugcagguuucucag

SEQ ID NO: 2432482 - RNA, 19 nt, Artificial Sequence
  Description of Artificial Sequence: Synthetic oligonucleotide
  Sense strand starting at position 3966 of SEQ ID NO: 1886874
cugcacuguuccuuugaaa

SEQ ID NO: 2432483 - RNA, 19 nt, Artificial Sequence
  Description of Artificial Sequence: Synthetic oligonucleotide
  Antisense strand to SEQ ID NO: 2432482
uuucaaaggaacagugcag

SEQ ID NO: 2432484 - RNA, 19 nt, Artificial Sequence
  Description of Artificial Sequence: Synthetic oligonucleotide
  Sense strand starting at position 89 of SEQ ID NO: 1886875
ugaagaugcuugucuggga

SEQ ID NO: 2432485 - RNA, 19 nt, Artificial Sequence
  Description of Artificial Sequence: Synthetic oligonucleotide
  Antisense strand to SEQ ID NO: 2432484
ucccagacaagcaucuuca

SEQ ID NO: 2432486 - RNA, 19 nt, Artificial Sequence
  Description of Artificial Sequence: Synthetic oligonucleotide
  Sense strand starting at position 90 of SEQ ID NO: 1886875
gaagaugcuugucugggaa

SEQ ID NO: 2432487 - RNA, 19 nt, Artificial Sequence
  Description of Artificial Sequence: Synthetic oligonucleotide
  Antisense strand to SEQ ID NO: 2432486
uucccagacaagcaucuuc

SEQ ID NO: 2432488 - RNA, 19 nt, Artificial Sequence
  Description of Artificial Sequence: Synthetic oligonucleotide
  Sense strand starting at position 93 of SEQ ID NO: 1886875
gaugcuugucugggaaaca

SEQ ID NO: 2432489 - RNA, 19 nt, Artificial Sequence
  Description of Artificial Sequence: Synthetic oligonucleotide
  Antisense strand to SEQ ID NO: 2432488
uguuucccagacaagcauc

SEQ ID NO: 2432490 - RNA, 19 nt, Artificial Sequence
  Description of Artificial Sequence: Synthetic oligonucleotide
  Sense strand starting at position 122 of SEQ ID NO: 1886875
ggauguacucccuggaaga

SEQ ID NO: 2432491 - RNA, 19 nt, Artificial Sequence
  Description of Artificial Sequence: Synthetic oligonucleotide
  Antisense strand to SEQ ID NO: 2432490
ucuuccagggaguacaucc

SEQ ID NO: 2432492 - RNA, 19 nt, Artificial Sequence
  Description of Artificial Sequence: Synthetic oligonucleotide
  Sense strand starting at position 123 of SEQ ID NO: 1886875
gauguacucccuggaagag

SEQ ID NO: 2432493 - RNA, 19 nt, Artificial Sequence
  Description of Artificial Sequence: Synthetic oligonucleotide
  Antisense strand to SEQ ID NO: 2432492
cucuuccagggaguacauc

SEQ ID NO: 2432494 - RNA, 19 nt, Artificial Sequence
  Description of Artificial Sequence: Synthetic oligonucleotide
  Sense strand starting at position 140 of SEQ ID NO: 1886875
agaggaaccuucuuccuca

SEQ ID NO: 2432495 - RNA, 19 nt, Artificial Sequence
  Description of Artificial Sequence: Synthetic oligonucleotide
  Antisense strand to SEQ ID NO: 2432494
ugaggaagaagguuccucu

SEQ ID NO: 2432496 - RNA, 19 nt, Artificial Sequence
  Description of Artificial Sequence: Synthetic oligonucleotide
  Sense strand starting at position 182 of SEQ ID NO: 1886875
gcuaccucccucuguuuau

SEQ ID NO: 2432497 - RNA, 19 nt, Artificial Sequence
  Description of Artificial Sequence: Synthetic oligonucleotide
  Antisense strand to SEQ ID NO: 2432496
auaaacagagggagguagc

SEQ ID NO: 2432498 - RNA, 19 nt, Artificial Sequence
  Description of Artificial Sequence: Synthetic oligonucleotide
  Sense strand starting at position 226 of SEQ ID NO: 1886875
ggaguuccugcagaggaca

SEQ ID NO: 2432499 - RNA, 19 nt, Artificial Sequence
  Description of Artificial Sequence: Synthetic oligonucleotide
  Antisense strand to SEQ ID NO: 2432498
uguccucugcaggaacucc

SEQ ID NO: 2432500 - RNA, 19 nt, Artificial Sequence
  Description of Artificial Sequence: Synthetic oligonucleotide
  Sense strand starting at position 274 of SEQ ID NO: 1886875
agagacugcuguuuggcaa

SEQ ID NO: 2432501 - RNA, 19 nt, Artificial Sequence
  Description of Artificial Sequence: Synthetic oligonucleotide
  Antisense strand to SEQ ID NO: 2432500
uugccaaacagcagucucu

SEQ ID NO: 2432502 - RNA, 19 nt, Artificial Sequence
  Description of Artificial Sequence: Synthetic oligonucleotide
  Sense strand starting at position 344 of SEQ ID NO: 1886875
ggcguagaccugcagagau

SEQ ID NO: 2432503 - RNA, 19 nt, Artificial Sequence
  Description of Artificial Sequence: Synthetic oligonucleotide
  Antisense strand to SEQ ID NO: 2432502
aucucugcaggucuacgcc

SEQ ID NO: 2432504 - RNA, 19 nt, Artificial Sequence
  Description of Artificial Sequence: Synthetic oligonucleotide
  Sense strand starting at position 346 of SEQ ID NO: 1886875
cguagaccugcagagauaa

SEQ ID NO: 2432505 - RNA, 19 nt, Artificial Sequence
  Description of Artificial Sequence: Synthetic oligonucleotide
  Antisense strand to SEQ ID NO: 2432504
uuaucucugcaggucuacg

SEQ ID NO: 2432506 - RNA, 19 nt, Artificial Sequence
  Description of Artificial Sequence: Synthetic oligonucleotide
  Sense strand starting at position 640 of SEQ ID NO: 1886875
gacugcuacucaguccaga

SEQ ID NO: 2432507 - RNA, 19 nt, Artificial Sequence
  Description of Artificial Sequence: Synthetic oligonucleotide
  Antisense strand to SEQ ID NO: 2432506
ucuggacugaguagcaguc

SEQ ID NO: 2432508 - RNA, 19 nt, Artificial Sequence
  Description of Artificial Sequence: Synthetic oligonucleotide
  Sense strand starting at position 654 of SEQ ID NO: 1886875
ccagaaugcuggcagaacu

SEQ ID NO: 2432509 - RNA, 19 nt, Artificial Sequence
  Description of Artificial Sequence: Synthetic oligonucleotide
  Antisense strand to SEQ ID NO: 2432508
aguucugccagcauucugg

SEQ ID NO: 2432510 - RNA, 19 nt, Artificial Sequence
  Description of Artificial Sequence: Synthetic oligonucleotide
  Sense strand starting at position 722 of SEQ ID NO: 1886875
acaaacaguuccuggcaga

SEQ ID NO: 2432511 - RNA, 19 nt, Artificial Sequence
  Description of Artificial Sequence: Synthetic oligonucleotide
  Antisense strand to SEQ ID NO: 2432510
ucugccaggaacuguuugu

SEQ ID NO: 2432512 - RNA, 19 nt, Artificial Sequence
  Description of Artificial Sequence: Synthetic oligonucleotide
  Sense strand starting at position 725 of SEQ ID NO: 1886875
aacaguuccuggcagagua

SEQ ID NO: 2432513 - RNA, 19 nt, Artificial Sequence
  Description of Artificial Sequence: Synthetic oligonucleotide
  Antisense strand to SEQ ID NO: 2432512
uacucugccaggaacuguu

SEQ ID NO: 2432514 - RNA, 19 nt, Artificial Sequence
  Description of Artificial Sequence: Synthetic oligonucleotide
  Sense strand starting at position 727 of SEQ ID NO: 1886875
caguuccuggcagaguaua

SEQ ID NO: 2432515 - RNA, 19 nt, Artificial Sequence
  Description of Artificial Sequence: Synthetic oligonucleotide
  Antisense strand to SEQ ID NO: 2432514
uauacucugccaggaacug

SEQ ID NO: 2432516 - RNA, 19 nt, Artificial Sequence
  Description of Artificial Sequence: Synthetic oligonucleotide
  Sense strand starting at position 794 of SEQ ID NO: 1886875
acagaugggucaggauaca

SEQ ID NO: 2432517 - RNA, 19 nt, Artificial Sequence
  Description of Artificial Sequence: Synthetic oligonucleotide
  Antisense strand to SEQ ID NO: 2432516
uguauccugacccaucugu

SEQ ID NO: 2432518 - RNA, 19 nt, Artificial Sequence
  Description of Artificial Sequence: Synthetic oligonucleotide
  Sense strand starting at position 894 of SEQ ID NO: 1886875
uggccuuauuucuuagcuu

SEQ ID NO: 2432519 - RNA, 19 nt, Artificial Sequence
  Description of Artificial Sequence: Synthetic oligonucleotide
  Antisense strand to SEQ ID NO: 2432518
aagcuaagaaauaaggcca

SEQ ID NO: 2432520 - RNA, 19 nt, Artificial Sequence
  Description of Artificial Sequence: Synthetic oligonucleotide
  Sense strand starting at position 920 of SEQ ID NO: 1886875
ugggaacucucccacuuua

SEQ ID NO: 2432521 - RNA, 19 nt, Artificial Sequence
  Description of Artificial Sequence: Synthetic oligonucleotide
  Antisense strand to SEQ ID NO: 2432520
uaaagugggagaguuccca

SEQ ID NO: 2432522 - RNA, 19 nt, Artificial Sequence
  Description of Artificial Sequence: Synthetic oligonucleotide
  Sense strand starting at position 1295 of SEQ ID NO: 1886875
uggaaaggcuuugagaaag

SEQ ID NO: 2432523 - RNA, 19 nt, Artificial Sequence
  Description of Artificial Sequence: Synthetic oligonucleotide
  Antisense strand to SEQ ID NO: 2432522
cuuucucaaagccuuucca

SEQ ID NO: 2432524 - RNA, 19 nt, Artificial Sequence
  Description of Artificial Sequence: Synthetic oligonucleotide
  Sense strand starting at position 1348 of SEQ ID NO: 1886875
gcgcgcucuacgcaauaca

SEQ ID NO: 2432525 - RNA, 19 nt, Artificial Sequence
  Description of Artificial Sequence: Synthetic oligonucleotide
  Antisense strand to SEQ ID NO: 2432524
uguauugcguagagcgcgc

SEQ ID NO: 2432526 - RNA, 19 nt, Artificial Sequence
  Description of Artificial Sequence: Synthetic oligonucleotide
  Sense strand starting at position 1399 of SEQ ID NO: 1886875
gagaacuucuuugacaagu

SEQ ID NO: 2432527 - RNA, 19 nt, Artificial Sequence
  Description of Artificial Sequence: Synthetic oligonucleotide
  Antisense strand to SEQ ID NO: 2432526
acuugucaaagaaguucuc

SEQ ID NO: 2432528 - RNA, 19 nt, Artificial Sequence
  Description of Artificial Sequence: Synthetic oligonucleotide
  Sense strand starting at position 1541 of SEQ ID NO: 1886875
uguccacaacuucgggaua

SEQ ID NO: 2432529 - RNA, 19 nt, Artificial Sequence
  Description of Artificial Sequence: Synthetic oligonucleotide
  Antisense strand to SEQ ID NO: 2432528
uaucccgaaguuguggaca

SEQ ID NO: 2432530 - RNA, 19 nt, Artificial Sequence
  Description of Artificial Sequence: Synthetic oligonucleotide
  Sense strand starting at position 2153 of SEQ ID NO: 1886875
cucggagaaucccuaaaug

SEQ ID NO: 2432531 - RNA, 19 nt, Artificial Sequence
  Description of Artificial Sequence: Synthetic oligonucleotide
  Antisense strand to SEQ ID NO: 2432530
cauuuagggauucuccgag

SEQ ID NO: 2432532 - RNA, 19 nt, Artificial Sequence
  Description of Artificial Sequence: Synthetic oligonucleotide
  Sense strand starting at position 2198 of SEQ ID NO: 1886875
cccggaguccgggauaaau

SEQ ID NO: 2432533 - RNA, 19 nt, Artificial Sequence
  Description of Artificial Sequence: Synthetic oligonucleotide
  Antisense strand to SEQ ID NO: 2432532
auuuaucccggacuccggg

SEQ ID NO: 2432534 - RNA, 19 nt, Artificial Sequence
  Description of Artificial Sequence: Synthetic oligonucleotide
  Sense strand starting at position 2208 of SEQ ID NO: 1886875
gggauaaauucccuaggcu

SEQ ID NO: 2432535 - RNA, 19 nt, Artificial Sequence
  Description of Artificial Sequence: Synthetic oligonucleotide
  Antisense strand to SEQ ID NO: 2432534
agccuagggaauuuauccc

SEQ ID NO: 2432536 - RNA, 19 nt, Artificial Sequence
  Description of Artificial Sequence: Synthetic oligonucleotide
  Sense strand starting at position 2489 of SEQ ID NO: 1886875
gucacaucgaaaggacuuu

SEQ ID NO: 2432537 - RNA, 19 nt, Artificial Sequence
  Description of Artificial Sequence: Synthetic oligonucleotide
  Antisense strand to SEQ ID NO: 2432536
aaaguccuuucgaugugac

SEQ ID NO: 2432538 - RNA, 19 nt, Artificial Sequence
  Description of Artificial Sequence: Synthetic oligonucleotide
  Sense strand starting at position 3029 of SEQ ID NO: 1886875
caagauauugcaugggaca

SEQ ID NO: 2432539 - RNA, 19 nt, Artificial Sequence
  Description of Artificial Sequence: Synthetic oligonucleotide
  Antisense strand to SEQ ID NO: 2432538
ugucccaugcaauaucuug

SEQ ID NO: 2432540 - RNA, 19 nt, Artificial Sequence
  Description of Artificial Sequence: Synthetic oligonucleotide
  Sense strand starting at position 3030 of SEQ ID NO: 1886875
aagauauugcaugggacau

SEQ ID NO: 2432541 - RNA, 19 nt, Artificial Sequence
  Description of Artificial Sequence: Synthetic oligonucleotide
  Antisense strand to SEQ ID NO: 2432540
augucccaugcaauaucuu

SEQ ID NO: 2432542 - RNA, 19 nt, Artificial Sequence
  Description of Artificial Sequence: Synthetic oligonucleotide
  Sense strand starting at position 3127 of SEQ ID NO: 1886875
ggcaguucuaguuggaaug

SEQ ID NO: 2432543 - RNA, 19 nt, Artificial Sequence
  Description of Artificial Sequence: Synthetic oligonucleotide
  Antisense strand to SEQ ID NO: 2432542
cauuccaacuagaacugcc

SEQ ID NO: 2432544 - RNA, 19 nt, Artificial Sequence
  Description of Artificial Sequence: Synthetic oligonucleotide
  Sense strand starting at position 3161 of SEQ ID NO: 1886875
cagcuauacuggucaagaa

SEQ ID NO: 2432545 - RNA, 19 nt, Artificial Sequence
  Description of Artificial Sequence: Synthetic oligonucleotide
  Antisense strand to SEQ ID NO: 2432544
uucuugaccaguauagcug

SEQ ID NO: 2432546 - RNA, 19 nt, Artificial Sequence
  Description of Artificial Sequence: Synthetic oligonucleotide
  Sense strand starting at position 3765 of SEQ ID NO: 1886875
gagcaucucuggucucagu

SEQ ID NO: 2432547 - RNA, 19 nt, Artificial Sequence
  Description of Artificial Sequence: Synthetic oligonucleotide
  Antisense strand to SEQ ID NO: 2432546
acugagaccagagaugcuc

SEQ ID NO: 2432548 - RNA, 19 nt, Artificial Sequence
  Description of Artificial Sequence: Synthetic oligonucleotide
  Sense strand starting at position 3831 of SEQ ID NO: 1886875
gagauaaugcucuggaagc

SEQ ID NO: 2432549 - RNA, 19 nt, Artificial Sequence
  Description of Artificial Sequence: Synthetic oligonucleotide
  Antisense strand to SEQ ID NO: 2432548
gcuuccagagcauuaucuc

SEQ ID NO: 2432550 - RNA, 19 nt, Artificial Sequence
  Description of Artificial Sequence: Synthetic oligonucleotide
  Sense strand starting at position 3832 of SEQ ID NO: 1886875
agauaaugcucuggaagca

SEQ ID NO: 2432551 - RNA, 19 nt, Artificial Sequence
  Description of Artificial Sequence: Synthetic oligonucleotide
  Antisense strand to SEQ ID NO: 2432550
ugcuuccagagcauuaucu

SEQ ID NO: 2432552 - RNA, 19 nt, Artificial Sequence
  Description of Artificial Sequence: Synthetic oligonucleotide
  Sense strand starting at position 3844 of SEQ ID NO: 1886875
ggaagcacucagcgcaaua

SEQ ID NO: 2432553 - RNA, 19 nt, Artificial Sequence
  Description of Artificial Sequence: Synthetic oligonucleotide
  Antisense strand to SEQ ID NO: 2432552
uauugcgcugagugcuucc

SEQ ID NO: 2432554 - RNA, 19 nt, Artificial Sequence
  Description of Artificial Sequence: Synthetic oligonucleotide
  Sense strand starting at position 3855 of SEQ ID NO: 1886875
gcgcaauacuuggcacaua

SEQ ID NO: 2432555 - RNA, 19 nt, Artificial Sequence
  Description of Artificial Sequence: Synthetic oligonucleotide
  Antisense strand to SEQ ID NO: 2432554
uaugugccaaguauugcgc

SEQ ID NO: 2432556 - RNA, 19 nt, Artificial Sequence
  Description of Artificial Sequence: Synthetic oligonucleotide
  Sense strand starting at position 3881 of SEQ ID NO: 1886875
cucaauaaauggucccaga

SEQ ID NO: 2432557 - RNA, 19 nt, Artificial Sequence
  Description of Artificial Sequence: Synthetic oligonucleotide
  Antisense strand to SEQ ID NO: 2432556
ucugggaccauuuauugag

SEQ ID NO: 2432558 - RNA, 19 nt, Artificial Sequence
  Description of Artificial Sequence: Synthetic oligonucleotide
  Sense strand starting at position 3943 of SEQ ID NO: 1886875
cuuauauaauuugggaaac

SEQ ID NO: 2432559 - RNA, 19 nt, Artificial Sequence
  Description of Artificial Sequence: Synthetic oligonucleotide
  Antisense strand to SEQ ID NO: 2432558
guuucccaaauuauauaag

SEQ ID NO: 2432560 - RNA, 19 nt, Artificial Sequence
  Description of Artificial Sequence: Synthetic oligonucleotide
  Sense strand starting at position 3953 of SEQ ID NO: 1886875
uugggaaacucucuuuaag

SEQ ID NO: 2432561 - RNA, 19 nt, Artificial Sequence
  Description of Artificial Sequence: Synthetic oligonucleotide
  Antisense strand to SEQ ID NO: 2432560
cuuaaagagaguuucccaa

SEQ ID NO: 2432562 - RNA, 19 nt, Artificial Sequence
  Description of Artificial Sequence: Synthetic oligonucleotide
  Sense strand starting at position 3979 of SEQ ID NO: 1886875
uacaaaguuggccgaguau

SEQ ID NO: 2432563 - RNA, 19 nt, Artificial Sequence
  Description of Artificial Sequence: Synthetic oligonucleotide
  Antisense strand to SEQ ID NO: 2432562
auacucggccaacuuugua

SEQ ID NO: 2432564 - RNA, 19 nt, Artificial Sequence
  Description of Artificial Sequence: Synthetic oligonucleotide
  Sense strand starting at position 361 of SEQ ID NO: 1886876
uggcgauucugcauggagu

SEQ ID NO: 2432565 - RNA, 19 nt, Artificial Sequence
  Description of Artificial Sequence: Synthetic oligonucleotide
  Antisense strand to SEQ ID NO: 2432564
acuccaugcagaaucgcca

SEQ ID NO: 2432566 - RNA, 19 nt, Artificial Sequence
  Description of Artificial Sequence: Synthetic oligonucleotide
  Sense strand starting at position 475 of SEQ ID NO: 1886876
uaguuuggaggcugaauau

SEQ ID NO: 2432567 - RNA, 19 nt, Artificial Sequence
  Description of Artificial Sequence: Synthetic oligonucleotide
  Antisense strand to SEQ ID NO: 2432566
auauucagccuccaaacua

SEQ ID NO: 2432568 - RNA, 19 nt, Artificial Sequence
  Description of Artificial Sequence: Synthetic oligonucleotide
  Sense strand starting at position 668 of SEQ ID NO: 1886876
gccagacuuccugaccagu

SEQ ID NO: 2432569 - RNA, 19 nt, Artificial Sequence
  Description of Artificial Sequence: Synthetic oligonucleotide
  Antisense strand to SEQ ID NO: 2432568
acuggucaggaagucuggc

SEQ ID NO: 2432570 - RNA, 19 nt, Artificial Sequence
  Description of Artificial Sequence: Synthetic oligonucleotide
  Sense strand starting at position 801 of SEQ ID NO: 1886876
gcacgugcccaucuaaagu

SEQ ID NO: 2432571 - RNA, 19 nt, Artificial Sequence
  Description of Artificial Sequence: Synthetic oligonucleotide
  Antisense strand to SEQ ID NO: 2432570
acuuuagaugggcacgugc

SEQ ID NO: 2432572 - RNA, 19 nt, Artificial Sequence
  Description of Artificial Sequence: Synthetic oligonucleotide
  Sense strand starting at position 811 of SEQ ID NO: 1886876
aucuaaagucuccauguga

SEQ ID NO: 2432573 - RNA, 19 nt, Artificial Sequence
  Description of Artificial Sequence: Synthetic oligonucleotide
  Antisense strand to SEQ ID NO: 2432572
ucacauggagacuuuagau

SEQ ID NO: 2432574 - RNA, 19 nt, Artificial Sequence
  Description of Artificial Sequence: Synthetic oligonucleotide
  Sense strand starting at position 930 of SEQ ID NO: 1886876
aaguauccaguuuagaagu

SEQ ID NO: 2432575 - RNA, 19 nt, Artificial Sequence
  Description of Artificial Sequence: Synthetic oligonucleotide
  Antisense strand to SEQ ID NO: 2432574
acuucuaaacuggauacuu

SEQ ID NO: 2432576 - RNA, 19 nt, Artificial Sequence
  Description of Artificial Sequence: Synthetic oligonucleotide
  Sense strand starting at position 973 of SEQ ID NO: 1886876
cauugugcugcccaaagaa

SEQ ID NO: 2432577 - RNA, 19 nt, Artificial Sequence
  Description of Artificial Sequence: Synthetic oligonucleotide
  Antisense strand to SEQ ID NO: 2432576
uucuuugggcagcacaaug

SEQ ID NO: 2432578 - RNA, 19 nt, Artificial Sequence
  Description of Artificial Sequence: Synthetic oligonucleotide
  Sense strand starting at position 1028 of SEQ ID NO: 1886876
cccucuggugagcagaaau

SEQ ID NO: 2432579 - RNA, 19 nt, Artificial Sequence
  Description of Artificial Sequence: Synthetic oligonucleotide
  Antisense strand to SEQ ID NO: 2432578
auuucugcucaccagaggg

SEQ ID NO: 2432580 - RNA, 19 nt, Artificial Sequence
  Description of Artificial Sequence: Synthetic oligonucleotide
  Sense strand starting at position 1041 of SEQ ID NO: 1886876
agaaaugucggaggucgaa

SEQ ID NO: 2432581 - RNA, 19 nt, Artificial Sequence
  Description of Artificial Sequence: Synthetic oligonucleotide
  Antisense strand to SEQ ID NO: 2432580
uucgaccuccgacauuucu

SEQ ID NO: 2432582 - RNA, 19 nt, Artificial Sequence
  Description of Artificial Sequence: Synthetic oligonucleotide
  Sense strand starting at position 1061 of SEQ ID NO: 1886876
ucuaguucugcuguugcaa

SEQ ID NO: 2432583 - RNA, 19 nt, Artificial Sequence
  Description of Artificial Sequence: Synthetic oligonucleotide
  Antisense strand to SEQ ID NO: 2432582
uugcaacagcagaacuaga

SEQ ID NO: 2432584 - RNA, 19 nt, Artificial Sequence
  Description of Artificial Sequence: Synthetic oligonucleotide
  Sense strand starting at position 1106 of SEQ ID NO: 1886876
ucuaaugcccaauggaaau

SEQ ID NO: 2432585 - RNA, 19 nt, Artificial Sequence
  Description of Artificial Sequence: Synthetic oligonucleotide
  Antisense strand to SEQ ID NO: 2432584
auuuccauugggcauuaga

SEQ ID NO: 2432586 - RNA, 19 nt, Artificial Sequence
  Description of Artificial Sequence: Synthetic oligonucleotide
  Sense strand starting at position 1409 of SEQ ID NO: 1886876
guuggauaugcugagucca

SEQ ID NO: 2432587 - RNA, 19 nt, Artificial Sequence
  Description of Artificial Sequence: Synthetic oligonucleotide
  Antisense strand to SEQ ID NO: 2432586
uggacucagcauauccaac

SEQ ID NO: 2432588 - RNA, 19 nt, Artificial Sequence
  Description of Artificial Sequence: Synthetic oligonucleotide
  Sense strand starting at position 1411 of SEQ ID NO: 1886876
uggauaugcugaguccaga

SEQ ID NO: 2432589 - RNA, 19 nt, Artificial Sequence
  Description of Artificial Sequence: Synthetic oligonucleotide
  Antisense strand to SEQ ID NO: 2432588
ucuggacucagcauaucca

SEQ ID NO: 2432590 - RNA, 19 nt, Artificial Sequence
  Description of Artificial Sequence: Synthetic oligonucleotide
  Sense strand starting at position 1471 of SEQ ID NO: 1886876
ccagauuuaugagauccuc

SEQ ID NO: 2432591 - RNA, 19 nt, Artificial Sequence
  Description of Artificial Sequence: Synthetic oligonucleotide
  Antisense strand to SEQ ID NO: 2432590
gaggaucucauaaaucugg

SEQ ID NO: 2432592 - RNA, 19 nt, Artificial Sequence
  Description of Artificial Sequence: Synthetic oligonucleotide
  Sense strand starting at position 1502 of SEQ ID NO: 1886876
gucaaagaaucugcauucu

SEQ ID NO: 2432593 - RNA, 19 nt, Artificial Sequence
  Description of Artificial Sequence: Synthetic oligonucleotide
  Antisense strand to SEQ ID NO: 2432592
agaaugcagauucuuugac

SEQ ID NO: 2432594 - RNA, 19 nt, Artificial Sequence
  Description of Artificial Sequence: Synthetic oligonucleotide
  Sense strand starting at position 1519 of SEQ ID NO: 1886876
cuaauaaguuccucagagg

SEQ ID NO: 2432595 - RNA, 19 nt, Artificial Sequence
  Description of Artificial Sequence: Synthetic oligonucleotide
  Antisense strand to SEQ ID NO: 2432594
ccucugaggaacuuauuag

SEQ ID NO: 2432596 - RNA, 19 nt, Artificial Sequence
  Description of Artificial Sequence: Synthetic oligonucleotide
  Sense strand starting at position 1602 of SEQ ID NO: 1886876
gggaaugaaucaugauuuc

SEQ ID NO: 2432597 - RNA, 19 nt, Artificial Sequence
  Description of Artificial Sequence: Synthetic oligonucleotide
  Antisense strand to SEQ ID NO: 2432596
gaaaucaugauucauuccc

SEQ ID NO: 2432598 - RNA, 19 nt, Artificial Sequence
  Description of Artificial Sequence: Synthetic oligonucleotide
  Sense strand starting at position 1617 of SEQ ID NO: 1886876
uuuccagucucauuaggga

SEQ ID NO: 2432599 - RNA, 19 nt, Artificial Sequence
  Description of Artificial Sequence: Synthetic oligonucleotide
  Antisense strand to SEQ ID NO: 2432598
ucccuaaugagacuggaaa

SEQ ID NO: 2432600 - RNA, 19 nt, Artificial Sequence
  Description of Artificial Sequence: Synthetic oligonucleotide
  Sense strand starting at position 1637 of SEQ ID NO: 1886876
agaugauaugcauaugcac

SEQ ID NO: 2432601 - RNA, 19 nt, Artificial Sequence
  Description of Artificial Sequence: Synthetic oligonucleotide
  Antisense strand to SEQ ID NO: 2432600
gugcauaugcauaucaucu

SEQ ID NO: 2432602 - RNA, 19 nt, Artificial Sequence
  Description of Artificial Sequence: Synthetic oligonucleotide
  Sense strand starting at position 1688 of SEQ ID NO: 1886876
aagcucuguggacauaauu

SEQ ID NO: 2432603 - RNA, 19 nt, Artificial Sequence
  Description of Artificial Sequence: Synthetic oligonucleotide
  Antisense strand to SEQ ID NO: 2432602
aauuauguccacagagcuu

SEQ ID NO: 2432604 - RNA, 19 nt, Artificial Sequence
  Description of Artificial Sequence: Synthetic oligonucleotide
  Sense strand starting at position 1696 of SEQ ID NO: 1886876
uggacauaauugccucuga

SEQ ID NO: 2432605 - RNA, 19 nt, Artificial Sequence
  Description of Artificial Sequence: Synthetic oligonucleotide
  Antisense strand to SEQ ID NO: 2432604
ucagaggcaauuaugucca

SEQ ID NO: 2432606 - RNA, 19 nt, Artificial Sequence
  Description of Artificial Sequence: Synthetic oligonucleotide
  Sense strand starting at position 1697 of SEQ ID NO: 1886876
ggacauaauugccucugau

SEQ ID NO: 2432607 - RNA, 19 nt, Artificial Sequence
  Description of Artificial Sequence: Synthetic oligonucleotide
  Antisense strand to SEQ ID NO: 2432606
aucagaggcaauuaugucc

SEQ ID NO: 2432608 - RNA, 19 nt, Artificial Sequence
  Description of Artificial Sequence: Synthetic oligonucleotide
  Sense strand starting at position 1712 of SEQ ID NO: 1886876
ugaugaagugcugacugau

SEQ ID NO: 2432609 - RNA, 19 nt, Artificial Sequence
  Description of Artificial Sequence: Synthetic oligonucleotide
  Antisense strand to SEQ ID NO: 2432608
aucagucagcacuucauca

SEQ ID NO: 2432610 - RNA, 19 nt, Artificial Sequence
  Description of Artificial Sequence: Synthetic oligonucleotide
  Sense strand starting at position 1797 of SEQ ID NO: 1886876
gccucaugaagugagauca

SEQ ID NO: 2432611 - RNA, 19 nt, Artificial Sequence
  Description of Artificial Sequence: Synthetic oligonucleotide
  Antisense strand to SEQ ID NO: 2432610
ugaucucacuucaugaggc

SEQ ID NO: 2432612 - RNA, 19 nt, Artificial Sequence
  Description of Artificial Sequence: Synthetic oligonucleotide
  Sense strand starting at position 1813 of SEQ ID NO: 1886876
ucaggauuacacggucaga

SEQ ID NO: 2432613 - RNA, 19 nt, Artificial Sequence
  Description of Artificial Sequence: Synthetic oligonucleotide
  Antisense strand to SEQ ID NO: 2432612
ucugaccguguaauccuga

SEQ ID NO: 2432614 - RNA, 19 nt, Artificial Sequence
  Description of Artificial Sequence: Synthetic oligonucleotide
  Sense strand starting at position 2667 of SEQ ID NO: 1886876
ugcuucucugaguauaacu

SEQ ID NO: 2432615 - RNA, 19 nt, Artificial Sequence
  Description of Artificial Sequence: Synthetic oligonucleotide
  Antisense strand to SEQ ID NO: 2432614
aguuauacucagagaagca

SEQ ID NO: 2432616 - RNA, 19 nt, Artificial Sequence
  Description of Artificial Sequence: Synthetic oligonucleotide
  Sense strand starting at position 2675 of SEQ ID NO: 1886876
ugaguauaacuugagcuga

SEQ ID NO: 2432617 - RNA, 19 nt, Artificial Sequence
  Description of Artificial Sequence: Synthetic oligonucleotide
  Antisense strand to SEQ ID NO: 2432616
ucagcucaaguuauacuca

SEQ ID NO: 2432618 - RNA, 19 nt, Artificial Sequence
  Description of Artificial Sequence: Synthetic oligonucleotide
  Sense strand starting at position 2707 of SEQ ID NO: 1886876
ccaguuaccugacuuacau

SEQ ID NO: 2432619 - RNA, 19 nt, Artificial Sequence
  Description of Artificial Sequence: Synthetic oligonucleotide
  Antisense strand to SEQ ID NO: 2432618
auguaagucagguaacugg

SEQ ID NO: 2432620 - RNA, 19 nt, Artificial Sequence
  Description of Artificial Sequence: Synthetic oligonucleotide
  Sense strand starting at position 3042 of SEQ ID NO: 1886876
acaugcugaucugcagaga

SEQ ID NO: 2432621 - RNA, 19 nt, Artificial Sequence
  Description of Artificial Sequence: Synthetic oligonucleotide
  Antisense strand to SEQ ID NO: 2432620
ucucugcagaucagcaugu

SEQ ID NO: 2432622 - RNA, 19 nt, Artificial Sequence
  Description of Artificial Sequence: Synthetic oligonucleotide
  Sense strand starting at position 3043 of SEQ ID NO: 1886876
caugcugaucugcagagaa

SEQ ID NO: 2432623 - RNA, 19 nt, Artificial Sequence
  Description of Artificial Sequence: Synthetic oligonucleotide
  Antisense strand to SEQ ID NO: 2432622
uucucugcagaucagcaug

SEQ ID NO: 2432624 - RNA, 19 nt, Artificial Sequence
  Description of Artificial Sequence: Synthetic oligonucleotide
  Sense strand starting at position 3045 of SEQ ID NO: 1886876
ugcugaucugcagagaaua

SEQ ID NO: 2432625 - RNA, 19 nt, Artificial Sequence
  Description of Artificial Sequence: Synthetic oligonucleotide
  Antisense strand to SEQ ID NO: 2432624
uauucucugcagaucagca

SEQ ID NO: 2432626 - RNA, 19 nt, Artificial Sequence
  Description of Artificial Sequence: Synthetic oligonucleotide
  Sense strand starting at position 3047 of SEQ ID NO: 1886876
cugaucugcagagaauagu

SEQ ID NO: 2432627 - RNA, 19 nt, Artificial Sequence
  Description of Artificial Sequence: Synthetic oligonucleotide
  Antisense strand to SEQ ID NO: 2432626
acuauucucugcagaucag

SEQ ID NO: 2432628 - RNA, 19 nt, Artificial Sequence
  Description of Artificial Sequence: Synthetic oligonucleotide
  Sense strand starting at position 3173 of SEQ ID NO: 1886876
ucaguaggacugugagaca

SEQ ID NO: 2432629 - RNA, 19 nt, Artificial Sequence
  Description of Artificial Sequence: Synthetic oligonucleotide
  Antisense strand to SEQ ID NO: 2432628
ugucucacaguccuacuga

SEQ ID NO: 2432630 - RNA, 19 nt, Artificial Sequence
  Description of Artificial Sequence: Synthetic oligonucleotide
  Sense strand starting at position 3200 of SEQ ID NO: 1886876
caaggcaucugaguagaug

SEQ ID NO: 2432631 - RNA, 19 nt, Artificial Sequence
  Description of Artificial Sequence: Synthetic oligonucleotide
  Antisense strand to SEQ ID NO: 2432630
caucuacucagaugccuug

SEQ ID NO: 2432632 - RNA, 19 nt, Artificial Sequence
  Description of Artificial Sequence: Synthetic oligonucleotide
  Sense strand starting at position 3305 of SEQ ID NO: 1886876
uugaguuguaaagggcaaa

SEQ ID NO: 2432633 - RNA, 19 nt, Artificial Sequence
  Description of Artificial Sequence: Synthetic oligonucleotide
  Antisense strand to SEQ ID NO: 2432632
uuugcccuuuacaacucaa

SEQ ID NO: 2432634 - RNA, 19 nt, Artificial Sequence
  Description of Artificial Sequence: Synthetic oligonucleotide
  Sense strand starting at position 3306 of SEQ ID NO: 1886876
ugaguuguaaagggcaaau

SEQ ID NO: 2432635 - RNA, 19 nt, Artificial Sequence
  Description of Artificial Sequence: Synthetic oligonucleotide
  Antisense strand to SEQ ID NO: 2432634
auuugcccuuuacaacuca

SEQ ID NO: 2432636 - RNA, 19 nt, Artificial Sequence
  Description of Artificial Sequence: Synthetic oligonucleotide
  Sense strand starting at position 3317 of SEQ ID NO: 1886876
gggcaaaucuguuuccaag

SEQ ID NO: 2432637 - RNA, 19 nt, Artificial Sequence
  Description of Artificial Sequence: Synthetic oligonucleotide
  Antisense strand to SEQ ID NO: 2432636
cuuggaaacagauuugccc

SEQ ID NO: 2432638 - RNA, 19 nt, Artificial Sequence
  Description of Artificial Sequence: Synthetic oligonucleotide
  Sense strand starting at position 3319 of SEQ ID NO: 1886876
gcaaaucuguuuccaagau

SEQ ID NO: 2432639 - RNA, 19 nt, Artificial Sequence
  Description of Artificial Sequence: Synthetic oligonucleotide
  Antisense strand to SEQ ID NO: 2432638
aucuuggaaacagauuugc

SEQ ID NO: 2432640 - RNA, 19 nt, Artificial Sequence
  Description of Artificial Sequence: Synthetic oligonucleotide
  Sense strand starting at position 3504 of SEQ ID NO: 1886876
gcaucuguuguacagaauc

SEQ ID NO: 2432641 - RNA, 19 nt, Artificial Sequence
  Description of Artificial Sequence: Synthetic oligonucleotide
  Antisense strand to SEQ ID NO: 2432640
gauucuguacaacagaugc

SEQ ID NO: 2432642 - RNA, 19 nt, Artificial Sequence
  Description of Artificial Sequence: Synthetic oligonucleotide
  Sense strand starting at position 3839 of SEQ ID NO: 1886876
gagcacacacguuaaacuu

SEQ ID NO: 2432643 - RNA, 19 nt, Artificial Sequence
  Description of Artificial Sequence: Synthetic oligonucleotide
  Antisense strand to SEQ ID NO: 2432642
aaguuuaacgugugugcuc

SEQ ID NO: 2432644 - RNA, 19 nt, Artificial Sequence
  Description of Artificial Sequence: Synthetic oligonucleotide
  Sense strand starting at position 1754 of SEQ ID NO: 1886877
gaggcaggguuccagugau

SEQ ID NO: 2432645 - RNA, 19 nt, Artificial Sequence
  Description of Artificial Sequence: Synthetic oligonucleotide
  Antisense strand to SEQ ID NO: 2432644
aucacuggaacccugccuc

SEQ ID NO: 2432646 - RNA, 19 nt, Artificial Sequence
  Description of Artificial Sequence: Synthetic oligonucleotide
  Sense strand starting at position 1758 of SEQ ID NO: 1886877
caggguuccagugaugugu

SEQ ID NO: 2432647 - RNA, 19 nt, Artificial Sequence
  Description of Artificial Sequence: Synthetic oligonucleotide
  Antisense strand to SEQ ID NO: 2432646
acacaucacuggaacccug

SEQ ID NO: 2432648 - RNA, 19 nt, Artificial Sequence
  Description of Artificial Sequence: Synthetic oligonucleotide
  Sense strand starting at position 1760 of SEQ ID NO: 1886877
ggguuccagugauguguuu

SEQ ID NO: 2432649 - RNA, 19 nt, Artificial Sequence
  Description of Artificial Sequence: Synthetic oligonucleotide
  Antisense strand to SEQ ID NO: 2432648
aaacacaucacuggaaccc

SEQ ID NO: 2432650 - RNA, 19 nt, Artificial Sequence
  Description of Artificial Sequence: Synthetic oligonucleotide
  Sense strand starting at position 2551 of SEQ ID NO: 1886877
cucugcuucucugaguaua

SEQ ID NO: 2432651 - RNA, 19 nt, Artificial Sequence
  Description of Artificial Sequence: Synthetic oligonucleotide
  Antisense strand to SEQ ID NO: 2432650
uauacucagagaagcagag

SEQ ID NO: 2432652 - RNA, 19 nt, Artificial Sequence
  Description of Artificial Sequence: Synthetic oligonucleotide
  Sense strand starting at position 2553 of SEQ ID NO: 1886877
cugcuucucugaguauaac

SEQ ID NO: 2432653 - RNA, 19 nt, Artificial Sequence
  Description of Artificial Sequence: Synthetic oligonucleotide
  Antisense strand to SEQ ID NO: 2432652
guuauacucagagaagcag

SEQ ID NO: 2432654 - RNA, 19 nt, Artificial Sequence
  Description of Artificial Sequence: Synthetic oligonucleotide
  Sense strand starting at position 2554 of SEQ ID NO: 1886877
ugcuucucugaguauaacu

SEQ ID NO: 2432655 - RNA, 19 nt, Artificial Sequence
  Description of Artificial Sequence: Synthetic oligonucleotide
  Antisense strand to SEQ ID NO: 2432654
aguuauacucagagaagca

SEQ ID NO: 2432656 - RNA, 19 nt, Artificial Sequence
  Description of Artificial Sequence: Synthetic oligonucleotide
  Sense strand starting at position 2798 of SEQ ID NO: 1886877
uugccugugucagacacaa

SEQ ID NO: 2432657 - RNA, 19 nt, Artificial Sequence
  Description of Artificial Sequence: Synthetic oligonucleotide
  Antisense strand to SEQ ID NO: 2432656
uugugucugacacaggcaa

SEQ ID NO: 2432658 - RNA, 19 nt, Artificial Sequence
  Description of Artificial Sequence: Synthetic oligonucleotide
  Sense strand starting at position 3862 of SEQ ID NO: 1886877
aggaaauaccauugcagac

SEQ ID NO: 2432659 - RNA, 19 nt, Artificial Sequence
  Description of Artificial Sequence: Synthetic oligonucleotide
  Antisense strand to SEQ ID NO: 2432658
gucugcaaugguauuuccu

SEQ ID NO: 2432660 - RNA, 19 nt, Artificial Sequence
  Description of Artificial Sequence: Synthetic oligonucleotide
  Sense strand starting at position 2558 of SEQ ID NO: 1886878
cucugcuucucugaguaca

SEQ ID NO: 2432661 - RNA, 19 nt, Artificial Sequence
  Description of Artificial Sequence: Synthetic oligonucleotide
  Antisense strand to SEQ ID NO: 2432660
uguacucagagaagcagag

SEQ ID NO: 2432662 - RNA, 19 nt, Artificial Sequence
  Description of Artificial Sequence: Synthetic oligonucleotide
  Sense strand starting at position 2560 of SEQ ID NO: 1886878
cugcuucucugaguacaac

SEQ ID NO: 2432663 - RNA, 19 nt, Artificial Sequence
  Description of Artificial Sequence: Synthetic oligonucleotide
  Antisense strand to SEQ ID NO: 2432662
guuguacucagagaagcag

SEQ ID NO: 2432664 - RNA, 19 nt, Artificial Sequence
  Description of Artificial Sequence: Synthetic oligonucleotide
  Sense strand starting at position 2561 of SEQ ID NO: 1886878
ugcuucucugaguacaacu

SEQ ID NO: 2432665 - RNA, 19 nt, Artificial Sequence
  Description of Artificial Sequence: Synthetic oligonucleotide
  Antisense strand to SEQ ID NO: 2432664
aguuguacucagagaagca

SEQ ID NO: 2432666 - RNA, 19 nt, Artificial Sequence
  Description of Artificial Sequence: Synthetic oligonucleotide
  Sense strand starting at position 2804 of SEQ ID NO: 1886878
cuuugccugugucagacau

SEQ ID NO: 2432667 - RNA, 19 nt, Artificial Sequence
  Description of Artificial Sequence: Synthetic oligonucleotide
  Antisense strand to SEQ ID NO: 2432666
augucugacacaggcaaag

SEQ ID NO: 2432668 - RNA, 19 nt, Artificial Sequence
  Description of Artificial Sequence: Synthetic oligonucleotide
  Sense strand starting at position 2806 of SEQ ID NO: 1886878
uugccugugucagacauaa

SEQ ID NO: 2432669 - RNA, 19 nt, Artificial Sequence
  Description of Artificial Sequence: Synthetic oligonucleotide
  Antisense strand to SEQ ID NO: 2432668
uuaugucugacacaggcaa

SEQ ID NO: 2432670 - RNA, 19 nt, Artificial Sequence
  Description of Artificial Sequence: Synthetic oligonucleotide
  Sense strand starting at position 3324 of SEQ ID NO: 1886878
ucaccauugucuguucuua

SEQ ID NO: 2432671 - RNA, 19 nt, Artificial Sequence
  Description of Artificial Sequence: Synthetic oligonucleotide
  Antisense strand to SEQ ID NO: 2432670
uaagaacagacaaugguga

SEQ ID NO: 2432672 - RNA, 19 nt, Artificial Sequence
  Description of Artificial Sequence: Synthetic oligonucleotide
  Sense strand starting at position 3326 of SEQ ID NO: 1886878
accauugucuguucuuaca

SEQ ID NO: 2432673 - RNA, 19 nt, Artificial Sequence
  Description of Artificial Sequence: Synthetic oligonucleotide
  Antisense strand to SEQ ID NO: 2432672
uguaagaacagacaauggu

SEQ ID NO: 2432674 - RNA, 19 nt, Artificial Sequence
  Description of Artificial Sequence: Synthetic oligonucleotide
  Sense strand starting at position 3885 of SEQ ID NO: 1886878
ggacguaggaccuggaaau

SEQ ID NO: 2432675 - RNA, 19 nt, Artificial Sequence
  Description of Artificial Sequence: Synthetic oligonucleotide
  Antisense strand to SEQ ID NO: 2432674
auuuccagguccuacgucc

SEQ ID NO: 2432676 - RNA, 19 nt, Artificial Sequence
  Description of Artificial Sequence: Synthetic oligonucleotide
  Sense strand starting at position 436 of SEQ ID NO: 1886879
aaaguuuaccaucgaguuu

SEQ ID NO: 2432677 - RNA, 19 nt, Artificial Sequence
  Description of Artificial Sequence: Synthetic oligonucleotide
  Antisense strand to SEQ ID NO: 2432676
aaacucgaugguaaacuuu

SEQ ID NO: 2432678 - RNA, 19 nt, Artificial Sequence
  Description of Artificial Sequence: Synthetic oligonucleotide
  Sense strand starting at position 442 of SEQ ID NO: 1886879
uaccaucgaguuugcuaaa

SEQ ID NO: 2432679 - RNA, 19 nt, Artificial Sequence
  Description of Artificial Sequence: Synthetic oligonucleotide
  Antisense strand to SEQ ID NO: 2432678
uuuagcaaacucgauggua

SEQ ID NO: 2432680 - RNA, 19 nt, Artificial Sequence
  Description of Artificial Sequence: Synthetic oligonucleotide
  Sense strand starting at position 527 of SEQ ID NO: 1886879
agaggauuagcuuaauagc

SEQ ID NO: 2432681 - RNA, 19 nt, Artificial Sequence
  Description of Artificial Sequence: Synthetic oligonucleotide
  Antisense strand to SEQ ID NO: 2432680
gcuauuaagcuaauccucu

SEQ ID NO: 2432682 - RNA, 19 nt, Artificial Sequence
  Description of Artificial Sequence: Synthetic oligonucleotide
  Sense strand starting at position 535 of SEQ ID NO: 1886879
agcuuaauagcugaacacu

SEQ ID NO: 2432683 - RNA, 19 nt, Artificial Sequence
  Description of Artificial Sequence: Synthetic oligonucleotide
  Antisense strand to SEQ ID NO: 2432682
aguguucagcuauuaagcu

SEQ ID NO: 2432684 - RNA, 19 nt, Artificial Sequence
  Description of Artificial Sequence: Synthetic oligonucleotide
  Sense strand starting at position 561 of SEQ ID NO: 1886879
ggucaaugaacuuggaauu

SEQ ID NO: 2432685 - RNA, 19 nt, Artificial Sequence
  Description of Artificial Sequence: Synthetic oligonucleotide
  Antisense strand to SEQ ID NO: 2432684
aauuccaaguucauugacc

SEQ ID NO: 2432686 - RNA, 19 nt, Artificial Sequence
  Description of Artificial Sequence: Synthetic oligonucleotide
  Sense strand starting at position 562 of SEQ ID NO: 1886879
gucaaugaacuuggaauua

SEQ ID NO: 2432687 - RNA, 19 nt, Artificial Sequence
  Description of Artificial Sequence: Synthetic oligonucleotide
  Antisense strand to SEQ ID NO: 2432686
uaauuccaaguucauugac

SEQ ID NO: 2432688 - RNA, 19 nt, Artificial Sequence
  Description of Artificial Sequence: Synthetic oligonucleotide
  Sense strand starting at position 574 of SEQ ID NO: 1886879
ggaauuauuuguucugcuu

SEQ ID NO: 2432689 - RNA, 19 nt, Artificial Sequence
  Description of Artificial Sequence: Synthetic oligonucleotide
  Antisense strand to SEQ ID NO: 2432688
aagcagaacaaauaauucc

SEQ ID NO: 2432690 - RNA, 19 nt, Artificial Sequence
  Description of Artificial Sequence: Synthetic oligonucleotide
  Sense strand starting at position 712 of SEQ ID NO: 1886879
caggcuuauccagaauagu

SEQ ID NO: 2432691 - RNA, 19 nt, Artificial Sequence
  Description of Artificial Sequence: Synthetic oligonucleotide
  Antisense strand to SEQ ID NO: 2432690
acuauucuggauaagccug

SEQ ID NO: 2432692 - RNA, 19 nt, Artificial Sequence
  Description of Artificial Sequence: Synthetic oligonucleotide
  Sense strand starting at position 715 of SEQ ID NO: 1886879
gcuuauccagaauagucuu

SEQ ID NO: 2432693 - RNA, 19 nt, Artificial Sequence
  Description of Artificial Sequence: Synthetic oligonucleotide
  Antisense strand to SEQ ID NO: 2432692
aagacuauucuggauaagc

SEQ ID NO: 2432694 - RNA, 19 nt, Artificial Sequence
  Description of Artificial Sequence: Synthetic oligonucleotide
  Sense strand starting at position 762 of SEQ ID NO: 1886879
uaagucaguucccuuggaa

SEQ ID NO: 2432695 - RNA, 19 nt, Artificial Sequence
  Description of Artificial Sequence: Synthetic oligonucleotide
  Antisense strand to SEQ ID NO: 2432694
uuccaagggaacugacuua

SEQ ID NO: 2432696 - RNA, 19 nt, Artificial Sequence
  Description of Artificial Sequence: Synthetic oligonucleotide
  Sense strand starting at position 805 of SEQ ID NO: 1886879
aaauuaugguugguagauc

SEQ ID NO: 2432697 - RNA, 19 nt, Artificial Sequence
  Description of Artificial Sequence: Synthetic oligonucleotide
  Antisense strand to SEQ ID NO: 2432696
gaucuaccaaccauaauuu

SEQ ID NO: 2432698 - RNA, 19 nt, Artificial Sequence
  Description of Artificial Sequence: Synthetic oligonucleotide
  Sense strand starting at position 813 of SEQ ID NO: 1886879
guugguagauccuaugaag

SEQ ID NO: 2432699 - RNA, 19 nt, Artificial Sequence
  Description of Artificial Sequence: Synthetic oligonucleotide
  Antisense strand to SEQ ID NO: 2432698
cuucauaggaucuaccaac

SEQ ID NO: 2432700 - RNA, 19 nt, Artificial Sequence
  Description of Artificial Sequence: Synthetic oligonucleotide
  Sense strand starting at position 910 of SEQ ID NO: 1886879
gcauauuuacagugcuacu

SEQ ID NO: 2432701 - RNA, 19 nt, Artificial Sequence
  Description of Artificial Sequence: Synthetic oligonucleotide
  Antisense strand to SEQ ID NO: 2432700
aguagcacuguaaauaugc

SEQ ID NO: 2432702 - RNA, 19 nt, Artificial Sequence
  Description of Artificial Sequence: Synthetic oligonucleotide
  Sense strand starting at position 977 of SEQ ID NO: 1886879
gccuauaaaccauggcuaa

SEQ ID NO: 2432703 - RNA, 19 nt, Artificial Sequence
  Description of Artificial Sequence: Synthetic oligonucleotide
  Antisense strand to SEQ ID NO: 2432702
uuagccaugguuuauaggc

SEQ ID NO: 2432704 - RNA, 19 nt, Artificial Sequence
  Description of Artificial Sequence: Synthetic oligonucleotide
  Sense strand starting at position 1004 of SEQ ID NO: 1886879
cucuaauuccuuggaacag

SEQ ID NO: 2432705 - RNA, 19 nt, Artificial Sequence
  Description of Artificial Sequence: Synthetic oligonucleotide
  Antisense strand to SEQ ID NO: 2432704
cuguuccaaggaauuagag

SEQ ID NO: 2432706 - RNA, 19 nt, Artificial Sequence
  Description of Artificial Sequence: Synthetic oligonucleotide
  Sense strand starting at position 1046 of SEQ ID NO: 1886879
cuuugacacgcguguaauc

SEQ ID NO: 2432707 - RNA, 19 nt, Artificial Sequence
  Description of Artificial Sequence: Synthetic oligonucleotide
  Antisense strand to SEQ ID NO: 2432706
gauuacacgcgugucaaag

SEQ ID NO: 2432708 - RNA, 19 nt, Artificial Sequence
  Description of Artificial Sequence: Synthetic oligonucleotide
  Sense strand starting at position 1056 of SEQ ID NO: 1886879
cguguaaucuccgucauca

SEQ ID NO: 2432709 - RNA, 19 nt, Artificial Sequence
  Description of Artificial Sequence: Synthetic oligonucleotide
  Antisense strand to SEQ ID NO: 2432708
ugaugacggagauuacacg

SEQ ID NO: 2432710 - RNA, 19 nt, Artificial Sequence
  Description of Artificial Sequence: Synthetic oligonucleotide
  Sense strand starting at position 1058 of SEQ ID NO: 1886879
uguaaucuccgucaucauu

SEQ ID NO: 2432711 - RNA, 19 nt, Artificial Sequence
  Description of Artificial Sequence: Synthetic oligonucleotide
  Antisense strand to SEQ ID NO: 2432710
aaugaugacggagauuaca

SEQ ID NO: 2432712 - RNA, 19 nt, Artificial Sequence
  Description of Artificial Sequence: Synthetic oligonucleotide
  Sense strand starting at position 1068 of SEQ ID NO: 1886879
gucaucauuuccuaacugu

SEQ ID NO: 2432713 - RNA, 19 nt, Artificial Sequence
  Description of Artificial Sequence: Synthetic oligonucleotide
  Antisense strand to SEQ ID NO: 2432712
acaguuaggaaaugaugac

SEQ ID NO: 2432714 - RNA, 19 nt, Artificial Sequence
  Description of Artificial Sequence: Synthetic oligonucleotide
  Sense strand starting at position 1189 of SEQ ID NO: 1886879
augcgaaucgcucaagcuu

SEQ ID NO: 2432715 - RNA, 19 nt, Artificial Sequence
  Description of Artificial Sequence: Synthetic oligonucleotide
  Antisense strand to SEQ ID NO: 2432714
aagcuugagcgauucgcau

SEQ ID NO: 2432716 - RNA, 19 nt, Artificial Sequence
  Description of Artificial Sequence: Synthetic oligonucleotide
  Sense strand starting at position 1226 of SEQ ID NO: 1886879
uggauaccuuugcaagacu

SEQ ID NO: 2432717 - RNA, 19 nt, Artificial Sequence
  Description of Artificial Sequence: Synthetic oligonucleotide
  Antisense strand to SEQ ID NO: 2432716
agucuugcaaagguaucca

SEQ ID NO: 2432718 - RNA, 19 nt, Artificial Sequence
  Description of Artificial Sequence: Synthetic oligonucleotide
  Sense strand starting at position 1320 of SEQ ID NO: 1886879
aaaggaagugauggcuuua

SEQ ID NO: 2432719 - RNA, 19 nt, Artificial Sequence
  Description of Artificial Sequence: Synthetic oligonucleotide
  Antisense strand to SEQ ID NO: 2432718
uaaagccaucacuuccuuu

SEQ ID NO: 2432720 - RNA, 19 nt, Artificial Sequence
  Description of Artificial Sequence: Synthetic oligonucleotide
  Sense strand starting at position 1392 of SEQ ID NO: 1886879
ggcucaagauguuaccaga

SEQ ID NO: 2432721 - RNA, 19 nt, Artificial Sequence
  Description of Artificial Sequence: Synthetic oligonucleotide
  Antisense strand to SEQ ID NO: 2432720
ucugguaacaucuugagcc

SEQ ID NO: 2432722 - RNA, 19 nt, Artificial Sequence
  Description of Artificial Sequence: Synthetic oligonucleotide
  Sense strand starting at position 2406 of SEQ ID NO: 1886879
augggaucucgcuguggga

SEQ ID NO: 2432723 - RNA, 19 nt, Artificial Sequence
  Description of Artificial Sequence: Synthetic oligonucleotide
  Antisense strand to SEQ ID NO: 2432722
ucccacagcgagaucccau

SEQ ID NO: 2432724 - RNA, 19 nt, Artificial Sequence
  Description of Artificial Sequence: Synthetic oligonucleotide
  Sense strand starting at position 2433 of SEQ ID NO: 1886879
uccaucuguccuugccaga

SEQ ID NO: 2432725 - RNA, 19 nt, Artificial Sequence
  Description of Artificial Sequence: Synthetic oligonucleotide
  Antisense strand to SEQ ID NO: 2432724
ucuggcaaggacagaugga

SEQ ID NO: 2432726 - RNA, 19 nt, Artificial Sequence
  Description of Artificial Sequence: Synthetic oligonucleotide
  Sense strand starting at position 2452 of SEQ ID NO: 1886879
aucguaguucucugaaagg

SEQ ID NO: 2432727 - RNA, 19 nt, Artificial Sequence
  Description of Artificial Sequence: Synthetic oligonucleotide
  Antisense strand to SEQ ID NO: 2432726
ccuuucagagaacuacgau

SEQ ID NO: 2432728 - RNA, 19 nt, Artificial Sequence
  Description of Artificial Sequence: Synthetic oligonucleotide
  Sense strand starting at position 2470 of SEQ ID NO: 1886879
gcgagacaucccugaccca

SEQ ID NO: 2432729 - RNA, 19 nt, Artificial Sequence
  Description of Artificial Sequence: Synthetic oligonucleotide
  Antisense strand to SEQ ID NO: 2432728
ugggucagggaugucucgc

SEQ ID NO: 2432730 - RNA, 19 nt, Artificial Sequence
  Description of Artificial Sequence: Synthetic oligonucleotide
  Sense strand starting at position 2540 of SEQ ID NO: 1886879
acaguccuuuccucagaca

SEQ ID NO: 2432731 - RNA, 19 nt, Artificial Sequence
  Description of Artificial Sequence: Synthetic oligonucleotide
  Antisense strand to SEQ ID NO: 2432730
ugucugaggaaaggacugu

SEQ ID NO: 2432732 - RNA, 19 nt, Artificial Sequence
  Description of Artificial Sequence: Synthetic oligonucleotide
  Sense strand starting at position 2580 of SEQ ID NO: 1886879
cuucuuaucccuggacgca

SEQ ID NO: 2432733 - RNA, 19 nt, Artificial Sequence
  Description of Artificial Sequence: Synthetic oligonucleotide
  Antisense strand to SEQ ID NO: 2432732
ugcguccagggauaagaag

SEQ ID NO: 2432734 - RNA, 19 nt, Artificial Sequence
  Description of Artificial Sequence: Synthetic oligonucleotide
  Sense strand starting at position 2636 of SEQ ID NO: 1886879
ggaccuagauaucuucuuu

SEQ ID NO: 2432735 - RNA, 19 nt, Artificial Sequence
  Description of Artificial Sequence: Synthetic oligonucleotide
  Antisense strand to SEQ ID NO: 2432734
aaagaagauaucuaggucc

SEQ ID NO: 2432736 - RNA, 19 nt, Artificial Sequence
  Description of Artificial Sequence: Synthetic oligonucleotide
  Sense strand starting at position 3216 of SEQ ID NO: 1886879
cuaugacgucccgaagaga

SEQ ID NO: 2432737 - RNA, 19 nt, Artificial Sequence
  Description of Artificial Sequence: Synthetic oligonucleotide
  Antisense strand to SEQ ID NO: 2432736
ucucuucgggacgucauag

SEQ ID NO: 2432738 - RNA, 19 nt, Artificial Sequence
  Description of Artificial Sequence: Synthetic oligonucleotide
  Sense strand starting at position 3242 of SEQ ID NO: 1886879
ccggaucagggauguauga

SEQ ID NO: 2432739 - RNA, 19 nt, Artificial Sequence
  Description of Artificial Sequence: Synthetic oligonucleotide
  Antisense strand to SEQ ID NO: 2432738
ucauacaucccugauccgg

SEQ ID NO: 2432740 - RNA, 19 nt, Artificial Sequence
  Description of Artificial Sequence: Synthetic oligonucleotide
  Sense strand starting at position 3287 of SEQ ID NO: 1886879
gggaguggacuauguaaua

SEQ ID NO: 2432741 - RNA, 19 nt, Artificial Sequence
  Description of Artificial Sequence: Synthetic oligonucleotide
  Antisense strand to SEQ ID NO: 2432740
uauuacauaguccacuccc

SEQ ID NO: 2432742 - RNA, 19 nt, Artificial Sequence
  Description of Artificial Sequence: Synthetic oligonucleotide
  Sense strand starting at position 3330 of SEQ ID NO: 1886879
ugcagugugccaggucauu

SEQ ID NO: 2432743 - RNA, 19 nt, Artificial Sequence
  Description of Artificial Sequence: Synthetic oligonucleotide
  Antisense strand to SEQ ID NO: 2432742
aaugaccuggcacacugca

SEQ ID NO: 2432744 - RNA, 19 nt, Artificial Sequence
  Description of Artificial Sequence: Synthetic oligonucleotide
  Sense strand starting at position 3341 of SEQ ID NO: 1886879
aggucauucuaagugcuuu

SEQ ID NO: 2432745 - RNA, 19 nt, Artificial Sequence
  Description of Artificial Sequence: Synthetic oligonucleotide
  Antisense strand to SEQ ID NO: 2432744
aaagcacuuagaaugaccu

SEQ ID NO: 2432746 - RNA, 19 nt, Artificial Sequence
  Description of Artificial Sequence: Synthetic oligonucleotide
  Sense strand starting at position 3840 of SEQ ID NO: 1886879
gcccuauaguuucuaucca

SEQ ID NO: 2432747 - RNA, 19 nt, Artificial Sequence
  Description of Artificial Sequence: Synthetic oligonucleotide
  Antisense strand to SEQ ID NO: 2432746
uggauagaaacuauagggc

SEQ ID NO: 2432748 - RNA, 19 nt, Artificial Sequence
  Description of Artificial Sequence: Synthetic oligonucleotide
  Sense strand starting at position 3859 of SEQ ID NO: 1886879
acuuacugucauuagugau

SEQ ID NO: 2432749 - RNA, 19 nt, Artificial Sequence
  Description of Artificial Sequence: Synthetic oligonucleotide
  Antisense strand to SEQ ID NO: 2432748
aucacuaaugacaguaagu

SEQ ID NO: 2432750 - RNA, 19 nt, Artificial Sequence
  Description of Artificial Sequence: Synthetic oligonucleotide
  Sense strand starting at position 3907 of SEQ ID NO: 1886879
ugauuaacgugcuucugau

SEQ ID NO: 2432751 - RNA, 19 nt, Artificial Sequence
  Description of Artificial Sequence: Synthetic oligonucleotide
  Antisense strand to SEQ ID NO: 2432750
aucagaagcacguuaauca

SEQ ID NO: 2432752 - RNA, 19 nt, Artificial Sequence
  Description of Artificial Sequence: Synthetic oligonucleotide
  Sense strand starting at position 3913 of SEQ ID NO: 1886879
acgugcuucugauuaaaua

SEQ ID NO: 2432753 - RNA, 19 nt, Artificial Sequence
  Description of Artificial Sequence: Synthetic oligonucleotide
  Antisense strand to SEQ ID NO: 2432752
uauuuaaucagaagcacgu

SEQ ID NO: 2432754 - RNA, 19 nt, Artificial Sequence
  Description of Artificial Sequence: Synthetic oligonucleotide
  Sense strand starting at position 3914 of SEQ ID NO: 1886879
cgugcuucugauuaaauaa

SEQ ID NO: 2432755 - RNA, 19 nt, Artificial Sequence
  Description of Artificial Sequence: Synthetic oligonucleotide
  Antisense strand to SEQ ID NO: 2432754
uuauuuaaucagaagcacg

SEQ ID NO: 2432756 - RNA, 19 nt, Artificial Sequence
  Description of Artificial Sequence: Synthetic oligonucleotide
  Sense strand starting at position 18 of SEQ ID NO: 1886880
cuaaacauguggcucagau

SEQ ID NO: 2432757 - RNA, 19 nt, Artificial Sequence
  Description of Artificial Sequence: Synthetic oligonucleotide
  Antisense strand to SEQ ID NO: 2432756
aucugagccacauguuuag

SEQ ID NO: 2432758 - RNA, 19 nt, Artificial Sequence
  Description of Artificial Sequence: Synthetic oligonucleotide
  Sense strand starting at position 183 of SEQ ID NO: 1886880
aggguacuccugcauuaag

SEQ ID NO: 2432759 - RNA, 19 nt, Artificial Sequence
  Description of Artificial Sequence: Synthetic oligonucleotide
  Antisense strand to SEQ ID NO: 2432758
cuuaaugcaggaguacccu

SEQ ID NO: 2432760 - RNA, 19 nt, Artificial Sequence
  Description of Artificial Sequence: Synthetic oligonucleotide
  Sense strand starting at position 228 of SEQ ID NO: 1886880
gcaagaaacggauguaucu

SEQ ID NO: 2432761 - RNA, 19 nt, Artificial Sequence
  Description of Artificial Sequence: Synthetic oligonucleotide
  Antisense strand to SEQ ID NO: 2432760
agauacauccguuucuugc

SEQ ID NO: 2432762 - RNA, 19 nt, Artificial Sequence
  Description of Artificial Sequence: Synthetic oligonucleotide
  Sense strand starting at position 274 of SEQ ID NO: 1886880
ugcacuguugaaugagaag

SEQ ID NO: 2432763 - RNA, 19 nt, Artificial Sequence
  Description of Artificial Sequence: Synthetic oligonucleotide
  Antisense strand to SEQ ID NO: 2432762
cuucucauucaacagugca

SEQ ID NO: 2432764 - RNA, 19 nt, Artificial Sequence
  Description of Artificial Sequence: Synthetic oligonucleotide
  Sense strand starting at position 316 of SEQ ID NO: 1886880
gaaggcaaauuaguaugau

SEQ ID NO: 2432765 - RNA, 19 nt, Artificial Sequence
  Description of Artificial Sequence: Synthetic oligonucleotide
  Antisense strand to SEQ ID NO: 2432764
aucauacuaauuugccuuc

SEQ ID NO: 2432766 - RNA, 19 nt, Artificial Sequence
  Description of Artificial Sequence: Synthetic oligonucleotide
  Sense strand starting at position 332 of SEQ ID NO: 1886880
gaugucaucuggcugggaa

SEQ ID NO: 2432767 - RNA, 19 nt, Artificial Sequence
  Description of Artificial Sequence: Synthetic oligonucleotide
  Antisense strand to SEQ ID NO: 2432766
uucccagccagaugacauc

SEQ ID NO: 2432768 - RNA, 19 nt, Artificial Sequence
  Description of Artificial Sequence: Synthetic oligonucleotide
  Sense strand starting at position 333 of SEQ ID NO: 1886880
augucaucuggcugggaaa

SEQ ID NO: 2432769 - RNA, 19 nt, Artificial Sequence
  Description of Artificial Sequence: Synthetic oligonucleotide
  Antisense strand to SEQ ID NO: 2432768
uuucccagccagaugacau

SEQ ID NO: 2432770 - RNA, 19 nt, Artificial Sequence
  Description of Artificial Sequence: Synthetic oligonucleotide
  Sense strand starting at position 360 of SEQ ID NO: 1886880
gggagagguaggugggauu

SEQ ID NO: 2432771 - RNA, 19 nt, Artificial Sequence
  Description of Artificial Sequence: Synthetic oligonucleotide
  Antisense strand to SEQ ID NO: 2432770
aaucccaccuaccucuccc

SEQ ID NO: 2432772 - RNA, 19 nt, Artificial Sequence
  Description of Artificial Sequence: Synthetic oligonucleotide
  Sense strand starting at position 415 of SEQ ID NO: 1886880
uuucucaaacugugauagu

SEQ ID NO: 2432773 - RNA, 19 nt, Artificial Sequence
  Description of Artificial Sequence: Synthetic oligonucleotide
  Antisense strand to SEQ ID NO: 2432772
acuaucacaguuugagaaa

SEQ ID NO: 2432774 - RNA, 19 nt, Artificial Sequence
  Description of Artificial Sequence: Synthetic oligonucleotide
  Sense strand starting at position 428 of SEQ ID NO: 1886880
gauaguauaccuugggucu

SEQ ID NO: 2432775 - RNA, 19 nt, Artificial Sequence
  Description of Artificial Sequence: Synthetic oligonucleotide
  Antisense strand to SEQ ID NO: 2432774
agacccaagguauacuauc

SEQ ID NO: 2432776 - RNA, 19 nt, Artificial Sequence
  Description of Artificial Sequence: Synthetic oligonucleotide
  Sense strand starting at position 477 of SEQ ID NO: 1886880
cagauuugggcguguccaa

SEQ ID NO: 2432777 - RNA, 19 nt, Artificial Sequence
  Description of Artificial Sequence: Synthetic oligonucleotide
  Antisense strand to SEQ ID NO: 2432776
uuggacacgcccaaaucug

SEQ ID NO: 2432778 - RNA, 19 nt, Artificial Sequence
  Description of Artificial Sequence: Synthetic oligonucleotide
  Sense strand starting at position 497 of SEQ ID NO: 1886880
uuucucauugguggagagu

SEQ ID NO: 2432779 - RNA, 19 nt, Artificial Sequence
  Description of Artificial Sequence: Synthetic oligonucleotide
  Antisense strand to SEQ ID NO: 2432778
acucuccaccaaugagaaa

SEQ ID NO: 2432780 - RNA, 19 nt, Artificial Sequence
  Description of Artificial Sequence: Synthetic oligonucleotide
  Sense strand starting at position 498 of SEQ ID NO: 1886880
uucucauugguggagaguu

SEQ ID NO: 2432781 - RNA, 19 nt, Artificial Sequence
  Description of Artificial Sequence: Synthetic oligonucleotide
  Antisense strand to SEQ ID NO: 2432780
aacucuccaccaaugagaa

SEQ ID NO: 2432782 - RNA, 19 nt, Artificial Sequence
  Description of Artificial Sequence: Synthetic oligonucleotide
  Sense strand starting at position 758 of SEQ ID NO: 1886880
gcgagacucugacuuuaaa

SEQ ID NO: 2432783 - RNA, 19 nt, Artificial Sequence
  Description of Artificial Sequence: Synthetic oligonucleotide
  Antisense strand to SEQ ID NO: 2432782
uuuaaagucagagucucgc

SEQ ID NO: 2432784 - RNA, 19 nt, Artificial Sequence
  Description of Artificial Sequence: Synthetic oligonucleotide
  Sense strand starting at position 863 of SEQ ID NO: 1886880
ugugaucuuagugauugca

SEQ ID NO: 2432785 - RNA, 19 nt, Artificial Sequence
  Description of Artificial Sequence: Synthetic oligonucleotide
  Antisense strand to SEQ ID NO: 2432784
ugcaaucacuaagaucaca

SEQ ID NO: 2432786 - RNA, 19 nt, Artificial Sequence
  Description of Artificial Sequence: Synthetic oligonucleotide
  Sense strand starting at position 865 of SEQ ID NO: 1886880
ugaucuuagugauugcaau

SEQ ID NO: 2432787 - RNA, 19 nt, Artificial Sequence
  Description of Artificial Sequence: Synthetic oligonucleotide
  Antisense strand to SEQ ID NO: 2432786
auugcaaucacuaagauca

SEQ ID NO: 2432788 - RNA, 19 nt, Artificial Sequence
  Description of Artificial Sequence: Synthetic oligonucleotide
  Sense strand starting at position 866 of SEQ ID NO: 1886880
gaucuuagugauugcaaug

SEQ ID NO: 2432789 - RNA, 19 nt, Artificial Sequence
  Description of Artificial Sequence: Synthetic oligonucleotide
  Antisense strand to SEQ ID NO: 2432788
cauugcaaucacuaagauc

SEQ ID NO: 2432790 - RNA, 19 nt, Artificial Sequence
  Description of Artificial Sequence: Synthetic oligonucleotide
  Sense strand starting at position 872 of SEQ ID NO: 1886880
agugauugcaauggacuga

SEQ ID NO: 2432791 - RNA, 19 nt, Artificial Sequence
  Description of Artificial Sequence: Synthetic oligonucleotide
  Antisense strand to SEQ ID NO: 2432790
ucaguccauugcaaucacu

SEQ ID NO: 2432792 - RNA, 19 nt, Artificial Sequence
  Description of Artificial Sequence: Synthetic oligonucleotide
  Sense strand starting at position 966 of SEQ ID NO: 1886880
gggagugauuagguuauga

SEQ ID NO: 2432793 - RNA, 19 nt, Artificial Sequence
  Description of Artificial Sequence: Synthetic oligonucleotide
  Antisense strand to SEQ ID NO: 2432792
ucauaaccuaaucacuccc

SEQ ID NO: 2432794 - RNA, 19 nt, Artificial Sequence
  Description of Artificial Sequence: Synthetic oligonucleotide
  Sense strand starting at position 1082 of SEQ ID NO: 1886880
gcaucugugaaccgggaaa

SEQ ID NO: 2432795 - RNA, 19 nt, Artificial Sequence
  Description of Artificial Sequence: Synthetic oligonucleotide
  Antisense strand to SEQ ID NO: 2432794
uuucccgguucacagaugc

SEQ ID NO: 2432796 - RNA, 19 nt, Artificial Sequence
  Description of Artificial Sequence: Synthetic oligonucleotide
  Sense strand starting at position 1434 of SEQ ID NO: 1886880
uaugguaagcaggauucua

SEQ ID NO: 2432797 - RNA, 19 nt, Artificial Sequence
  Description of Artificial Sequence: Synthetic oligonucleotide
  Antisense strand to SEQ ID NO: 2432796
uagaauccugcuuaccaua

SEQ ID NO: 2432798 - RNA, 19 nt, Artificial Sequence
  Description of Artificial Sequence: Synthetic oligonucleotide
  Sense strand starting at position 1563 of SEQ ID NO: 1886880
caaggugggccugauugaa

SEQ ID NO: 2432799 - RNA, 19 nt, Artificial Sequence
  Description of Artificial Sequence: Synthetic oligonucleotide
  Antisense strand to SEQ ID NO: 2432798
uucaaucaggcccaccuug

SEQ ID NO: 2432800 - RNA, 19 nt, Artificial Sequence
  Description of Artificial Sequence: Synthetic oligonucleotide
  Sense strand starting at position 1584 of SEQ ID NO: 1886880
gcaugagcccuugaaagua

SEQ ID NO: 2432801 - RNA, 19 nt, Artificial Sequence
  Description of Artificial Sequence: Synthetic oligonucleotide
  Antisense strand to SEQ ID NO: 2432800
uacuuucaagggcucaugc

SEQ ID NO: 2432802 - RNA, 19 nt, Artificial Sequence
  Description of Artificial Sequence: Synthetic oligonucleotide
  Sense strand starting at position 1651 of SEQ ID NO: 1886880
agaagcauuugacacacua

SEQ ID NO: 2432803 - RNA, 19 nt, Artificial Sequence
  Description of Artificial Sequence: Synthetic oligonucleotide
  Antisense strand to SEQ ID NO: 2432802
uagugugucaaaugcuucu

SEQ ID NO: 2432804 - RNA, 19 nt, Artificial Sequence
  Description of Artificial Sequence: Synthetic oligonucleotide
  Sense strand starting at position 1686 of SEQ ID NO: 1886880
cccacuauuguugggucaa

SEQ ID NO: 2432805 - RNA, 19 nt, Artificial Sequence
  Description of Artificial Sequence: Synthetic oligonucleotide
  Antisense strand to SEQ ID NO: 2432804
uugacccaacaauaguggg

SEQ ID NO: 2432806 - RNA, 19 nt, Artificial Sequence
  Description of Artificial Sequence: Synthetic oligonucleotide
  Sense strand starting at position 1797 of SEQ ID NO: 1886880
caacgagaaugagcuugaa

SEQ ID NO: 2432807 - RNA, 19 nt, Artificial Sequence
  Description of Artificial Sequence: Synthetic oligonucleotide
  Antisense strand to SEQ ID NO: 2432806
uucaagcucauucucguug

SEQ ID NO: 2432808 - RNA, 19 nt, Artificial Sequence
  Description of Artificial Sequence: Synthetic oligonucleotide
  Sense strand starting at position 1800 of SEQ ID NO: 1886880
cgagaaugagcuugaagga

SEQ ID NO: 2432809 - RNA, 19 nt, Artificial Sequence
  Description of Artificial Sequence: Synthetic oligonucleotide
  Antisense strand to SEQ ID NO: 2432808
uccuucaagcucauucucg

SEQ ID NO: 2432810 - RNA, 19 nt, Artificial Sequence
  Description of Artificial Sequence: Synthetic oligonucleotide
  Sense strand starting at position 1823 of SEQ ID NO: 1886880
cccugagcugcugacgaaa

SEQ ID NO: 2432811 - RNA, 19 nt, Artificial Sequence
  Description of Artificial Sequence: Synthetic oligonucleotide
  Antisense strand to SEQ ID NO: 2432810
uuucgucagcagcucaggg

SEQ ID NO: 2432812 - RNA, 19 nt, Artificial Sequence
  Description of Artificial Sequence: Synthetic oligonucleotide
  Sense strand starting at position 1905 of SEQ ID NO: 1886880
ucagauaugguuuggaugu

SEQ ID NO: 2432813 - RNA, 19 nt, Artificial Sequence
  Description of Artificial Sequence: Synthetic oligonucleotide
  Antisense strand to SEQ ID NO: 2432812
acauccaaaccauaucuga

SEQ ID NO: 2432814 - RNA, 19 nt, Artificial Sequence
  Description of Artificial Sequence: Synthetic oligonucleotide
  Sense strand starting at position 1981 of SEQ ID NO: 1886880
gugggagguaauuguaaca

SEQ ID NO: 2432815 - RNA, 19 nt, Artificial Sequence
  Description of Artificial Sequence: Synthetic oligonucleotide
  Antisense strand to SEQ ID NO: 2432814
uguuacaauuaccucccac

SEQ ID NO: 2432816 - RNA, 19 nt, Artificial Sequence
  Description of Artificial Sequence: Synthetic oligonucleotide
  Sense strand starting at position 2032 of SEQ ID NO: 1886880
cgucuccuuggugaugaau

SEQ ID NO: 2432817 - RNA, 19 nt, Artificial Sequence
  Description of Artificial Sequence: Synthetic oligonucleotide
  Antisense strand to SEQ ID NO: 2432816
auucaucaccaaggagacg

SEQ ID NO: 2432818 - RNA, 19 nt, Artificial Sequence
  Description of Artificial Sequence: Synthetic oligonucleotide
  Sense strand starting at position 2050 of SEQ ID NO: 1886880
ugaggucuugcucagaguu

SEQ ID NO: 2432819 - RNA, 19 nt, Artificial Sequence
  Description of Artificial Sequence: Synthetic oligonucleotide
  Antisense strand to SEQ ID NO: 2432818
aacucugagcaagaccuca

SEQ ID NO: 2432820 - RNA, 19 nt, Artificial Sequence
  Description of Artificial Sequence: Synthetic oligonucleotide
  Sense strand starting at position 2068 of SEQ ID NO: 1886880
ucaugugagaucuggaugu

SEQ ID NO: 2432821 - RNA, 19 nt, Artificial Sequence
  Description of Artificial Sequence: Synthetic oligonucleotide
  Antisense strand to SEQ ID NO: 2432820
acauccagaucucacauga

SEQ ID NO: 2432822 - RNA, 19 nt, Artificial Sequence
  Description of Artificial Sequence: Synthetic oligonucleotide
  Sense strand starting at position 2070 of SEQ ID NO: 1886880
augugagaucuggauguuu

SEQ ID NO: 2432823 - RNA, 19 nt, Artificial Sequence
  Description of Artificial Sequence: Synthetic oligonucleotide
  Antisense strand to SEQ ID NO: 2432822
aaacauccagaucucacau

SEQ ID NO: 2432824 - RNA, 19 nt, Artificial Sequence
  Description of Artificial Sequence: Synthetic oligonucleotide
  Sense strand starting at position 2084 of SEQ ID NO: 1886880
uguuuaaaggcauauggca

SEQ ID NO: 2432825 - RNA, 19 nt, Artificial Sequence
  Description of Artificial Sequence: Synthetic oligonucleotide
  Antisense strand to SEQ ID NO: 2432824
ugccauaugccuuuaaaca

SEQ ID NO: 2432826 - RNA, 19 nt, Artificial Sequence
  Description of Artificial Sequence: Synthetic oligonucleotide
  Sense strand starting at position 2618 of SEQ ID NO: 1886880
accacaccucgccagauau

SEQ ID NO: 2432827 - RNA, 19 nt, Artificial Sequence
  Description of Artificial Sequence: Synthetic oligonucleotide
  Antisense strand to SEQ ID NO: 2432826
auaucuggcgagguguggu

SEQ ID NO: 2432828 - RNA, 19 nt, Artificial Sequence
  Description of Artificial Sequence: Synthetic oligonucleotide
  Sense strand starting at position 2625 of SEQ ID NO: 1886880
cucgccagauauuucuuua

SEQ ID NO: 2432829 - RNA, 19 nt, Artificial Sequence
  Description of Artificial Sequence: Synthetic oligonucleotide
  Antisense strand to SEQ ID NO: 2432828
uaaagaaauaucuggcgag

SEQ ID NO: 2432830 - RNA, 19 nt, Artificial Sequence
  Description of Artificial Sequence: Synthetic oligonucleotide
  Sense strand starting at position 2932 of SEQ ID NO: 1886880
ucuauuuguguuggacagu

SEQ ID NO: 2432831 - RNA, 19 nt, Artificial Sequence
  Description of Artificial Sequence: Synthetic oligonucleotide
  Antisense strand to SEQ ID NO: 2432830
acuguccaacacaaauaga

SEQ ID NO: 2432832 - RNA, 19 nt, Artificial Sequence
  Description of Artificial Sequence: Synthetic oligonucleotide
  Sense strand starting at position 3255 of SEQ ID NO: 1886880
guuaaaugucaagacucuu

SEQ ID NO: 2432833 - RNA, 19 nt, Artificial Sequence
  Description of Artificial Sequence: Synthetic oligonucleotide
  Antisense strand to SEQ ID NO: 2432832
aagagucuugacauuuaac

SEQ ID NO: 2432834 - RNA, 19 nt, Artificial Sequence
  Description of Artificial Sequence: Synthetic oligonucleotide
  Sense strand starting at position 3490 of SEQ ID NO: 1886880
aucauauuccaguguauga

SEQ ID NO: 2432835 - RNA, 19 nt, Artificial Sequence
  Description of Artificial Sequence: Synthetic oligonucleotide
  Antisense strand to SEQ ID NO: 2432834
ucauacacuggaauaugau

SEQ ID NO: 2432836 - RNA, 19 nt, Artificial Sequence
  Description of Artificial Sequence: Synthetic oligonucleotide
  Sense strand starting at position 54 of SEQ ID NO: 1886881
ggagucacaugguggagau

SEQ ID NO: 2432837 - RNA, 19 nt, Artificial Sequence
  Description of Artificial Sequence: Synthetic oligonucleotide
  Antisense strand to SEQ ID NO: 2432836
aucuccaccaugugacucc

SEQ ID NO: 2432838 - RNA, 19 nt, Artificial Sequence
  Description of Artificial Sequence: Synthetic oligonucleotide
  Sense strand starting at position 66 of SEQ ID NO: 1886881
uggagaucuagcuaaguca

SEQ ID NO: 2432839 - RNA, 19 nt, Artificial Sequence
  Description of Artificial Sequence: Synthetic oligonucleotide
  Antisense strand to SEQ ID NO: 2432838
ugacuuagcuagaucucca

SEQ ID NO: 2432840 - RNA, 19 nt, Artificial Sequence
  Description of Artificial Sequence: Synthetic oligonucleotide
  Sense strand starting at position 127 of SEQ ID NO: 1886881
cacaaucaucccgaguuga

SEQ ID NO: 2432841 - RNA, 19 nt, Artificial Sequence
  Description of Artificial Sequence: Synthetic oligonucleotide
  Antisense strand to SEQ ID NO: 2432840
ucaacucgggaugauugug

SEQ ID NO: 2432842 - RNA, 19 nt, Artificial Sequence
  Description of Artificial Sequence: Synthetic oligonucleotide
  Sense strand starting at position 158 of SEQ ID NO: 1886881
cugggauugacccggaguu

SEQ ID NO: 2432843 - RNA, 19 nt, Artificial Sequence
  Description of Artificial Sequence: Synthetic oligonucleotide
  Antisense strand to SEQ ID NO: 2432842
aacuccgggucaaucccag

SEQ ID NO: 2432844 - RNA, 19 nt, Artificial Sequence
  Description of Artificial Sequence: Synthetic oligonucleotide
  Sense strand starting at position 159 of SEQ ID NO: 1886881
ugggauugacccggaguuu

SEQ ID NO: 2432845 - RNA, 19 nt, Artificial Sequence
  Description of Artificial Sequence: Synthetic oligonucleotide
  Antisense strand to SEQ ID NO: 2432844
aaacuccgggucaauccca

SEQ ID NO: 2432846 - RNA, 19 nt, Artificial Sequence
  Description of Artificial Sequence: Synthetic oligonucleotide
  Sense strand starting at position 168 of SEQ ID NO: 1886881
cccggaguuuguucuggaa

SEQ ID NO: 2432847 - RNA, 19 nt, Artificial Sequence
  Description of Artificial Sequence: Synthetic oligonucleotide
  Antisense strand to SEQ ID NO: 2432846
uuccagaacaaacuccggg

SEQ ID NO: 2432848 - RNA, 19 nt, Artificial Sequence
  Description of Artificial Sequence: Synthetic oligonucleotide
  Sense strand starting at position 276 of SEQ ID NO: 1886881
agguguccacaaggaaauu

SEQ ID NO: 2432849 - RNA, 19 nt, Artificial Sequence
  Description of Artificial Sequence: Synthetic oligonucleotide
  Antisense strand to SEQ ID NO: 2432848
aauuuccuuguggacaccu

SEQ ID NO: 2432850 - RNA, 19 nt, Artificial Sequence
  Description of Artificial Sequence: Synthetic oligonucleotide
  Sense strand starting at position 655 of SEQ ID NO: 1886881
ccuugugugcugcuuuaaa

SEQ ID NO: 2432851 - RNA, 19 nt, Artificial Sequence
  Description of Artificial Sequence: Synthetic oligonucleotide
  Antisense strand to SEQ ID NO: 2432850
uuuaaagcagcacacaagg

SEQ ID NO: 2432852 - RNA, 19 nt, Artificial Sequence
  Description of Artificial Sequence: Synthetic oligonucleotide
  Sense strand starting at position 902 of SEQ ID NO: 1886881
accagugaagccuauauua

SEQ ID NO: 2432853 - RNA, 19 nt, Artificial Sequence
  Description of Artificial Sequence: Synthetic oligonucleotide
  Antisense strand to SEQ ID NO: 2432852
uaauauaggcuucacuggu

SEQ ID NO: 2432854 - RNA, 19 nt, Artificial Sequence
  Description of Artificial Sequence: Synthetic oligonucleotide
  Sense strand starting at position 904 of SEQ ID NO: 1886881
cagugaagccuauauuaag

SEQ ID NO: 2432855 - RNA, 19 nt, Artificial Sequence
  Description of Artificial Sequence: Synthetic oligonucleotide
  Antisense strand to SEQ ID NO: 2432854
cuuaauauaggcuucacug

SEQ ID NO: 2432856 - RNA, 19 nt, Artificial Sequence
  Description of Artificial Sequence: Synthetic oligonucleotide
  Sense strand starting at position 928 of SEQ ID NO: 1886881
uuaugcucacucugcgaua

SEQ ID NO: 2432857 - RNA, 19 nt, Artificial Sequence
  Description of Artificial Sequence: Synthetic oligonucleotide
  Antisense strand to SEQ ID NO: 2432856
uaucgcagagugagcauaa

SEQ ID NO: 2432858 - RNA, 19 nt, Artificial Sequence
  Description of Artificial Sequence: Synthetic oligonucleotide
  Sense strand starting at position 2011 of SEQ ID NO: 1886881
ugguaucugucucugugaa

SEQ ID NO: 2432859 - RNA, 19 nt, Artificial Sequence
  Description of Artificial Sequence: Synthetic oligonucleotide
  Antisense strand to SEQ ID NO: 2432858
uucacagagacagauacca

SEQ ID NO: 2432860 - RNA, 19 nt, Artificial Sequence
  Description of Artificial Sequence: Synthetic oligonucleotide
  Sense strand starting at position 2012 of SEQ ID NO: 1886881
gguaucugucucugugaag

SEQ ID NO: 2432861 - RNA, 19 nt, Artificial Sequence
  Description of Artificial Sequence: Synthetic oligonucleotide
  Antisense strand to SEQ ID NO: 2432860
cuucacagagacagauacc

SEQ ID NO: 2432862 - RNA, 19 nt, Artificial Sequence
  Description of Artificial Sequence: Synthetic oligonucleotide
  Sense strand starting at position 2013 of SEQ ID NO: 1886881
guaucugucucugugaaga

SEQ ID NO: 2432863 - RNA, 19 nt, Artificial Sequence
  Description of Artificial Sequence: Synthetic oligonucleotide
  Antisense strand to SEQ ID NO: 2432862
ucuucacagagacagauac

SEQ ID NO: 2432864 - RNA, 19 nt, Artificial Sequence
  Description of Artificial Sequence: Synthetic oligonucleotide
  Sense strand starting at position 2269 of SEQ ID NO: 1886881
gccuacuaugcaugaccaa

SEQ ID NO: 2432865 - RNA, 19 nt, Artificial Sequence
  Description of Artificial Sequence: Synthetic oligonucleotide
  Antisense strand to SEQ ID NO: 2432864
uuggucaugcauaguaggc

SEQ ID NO: 2432866 - RNA, 19 nt, Artificial Sequence
  Description of Artificial Sequence: Synthetic oligonucleotide
  Sense strand starting at position 2331 of SEQ ID NO: 1886881
aggugaucaggccacaacu

SEQ ID NO: 2432867 - RNA, 19 nt, Artificial Sequence
  Description of Artificial Sequence: Synthetic oligonucleotide
  Antisense strand to SEQ ID NO: 2432866
aguuguggccugaucaccu

SEQ ID NO: 2432868 - RNA, 19 nt, Artificial Sequence
  Description of Artificial Sequence: Synthetic oligonucleotide
  Sense strand starting at position 2382 of SEQ ID NO: 1886881
ucaauaauauaugcgacau

SEQ ID NO: 2432869 - RNA, 19 nt, Artificial Sequence
  Description of Artificial Sequence: Synthetic oligonucleotide
  Antisense strand to SEQ ID NO: 2432868
augucgcauauauuauuga

SEQ ID NO: 2432870 - RNA, 19 nt, Artificial Sequence
  Description of Artificial Sequence: Synthetic oligonucleotide
  Sense strand starting at position 2384 of SEQ ID NO: 1886881
aauaauauaugcgacaugu

SEQ ID NO: 2432871 - RNA, 19 nt, Artificial Sequence
  Description of Artificial Sequence: Synthetic oligonucleotide
  Antisense strand to SEQ ID NO: 2432870
acaugucgcauauauuauu

SEQ ID NO: 2432872 - RNA, 19 nt, Artificial Sequence
  Description of Artificial Sequence: Synthetic oligonucleotide
  Sense strand starting at position 2386 of SEQ ID NO: 1886881
uaauauaugcgacauguac

SEQ ID NO: 2432873 - RNA, 19 nt, Artificial Sequence
  Description of Artificial Sequence: Synthetic oligonucleotide
  Antisense strand to SEQ ID NO: 2432872
guacaugucgcauauauua

SEQ ID NO: 2432874 - RNA, 19 nt, Artificial Sequence
  Description of Artificial Sequence: Synthetic oligonucleotide
  Sense strand starting at position 2454 of SEQ ID NO: 1886881
ggacgacuuccagguuaua

SEQ ID NO: 2432875 - RNA, 19 nt, Artificial Sequence
  Description of Artificial Sequence: Synthetic oligonucleotide
  Antisense strand to SEQ ID NO: 2432874
uauaaccuggaagucgucc

SEQ ID NO: 2432876 - RNA, 19 nt, Artificial Sequence
  Description of Artificial Sequence: Synthetic oligonucleotide
  Sense strand starting at position 2457 of SEQ ID NO: 1886881
cgacuuccagguuauaagu

SEQ ID NO: 2432877 - RNA, 19 nt, Artificial Sequence
  Description of Artificial Sequence: Synthetic oligonucleotide
  Antisense strand to SEQ ID NO: 2432876
acuuauaaccuggaagucg

SEQ ID NO: 2432878 - RNA, 19 nt, Artificial Sequence
  Description of Artificial Sequence: Synthetic oligonucleotide
  Sense strand starting at position 2468 of SEQ ID NO: 1886881
uuauaaguagaucgaaaga

SEQ ID NO: 2432879 - RNA, 19 nt, Artificial Sequence
  Description of Artificial Sequence: Synthetic oligonucleotide
  Antisense strand to SEQ ID NO: 2432878
ucuuucgaucuacuuauaa

SEQ ID NO: 2432880 - RNA, 19 nt, Artificial Sequence
  Description of Artificial Sequence: Synthetic oligonucleotide
  Sense strand starting at position 2703 of SEQ ID NO: 1886881
cguauaauuaggcaugacu

SEQ ID NO: 2432881 - RNA, 19 nt, Artificial Sequence
  Description of Artificial Sequence: Synthetic oligonucleotide
  Antisense strand to SEQ ID NO: 2432880
agucaugccuaauuauacg

SEQ ID NO: 2432882 - RNA, 19 nt, Artificial Sequence
  Description of Artificial Sequence: Synthetic oligonucleotide
  Sense strand starting at position 2774 of SEQ ID NO: 1886881
gcccuuugcugaguggaga

SEQ ID NO: 2432883 - RNA, 19 nt, Artificial Sequence
  Description of Artificial Sequence: Synthetic oligonucleotide
  Antisense strand to SEQ ID NO: 2432882
ucuccacucagcaaagggc

SEQ ID NO: 2432884 - RNA, 19 nt, Artificial Sequence
  Description of Artificial Sequence: Synthetic oligonucleotide
  Sense strand starting at position 2963 of SEQ ID NO: 1886881
aggaaucccuuugaugauu

SEQ ID NO: 2432885 - RNA, 19 nt, Artificial Sequence
  Description of Artificial Sequence: Synthetic oligonucleotide
  Antisense strand to SEQ ID NO: 2432884
aaucaucaaagggauuccu

SEQ ID NO: 2432886 - RNA, 19 nt, Artificial Sequence
  Description of Artificial Sequence: Synthetic oligonucleotide
  Sense strand starting at position 2972 of SEQ ID NO: 1886881
uuugaugauuugcauaaac

SEQ ID NO: 2432887 - RNA, 19 nt, Artificial Sequence
  Description of Artificial Sequence: Synthetic oligonucleotide
  Antisense strand to SEQ ID NO: 2432886
guuuaugcaaaucaucaaa

SEQ ID NO: 2432888 - RNA, 19 nt, Artificial Sequence
  Description of Artificial Sequence: Synthetic oligonucleotide
  Sense strand starting at position 3103 of SEQ ID NO: 1886881
gcuggauucuucccaaagc

SEQ ID NO: 2432889 - RNA, 19 nt, Artificial Sequence
  Description of Artificial Sequence: Synthetic oligonucleotide
  Antisense strand to SEQ ID NO: 2432888
gcuuugggaagaauccagc

SEQ ID NO: 2432890 - RNA, 19 nt, Artificial Sequence
  Description of Artificial Sequence: Synthetic oligonucleotide
  Sense strand starting at position 3104 of SEQ ID NO: 1886881
cuggauucuucccaaagca

SEQ ID NO: 2432891 - RNA, 19 nt, Artificial Sequence
  Description of Artificial Sequence: Synthetic oligonucleotide
  Antisense strand to SEQ ID NO: 2432890
ugcuuugggaagaauccag

SEQ ID NO: 2432892 - RNA, 19 nt, Artificial Sequence
  Description of Artificial Sequence: Synthetic oligonucleotide
  Sense strand starting at position 3140 of SEQ ID NO: 1886881
cuguaaucaccugaugggu

SEQ ID NO: 2432893 - RNA, 19 nt, Artificial Sequence
  Description of Artificial Sequence: Synthetic oligonucleotide
  Antisense strand to SEQ ID NO: 2432892
acccaucaggugauuacag

SEQ ID NO: 2432894 - RNA, 19 nt, Artificial Sequence
  Description of Artificial Sequence: Synthetic oligonucleotide
  Sense strand starting at position 3249 of SEQ ID NO: 1886881
ggaaauaguuauuacucaa

SEQ ID NO: 2432895 - RNA, 19 nt, Artificial Sequence
  Description of Artificial Sequence: Synthetic oligonucleotide
  Antisense strand to SEQ ID NO: 2432894
uugaguaauaacuauuucc

SEQ ID NO: 2432896 - RNA, 19 nt, Artificial Sequence
  Description of Artificial Sequence: Synthetic oligonucleotide
  Sense strand starting at position 3351 of SEQ ID NO: 1886881
auugguugggcaugcagau

SEQ ID NO: 2432897 - RNA, 19 nt, Artificial Sequence
  Description of Artificial Sequence: Synthetic oligonucleotide
  Antisense strand to SEQ ID NO: 2432896
aucugcaugcccaaccaau

SEQ ID NO: 2432898 - RNA, 19 nt, Artificial Sequence
  Description of Artificial Sequence: Synthetic oligonucleotide
  Sense strand starting at position 3446 of SEQ ID NO: 1886881
ucucgauggagccagaaau

SEQ ID NO: 2432899 - RNA, 19 nt, Artificial Sequence
  Description of Artificial Sequence: Synthetic oligonucleotide
  Antisense strand to SEQ ID NO: 2432898
auuucuggcuccaucgaga

SEQ ID NO: 2432900 - RNA, 19 nt, Artificial Sequence
  Description of Artificial Sequence: Synthetic oligonucleotide
  Sense strand starting at position 3499 of SEQ ID NO: 1886881
aucagcugugcuuacacau

SEQ ID NO: 2432901 - RNA, 19 nt, Artificial Sequence
  Description of Artificial Sequence: Synthetic oligonucleotide
  Antisense strand to SEQ ID NO: 2432900
auguguaagcacagcugau

SEQ ID NO: 2432902 - RNA, 19 nt, Artificial Sequence
  Description of Artificial Sequence: Synthetic oligonucleotide
  Sense strand starting at position 3508 of SEQ ID NO: 1886881
gcuuacacauuccuuugua

SEQ ID NO: 2432903 - RNA, 19 nt, Artificial Sequence
  Description of Artificial Sequence: Synthetic oligonucleotide
  Antisense strand to SEQ ID NO: 2432902
uacaaaggaauguguaagc

SEQ ID NO: 2432904 - RNA, 19 nt, Artificial Sequence
  Description of Artificial Sequence: Synthetic oligonucleotide
  Sense strand starting at position 3512 of SEQ ID NO: 1886881
acacauuccuuuguaagga

SEQ ID NO: 2432905 - RNA, 19 nt, Artificial Sequence
  Description of Artificial Sequence: Synthetic oligonucleotide
  Antisense strand to SEQ ID NO: 2432904
uccuuacaaaggaaugugu

SEQ ID NO: 2432906 - RNA, 19 nt, Artificial Sequence
  Description of Artificial Sequence: Synthetic oligonucleotide
  Sense strand starting at position 3687 of SEQ ID NO: 1886881
acuccauguccuuaguacu

SEQ ID NO: 2432907 - RNA, 19 nt, Artificial Sequence
  Description of Artificial Sequence: Synthetic oligonucleotide
  Antisense strand to SEQ ID NO: 2432906
aguacuaaggacauggagu

SEQ ID NO: 2432908 - RNA, 19 nt, Artificial Sequence
  Description of Artificial Sequence: Synthetic oligonucleotide
  Sense strand starting at position 3690 of SEQ ID NO: 1886881
ccauguccuuaguacuaaa

SEQ ID NO: 2432909 - RNA, 19 nt, Artificial Sequence
  Description of Artificial Sequence: Synthetic oligonucleotide
  Antisense strand to SEQ ID NO: 2432908
uuuaguacuaaggacaugg

SEQ ID NO: 2432910 - RNA, 19 nt, Artificial Sequence
  Description of Artificial Sequence: Synthetic oligonucleotide
  Sense strand starting at position 3850 of SEQ ID NO: 1886881
acagcuaccuucugaggaa

SEQ ID NO: 2432911 - RNA, 19 nt, Artificial Sequence
  Description of Artificial Sequence: Synthetic oligonucleotide
  Antisense strand to SEQ ID NO: 2432910
uuccucagaagguagcugu

SEQ ID NO: 2432912 - RNA, 19 nt, Artificial Sequence
  Description of Artificial Sequence: Synthetic oligonucleotide
  Sense strand starting at position 3853 of SEQ ID NO: 1886881
gcuaccuucugaggaaaga

SEQ ID NO: 2432913 - RNA, 19 nt, Artificial Sequence
  Description of Artificial Sequence: Synthetic oligonucleotide
  Antisense strand to SEQ ID NO: 2432912
ucuuuccucagaagguagc

SEQ ID NO: 2432914 - RNA, 19 nt, Artificial Sequence
  Description of Artificial Sequence: Synthetic oligonucleotide
  Sense strand starting at position 3977 of SEQ ID NO: 1886881
cccagagauucugcaccuu

SEQ ID NO: 2432915 - RNA, 19 nt, Artificial Sequence
  Description of Artificial Sequence: Synthetic oligonucleotide
  Antisense strand to SEQ ID NO: 2432914
aaggugcagaaucucuggg

SEQ ID NO: 2432916 - RNA, 19 nt, Artificial Sequence
  Description of Artificial Sequence: Synthetic oligonucleotide
  Sense strand starting at position 66 of SEQ ID NO: 1886882
gccgacuuccaccagugaa

SEQ ID NO: 2432917 - RNA, 19 nt, Artificial Sequence
  Description of Artificial Sequence: Synthetic oligonucleotide
  Antisense strand to SEQ ID NO: 2432916
uucacugguggaagucggc

SEQ ID NO: 2432918 - RNA, 19 nt, Artificial Sequence
  Description of Artificial Sequence: Synthetic oligonucleotide
  Sense strand starting at position 231 of SEQ ID NO: 1886882
gacguagugucagcugaaa

SEQ ID NO: 2432919 - RNA, 19 nt, Artificial Sequence
  Description of Artificial Sequence: Synthetic oligonucleotide
  Antisense strand to SEQ ID NO: 2432918
uuucagcugacacuacguc

SEQ ID NO: 2432920 - RNA, 19 nt, Artificial Sequence
  Description of Artificial Sequence: Synthetic oligonucleotide
  Sense strand starting at position 341 of SEQ ID NO: 1886882
gauacugcuuuccaggaca

SEQ ID NO: 2432921 - RNA, 19 nt, Artificial Sequence
  Description of Artificial Sequence: Synthetic oligonucleotide
  Antisense strand to SEQ ID NO: 2432920
uguccuggaaagcaguauc

SEQ ID NO: 2432922 - RNA, 19 nt, Artificial Sequence
  Description of Artificial Sequence: Synthetic oligonucleotide
  Sense strand starting at position 344 of SEQ ID NO: 1886882
acugcuuuccaggacacau

SEQ ID NO: 2432923 - RNA, 19 nt, Artificial Sequence
  Description of Artificial Sequence: Synthetic oligonucleotide
  Antisense strand to SEQ ID NO: 2432922
auguguccuggaaagcagu

SEQ ID NO: 2432924 - RNA, 19 nt, Artificial Sequence
  Description of Artificial Sequence: Synthetic oligonucleotide
  Sense strand starting at position 376 of SEQ ID NO: 1886882
gggcgauuccgagguggaa

SEQ ID NO: 2432925 - RNA, 19 nt, Artificial Sequence
  Description of Artificial Sequence: Synthetic oligonucleotide
  Antisense strand to SEQ ID NO: 2432924
uuccaccucggaaucgccc

SEQ ID NO: 2432926 - RNA, 19 nt, Artificial Sequence
  Description of Artificial Sequence: Synthetic oligonucleotide
  Sense strand starting at position 673 of SEQ ID NO: 1886882
gcgcccgucauagaagaaa

SEQ ID NO: 2432927 - RNA, 19 nt, Artificial Sequence
  Description of Artificial Sequence: Synthetic oligonucleotide
  Antisense strand to SEQ ID NO: 2432926
uuucuucuaugacgggcgc

SEQ ID NO: 2432928 - RNA, 19 nt, Artificial Sequence
  Description of Artificial Sequence: Synthetic oligonucleotide
  Sense strand starting at position 696 of SEQ ID NO: 1886882
cagucauggucgcuuacca

SEQ ID NO: 2432929 - RNA, 19 nt, Artificial Sequence
  Description of Artificial Sequence: Synthetic oligonucleotide
  Antisense strand to SEQ ID NO: 2432928
ugguaagcgaccaugacug

SEQ ID NO: 2432930 - RNA, 19 nt, Artificial Sequence
  Description of Artificial Sequence: Synthetic oligonucleotide
  Sense strand starting at position 768 of SEQ ID NO: 1886882
uucccugucugagacacau

SEQ ID NO: 2432931 - RNA, 19 nt, Artificial Sequence
  Description of Artificial Sequence: Synthetic oligonucleotide
  Antisense strand to SEQ ID NO: 2432930
augugucucagacagggaa

SEQ ID NO: 2432932 - RNA, 19 nt, Artificial Sequence
  Description of Artificial Sequence: Synthetic oligonucleotide
  Sense strand starting at position 794 of SEQ ID NO: 1886882
cuaagagcuccagggucau

SEQ ID NO: 2432933 - RNA, 19 nt, Artificial Sequence
  Description of Artificial Sequence: Synthetic oligonucleotide
  Antisense strand to SEQ ID NO: 2432932
augacccuggagcucuuag

SEQ ID NO: 2432934 - RNA, 19 nt, Artificial Sequence
  Description of Artificial Sequence: Synthetic oligonucleotide
  Sense strand starting at position 798 of SEQ ID NO: 1886882
gagcuccagggucaucaaa

SEQ ID NO: 2432935 - RNA, 19 nt, Artificial Sequence
  Description of Artificial Sequence: Synthetic oligonucleotide
  Antisense strand to SEQ ID NO: 2432934
uuugaugacccuggagcuc

SEQ ID NO: 2432936 - RNA, 19 nt, Artificial Sequence
  Description of Artificial Sequence: Synthetic oligonucleotide
  Sense strand starting at position 1459 of SEQ ID NO: 1886882
gaaauugcuuucuggugca

SEQ ID NO: 2432937 - RNA, 19 nt, Artificial Sequence
  Description of Artificial Sequence: Synthetic oligonucleotide
  Antisense strand to SEQ ID NO: 2432936
ugcaccagaaagcaauuuc

SEQ ID NO: 2432938 - RNA, 19 nt, Artificial Sequence
  Description of Artificial Sequence: Synthetic oligonucleotide
  Sense strand starting at position 1626 of SEQ ID NO: 1886882
cagucauacagcgguguca

SEQ ID NO: 2432939 - RNA, 19 nt, Artificial Sequence
  Description of Artificial Sequence: Synthetic oligonucleotide
  Antisense strand to SEQ ID NO: 2432938
ugacaccgcuguaugacug

SEQ ID NO: 2432940 - RNA, 19 nt, Artificial Sequence
  Description of Artificial Sequence: Synthetic oligonucleotide
  Sense strand starting at position 1628 of SEQ ID NO: 1886882
gucauacagcggugucaug

SEQ ID NO: 2432941 - RNA, 19 nt, Artificial Sequence
  Description of Artificial Sequence: Synthetic oligonucleotide
  Antisense strand to SEQ ID NO: 2432940
caugacaccgcuguaugac

SEQ ID NO: 2432942 - RNA, 19 nt, Artificial Sequence
  Description of Artificial Sequence: Synthetic oligonucleotide
  Sense strand starting at position 2001 of SEQ ID NO: 1886882
gggagugguuucuacgaca

SEQ ID NO: 2432943 - RNA, 19 nt, Artificial Sequence
  Description of Artificial Sequence: Synthetic oligonucleotide
  Antisense strand to SEQ ID NO: 2432942
ugucguagaaaccacuccc

SEQ ID NO: 2432944 - RNA, 19 nt, Artificial Sequence
  Description of Artificial Sequence: Synthetic oligonucleotide
  Sense strand starting at position 2012 of SEQ ID NO: 1886882
cuacgacaacccugggaau

SEQ ID NO: 2432945 - RNA, 19 nt, Artificial Sequence
  Description of Artificial Sequence: Synthetic oligonucleotide
  Antisense strand to SEQ ID NO: 2432944
auucccaggguugucguag

SEQ ID NO: 2432946 - RNA, 19 nt, Artificial Sequence
  Description of Artificial Sequence: Synthetic oligonucleotide
  Sense strand starting at position 2067 of SEQ ID NO: 1886882
ugcgcauugacuuggccaa

SEQ ID NO: 2432947 - RNA, 19 nt, Artificial Sequence
  Description of Artificial Sequence: Synthetic oligonucleotide
  Antisense strand to SEQ ID NO: 2432946
uuggccaagucaaugcgca

SEQ ID NO: 2432948 - RNA, 19 nt, Artificial Sequence
  Description of Artificial Sequence: Synthetic oligonucleotide
  Sense strand starting at position 2285 of SEQ ID NO: 1886882
gccaucguauccuggagau

SEQ ID NO: 2432949 - RNA, 19 nt, Artificial Sequence
  Description of Artificial Sequence: Synthetic oligonucleotide
  Antisense strand to SEQ ID NO: 2432948
aucuccaggauacgauggc

SEQ ID NO: 2432950 - RNA, 19 nt, Artificial Sequence
  Description of Artificial Sequence: Synthetic oligonucleotide
  Sense strand starting at position 2291 of SEQ ID NO: 1886882
guauccuggagauggucaa

SEQ ID NO: 2432951 - RNA, 19 nt, Artificial Sequence
  Description of Artificial Sequence: Synthetic oligonucleotide
  Antisense strand to SEQ ID NO: 2432950
uugaccaucuccaggauac

SEQ ID NO: 2432952 - RNA, 19 nt, Artificial Sequence
  Description of Artificial Sequence: Synthetic oligonucleotide
  Sense strand starting at position 2313 of SEQ ID NO: 1886882
agcuuugacccugaccaga

SEQ ID NO: 2432953 - RNA, 19 nt, Artificial Sequence
  Description of Artificial Sequence: Synthetic oligonucleotide
  Antisense strand to SEQ ID NO: 2432952
ucuggucagggucaaagcu

SEQ ID NO: 2432954 - RNA, 19 nt, Artificial Sequence
  Description of Artificial Sequence: Synthetic oligonucleotide
  Sense strand starting at position 2404 of SEQ ID NO: 1886882
cacaaacgguccuggagaa

SEQ ID NO: 2432955 - RNA, 19 nt, Artificial Sequence
  Description of Artificial Sequence: Synthetic oligonucleotide
  Antisense strand to SEQ ID NO: 2432954
uucuccaggaccguuugug

SEQ ID NO: 2432956 - RNA, 19 nt, Artificial Sequence
  Description of Artificial Sequence: Synthetic oligonucleotide
  Sense strand starting at position 2527 of SEQ ID NO: 1886882
uggaaauggcccuggaaag

SEQ ID NO: 2432957 - RNA, 19 nt, Artificial Sequence
  Description of Artificial Sequence: Synthetic oligonucleotide
  Antisense strand to SEQ ID NO: 2432956
cuuuccagggccauuucca

SEQ ID NO: 2432958 - RNA, 19 nt, Artificial Sequence
  Description of Artificial Sequence: Synthetic oligonucleotide
  Sense strand starting at position 2570 of SEQ ID NO: 1886882
gugaguuauucuccaccug

SEQ ID NO: 2432959 - RNA, 19 nt, Artificial Sequence
  Description of Artificial Sequence: Synthetic oligonucleotide
  Antisense strand to SEQ ID NO: 2432958
cagguggagaauaacucac

SEQ ID NO: 2432960 - RNA, 19 nt, Artificial Sequence
  Description of Artificial Sequence: Synthetic oligonucleotide
  Sense strand starting at position 2669 of SEQ ID NO: 1886882
guuaguaucuccuucugca

SEQ ID NO: 2432961 - RNA, 19 nt, Artificial Sequence
  Description of Artificial Sequence: Synthetic oligonucleotide
  Antisense strand to SEQ ID NO: 2432960
ugcagaaggagauacuaac

SEQ ID NO: 2432962 - RNA, 19 nt, Artificial Sequence
  Description of Artificial Sequence: Synthetic oligonucleotide
  Sense strand starting at position 2833 of SEQ ID NO: 1886882
cugaguuccugaccagguu

SEQ ID NO: 2432963 - RNA, 19 nt, Artificial Sequence
  Description of Artificial Sequence: Synthetic oligonucleotide
  Antisense strand to SEQ ID NO: 2432962
aaccuggucaggaacucag

SEQ ID NO: 2432964 - RNA, 19 nt, Artificial Sequence
  Description of Artificial Sequence: Synthetic oligonucleotide
  Sense strand starting at position 2856 of SEQ ID NO: 1886882
ccaugagcaugcucuuuaa

SEQ ID NO: 2432965 - RNA, 19 nt, Artificial Sequence
  Description of Artificial Sequence: Synthetic oligonucleotide
  Antisense strand to SEQ ID NO: 2432964
uuaaagagcaugcucaugg

SEQ ID NO: 2432966 - RNA, 19 nt, Artificial Sequence
  Description of Artificial Sequence: Synthetic oligonucleotide
  Sense strand starting at position 2859 of SEQ ID NO: 1886882
ugagcaugcucuuuaaccu

SEQ ID NO: 2432967 - RNA, 19 nt, Artificial Sequence
  Description of Artificial Sequence: Synthetic oligonucleotide
  Antisense strand to SEQ ID NO: 2432966
agguuaaagagcaugcuca

SEQ ID NO: 2432968 - RNA, 19 nt, Artificial Sequence
  Description of Artificial Sequence: Synthetic oligonucleotide
  Sense strand starting at position 2991 of SEQ ID NO: 1886882
aggcaugaguccucaugca

SEQ ID NO: 2432969 - RNA, 19 nt, Artificial Sequence
  Description of Artificial Sequence: Synthetic oligonucleotide
  Antisense strand to SEQ ID NO: 2432968
ugcaugaggacucaugccu

SEQ ID NO: 2432970 - RNA, 19 nt, Artificial Sequence
  Description of Artificial Sequence: Synthetic oligonucleotide
  Sense strand starting at position 3058 of SEQ ID NO: 1886882
ugggccaguucucaacaga

SEQ ID NO: 2432971 - RNA, 19 nt, Artificial Sequence
  Description of Artificial Sequence: Synthetic oligonucleotide
  Antisense strand to SEQ ID NO: 2432970
ucuguugagaacuggccca

SEQ ID NO: 2432972 - RNA, 19 nt, Artificial Sequence
  Description of Artificial Sequence: Synthetic oligonucleotide
  Sense strand starting at position 3140 of SEQ ID NO: 1886882
ugcugugccauuuggagau

SEQ ID NO: 2432973 - RNA, 19 nt, Artificial Sequence
  Description of Artificial Sequence: Synthetic oligonucleotide
  Antisense strand to SEQ ID NO: 2432972
aucuccaaauggcacagca

SEQ ID NO: 2432974 - RNA, 19 nt, Artificial Sequence
  Description of Artificial Sequence: Synthetic oligonucleotide
  Sense strand starting at position 3323 of SEQ ID NO: 1886882
agacucagcucugcauauu

SEQ ID NO: 2432975 - RNA, 19 nt, Artificial Sequence
  Description of Artificial Sequence: Synthetic oligonucleotide
  Antisense strand to SEQ ID NO: 2432974
aauaugcagagcugagucu

SEQ ID NO: 2432976 - RNA, 19 nt, Artificial Sequence
  Description of Artificial Sequence: Synthetic oligonucleotide
  Sense strand starting at position 3490 of SEQ ID NO: 1886882
ccauaucuccucugaggau

SEQ ID NO: 2432977 - RNA, 19 nt, Artificial Sequence
  Description of Artificial Sequence: Synthetic oligonucleotide
  Antisense strand to SEQ ID NO: 2432976
auccucagaggagauaugg

SEQ ID NO: 2432978 - RNA, 19 nt, Artificial Sequence
  Description of Artificial Sequence: Synthetic oligonucleotide
  Sense strand starting at position 3531 of SEQ ID NO: 1886882
cguguacuguuaguuuaaa

SEQ ID NO: 2432979 - RNA, 19 nt, Artificial Sequence
  Description of Artificial Sequence: Synthetic oligonucleotide
  Antisense strand to SEQ ID NO: 2432978
uuuaaacuaacaguacacg

SEQ ID NO: 2432980 - RNA, 19 nt, Artificial Sequence
  Description of Artificial Sequence: Synthetic oligonucleotide
  Sense strand starting at position 3532 of SEQ ID NO: 1886882
guguacuguuaguuuaaau

SEQ ID NO: 2432981 - RNA, 19 nt, Artificial Sequence
  Description of Artificial Sequence: Synthetic oligonucleotide
  Antisense strand to SEQ ID NO: 2432980
auuuaaacuaacaguacac

SEQ ID NO: 2432982 - RNA, 19 nt, Artificial Sequence
  Description of Artificial Sequence: Synthetic oligonucleotide
  Sense strand starting at position 3616 of SEQ ID NO: 1886882
gagaguaaauccguuaggu

SEQ ID NO: 2432983 - RNA, 19 nt, Artificial Sequence
  Description of Artificial Sequence: Synthetic oligonucleotide
  Antisense strand to SEQ ID NO: 2432982
accuaacggauuuacucuc

SEQ ID NO: 2432984 - RNA, 19 nt, Artificial Sequence
  Description of Artificial Sequence: Synthetic oligonucleotide
  Sense strand starting at position 3618 of SEQ ID NO: 1886882
gaguaaauccguuagguga

SEQ ID NO: 2432985 - RNA, 19 nt, Artificial Sequence
  Description of Artificial Sequence: Synthetic oligonucleotide
  Antisense strand to SEQ ID NO: 2432984
ucaccuaacggauuuacuc

SEQ ID NO: 2432986 - RNA, 19 nt, Artificial Sequence
  Description of Artificial Sequence: Synthetic oligonucleotide
  Sense strand starting at position 3620 of SEQ ID NO: 1886882
guaaauccguuaggugaga

SEQ ID NO: 2432987 - RNA, 19 nt, Artificial Sequence
  Description of Artificial Sequence: Synthetic oligonucleotide
  Antisense strand to SEQ ID NO: 2432986
ucucaccuaacggauuuac

SEQ ID NO: 2432988 - RNA, 19 nt, Artificial Sequence
  Description of Artificial Sequence: Synthetic oligonucleotide
  Sense strand starting at position 3648 of SEQ ID NO: 1886882
gcacucaguggaggugaaa

SEQ ID NO: 2432989 - RNA, 19 nt, Artificial Sequence
  Description of Artificial Sequence: Synthetic oligonucleotide
  Antisense strand to SEQ ID NO: 2432988
uuucaccuccacugagugc

SEQ ID NO: 2432990 - RNA, 19 nt, Artificial Sequence
  Description of Artificial Sequence: Synthetic oligonucleotide
  Sense strand starting at position 3884 of SEQ ID NO: 1886882
accugugucuuaggaguaa

SEQ ID NO: 2432991 - RNA, 19 nt, Artificial Sequence
  Description of Artificial Sequence: Synthetic oligonucleotide
  Antisense strand to SEQ ID NO: 2432990
uuacuccuaagacacaggu

SEQ ID NO: 2432992 - RNA, 19 nt, Artificial Sequence
  Description of Artificial Sequence: Synthetic oligonucleotide
  Sense strand starting at position 3888 of SEQ ID NO: 1886882
gugucuuaggaguaaaccu

SEQ ID NO: 2432993 - RNA, 19 nt, Artificial Sequence
  Description of Artificial Sequence: Synthetic oligonucleotide
  Antisense strand to SEQ ID NO: 2432992
agguuuacuccuaagacac

SEQ ID NO: 2432994 - RNA, 19 nt, Artificial Sequence
  Description of Artificial Sequence: Synthetic oligonucleotide
  Sense strand starting at position 3950 of SEQ ID NO: 1886882
ggaguucaccuguggccua

SEQ ID NO: 2432995 - RNA, 19 nt, Artificial Sequence
  Description of Artificial Sequence: Synthetic oligonucleotide
  Antisense strand to SEQ ID NO: 2432994
uaggccacaggugaacucc

SEQ ID NO: 2432996 - RNA, 19 nt, Artificial Sequence
  Description of Artificial Sequence: Synthetic oligonucleotide
  Sense strand starting at position 178 of SEQ ID NO: 1886883
ugaacuaucuggccaaaca

SEQ ID NO: 2432997 - RNA, 19 nt, Artificial Sequence
  Description of Artificial Sequence: Synthetic oligonucleotide
  Antisense strand to SEQ ID NO: 2432996
uguuuggccagauaguuca

SEQ ID NO: 2432998 - RNA, 19 nt, Artificial Sequence
  Description of Artificial Sequence: Synthetic oligonucleotide
  Sense strand starting at position 213 of SEQ ID NO: 1886883
acacccuaggccugugauu

SEQ ID NO: 2432999 - RNA, 19 nt, Artificial Sequence
  Description of Artificial Sequence: Synthetic oligonucleotide
  Antisense strand to SEQ ID NO: 2432998
aaucacaggccuagggugu

SEQ ID NO: 2433000 - RNA, 19 nt, Artificial Sequence
  Description of Artificial Sequence: Synthetic oligonucleotide
  Sense strand starting at position 222 of SEQ ID NO: 1886883
gccugugauucucaaagac

SEQ ID NO: 2433001 - RNA, 19 nt, Artificial Sequence
  Description of Artificial Sequence: Synthetic oligonucleotide
  Antisense strand to SEQ ID NO: 2433000
gucuuugagaaucacaggc

SEQ ID NO: 2433002 - RNA, 19 nt, Artificial Sequence
  Description of Artificial Sequence: Synthetic oligonucleotide
  Sense strand starting at position 1984 of SEQ ID NO: 1886883
gaaacauggcuuuaccgua

SEQ ID NO: 2433003 - RNA, 19 nt, Artificial Sequence
  Description of Artificial Sequence: Synthetic oligonucleotide
  Antisense strand to SEQ ID NO: 2433002
uacgguaaagccauguuuc

SEQ ID NO: 2433004 - RNA, 19 nt, Artificial Sequence
  Description of Artificial Sequence: Synthetic oligonucleotide
  Sense strand starting at position 1989 of SEQ ID NO: 1886883
auggcuuuaccguaaaucu

SEQ ID NO: 2433005 - RNA, 19 nt, Artificial Sequence
  Description of Artificial Sequence: Synthetic oligonucleotide
  Antisense strand to SEQ ID NO: 2433004
agauuuacgguaaagccau

SEQ ID NO: 2433006 - RNA, 19 nt, Artificial Sequence
  Description of Artificial Sequence: Synthetic oligonucleotide
  Sense strand starting at position 2023 of SEQ ID NO: 1886883
gcuuuauguggaggcaguu

SEQ ID NO: 2433007 - RNA, 19 nt, Artificial Sequence
  Description of Artificial Sequence: Synthetic oligonucleotide
  Antisense strand to SEQ ID NO: 2433006
aacugccuccacauaaagc

SEQ ID NO: 2433008 - RNA, 19 nt, Artificial Sequence
  Description of Artificial Sequence: Synthetic oligonucleotide
  Sense strand starting at position 2039 of SEQ ID NO: 1886883
guugcuguauauucugaaa

SEQ ID NO: 2433009 - RNA, 19 nt, Artificial Sequence
  Description of Artificial Sequence: Synthetic oligonucleotide
  Antisense strand to SEQ ID NO: 2433008
uuucagaauauacagcaac

SEQ ID NO: 2433010 - RNA, 19 nt, Artificial Sequence
  Description of Artificial Sequence: Synthetic oligonucleotide
  Sense strand starting at position 2042 of SEQ ID NO: 1886883
gcuguauauucugaaagag

SEQ ID NO: 2433011 - RNA, 19 nt, Artificial Sequence
  Description of Artificial Sequence: Synthetic oligonucleotide
  Antisense strand to SEQ ID NO: 2433010
cucuuucagaauauacagc

SEQ ID NO: 2433012 - RNA, 19 nt, Artificial Sequence
  Description of Artificial Sequence: Synthetic oligonucleotide
  Sense strand starting at position 2050 of SEQ ID NO: 1886883
uucugaaagagcuggucau

SEQ ID NO: 2433013 - RNA, 19 nt, Artificial Sequence
  Description of Artificial Sequence: Synthetic oligonucleotide
  Antisense strand to SEQ ID NO: 2433012
augaccagcucuuucagaa

SEQ ID NO: 2433014 - RNA, 19 nt, Artificial Sequence
  Description of Artificial Sequence: Synthetic oligonucleotide
  Sense strand starting at position 2054 of SEQ ID NO: 1886883
gaaagagcuggucaucuca

SEQ ID NO: 2433015 - RNA, 19 nt, Artificial Sequence
  Description of Artificial Sequence: Synthetic oligonucleotide
  Antisense strand to SEQ ID NO: 2433014
ugagaugaccagcucuuuc

SEQ ID NO: 2433016 - RNA, 19 nt, Artificial Sequence
  Description of Artificial Sequence: Synthetic oligonucleotide
  Sense strand starting at position 2056 of SEQ ID NO: 1886883
aagagcuggucaucucauu

SEQ ID NO: 2433017 - RNA, 19 nt, Artificial Sequence
  Description of Artificial Sequence: Synthetic oligonucleotide
  Antisense strand to SEQ ID NO: 2433016
aaugagaugaccagcucuu

SEQ ID NO: 2433018 - RNA, 19 nt, Artificial Sequence
  Description of Artificial Sequence: Synthetic oligonucleotide
  Sense strand starting at position 2087 of SEQ ID NO: 1886883
agaauacuguuagucaaau

SEQ ID NO: 2433019 - RNA, 19 nt, Artificial Sequence
  Description of Artificial Sequence: Synthetic oligonucleotide
  Antisense strand to SEQ ID NO: 2433018
auuugacuaacaguauucu

SEQ ID NO: 2433020 - RNA, 19 nt, Artificial Sequence
  Description of Artificial Sequence: Synthetic oligonucleotide
  Sense strand starting at position 2107 of SEQ ID NO: 1886883
uaaguaauauguggacuau

SEQ ID NO: 2433021 - RNA, 19 nt, Artificial Sequence
  Description of Artificial Sequence: Synthetic oligonucleotide
  Antisense strand to SEQ ID NO: 2433020
auaguccacauauuacuua

SEQ ID NO: 2433022 - RNA, 19 nt, Artificial Sequence
  Description of Artificial Sequence: Synthetic oligonucleotide
  Sense strand starting at position 2116 of SEQ ID NO: 1886883
uguggacuauuacugguau

SEQ ID NO: 2433023 - RNA, 19 nt, Artificial Sequence
  Description of Artificial Sequence: Synthetic oligonucleotide
  Antisense strand to SEQ ID NO: 2433022
auaccaguaauaguccaca

SEQ ID NO: 2433024 - RNA, 19 nt, Artificial Sequence
  Description of Artificial Sequence: Synthetic oligonucleotide
  Sense strand starting at position 2120 of SEQ ID NO: 1886883
gacuauuacugguauugca

SEQ ID NO: 2433025 - RNA, 19 nt, Artificial Sequence
  Description of Artificial Sequence: Synthetic oligonucleotide
  Antisense strand to SEQ ID NO: 2433024
ugcaauaccaguaauaguc

SEQ ID NO: 2433026 - RNA, 19 nt, Artificial Sequence
  Description of Artificial Sequence: Synthetic oligonucleotide
  Sense strand starting at position 2130 of SEQ ID NO: 1886883
gguauugcacuuuaauuau

SEQ ID NO: 2433027 - RNA, 19 nt, Artificial Sequence
  Description of Artificial Sequence: Synthetic oligonucleotide
  Antisense strand to SEQ ID NO: 2433026
auaauuaaagugcaauacc

SEQ ID NO: 2433028 - RNA, 19 nt, Artificial Sequence
  Description of Artificial Sequence: Synthetic oligonucleotide
  Sense strand starting at position 2152 of SEQ ID NO: 1886883
uguuauauauggcuucuga

SEQ ID NO: 2433029 - RNA, 19 nt, Artificial Sequence
  Description of Artificial Sequence: Synthetic oligonucleotide
  Antisense strand to SEQ ID NO: 2433028
ucagaagccauauauaaca

SEQ ID NO: 2433030 - RNA, 19 nt, Artificial Sequence
  Description of Artificial Sequence: Synthetic oligonucleotide
  Sense strand starting at position 2232 of SEQ ID NO: 1886883
uggcuaucccaaugaugcu

SEQ ID NO: 2433031 - RNA, 19 nt, Artificial Sequence
  Description of Artificial Sequence: Synthetic oligonucleotide
  Antisense strand to SEQ ID NO: 2433030
agcaucauugggauagcca

SEQ ID NO: 2433032 - RNA, 19 nt, Artificial Sequence
  Description of Artificial Sequence: Synthetic oligonucleotide
  Sense strand starting at position 2346 of SEQ ID NO: 1886883
ccagaaaucucacuguagu

SEQ ID NO: 2433033 - RNA, 19 nt, Artificial Sequence
  Description of Artificial Sequence: Synthetic oligonucleotide
  Antisense strand to SEQ ID NO: 2433032
acuacagugagauuucugg

SEQ ID NO: 2433034 - RNA, 19 nt, Artificial Sequence
  Description of Artificial Sequence: Synthetic oligonucleotide
  Sense strand starting at position 2413 of SEQ ID NO: 1886883
aagucaugcugagauaauu

SEQ ID NO: 2433035 - RNA, 19 nt, Artificial Sequence
  Description of Artificial Sequence: Synthetic oligonucleotide
  Antisense strand to SEQ ID NO: 2433034
aauuaucucagcaugacuu

SEQ ID NO: 2433036 - RNA, 19 nt, Artificial Sequence
  Description of Artificial Sequence: Synthetic oligonucleotide
  Sense strand starting at position 2422 of SEQ ID NO: 1886883
ugagauaauucuccuacug

SEQ ID NO: 2433037 - RNA, 19 nt, Artificial Sequence
  Description of Artificial Sequence: Synthetic oligonucleotide
  Antisense strand to SEQ ID NO: 2433036
caguaggagaauuaucuca

SEQ ID NO: 2433038 - RNA, 19 nt, Artificial Sequence
  Description of Artificial Sequence: Synthetic oligonucleotide
  Sense strand starting at position 2442 of SEQ ID NO: 1886883
agguaagacucgguucaaa

SEQ ID NO: 2433039 - RNA, 19 nt, Artificial Sequence
  Description of Artificial Sequence: Synthetic oligonucleotide
  Antisense strand to SEQ ID NO: 2433038
uuugaaccgagucuuaccu

SEQ ID NO: 2433040 - RNA, 19 nt, Artificial Sequence
  Description of Artificial Sequence: Synthetic oligonucleotide
  Sense strand starting at position 2479 of SEQ ID NO: 1886883
ggagcuauauggucucgag

SEQ ID NO: 2433041 - RNA, 19 nt, Artificial Sequence
  Description of Artificial Sequence: Synthetic oligonucleotide
  Antisense strand to SEQ ID NO: 2433040
cucgagaccauauagcucc

SEQ ID NO: 2433042 - RNA, 19 nt, Artificial Sequence
  Description of Artificial Sequence: Synthetic oligonucleotide
  Sense strand starting at position 2528 of SEQ ID NO: 1886883
ucuccauccuaguuaugag

SEQ ID NO: 2433043 - RNA, 19 nt, Artificial Sequence
  Description of Artificial Sequence: Synthetic oligonucleotide
  Antisense strand to SEQ ID NO: 2433042
cucauaacuaggauggaga

SEQ ID NO: 2433044 - RNA, 19 nt, Artificial Sequence
  Description of Artificial Sequence: Synthetic oligonucleotide
  Sense strand starting at position 2531 of SEQ ID NO: 1886883
ccauccuaguuaugaggau

SEQ ID NO: 2433045 - RNA, 19 nt, Artificial Sequence
  Description of Artificial Sequence: Synthetic oligonucleotide
  Antisense strand to SEQ ID NO: 2433044
auccucauaacuaggaugg

SEQ ID NO: 2433046 - RNA, 19 nt, Artificial Sequence
  Description of Artificial Sequence: Synthetic oligonucleotide
  Sense strand starting at position 2585 of SEQ ID NO: 1886883
accuucuaggauugcauua

SEQ ID NO: 2433047 - RNA, 19 nt, Artificial Sequence
  Description of Artificial Sequence: Synthetic oligonucleotide
  Antisense strand to SEQ ID NO: 2433046
uaaugcaauccuagaaggu

SEQ ID NO: 2433048 - RNA, 19 nt, Artificial Sequence
  Description of Artificial Sequence: Synthetic oligonucleotide
  Sense strand starting at position 2587 of SEQ ID NO: 1886883
cuucuaggauugcauuaaa

SEQ ID NO: 2433049 - RNA, 19 nt, Artificial Sequence
  Description of Artificial Sequence: Synthetic oligonucleotide
  Antisense strand to SEQ ID NO: 2433048
uuuaaugcaauccuagaag

SEQ ID NO: 2433050 - RNA, 19 nt, Artificial Sequence
  Description of Artificial Sequence: Synthetic oligonucleotide
  Sense strand starting at position 2631 of SEQ ID NO: 1886883
uuguuacuguuacuaagua

SEQ ID NO: 2433051 - RNA, 19 nt, Artificial Sequence
  Description of Artificial Sequence: Synthetic oligonucleotide
  Antisense strand to SEQ ID NO: 2433050
uacuuaguaacaguaacaa

SEQ ID NO: 2433052 - RNA, 19 nt, Artificial Sequence
  Description of Artificial Sequence: Synthetic oligonucleotide
  Sense strand starting at position 2678 of SEQ ID NO: 1886883
ugcaauauugugugccuuu

SEQ ID NO: 2433053 - RNA, 19 nt, Artificial Sequence
  Description of Artificial Sequence: Synthetic oligonucleotide
  Antisense strand to SEQ ID NO: 2433052
aaaggcacacaauauugca

SEQ ID NO: 2433054 - RNA, 19 nt, Artificial Sequence
  Description of Artificial Sequence: Synthetic oligonucleotide
  Sense strand starting at position 2695 of SEQ ID NO: 1886883
uucuaaugcccauguugaa

SEQ ID NO: 2433055 - RNA, 19 nt, Artificial Sequence
  Description of Artificial Sequence: Synthetic oligonucleotide
  Antisense strand to SEQ ID NO: 2433054
uucaacaugggcauuagaa

SEQ ID NO: 2433056 - RNA, 19 nt, Artificial Sequence
  Description of Artificial Sequence: Synthetic oligonucleotide
  Sense strand starting at position 2800 of SEQ ID NO: 1886883
gaauaagaaucagguuaag

SEQ ID NO: 2433057 - RNA, 19 nt, Artificial Sequence
  Description of Artificial Sequence: Synthetic oligonucleotide
  Antisense strand to SEQ ID NO: 2433056
cuuaaccugauucuuauuc

SEQ ID NO: 2433058 - RNA, 19 nt, Artificial Sequence
  Description of Artificial Sequence: Synthetic oligonucleotide
  Sense strand starting at position 2812 of SEQ ID NO: 1886883
gguuaagaaugagaucagu

SEQ ID NO: 2433059 - RNA, 19 nt, Artificial Sequence
  Description of Artificial Sequence: Synthetic oligonucleotide
  Antisense strand to SEQ ID NO: 2433058
acugaucucauucuuaacc

SEQ ID NO: 2433060 - RNA, 19 nt, Artificial Sequence
  Description of Artificial Sequence: Synthetic oligonucleotide
  Sense strand starting at position 2822 of SEQ ID NO: 1886883
gagaucaguucucacagcu

SEQ ID NO: 2433061 - RNA, 19 nt, Artificial Sequence
  Description of Artificial Sequence: Synthetic oligonucleotide
  Antisense strand to SEQ ID NO: 2433060
agcugugagaacugaucuc

SEQ ID NO: 2433062 - RNA, 19 nt, Artificial Sequence
  Description of Artificial Sequence: Synthetic oligonucleotide
  Sense strand starting at position 2843 of SEQ ID NO: 1886883
accucuucugucugaagag

SEQ ID NO: 2433063 - RNA, 19 nt, Artificial Sequence
  Description of Artificial Sequence: Synthetic oligonucleotide
  Antisense strand to SEQ ID NO: 2433062
cucuucagacagaagaggu

SEQ ID NO: 2433064 - RNA, 19 nt, Artificial Sequence
  Description of Artificial Sequence: Synthetic oligonucleotide
  Sense strand starting at position 2877 of SEQ ID NO: 1886883
gcaugaguagauuaauauu

SEQ ID NO: 2433065 - RNA, 19 nt, Artificial Sequence
  Description of Artificial Sequence: Synthetic oligonucleotide
  Antisense strand to SEQ ID NO: 2433064
aauauuaaucuacucaugc

SEQ ID NO: 2433066 - RNA, 19 nt, Artificial Sequence
  Description of Artificial Sequence: Synthetic oligonucleotide
  Sense strand starting at position 2948 of SEQ ID NO: 1886883
gaagcagacucuuuggauc

SEQ ID NO: 2433067 - RNA, 19 nt, Artificial Sequence
  Description of Artificial Sequence: Synthetic oligonucleotide
  Antisense strand to SEQ ID NO: 2433066
gauccaaagagucugcuuc

SEQ ID NO: 2433068 - RNA, 19 nt, Artificial Sequence
  Description of Artificial Sequence: Synthetic oligonucleotide
  Sense strand starting at position 2988 of SEQ ID NO: 1886883
uaagaagugcugcaagcua

SEQ ID NO: 2433069 - RNA, 19 nt, Artificial Sequence
  Description of Artificial Sequence: Synthetic oligonucleotide
  Antisense strand to SEQ ID NO: 2433068
uagcuugcagcacuucuua

SEQ ID NO: 2433070 - RNA, 19 nt, Artificial Sequence
  Description of Artificial Sequence: Synthetic oligonucleotide
  Sense strand starting at position 3620 of SEQ ID NO: 1886883
cagcuucuuugagaagaug

SEQ ID NO: 2433071 - RNA, 19 nt, Artificial Sequence
  Description of Artificial Sequence: Synthetic oligonucleotide
  Antisense strand to SEQ ID NO: 2433070
caucuucucaaagaagcug

SEQ ID NO: 2433072 - RNA, 19 nt, Artificial Sequence
  Description of Artificial Sequence: Synthetic oligonucleotide
  Sense strand starting at position 3789 of SEQ ID NO: 1886883
gaagccauuugggaucuga

SEQ ID NO: 2433073 - RNA, 19 nt, Artificial Sequence
  Description of Artificial Sequence: Synthetic oligonucleotide
  Antisense strand to SEQ ID NO: 2433072
ucagaucccaaauggcuuc

SEQ ID NO: 2433074 - RNA, 19 nt, Artificial Sequence
  Description of Artificial Sequence: Synthetic oligonucleotide
  Sense strand starting at position 3799 of SEQ ID NO: 1886883
gggaucugauguuacaguu

SEQ ID NO: 2433075 - RNA, 19 nt, Artificial Sequence
  Description of Artificial Sequence: Synthetic oligonucleotide
  Antisense strand to SEQ ID NO: 2433074
aacuguaacaucagauccc

SEQ ID NO: 2433076 - RNA, 19 nt, Artificial Sequence
  Description of Artificial Sequence: Synthetic oligonucleotide
  Sense strand starting at position 78 of SEQ ID NO: 1886884
gaaacaguuucugauugac

SEQ ID NO: 2433077 - RNA, 19 nt, Artificial Sequence
  Description of Artificial Sequence: Synthetic oligonucleotide
  Antisense strand to SEQ ID NO: 2433076
gucaaucagaaacuguuuc

SEQ ID NO: 2433078 - RNA, 19 nt, Artificial Sequence
  Description of Artificial Sequence: Synthetic oligonucleotide
  Sense strand starting at position 148 of SEQ ID NO: 1886884
ccguguugccugggaagca

SEQ ID NO: 2433079 - RNA, 19 nt, Artificial Sequence
  Description of Artificial Sequence: Synthetic oligonucleotide
  Antisense strand to SEQ ID NO: 2433078
ugcuucccaggcaacacgg

SEQ ID NO: 2433080 - RNA, 19 nt, Artificial Sequence
  Description of Artificial Sequence: Synthetic oligonucleotide
  Sense strand starting at position 261 of SEQ ID NO: 1886884
gccaguuggucacccuaca

SEQ ID NO: 2433081 - RNA, 19 nt, Artificial Sequence
  Description of Artificial Sequence: Synthetic oligonucleotide
  Antisense strand to SEQ ID NO: 2433080
uguagggugaccaacuggc

SEQ ID NO: 2433082 - RNA, 19 nt, Artificial Sequence
  Description of Artificial Sequence: Synthetic oligonucleotide
  Sense strand starting at position 630 of SEQ ID NO: 1886884
guggguagccucgagaugu

SEQ ID NO: 2433083 - RNA, 19 nt, Artificial Sequence
  Description of Artificial Sequence: Synthetic oligonucleotide
  Antisense strand to SEQ ID NO: 2433082
acaucucgaggcuacccac

SEQ ID NO: 2433084 - RNA, 19 nt, Artificial Sequence
  Description of Artificial Sequence: Synthetic oligonucleotide
  Sense strand starting at position 631 of SEQ ID NO: 1886884
uggguagccucgagaugua

SEQ ID NO: 2433085 - RNA, 19 nt, Artificial Sequence
  Description of Artificial Sequence: Synthetic oligonucleotide
  Antisense strand to SEQ ID NO: 2433084
uacaucucgaggcuaccca

SEQ ID NO: 2433086 - RNA, 19 nt, Artificial Sequence
  Description of Artificial Sequence: Synthetic oligonucleotide
  Sense strand starting at position 634 of SEQ ID NO: 1886884
guagccucgagauguagga

SEQ ID NO: 2433087 - RNA, 19 nt, Artificial Sequence
  Description of Artificial Sequence: Synthetic oligonucleotide
  Antisense strand to SEQ ID NO: 2433086
uccuacaucucgaggcuac

SEQ ID NO: 2433088 - RNA, 19 nt, Artificial Sequence
  Description of Artificial Sequence: Synthetic oligonucleotide
  Sense strand starting at position 638 of SEQ ID NO: 1886884
ccucgagauguaggauguu

SEQ ID NO: 2433089 - RNA, 19 nt, Artificial Sequence
  Description of Artificial Sequence: Synthetic oligonucleotide
  Antisense strand to SEQ ID NO: 2433088
aacauccuacaucucgagg

SEQ ID NO: 2433090 - RNA, 19 nt, Artificial Sequence
  Description of Artificial Sequence: Synthetic oligonucleotide
  Sense strand starting at position 644 of SEQ ID NO: 1886884
gauguaggauguuugggau

SEQ ID NO: 2433091 - RNA, 19 nt, Artificial Sequence
  Description of Artificial Sequence: Synthetic oligonucleotide
  Antisense strand to SEQ ID NO: 2433090
aucccaaacauccuacauc

SEQ ID NO: 2433092 - RNA, 19 nt, Artificial Sequence
  Description of Artificial Sequence: Synthetic oligonucleotide
  Sense strand starting at position 648 of SEQ ID NO: 1886884
uaggauguuugggauagag

SEQ ID NO: 2433093 - RNA, 19 nt, Artificial Sequence
  Description of Artificial Sequence: Synthetic oligonucleotide
  Antisense strand to SEQ ID NO: 2433092
cucuaucccaaacauccua

SEQ ID NO: 2433094 - RNA, 19 nt, Artificial Sequence
  Description of Artificial Sequence: Synthetic oligonucleotide
  Sense strand starting at position 945 of SEQ ID NO: 1886884
gaggcuugcccuuaggacu

SEQ ID NO: 2433095 - RNA, 19 nt, Artificial Sequence
  Description of Artificial Sequence: Synthetic oligonucleotide
  Antisense strand to SEQ ID NO: 2433094
aguccuaagggcaagccuc

SEQ ID NO: 2433096 - RNA, 19 nt, Artificial Sequence
  Description of Artificial Sequence: Synthetic oligonucleotide
  Sense strand starting at position 990 of SEQ ID NO: 1886884
gaguaaguggcuuaccuuu

SEQ ID NO: 2433097 - RNA, 19 nt, Artificial Sequence
  Description of Artificial Sequence: Synthetic oligonucleotide
  Antisense strand to SEQ ID NO: 2433096
aaagguaagccacuuacuc

SEQ ID NO: 2433098 - RNA, 19 nt, Artificial Sequence
  Description of Artificial Sequence: Synthetic oligonucleotide
  Sense strand starting at position 1013 of SEQ ID NO: 1886884
gguguugggccguguagaa

SEQ ID NO: 2433099 - RNA, 19 nt, Artificial Sequence
  Description of Artificial Sequence: Synthetic oligonucleotide
  Antisense strand to SEQ ID NO: 2433098
uucuacacggcccaacacc

SEQ ID NO: 2433100 - RNA, 19 nt, Artificial Sequence
  Description of Artificial Sequence: Synthetic oligonucleotide
  Sense strand starting at position 1068 of SEQ ID NO: 1886884
ggucuucuccuguguggag

SEQ ID NO: 2433101 - RNA, 19 nt, Artificial Sequence
  Description of Artificial Sequence: Synthetic oligonucleotide
  Antisense strand to SEQ ID NO: 2433100
cuccacacaggagaagacc

SEQ ID NO: 2433102 - RNA, 19 nt, Artificial Sequence
  Description of Artificial Sequence: Synthetic oligonucleotide
  Sense strand starting at position 1072 of SEQ ID NO: 1886884
uucuccuguguggagaaau

SEQ ID NO: 2433103 - RNA, 19 nt, Artificial Sequence
  Description of Artificial Sequence: Synthetic oligonucleotide
  Antisense strand to SEQ ID NO: 2433102
auuucuccacacaggagaa

SEQ ID NO: 2433104 - RNA, 19 nt, Artificial Sequence
  Description of Artificial Sequence: Synthetic oligonucleotide
  Sense strand starting at position 1082 of SEQ ID NO: 1886884
uggagaaaugguggcagaa

SEQ ID NO: 2433105 - RNA, 19 nt, Artificial Sequence
  Description of Artificial Sequence: Synthetic oligonucleotide
  Antisense strand to SEQ ID NO: 2433104
uucugccaccauuucucca

SEQ ID NO: 2433106 - RNA, 19 nt, Artificial Sequence
  Description of Artificial Sequence: Synthetic oligonucleotide
  Sense strand starting at position 1482 of SEQ ID NO: 1886884
acgcuauauugcccauaua

SEQ ID NO: 2433107 - RNA, 19 nt, Artificial Sequence
  Description of Artificial Sequence: Synthetic oligonucleotide
  Antisense strand to SEQ ID NO: 2433106
uauaugggcaauauagcgu

SEQ ID NO: 2433108 - RNA, 19 nt, Artificial Sequence
  Description of Artificial Sequence: Synthetic oligonucleotide
  Sense strand starting at position 1483 of SEQ ID NO: 1886884
cgcuauauugcccauauag

SEQ ID NO: 2433109 - RNA, 19 nt, Artificial Sequence
  Description of Artificial Sequence: Synthetic oligonucleotide
  Antisense strand to SEQ ID NO: 2433108
cuauaugggcaauauagcg

SEQ ID NO: 2433110 - RNA, 19 nt, Artificial Sequence
  Description of Artificial Sequence: Synthetic oligonucleotide
  Sense strand starting at position 1503 of SEQ ID NO: 1886884
cccgucuuauuccuacaga

SEQ ID NO: 2433111 - RNA, 19 nt, Artificial Sequence
  Description of Artificial Sequence: Synthetic oligonucleotide
  Antisense strand to SEQ ID NO: 2433110
ucuguaggaauaagacggg

SEQ ID NO: 2433112 - RNA, 19 nt, Artificial Sequence
  Description of Artificial Sequence: Synthetic oligonucleotide
  Sense strand starting at position 1506 of SEQ ID NO: 1886884
gucuuauuccuacagaucc

SEQ ID NO: 2433113 - RNA, 19 nt, Artificial Sequence
  Description of Artificial Sequence: Synthetic oligonucleotide
  Antisense strand to SEQ ID NO: 2433112
ggaucuguaggaauaagac

SEQ ID NO: 2433114 - RNA, 19 nt, Artificial Sequence
  Description of Artificial Sequence: Synthetic oligonucleotide
  Sense strand starting at position 1932 of SEQ ID NO: 1886884
gcaaguggaucuguuccua

SEQ ID NO: 2433115 - RNA, 19 nt, Artificial Sequence
  Description of Artificial Sequence: Synthetic oligonucleotide
  Antisense strand to SEQ ID NO: 2433114
uaggaacagauccacuugc

SEQ ID NO: 2433116 - RNA, 19 nt, Artificial Sequence
  Description of Artificial Sequence: Synthetic oligonucleotide
  Sense strand starting at position 1936 of SEQ ID NO: 1886884
guggaucuguuccuagcua

SEQ ID NO: 2433117 - RNA, 19 nt, Artificial Sequence
  Description of Artificial Sequence: Synthetic oligonucleotide
  Antisense strand to SEQ ID NO: 2433116
uagcuaggaacagauccac

SEQ ID NO: 2433118 - RNA, 19 nt, Artificial Sequence
  Description of Artificial Sequence: Synthetic oligonucleotide
  Sense strand starting at position 2346 of SEQ ID NO: 1886884
cuugccauuugauugcgaa

SEQ ID NO: 2433119 - RNA, 19 nt, Artificial Sequence
  Description of Artificial Sequence: Synthetic oligonucleotide
  Antisense strand to SEQ ID NO: 2433118
uucgcaaucaaauggcaag

SEQ ID NO: 2433120 - RNA, 19 nt, Artificial Sequence
  Description of Artificial Sequence: Synthetic oligonucleotide
  Sense strand starting at position 2347 of SEQ ID NO: 1886884
uugccauuugauugcgaau

SEQ ID NO: 2433121 - RNA, 19 nt, Artificial Sequence
  Description of Artificial Sequence: Synthetic oligonucleotide
  Antisense strand to SEQ ID NO: 2433120
auucgcaaucaaauggcaa

SEQ ID NO: 2433122 - RNA, 19 nt, Artificial Sequence
  Description of Artificial Sequence: Synthetic oligonucleotide
  Sense strand starting at position 2350 of SEQ ID NO: 1886884
ccauuugauugcgaauccu

SEQ ID NO: 2433123 - RNA, 19 nt, Artificial Sequence
  Description of Artificial Sequence: Synthetic oligonucleotide
  Antisense strand to SEQ ID NO: 2433122
aggauucgcaaucaaaugg

SEQ ID NO: 2433124 - RNA, 19 nt, Artificial Sequence
  Description of Artificial Sequence: Synthetic oligonucleotide
  Sense strand starting at position 2505 of SEQ ID NO: 1886884
ggguguugugccgauguaa

SEQ ID NO: 2433125 - RNA, 19 nt, Artificial Sequence
  Description of Artificial Sequence: Synthetic oligonucleotide
  Antisense strand to SEQ ID NO: 2433124
uuacaucggcacaacaccc

SEQ ID NO: 2433126 - RNA, 19 nt, Artificial Sequence
  Description of Artificial Sequence: Synthetic oligonucleotide
  Sense strand starting at position 2599 of SEQ ID NO: 1886884
cccauuacauaggugaaga

SEQ ID NO: 2433127 - RNA, 19 nt, Artificial Sequence
  Description of Artificial Sequence: Synthetic oligonucleotide
  Antisense strand to SEQ ID NO: 2433126
ucuucaccuauguaauggg

SEQ ID NO: 2433128 - RNA, 19 nt, Artificial Sequence
  Description of Artificial Sequence: Synthetic oligonucleotide
  Sense strand starting at position 2892 of SEQ ID NO: 1886884
ugggcccucuugucaaaua

SEQ ID NO: 2433129 - RNA, 19 nt, Artificial Sequence
  Description of Artificial Sequence: Synthetic oligonucleotide
  Antisense strand to SEQ ID NO: 2433128
uauuugacaagagggccca

SEQ ID NO: 2433130 - RNA, 19 nt, Artificial Sequence
  Description of Artificial Sequence: Synthetic oligonucleotide
  Sense strand starting at position 3216 of SEQ ID NO: 1886884
aguaaaugcugucugcuuu

SEQ ID NO: 2433131 - RNA, 19 nt, Artificial Sequence
  Description of Artificial Sequence: Synthetic oligonucleotide
  Antisense strand to SEQ ID NO: 2433130
aaagcagacagcauuuacu

SEQ ID NO: 2433132 - RNA, 19 nt, Artificial Sequence
  Description of Artificial Sequence: Synthetic oligonucleotide
  Sense strand starting at position 3223 of SEQ ID NO: 1886884
gcugucugcuuucuaauag

SEQ ID NO: 2433133 - RNA, 19 nt, Artificial Sequence
  Description of Artificial Sequence: Synthetic oligonucleotide
  Antisense strand to SEQ ID NO: 2433132
cuauuagaaagcagacagc

SEQ ID NO: 2433134 - RNA, 19 nt, Artificial Sequence
  Description of Artificial Sequence: Synthetic oligonucleotide
  Sense strand starting at position 3234 of SEQ ID NO: 1886884
ucuaauaggucacuguguu

SEQ ID NO: 2433135 - RNA, 19 nt, Artificial Sequence
  Description of Artificial Sequence: Synthetic oligonucleotide
  Antisense strand to SEQ ID NO: 2433134
aacacagugaccuauuaga

SEQ ID NO: 2433136 - RNA, 19 nt, Artificial Sequence
  Description of Artificial Sequence: Synthetic oligonucleotide
  Sense strand starting at position 3235 of SEQ ID NO: 1886884
cuaauaggucacuguguuu

SEQ ID NO: 2433137 - RNA, 19 nt, Artificial Sequence
  Description of Artificial Sequence: Synthetic oligonucleotide
  Antisense strand to SEQ ID NO: 2433136
aaacacagugaccuauuag

SEQ ID NO: 2433138 - RNA, 19 nt, Artificial Sequence
  Description of Artificial Sequence: Synthetic oligonucleotide
  Sense strand starting at position 3779 of SEQ ID NO: 1886884
ggaagacauccaugcuuac

SEQ ID NO: 2433139 - RNA, 19 nt, Artificial Sequence
  Description of Artificial Sequence: Synthetic oligonucleotide
  Antisense strand to SEQ ID NO: 2433138
guaagcauggaugucuucc

SEQ ID NO: 2433140 - RNA, 19 nt, Artificial Sequence
  Description of Artificial Sequence: Synthetic oligonucleotide
  Sense strand starting at position 3817 of SEQ ID NO: 1886884
ggcuauauuugugcuuuga

SEQ ID NO: 2433141 - RNA, 19 nt, Artificial Sequence
  Description of Artificial Sequence: Synthetic oligonucleotide
  Antisense strand to SEQ ID NO: 2433140
ucaaagcacaaauauagcc

SEQ ID NO: 2433142 - RNA, 19 nt, Artificial Sequence
  Description of Artificial Sequence: Synthetic oligonucleotide
  Sense strand starting at position 3819 of SEQ ID NO: 1886884
cuauauuugugcuuugaug

SEQ ID NO: 2433143 - RNA, 19 nt, Artificial Sequence
  Description of Artificial Sequence: Synthetic oligonucleotide
  Antisense strand to SEQ ID NO: 2433142
caucaaagcacaaauauag

SEQ ID NO: 2433144 - RNA, 19 nt, Artificial Sequence
  Description of Artificial Sequence: Synthetic oligonucleotide
  Sense strand starting at position 3837 of SEQ ID NO: 1886884
ggcacaauugaguaguugu

SEQ ID NO: 2433145 - RNA, 19 nt, Artificial Sequence
  Description of Artificial Sequence: Synthetic oligonucleotide
  Antisense strand to SEQ ID NO: 2433144
acaacuacucaauugugcc

SEQ ID NO: 2433146 - RNA, 19 nt, Artificial Sequence
  Description of Artificial Sequence: Synthetic oligonucleotide
  Sense strand starting at position 3840 of SEQ ID NO: 1886884
acaauugaguaguuguaac

SEQ ID NO: 2433147 - RNA, 19 nt, Artificial Sequence
  Description of Artificial Sequence: Synthetic oligonucleotide
  Antisense strand to SEQ ID NO: 2433146
guuacaacuacucaauugu

SEQ ID NO: 2433148 - RNA, 19 nt, Artificial Sequence
  Description of Artificial Sequence: Synthetic oligonucleotide
  Sense strand starting at position 3848 of SEQ ID NO: 1886884
guaguuguaacagagauca

SEQ ID NO: 2433149 - RNA, 19 nt, Artificial Sequence
  Description of Artificial Sequence: Synthetic oligonucleotide
  Antisense strand to SEQ ID NO: 2433148
ugaucucuguuacaacuac

SEQ ID NO: 2433150 - RNA, 19 nt, Artificial Sequence
  Description of Artificial Sequence: Synthetic oligonucleotide
  Sense strand starting at position 3860 of SEQ ID NO: 1886884
gagaucauaugguucgcaa

SEQ ID NO: 2433151 - RNA, 19 nt, Artificial Sequence
  Description of Artificial Sequence: Synthetic oligonucleotide
  Antisense strand to SEQ ID NO: 2433150
uugcgaaccauaugaucuc

SEQ ID NO: 2433152 - RNA, 19 nt, Artificial Sequence
  Description of Artificial Sequence: Synthetic oligonucleotide
  Sense strand starting at position 3862 of SEQ ID NO: 1886884
gaucauaugguucgcaaag

SEQ ID NO: 2433153 - RNA, 19 nt, Artificial Sequence
  Description of Artificial Sequence: Synthetic oligonucleotide
  Antisense strand to SEQ ID NO: 2433152
cuuugcgaaccauaugauc

SEQ ID NO: 2433154 - RNA, 19 nt, Artificial Sequence
  Description of Artificial Sequence: Synthetic oligonucleotide
  Sense strand starting at position 3935 of SEQ ID NO: 1886884
uuauaagcuccaugaggau

SEQ ID NO: 2433155 - RNA, 19 nt, Artificial Sequence
  Description of Artificial Sequence: Synthetic oligonucleotide
  Antisense strand to SEQ ID NO: 2433154
auccucauggagcuuauaa

SEQ ID NO: 2433156 - RNA, 19 nt, Artificial Sequence
  Description of Artificial Sequence: Synthetic oligonucleotide
  Sense strand starting at position 39 of SEQ ID NO: 1886885
agagcuuugcaacauugua

SEQ ID NO: 2433157 - RNA, 19 nt, Artificial Sequence
  Description of Artificial Sequence: Synthetic oligonucleotide
  Antisense strand to SEQ ID NO: 2433156
uacaauguugcaaagcucu

SEQ ID NO: 2433158 - RNA, 19 nt, Artificial Sequence
  Description of Artificial Sequence: Synthetic oligonucleotide
  Sense strand starting at position 61 of SEQ ID NO: 1886885
uguuaccagcguuaacaau

SEQ ID NO: 2433159 - RNA, 19 nt, Artificial Sequence
  Description of Artificial Sequence: Synthetic oligonucleotide
  Antisense strand to SEQ ID NO: 2433158
auuguuaacgcugguaaca

SEQ ID NO: 2433160 - RNA, 19 nt, Artificial Sequence
  Description of Artificial Sequence: Synthetic oligonucleotide
  Sense strand starting at position 70 of SEQ ID NO: 1886885
cguuaacaauguucuuaga

SEQ ID NO: 2433161 - RNA, 19 nt, Artificial Sequence
  Description of Artificial Sequence: Synthetic oligonucleotide
  Antisense strand to SEQ ID NO: 2433160
ucuaagaacauuguuaacg

SEQ ID NO: 2433162 - RNA, 19 nt, Artificial Sequence
  Description of Artificial Sequence: Synthetic oligonucleotide
  Sense strand starting at position 72 of SEQ ID NO: 1886885
uuaacaauguucuuagaag

SEQ ID NO: 2433163 - RNA, 19 nt, Artificial Sequence
  Description of Artificial Sequence: Synthetic oligonucleotide
  Antisense strand to SEQ ID NO: 2433162
cuucuaagaacauuguuaa

SEQ ID NO: 2433164 - RNA, 19 nt, Artificial Sequence
  Description of Artificial Sequence: Synthetic oligonucleotide
  Sense strand starting at position 1989 of SEQ ID NO: 1886885
gugggaagacguugggaaa

SEQ ID NO: 2433165 - RNA, 19 nt, Artificial Sequence
  Description of Artificial Sequence: Synthetic oligonucleotide
  Antisense strand to SEQ ID NO: 2433164
uuucccaacgucuucccac

SEQ ID NO: 2433166 - RNA, 19 nt, Artificial Sequence
  Description of Artificial Sequence: Synthetic oligonucleotide
  Sense strand starting at position 2181 of SEQ ID NO: 1886885
aaagauuggugggagagaa

SEQ ID NO: 2433167 - RNA, 19 nt, Artificial Sequence
  Description of Artificial Sequence: Synthetic oligonucleotide
  Antisense strand to SEQ ID NO: 2433166
uucucucccaccaaucuuu

SEQ ID NO: 2433168 - RNA, 19 nt, Artificial Sequence
  Description of Artificial Sequence: Synthetic oligonucleotide
  Sense strand starting at position 2480 of SEQ ID NO: 1886885
aauaucuugugauugcagu

SEQ ID NO: 2433169 - RNA, 19 nt, Artificial Sequence
  Description of Artificial Sequence: Synthetic oligonucleotide
  Antisense strand to SEQ ID NO: 2433168
acugcaaucacaagauauu

SEQ ID NO: 2433170 - RNA, 19 nt, Artificial Sequence
  Description of Artificial Sequence: Synthetic oligonucleotide
  Sense strand starting at position 2514 of SEQ ID NO: 1886885
uacuuagauccagagcagu

SEQ ID NO: 2433171 - RNA, 19 nt, Artificial Sequence
  Description of Artificial Sequence: Synthetic oligonucleotide
  Antisense strand to SEQ ID NO: 2433170
acugcucuggaucuaagua

SEQ ID NO: 2433172 - RNA, 19 nt, Artificial Sequence
  Description of Artificial Sequence: Synthetic oligonucleotide
  Sense strand starting at position 2524 of SEQ ID NO: 1886885
cagagcagucucugauugu

SEQ ID NO: 2433173 - RNA, 19 nt, Artificial Sequence
  Description of Artificial Sequence: Synthetic oligonucleotide
  Antisense strand to SEQ ID NO: 2433172
acaaucagagacugcucug

SEQ ID NO: 2433174 - RNA, 19 nt, Artificial Sequence
  Description of Artificial Sequence: Synthetic oligonucleotide
  Sense strand starting at position 2530 of SEQ ID NO: 1886885
agucucugauuguuaguga

SEQ ID NO: 2433175 - RNA, 19 nt, Artificial Sequence
  Description of Artificial Sequence: Synthetic oligonucleotide
  Antisense strand to SEQ ID NO: 2433174
ucacuaacaaucagagacu

SEQ ID NO: 2433176 - RNA, 19 nt, Artificial Sequence
  Description of Artificial Sequence: Synthetic oligonucleotide
  Sense strand starting at position 2662 of SEQ ID NO: 1886885
aauagagguguguaccuuu

SEQ ID NO: 2433177 - RNA, 19 nt, Artificial Sequence
  Description of Artificial Sequence: Synthetic oligonucleotide
  Antisense strand to SEQ ID NO: 2433176
aaagguacacaccucuauu

SEQ ID NO: 2433178 - RNA, 19 nt, Artificial Sequence
  Description of Artificial Sequence: Synthetic oligonucleotide
  Sense strand starting at position 2674 of SEQ ID NO: 1886885
uaccuuuggcauuggacau

SEQ ID NO: 2433179 - RNA, 19 nt, Artificial Sequence
  Description of Artificial Sequence: Synthetic oligonucleotide
  Antisense strand to SEQ ID NO: 2433178
auguccaaugccaaaggua

SEQ ID NO: 2433180 - RNA, 19 nt, Artificial Sequence
  Description of Artificial Sequence: Synthetic oligonucleotide
  Sense strand starting at position 2728 of SEQ ID NO: 1886885
aaucuuuaagauuguggca

SEQ ID NO: 2433181 - RNA, 19 nt, Artificial Sequence
  Description of Artificial Sequence: Synthetic oligonucleotide
  Antisense strand to SEQ ID NO: 2433180
ugccacaaucuuaaagauu

SEQ ID NO: 2433182 - RNA, 19 nt, Artificial Sequence
  Description of Artificial Sequence: Synthetic oligonucleotide
  Sense strand starting at position 2741 of SEQ ID NO: 1886885
guggcagaaacaugauugu

SEQ ID NO: 2433183 - RNA, 19 nt, Artificial Sequence
  Description of Artificial Sequence: Synthetic oligonucleotide
  Antisense strand to SEQ ID NO: 2433182
acaaucauguuucugccac

SEQ ID NO: 2433184 - RNA, 19 nt, Artificial Sequence
  Description of Artificial Sequence: Synthetic oligonucleotide
  Sense strand starting at position 2745 of SEQ ID NO: 1886885
cagaaacaugauugugacu

SEQ ID NO: 2433185 - RNA, 19 nt, Artificial Sequence
  Description of Artificial Sequence: Synthetic oligonucleotide
  Antisense strand to SEQ ID NO: 2433184
agucacaaucauguuucug

SEQ ID NO: 2433186 - RNA, 19 nt, Artificial Sequence
  Description of Artificial Sequence: Synthetic oligonucleotide
  Sense strand starting at position 2808 of SEQ ID NO: 1886885
guaaacugauaugccuaua

SEQ ID NO: 2433187 - RNA, 19 nt, Artificial Sequence
  Description of Artificial Sequence: Synthetic oligonucleotide
  Antisense strand to SEQ ID NO: 2433186
uauaggcauaucaguuuac

SEQ ID NO: 2433188 - RNA, 19 nt, Artificial Sequence
  Description of Artificial Sequence: Synthetic oligonucleotide
  Sense strand starting at position 2894 of SEQ ID NO: 1886885
acaguuaaauugccuuagu

SEQ ID NO: 2433189 - RNA, 19 nt, Artificial Sequence
  Description of Artificial Sequence: Synthetic oligonucleotide
  Antisense strand to SEQ ID NO: 2433188
acuaaggcaauuuaacugu

SEQ ID NO: 2433190 - RNA, 19 nt, Artificial Sequence
  Description of Artificial Sequence: Synthetic oligonucleotide
  Sense strand starting at position 2897 of SEQ ID NO: 1886885
guuaaauugccuuagucuu

SEQ ID NO: 2433191 - RNA, 19 nt, Artificial Sequence
  Description of Artificial Sequence: Synthetic oligonucleotide
  Antisense strand to SEQ ID NO: 2433190
aagacuaaggcaauuuaac

SEQ ID NO: 2433192 - RNA, 19 nt, Artificial Sequence
  Description of Artificial Sequence: Synthetic oligonucleotide
  Sense strand starting at position 2975 of SEQ ID NO: 1886885
uguugcguuaugccuauau

SEQ ID NO: 2433193 - RNA, 19 nt, Artificial Sequence
  Description of Artificial Sequence: Synthetic oligonucleotide
  Antisense strand to SEQ ID NO: 2433192
auauaggcauaacgcaaca

SEQ ID NO: 2433194 - RNA, 19 nt, Artificial Sequence
  Description of Artificial Sequence: Synthetic oligonucleotide
  Sense strand starting at position 2977 of SEQ ID NO: 1886885
uugcguuaugccuauauaa

SEQ ID NO: 2433195 - RNA, 19 nt, Artificial Sequence
  Description of Artificial Sequence: Synthetic oligonucleotide
  Antisense strand to SEQ ID NO: 2433194
uuauauaggcauaacgcaa

SEQ ID NO: 2433196 - RNA, 19 nt, Artificial Sequence
  Description of Artificial Sequence: Synthetic oligonucleotide
  Sense strand starting at position 3089 of SEQ ID NO: 1886885
uuaauuggugaaugauaac

SEQ ID NO: 2433197 - RNA, 19 nt, Artificial Sequence
  Description of Artificial Sequence: Synthetic oligonucleotide
  Antisense strand to SEQ ID NO: 2433196
guuaucauucaccaauuaa

SEQ ID NO: 2433198 - RNA, 19 nt, Artificial Sequence
  Description of Artificial Sequence: Synthetic oligonucleotide
  Sense strand starting at position 3095 of SEQ ID NO: 1886885
ggugaaugauaacuuauug

SEQ ID NO: 2433199 - RNA, 19 nt, Artificial Sequence
  Description of Artificial Sequence: Synthetic oligonucleotide
  Antisense strand to SEQ ID NO: 2433198
caauaaguuaucauucacc

SEQ ID NO: 2433200 - RNA, 19 nt, Artificial Sequence
  Description of Artificial Sequence: Synthetic oligonucleotide
  Sense strand starting at position 3125 of SEQ ID NO: 1886885
agcaguuaaauguaaggau

SEQ ID NO: 2433201 - RNA, 19 nt, Artificial Sequence
  Description of Artificial Sequence: Synthetic oligonucleotide
  Antisense strand to SEQ ID NO: 2433200
auccuuacauuuaacugcu

SEQ ID NO: 2433202 - RNA, 19 nt, Artificial Sequence
  Description of Artificial Sequence: Synthetic oligonucleotide
  Sense strand starting at position 3279 of SEQ ID NO: 1886885
agcaaaugucuguaccaga

SEQ ID NO: 2433203 - RNA, 19 nt, Artificial Sequence
  Description of Artificial Sequence: Synthetic oligonucleotide
  Antisense strand to SEQ ID NO: 2433202
ucugguacagacauuugcu

SEQ ID NO: 2433204 - RNA, 19 nt, Artificial Sequence
  Description of Artificial Sequence: Synthetic oligonucleotide
  Sense strand starting at position 3284 of SEQ ID NO: 1886885
augucuguaccagaacauc

SEQ ID NO: 2433205 - RNA, 19 nt, Artificial Sequence
  Description of Artificial Sequence: Synthetic oligonucleotide
  Antisense strand to SEQ ID NO: 2433204
gauguucugguacagacau

SEQ ID NO: 2433206 - RNA, 19 nt, Artificial Sequence
  Description of Artificial Sequence: Synthetic oligonucleotide
  Sense strand starting at position 3621 of SEQ ID NO: 1886885
cugucagacaguggguuaa

SEQ ID NO: 2433207 - RNA, 19 nt, Artificial Sequence
  Description of Artificial Sequence: Synthetic oligonucleotide
  Antisense strand to SEQ ID NO: 2433206
uuaacccacugucugacag

SEQ ID NO: 2433208 - RNA, 19 nt, Artificial Sequence
  Description of Artificial Sequence: Synthetic oligonucleotide
  Sense strand starting at position 3623 of SEQ ID NO: 1886885
gucagacaguggguuaaau

SEQ ID NO: 2433209 - RNA, 19 nt, Artificial Sequence
  Description of Artificial Sequence: Synthetic oligonucleotide
  Antisense strand to SEQ ID NO: 2433208
auuuaacccacugucugac

SEQ ID NO: 2433210 - RNA, 19 nt, Artificial Sequence
  Description of Artificial Sequence: Synthetic oligonucleotide
  Sense strand starting at position 3625 of SEQ ID NO: 1886885
cagacaguggguuaaaugu

SEQ ID NO: 2433211 - RNA, 19 nt, Artificial Sequence
  Description of Artificial Sequence: Synthetic oligonucleotide
  Antisense strand to SEQ ID NO: 2433210
acauuuaacccacugucug

SEQ ID NO: 2433212 - RNA, 19 nt, Artificial Sequence
  Description of Artificial Sequence: Synthetic oligonucleotide
  Sense strand starting at position 3631 of SEQ ID NO: 1886885
guggguuaaaugugucuga

SEQ ID NO: 2433213 - RNA, 19 nt, Artificial Sequence
  Description of Artificial Sequence: Synthetic oligonucleotide
  Antisense strand to SEQ ID NO: 2433212
ucagacacauuuaacccac

SEQ ID NO: 2433214 - RNA, 19 nt, Artificial Sequence
  Description of Artificial Sequence: Synthetic oligonucleotide
  Sense strand starting at position 3634 of SEQ ID NO: 1886885
gguuaaaugugucugagca

SEQ ID NO: 2433215 - RNA, 19 nt, Artificial Sequence
  Description of Artificial Sequence: Synthetic oligonucleotide
  Antisense strand to SEQ ID NO: 2433214
ugcucagacacauuuaacc

SEQ ID NO: 2433216 - RNA, 19 nt, Artificial Sequence
  Description of Artificial Sequence: Synthetic oligonucleotide
  Sense strand starting at position 3635 of SEQ ID NO: 1886885
guuaaaugugucugagcac

SEQ ID NO: 2433217 - RNA, 19 nt, Artificial Sequence
  Description of Artificial Sequence: Synthetic oligonucleotide
  Antisense strand to SEQ ID NO: 2433216
gugcucagacacauuuaac

SEQ ID NO: 2433218 - RNA, 19 nt, Artificial Sequence
  Description of Artificial Sequence: Synthetic oligonucleotide
  Sense strand starting at position 3678 of SEQ ID NO: 1886885
caguauccgcacugaauau

SEQ ID NO: 2433219 - RNA, 19 nt, Artificial Sequence
  Description of Artificial Sequence: Synthetic oligonucleotide
  Antisense strand to SEQ ID NO: 2433218
auauucagugcggauacug

SEQ ID NO: 2433220 - RNA, 19 nt, Artificial Sequence
  Description of Artificial Sequence: Synthetic oligonucleotide
  Sense strand starting at position 3716 of SEQ ID NO: 1886885
uguuauauagaguagcaua

SEQ ID NO: 2433221 - RNA, 19 nt, Artificial Sequence
  Description of Artificial Sequence: Synthetic oligonucleotide
  Antisense strand to SEQ ID NO: 2433220
uaugcuacucuauauaaca

SEQ ID NO: 2433222 - RNA, 19 nt, Artificial Sequence
  Description of Artificial Sequence: Synthetic oligonucleotide
  Sense strand starting at position 3763 of SEQ ID NO: 1886885
uuuguuguggaauacuuaa

SEQ ID NO: 2433223 - RNA, 19 nt, Artificial Sequence
  Description of Artificial Sequence: Synthetic oligonucleotide
  Antisense strand to SEQ ID NO: 2433222
uuaaguauuccacaacaaa

SEQ ID NO: 2433224 - RNA, 19 nt, Artificial Sequence
  Description of Artificial Sequence: Synthetic oligonucleotide
  Sense strand starting at position 3781 of SEQ ID NO: 1886885
acaugaccuccucguauau

SEQ ID NO: 2433225 - RNA, 19 nt, Artificial Sequence
  Description of Artificial Sequence: Synthetic oligonucleotide
  Antisense strand to SEQ ID NO: 2433224
auauacgaggaggucaugu

SEQ ID NO: 2433226 - RNA, 19 nt, Artificial Sequence
  Description of Artificial Sequence: Synthetic oligonucleotide
  Sense strand starting at position 3796 of SEQ ID NO: 1886885
auauaauuaucagugcugu

SEQ ID NO: 2433227 - RNA, 19 nt, Artificial Sequence
  Description of Artificial Sequence: Synthetic oligonucleotide
  Antisense strand to SEQ ID NO: 2433226
acagcacugauaauuauau

SEQ ID NO: 2433228 - RNA, 19 nt, Artificial Sequence
  Description of Artificial Sequence: Synthetic oligonucleotide
  Sense strand starting at position 3835 of SEQ ID NO: 1886885
cuggauauuuacuagacuu

SEQ ID NO: 2433229 - RNA, 19 nt, Artificial Sequence
  Description of Artificial Sequence: Synthetic oligonucleotide
  Antisense strand to SEQ ID NO: 2433228
aagucuaguaaauauccag

SEQ ID NO: 2433230 - RNA, 19 nt, Artificial Sequence
  Description of Artificial Sequence: Synthetic oligonucleotide
  Sense strand starting at position 3861 of SEQ ID NO: 1886885
ugacuuacugcagaaaugu

SEQ ID NO: 2433231 - RNA, 19 nt, Artificial Sequence
  Description of Artificial Sequence: Synthetic oligonucleotide
  Antisense strand to SEQ ID NO: 2433230
acauuucugcaguaaguca

SEQ ID NO: 2433232 - RNA, 19 nt, Artificial Sequence
  Description of Artificial Sequence: Synthetic oligonucleotide
  Sense strand starting at position 3870 of SEQ ID NO: 1886885
gcagaaaugucauccauau

SEQ ID NO: 2433233 - RNA, 19 nt, Artificial Sequence
  Description of Artificial Sequence: Synthetic oligonucleotide
  Antisense strand to SEQ ID NO: 2433232
auauggaugacauuucugc

SEQ ID NO: 2433234 - RNA, 19 nt, Artificial Sequence
  Description of Artificial Sequence: Synthetic oligonucleotide
  Sense strand starting at position 3979 of SEQ ID NO: 1886885
cuuauuguacuaugaagua

SEQ ID NO: 2433235 - RNA, 19 nt, Artificial Sequence
  Description of Artificial Sequence: Synthetic oligonucleotide
  Antisense strand to SEQ ID NO: 2433234
uacuucauaguacaauaag

SEQ ID NO: 2433236 - RNA, 19 nt, Artificial Sequence
  Description of Artificial Sequence: Synthetic oligonucleotide
  Sense strand starting at position 2148 of SEQ ID NO: 1886886
caaagaccggucgacauaa

SEQ ID NO: 2433237 - RNA, 19 nt, Artificial Sequence
  Description of Artificial Sequence: Synthetic oligonucleotide
  Antisense strand to SEQ ID NO: 2433236
uuaugucgaccggucuuug

SEQ ID NO: 2433238 - RNA, 19 nt, Artificial Sequence
  Description of Artificial Sequence: Synthetic oligonucleotide
  Sense strand starting at position 3737 of SEQ ID NO: 1886886
ggaaaugcacuuuguccua

SEQ ID NO: 2433239 - RNA, 19 nt, Artificial Sequence
  Description of Artificial Sequence: Synthetic oligonucleotide
  Antisense strand to SEQ ID NO: 2433238
uaggacaaagugcauuucc

SEQ ID NO: 2433240 - RNA, 19 nt, Artificial Sequence
  Description of Artificial Sequence: Synthetic oligonucleotide
  Sense strand starting at position 3742 of SEQ ID NO: 1886886
ugcacuuuguccuauaaga

SEQ ID NO: 2433241 - RNA, 19 nt, Artificial Sequence
  Description of Artificial Sequence: Synthetic oligonucleotide
  Antisense strand to SEQ ID NO: 2433240
ucuuauaggacaaagugca

SEQ ID NO: 2433242 - RNA, 19 nt, Artificial Sequence
  Description of Artificial Sequence: Synthetic oligonucleotide
  Sense strand starting at position 15 of SEQ ID NO: 1886887
gaucccaugugagagauga

SEQ ID NO: 2433243 - RNA, 19 nt, Artificial Sequence
  Description of Artificial Sequence: Synthetic oligonucleotide
  Antisense strand to SEQ ID NO: 2433242
ucaucucucacaugggauc

SEQ ID NO: 2433244 - RNA, 19 nt, Artificial Sequence
  Description of Artificial Sequence: Synthetic oligonucleotide
  Sense strand starting at position 138 of SEQ ID NO: 1886887
accaauucuccuuggcaag

SEQ ID NO: 2433245 - RNA, 19 nt, Artificial Sequence
  Description of Artificial Sequence: Synthetic oligonucleotide
  Antisense strand to SEQ ID NO: 2433244
cuugccaaggagaauuggu

SEQ ID NO: 2433246 - RNA, 19 nt, Artificial Sequence
  Description of Artificial Sequence: Synthetic oligonucleotide
  Sense strand starting at position 139 of SEQ ID NO: 1886887
ccaauucuccuuggcaagu

SEQ ID NO: 2433247 - RNA, 19 nt, Artificial Sequence
  Description of Artificial Sequence: Synthetic oligonucleotide
  Antisense strand to SEQ ID NO: 2433246
acuugccaaggagaauugg

SEQ ID NO: 2433248 - RNA, 19 nt, Artificial Sequence
  Description of Artificial Sequence: Synthetic oligonucleotide
  Sense strand starting at position 233 of SEQ ID NO: 1886887
ggugaacugaagugaugua

SEQ ID NO: 2433249 - RNA, 19 nt, Artificial Sequence
  Description of Artificial Sequence: Synthetic oligonucleotide
  Antisense strand to SEQ ID NO: 2433248
uacaucacuucaguucacc

SEQ ID NO: 2433250 - RNA, 19 nt, Artificial Sequence
  Description of Artificial Sequence: Synthetic oligonucleotide
  Sense strand starting at position 234 of SEQ ID NO: 1886887
gugaacugaagugauguau

SEQ ID NO: 2433251 - RNA, 19 nt, Artificial Sequence
  Description of Artificial Sequence: Synthetic oligonucleotide
  Antisense strand to SEQ ID NO: 2433250
auacaucacuucaguucac

SEQ ID NO: 2433252 - RNA, 19 nt, Artificial Sequence
  Description of Artificial Sequence: Synthetic oligonucleotide
  Sense strand starting at position 238 of SEQ ID NO: 1886887
acugaagugauguauguua

SEQ ID NO: 2433253 - RNA, 19 nt, Artificial Sequence
  Description of Artificial Sequence: Synthetic oligonucleotide
  Antisense strand to SEQ ID NO: 2433252
uaacauacaucacuucagu

SEQ ID NO: 2433254 - RNA, 19 nt, Artificial Sequence
  Description of Artificial Sequence: Synthetic oligonucleotide
  Sense strand starting at position 240 of SEQ ID NO: 1886887
ugaagugauguauguuauu

SEQ ID NO: 2433255 - RNA, 19 nt, Artificial Sequence
  Description of Artificial Sequence: Synthetic oligonucleotide
  Antisense strand to SEQ ID NO: 2433254
aauaacauacaucacuuca

SEQ ID NO: 2433256 - RNA, 19 nt, Artificial Sequence
  Description of Artificial Sequence: Synthetic oligonucleotide
  Sense strand starting at position 245 of SEQ ID NO: 1886887
ugauguauguuauuguuga

SEQ ID NO: 2433257 - RNA, 19 nt, Artificial Sequence
  Description of Artificial Sequence: Synthetic oligonucleotide
  Antisense strand to SEQ ID NO: 2433256
ucaacaauaacauacauca

SEQ ID NO: 2433258 - RNA, 19 nt, Artificial Sequence
  Description of Artificial Sequence: Synthetic oligonucleotide
  Sense strand starting at position 262 of SEQ ID NO: 1886887
gagagugcugccugacaca

SEQ ID NO: 2433259 - RNA, 19 nt, Artificial Sequence
  Description of Artificial Sequence: Synthetic oligonucleotide
  Antisense strand to SEQ ID NO: 2433258
ugugucaggcagcacucuc

SEQ ID NO: 2433260 - RNA, 19 nt, Artificial Sequence
  Description of Artificial Sequence: Synthetic oligonucleotide
  Sense strand starting at position 283 of SEQ ID NO: 1886887
gcugcuugucauucuuguu

SEQ ID NO: 2433261 - RNA, 19 nt, Artificial Sequence
  Description of Artificial Sequence: Synthetic oligonucleotide
  Antisense strand to SEQ ID NO: 2433260
aacaagaaugacaagcagc

SEQ ID NO: 2433262 - RNA, 19 nt, Artificial Sequence
  Description of Artificial Sequence: Synthetic oligonucleotide
  Sense strand starting at position 359 of SEQ ID NO: 1886887
uccacagaggcguguaaug

SEQ ID NO: 2433263 - RNA, 19 nt, Artificial Sequence
  Description of Artificial Sequence: Synthetic oligonucleotide
  Antisense strand to SEQ ID NO: 2433262
cauuacacgccucugugga

SEQ ID NO: 2433264 - RNA, 19 nt, Artificial Sequence
  Description of Artificial Sequence: Synthetic oligonucleotide
  Sense strand starting at position 817 of SEQ ID NO: 1886887
cccuguuaucuugggcacu

SEQ ID NO: 2433265 - RNA, 19 nt, Artificial Sequence
  Description of Artificial Sequence: Synthetic oligonucleotide
  Antisense strand to SEQ ID NO: 2433264
agugcccaagauaacaggg

SEQ ID NO: 2433266 - RNA, 19 nt, Artificial Sequence
  Description of Artificial Sequence: Synthetic oligonucleotide
  Sense strand starting at position 1061 of SEQ ID NO: 1886887
gggcuauggucucccuaaa

SEQ ID NO: 2433267 - RNA, 19 nt, Artificial Sequence
  Description of Artificial Sequence: Synthetic oligonucleotide
  Antisense strand to SEQ ID NO: 2433266
uuuagggagaccauagccc

SEQ ID NO: 2433268 - RNA, 19 nt, Artificial Sequence
  Description of Artificial Sequence: Synthetic oligonucleotide
  Sense strand starting at position 1136 of SEQ ID NO: 1886887
cuguguguugaggguauca

SEQ ID NO: 2433269 - RNA, 19 nt, Artificial Sequence
  Description of Artificial Sequence: Synthetic oligonucleotide
  Antisense strand to SEQ ID NO: 2433268
ugauacccucaacacacag

SEQ ID NO: 2433270 - RNA, 19 nt, Artificial Sequence
  Description of Artificial Sequence: Synthetic oligonucleotide
  Sense strand starting at position 1138 of SEQ ID NO: 1886887
guguguugaggguaucaau

SEQ ID NO: 2433271 - RNA, 19 nt, Artificial Sequence
  Description of Artificial Sequence: Synthetic oligonucleotide
  Antisense strand to SEQ ID NO: 2433270
auugauacccucaacacac

SEQ ID NO: 2433272 - RNA, 19 nt, Artificial Sequence
  Description of Artificial Sequence: Synthetic oligonucleotide
  Sense strand starting at position 1185 of SEQ ID NO: 1886887
ugcaaaugugccgauguuu

SEQ ID NO: 2433273 - RNA, 19 nt, Artificial Sequence
  Description of Artificial Sequence: Synthetic oligonucleotide
  Antisense strand to SEQ ID NO: 2433272
aaacaucggcacauuugca

SEQ ID NO: 2433274 - RNA, 19 nt, Artificial Sequence
  Description of Artificial Sequence: Synthetic oligonucleotide
  Sense strand starting at position 1190 of SEQ ID NO: 1886887
augugccgauguuucuaaa

SEQ ID NO: 2433275 - RNA, 19 nt, Artificial Sequence
  Description of Artificial Sequence: Synthetic oligonucleotide
  Antisense strand to SEQ ID NO: 2433274
uuuagaaacaucggcacau

SEQ ID NO: 2433276 - RNA, 19 nt, Artificial Sequence
  Description of Artificial Sequence: Synthetic oligonucleotide
  Sense strand starting at position 1349 of SEQ ID NO: 1886887
uggguauggugaccaauua

SEQ ID NO: 2433277 - RNA, 19 nt, Artificial Sequence
  Description of Artificial Sequence: Synthetic oligonucleotide
  Antisense strand to SEQ ID NO: 2433276
uaauuggucaccauaccca

SEQ ID NO: 2433278 - RNA, 19 nt, Artificial Sequence
  Description of Artificial Sequence: Synthetic oligonucleotide
  Sense strand starting at position 1743 of SEQ ID NO: 1886887
cugagauccugcuucuacu

SEQ ID NO: 2433279 - RNA, 19 nt, Artificial Sequence
  Description of Artificial Sequence: Synthetic oligonucleotide
  Antisense strand to SEQ ID NO: 2433278
aguagaagcaggaucucag

SEQ ID NO: 2433280 - RNA, 19 nt, Artificial Sequence
  Description of Artificial Sequence: Synthetic oligonucleotide
  Sense strand starting at position 1828 of SEQ ID NO: 1886887
ugcaaaugagauuguguca

SEQ ID NO: 2433281 - RNA, 19 nt, Artificial Sequence
  Description of Artificial Sequence: Synthetic oligonucleotide
  Antisense strand to SEQ ID NO: 2433280
ugacacaaucucauuugca

SEQ ID NO: 2433282 - RNA, 19 nt, Artificial Sequence
  Description of Artificial Sequence: Synthetic oligonucleotide
  Sense strand starting at position 2019 of SEQ ID NO: 1886887
caggucucagcuuauaagu

SEQ ID NO: 2433283 - RNA, 19 nt, Artificial Sequence
  Description of Artificial Sequence: Synthetic oligonucleotide
  Antisense strand to SEQ ID NO: 2433282
acuuauaagcugagaccug

SEQ ID NO: 2433284 - RNA, 19 nt, Artificial Sequence
  Description of Artificial Sequence: Synthetic oligonucleotide
  Sense strand starting at position 2028 of SEQ ID NO: 1886887
gcuuauaaguuauugcuca

SEQ ID NO: 2433285 - RNA, 19 nt, Artificial Sequence
  Description of Artificial Sequence: Synthetic oligonucleotide
  Antisense strand to SEQ ID NO: 2433284
ugagcaauaacuuauaagc

SEQ ID NO: 2433286 - RNA, 19 nt, Artificial Sequence
  Description of Artificial Sequence: Synthetic oligonucleotide
  Sense strand starting at position 2032 of SEQ ID NO: 1886887
auaaguuauugcucaugga

SEQ ID NO: 2433287 - RNA, 19 nt, Artificial Sequence
  Description of Artificial Sequence: Synthetic oligonucleotide
  Antisense strand to SEQ ID NO: 2433286
uccaugagcaauaacuuau

SEQ ID NO: 2433288 - RNA, 19 nt, Artificial Sequence
  Description of Artificial Sequence: Synthetic oligonucleotide
  Sense strand starting at position 2033 of SEQ ID NO: 1886887
uaaguuauugcucauggaa

SEQ ID NO: 2433289 - RNA, 19 nt, Artificial Sequence
  Description of Artificial Sequence: Synthetic oligonucleotide
  Antisense strand to SEQ ID NO: 2433288
uuccaugagcaauaacuua

SEQ ID NO: 2433290 - RNA, 19 nt, Artificial Sequence
  Description of Artificial Sequence: Synthetic oligonucleotide
  Sense strand starting at position 2189 of SEQ ID NO: 1886887
ggccgaagcuuccucuuau

SEQ ID NO: 2433291 - RNA, 19 nt, Artificial Sequence
  Description of Artificial Sequence: Synthetic oligonucleotide
  Antisense strand to SEQ ID NO: 2433290
auaagaggaagcuucggcc

SEQ ID NO: 2433292 - RNA, 19 nt, Artificial Sequence
  Description of Artificial Sequence: Synthetic oligonucleotide
  Sense strand starting at position 2266 of SEQ ID NO: 1886887
guuggaagaaugugcaaau

SEQ ID NO: 2433293 - RNA, 19 nt, Artificial Sequence
  Description of Artificial Sequence: Synthetic oligonucleotide
  Antisense strand to SEQ ID NO: 2433292
auuugcacauucuuccaac

SEQ ID NO: 2433294 - RNA, 19 nt, Artificial Sequence
  Description of Artificial Sequence: Synthetic oligonucleotide
  Sense strand starting at position 2317 of SEQ ID NO: 1886887
auguaugggugucuugaga

SEQ ID NO: 2433295 - RNA, 19 nt, Artificial Sequence
  Description of Artificial Sequence: Synthetic oligonucleotide
  Antisense strand to SEQ ID NO: 2433294
ucucaagacacccauacau

SEQ ID NO: 2433296 - RNA, 19 nt, Artificial Sequence
  Description of Artificial Sequence: Synthetic oligonucleotide
  Sense strand starting at position 2321 of SEQ ID NO: 1886887
augggugucuugagaggua

SEQ ID NO: 2433297 - RNA, 19 nt, Artificial Sequence
  Description of Artificial Sequence: Synthetic oligonucleotide
  Antisense strand to SEQ ID NO: 2433296
uaccucucaagacacccau

SEQ ID NO: 2433298 - RNA, 19 nt, Artificial Sequence
  Description of Artificial Sequence: Synthetic oligonucleotide
  Sense strand starting at position 3053 of SEQ ID NO: 1886887
ccaucuugauuuggucaau

SEQ ID NO: 2433299 - RNA, 19 nt, Artificial Sequence
  Description of Artificial Sequence: Synthetic oligonucleotide
  Antisense strand to SEQ ID NO: 2433298
auugaccaaaucaagaugg

SEQ ID NO: 2433300 - RNA, 19 nt, Artificial Sequence
  Description of Artificial Sequence: Synthetic oligonucleotide
  Sense strand starting at position 3123 of SEQ ID NO: 1886887
ggaugcacucuaggacaaa

SEQ ID NO: 2433301 - RNA, 19 nt, Artificial Sequence
  Description of Artificial Sequence: Synthetic oligonucleotide
  Antisense strand to SEQ ID NO: 2433300
uuuguccuagagugcaucc

SEQ ID NO: 2433302 - RNA, 19 nt, Artificial Sequence
  Description of Artificial Sequence: Synthetic oligonucleotide
  Sense strand starting at position 3194 of SEQ ID NO: 1886887
ggccgugggucacuuauga

SEQ ID NO: 2433303 - RNA, 19 nt, Artificial Sequence
  Description of Artificial Sequence: Synthetic oligonucleotide
  Antisense strand to SEQ ID NO: 2433302
ucauaagugacccacggcc

SEQ ID NO: 2433304 - RNA, 19 nt, Artificial Sequence
  Description of Artificial Sequence: Synthetic oligonucleotide
  Sense strand starting at position 3201 of SEQ ID NO: 1886887
ggucacuuaugagcaacaa

SEQ ID NO: 2433305 - RNA, 19 nt, Artificial Sequence
  Description of Artificial Sequence: Synthetic oligonucleotide
  Antisense strand to SEQ ID NO: 2433304
uuguugcucauaagugacc

SEQ ID NO: 2433306 - RNA, 19 nt, Artificial Sequence
  Description of Artificial Sequence: Synthetic oligonucleotide
  Sense strand starting at position 3294 of SEQ ID NO: 1886887
gagacacacuuuguauguu

SEQ ID NO: 2433307 - RNA, 19 nt, Artificial Sequence
  Description of Artificial Sequence: Synthetic oligonucleotide
  Antisense strand to SEQ ID NO: 2433306
aacauacaaagugugucuc

SEQ ID NO: 2433308 - RNA, 19 nt, Artificial Sequence
  Description of Artificial Sequence: Synthetic oligonucleotide
  Sense strand starting at position 3373 of SEQ ID NO: 1886887
uuagauuguuuaccgguua

SEQ ID NO: 2433309 - RNA, 19 nt, Artificial Sequence
  Description of Artificial Sequence: Synthetic oligonucleotide
  Antisense strand to SEQ ID NO: 2433308
uaaccgguaaacaaucuaa

SEQ ID NO: 2433310 - RNA, 19 nt, Artificial Sequence
  Description of Artificial Sequence: Synthetic oligonucleotide
  Sense strand starting at position 3386 of SEQ ID NO: 1886887
cgguuaucccaauaacuau

SEQ ID NO: 2433311 - RNA, 19 nt, Artificial Sequence
  Description of Artificial Sequence: Synthetic oligonucleotide
  Antisense strand to SEQ ID NO: 2433310
auaguuauugggauaaccg

SEQ ID NO: 2433312 - RNA, 19 nt, Artificial Sequence
  Description of Artificial Sequence: Synthetic oligonucleotide
  Sense strand starting at position 3393 of SEQ ID NO: 1886887
cccaauaacuauuggaaga

SEQ ID NO: 2433313 - RNA, 19 nt, Artificial Sequence
  Description of Artificial Sequence: Synthetic oligonucleotide
  Antisense strand to SEQ ID NO: 2433312
ucuuccaauaguuauuggg

SEQ ID NO: 2433314 - RNA, 19 nt, Artificial Sequence
  Description of Artificial Sequence: Synthetic oligonucleotide
  Sense strand starting at position 3415 of SEQ ID NO: 1886887
cugaaaugucaguauuccu

SEQ ID NO: 2433315 - RNA, 19 nt, Artificial Sequence
  Description of Artificial Sequence: Synthetic oligonucleotide
  Antisense strand to SEQ ID NO: 2433314
aggaauacugacauuucag

SEQ ID NO: 2433316 - RNA, 19 nt, Artificial Sequence
  Description of Artificial Sequence: Synthetic oligonucleotide
  Sense strand starting at position 3423 of SEQ ID NO: 1886887
ucaguauuccugcaugcaa

SEQ ID NO: 2433317 - RNA, 19 nt, Artificial Sequence
  Description of Artificial Sequence: Synthetic oligonucleotide
  Antisense strand to SEQ ID NO: 2433316
uugcaugcaggaauacuga

SEQ ID NO: 2433318 - RNA, 19 nt, Artificial Sequence
  Description of Artificial Sequence: Synthetic oligonucleotide
  Sense strand starting at position 3425 of SEQ ID NO: 1886887
aguauuccugcaugcaaau

SEQ ID NO: 2433319 - RNA, 19 nt, Artificial Sequence
  Description of Artificial Sequence: Synthetic oligonucleotide
  Antisense strand to SEQ ID NO: 2433318
auuugcaugcaggaauacu

SEQ ID NO: 2433320 - RNA, 19 nt, Artificial Sequence
  Description of Artificial Sequence: Synthetic oligonucleotide
  Sense strand starting at position 3841 of SEQ ID NO: 1886887
ucucuaauacacugggauu

SEQ ID NO: 2433321 - RNA, 19 nt, Artificial Sequence
  Description of Artificial Sequence: Synthetic oligonucleotide
  Antisense strand to SEQ ID NO: 2433320
aaucccaguguauuagaga

SEQ ID NO: 2433322 - RNA, 19 nt, Artificial Sequence
  Description of Artificial Sequence: Synthetic oligonucleotide
  Sense strand starting at position 2 of SEQ ID NO: 1886889
guaagugugcacuguauag

SEQ ID NO: 2433323 - RNA, 19 nt, Artificial Sequence
  Description of Artificial Sequence: Synthetic oligonucleotide
  Antisense strand to SEQ ID NO: 2433322
cuauacagugcacacuuac

SEQ ID NO: 2433324 - RNA, 19 nt, Artificial Sequence
  Description of Artificial Sequence: Synthetic oligonucleotide
  Sense strand starting at position 28 of SEQ ID NO: 1886889
cggauaugugucaguguac

SEQ ID NO: 2433325 - RNA, 19 nt, Artificial Sequence
  Description of Artificial Sequence: Synthetic oligonucleotide
  Antisense strand to SEQ ID NO: 2433324
guacacugacacauauccg

SEQ ID NO: 2433326 - RNA, 19 nt, Artificial Sequence
  Description of Artificial Sequence: Synthetic oligonucleotide
  Sense strand starting at position 29 of SEQ ID NO: 1886889
ggauaugugucaguguaca

SEQ ID NO: 2433327 - RNA, 19 nt, Artificial Sequence
  Description of Artificial Sequence: Synthetic oligonucleotide
  Antisense strand to SEQ ID NO: 2433326
uguacacugacacauaucc

SEQ ID NO: 2433328 - RNA, 19 nt, Artificial Sequence
  Description of Artificial Sequence: Synthetic oligonucleotide
  Sense strand starting at position 111 of SEQ ID NO: 1886889
ugcaaauggguguaugcaa

SEQ ID NO: 2433329 - RNA, 19 nt, Artificial Sequence
  Description of Artificial Sequence: Synthetic oligonucleotide
  Antisense strand to SEQ ID NO: 2433328
uugcauacacccauuugca

SEQ ID NO: 2433330 - RNA, 19 nt, Artificial Sequence
  Description of Artificial Sequence: Synthetic oligonucleotide
  Sense strand starting at position 157 of SEQ ID NO: 1886889
gggugcauuucugcaaaug

SEQ ID NO: 2433331 - RNA, 19 nt, Artificial Sequence
  Description of Artificial Sequence: Synthetic oligonucleotide
  Antisense strand to SEQ ID NO: 2433330
cauuugcagaaaugcaccc

SEQ ID NO: 2433332 - RNA, 19 nt, Artificial Sequence
  Description of Artificial Sequence: Synthetic oligonucleotide
  Sense strand starting at position 246 of SEQ ID NO: 1886889
gaugcaaacgcauauaugu

SEQ ID NO: 2433333 - RNA, 19 nt, Artificial Sequence
  Description of Artificial Sequence: Synthetic oligonucleotide
  Antisense strand to SEQ ID NO: 2433332
acauauaugcguuugcauc

SEQ ID NO: 2433334 - RNA, 19 nt, Artificial Sequence
  Description of Artificial Sequence: Synthetic oligonucleotide
  Sense strand starting at position 450 of SEQ ID NO: 1886889
cuuuguuccugucucagua

SEQ ID NO: 2433335 - RNA, 19 nt, Artificial Sequence
  Description of Artificial Sequence: Synthetic oligonucleotide
  Antisense strand to SEQ ID NO: 2433334
uacugagacaggaacaaag

SEQ ID NO: 2433336 - RNA, 19 nt, Artificial Sequence
  Description of Artificial Sequence: Synthetic oligonucleotide
  Sense strand starting at position 678 of SEQ ID NO: 1886889
aggguaguaucugcucaau

SEQ ID NO: 2433337 - RNA, 19 nt, Artificial Sequence
  Description of Artificial Sequence: Synthetic oligonucleotide
  Antisense strand to SEQ ID NO: 2433336
auugagcagauacuacccu

SEQ ID NO: 2433338 - RNA, 19 nt, Artificial Sequence
  Description of Artificial Sequence: Synthetic oligonucleotide
  Sense strand starting at position 832 of SEQ ID NO: 1886889
uguggaguccuuugggaau

SEQ ID NO: 2433339 - RNA, 19 nt, Artificial Sequence
  Description of Artificial Sequence: Synthetic oligonucleotide
  Antisense strand to SEQ ID NO: 2433338
auucccaaaggacuccaca

SEQ ID NO: 2433340 - RNA, 19 nt, Artificial Sequence
  Description of Artificial Sequence: Synthetic oligonucleotide
  Sense strand starting at position 838 of SEQ ID NO: 1886889
guccuuugggaaugagcau

SEQ ID NO: 2433341 - RNA, 19 nt, Artificial Sequence
  Description of Artificial Sequence: Synthetic oligonucleotide
  Antisense strand to SEQ ID NO: 2433340
augcucauucccaaaggac

SEQ ID NO: 2433342 - RNA, 19 nt, Artificial Sequence
  Description of Artificial Sequence: Synthetic oligonucleotide
  Sense strand starting at position 898 of SEQ ID NO: 1886889
uagugcucccugcagauga

SEQ ID NO: 2433343 - RNA, 19 nt, Artificial Sequence
  Description of Artificial Sequence: Synthetic oligonucleotide
  Antisense strand to SEQ ID NO: 2433342
ucaucugcagggagcacua

SEQ ID NO: 2433344 - RNA, 19 nt, Artificial Sequence
  Description of Artificial Sequence: Synthetic oligonucleotide
  Sense strand starting at position 900 of SEQ ID NO: 1886889
gugcucccugcagaugauu

SEQ ID NO: 2433345 - RNA, 19 nt, Artificial Sequence
  Description of Artificial Sequence: Synthetic oligonucleotide
  Antisense strand to SEQ ID NO: 2433344
aaucaucugcagggagcac

SEQ ID NO: 2433346 - RNA, 19 nt, Artificial Sequence
  Description of Artificial Sequence: Synthetic oligonucleotide
  Sense strand starting at position 909 of SEQ ID NO: 1886889
gcagaugauugggaccuaa

SEQ ID NO: 2433347 - RNA, 19 nt, Artificial Sequence
  Description of Artificial Sequence: Synthetic oligonucleotide
  Antisense strand to SEQ ID NO: 2433346
uuaggucccaaucaucugc

SEQ ID NO: 2433348 - RNA, 19 nt, Artificial Sequence
  Description of Artificial Sequence: Synthetic oligonucleotide
  Sense strand starting at position 978 of SEQ ID NO: 1886889
caguguuuccagcagugac

SEQ ID NO: 2433349 - RNA, 19 nt, Artificial Sequence
  Description of Artificial Sequence: Synthetic oligonucleotide
  Antisense strand to SEQ ID NO: 2433348
gucacugcuggaaacacug

SEQ ID NO: 2433350 - RNA, 19 nt, Artificial Sequence
  Description of Artificial Sequence: Synthetic oligonucleotide
  Sense strand starting at position 988 of SEQ ID NO: 1886889
agcagugacacuugggauu

SEQ ID NO: 2433351 - RNA, 19 nt, Artificial Sequence
  Description of Artificial Sequence: Synthetic oligonucleotide
  Antisense strand to SEQ ID NO: 2433350
aaucccaagugucacugcu

SEQ ID NO: 2433352 - RNA, 19 nt, Artificial Sequence
  Description of Artificial Sequence: Synthetic oligonucleotide
  Sense strand starting at position 991 of SEQ ID NO: 1886889
agugacacuugggauugaa

SEQ ID NO: 2433353 - RNA, 19 nt, Artificial Sequence
  Description of Artificial Sequence: Synthetic oligonucleotide
  Antisense strand to SEQ ID NO: 2433352
uucaaucccaagugucacu

SEQ ID NO: 2433354 - RNA, 19 nt, Artificial Sequence
  Description of Artificial Sequence: Synthetic oligonucleotide
  Sense strand starting at position 1233 of SEQ ID NO: 1886889
gcguuaucauccucaaggu

SEQ ID NO: 2433355 - RNA, 19 nt, Artificial Sequence
  Description of Artificial Sequence: Synthetic oligonucleotide
  Antisense strand to SEQ ID NO: 2433354
accuugaggaugauaacgc

SEQ ID NO: 2433356 - RNA, 19 nt, Artificial Sequence
  Description of Artificial Sequence: Synthetic oligonucleotide
  Sense strand starting at position 1697 of SEQ ID NO: 1886889
gccagaaagccacguagau

SEQ ID NO: 2433357 - RNA, 19 nt, Artificial Sequence
  Description of Artificial Sequence: Synthetic oligonucleotide
  Antisense strand to SEQ ID NO: 2433356
aucuacguggcuuucuggc

SEQ ID NO: 2433358 - RNA, 19 nt, Artificial Sequence
  Description of Artificial Sequence: Synthetic oligonucleotide
  Sense strand starting at position 1827 of SEQ ID NO: 1886889
ggaauuaccugauaaucua

SEQ ID NO: 2433359 - RNA, 19 nt, Artificial Sequence
  Description of Artificial Sequence: Synthetic oligonucleotide
  Antisense strand to SEQ ID NO: 2433358
uagauuaucagguaauucc

SEQ ID NO: 2433360 - RNA, 19 nt, Artificial Sequence
  Description of Artificial Sequence: Synthetic oligonucleotide
  Sense strand starting at position 1924 of SEQ ID NO: 1886889
caggguagauguccaugaa

SEQ ID NO: 2433361 - RNA, 19 nt, Artificial Sequence
  Description of Artificial Sequence: Synthetic oligonucleotide
  Antisense strand to SEQ ID NO: 2433360
uucauggacaucuacccug

SEQ ID NO: 2433362 - RNA, 19 nt, Artificial Sequence
  Description of Artificial Sequence: Synthetic oligonucleotide
  Sense strand starting at position 1927 of SEQ ID NO: 1886889
gguagauguccaugaaaua

SEQ ID NO: 2433363 - RNA, 19 nt, Artificial Sequence
  Description of Artificial Sequence: Synthetic oligonucleotide
  Antisense strand to SEQ ID NO: 2433362
uauuucauggacaucuacc

SEQ ID NO: 2433364 - RNA, 19 nt, Artificial Sequence
  Description of Artificial Sequence: Synthetic oligonucleotide
  Sense strand starting at position 1963 of SEQ ID NO: 1886889
gacugagauugagacuuga

SEQ ID NO: 2433365 - RNA, 19 nt, Artificial Sequence
  Description of Artificial Sequence: Synthetic oligonucleotide
  Antisense strand to SEQ ID NO: 2433364
ucaagucucaaucucaguc

SEQ ID NO: 2433366 - RNA, 19 nt, Artificial Sequence
  Description of Artificial Sequence: Synthetic oligonucleotide
  Sense strand starting at position 1982 of SEQ ID NO: 1886889
cuggaagcaucuuccaaau

SEQ ID NO: 2433367 - RNA, 19 nt, Artificial Sequence
  Description of Artificial Sequence: Synthetic oligonucleotide
  Antisense strand to SEQ ID NO: 2433366
auuuggaagaugcuuccag

SEQ ID NO: 2433368 - RNA, 19 nt, Artificial Sequence
  Description of Artificial Sequence: Synthetic oligonucleotide
  Sense strand starting at position 2363 of SEQ ID NO: 1886889
cugagccucccgugaaaug

SEQ ID NO: 2433369 - RNA, 19 nt, Artificial Sequence
  Description of Artificial Sequence: Synthetic oligonucleotide
  Antisense strand to SEQ ID NO: 2433368
cauuucacgggaggcucag

SEQ ID NO: 2433370 - RNA, 19 nt, Artificial Sequence
  Description of Artificial Sequence: Synthetic oligonucleotide
  Sense strand starting at position 2372 of SEQ ID NO: 1886889
ccgugaaaugcagaagauc

SEQ ID NO: 2433371 - RNA, 19 nt, Artificial Sequence
  Description of Artificial Sequence: Synthetic oligonucleotide
  Antisense strand to SEQ ID NO: 2433370
gaucuucugcauuucacgg

SEQ ID NO: 2433372 - RNA, 19 nt, Artificial Sequence
  Description of Artificial Sequence: Synthetic oligonucleotide
  Sense strand starting at position 2440 of SEQ ID NO: 1886889
agcugucucugugucauuu

SEQ ID NO: 2433373 - RNA, 19 nt, Artificial Sequence
  Description of Artificial Sequence: Synthetic oligonucleotide
  Antisense strand to SEQ ID NO: 2433372
aaaugacacagagacagcu

SEQ ID NO: 2433374 - RNA, 19 nt, Artificial Sequence
  Description of Artificial Sequence: Synthetic oligonucleotide
  Sense strand starting at position 2667 of SEQ ID NO: 1886889
ggcucugagggcuacuaau

SEQ ID NO: 2433375 - RNA, 19 nt, Artificial Sequence
  Description of Artificial Sequence: Synthetic oligonucleotide
  Antisense strand to SEQ ID NO: 2433374
auuaguagcccucagagcc

SEQ ID NO: 2433376 - RNA, 19 nt, Artificial Sequence
  Description of Artificial Sequence: Synthetic oligonucleotide
  Sense strand starting at position 2730 of SEQ ID NO: 1886889
gggcaacucugcucaugaa

SEQ ID NO: 2433377 - RNA, 19 nt, Artificial Sequence
  Description of Artificial Sequence: Synthetic oligonucleotide
  Antisense strand to SEQ ID NO: 2433376
uucaugagcagaguugccc

SEQ ID NO: 2433378 - RNA, 19 nt, Artificial Sequence
  Description of Artificial Sequence: Synthetic oligonucleotide
  Sense strand starting at position 2784 of SEQ ID NO: 1886889
ccaggucucacuggaguca

SEQ ID NO: 2433379 - RNA, 19 nt, Artificial Sequence
  Description of Artificial Sequence: Synthetic oligonucleotide
  Antisense strand to SEQ ID NO: 2433378
ugacuccagugagaccugg

SEQ ID NO: 2433380 - RNA, 19 nt, Artificial Sequence
  Description of Artificial Sequence: Synthetic oligonucleotide
  Sense strand starting at position 2805 of SEQ ID NO: 1886889
gaaagugaugguuguccua

SEQ ID NO: 2433381 - RNA, 19 nt, Artificial Sequence
  Description of Artificial Sequence: Synthetic oligonucleotide
  Antisense strand to SEQ ID NO: 2433380
uaggacaaccaucacuuuc

SEQ ID NO: 2433382 - RNA, 19 nt, Artificial Sequence
  Description of Artificial Sequence: Synthetic oligonucleotide
  Sense strand starting at position 2807 of SEQ ID NO: 1886889
aagugaugguuguccuauc

SEQ ID NO: 2433383 - RNA, 19 nt, Artificial Sequence
  Description of Artificial Sequence: Synthetic oligonucleotide
  Antisense strand to SEQ ID NO: 2433382
gauaggacaaccaucacuu

SEQ ID NO: 2433384 - RNA, 19 nt, Artificial Sequence
  Description of Artificial Sequence: Synthetic oligonucleotide
  Sense strand starting at position 2808 of SEQ ID NO: 1886889
agugaugguuguccuaucu

SEQ ID NO: 2433385 - RNA, 19 nt, Artificial Sequence
  Description of Artificial Sequence: Synthetic oligonucleotide
  Antisense strand to SEQ ID NO: 2433384
agauaggacaaccaucacu

SEQ ID NO: 2433386 - RNA, 19 nt, Artificial Sequence
  Description of Artificial Sequence: Synthetic oligonucleotide
  Sense strand starting at position 2840 of SEQ ID NO: 1886889
aaugguagcuaucucugaa

SEQ ID NO: 2433387 - RNA, 19 nt, Artificial Sequence
  Description of Artificial Sequence: Synthetic oligonucleotide
  Antisense strand to SEQ ID NO: 2433386
uucagagauagcuaccauu

SEQ ID NO: 2433388 - RNA, 19 nt, Artificial Sequence
  Description of Artificial Sequence: Synthetic oligonucleotide
  Sense strand starting at position 2843 of SEQ ID NO: 1886889
gguagcuaucucugaagau

SEQ ID NO: 2433389 - RNA, 19 nt, Artificial Sequence
  Description of Artificial Sequence: Synthetic oligonucleotide
  Antisense strand to SEQ ID NO: 2433388
aucuucagagauagcuacc

SEQ ID NO: 2433390 - RNA, 19 nt, Artificial Sequence
  Description of Artificial Sequence: Synthetic oligonucleotide
  Sense strand starting at position 3311 of SEQ ID NO: 1886889
ggugguugaaucgguggau

SEQ ID NO: 2433391 - RNA, 19 nt, Artificial Sequence
  Description of Artificial Sequence: Synthetic oligonucleotide
  Antisense strand to SEQ ID NO: 2433390
auccaccgauucaaccacc

SEQ ID NO: 2433392 - RNA, 19 nt, Artificial Sequence
  Description of Artificial Sequence: Synthetic oligonucleotide
  Sense strand starting at position 3313 of SEQ ID NO: 1886889
ugguugaaucgguggauga

SEQ ID NO: 2433393 - RNA, 19 nt, Artificial Sequence
  Description of Artificial Sequence: Synthetic oligonucleotide
  Antisense strand to SEQ ID NO: 2433392
ucauccaccgauucaacca

SEQ ID NO: 2433394 - RNA, 19 nt, Artificial Sequence
  Description of Artificial Sequence: Synthetic oligonucleotide
  Sense strand starting at position 3314 of SEQ ID NO: 1886889
gguugaaucgguggaugac

SEQ ID NO: 2433395 - RNA, 19 nt, Artificial Sequence
  Description of Artificial Sequence: Synthetic oligonucleotide
  Antisense strand to SEQ ID NO: 2433394
gucauccaccgauucaacc

SEQ ID NO: 2433396 - RNA, 19 nt, Artificial Sequence
  Description of Artificial Sequence: Synthetic oligonucleotide
  Sense strand starting at position 3315 of SEQ ID NO: 1886889
guugaaucgguggaugacu

SEQ ID NO: 2433397 - RNA, 19 nt, Artificial Sequence
  Description of Artificial Sequence: Synthetic oligonucleotide
  Antisense strand to SEQ ID NO: 2433396
agucauccaccgauucaac

SEQ ID NO: 2433398 - RNA, 19 nt, Artificial Sequence
  Description of Artificial Sequence: Synthetic oligonucleotide
  Sense strand starting at position 3323 of SEQ ID NO: 1886889
gguggaugacuaggugaaa

SEQ ID NO: 2433399 - RNA, 19 nt, Artificial Sequence
  Description of Artificial Sequence: Synthetic oligonucleotide
  Antisense strand to SEQ ID NO: 2433398
uuucaccuagucauccacc

SEQ ID NO: 2433400 - RNA, 19 nt, Artificial Sequence
  Description of Artificial Sequence: Synthetic oligonucleotide
  Sense strand starting at position 3845 of SEQ ID NO: 1886889
ugggucuugcuaugaauaa

SEQ ID NO: 2433401 - RNA, 19 nt, Artificial Sequence
  Description of Artificial Sequence: Synthetic oligonucleotide
  Antisense strand to SEQ ID NO: 2433400
uuauucauagcaagaccca

SEQ ID NO: 2433402 - RNA, 19 nt, Artificial Sequence
  Description of Artificial Sequence: Synthetic oligonucleotide
  Sense strand starting at position 4 of SEQ ID NO: 1886890
gcuugagcuuuccaguguu

SEQ ID NO: 2433403 - RNA, 19 nt, Artificial Sequence
  Description of Artificial Sequence: Synthetic oligonucleotide
  Antisense strand to SEQ ID NO: 2433402
aacacuggaaagcucaagc

SEQ ID NO: 2433404 - RNA, 19 nt, Artificial Sequence
  Description of Artificial Sequence: Synthetic oligonucleotide
  Sense strand starting at position 7 of SEQ ID NO: 1886890
ugagcuuuccaguguugga

SEQ ID NO: 2433405 - RNA, 19 nt, Artificial Sequence
  Description of Artificial Sequence: Synthetic oligonucleotide
  Antisense strand to SEQ ID NO: 2433404
uccaacacuggaaagcuca

SEQ ID NO: 2433406 - RNA, 19 nt, Artificial Sequence
  Description of Artificial Sequence: Synthetic oligonucleotide
  Sense strand starting at position 10 of SEQ ID NO: 1886890
gcuuuccaguguuggacua

SEQ ID NO: 2433407 - RNA, 19 nt, Artificial Sequence
  Description of Artificial Sequence: Synthetic oligonucleotide
  Antisense strand to SEQ ID NO: 2433406
uaguccaacacuggaaagc

SEQ ID NO: 2433408 - RNA, 19 nt, Artificial Sequence
  Description of Artificial Sequence: Synthetic oligonucleotide
  Sense strand starting at position 30 of SEQ ID NO: 1886890
acuugugugcugugguuga

SEQ ID NO: 2433409 - RNA, 19 nt, Artificial Sequence
  Description of Artificial Sequence: Synthetic oligonucleotide
  Antisense strand to SEQ ID NO: 2433408
ucaaccacagcacacaagu

SEQ ID NO: 2433410 - RNA, 19 nt, Artificial Sequence
  Description of Artificial Sequence: Synthetic oligonucleotide
  Sense strand starting at position 32 of SEQ ID NO: 1886890
uugugugcugugguugaau

SEQ ID NO: 2433411 - RNA, 19 nt, Artificial Sequence
  Description of Artificial Sequence: Synthetic oligonucleotide
  Antisense strand to SEQ ID NO: 2433410
auucaaccacagcacacaa

SEQ ID NO: 2433412 - RNA, 19 nt, Artificial Sequence
  Description of Artificial Sequence: Synthetic oligonucleotide
  Sense strand starting at position 50 of SEQ ID NO: 1886890
uugggagguucucuggaga

SEQ ID NO: 2433413 - RNA, 19 nt, Artificial Sequence
  Description of Artificial Sequence: Synthetic oligonucleotide
  Antisense strand to SEQ ID NO: 2433412
ucuccagagaaccucccaa

SEQ ID NO: 2433414 - RNA, 19 nt, Artificial Sequence
  Description of Artificial Sequence: Synthetic oligonucleotide
  Sense strand starting at position 395 of SEQ ID NO: 1886890
agcagugaucccuagagua

SEQ ID NO: 2433415 - RNA, 19 nt, Artificial Sequence
  Description of Artificial Sequence: Synthetic oligonucleotide
  Antisense strand to SEQ ID NO: 2433414
uacucuagggaucacugcu

SEQ ID NO: 2433416 - RNA, 19 nt, Artificial Sequence
  Description of Artificial Sequence: Synthetic oligonucleotide
  Sense strand starting at position 1273 of SEQ ID NO: 1886890
gaaugagucuaacagaagg

SEQ ID NO: 2433417 - RNA, 19 nt, Artificial Sequence
  Description of Artificial Sequence: Synthetic oligonucleotide
  Antisense strand to SEQ ID NO: 2433416
ccuucuguuagacucauuc

SEQ ID NO: 2433418 - RNA, 19 nt, Artificial Sequence
  Description of Artificial Sequence: Synthetic oligonucleotide
  Sense strand starting at position 1757 of SEQ ID NO: 1886890
cgacccucuccggaaagaa

SEQ ID NO: 2433419 - RNA, 19 nt, Artificial Sequence
  Description of Artificial Sequence: Synthetic oligonucleotide
  Antisense strand to SEQ ID NO: 2433418
uucuuuccggagagggucg

SEQ ID NO: 2433420 - RNA, 19 nt, Artificial Sequence
  Description of Artificial Sequence: Synthetic oligonucleotide
  Sense strand starting at position 2023 of SEQ ID NO: 1886890
augaguccgcgcgaggauu

SEQ ID NO: 2433421 - RNA, 19 nt, Artificial Sequence
  Description of Artificial Sequence: Synthetic oligonucleotide
  Antisense strand to SEQ ID NO: 2433420
aauccucgcgcggacucau

SEQ ID NO: 2433422 - RNA, 19 nt, Artificial Sequence
  Description of Artificial Sequence: Synthetic oligonucleotide
  Sense strand starting at position 2076 of SEQ ID NO: 1886890
agagacaagcgcuaggauu

SEQ ID NO: 2433423 - RNA, 19 nt, Artificial Sequence
  Description of Artificial Sequence: Synthetic oligonucleotide
  Antisense strand to SEQ ID NO: 2433422
aauccuagcgcuugucucu

SEQ ID NO: 2433424 - RNA, 19 nt, Artificial Sequence
  Description of Artificial Sequence: Synthetic oligonucleotide
  Sense strand starting at position 2124 of SEQ ID NO: 1886890
agagaugagcgcugggauu

SEQ ID NO: 2433425 - RNA, 19 nt, Artificial Sequence
  Description of Artificial Sequence: Synthetic oligonucleotide
  Antisense strand to SEQ ID NO: 2433424
aaucccagcgcucaucucu

SEQ ID NO: 2433426 - RNA, 19 nt, Artificial Sequence
  Description of Artificial Sequence: Synthetic oligonucleotide
  Sense strand starting at position 2277 of SEQ ID NO: 1886890
uggaaaugcugauggaaau

SEQ ID NO: 2433427 - RNA, 19 nt, Artificial Sequence
  Description of Artificial Sequence: Synthetic oligonucleotide
  Antisense strand to SEQ ID NO: 2433426
auuuccaucagcauuucca

SEQ ID NO: 2433428 - RNA, 19 nt, Artificial Sequence
  Description of Artificial Sequence: Synthetic oligonucleotide
  Sense strand starting at position 2365 of SEQ ID NO: 1886890
agcccagaauguuaagauu

SEQ ID NO: 2433429 - RNA, 19 nt, Artificial Sequence
  Description of Artificial Sequence: Synthetic oligonucleotide
  Antisense strand to SEQ ID NO: 2433428
aaucuuaacauucugggcu

SEQ ID NO: 2433430 - RNA, 19 nt, Artificial Sequence
  Description of Artificial Sequence: Synthetic oligonucleotide
  Sense strand starting at position 2371 of SEQ ID NO: 1886890
gaauguuaagauugcuuuc

SEQ ID NO: 2433431 - RNA, 19 nt, Artificial Sequence
  Description of Artificial Sequence: Synthetic oligonucleotide
  Antisense strand to SEQ ID NO: 2433430
gaaagcaaucuuaacauuc

SEQ ID NO: 2433432 - RNA, 19 nt, Artificial Sequence
  Description of Artificial Sequence: Synthetic oligonucleotide
  Sense strand starting at position 2704 of SEQ ID NO: 1886890
cggccuccguaauugcaaa

SEQ ID NO: 2433433 - RNA, 19 nt, Artificial Sequence
  Description of Artificial Sequence: Synthetic oligonucleotide
  Antisense strand to SEQ ID NO: 2433432
uuugcaauuacggaggccg

SEQ ID NO: 2433434 - RNA, 19 nt, Artificial Sequence
  Description of Artificial Sequence: Synthetic oligonucleotide
  Sense strand starting at position 2759 of SEQ ID NO: 1886890
acgucuauauccuacugga

SEQ ID NO: 2433435 - RNA, 19 nt, Artificial Sequence
  Description of Artificial Sequence: Synthetic oligonucleotide
  Antisense strand to SEQ ID NO: 2433434
uccaguaggauauagacgu

SEQ ID NO: 2433436 - RNA, 19 nt, Artificial Sequence
  Description of Artificial Sequence: Synthetic oligonucleotide
  Sense strand starting at position 2775 of SEQ ID NO: 1886890
ggauccgucucucuggaga

SEQ ID NO: 2433437 - RNA, 19 nt, Artificial Sequence
  Description of Artificial Sequence: Synthetic oligonucleotide
  Antisense strand to SEQ ID NO: 2433436
ucuccagagagacggaucc

SEQ ID NO: 2433438 - RNA, 19 nt, Artificial Sequence
  Description of Artificial Sequence: Synthetic oligonucleotide
  Sense strand starting at position 2943 of SEQ ID NO: 1886890
aguuaauauuaccuacagu

SEQ ID NO: 2433439 - RNA, 19 nt, Artificial Sequence
  Description of Artificial Sequence: Synthetic oligonucleotide
  Antisense strand to SEQ ID NO: 2433438
acuguagguaauauuaacu

SEQ ID NO: 2433440 - RNA, 19 nt, Artificial Sequence
  Description of Artificial Sequence: Synthetic oligonucleotide
  Sense strand starting at position 3001 of SEQ ID NO: 1886890
uaggaaaugucgcuucccu

SEQ ID NO: 2433441 - RNA, 19 nt, Artificial Sequence
  Description of Artificial Sequence: Synthetic oligonucleotide
  Antisense strand to SEQ ID NO: 2433440
agggaagcgacauuuccua

SEQ ID NO: 2433442 - RNA, 19 nt, Artificial Sequence
  Description of Artificial Sequence: Synthetic oligonucleotide
  Sense strand starting at position 3171 of SEQ ID NO: 1886890
guguguauaccgcauuuca

SEQ ID NO: 2433443 - RNA, 19 nt, Artificial Sequence
  Description of Artificial Sequence: Synthetic oligonucleotide
  Antisense strand to SEQ ID NO: 2433442
ugaaaugcgguauacacac

SEQ ID NO: 2433444 - RNA, 19 nt, Artificial Sequence
  Description of Artificial Sequence: Synthetic oligonucleotide
  Sense strand starting at position 3398 of SEQ ID NO: 1886890
cgcagaugguaauagauaa

SEQ ID NO: 2433445 - RNA, 19 nt, Artificial Sequence
  Description of Artificial Sequence: Synthetic oligonucleotide
  Antisense strand to SEQ ID NO: 2433444
uuaucuauuaccaucugcg

SEQ ID NO: 2433446 - RNA, 19 nt, Artificial Sequence
  Description of Artificial Sequence: Synthetic oligonucleotide
  Sense strand starting at position 3432 of SEQ ID NO: 1886890
agagaagagugagagaauu

SEQ ID NO: 2433447 - RNA, 19 nt, Artificial Sequence
  Description of Artificial Sequence: Synthetic oligonucleotide
  Antisense strand to SEQ ID NO: 2433446
aauucucucacucuucucu

SEQ ID NO: 2433448 - RNA, 19 nt, Artificial Sequence
  Description of Artificial Sequence: Synthetic oligonucleotide
  Sense strand starting at position 3547 of SEQ ID NO: 1886890
ccuugaccguuuggacauu

SEQ ID NO: 2433449 - RNA, 19 nt, Artificial Sequence
  Description of Artificial Sequence: Synthetic oligonucleotide
  Antisense strand to SEQ ID NO: 2433448
aauguccaaacggucaagg

SEQ ID NO: 2433450 - RNA, 19 nt, Artificial Sequence
  Description of Artificial Sequence: Synthetic oligonucleotide
  Sense strand starting at position 3601 of SEQ ID NO: 1886890
gaacuaugccaccguuaag

SEQ ID NO: 2433451 - RNA, 19 nt, Artificial Sequence
  Description of Artificial Sequence: Synthetic oligonucleotide
  Antisense strand to SEQ ID NO: 2433450
cuuaacgguggcauaguuc

SEQ ID NO: 2433452 - RNA, 19 nt, Artificial Sequence
  Description of Artificial Sequence: Synthetic oligonucleotide
  Sense strand starting at position 3604 of SEQ ID NO: 1886890
cuaugccaccguuaaguuu

SEQ ID NO: 2433453 - RNA, 19 nt, Artificial Sequence
  Description of Artificial Sequence: Synthetic oligonucleotide
  Antisense strand to SEQ ID NO: 2433452
aaacuuaacgguggcauag

SEQ ID NO: 2433454 - RNA, 19 nt, Artificial Sequence
  Description of Artificial Sequence: Synthetic oligonucleotide
  Sense strand starting at position 33 of SEQ ID NO: 1886891
ugguguuuggcugacccaa

SEQ ID NO: 2433455 - RNA, 19 nt, Artificial Sequence
  Description of Artificial Sequence: Synthetic oligonucleotide
  Antisense strand to SEQ ID NO: 2433454
uugggucagccaaacacca

SEQ ID NO: 2433456 - RNA, 19 nt, Artificial Sequence
  Description of Artificial Sequence: Synthetic oligonucleotide
  Sense strand starting at position 71 of SEQ ID NO: 1886891
gcccauguugcugacagaa

SEQ ID NO: 2433457 - RNA, 19 nt, Artificial Sequence
  Description of Artificial Sequence: Synthetic oligonucleotide
  Antisense strand to SEQ ID NO: 2433456
uucugucagcaacaugggc

SEQ ID NO: 2433458 - RNA, 19 nt, Artificial Sequence
  Description of Artificial Sequence: Synthetic oligonucleotide
  Sense strand starting at position 145 of SEQ ID NO: 1886891
gcaaguucugauugaccac

SEQ ID NO: 2433459 - RNA, 19 nt, Artificial Sequence
  Description of Artificial Sequence: Synthetic oligonucleotide
  Antisense strand to SEQ ID NO: 2433458
guggucaaucagaacuugc

SEQ ID NO: 2433460 - RNA, 19 nt, Artificial Sequence
  Description of Artificial Sequence: Synthetic oligonucleotide
  Sense strand starting at position 333 of SEQ ID NO: 1886891
uggagugucugguuaccau

SEQ ID NO: 2433461 - RNA, 19 nt, Artificial Sequence
  Description of Artificial Sequence: Synthetic oligonucleotide
  Antisense strand to SEQ ID NO: 2433460
augguaaccagacacucca

SEQ ID NO: 2433462 - RNA, 19 nt, Artificial Sequence
  Description of Artificial Sequence: Synthetic oligonucleotide
  Sense strand starting at position 349 of SEQ ID NO: 1886891
cauagugugacauggaaga

SEQ ID NO: 2433463 - RNA, 19 nt, Artificial Sequence
  Description of Artificial Sequence: Synthetic oligonucleotide
  Antisense strand to SEQ ID NO: 2433462
ucuuccaugucacacuaug

SEQ ID NO: 2433464 - RNA, 19 nt, Artificial Sequence
  Description of Artificial Sequence: Synthetic oligonucleotide
  Sense strand starting at position 491 of SEQ ID NO: 1886891
ggugguauacgggaagcua

SEQ ID NO: 2433465 - RNA, 19 nt, Artificial Sequence
  Description of Artificial Sequence: Synthetic oligonucleotide
  Antisense strand to SEQ ID NO: 2433464
uagcuucccguauaccacc

SEQ ID NO: 2433466 - RNA, 19 nt, Artificial Sequence
  Description of Artificial Sequence: Synthetic oligonucleotide
  Sense strand starting at position 891 of SEQ ID NO: 1886891
gggacugucgucagcugau

SEQ ID NO: 2433467 - RNA, 19 nt, Artificial Sequence
  Description of Artificial Sequence: Synthetic oligonucleotide
  Antisense strand to SEQ ID NO: 2433466
aucagcugacgacaguccc

SEQ ID NO: 2433468 - RNA, 19 nt, Artificial Sequence
  Description of Artificial Sequence: Synthetic oligonucleotide
  Sense strand starting at position 974 of SEQ ID NO: 1886891
ugcuauuguccauggagac

SEQ ID NO: 2433469 - RNA, 19 nt, Artificial Sequence
  Description of Artificial Sequence: Synthetic oligonucleotide
  Antisense strand to SEQ ID NO: 2433468
gucuccauggacaauagca

SEQ ID NO: 2433470 - RNA, 19 nt, Artificial Sequence
  Description of Artificial Sequence: Synthetic oligonucleotide
  Sense strand starting at position 975 of SEQ ID NO: 1886891
gcuauuguccauggagaca

SEQ ID NO: 2433471 - RNA, 19 nt, Artificial Sequence
  Description of Artificial Sequence: Synthetic oligonucleotide
  Antisense strand to SEQ ID NO: 2433470
ugucuccauggacaauagc

SEQ ID NO: 2433472 - RNA, 19 nt, Artificial Sequence
  Description of Artificial Sequence: Synthetic oligonucleotide
  Sense strand starting at position 1082 of SEQ ID NO: 1886891
gcaugaaucgacuaugcag

SEQ ID NO: 2433473 - RNA, 19 nt, Artificial Sequence
  Description of Artificial Sequence: Synthetic oligonucleotide
  Antisense strand to SEQ ID NO: 2433472
cugcauagucgauucaugc

SEQ ID NO: 2433474 - RNA, 19 nt, Artificial Sequence
  Description of Artificial Sequence: Synthetic oligonucleotide
  Sense strand starting at position 1151 of SEQ ID NO: 1886891
ugcccuuauccuugaagua

SEQ ID NO: 2433475 - RNA, 19 nt, Artificial Sequence
  Description of Artificial Sequence: Synthetic oligonucleotide
  Antisense strand to SEQ ID NO: 2433474
uacuucaaggauaagggca

SEQ ID NO: 2433476 - RNA, 19 nt, Artificial Sequence
  Description of Artificial Sequence: Synthetic oligonucleotide
  Sense strand starting at position 1152 of SEQ ID NO: 1886891
gcccuuauccuugaaguag

SEQ ID NO: 2433477 - RNA, 19 nt, Artificial Sequence
  Description of Artificial Sequence: Synthetic oligonucleotide
  Antisense strand to SEQ ID NO: 2433476
cuacuucaaggauaagggc

SEQ ID NO: 2433478 - RNA, 19 nt, Artificial Sequence
  Description of Artificial Sequence: Synthetic oligonucleotide
  Sense strand starting at position 1191 of SEQ ID NO: 1886891
cucguagaucugggacaga

SEQ ID NO: 2433479 - RNA, 19 nt, Artificial Sequence
  Description of Artificial Sequence: Synthetic oligonucleotide
  Antisense strand to SEQ ID NO: 2433478
ucugucccagaucuacgag

SEQ ID NO: 2433480 - RNA, 19 nt, Artificial Sequence
  Description of Artificial Sequence: Synthetic oligonucleotide
  Sense strand starting at position 1696 of SEQ ID NO: 1886891
uccacuucgagcggagaaa

SEQ ID NO: 2433481 - RNA, 19 nt, Artificial Sequence
  Description of Artificial Sequence: Synthetic oligonucleotide
  Antisense strand to SEQ ID NO: 2433480
uuucuccgcucgaagugga

SEQ ID NO: 2433482 - RNA, 19 nt, Artificial Sequence
  Description of Artificial Sequence: Synthetic oligonucleotide
  Sense strand starting at position 2218 of SEQ ID NO: 1886891
accacauccggccaauuau

SEQ ID NO: 2433483 - RNA, 19 nt, Artificial Sequence
  Description of Artificial Sequence: Synthetic oligonucleotide
  Antisense strand to SEQ ID NO: 2433482
auaauuggccggauguggu

SEQ ID NO: 2433484 - RNA, 19 nt, Artificial Sequence
  Description of Artificial Sequence: Synthetic oligonucleotide
  Sense strand starting at position 2247 of SEQ ID NO: 1886891
auuagcuaauagcuugaaa

SEQ ID NO: 2433485 - RNA, 19 nt, Artificial Sequence
  Description of Artificial Sequence: Synthetic oligonucleotide
  Antisense strand to SEQ ID NO: 2433484
uuucaagcuauuagcuaau

SEQ ID NO: 2433486 - RNA, 19 nt, Artificial Sequence
  Description of Artificial Sequence: Synthetic oligonucleotide
  Sense strand starting at position 2289 of SEQ ID NO: 1886891
uaguaacuauugguagaua

SEQ ID NO: 2433487 - RNA, 19 nt, Artificial Sequence
  Description of Artificial Sequence: Synthetic oligonucleotide
  Antisense strand to SEQ ID NO: 2433486
uaucuaccaauaguuacua

SEQ ID NO: 2433488 - RNA, 19 nt, Artificial Sequence
  Description of Artificial Sequence: Synthetic oligonucleotide
  Sense strand starting at position 2319 of SEQ ID NO: 1886891
aaugaaacaucuuuagggu

SEQ ID NO: 2433489 - RNA, 19 nt, Artificial Sequence
  Description of Artificial Sequence: Synthetic oligonucleotide
  Antisense strand to SEQ ID NO: 2433488
acccuaaagauguuucauu

SEQ ID NO: 2433490 - RNA, 19 nt, Artificial Sequence
  Description of Artificial Sequence: Synthetic oligonucleotide
  Sense strand starting at position 2328 of SEQ ID NO: 1886891
ucuuuagggucuuuaacaa

SEQ ID NO: 2433491 - RNA, 19 nt, Artificial Sequence
  Description of Artificial Sequence: Synthetic oligonucleotide
  Antisense strand to SEQ ID NO: 2433490
uuguuaaagacccuaaaga

SEQ ID NO: 2433492 - RNA, 19 nt, Artificial Sequence
  Description of Artificial Sequence: Synthetic oligonucleotide
  Sense strand starting at position 2415 of SEQ ID NO: 1886891
gaagaagaguaguugugaa

SEQ ID NO: 2433493 - RNA, 19 nt, Artificial Sequence
  Description of Artificial Sequence: Synthetic oligonucleotide
  Antisense strand to SEQ ID NO: 2433492
uucacaacuacucuucuuc

SEQ ID NO: 2433494 - RNA, 19 nt, Artificial Sequence
  Description of Artificial Sequence: Synthetic oligonucleotide
  Sense strand starting at position 2423 of SEQ ID NO: 1886891
guaguugugaaaugagguu

SEQ ID NO: 2433495 - RNA, 19 nt, Artificial Sequence
  Description of Artificial Sequence: Synthetic oligonucleotide
  Antisense strand to SEQ ID NO: 2433494
aaccucauuucacaacuac

SEQ ID NO: 2433496 - RNA, 19 nt, Artificial Sequence
  Description of Artificial Sequence: Synthetic oligonucleotide
  Sense strand starting at position 2429 of SEQ ID NO: 1886891
gugaaaugagguugggaua

SEQ ID NO: 2433497 - RNA, 19 nt, Artificial Sequence
  Description of Artificial Sequence: Synthetic oligonucleotide
  Antisense strand to SEQ ID NO: 2433496
uaucccaaccucauuucac

SEQ ID NO: 2433498 - RNA, 19 nt, Artificial Sequence
  Description of Artificial Sequence: Synthetic oligonucleotide
  Sense strand starting at position 2590 of SEQ ID NO: 1886891
caauguugagaaugaagua

SEQ ID NO: 2433499 - RNA, 19 nt, Artificial Sequence
  Description of Artificial Sequence: Synthetic oligonucleotide
  Antisense strand to SEQ ID NO: 2433498
uacuucauucucaacauug

SEQ ID NO: 2433500 - RNA, 19 nt, Artificial Sequence
  Description of Artificial Sequence: Synthetic oligonucleotide
  Sense strand starting at position 2840 of SEQ ID NO: 1886891
augggaaauuuagacuuau

SEQ ID NO: 2433501 - RNA, 19 nt, Artificial Sequence
  Description of Artificial Sequence: Synthetic oligonucleotide
  Antisense strand to SEQ ID NO: 2433500
auaagucuaaauuucccau

SEQ ID NO: 2433502 - RNA, 19 nt, Artificial Sequence
  Description of Artificial Sequence: Synthetic oligonucleotide
  Sense strand starting at position 2878 of SEQ ID NO: 1886891
acauguuguauugaaguau

SEQ ID NO: 2433503 - RNA, 19 nt, Artificial Sequence
  Description of Artificial Sequence: Synthetic oligonucleotide
  Antisense strand to SEQ ID NO: 2433502
auacuucaauacaacaugu

SEQ ID NO: 2433504 - RNA, 19 nt, Artificial Sequence
  Description of Artificial Sequence: Synthetic oligonucleotide
  Sense strand starting at position 2887 of SEQ ID NO: 1886891
auugaaguaucguugacau

SEQ ID NO: 2433505 - RNA, 19 nt, Artificial Sequence
  Description of Artificial Sequence: Synthetic oligonucleotide
  Antisense strand to SEQ ID NO: 2433504
augucaacgauacuucaau

SEQ ID NO: 2433506 - RNA, 19 nt, Artificial Sequence
  Description of Artificial Sequence: Synthetic oligonucleotide
  Sense strand starting at position 2889 of SEQ ID NO: 1886891
ugaaguaucguugacauaa

SEQ ID NO: 2433507 - RNA, 19 nt, Artificial Sequence
  Description of Artificial Sequence: Synthetic oligonucleotide
  Antisense strand to SEQ ID NO: 2433506
uuaugucaacgauacuuca

SEQ ID NO: 2433508 - RNA, 19 nt, Artificial Sequence
  Description of Artificial Sequence: Synthetic oligonucleotide
  Sense strand starting at position 3013 of SEQ ID NO: 1886891
ugggaaugaugagacuaau

SEQ ID NO: 2433509 - RNA, 19 nt, Artificial Sequence
  Description of Artificial Sequence: Synthetic oligonucleotide
  Antisense strand to SEQ ID NO: 2433508
auuagucucaucauuccca

SEQ ID NO: 2433510 - RNA, 19 nt, Artificial Sequence
  Description of Artificial Sequence: Synthetic oligonucleotide
  Sense strand starting at position 3057 of SEQ ID NO: 1886891
aguugaucaguuggccaaa

SEQ ID NO: 2433511 - RNA, 19 nt, Artificial Sequence
  Description of Artificial Sequence: Synthetic oligonucleotide
  Antisense strand to SEQ ID NO: 2433510
uuuggccaacugaucaacu

SEQ ID NO: 2433512 - RNA, 19 nt, Artificial Sequence
  Description of Artificial Sequence: Synthetic oligonucleotide
  Sense strand starting at position 3058 of SEQ ID NO: 1886891
guugaucaguuggccaaau

SEQ ID NO: 2433513 - RNA, 19 nt, Artificial Sequence
  Description of Artificial Sequence: Synthetic oligonucleotide
  Antisense strand to SEQ ID NO: 2433512
auuuggccaacugaucaac

SEQ ID NO: 2433514 - RNA, 19 nt, Artificial Sequence
  Description of Artificial Sequence: Synthetic oligonucleotide
  Sense strand starting at position 3060 of SEQ ID NO: 1886891
ugaucaguuggccaaauca

SEQ ID NO: 2433515 - RNA, 19 nt, Artificial Sequence
  Description of Artificial Sequence: Synthetic oligonucleotide
  Antisense strand to SEQ ID NO: 2433514
ugauuuggccaacugauca

SEQ ID NO: 2433516 - RNA, 19 nt, Artificial Sequence
  Description of Artificial Sequence: Synthetic oligonucleotide
  Sense strand starting at position 3155 of SEQ ID NO: 1886891
gagauuauugcuggacgca

SEQ ID NO: 2433517 - RNA, 19 nt, Artificial Sequence
  Description of Artificial Sequence: Synthetic oligonucleotide
  Antisense strand to SEQ ID NO: 2433516
ugcguccagcaauaaucuc

SEQ ID NO: 2433518 - RNA, 19 nt, Artificial Sequence
  Description of Artificial Sequence: Synthetic oligonucleotide
  Sense strand starting at position 3491 of SEQ ID NO: 1886891
uaggguuucucucuugaaa

SEQ ID NO: 2433519 - RNA, 19 nt, Artificial Sequence
  Description of Artificial Sequence: Synthetic oligonucleotide
  Antisense strand to SEQ ID NO: 2433518
uuucaagagagaaacccua

SEQ ID NO: 2433520 - RNA, 19 nt, Artificial Sequence
  Description of Artificial Sequence: Synthetic oligonucleotide
  Sense strand starting at position 3683 of SEQ ID NO: 1886891
ucccacaaagcguaauuau

SEQ ID NO: 2433521 - RNA, 19 nt, Artificial Sequence
  Description of Artificial Sequence: Synthetic oligonucleotide
  Antisense strand to SEQ ID NO: 2433520
auaauuacgcuuuguggga

SEQ ID NO: 2433522 - RNA, 19 nt, Artificial Sequence
  Description of Artificial Sequence: Synthetic oligonucleotide
  Sense strand starting at position 3693 of SEQ ID NO: 1886891
cguaauuauuuacugucua

SEQ ID NO: 2433523 - RNA, 19 nt, Artificial Sequence
  Description of Artificial Sequence: Synthetic oligonucleotide
  Antisense strand to SEQ ID NO: 2433522
uagacaguaaauaauuacg

SEQ ID NO: 2433524 - RNA, 19 nt, Artificial Sequence
  Description of Artificial Sequence: Synthetic oligonucleotide
  Sense strand starting at position 3701 of SEQ ID NO: 1886891
uuuacugucuagccauuua

SEQ ID NO: 2433525 - RNA, 19 nt, Artificial Sequence
  Description of Artificial Sequence: Synthetic oligonucleotide
  Antisense strand to SEQ ID NO: 2433524
uaaauggcuagacaguaaa

SEQ ID NO: 2433526 - RNA, 19 nt, Artificial Sequence
  Description of Artificial Sequence: Synthetic oligonucleotide
  Sense strand starting at position 3806 of SEQ ID NO: 1886891
ugcuuaacucagugauauu

SEQ ID NO: 2433527 - RNA, 19 nt, Artificial Sequence
  Description of Artificial Sequence: Synthetic oligonucleotide
  Antisense strand to SEQ ID NO: 2433526
aauaucacugaguuaagca

SEQ ID NO: 2433528 - RNA, 19 nt, Artificial Sequence
  Description of Artificial Sequence: Synthetic oligonucleotide
  Sense strand starting at position 3835 of SEQ ID NO: 1886891
ccauguaaguacucaaguu

SEQ ID NO: 2433529 - RNA, 19 nt, Artificial Sequence
  Description of Artificial Sequence: Synthetic oligonucleotide
  Antisense strand to SEQ ID NO: 2433528
aacuugaguacuuacaugg

SEQ ID NO: 2433530 - RNA, 19 nt, Artificial Sequence
  Description of Artificial Sequence: Synthetic oligonucleotide
  Sense strand starting at position 3850 of SEQ ID NO: 1886891
aguuuaugacuccagguau

SEQ ID NO: 2433531 - RNA, 19 nt, Artificial Sequence
  Description of Artificial Sequence: Synthetic oligonucleotide
  Antisense strand to SEQ ID NO: 2433530
auaccuggagucauaaacu

SEQ ID NO: 2433532 - RNA, 19 nt, Artificial Sequence
  Description of Artificial Sequence: Synthetic oligonucleotide
  Sense strand starting at position 3928 of SEQ ID NO: 1886891
aaagaaggcuaagaagaua

SEQ ID NO: 2433533 - RNA, 19 nt, Artificial Sequence
  Description of Artificial Sequence: Synthetic oligonucleotide
  Antisense strand to SEQ ID NO: 2433532
uaucuucuuagccuucuuu

SEQ ID NO: 2433534 - RNA, 19 nt, Artificial Sequence
  Description of Artificial Sequence: Synthetic oligonucleotide
  Sense strand starting at position 447 of SEQ ID NO: 1886892
auuaauagugucugaagga

SEQ ID NO: 2433535 - RNA, 19 nt, Artificial Sequence
  Description of Artificial Sequence: Synthetic oligonucleotide
  Antisense strand to SEQ ID NO: 2433534
uccuucagacacuauuaau

SEQ ID NO: 2433536 - RNA, 19 nt, Artificial Sequence
  Description of Artificial Sequence: Synthetic oligonucleotide
  Sense strand starting at position 460 of SEQ ID NO: 1886892
gaaggagauugugaucuuu

SEQ ID NO: 2433537 - RNA, 19 nt, Artificial Sequence
  Description of Artificial Sequence: Synthetic oligonucleotide
  Antisense strand to SEQ ID NO: 2433536
aaagaucacaaucuccuuc

SEQ ID NO: 2433538 - RNA, 19 nt, Artificial Sequence
  Description of Artificial Sequence: Synthetic oligonucleotide
  Sense strand starting at position 563 of SEQ ID NO: 1886892
ugaacagaucacugugguu

SEQ ID NO: 2433539 - RNA, 19 nt, Artificial Sequence
  Description of Artificial Sequence: Synthetic oligonucleotide
  Antisense strand to SEQ ID NO: 2433538
aaccacagugaucuguuca

SEQ ID NO: 2433540 - RNA, 19 nt, Artificial Sequence
  Description of Artificial Sequence: Synthetic oligonucleotide
  Sense strand starting at position 575 of SEQ ID NO: 1886892
ugugguucccuuuacauaa

SEQ ID NO: 2433541 - RNA, 19 nt, Artificial Sequence
  Description of Artificial Sequence: Synthetic oligonucleotide
  Antisense strand to SEQ ID NO: 2433540
uuauguaaagggaaccaca

SEQ ID NO: 2433542 - RNA, 19 nt, Artificial Sequence
  Description of Artificial Sequence: Synthetic oligonucleotide
  Sense strand starting at position 594 of SEQ ID NO: 1886892
ggaugaggcccucguggaa

SEQ ID NO: 2433543 - RNA, 19 nt, Artificial Sequence
  Description of Artificial Sequence: Synthetic oligonucleotide
  Antisense strand to SEQ ID NO: 2433542
uuccacgagggccucaucc

SEQ ID NO: 2433544 - RNA, 19 nt, Artificial Sequence
  Description of Artificial Sequence: Synthetic oligonucleotide
  Sense strand starting at position 654 of SEQ ID NO: 1886892
gucauuccagcucauugaa

SEQ ID NO: 2433545 - RNA, 19 nt, Artificial Sequence
  Description of Artificial Sequence: Synthetic oligonucleotide
  Antisense strand to SEQ ID NO: 2433544
uucaaugagcuggaaugac

SEQ ID NO: 2433546 - RNA, 19 nt, Artificial Sequence
  Description of Artificial Sequence: Synthetic oligonucleotide
  Sense strand starting at position 782 of SEQ ID NO: 1886892
cacccaugucccugggauu

SEQ ID NO: 2433547 - RNA, 19 nt, Artificial Sequence
  Description of Artificial Sequence: Synthetic oligonucleotide
  Antisense strand to SEQ ID NO: 2433546
aaucccagggacaugggug

SEQ ID NO: 2433548 - RNA, 19 nt, Artificial Sequence
  Description of Artificial Sequence: Synthetic oligonucleotide
  Sense strand starting at position 794 of SEQ ID NO: 1886892
ugggauuccuggcuucuaa

SEQ ID NO: 2433549 - RNA, 19 nt, Artificial Sequence
  Description of Artificial Sequence: Synthetic oligonucleotide
  Antisense strand to SEQ ID NO: 2433548
uuagaagccaggaauccca

SEQ ID NO: 2433550 - RNA, 19 nt, Artificial Sequence
  Description of Artificial Sequence: Synthetic oligonucleotide
  Sense strand starting at position 807 of SEQ ID NO: 1886892
uucuaagucucagugugaa

SEQ ID NO: 2433551 - RNA, 19 nt, Artificial Sequence
  Description of Artificial Sequence: Synthetic oligonucleotide
  Antisense strand to SEQ ID NO: 2433550
uucacacugagacuuagaa

SEQ ID NO: 2433552 - RNA, 19 nt, Artificial Sequence
  Description of Artificial Sequence: Synthetic oligonucleotide
  Sense strand starting at position 819 of SEQ ID NO: 1886892
gugugaagagucuacuggu

SEQ ID NO: 2433553 - RNA, 19 nt, Artificial Sequence
  Description of Artificial Sequence: Synthetic oligonucleotide
  Antisense strand to SEQ ID NO: 2433552
accaguagacucuucacac

SEQ ID NO: 2433554 - RNA, 19 nt, Artificial Sequence
  Description of Artificial Sequence: Synthetic oligonucleotide
  Sense strand starting at position 855 of SEQ ID NO: 1886892
gagaaaguguucccuggaa

SEQ ID NO: 2433555 - RNA, 19 nt, Artificial Sequence
  Description of Artificial Sequence: Synthetic oligonucleotide
  Antisense strand to SEQ ID NO: 2433554
uuccagggaacacuuucuc

SEQ ID NO: 2433556 - RNA, 19 nt, Artificial Sequence
  Description of Artificial Sequence: Synthetic oligonucleotide
  Sense strand starting at position 857 of SEQ ID NO: 1886892
gaaaguguucccuggaaag

SEQ ID NO: 2433557 - RNA, 19 nt, Artificial Sequence
  Description of Artificial Sequence: Synthetic oligonucleotide
  Antisense strand to SEQ ID NO: 2433556
cuuuccagggaacacuuuc

SEQ ID NO: 2433558 - RNA, 19 nt, Artificial Sequence
  Description of Artificial Sequence: Synthetic oligonucleotide
  Sense strand starting at position 859 of SEQ ID NO: 1886892
aaguguucccuggaaagca

SEQ ID NO: 2433559 - RNA, 19 nt, Artificial Sequence
  Description of Artificial Sequence: Synthetic oligonucleotide
  Antisense strand to SEQ ID NO: 2433558
ugcuuuccagggaacacuu

SEQ ID NO: 2433560 - RNA, 19 nt, Artificial Sequence
  Description of Artificial Sequence: Synthetic oligonucleotide
  Sense strand starting at position 867 of SEQ ID NO: 1886892
ccuggaaagcagugcuuua

SEQ ID NO: 2433561 - RNA, 19 nt, Artificial Sequence
  Description of Artificial Sequence: Synthetic oligonucleotide
  Antisense strand to SEQ ID NO: 2433560
uaaagcacugcuuuccagg

SEQ ID NO: 2433562 - RNA, 19 nt, Artificial Sequence
  Description of Artificial Sequence: Synthetic oligonucleotide
  Sense strand starting at position 874 of SEQ ID NO: 1886892
agcagugcuuuagcccaaa

SEQ ID NO: 2433563 - RNA, 19 nt, Artificial Sequence
  Description of Artificial Sequence: Synthetic oligonucleotide
  Antisense strand to SEQ ID NO: 2433562
uuugggcuaaagcacugcu

SEQ ID NO: 2433564 - RNA, 19 nt, Artificial Sequence
  Description of Artificial Sequence: Synthetic oligonucleotide
  Sense strand starting at position 877 of SEQ ID NO: 1886892
agugcuuuagcccaaacuu

SEQ ID NO: 2433565 - RNA, 19 nt, Artificial Sequence
  Description of Artificial Sequence: Synthetic oligonucleotide
  Antisense strand to SEQ ID NO: 2433564
aaguuugggcuaaagcacu

SEQ ID NO: 2433566 - RNA, 19 nt, Artificial Sequence
  Description of Artificial Sequence: Synthetic oligonucleotide
  Sense strand starting at position 1266 of SEQ ID NO: 1886892
guaagugugagaugaggau

SEQ ID NO: 2433567 - RNA, 19 nt, Artificial Sequence
  Description of Artificial Sequence: Synthetic oligonucleotide
  Antisense strand to SEQ ID NO: 2433566
auccucaucucacacuuac

SEQ ID NO: 2433568 - RNA, 19 nt, Artificial Sequence
  Description of Artificial Sequence: Synthetic oligonucleotide
  Sense strand starting at position 1337 of SEQ ID NO: 1886892
uuugaagaacacuggucua

SEQ ID NO: 2433569 - RNA, 19 nt, Artificial Sequence
  Description of Artificial Sequence: Synthetic oligonucleotide
  Antisense strand to SEQ ID NO: 2433568
uagaccaguguucuucaaa

SEQ ID NO: 2433570 - RNA, 19 nt, Artificial Sequence
  Description of Artificial Sequence: Synthetic oligonucleotide
  Sense strand starting at position 1454 of SEQ ID NO: 1886892
ccuugagacaguugcugaa

SEQ ID NO: 2433571 - RNA, 19 nt, Artificial Sequence
  Description of Artificial Sequence: Synthetic oligonucleotide
  Antisense strand to SEQ ID NO: 2433570
uucagcaacugucucaagg

SEQ ID NO: 2433572 - RNA, 19 nt, Artificial Sequence
  Description of Artificial Sequence: Synthetic oligonucleotide
  Sense strand starting at position 2164 of SEQ ID NO: 1886892
ugcgaaggcggauauauaa

SEQ ID NO: 2433573 - RNA, 19 nt, Artificial Sequence
  Description of Artificial Sequence: Synthetic oligonucleotide
  Antisense strand to SEQ ID NO: 2433572
uuauauauccgccuucgca

SEQ ID NO: 2433574 - RNA, 19 nt, Artificial Sequence
  Description of Artificial Sequence: Synthetic oligonucleotide
  Sense strand starting at position 2428 of SEQ ID NO: 1886892
ucuggaggcugacagauaa

SEQ ID NO: 2433575 - RNA, 19 nt, Artificial Sequence
  Description of Artificial Sequence: Synthetic oligonucleotide
  Antisense strand to SEQ ID NO: 2433574
uuaucugucagccuccaga

SEQ ID NO: 2433576 - RNA, 19 nt, Artificial Sequence
  Description of Artificial Sequence: Synthetic oligonucleotide
  Sense strand starting at position 2439 of SEQ ID NO: 1886892
acagauaagucucuugauu

SEQ ID NO: 2433577 - RNA, 19 nt, Artificial Sequence
  Description of Artificial Sequence: Synthetic oligonucleotide
  Antisense strand to SEQ ID NO: 2433576
aaucaagagacuuaucugu

SEQ ID NO: 2433578 - RNA, 19 nt, Artificial Sequence
  Description of Artificial Sequence: Synthetic oligonucleotide
  Sense strand starting at position 2566 of SEQ ID NO: 1886892
ccugcuuaggcagaugaaa

SEQ ID NO: 2433579 - RNA, 19 nt, Artificial Sequence
  Description of Artificial Sequence: Synthetic oligonucleotide
  Antisense strand to SEQ ID NO: 2433578
uuucaucugccuaagcagg

SEQ ID NO: 2433580 - RNA, 19 nt, Artificial Sequence
  Description of Artificial Sequence: Synthetic oligonucleotide
  Sense strand starting at position 2633 of SEQ ID NO: 1886892
cgcgacagaguuugaaaca

SEQ ID NO: 2433581 - RNA, 19 nt, Artificial Sequence
  Description of Artificial Sequence: Synthetic oligonucleotide
  Antisense strand to SEQ ID NO: 2433580
uguuucaaacucugucgcg

SEQ ID NO: 2433582 - RNA, 19 nt, Artificial Sequence
  Description of Artificial Sequence: Synthetic oligonucleotide
  Sense strand starting at position 2701 of SEQ ID NO: 1886892
cgagguccugccuagaaua

SEQ ID NO: 2433583 - RNA, 19 nt, Artificial Sequence
  Description of Artificial Sequence: Synthetic oligonucleotide
  Antisense strand to SEQ ID NO: 2433582
uauucuaggcaggaccucg

SEQ ID NO: 2433584 - RNA, 19 nt, Artificial Sequence
  Description of Artificial Sequence: Synthetic oligonucleotide
  Sense strand starting at position 2703 of SEQ ID NO: 1886892
agguccugccuagaauacu

SEQ ID NO: 2433585 - RNA, 19 nt, Artificial Sequence
  Description of Artificial Sequence: Synthetic oligonucleotide
  Antisense strand to SEQ ID NO: 2433584
aguauucuaggcaggaccu

SEQ ID NO: 2433586 - RNA, 19 nt, Artificial Sequence
  Description of Artificial Sequence: Synthetic oligonucleotide
  Sense strand starting at position 2722 of SEQ ID NO: 1886892
guugaacagugucuccuua

SEQ ID NO: 2433587 - RNA, 19 nt, Artificial Sequence
  Description of Artificial Sequence: Synthetic oligonucleotide
  Antisense strand to SEQ ID NO: 2433586
uaaggagacacuguucaac

SEQ ID NO: 2433588 - RNA, 19 nt, Artificial Sequence
  Description of Artificial Sequence: Synthetic oligonucleotide
  Sense strand starting at position 2724 of SEQ ID NO: 1886892
ugaacagugucuccuuagu

SEQ ID NO: 2433589 - RNA, 19 nt, Artificial Sequence
  Description of Artificial Sequence: Synthetic oligonucleotide
  Antisense strand to SEQ ID NO: 2433588
acuaaggagacacuguuca

SEQ ID NO: 2433590 - RNA, 19 nt, Artificial Sequence
  Description of Artificial Sequence: Synthetic oligonucleotide
  Sense strand starting at position 3189 of SEQ ID NO: 1886892
uggagacuagucugaccaa

SEQ ID NO: 2433591 - RNA, 19 nt, Artificial Sequence
  Description of Artificial Sequence: Synthetic oligonucleotide
  Antisense strand to SEQ ID NO: 2433590
uuggucagacuagucucca

SEQ ID NO: 2433592 - RNA, 19 nt, Artificial Sequence
  Description of Artificial Sequence: Synthetic oligonucleotide
  Sense strand starting at position 3190 of SEQ ID NO: 1886892
ggagacuagucugaccaac

SEQ ID NO: 2433593 - RNA, 19 nt, Artificial Sequence
  Description of Artificial Sequence: Synthetic oligonucleotide
  Antisense strand to SEQ ID NO: 2433592
guuggucagacuagucucc

SEQ ID NO: 2433594 - RNA, 19 nt, Artificial Sequence
  Description of Artificial Sequence: Synthetic oligonucleotide
  Sense strand starting at position 3381 of SEQ ID NO: 1886892
gacagaaauuccgucucca

SEQ ID NO: 2433595 - RNA, 19 nt, Artificial Sequence
  Description of Artificial Sequence: Synthetic oligonucleotide
  Antisense strand to SEQ ID NO: 2433594
uggagacggaauuucuguc

SEQ ID NO: 2433596 - RNA, 19 nt, Artificial Sequence
  Description of Artificial Sequence: Synthetic oligonucleotide
  Sense strand starting at position 3431 of SEQ ID NO: 1886892
ggauauaaaucuucguuua

SEQ ID NO: 2433597 - RNA, 19 nt, Artificial Sequence
  Description of Artificial Sequence: Synthetic oligonucleotide
  Antisense strand to SEQ ID NO: 2433596
uaaacgaagauuuauaucc

SEQ ID NO: 2433598 - RNA, 19 nt, Artificial Sequence
  Description of Artificial Sequence: Synthetic oligonucleotide
  Sense strand starting at position 3444 of SEQ ID NO: 1886892
cguuuauugccuuuguagu

SEQ ID NO: 2433599 - RNA, 19 nt, Artificial Sequence
  Description of Artificial Sequence: Synthetic oligonucleotide
  Antisense strand to SEQ ID NO: 2433598
acuacaaaggcaauaaacg

SEQ ID NO: 2433600 - RNA, 19 nt, Artificial Sequence
  Description of Artificial Sequence: Synthetic oligonucleotide
  Sense strand starting at position 3451 of SEQ ID NO: 1886892
ugccuuuguagugaacaga

SEQ ID NO: 2433601 - RNA, 19 nt, Artificial Sequence
  Description of Artificial Sequence: Synthetic oligonucleotide
  Antisense strand to SEQ ID NO: 2433600
ucuguucacuacaaaggca

SEQ ID NO: 2433602 - RNA, 19 nt, Artificial Sequence
  Description of Artificial Sequence: Synthetic oligonucleotide
  Sense strand starting at position 3454 of SEQ ID NO: 1886892
cuuuguagugaacagaauu

SEQ ID NO: 2433603 - RNA, 19 nt, Artificial Sequence
  Description of Artificial Sequence: Synthetic oligonucleotide
  Antisense strand to SEQ ID NO: 2433602
aauucuguucacuacaaag

SEQ ID NO: 2433604 - RNA, 19 nt, Artificial Sequence
  Description of Artificial Sequence: Synthetic oligonucleotide
  Sense strand starting at position 3809 of SEQ ID NO: 1886892
cggacaauaccaggaaguu

SEQ ID NO: 2433605 - RNA, 19 nt, Artificial Sequence
  Description of Artificial Sequence: Synthetic oligonucleotide
  Antisense strand to SEQ ID NO: 2433604
aacuuccugguauuguccg

SEQ ID NO: 2433606 - RNA, 19 nt, Artificial Sequence
  Description of Artificial Sequence: Synthetic oligonucleotide
  Sense strand starting at position 3840 of SEQ ID NO: 1886892
agagaaagccuacauuguu

SEQ ID NO: 2433607 - RNA, 19 nt, Artificial Sequence
  Description of Artificial Sequence: Synthetic oligonucleotide
  Antisense strand to SEQ ID NO: 2433606
aacaauguaggcuuucucu

SEQ ID NO: 2433608 - RNA, 19 nt, Artificial Sequence
  Description of Artificial Sequence: Synthetic oligonucleotide
  Sense strand starting at position 3867 of SEQ ID NO: 1886892
cuuugagguuugcccucaa

SEQ ID NO: 2433609 - RNA, 19 nt, Artificial Sequence
  Description of Artificial Sequence: Synthetic oligonucleotide
  Antisense strand to SEQ ID NO: 2433608
uugagggcaaaccucaaag

SEQ ID NO: 2433610 - RNA, 19 nt, Artificial Sequence
  Description of Artificial Sequence: Synthetic oligonucleotide
  Sense strand starting at position 3871 of SEQ ID NO: 1886892
gagguuugcccucaaccuu

SEQ ID NO: 2433611 - RNA, 19 nt, Artificial Sequence
  Description of Artificial Sequence: Synthetic oligonucleotide
  Antisense strand to SEQ ID NO: 2433610
aagguugagggcaaaccuc

SEQ ID NO: 2433612 - RNA, 19 nt, Artificial Sequence
  Description of Artificial Sequence: Synthetic oligonucleotide
  Sense strand starting at position 3905 of SEQ ID NO: 1886892
acacuccgcuuuguaauau

SEQ ID NO: 2433613 - RNA, 19 nt, Artificial Sequence
  Description of Artificial Sequence: Synthetic oligonucleotide
  Antisense strand to SEQ ID NO: 2433612
auauuacaaagcggagugu

SEQ ID NO: 2433614 - RNA, 19 nt, Artificial Sequence
  Description of Artificial Sequence: Synthetic oligonucleotide
  Sense strand starting at position 127 of SEQ ID NO: 1886893
ggaauucugugguugacag

SEQ ID NO: 2433615 - RNA, 19 nt, Artificial Sequence
  Description of Artificial Sequence: Synthetic oligonucleotide
  Antisense strand to SEQ ID NO: 2433614
cugucaaccacagaauucc

SEQ ID NO: 2433616 - RNA, 19 nt, Artificial Sequence
  Description of Artificial Sequence: Synthetic oligonucleotide
  Sense strand starting at position 128 of SEQ ID NO: 1886893
gaauucugugguugacagu

SEQ ID NO: 2433617 - RNA, 19 nt, Artificial Sequence
  Description of Artificial Sequence: Synthetic oligonucleotide
  Antisense strand to SEQ ID NO: 2433616
acugucaaccacagaauuc

SEQ ID NO: 2433618 - RNA, 19 nt, Artificial Sequence
  Description of Artificial Sequence: Synthetic oligonucleotide
  Sense strand starting at position 227 of SEQ ID NO: 1886893
aaagcauuugcgggcuuua

SEQ ID NO: 2433619 - RNA, 19 nt, Artificial Sequence
  Description of Artificial Sequence: Synthetic oligonucleotide
  Antisense strand to SEQ ID NO: 2433618
uaaagcccgcaaaugcuuu

SEQ ID NO: 2433620 - RNA, 19 nt, Artificial Sequence
  Description of Artificial Sequence: Synthetic oligonucleotide
  Sense strand starting at position 238 of SEQ ID NO: 1886893
gggcuuuaguuaucaguau

SEQ ID NO: 2433621 - RNA, 19 nt, Artificial Sequence
  Description of Artificial Sequence: Synthetic oligonucleotide
  Antisense strand to SEQ ID NO: 2433620
auacugauaacuaaagccc

SEQ ID NO: 2433622 - RNA, 19 nt, Artificial Sequence
  Description of Artificial Sequence: Synthetic oligonucleotide
  Sense strand starting at position 242 of SEQ ID NO: 1886893
uuuaguuaucaguaugucu

SEQ ID NO: 2433623 - RNA, 19 nt, Artificial Sequence
  Description of Artificial Sequence: Synthetic oligonucleotide
  Antisense strand to SEQ ID NO: 2433622
agacauacugauaacuaaa

SEQ ID NO: 2433624 - RNA, 19 nt, Artificial Sequence
  Description of Artificial Sequence: Synthetic oligonucleotide
  Sense strand starting at position 245 of SEQ ID NO: 1886893
aguuaucaguaugucucua

SEQ ID NO: 2433625 - RNA, 19 nt, Artificial Sequence
  Description of Artificial Sequence: Synthetic oligonucleotide
  Antisense strand to SEQ ID NO: 2433624
uagagacauacugauaacu

SEQ ID NO: 2433626 - RNA, 19 nt, Artificial Sequence
  Description of Artificial Sequence: Synthetic oligonucleotide
  Sense strand starting at position 355 of SEQ ID NO: 1886893
auauauuucucagggauca

SEQ ID NO: 2433627 - RNA, 19 nt, Artificial Sequence
  Description of Artificial Sequence: Synthetic oligonucleotide
  Antisense strand to SEQ ID NO: 2433626
ugaucccugagaaauauau

SEQ ID NO: 2433628 - RNA, 19 nt, Artificial Sequence
  Description of Artificial Sequence: Synthetic oligonucleotide
  Sense strand starting at position 431 of SEQ ID NO: 1886893
uccugagacucuccuguau

SEQ ID NO: 2433629 - RNA, 19 nt, Artificial Sequence
  Description of Artificial Sequence: Synthetic oligonucleotide
  Antisense strand to SEQ ID NO: 2433628
auacaggagagucucagga

SEQ ID NO: 2433630 - RNA, 19 nt, Artificial Sequence
  Description of Artificial Sequence: Synthetic oligonucleotide
  Sense strand starting at position 435 of SEQ ID NO: 1886893
gagacucuccuguauugug

SEQ ID NO: 2433631 - RNA, 19 nt, Artificial Sequence
  Description of Artificial Sequence: Synthetic oligonucleotide
  Antisense strand to SEQ ID NO: 2433630
cacaauacaggagagucuc

SEQ ID NO: 2433632 - RNA, 19 nt, Artificial Sequence
  Description of Artificial Sequence: Synthetic oligonucleotide
  Sense strand starting at position 444 of SEQ ID NO: 1886893
cuguauugugcugcagcua

SEQ ID NO: 2433633 - RNA, 19 nt, Artificial Sequence
  Description of Artificial Sequence: Synthetic oligonucleotide
  Antisense strand to SEQ ID NO: 2433632
uagcugcagcacaauacag

SEQ ID NO: 2433634 - RNA, 19 nt, Artificial Sequence
  Description of Artificial Sequence: Synthetic oligonucleotide
  Sense strand starting at position 553 of SEQ ID NO: 1886893
guuaacagugcugaguuaa

SEQ ID NO: 2433635 - RNA, 19 nt, Artificial Sequence
  Description of Artificial Sequence: Synthetic oligonucleotide
  Antisense strand to SEQ ID NO: 2433634
uuaacucagcacuguuaac

SEQ ID NO: 2433636 - RNA, 19 nt, Artificial Sequence
  Description of Artificial Sequence: Synthetic oligonucleotide
  Sense strand starting at position 608 of SEQ ID NO: 1886893
cuaucaucucagggaauuc

SEQ ID NO: 2433637 - RNA, 19 nt, Artificial Sequence
  Description of Artificial Sequence: Synthetic oligonucleotide
  Antisense strand to SEQ ID NO: 2433636
gaauucccugagaugauag

SEQ ID NO: 2433638 - RNA, 19 nt, Artificial Sequence
  Description of Artificial Sequence: Synthetic oligonucleotide
  Sense strand starting at position 683 of SEQ ID NO: 1886893
uaggaucugcagcgggaua

SEQ ID NO: 2433639 - RNA, 19 nt, Artificial Sequence
  Description of Artificial Sequence: Synthetic oligonucleotide
  Antisense strand to SEQ ID NO: 2433638
uaucccgcugcagauccua

SEQ ID NO: 2433640 - RNA, 19 nt, Artificial Sequence
  Description of Artificial Sequence: Synthetic oligonucleotide
  Sense strand starting at position 685 of SEQ ID NO: 1886893
ggaucugcagcgggauaaa

SEQ ID NO: 2433641 - RNA, 19 nt, Artificial Sequence
  Description of Artificial Sequence: Synthetic oligonucleotide
  Antisense strand to SEQ ID NO: 2433640
uuuaucccgcugcagaucc

SEQ ID NO: 2433642 - RNA, 19 nt, Artificial Sequence
  Description of Artificial Sequence: Synthetic oligonucleotide
  Sense strand starting at position 746 of SEQ ID NO: 1886893
caggauaugcgguaguaau

SEQ ID NO: 2433643 - RNA, 19 nt, Artificial Sequence
  Description of Artificial Sequence: Synthetic oligonucleotide
  Antisense strand to SEQ ID NO: 2433642
auuacuaccgcauauccug

SEQ ID NO: 2433644 - RNA, 19 nt, Artificial Sequence
  Description of Artificial Sequence: Synthetic oligonucleotide
  Sense strand starting at position 786 of SEQ ID NO: 1886893
ugagacucuacggauguau

SEQ ID NO: 2433645 - RNA, 19 nt, Artificial Sequence
  Description of Artificial Sequence: Synthetic oligonucleotide
  Antisense strand to SEQ ID NO: 2433644
auacauccguagagucuca

SEQ ID NO: 2433646 - RNA, 19 nt, Artificial Sequence
  Description of Artificial Sequence: Synthetic oligonucleotide
  Sense strand starting at position 848 of SEQ ID NO: 1886893
ucgagauuuccgcgguaac

SEQ ID NO: 2433647 - RNA, 19 nt, Artificial Sequence
  Description of Artificial Sequence: Synthetic oligonucleotide
  Antisense strand to SEQ ID NO: 2433646
guuaccgcggaaaucucga

SEQ ID NO: 2433648 - RNA, 19 nt, Artificial Sequence
  Description of Artificial Sequence: Synthetic oligonucleotide
  Sense strand starting at position 849 of SEQ ID NO: 1886893
cgagauuuccgcgguaaca

SEQ ID NO: 2433649 - RNA, 19 nt, Artificial Sequence
  Description of Artificial Sequence: Synthetic oligonucleotide
  Antisense strand to SEQ ID NO: 2433648
uguuaccgcggaaaucucg

SEQ ID NO: 2433650 - RNA, 19 nt, Artificial Sequence
  Description of Artificial Sequence: Synthetic oligonucleotide
  Sense strand starting at position 1054 of SEQ ID NO: 1886893
ucucacaaaucuuucgaga

SEQ ID NO: 2433651 - RNA, 19 nt, Artificial Sequence
  Description of Artificial Sequence: Synthetic oligonucleotide
  Antisense strand to SEQ ID NO: 2433650
ucucgaaagauuugugaga

SEQ ID NO: 2433652 - RNA, 19 nt, Artificial Sequence
  Description of Artificial Sequence: Synthetic oligonucleotide
  Sense strand starting at position 1069 of SEQ ID NO: 1886893
gagauaggauuugagguua

SEQ ID NO: 2433653 - RNA, 19 nt, Artificial Sequence
  Description of Artificial Sequence: Synthetic oligonucleotide
  Antisense strand to SEQ ID NO: 2433652
uaaccucaaauccuaucuc

SEQ ID NO: 2433654 - RNA, 19 nt, Artificial Sequence
  Description of Artificial Sequence: Synthetic oligonucleotide
  Sense strand starting at position 1100 of SEQ ID NO: 1886893
aucauaguccaguaacuua

SEQ ID NO: 2433655 - RNA, 19 nt, Artificial Sequence
  Description of Artificial Sequence: Synthetic oligonucleotide
  Antisense strand to SEQ ID NO: 2433654
uaaguuacuggacuaugau

SEQ ID NO: 2433656 - RNA, 19 nt, Artificial Sequence
  Description of Artificial Sequence: Synthetic oligonucleotide
  Sense strand starting at position 1169 of SEQ ID NO: 1886893
gcgaaaucucaauguauga

SEQ ID NO: 2433657 - RNA, 19 nt, Artificial Sequence
  Description of Artificial Sequence: Synthetic oligonucleotide
  Antisense strand to SEQ ID NO: 2433656
ucauacauugagauuucgc

SEQ ID NO: 2433658 - RNA, 19 nt, Artificial Sequence
  Description of Artificial Sequence: Synthetic oligonucleotide
  Sense strand starting at position 1263 of SEQ ID NO: 1886893
auugauuuaucacagugaa

SEQ ID NO: 2433659 - RNA, 19 nt, Artificial Sequence
  Description of Artificial Sequence: Synthetic oligonucleotide
  Antisense strand to SEQ ID NO: 2433658
uucacugugauaaaucaau

SEQ ID NO: 2433660 - RNA, 19 nt, Artificial Sequence
  Description of Artificial Sequence: Synthetic oligonucleotide
  Sense strand starting at position 1482 of SEQ ID NO: 1886893
uccgaaauccgaugccaaa

SEQ ID NO: 2433661 - RNA, 19 nt, Artificial Sequence
  Description of Artificial Sequence: Synthetic oligonucleotide
  Antisense strand to SEQ ID NO: 2433660
uuuggcaucggauuucgga

SEQ ID NO: 2433662 - RNA, 19 nt, Artificial Sequence
  Description of Artificial Sequence: Synthetic oligonucleotide
  Sense strand starting at position 1727 of SEQ ID NO: 1886893
ccguguuuaccugaaaguc

SEQ ID NO: 2433663 - RNA, 19 nt, Artificial Sequence
  Description of Artificial Sequence: Synthetic oligonucleotide
  Antisense strand to SEQ ID NO: 2433662
gacuuucagguaaacacgg

SEQ ID NO: 2433664 - RNA, 19 nt, Artificial Sequence
  Description of Artificial Sequence: Synthetic oligonucleotide
  Sense strand starting at position 1907 of SEQ ID NO: 1886893
gcgagaaugcgcguccuga

SEQ ID NO: 2433665 - RNA, 19 nt, Artificial Sequence
  Description of Artificial Sequence: Synthetic oligonucleotide
  Antisense strand to SEQ ID NO: 2433664
ucaggacgcgcauucucgc

SEQ ID NO: 2433666 - RNA, 19 nt, Artificial Sequence
  Description of Artificial Sequence: Synthetic oligonucleotide
  Sense strand starting at position 2088 of SEQ ID NO: 1886893
cggacaaaucuggauguuu

SEQ ID NO: 2433667 - RNA, 19 nt, Artificial Sequence
  Description of Artificial Sequence: Synthetic oligonucleotide
  Antisense strand to SEQ ID NO: 2433666
aaacauccagauuuguccg

SEQ ID NO: 2433668 - RNA, 19 nt, Artificial Sequence
  Description of Artificial Sequence: Synthetic oligonucleotide
  Sense strand starting at position 2157 of SEQ ID NO: 1886893
cgcagaaguccaucgucuu

SEQ ID NO: 2433669 - RNA, 19 nt, Artificial Sequence
  Description of Artificial Sequence: Synthetic oligonucleotide
  Antisense strand to SEQ ID NO: 2433668
aagacgauggacuucugcg

SEQ ID NO: 2433670 - RNA, 19 nt, Artificial Sequence
  Description of Artificial Sequence: Synthetic oligonucleotide
  Sense strand starting at position 2243 of SEQ ID NO: 1886893
ucagcucacccugaggauu

SEQ ID NO: 2433671 - RNA, 19 nt, Artificial Sequence
  Description of Artificial Sequence: Synthetic oligonucleotide
  Antisense strand to SEQ ID NO: 2433670
aauccucagggugagcuga

SEQ ID NO: 2433672 - RNA, 19 nt, Artificial Sequence
  Description of Artificial Sequence: Synthetic oligonucleotide
  Sense strand starting at position 2256 of SEQ ID NO: 1886893
aggauucaacggugaacga

SEQ ID NO: 2433673 - RNA, 19 nt, Artificial Sequence
  Description of Artificial Sequence: Synthetic oligonucleotide
  Antisense strand to SEQ ID NO: 2433672
ucguucaccguugaauccu

SEQ ID NO: 2433674 - RNA, 19 nt, Artificial Sequence
  Description of Artificial Sequence: Synthetic oligonucleotide
  Sense strand starting at position 2298 of SEQ ID NO: 1886893
gggauuucauuccagugga

SEQ ID NO: 2433675 - RNA, 19 nt, Artificial Sequence
  Description of Artificial Sequence: Synthetic oligonucleotide
  Antisense strand to SEQ ID NO: 2433674
uccacuggaaugaaauccc

SEQ ID NO: 2433676 - RNA, 19 nt, Artificial Sequence
  Description of Artificial Sequence: Synthetic oligonucleotide
  Sense strand starting at position 2508 of SEQ ID NO: 1886893
cgagccauccuuugagaga

SEQ ID NO: 2433677 - RNA, 19 nt, Artificial Sequence
  Description of Artificial Sequence: Synthetic oligonucleotide
  Antisense strand to SEQ ID NO: 2433676
ucucucaaaggauggcucg

SEQ ID NO: 2433678 - RNA, 19 nt, Artificial Sequence
  Description of Artificial Sequence: Synthetic oligonucleotide
  Sense strand starting at position 2541 of SEQ ID NO: 1886893
gaccgaaguugauccagau

SEQ ID NO: 2433679 - RNA, 19 nt, Artificial Sequence
  Description of Artificial Sequence: Synthetic oligonucleotide
  Antisense strand to SEQ ID NO: 2433678
aucuggaucaacuucgguc

SEQ ID NO: 2433680 - RNA, 19 nt, Artificial Sequence
  Description of Artificial Sequence: Synthetic oligonucleotide
  Sense strand starting at position 2548 of SEQ ID NO: 1886893
guugauccagaucgacuaa

SEQ ID NO: 2433681 - RNA, 19 nt, Artificial Sequence
  Description of Artificial Sequence: Synthetic oligonucleotide
  Antisense strand to SEQ ID NO: 2433680
uuagucgaucuggaucaac

SEQ ID NO: 2433682 - RNA, 19 nt, Artificial Sequence
  Description of Artificial Sequence: Synthetic oligonucleotide
  Sense strand starting at position 2804 of SEQ ID NO: 1886893
gucuuacccugcccugaaa

SEQ ID NO: 2433683 - RNA, 19 nt, Artificial Sequence
  Description of Artificial Sequence: Synthetic oligonucleotide
  Antisense strand to SEQ ID NO: 2433682
uuucagggcaggguaagac

SEQ ID NO: 2433684 - RNA, 19 nt, Artificial Sequence
  Description of Artificial Sequence: Synthetic oligonucleotide
  Sense strand starting at position 3586 of SEQ ID NO: 1886893
gguagcgugaaagauugaa

SEQ ID NO: 2433685 - RNA, 19 nt, Artificial Sequence
  Description of Artificial Sequence: Synthetic oligonucleotide
  Antisense strand to SEQ ID NO: 2433684
uucaaucuuucacgcuacc

SEQ ID NO: 2433686 - RNA, 19 nt, Artificial Sequence
  Description of Artificial Sequence: Synthetic oligonucleotide
  Sense strand starting at position 3590 of SEQ ID NO: 1886893
gcgugaaagauugaaucac

SEQ ID NO: 2433687 - RNA, 19 nt, Artificial Sequence
  Description of Artificial Sequence: Synthetic oligonucleotide
  Antisense strand to SEQ ID NO: 2433686
gugauucaaucuuucacgc

SEQ ID NO: 2433688 - RNA, 19 nt, Artificial Sequence
  Description of Artificial Sequence: Synthetic oligonucleotide
  Sense strand starting at position 3779 of SEQ ID NO: 1886893
acuuuaguagaguggagaa

SEQ ID NO: 2433689 - RNA, 19 nt, Artificial Sequence
  Description of Artificial Sequence: Synthetic oligonucleotide
  Antisense strand to SEQ ID NO: 2433688
uucuccacucuacuaaagu

SEQ ID NO: 2433690 - RNA, 19 nt, Artificial Sequence
  Description of Artificial Sequence: Synthetic oligonucleotide
  Sense strand starting at position 3880 of SEQ ID NO: 1886893
ccuggugccacugaugauu

SEQ ID NO: 2433691 - RNA, 19 nt, Artificial Sequence
  Description of Artificial Sequence: Synthetic oligonucleotide
  Antisense strand to SEQ ID NO: 2433690
aaucaucaguggcaccagg

SEQ ID NO: 2433692 - RNA, 19 nt, Artificial Sequence
  Description of Artificial Sequence: Synthetic oligonucleotide
  Sense strand starting at position 3967 of SEQ ID NO: 1886893
cuggacuuuauaggugaga

SEQ ID NO: 2433693 - RNA, 19 nt, Artificial Sequence
  Description of Artificial Sequence: Synthetic oligonucleotide
  Antisense strand to SEQ ID NO: 2433692
ucucaccuauaaaguccag

SEQ ID NO: 2433694 - RNA, 19 nt, Artificial Sequence
  Description of Artificial Sequence: Synthetic oligonucleotide
  Sense strand starting at position 27 of SEQ ID NO: 1886894
ggguauguuuagucaaaga

SEQ ID NO: 2433695 - RNA, 19 nt, Artificial Sequence
  Description of Artificial Sequence: Synthetic oligonucleotide
  Antisense strand to SEQ ID NO: 2433694
ucuuugacuaaacauaccc

SEQ ID NO: 2433696 - RNA, 19 nt, Artificial Sequence
  Description of Artificial Sequence: Synthetic oligonucleotide
  Sense strand starting at position 147 of SEQ ID NO: 1886894
cagugugacccuggaugaa

SEQ ID NO: 2433697 - RNA, 19 nt, Artificial Sequence
  Description of Artificial Sequence: Synthetic oligonucleotide
  Antisense strand to SEQ ID NO: 2433696
uucauccagggucacacug

SEQ ID NO: 2433698 - RNA, 19 nt, Artificial Sequence
  Description of Artificial Sequence: Synthetic oligonucleotide
  Sense strand starting at position 199 of SEQ ID NO: 1886894
gaauaagcagucugccauu

SEQ ID NO: 2433699 - RNA, 19 nt, Artificial Sequence
  Description of Artificial Sequence: Synthetic oligonucleotide
  Antisense strand to SEQ ID NO: 2433698
aauggcagacugcuuauuc

SEQ ID NO: 2433700 - RNA, 19 nt, Artificial Sequence
  Description of Artificial Sequence: Synthetic oligonucleotide
  Sense strand starting at position 340 of SEQ ID NO: 1886894
ggaauaagggucugguaau

SEQ ID NO: 2433701 - RNA, 19 nt, Artificial Sequence
  Description of Artificial Sequence: Synthetic oligonucleotide
  Antisense strand to SEQ ID NO: 2433700
auuaccagacccuuauucc

SEQ ID NO: 2433702 - RNA, 19 nt, Artificial Sequence
  Description of Artificial Sequence: Synthetic oligonucleotide
  Sense strand starting at position 341 of SEQ ID NO: 1886894
gaauaagggucugguaaua

SEQ ID NO: 2433703 - RNA, 19 nt, Artificial Sequence
  Description of Artificial Sequence: Synthetic oligonucleotide
  Antisense strand to SEQ ID NO: 2433702
uauuaccagacccuuauuc

SEQ ID NO: 2433704 - RNA, 19 nt, Artificial Sequence
  Description of Artificial Sequence: Synthetic oligonucleotide
  Sense strand starting at position 608 of SEQ ID NO: 1886894
caaggagcuuccgaauucu

SEQ ID NO: 2433705 - RNA, 19 nt, Artificial Sequence
  Description of Artificial Sequence: Synthetic oligonucleotide
  Antisense strand to SEQ ID NO: 2433704
agaauucggaagcuccuug

SEQ ID NO: 2433706 - RNA, 19 nt, Artificial Sequence
  Description of Artificial Sequence: Synthetic oligonucleotide
  Sense strand starting at position 617 of SEQ ID NO: 1886894
uccgaauucugucucauca

SEQ ID NO: 2433707 - RNA, 19 nt, Artificial Sequence
  Description of Artificial Sequence: Synthetic oligonucleotide
  Antisense strand to SEQ ID NO: 2433706
ugaugagacagaauucgga

SEQ ID NO: 2433708 - RNA, 19 nt, Artificial Sequence
  Description of Artificial Sequence: Synthetic oligonucleotide
  Sense strand starting at position 840 of SEQ ID NO: 1886894
agcuuagucccauagacag

SEQ ID NO: 2433709 - RNA, 19 nt, Artificial Sequence
  Description of Artificial Sequence: Synthetic oligonucleotide
  Antisense strand to SEQ ID NO: 2433708
cugucuaugggacuaagcu

SEQ ID NO: 2433710 - RNA, 19 nt, Artificial Sequence
  Description of Artificial Sequence: Synthetic oligonucleotide
  Sense strand starting at position 984 of SEQ ID NO: 1886894
cuggaauguccucauccca

SEQ ID NO: 2433711 - RNA, 19 nt, Artificial Sequence
  Description of Artificial Sequence: Synthetic oligonucleotide
  Antisense strand to SEQ ID NO: 2433710
ugggaugaggacauuccag

SEQ ID NO: 2433712 - RNA, 19 nt, Artificial Sequence
  Description of Artificial Sequence: Synthetic oligonucleotide
  Sense strand starting at position 1255 of SEQ ID NO: 1886894
gcagacacauugucucaga

SEQ ID NO: 2433713 - RNA, 19 nt, Artificial Sequence
  Description of Artificial Sequence: Synthetic oligonucleotide
  Antisense strand to SEQ ID NO: 2433712
ucugagacaaugugucugc

SEQ ID NO: 2433714 - RNA, 19 nt, Artificial Sequence
  Description of Artificial Sequence: Synthetic oligonucleotide
  Sense strand starting at position 1258 of SEQ ID NO: 1886894
gacacauugucucagagac

SEQ ID NO: 2433715 - RNA, 19 nt, Artificial Sequence
  Description of Artificial Sequence: Synthetic oligonucleotide
  Antisense strand to SEQ ID NO: 2433714
gucucugagacaauguguc

SEQ ID NO: 2433716 - RNA, 19 nt, Artificial Sequence
  Description of Artificial Sequence: Synthetic oligonucleotide
  Sense strand starting at position 1382 of SEQ ID NO: 1886894
uggucaguccugcaggaca

SEQ ID NO: 2433717 - RNA, 19 nt, Artificial Sequence
  Description of Artificial Sequence: Synthetic oligonucleotide
  Antisense strand to SEQ ID NO: 2433716
uguccugcaggacugacca

SEQ ID NO: 2433718 - RNA, 19 nt, Artificial Sequence
  Description of Artificial Sequence: Synthetic oligonucleotide
  Sense strand starting at position 1536 of SEQ ID NO: 1886894
cugagauaccgauggcucu

SEQ ID NO: 2433719 - RNA, 19 nt, Artificial Sequence
  Description of Artificial Sequence: Synthetic oligonucleotide
  Antisense strand to SEQ ID NO: 2433718
agagccaucgguaucucag

SEQ ID NO: 2433720 - RNA, 19 nt, Artificial Sequence
  Description of Artificial Sequence: Synthetic oligonucleotide
  Sense strand starting at position 1571 of SEQ ID NO: 1886894
gaaacucugucgcaggagu

SEQ ID NO: 2433721 - RNA, 19 nt, Artificial Sequence
  Description of Artificial Sequence: Synthetic oligonucleotide
  Antisense strand to SEQ ID NO: 2433720
acuccugcgacagaguuuc

SEQ ID NO: 2433722 - RNA, 19 nt, Artificial Sequence
  Description of Artificial Sequence: Synthetic oligonucleotide
  Sense strand starting at position 1751 of SEQ ID NO: 1886894
cggaguucuugcuccucca

SEQ ID NO: 2433723 - RNA, 19 nt, Artificial Sequence
  Description of Artificial Sequence: Synthetic oligonucleotide
  Antisense strand to SEQ ID NO: 2433722
uggaggagcaagaacuccg

SEQ ID NO: 2433724 - RNA, 19 nt, Artificial Sequence
  Description of Artificial Sequence: Synthetic oligonucleotide
  Sense strand starting at position 2286 of SEQ ID NO: 1886894
gcucuuauucuucgggagu

SEQ ID NO: 2433725 - RNA, 19 nt, Artificial Sequence
  Description of Artificial Sequence: Synthetic oligonucleotide
  Antisense strand to SEQ ID NO: 2433724
acucccgaagaauaagagc

SEQ ID NO: 2433726 - RNA, 19 nt, Artificial Sequence
  Description of Artificial Sequence: Synthetic oligonucleotide
  Sense strand starting at position 2287 of SEQ ID NO: 1886894
cucuuauucuucgggaguu

SEQ ID NO: 2433727 - RNA, 19 nt, Artificial Sequence
  Description of Artificial Sequence: Synthetic oligonucleotide
  Antisense strand to SEQ ID NO: 2433726
aacucccgaagaauaagag

SEQ ID NO: 2433728 - RNA, 19 nt, Artificial Sequence
  Description of Artificial Sequence: Synthetic oligonucleotide
  Sense strand starting at position 2288 of SEQ ID NO: 1886894
ucuuauucuucgggaguuu

SEQ ID NO: 2433729 - RNA, 19 nt, Artificial Sequence
  Description of Artificial Sequence: Synthetic oligonucleotide
  Antisense strand to SEQ ID NO: 2433728
aaacucccgaagaauaaga

SEQ ID NO: 2433730 - RNA, 19 nt, Artificial Sequence
  Description of Artificial Sequence: Synthetic oligonucleotide
  Sense strand starting at position 2289 of SEQ ID NO: 1886894
cuuauucuucgggaguuua

SEQ ID NO: 2433731 - RNA, 19 nt, Artificial Sequence
  Description of Artificial Sequence: Synthetic oligonucleotide
  Antisense strand to SEQ ID NO: 2433730
uaaacucccgaagaauaag

SEQ ID NO: 2433732 - RNA, 19 nt, Artificial Sequence
  Description of Artificial Sequence: Synthetic oligonucleotide
  Sense strand starting at position 2342 of SEQ ID NO: 1886894
cuggacgggcucugaaaua

SEQ ID NO: 2433733 - RNA, 19 nt, Artificial Sequence
  Description of Artificial Sequence: Synthetic oligonucleotide
  Antisense strand to SEQ ID NO: 2433732
uauuucagagcccguccag

SEQ ID NO: 2433734 - RNA, 19 nt, Artificial Sequence
  Description of Artificial Sequence: Synthetic oligonucleotide
  Sense strand starting at position 2388 of SEQ ID NO: 1886894
auaagugucuuuccucgau

SEQ ID NO: 2433735 - RNA, 19 nt, Artificial Sequence
  Description of Artificial Sequence: Synthetic oligonucleotide
  Antisense strand to SEQ ID NO: 2433734
aucgaggaaagacacuuau

SEQ ID NO: 2433736 - RNA, 19 nt, Artificial Sequence
  Description of Artificial Sequence: Synthetic oligonucleotide
  Sense strand starting at position 2390 of SEQ ID NO: 1886894
aagugucuuuccucgauuu

SEQ ID NO: 2433737 - RNA, 19 nt, Artificial Sequence
  Description of Artificial Sequence: Synthetic oligonucleotide
  Antisense strand to SEQ ID NO: 2433736
aaaucgaggaaagacacuu

SEQ ID NO: 2433738 - RNA, 19 nt, Artificial Sequence
  Description of Artificial Sequence: Synthetic oligonucleotide
  Sense strand starting at position 2832 of SEQ ID NO: 1886894
gggccagcaucugcaagau

SEQ ID NO: 2433739 - RNA, 19 nt, Artificial Sequence
  Description of Artificial Sequence: Synthetic oligonucleotide
  Antisense strand to SEQ ID NO: 2433738
aucuugcagaugcuggccc

SEQ ID NO: 2433740 - RNA, 19 nt, Artificial Sequence
  Description of Artificial Sequence: Synthetic oligonucleotide
  Sense strand starting at position 874 of SEQ ID NO: 1886895
gcucauaacucuccuguga

SEQ ID NO: 2433741 - RNA, 19 nt, Artificial Sequence
  Description of Artificial Sequence: Synthetic oligonucleotide
  Antisense strand to SEQ ID NO: 2433740
ucacaggagaguuaugagc

SEQ ID NO: 2433742 - RNA, 19 nt, Artificial Sequence
  Description of Artificial Sequence: Synthetic oligonucleotide
  Sense strand starting at position 876 of SEQ ID NO: 1886895
ucauaacucuccugugagu

SEQ ID NO: 2433743 - RNA, 19 nt, Artificial Sequence
  Description of Artificial Sequence: Synthetic oligonucleotide
  Antisense strand to SEQ ID NO: 2433742
acucacaggagaguuauga

SEQ ID NO: 2433744 - RNA, 19 nt, Artificial Sequence
  Description of Artificial Sequence: Synthetic oligonucleotide
  Sense strand starting at position 1001 of SEQ ID NO: 1886895
cagagaugcucggcccuga

SEQ ID NO: 2433745 - RNA, 19 nt, Artificial Sequence
  Description of Artificial Sequence: Synthetic oligonucleotide
  Antisense strand to SEQ ID NO: 2433744
ucagggccgagcaucucug

SEQ ID NO: 2433746 - RNA, 19 nt, Artificial Sequence
  Description of Artificial Sequence: Synthetic oligonucleotide
  Sense strand starting at position 1226 of SEQ ID NO: 1886895
gggucaaaugugcagcaaa

SEQ ID NO: 2433747 - RNA, 19 nt, Artificial Sequence
  Description of Artificial Sequence: Synthetic oligonucleotide
  Antisense strand to SEQ ID NO: 2433746
uuugcugcacauuugaccc

SEQ ID NO: 2433748 - RNA, 19 nt, Artificial Sequence
  Description of Artificial Sequence: Synthetic oligonucleotide
  Sense strand starting at position 1276 of SEQ ID NO: 1886895
cugaaaggcucuugauaga

SEQ ID NO: 2433749 - RNA, 19 nt, Artificial Sequence
  Description of Artificial Sequence: Synthetic oligonucleotide
  Antisense strand to SEQ ID NO: 2433748
ucuaucaagagccuuucag

SEQ ID NO: 2433750 - RNA, 19 nt, Artificial Sequence
  Description of Artificial Sequence: Synthetic oligonucleotide
  Sense strand starting at position 1455 of SEQ ID NO: 1886895
aagggaggcucccauguuu

SEQ ID NO: 2433751 - RNA, 19 nt, Artificial Sequence
  Description of Artificial Sequence: Synthetic oligonucleotide
  Antisense strand to SEQ ID NO: 2433750
aaacaugggagccucccuu

SEQ ID NO: 2433752 - RNA, 19 nt, Artificial Sequence
  Description of Artificial Sequence: Synthetic oligonucleotide
  Sense strand starting at position 1485 of SEQ ID NO: 1886895
gaagaaacuccuuguugga

SEQ ID NO: 2433753 - RNA, 19 nt, Artificial Sequence
  Description of Artificial Sequence: Synthetic oligonucleotide
  Antisense strand to SEQ ID NO: 2433752
uccaacaaggaguuucuuc

SEQ ID NO: 2433754 - RNA, 19 nt, Artificial Sequence
  Description of Artificial Sequence: Synthetic oligonucleotide
  Sense strand starting at position 1488 of SEQ ID NO: 1886895
gaaacuccuuguuggagga

SEQ ID NO: 2433755 - RNA, 19 nt, Artificial Sequence
  Description of Artificial Sequence: Synthetic oligonucleotide
  Antisense strand to SEQ ID NO: 2433754
uccuccaacaaggaguuuc

SEQ ID NO: 2433756 - RNA, 19 nt, Artificial Sequence
  Description of Artificial Sequence: Synthetic oligonucleotide
  Sense strand starting at position 1490 of SEQ ID NO: 1886895
aacuccuuguuggaggauu

SEQ ID NO: 2433757 - RNA, 19 nt, Artificial Sequence
  Description of Artificial Sequence: Synthetic oligonucleotide
  Antisense strand to SEQ ID NO: 2433756
aauccuccaacaaggaguu

SEQ ID NO: 2433758 - RNA, 19 nt, Artificial Sequence
  Description of Artificial Sequence: Synthetic oligonucleotide
  Sense strand starting at position 1636 of SEQ ID NO: 1886895
cugucuuucccuggcuaca

SEQ ID NO: 2433759 - RNA, 19 nt, Artificial Sequence
  Description of Artificial Sequence: Synthetic oligonucleotide
  Antisense strand to SEQ ID NO: 2433758
uguagccagggaaagacag

SEQ ID NO: 2433760 - RNA, 19 nt, Artificial Sequence
  Description of Artificial Sequence: Synthetic oligonucleotide
  Sense strand starting at position 1684 of SEQ ID NO: 1886895
uguucuguuucccagcuga

SEQ ID NO: 2433761 - RNA, 19 nt, Artificial Sequence
  Description of Artificial Sequence: Synthetic oligonucleotide
  Antisense strand to SEQ ID NO: 2433760
ucagcugggaaacagaaca

SEQ ID NO: 2433762 - RNA, 19 nt, Artificial Sequence
  Description of Artificial Sequence: Synthetic oligonucleotide
  Sense strand starting at position 1700 of SEQ ID NO: 1886895
ugaguaggcuuggaauaga

SEQ ID NO: 2433763 - RNA, 19 nt, Artificial Sequence
  Description of Artificial Sequence: Synthetic oligonucleotide
  Antisense strand to SEQ ID NO: 2433762
ucuauuccaagccuacuca

SEQ ID NO: 2433764 - RNA, 19 nt, Artificial Sequence
  Description of Artificial Sequence: Synthetic oligonucleotide
  Sense strand starting at position 1821 of SEQ ID NO: 1886895
agccuuggacucuguguaa

SEQ ID NO: 2433765 - RNA, 19 nt, Artificial Sequence
  Description of Artificial Sequence: Synthetic oligonucleotide
  Antisense strand to SEQ ID NO: 2433764
uuacacagaguccaaggcu

SEQ ID NO: 2433766 - RNA, 19 nt, Artificial Sequence
  Description of Artificial Sequence: Synthetic oligonucleotide
  Sense strand starting at position 1832 of SEQ ID NO: 1886895
cuguguaagugaccugacu

SEQ ID NO: 2433767 - RNA, 19 nt, Artificial Sequence
  Description of Artificial Sequence: Synthetic oligonucleotide
  Antisense strand to SEQ ID NO: 2433766
agucaggucacuuacacag

SEQ ID NO: 2433768 - RNA, 19 nt, Artificial Sequence
  Description of Artificial Sequence: Synthetic oligonucleotide
  Sense strand starting at position 1834 of SEQ ID NO: 1886895
guguaagugaccugacuug

SEQ ID NO: 2433769 - RNA, 19 nt, Artificial Sequence
  Description of Artificial Sequence: Synthetic oligonucleotide
  Antisense strand to SEQ ID NO: 2433768
caagucaggucacuuacac

SEQ ID NO: 2433770 - RNA, 19 nt, Artificial Sequence
  Description of Artificial Sequence: Synthetic oligonucleotide
  Sense strand starting at position 1854 of SEQ ID NO: 1886895
guagcuugggugugaggau

SEQ ID NO: 2433771 - RNA, 19 nt, Artificial Sequence
  Description of Artificial Sequence: Synthetic oligonucleotide
  Antisense strand to SEQ ID NO: 2433770
auccucacacccaagcuac

SEQ ID NO: 2433772 - RNA, 19 nt, Artificial Sequence
  Description of Artificial Sequence: Synthetic oligonucleotide
  Sense strand starting at position 2152 of SEQ ID NO: 1886895
ccuggugcuuccucauagu

SEQ ID NO: 2433773 - RNA, 19 nt, Artificial Sequence
  Description of Artificial Sequence: Synthetic oligonucleotide
  Antisense strand to SEQ ID NO: 2433772
acuaugaggaagcaccagg

SEQ ID NO: 2433774 - RNA, 19 nt, Artificial Sequence
  Description of Artificial Sequence: Synthetic oligonucleotide
  Sense strand starting at position 2219 of SEQ ID NO: 1886895
gauccugccuguuuggaau

SEQ ID NO: 2433775 - RNA, 19 nt, Artificial Sequence
  Description of Artificial Sequence: Synthetic oligonucleotide
  Antisense strand to SEQ ID NO: 2433774
auuccaaacaggcaggauc

SEQ ID NO: 2433776 - RNA, 19 nt, Artificial Sequence
  Description of Artificial Sequence: Synthetic oligonucleotide
  Sense strand starting at position 2289 of SEQ ID NO: 1886895
cauguaugugcaugggaau

SEQ ID NO: 2433777 - RNA, 19 nt, Artificial Sequence
  Description of Artificial Sequence: Synthetic oligonucleotide
  Antisense strand to SEQ ID NO: 2433776
auucccaugcacauacaug

SEQ ID NO: 2433778 - RNA, 19 nt, Artificial Sequence
  Description of Artificial Sequence: Synthetic oligonucleotide
  Sense strand starting at position 2300 of SEQ ID NO: 1886895
augggaaugcauggugaca

SEQ ID NO: 2433779 - RNA, 19 nt, Artificial Sequence
  Description of Artificial Sequence: Synthetic oligonucleotide
  Antisense strand to SEQ ID NO: 2433778
ugucaccaugcauucccau

SEQ ID NO: 2433780 - RNA, 19 nt, Artificial Sequence
  Description of Artificial Sequence: Synthetic oligonucleotide
  Sense strand starting at position 2302 of SEQ ID NO: 1886895
gggaaugcauggugacaca

SEQ ID NO: 2433781 - RNA, 19 nt, Artificial Sequence
  Description of Artificial Sequence: Synthetic oligonucleotide
  Antisense strand to SEQ ID NO: 2433780
ugugucaccaugcauuccc

SEQ ID NO: 2433782 - RNA, 19 nt, Artificial Sequence
  Description of Artificial Sequence: Synthetic oligonucleotide
  Sense strand starting at position 2313 of SEQ ID NO: 1886895
gugacacaguccucuagag

SEQ ID NO: 2433783 - RNA, 19 nt, Artificial Sequence
  Description of Artificial Sequence: Synthetic oligonucleotide
  Antisense strand to SEQ ID NO: 2433782
cucuagaggacugugucac

SEQ ID NO: 2433784 - RNA, 19 nt, Artificial Sequence
  Description of Artificial Sequence: Synthetic oligonucleotide
  Sense strand starting at position 2315 of SEQ ID NO: 1886895
gacacaguccucuagagca

SEQ ID NO: 2433785 - RNA, 19 nt, Artificial Sequence
  Description of Artificial Sequence: Synthetic oligonucleotide
  Antisense strand to SEQ ID NO: 2433784
ugcucuagaggacuguguc

SEQ ID NO: 2433786 - RNA, 19 nt, Artificial Sequence
  Description of Artificial Sequence: Synthetic oligonucleotide
  Sense strand starting at position 3565 of SEQ ID NO: 1886895
ccacguuucucccauuaga

SEQ ID NO: 2433787 - RNA, 19 nt, Artificial Sequence
  Description of Artificial Sequence: Synthetic oligonucleotide
  Antisense strand to SEQ ID NO: 2433786
ucuaaugggagaaacgugg

SEQ ID NO: 2433788 - RNA, 19 nt, Artificial Sequence
  Description of Artificial Sequence: Synthetic oligonucleotide
  Sense strand starting at position 3596 of SEQ ID NO: 1886895
cucagugacccugacuaau

SEQ ID NO: 2433789 - RNA, 19 nt, Artificial Sequence
  Description of Artificial Sequence: Synthetic oligonucleotide
  Antisense strand to SEQ ID NO: 2433788
auuagucagggucacugag

SEQ ID NO: 2433790 - RNA, 19 nt, Artificial Sequence
  Description of Artificial Sequence: Synthetic oligonucleotide
  Sense strand starting at position 3606 of SEQ ID NO: 1886895
cugacuaaugccuguagca

SEQ ID NO: 2433791 - RNA, 19 nt, Artificial Sequence
  Description of Artificial Sequence: Synthetic oligonucleotide
  Antisense strand to SEQ ID NO: 2433790
ugcuacaggcauuagucag

SEQ ID NO: 2433792 - RNA, 19 nt, Artificial Sequence
  Description of Artificial Sequence: Synthetic oligonucleotide
  Sense strand starting at position 3608 of SEQ ID NO: 1886895
gacuaaugccuguagcauc

SEQ ID NO: 2433793 - RNA, 19 nt, Artificial Sequence
  Description of Artificial Sequence: Synthetic oligonucleotide
  Antisense strand to SEQ ID NO: 2433792
gaugcuacaggcauuaguc

SEQ ID NO: 2433794 - RNA, 19 nt, Artificial Sequence
  Description of Artificial Sequence: Synthetic oligonucleotide
  Sense strand starting at position 3712 of SEQ ID NO: 1886895
gaggcaaaguccuguuccu

SEQ ID NO: 2433795 - RNA, 19 nt, Artificial Sequence
  Description of Artificial Sequence: Synthetic oligonucleotide
  Antisense strand to SEQ ID NO: 2433794
aggaacaggacuuugccuc

SEQ ID NO: 2433796 - RNA, 19 nt, Artificial Sequence
  Description of Artificial Sequence: Synthetic oligonucleotide
  Sense strand starting at position 3759 of SEQ ID NO: 1886895
ugggaucucuccucugcuu

SEQ ID NO: 2433797 - RNA, 19 nt, Artificial Sequence
  Description of Artificial Sequence: Synthetic oligonucleotide
  Antisense strand to SEQ ID NO: 2433796
aagcagaggagagauccca

SEQ ID NO: 2433798 - RNA, 19 nt, Artificial Sequence
  Description of Artificial Sequence: Synthetic oligonucleotide
  Sense strand starting at position 3787 of SEQ ID NO: 1886895
gcuaguaagucucuuucuu

SEQ ID NO: 2433799 - RNA, 19 nt, Artificial Sequence
  Description of Artificial Sequence: Synthetic oligonucleotide
  Antisense strand to SEQ ID NO: 2433798
aagaaagagacuuacuagc

SEQ ID NO: 2433800 - RNA, 19 nt, Artificial Sequence
  Description of Artificial Sequence: Synthetic oligonucleotide
  Sense strand starting at position 3826 of SEQ ID NO: 1886895
ggugacacugccugaugaa

SEQ ID NO: 2433801 - RNA, 19 nt, Artificial Sequence
  Description of Artificial Sequence: Synthetic oligonucleotide
  Antisense strand to SEQ ID NO: 2433800
uucaucaggcagugucacc

SEQ ID NO: 2433802 - RNA, 19 nt, Artificial Sequence
  Description of Artificial Sequence: Synthetic oligonucleotide
  Sense strand starting at position 3827 of SEQ ID NO: 1886895
gugacacugccugaugaac

SEQ ID NO: 2433803 - RNA, 19 nt, Artificial Sequence
  Description of Artificial Sequence: Synthetic oligonucleotide
  Antisense strand to SEQ ID NO: 2433802
guucaucaggcagugucac

SEQ ID NO: 2433804 - RNA, 19 nt, Artificial Sequence
  Description of Artificial Sequence: Synthetic oligonucleotide
  Sense strand starting at position 3861 of SEQ ID NO: 1886895
gccugcuugugcuuaguuu

SEQ ID NO: 2433805 - RNA, 19 nt, Artificial Sequence
  Description of Artificial Sequence: Synthetic oligonucleotide
  Antisense strand to SEQ ID NO: 2433804
aaacuaagcacaagcaggc

SEQ ID NO: 2433806 - RNA, 19 nt, Artificial Sequence
  Description of Artificial Sequence: Synthetic oligonucleotide
  Sense strand starting at position 3872 of SEQ ID NO: 1886895
cuuaguuucugcccuuuga

SEQ ID NO: 2433807 - RNA, 19 nt, Artificial Sequence
  Description of Artificial Sequence: Synthetic oligonucleotide
  Antisense strand to SEQ ID NO: 2433806
ucaaagggcagaaacuaag

SEQ ID NO: 2433808 - RNA, 19 nt, Artificial Sequence
  Description of Artificial Sequence: Synthetic oligonucleotide
  Sense strand starting at position 3967 of SEQ ID NO: 1886895
guggguuuccugggauguc

SEQ ID NO: 2433809 - RNA, 19 nt, Artificial Sequence
  Description of Artificial Sequence: Synthetic oligonucleotide
  Antisense strand to SEQ ID NO: 2433808
gacaucccaggaaacccac

SEQ ID NO: 2433810 - RNA, 19 nt, Artificial Sequence
  Description of Artificial Sequence: Synthetic oligonucleotide
  Sense strand starting at position 237 of SEQ ID NO: 1886896
ugccgaagccuccagagua

SEQ ID NO: 2433811 - RNA, 19 nt, Artificial Sequence
  Description of Artificial Sequence: Synthetic oligonucleotide
  Antisense strand to SEQ ID NO: 2433810
uacucuggaggcuucggca

SEQ ID NO: 2433812 - RNA, 19 nt, Artificial Sequence
  Description of Artificial Sequence: Synthetic oligonucleotide
  Sense strand starting at position 436 of SEQ ID NO: 1886896
uuuaauuguugggacuuaa

SEQ ID NO: 2433813 - RNA, 19 nt, Artificial Sequence
  Description of Artificial Sequence: Synthetic oligonucleotide
  Antisense strand to SEQ ID NO: 2433812
uuaagucccaacaauuaaa

SEQ ID NO: 2433814 - RNA, 19 nt, Artificial Sequence
  Description of Artificial Sequence: Synthetic oligonucleotide
  Sense strand starting at position 807 of SEQ ID NO: 1886896
ucauuagaauauugaguug

SEQ ID NO: 2433815 - RNA, 19 nt, Artificial Sequence
  Description of Artificial Sequence: Synthetic oligonucleotide
  Antisense strand to SEQ ID NO: 2433814
caacucaauauucuaauga

SEQ ID NO: 2433816 - RNA, 19 nt, Artificial Sequence
  Description of Artificial Sequence: Synthetic oligonucleotide
  Sense strand starting at position 1204 of SEQ ID NO: 1886896
gcugaucaccaccagugau

SEQ ID NO: 2433817 - RNA, 19 nt, Artificial Sequence
  Description of Artificial Sequence: Synthetic oligonucleotide
  Antisense strand to SEQ ID NO: 2433816
aucacugguggugaucagc

SEQ ID NO: 2433818 - RNA, 19 nt, Artificial Sequence
  Description of Artificial Sequence: Synthetic oligonucleotide
  Sense strand starting at position 1421 of SEQ ID NO: 1886896
gcuccagguuccucauauc

SEQ ID NO: 2433819 - RNA, 19 nt, Artificial Sequence
  Description of Artificial Sequence: Synthetic oligonucleotide
  Antisense strand to SEQ ID NO: 2433818
gauaugaggaaccuggagc

SEQ ID NO: 2433820 - RNA, 19 nt, Artificial Sequence
  Description of Artificial Sequence: Synthetic oligonucleotide
  Sense strand starting at position 1527 of SEQ ID NO: 1886896
uucccuuguuccgugagua

SEQ ID NO: 2433821 - RNA, 19 nt, Artificial Sequence
  Description of Artificial Sequence: Synthetic oligonucleotide
  Antisense strand to SEQ ID NO: 2433820
uacucacggaacaagggaa

SEQ ID NO: 2433822 - RNA, 19 nt, Artificial Sequence
  Description of Artificial Sequence: Synthetic oligonucleotide
  Sense strand starting at position 1528 of SEQ ID NO: 1886896
ucccuuguuccgugaguag

SEQ ID NO: 2433823 - RNA, 19 nt, Artificial Sequence
  Description of Artificial Sequence: Synthetic oligonucleotide
  Antisense strand to SEQ ID NO: 2433822
cuacucacggaacaaggga

SEQ ID NO: 2433824 - RNA, 19 nt, Artificial Sequence
  Description of Artificial Sequence: Synthetic oligonucleotide
  Sense strand starting at position 2059 of SEQ ID NO: 1886896
gggugugauccuugggcca

SEQ ID NO: 2433825 - RNA, 19 nt, Artificial Sequence
  Description of Artificial Sequence: Synthetic oligonucleotide
  Antisense strand to SEQ ID NO: 2433824
uggcccaaggaucacaccc

SEQ ID NO: 2433826 - RNA, 19 nt, Artificial Sequence
  Description of Artificial Sequence: Synthetic oligonucleotide
  Sense strand starting at position 2061 of SEQ ID NO: 1886896
gugugauccuugggccaag

SEQ ID NO: 2433827 - RNA, 19 nt, Artificial Sequence
  Description of Artificial Sequence: Synthetic oligonucleotide
  Antisense strand to SEQ ID NO: 2433826
cuuggcccaaggaucacac

SEQ ID NO: 2433828 - RNA, 19 nt, Artificial Sequence
  Description of Artificial Sequence: Synthetic oligonucleotide
  Sense strand starting at position 2062 of SEQ ID NO: 1886896
ugugauccuugggccaaga

SEQ ID NO: 2433829 - RNA, 19 nt, Artificial Sequence
  Description of Artificial Sequence: Synthetic oligonucleotide
  Antisense strand to SEQ ID NO: 2433828
ucuuggcccaaggaucaca

SEQ ID NO: 2433830 - RNA, 19 nt, Artificial Sequence
  Description of Artificial Sequence: Synthetic oligonucleotide
  Sense strand starting at position 2114 of SEQ ID NO: 1886896
gagaaacaguccuugagug

SEQ ID NO: 2433831 - RNA, 19 nt, Artificial Sequence
  Description of Artificial Sequence: Synthetic oligonucleotide
  Antisense strand to SEQ ID NO: 2433830
cacucaaggacuguuucuc

SEQ ID NO: 2433832 - RNA, 19 nt, Artificial Sequence
  Description of Artificial Sequence: Synthetic oligonucleotide
  Sense strand starting at position 2116 of SEQ ID NO: 1886896
gaaacaguccuugagugcu

SEQ ID NO: 2433833 - RNA, 19 nt, Artificial Sequence
  Description of Artificial Sequence: Synthetic oligonucleotide
  Antisense strand to SEQ ID NO: 2433832
agcacucaaggacuguuuc

SEQ ID NO: 2433834 - RNA, 19 nt, Artificial Sequence
  Description of Artificial Sequence: Synthetic oligonucleotide
  Sense strand starting at position 2146 of SEQ ID NO: 1886896
uggccuuuggucugugaug

SEQ ID NO: 2433835 - RNA, 19 nt, Artificial Sequence
  Description of Artificial Sequence: Synthetic oligonucleotide
  Antisense strand to SEQ ID NO: 2433834
caucacagaccaaaggcca

SEQ ID NO: 2433836 - RNA, 19 nt, Artificial Sequence
  Description of Artificial Sequence: Synthetic oligonucleotide
  Sense strand starting at position 2148 of SEQ ID NO: 1886896
gccuuuggucugugauggu

SEQ ID NO: 2433837 - RNA, 19 nt, Artificial Sequence
  Description of Artificial Sequence: Synthetic oligonucleotide
  Antisense strand to SEQ ID NO: 2433836
accaucacagaccaaaggc

SEQ ID NO: 2433838 - RNA, 19 nt, Artificial Sequence
  Description of Artificial Sequence: Synthetic oligonucleotide
  Sense strand starting at position 2161 of SEQ ID NO: 1886896
gaugguuucuccuguggga

SEQ ID NO: 2433839 - RNA, 19 nt, Artificial Sequence
  Description of Artificial Sequence: Synthetic oligonucleotide
  Antisense strand to SEQ ID NO: 2433838
ucccacaggagaaaccauc

SEQ ID NO: 2433840 - RNA, 19 nt, Artificial Sequence
  Description of Artificial Sequence: Synthetic oligonucleotide
  Sense strand starting at position 2209 of SEQ ID NO: 1886896
ccagaaauguccuagacca

SEQ ID NO: 2433841 - RNA, 19 nt, Artificial Sequence
  Description of Artificial Sequence: Synthetic oligonucleotide
  Antisense strand to SEQ ID NO: 2433840
uggucuaggacauuucugg

SEQ ID NO: 2433842 - RNA, 19 nt, Artificial Sequence
  Description of Artificial Sequence: Synthetic oligonucleotide
  Sense strand starting at position 2226 of SEQ ID NO: 1886896
cagauaguguaacagcauu

SEQ ID NO: 2433843 - RNA, 19 nt, Artificial Sequence
  Description of Artificial Sequence: Synthetic oligonucleotide
  Antisense strand to SEQ ID NO: 2433842
aaugcuguuacacuaucug

SEQ ID NO: 2433844 - RNA, 19 nt, Artificial Sequence
  Description of Artificial Sequence: Synthetic oligonucleotide
  Sense strand starting at position 2232 of SEQ ID NO: 1886896
guguaacagcauuaguuac

SEQ ID NO: 2433845 - RNA, 19 nt, Artificial Sequence
  Description of Artificial Sequence: Synthetic oligonucleotide
  Antisense strand to SEQ ID NO: 2433844
guaacuaaugcuguuacac

SEQ ID NO: 2433846 - RNA, 19 nt, Artificial Sequence
  Description of Artificial Sequence: Synthetic oligonucleotide
  Sense strand starting at position 2247 of SEQ ID NO: 1886896
uuaccaaauugccagagau

SEQ ID NO: 2433847 - RNA, 19 nt, Artificial Sequence
  Description of Artificial Sequence: Synthetic oligonucleotide
  Antisense strand to SEQ ID NO: 2433846
aucucuggcaauuugguaa

SEQ ID NO: 2433848 - RNA, 19 nt, Artificial Sequence
  Description of Artificial Sequence: Synthetic oligonucleotide
  Sense strand starting at position 2277 of SEQ ID NO: 1886896
gacauugauuugcauguaa

SEQ ID NO: 2433849 - RNA, 19 nt, Artificial Sequence
  Description of Artificial Sequence: Synthetic oligonucleotide
  Antisense strand to SEQ ID NO: 2433848
uuacaugcaaaucaauguc

SEQ ID NO: 2433850 - RNA, 19 nt, Artificial Sequence
  Description of Artificial Sequence: Synthetic oligonucleotide
  Sense strand starting at position 2311 of SEQ ID NO: 1886896
gcacaugaguacuaaggaa

SEQ ID NO: 2433851 - RNA, 19 nt, Artificial Sequence
  Description of Artificial Sequence: Synthetic oligonucleotide
  Antisense strand to SEQ ID NO: 2433850
uuccuuaguacucaugugc

SEQ ID NO: 2433852 - RNA, 19 nt, Artificial Sequence
  Description of Artificial Sequence: Synthetic oligonucleotide
  Sense strand starting at position 3041 of SEQ ID NO: 1886896
ugcccuguccaaugggaua

SEQ ID NO: 2433853 - RNA, 19 nt, Artificial Sequence
  Description of Artificial Sequence: Synthetic oligonucleotide
  Antisense strand to SEQ ID NO: 2433852
uaucccauuggacagggca

SEQ ID NO: 2433854 - RNA, 19 nt, Artificial Sequence
  Description of Artificial Sequence: Synthetic oligonucleotide
  Sense strand starting at position 3053 of SEQ ID NO: 1886896
ugggauaccuucuaagccu

SEQ ID NO: 2433855 - RNA, 19 nt, Artificial Sequence
  Description of Artificial Sequence: Synthetic oligonucleotide
  Antisense strand to SEQ ID NO: 2433854
aggcuuagaagguauccca

SEQ ID NO: 2433856 - RNA, 19 nt, Artificial Sequence
  Description of Artificial Sequence: Synthetic oligonucleotide
  Sense strand starting at position 3158 of SEQ ID NO: 1886896
ugucaaucccugcaagcuu

SEQ ID NO: 2433857 - RNA, 19 nt, Artificial Sequence
  Description of Artificial Sequence: Synthetic oligonucleotide
  Antisense strand to SEQ ID NO: 2433856
aagcuugcagggauugaca

SEQ ID NO: 2433858 - RNA, 19 nt, Artificial Sequence
  Description of Artificial Sequence: Synthetic oligonucleotide
  Sense strand starting at position 3385 of SEQ ID NO: 1886896
gcccuugagucagcuucua

SEQ ID NO: 2433859 - RNA, 19 nt, Artificial Sequence
  Description of Artificial Sequence: Synthetic oligonucleotide
  Antisense strand to SEQ ID NO: 2433858
uagaagcugacucaagggc

SEQ ID NO: 2433860 - RNA, 19 nt, Artificial Sequence
  Description of Artificial Sequence: Synthetic oligonucleotide
  Sense strand starting at position 3390 of SEQ ID NO: 1886896
ugagucagcuucuauccua

SEQ ID NO: 2433861 - RNA, 19 nt, Artificial Sequence
  Description of Artificial Sequence: Synthetic oligonucleotide
  Antisense strand to SEQ ID NO: 2433860
uaggauagaagcugacuca

SEQ ID NO: 2433862 - RNA, 19 nt, Artificial Sequence
  Description of Artificial Sequence: Synthetic oligonucleotide
  Sense strand starting at position 3393 of SEQ ID NO: 1886896
gucagcuucuauccuaguu

SEQ ID NO: 2433863 - RNA, 19 nt, Artificial Sequence
  Description of Artificial Sequence: Synthetic oligonucleotide
  Antisense strand to SEQ ID NO: 2433862
aacuaggauagaagcugac

SEQ ID NO: 2433864 - RNA, 19 nt, Artificial Sequence
  Description of Artificial Sequence: Synthetic oligonucleotide
  Sense strand starting at position 3465 of SEQ ID NO: 1886896
gcuggugcuuacccuaaga

SEQ ID NO: 2433865 - RNA, 19 nt, Artificial Sequence
  Description of Artificial Sequence: Synthetic oligonucleotide
  Antisense strand to SEQ ID NO: 2433864
ucuuaggguaagcaccagc

SEQ ID NO: 2433866 - RNA, 19 nt, Artificial Sequence
  Description of Artificial Sequence: Synthetic oligonucleotide
  Sense strand starting at position 3467 of SEQ ID NO: 1886896
uggugcuuacccuaagaga

SEQ ID NO: 2433867 - RNA, 19 nt, Artificial Sequence
  Description of Artificial Sequence: Synthetic oligonucleotide
  Antisense strand to SEQ ID NO: 2433866
ucucuuaggguaagcacca

SEQ ID NO: 2433868 - RNA, 19 nt, Artificial Sequence
  Description of Artificial Sequence: Synthetic oligonucleotide
  Sense strand starting at position 3586 of SEQ ID NO: 1886896
agcagugacuugggcuuua

SEQ ID NO: 2433869 - RNA, 19 nt, Artificial Sequence
  Description of Artificial Sequence: Synthetic oligonucleotide
  Antisense strand to SEQ ID NO: 2433868
uaaagcccaagucacugcu

SEQ ID NO: 2433870 - RNA, 19 nt, Artificial Sequence
  Description of Artificial Sequence: Synthetic oligonucleotide
  Sense strand starting at position 3611 of SEQ ID NO: 1886896
cuuugaagucagggaugga

SEQ ID NO: 2433871 - RNA, 19 nt, Artificial Sequence
  Description of Artificial Sequence: Synthetic oligonucleotide
  Antisense strand to SEQ ID NO: 2433870
uccaucccugacuucaaag

SEQ ID NO: 2433872 - RNA, 19 nt, Artificial Sequence
  Description of Artificial Sequence: Synthetic oligonucleotide
  Sense strand starting at position 3768 of SEQ ID NO: 1886896
gaauuaaguggcuggauca

SEQ ID NO: 2433873 - RNA, 19 nt, Artificial Sequence
  Description of Artificial Sequence: Synthetic oligonucleotide
  Antisense strand to SEQ ID NO: 2433872
ugauccagccacuuaauuc

SEQ ID NO: 2433874 - RNA, 19 nt, Artificial Sequence
  Description of Artificial Sequence: Synthetic oligonucleotide
  Sense strand starting at position 3870 of SEQ ID NO: 1886896
cucggauacucuuaugaac

SEQ ID NO: 2433875 - RNA, 19 nt, Artificial Sequence
  Description of Artificial Sequence: Synthetic oligonucleotide
  Antisense strand to SEQ ID NO: 2433874
guucauaagaguauccgag

SEQ ID NO: 2433876 - RNA, 19 nt, Artificial Sequence
  Description of Artificial Sequence: Synthetic oligonucleotide
  Sense strand starting at position 3872 of SEQ ID NO: 1886896
cggauacucuuaugaacaa

SEQ ID NO: 2433877 - RNA, 19 nt, Artificial Sequence
  Description of Artificial Sequence: Synthetic oligonucleotide
  Antisense strand to SEQ ID NO: 2433876
uuguucauaagaguauccg

SEQ ID NO: 2433878 - RNA, 19 nt, Artificial Sequence
  Description of Artificial Sequence: Synthetic oligonucleotide
  Sense strand starting at position 3873 of SEQ ID NO: 1886896
ggauacucuuaugaacaau

SEQ ID NO: 2433879 - RNA, 19 nt, Artificial Sequence
  Description of Artificial Sequence: Synthetic oligonucleotide
  Antisense strand to SEQ ID NO: 2433878
auuguucauaagaguaucc

SEQ ID NO: 2433880 - RNA, 19 nt, Artificial Sequence
  Description of Artificial Sequence: Synthetic oligonucleotide
  Sense strand starting at position 3884 of SEQ ID NO: 1886896
ugaacaaugugggauguaa

SEQ ID NO: 2433881 - RNA, 19 nt, Artificial Sequence
  Description of Artificial Sequence: Synthetic oligonucleotide
  Antisense strand to SEQ ID NO: 2433880
uuacaucccacauuguuca

SEQ ID NO: 2433882 - RNA, 19 nt, Artificial Sequence
  Description of Artificial Sequence: Synthetic oligonucleotide
  Sense strand starting at position 3886 of SEQ ID NO: 1886896
aacaaugugggauguaaau

SEQ ID NO: 2433883 - RNA, 19 nt, Artificial Sequence
  Description of Artificial Sequence: Synthetic oligonucleotide
  Antisense strand to SEQ ID NO: 2433882
auuuacaucccacauuguu

SEQ ID NO: 2433884 - RNA, 19 nt, Artificial Sequence
  Description of Artificial Sequence: Synthetic oligonucleotide
  Sense strand starting at position 3908 of SEQ ID NO: 1886896
auacccuaguugugagaga

SEQ ID NO: 2433885 - RNA, 19 nt, Artificial Sequence
  Description of Artificial Sequence: Synthetic oligonucleotide
  Antisense strand to SEQ ID NO: 2433884
ucucucacaacuaggguau

SEQ ID NO: 2433886 - RNA, 19 nt, Artificial Sequence
  Description of Artificial Sequence: Synthetic oligonucleotide
  Sense strand starting at position 56 of SEQ ID NO: 1886897
gagggcauuguggauaauu

SEQ ID NO: 2433887 - RNA, 19 nt, Artificial Sequence
  Description of Artificial Sequence: Synthetic oligonucleotide
  Antisense strand to SEQ ID NO: 2433886
aauuauccacaaugcccuc

SEQ ID NO: 2433888 - RNA, 19 nt, Artificial Sequence
  Description of Artificial Sequence: Synthetic oligonucleotide
  Sense strand starting at position 180 of SEQ ID NO: 1886897
gcuaccuccgagugaguaa

SEQ ID NO: 2433889 - RNA, 19 nt, Artificial Sequence
  Description of Artificial Sequence: Synthetic oligonucleotide
  Antisense strand to SEQ ID NO: 2433888
uuacucacucggagguagc

SEQ ID NO: 2433890 - RNA, 19 nt, Artificial Sequence
  Description of Artificial Sequence: Synthetic oligonucleotide
  Sense strand starting at position 181 of SEQ ID NO: 1886897
cuaccuccgagugaguaaa

SEQ ID NO: 2433891 - RNA, 19 nt, Artificial Sequence
  Description of Artificial Sequence: Synthetic oligonucleotide
  Antisense strand to SEQ ID NO: 2433890
uuuacucacucggagguag

SEQ ID NO: 2433892 - RNA, 19 nt, Artificial Sequence
  Description of Artificial Sequence: Synthetic oligonucleotide
  Sense strand starting at position 284 of SEQ ID NO: 1886897
uaaauaacuccagggugau

SEQ ID NO: 2433893 - RNA, 19 nt, Artificial Sequence
  Description of Artificial Sequence: Synthetic oligonucleotide
  Antisense strand to SEQ ID NO: 2433892
aucacccuggaguuauuua

SEQ ID NO: 2433894 - RNA, 19 nt, Artificial Sequence
  Description of Artificial Sequence: Synthetic oligonucleotide
  Sense strand starting at position 649 of SEQ ID NO: 1886897
gggcuugagaagcaacuua

SEQ ID NO: 2433895 - RNA, 19 nt, Artificial Sequence
  Description of Artificial Sequence: Synthetic oligonucleotide
  Antisense strand to SEQ ID NO: 2433894
uaaguugcuucucaagccc

SEQ ID NO: 2433896 - RNA, 19 nt, Artificial Sequence
  Description of Artificial Sequence: Synthetic oligonucleotide
  Sense strand starting at position 665 of SEQ ID NO: 1886897
uuaagagacucccaguauc

SEQ ID NO: 2433897 - RNA, 19 nt, Artificial Sequence
  Description of Artificial Sequence: Synthetic oligonucleotide
  Antisense strand to SEQ ID NO: 2433896
gauacugggagucucuuaa

SEQ ID NO: 2433898 - RNA, 19 nt, Artificial Sequence
  Description of Artificial Sequence: Synthetic oligonucleotide
  Sense strand starting at position 668 of SEQ ID NO: 1886897
agagacucccaguaucagu

SEQ ID NO: 2433899 - RNA, 19 nt, Artificial Sequence
  Description of Artificial Sequence: Synthetic oligonucleotide
  Antisense strand to SEQ ID NO: 2433898
acugauacugggagucucu

SEQ ID NO: 2433900 - RNA, 19 nt, Artificial Sequence
  Description of Artificial Sequence: Synthetic oligonucleotide
  Sense strand starting at position 676 of SEQ ID NO: 1886897
ccaguaucaguaugaguca

SEQ ID NO: 2433901 - RNA, 19 nt, Artificial Sequence
  Description of Artificial Sequence: Synthetic oligonucleotide
  Antisense strand to SEQ ID NO: 2433900
ugacucauacugauacugg

SEQ ID NO: 2433902 - RNA, 19 nt, Artificial Sequence
  Description of Artificial Sequence: Synthetic oligonucleotide
  Sense strand starting at position 771 of SEQ ID NO: 1886897
gcaagaucacgagguugga

SEQ ID NO: 2433903 - RNA, 19 nt, Artificial Sequence
  Description of Artificial Sequence: Synthetic oligonucleotide
  Antisense strand to SEQ ID NO: 2433902
uccaaccucgugaucuugc

SEQ ID NO: 2433904 - RNA, 19 nt, Artificial Sequence
  Description of Artificial Sequence: Synthetic oligonucleotide
  Sense strand starting at position 790 of SEQ ID NO: 1886897
cuagcuggugucuaugagu

SEQ ID NO: 2433905 - RNA, 19 nt, Artificial Sequence
  Description of Artificial Sequence: Synthetic oligonucleotide
  Antisense strand to SEQ ID NO: 2433904
acucauagacaccagcuag

SEQ ID NO: 2433906 - RNA, 19 nt, Artificial Sequence
  Description of Artificial Sequence: Synthetic oligonucleotide
  Sense strand starting at position 799 of SEQ ID NO: 1886897
gucuaugagugcuuccaau

SEQ ID NO: 2433907 - RNA, 19 nt, Artificial Sequence
  Description of Artificial Sequence: Synthetic oligonucleotide
  Antisense strand to SEQ ID NO: 2433906
auuggaagcacucauagac

SEQ ID NO: 2433908 - RNA, 19 nt, Artificial Sequence
  Description of Artificial Sequence: Synthetic oligonucleotide
  Sense strand starting at position 938 of SEQ ID NO: 1886897
ccaggaggcagaugugaaa

SEQ ID NO: 2433909 - RNA, 19 nt, Artificial Sequence
  Description of Artificial Sequence: Synthetic oligonucleotide
  Antisense strand to SEQ ID NO: 2433908
uuucacaucugccuccugg

SEQ ID NO: 2433910 - RNA, 19 nt, Artificial Sequence
  Description of Artificial Sequence: Synthetic oligonucleotide
  Sense strand starting at position 945 of SEQ ID NO: 1886897
gcagaugugaaauaaguua

SEQ ID NO: 2433911 - RNA, 19 nt, Artificial Sequence
  Description of Artificial Sequence: Synthetic oligonucleotide
  Antisense strand to SEQ ID NO: 2433910
uaacuuauuucacaucugc

SEQ ID NO: 2433912 - RNA, 19 nt, Artificial Sequence
  Description of Artificial Sequence: Synthetic oligonucleotide
  Sense strand starting at position 1023 of SEQ ID NO: 1886897
ccuggccugccucauuaau

SEQ ID NO: 2433913 - RNA, 19 nt, Artificial Sequence
  Description of Artificial Sequence: Synthetic oligonucleotide
  Antisense strand to SEQ ID NO: 2433912
auuaaugaggcaggccagg

SEQ ID NO: 2433914 - RNA, 19 nt, Artificial Sequence
  Description of Artificial Sequence: Synthetic oligonucleotide
  Sense strand starting at position 1035 of SEQ ID NO: 1886897
cauuaauugcaguggcacu

SEQ ID NO: 2433915 - RNA, 19 nt, Artificial Sequence
  Description of Artificial Sequence: Synthetic oligonucleotide
  Antisense strand to SEQ ID NO: 2433914
agugccacugcaauuaaug

SEQ ID NO: 2433916 - RNA, 19 nt, Artificial Sequence
  Description of Artificial Sequence: Synthetic oligonucleotide
  Sense strand starting at position 1198 of SEQ ID NO: 1886897
gcuucuugcccagggugaa

SEQ ID NO: 2433917 - RNA, 19 nt, Artificial Sequence
  Description of Artificial Sequence: Synthetic oligonucleotide
  Antisense strand to SEQ ID NO: 2433916
uucacccugggcaagaagc

SEQ ID NO: 2433918 - RNA, 19 nt, Artificial Sequence
  Description of Artificial Sequence: Synthetic oligonucleotide
  Sense strand starting at position 1698 of SEQ ID NO: 1886897
uuaccuguguggccagaaa

SEQ ID NO: 2433919 - RNA, 19 nt, Artificial Sequence
  Description of Artificial Sequence: Synthetic oligonucleotide
  Antisense strand to SEQ ID NO: 2433918
uuucuggccacacagguaa

SEQ ID NO: 2433920 - RNA, 19 nt, Artificial Sequence
  Description of Artificial Sequence: Synthetic oligonucleotide
  Sense strand starting at position 1782 of SEQ ID NO: 1886897
gagguuaucucugugguga

SEQ ID NO: 2433921 - RNA, 19 nt, Artificial Sequence
  Description of Artificial Sequence: Synthetic oligonucleotide
  Antisense strand to SEQ ID NO: 2433920
ucaccacagagauaaccuc

SEQ ID NO: 2433922 - RNA, 19 nt, Artificial Sequence
  Description of Artificial Sequence: Synthetic oligonucleotide
  Sense strand starting at position 1783 of SEQ ID NO: 1886897
agguuaucucuguggugac

SEQ ID NO: 2433923 - RNA, 19 nt, Artificial Sequence
  Description of Artificial Sequence: Synthetic oligonucleotide
  Antisense strand to SEQ ID NO: 2433922
gucaccacagagauaaccu

SEQ ID NO: 2433924 - RNA, 19 nt, Artificial Sequence
  Description of Artificial Sequence: Synthetic oligonucleotide
  Sense strand starting at position 1812 of SEQ ID NO: 1886897
accagaauucugugugggu

SEQ ID NO: 2433925 - RNA, 19 nt, Artificial Sequence
  Description of Artificial Sequence: Synthetic oligonucleotide
  Antisense strand to SEQ ID NO: 2433924
acccacacagaauucuggu

SEQ ID NO: 2433926 - RNA, 19 nt, Artificial Sequence
  Description of Artificial Sequence: Synthetic oligonucleotide
  Sense strand starting at position 1813 of SEQ ID NO: 1886897
ccagaauucuguguggguc

SEQ ID NO: 2433927 - RNA, 19 nt, Artificial Sequence
  Description of Artificial Sequence: Synthetic oligonucleotide
  Antisense strand to SEQ ID NO: 2433926
gacccacacagaauucugg

SEQ ID NO: 2433928 - RNA, 19 nt, Artificial Sequence
  Description of Artificial Sequence: Synthetic oligonucleotide
  Sense strand starting at position 1814 of SEQ ID NO: 1886897
cagaauucuguguggguca

SEQ ID NO: 2433929 - RNA, 19 nt, Artificial Sequence
  Description of Artificial Sequence: Synthetic oligonucleotide
  Antisense strand to SEQ ID NO: 2433928
ugacccacacagaauucug

SEQ ID NO: 2433930 - RNA, 19 nt, Artificial Sequence
  Description of Artificial Sequence: Synthetic oligonucleotide
  Sense strand starting at position 1816 of SEQ ID NO: 1886897
gaauucugugugggucaca

SEQ ID NO: 2433931 - RNA, 19 nt, Artificial Sequence
  Description of Artificial Sequence: Synthetic oligonucleotide
  Antisense strand to SEQ ID NO: 2433930
ugugacccacacagaauuc

SEQ ID NO: 2433932 - RNA, 19 nt, Artificial Sequence
  Description of Artificial Sequence: Synthetic oligonucleotide
  Sense strand starting at position 2292 of SEQ ID NO: 1886897
ggaauauaguuuccaaagu

SEQ ID NO: 2433933 - RNA, 19 nt, Artificial Sequence
  Description of Artificial Sequence: Synthetic oligonucleotide
  Antisense strand to SEQ ID NO: 2433932
acuuuggaaacuauauucc

SEQ ID NO: 2433934 - RNA, 19 nt, Artificial Sequence
  Description of Artificial Sequence: Synthetic oligonucleotide
  Sense strand starting at position 2338 of SEQ ID NO: 1886897
acgcuaaguugacuuaauu

SEQ ID NO: 2433935 - RNA, 19 nt, Artificial Sequence
  Description of Artificial Sequence: Synthetic oligonucleotide
  Antisense strand to SEQ ID NO: 2433934
aauuaagucaacuuagcgu

SEQ ID NO: 2433936 - RNA, 19 nt, Artificial Sequence
  Description of Artificial Sequence: Synthetic oligonucleotide
  Sense strand starting at position 2542 of SEQ ID NO: 1886897
auucucuugugaccaguau

SEQ ID NO: 2433937 - RNA, 19 nt, Artificial Sequence
  Description of Artificial Sequence: Synthetic oligonucleotide
  Antisense strand to SEQ ID NO: 2433936
auacuggucacaagagaau

SEQ ID NO: 2433938 - RNA, 19 nt, Artificial Sequence
  Description of Artificial Sequence: Synthetic oligonucleotide
  Sense strand starting at position 2543 of SEQ ID NO: 1886897
uucucuugugaccaguauu

SEQ ID NO: 2433939 - RNA, 19 nt, Artificial Sequence
  Description of Artificial Sequence: Synthetic oligonucleotide
  Antisense strand to SEQ ID NO: 2433938
aauacuggucacaagagaa

SEQ ID NO: 2433940 - RNA, 19 nt, Artificial Sequence
  Description of Artificial Sequence: Synthetic oligonucleotide
  Sense strand starting at position 2624 of SEQ ID NO: 1886897
ugccucagucaaugugaaa

SEQ ID NO: 2433941 - RNA, 19 nt, Artificial Sequence
  Description of Artificial Sequence: Synthetic oligonucleotide
  Antisense strand to SEQ ID NO: 2433940
uuucacauugacugaggca

SEQ ID NO: 2433942 - RNA, 19 nt, Artificial Sequence
  Description of Artificial Sequence: Synthetic oligonucleotide
  Sense strand starting at position 2635 of SEQ ID NO: 1886897
augugaaaucaauaaccgu

SEQ ID NO: 2433943 - RNA, 19 nt, Artificial Sequence
  Description of Artificial Sequence: Synthetic oligonucleotide
  Antisense strand to SEQ ID NO: 2433942
acgguuauugauuucacau

SEQ ID NO: 2433944 - RNA, 19 nt, Artificial Sequence
  Description of Artificial Sequence: Synthetic oligonucleotide
  Sense strand starting at position 2686 of SEQ ID NO: 1886897
uggauuucacguugaugua

SEQ ID NO: 2433945 - RNA, 19 nt, Artificial Sequence
  Description of Artificial Sequence: Synthetic oligonucleotide
  Antisense strand to SEQ ID NO: 2433944
uacaucaacgugaaaucca

SEQ ID NO: 2433946 - RNA, 19 nt, Artificial Sequence
  Description of Artificial Sequence: Synthetic oligonucleotide
  Sense strand starting at position 2945 of SEQ ID NO: 1886897
gccugaguguguaggaaug

SEQ ID NO: 2433947 - RNA, 19 nt, Artificial Sequence
  Description of Artificial Sequence: Synthetic oligonucleotide
  Antisense strand to SEQ ID NO: 2433946
cauuccuacacacucaggc

SEQ ID NO: 2433948 - RNA, 19 nt, Artificial Sequence
  Description of Artificial Sequence: Synthetic oligonucleotide
  Sense strand starting at position 2955 of SEQ ID NO: 1886897
guaggaaugccugccguuu

SEQ ID NO: 2433949 - RNA, 19 nt, Artificial Sequence
  Description of Artificial Sequence: Synthetic oligonucleotide
  Antisense strand to SEQ ID NO: 2433948
aaacggcaggcauuccuac

SEQ ID NO: 2433950 - RNA, 19 nt, Artificial Sequence
  Description of Artificial Sequence: Synthetic oligonucleotide
  Sense strand starting at position 3033 of SEQ ID NO: 1886897
cucugcucuugcucuagaa

SEQ ID NO: 2433951 - RNA, 19 nt, Artificial Sequence
  Description of Artificial Sequence: Synthetic oligonucleotide
  Antisense strand to SEQ ID NO: 2433950
uucuagagcaagagcagag

SEQ ID NO: 2433952 - RNA, 19 nt, Artificial Sequence
  Description of Artificial Sequence: Synthetic oligonucleotide
  Sense strand starting at position 3079 of SEQ ID NO: 1886897
guguguugccagaguaaug

SEQ ID NO: 2433953 - RNA, 19 nt, Artificial Sequence
  Description of Artificial Sequence: Synthetic oligonucleotide
  Antisense strand to SEQ ID NO: 2433952
cauuacucuggcaacacac

SEQ ID NO: 2433954 - RNA, 19 nt, Artificial Sequence
  Description of Artificial Sequence: Synthetic oligonucleotide
  Sense strand starting at position 3091 of SEQ ID NO: 1886897
aguaaugagguccagaugu

SEQ ID NO: 2433955 - RNA, 19 nt, Artificial Sequence
  Description of Artificial Sequence: Synthetic oligonucleotide
  Antisense strand to SEQ ID NO: 2433954
acaucuggaccucauuacu

SEQ ID NO: 2433956 - RNA, 19 nt, Artificial Sequence
  Description of Artificial Sequence: Synthetic oligonucleotide
  Sense strand starting at position 3249 of SEQ ID NO: 1886897
uuggguuucggacaacuca

SEQ ID NO: 2433957 - RNA, 19 nt, Artificial Sequence
  Description of Artificial Sequence: Synthetic oligonucleotide
  Antisense strand to SEQ ID NO: 2433956
ugaguuguccgaaacccaa

SEQ ID NO: 2433958 - RNA, 19 nt, Artificial Sequence
  Description of Artificial Sequence: Synthetic oligonucleotide
  Sense strand starting at position 3422 of SEQ ID NO: 1886897
cggagucuguguccacuaa

SEQ ID NO: 2433959 - RNA, 19 nt, Artificial Sequence
  Description of Artificial Sequence: Synthetic oligonucleotide
  Antisense strand to SEQ ID NO: 2433958
uuaguggacacagacuccg

SEQ ID NO: 2433960 - RNA, 19 nt, Artificial Sequence
  Description of Artificial Sequence: Synthetic oligonucleotide
  Sense strand starting at position 3423 of SEQ ID NO: 1886897
ggagucuguguccacuaau

SEQ ID NO: 2433961 - RNA, 19 nt, Artificial Sequence
  Description of Artificial Sequence: Synthetic oligonucleotide
  Antisense strand to SEQ ID NO: 2433960
auuaguggacacagacucc

SEQ ID NO: 2433962 - RNA, 19 nt, Artificial Sequence
  Description of Artificial Sequence: Synthetic oligonucleotide
  Sense strand starting at position 3939 of SEQ ID NO: 1886897
cauaucuugugagcgcuua

SEQ ID NO: 2433963 - RNA, 19 nt, Artificial Sequence
  Description of Artificial Sequence: Synthetic oligonucleotide
  Antisense strand to SEQ ID NO: 2433962
uaagcgcucacaagauaug

SEQ ID NO: 2433964 - RNA, 19 nt, Artificial Sequence
  Description of Artificial Sequence: Synthetic oligonucleotide
  Sense strand starting at position 3943 of SEQ ID NO: 1886897
ucuugugagcgcuuaucac

SEQ ID NO: 2433965 - RNA, 19 nt, Artificial Sequence
  Description of Artificial Sequence: Synthetic oligonucleotide
  Antisense strand to SEQ ID NO: 2433964
gugauaagcgcucacaaga

SEQ ID NO: 2433966 - RNA, 19 nt, Artificial Sequence
  Description of Artificial Sequence: Synthetic oligonucleotide
  Sense strand starting at position 18 of SEQ ID NO: 1886898
uuaucauuccgacgacuga

SEQ ID NO: 2433967 - RNA, 19 nt, Artificial Sequence
  Description of Artificial Sequence: Synthetic oligonucleotide
  Antisense strand to SEQ ID NO: 2433966
ucagucgucggaaugauaa

SEQ ID NO: 2433968 - RNA, 19 nt, Artificial Sequence
  Description of Artificial Sequence: Synthetic oligonucleotide
  Sense strand starting at position 19 of SEQ ID NO: 1886898
uaucauuccgacgacugaa

SEQ ID NO: 2433969 - RNA, 19 nt, Artificial Sequence
  Description of Artificial Sequence: Synthetic oligonucleotide
  Antisense strand to SEQ ID NO: 2433968
uucagucgucggaaugaua

SEQ ID NO: 2433970 - RNA, 19 nt, Artificial Sequence
  Description of Artificial Sequence: Synthetic oligonucleotide
  Sense strand starting at position 34 of SEQ ID NO: 1886898
ugaagucuaaccggcagaa

SEQ ID NO: 2433971 - RNA, 19 nt, Artificial Sequence
  Description of Artificial Sequence: Synthetic oligonucleotide
  Antisense strand to SEQ ID NO: 2433970
uucugccgguuagacuuca

SEQ ID NO: 2433972 - RNA, 19 nt, Artificial Sequence
  Description of Artificial Sequence: Synthetic oligonucleotide
  Sense strand starting at position 38 of SEQ ID NO: 1886898
gucuaaccggcagaaaguu

SEQ ID NO: 2433973 - RNA, 19 nt, Artificial Sequence
  Description of Artificial Sequence: Synthetic oligonucleotide
  Antisense strand to SEQ ID NO: 2433972
aacuuucugccgguuagac

SEQ ID NO: 2433974 - RNA, 19 nt, Artificial Sequence
  Description of Artificial Sequence: Synthetic oligonucleotide
  Sense strand starting at position 94 of SEQ ID NO: 1886898
ucuuccuguucucugaaga

SEQ ID NO: 2433975 - RNA, 19 nt, Artificial Sequence
  Description of Artificial Sequence: Synthetic oligonucleotide
  Antisense strand to SEQ ID NO: 2433974
ucuucagagaacaggaaga

SEQ ID NO: 2433976 - RNA, 19 nt, Artificial Sequence
  Description of Artificial Sequence: Synthetic oligonucleotide
  Sense strand starting at position 95 of SEQ ID NO: 1886898
cuuccuguucucugaagaa

SEQ ID NO: 2433977 - RNA, 19 nt, Artificial Sequence
  Description of Artificial Sequence: Synthetic oligonucleotide
  Antisense strand to SEQ ID NO: 2433976
uucuucagagaacaggaag

SEQ ID NO: 2433978 - RNA, 19 nt, Artificial Sequence
  Description of Artificial Sequence: Synthetic oligonucleotide
  Sense strand starting at position 235 of SEQ ID NO: 1886898
ccuuguaaaccugaaagua

SEQ ID NO: 2433979 - RNA, 19 nt, Artificial Sequence
  Description of Artificial Sequence: Synthetic oligonucleotide
  Antisense strand to SEQ ID NO: 2433978
uacuuucagguuuacaagg

SEQ ID NO: 2433980 - RNA, 19 nt, Artificial Sequence
  Description of Artificial Sequence: Synthetic oligonucleotide
  Sense strand starting at position 244 of SEQ ID NO: 1886898
ccugaaaguauugaguugu

SEQ ID NO: 2433981 - RNA, 19 nt, Artificial Sequence
  Description of Artificial Sequence: Synthetic oligonucleotide
  Antisense strand to SEQ ID NO: 2433980
acaacucaauacuuucagg

SEQ ID NO: 2433982 - RNA, 19 nt, Artificial Sequence
  Description of Artificial Sequence: Synthetic oligonucleotide
  Sense strand starting at position 254 of SEQ ID NO: 1886898
uugaguuguaaaggaaugu

SEQ ID NO: 2433983 - RNA, 19 nt, Artificial Sequence
  Description of Artificial Sequence: Synthetic oligonucleotide
  Antisense strand to SEQ ID NO: 2433982
acauuccuuuacaacucaa

SEQ ID NO: 2433984 - RNA, 19 nt, Artificial Sequence
  Description of Artificial Sequence: Synthetic oligonucleotide
  Sense strand starting at position 258 of SEQ ID NO: 1886898
guuguaaaggaaugucauu

SEQ ID NO: 2433985 - RNA, 19 nt, Artificial Sequence
  Description of Artificial Sequence: Synthetic oligonucleotide
  Antisense strand to SEQ ID NO: 2433984
aaugacauuccuuuacaac

SEQ ID NO: 2433986 - RNA, 19 nt, Artificial Sequence
  Description of Artificial Sequence: Synthetic oligonucleotide
  Sense strand starting at position 344 of SEQ ID NO: 1886898
cccugugagauauggcuau

SEQ ID NO: 2433987 - RNA, 19 nt, Artificial Sequence
  Description of Artificial Sequence: Synthetic oligonucleotide
  Antisense strand to SEQ ID NO: 2433986
auagccauaucucacaggg

SEQ ID NO: 2433988 - RNA, 19 nt, Artificial Sequence
  Description of Artificial Sequence: Synthetic oligonucleotide
  Sense strand starting at position 535 of SEQ ID NO: 1886898
cuuaaagaacagugugcaa

SEQ ID NO: 2433989 - RNA, 19 nt, Artificial Sequence
  Description of Artificial Sequence: Synthetic oligonucleotide
  Antisense strand to SEQ ID NO: 2433988
uugcacacuguucuuuaag

SEQ ID NO: 2433990 - RNA, 19 nt, Artificial Sequence
  Description of Artificial Sequence: Synthetic oligonucleotide
  Sense strand starting at position 537 of SEQ ID NO: 1886898
uaaagaacagugugcaauu

SEQ ID NO: 2433991 - RNA, 19 nt, Artificial Sequence
  Description of Artificial Sequence: Synthetic oligonucleotide
  Antisense strand to SEQ ID NO: 2433990
aauugcacacuguucuuua

SEQ ID NO: 2433992 - RNA, 19 nt, Artificial Sequence
  Description of Artificial Sequence: Synthetic oligonucleotide
  Sense strand starting at position 538 of SEQ ID NO: 1886898
aaagaacagugugcaauua

SEQ ID NO: 2433993 - RNA, 19 nt, Artificial Sequence
  Description of Artificial Sequence: Synthetic oligonucleotide
  Antisense strand to SEQ ID NO: 2433992
uaauugcacacuguucuuu

SEQ ID NO: 2433994 - RNA, 19 nt, Artificial Sequence
  Description of Artificial Sequence: Synthetic oligonucleotide
  Sense strand starting at position 548 of SEQ ID NO: 1886898
gugcaauuagcugagacaa

SEQ ID NO: 2433995 - RNA, 19 nt, Artificial Sequence
  Description of Artificial Sequence: Synthetic oligonucleotide
  Antisense strand to SEQ ID NO: 2433994
uugucucagcuaauugcac

SEQ ID NO: 2433996 - RNA, 19 nt, Artificial Sequence
  Description of Artificial Sequence: Synthetic oligonucleotide
  Sense strand starting at position 628 of SEQ ID NO: 1886898
aaggguuccuguccaaaca

SEQ ID NO: 2433997 - RNA, 19 nt, Artificial Sequence
  Description of Artificial Sequence: Synthetic oligonucleotide
  Antisense strand to SEQ ID NO: 2433996
uguuuggacaggaacccuu

SEQ ID NO: 2433998 - RNA, 19 nt, Artificial Sequence
  Description of Artificial Sequence: Synthetic oligonucleotide
  Sense strand starting at position 799 of SEQ ID NO: 1886898
ggaugaacucacugggcaa

SEQ ID NO: 2433999 - RNA, 19 nt, Artificial Sequence
  Description of Artificial Sequence: Synthetic oligonucleotide
  Antisense strand to SEQ ID NO: 2433998
uugcccagugaguucaucc

SEQ ID NO: 2434000 - RNA, 19 nt, Artificial Sequence
  Description of Artificial Sequence: Synthetic oligonucleotide
  Sense strand starting at position 929 of SEQ ID NO: 1886898
uagaaaugagcgcagggau

SEQ ID NO: 2434001 - RNA, 19 nt, Artificial Sequence
  Description of Artificial Sequence: Synthetic oligonucleotide
  Antisense strand to SEQ ID NO: 2434000
aucccugcgcucauuucua

SEQ ID NO: 2434002 - RNA, 19 nt, Artificial Sequence
  Description of Artificial Sequence: Synthetic oligonucleotide
  Sense strand starting at position 1362 of SEQ ID NO: 1886898
gaagguuccgauuaacgaa

SEQ ID NO: 2434003 - RNA, 19 nt, Artificial Sequence
  Description of Artificial Sequence: Synthetic oligonucleotide
  Antisense strand to SEQ ID NO: 2434002
uucguuaaucggaaccuuc

SEQ ID NO: 2434004 - RNA, 19 nt, Artificial Sequence
  Description of Artificial Sequence: Synthetic oligonucleotide
  Sense strand starting at position 1841 of SEQ ID NO: 1886898
ggccgaucgacgccuuuau

SEQ ID NO: 2434005 - RNA, 19 nt, Artificial Sequence
  Description of Artificial Sequence: Synthetic oligonucleotide
  Antisense strand to SEQ ID NO: 2434004
auaaaggcgucgaucggcc

SEQ ID NO: 2434006 - RNA, 19 nt, Artificial Sequence
  Description of Artificial Sequence: Synthetic oligonucleotide
  Sense strand starting at position 1842 of SEQ ID NO: 1886898
gccgaucgacgccuuuaua

SEQ ID NO: 2434007 - RNA, 19 nt, Artificial Sequence
  Description of Artificial Sequence: Synthetic oligonucleotide
  Antisense strand to SEQ ID NO: 2434006
uauaaaggcgucgaucggc

SEQ ID NO: 2434008 - RNA, 19 nt, Artificial Sequence
  Description of Artificial Sequence: Synthetic oligonucleotide
  Sense strand starting at position 2200 of SEQ ID NO: 1886898
uguuacuguucucucauuu

SEQ ID NO: 2434009 - RNA, 19 nt, Artificial Sequence
  Description of Artificial Sequence: Synthetic oligonucleotide
  Antisense strand to SEQ ID NO: 2434008
aaaugagagaacaguaaca

SEQ ID NO: 2434010 - RNA, 19 nt, Artificial Sequence
  Description of Artificial Sequence: Synthetic oligonucleotide
  Sense strand starting at position 2446 of SEQ ID NO: 1886898
gugcauguacuggaccaaa

SEQ ID NO: 2434011 - RNA, 19 nt, Artificial Sequence
  Description of Artificial Sequence: Synthetic oligonucleotide
  Antisense strand to SEQ ID NO: 2434010
uuugguccaguacaugcac

SEQ ID NO: 2434012 - RNA, 19 nt, Artificial Sequence
  Description of Artificial Sequence: Synthetic oligonucleotide
  Sense strand starting at position 2490 of SEQ ID NO: 1886898
cuauucuaaggcugguuaa

SEQ ID NO: 2434013 - RNA, 19 nt, Artificial Sequence
  Description of Artificial Sequence: Synthetic oligonucleotide
  Antisense strand to SEQ ID NO: 2434012
uuaaccagccuuagaauag

SEQ ID NO: 2434014 - RNA, 19 nt, Artificial Sequence
  Description of Artificial Sequence: Synthetic oligonucleotide
  Sense strand starting at position 2491 of SEQ ID NO: 1886898
uauucuaaggcugguuaau

SEQ ID NO: 2434015 - RNA, 19 nt, Artificial Sequence
  Description of Artificial Sequence: Synthetic oligonucleotide
  Antisense strand to SEQ ID NO: 2434014
auuaaccagccuuagaaua

SEQ ID NO: 2434016 - RNA, 19 nt, Artificial Sequence
  Description of Artificial Sequence: Synthetic oligonucleotide
  Sense strand starting at position 2566 of SEQ ID NO: 1886898
gccucugcagcuguuuaua

SEQ ID NO: 2434017 - RNA, 19 nt, Artificial Sequence
  Description of Artificial Sequence: Synthetic oligonucleotide
  Antisense strand to SEQ ID NO: 2434016
uauaaacagcugcagaggc

SEQ ID NO: 2434018 - RNA, 19 nt, Artificial Sequence
  Description of Artificial Sequence: Synthetic oligonucleotide
  Sense strand starting at position 2578 of SEQ ID NO: 1886898
guuuauaacccuuaaguca

SEQ ID NO: 2434019 - RNA, 19 nt, Artificial Sequence
  Description of Artificial Sequence: Synthetic oligonucleotide
  Antisense strand to SEQ ID NO: 2434018
ugacuuaaggguuauaaac

SEQ ID NO: 2434020 - RNA, 19 nt, Artificial Sequence
  Description of Artificial Sequence: Synthetic oligonucleotide
  Sense strand starting at position 2604 of SEQ ID NO: 1886898
uccaccugucuggguaaau

SEQ ID NO: 2434021 - RNA, 19 nt, Artificial Sequence
  Description of Artificial Sequence: Synthetic oligonucleotide
  Antisense strand to SEQ ID NO: 2434020
auuuacccagacaggugga

SEQ ID NO: 2434022 - RNA, 19 nt, Artificial Sequence
  Description of Artificial Sequence: Synthetic oligonucleotide
  Sense strand starting at position 2605 of SEQ ID NO: 1886898
ccaccugucuggguaaauc

SEQ ID NO: 2434023 - RNA, 19 nt, Artificial Sequence
  Description of Artificial Sequence: Synthetic oligonucleotide
  Antisense strand to SEQ ID NO: 2434022
gauuuacccagacaggugg

SEQ ID NO: 2434024 - RNA, 19 nt, Artificial Sequence
  Description of Artificial Sequence: Synthetic oligonucleotide
  Sense strand starting at position 2616 of SEQ ID NO: 1886898
gguaaaucuauccaugcga

SEQ ID NO: 2434025 - RNA, 19 nt, Artificial Sequence
  Description of Artificial Sequence: Synthetic oligonucleotide
  Antisense strand to SEQ ID NO: 2434024
ucgcauggauagauuuacc

SEQ ID NO: 2434026 - RNA, 19 nt, Artificial Sequence
  Description of Artificial Sequence: Synthetic oligonucleotide
  Sense strand starting at position 2675 of SEQ ID NO: 1886898
acaagaucauaauaggaaa

SEQ ID NO: 2434027 - RNA, 19 nt, Artificial Sequence
  Description of Artificial Sequence: Synthetic oligonucleotide
  Antisense strand to SEQ ID NO: 2434026
uuuccuauuaugaucuugu

SEQ ID NO: 2434028 - RNA, 19 nt, Artificial Sequence
  Description of Artificial Sequence: Synthetic oligonucleotide
  Sense strand starting at position 2686 of SEQ ID NO: 1886898
auaggaaagccuugggcaa

SEQ ID NO: 2434029 - RNA, 19 nt, Artificial Sequence
  Description of Artificial Sequence: Synthetic oligonucleotide
  Antisense strand to SEQ ID NO: 2434028
uugcccaaggcuuuccuau

SEQ ID NO: 2434030 - RNA, 19 nt, Artificial Sequence
  Description of Artificial Sequence: Synthetic oligonucleotide
  Sense strand starting at position 2687 of SEQ ID NO: 1886898
uaggaaagccuugggcaaa

SEQ ID NO: 2434031 - RNA, 19 nt, Artificial Sequence
  Description of Artificial Sequence: Synthetic oligonucleotide
  Antisense strand to SEQ ID NO: 2434030
uuugcccaaggcuuuccua

SEQ ID NO: 2434032 - RNA, 19 nt, Artificial Sequence
  Description of Artificial Sequence: Synthetic oligonucleotide
  Sense strand starting at position 2831 of SEQ ID NO: 1886898
uuguauucugggcagucua

SEQ ID NO: 2434033 - RNA, 19 nt, Artificial Sequence
  Description of Artificial Sequence: Synthetic oligonucleotide
  Antisense strand to SEQ ID NO: 2434032
uagacugcccagaauacaa

SEQ ID NO: 2434034 - RNA, 19 nt, Artificial Sequence
  Description of Artificial Sequence: Synthetic oligonucleotide
  Sense strand starting at position 2890 of SEQ ID NO: 1886898
gugagaaguucuguucuag

SEQ ID NO: 2434035 - RNA, 19 nt, Artificial Sequence
  Description of Artificial Sequence: Synthetic oligonucleotide
  Antisense strand to SEQ ID NO: 2434034
cuagaacagaacuucucac

SEQ ID NO: 2434036 - RNA, 19 nt, Artificial Sequence
  Description of Artificial Sequence: Synthetic oligonucleotide
  Sense strand starting at position 2896 of SEQ ID NO: 1886898
aguucuguucuagaaagca

SEQ ID NO: 2434037 - RNA, 19 nt, Artificial Sequence
  Description of Artificial Sequence: Synthetic oligonucleotide
  Antisense strand to SEQ ID NO: 2434036
ugcuuucuagaacagaacu

SEQ ID NO: 2434038 - RNA, 19 nt, Artificial Sequence
  Description of Artificial Sequence: Synthetic oligonucleotide
  Sense strand starting at position 2904 of SEQ ID NO: 1886898
ucuagaaagcacggaugau

SEQ ID NO: 2434039 - RNA, 19 nt, Artificial Sequence
  Description of Artificial Sequence: Synthetic oligonucleotide
  Antisense strand to SEQ ID NO: 2434038
aucauccgugcuuucuaga

SEQ ID NO: 2434040 - RNA, 19 nt, Artificial Sequence
  Description of Artificial Sequence: Synthetic oligonucleotide
  Sense strand starting at position 2919 of SEQ ID NO: 1886898
ugaugcauuuaugugcuua

SEQ ID NO: 2434041 - RNA, 19 nt, Artificial Sequence
  Description of Artificial Sequence: Synthetic oligonucleotide
  Antisense strand to SEQ ID NO: 2434040
uaagcacauaaaugcauca

SEQ ID NO: 2434042 - RNA, 19 nt, Artificial Sequence
  Description of Artificial Sequence: Synthetic oligonucleotide
  Sense strand starting at position 2923 of SEQ ID NO: 1886898
gcauuuaugugcuuaccac

SEQ ID NO: 2434043 - RNA, 19 nt, Artificial Sequence
  Description of Artificial Sequence: Synthetic oligonucleotide
  Antisense strand to SEQ ID NO: 2434042
gugguaagcacauaaaugc

SEQ ID NO: 2434044 - RNA, 19 nt, Artificial Sequence
  Description of Artificial Sequence: Synthetic oligonucleotide
  Sense strand starting at position 3478 of SEQ ID NO: 1886898
uguaguuuauuaguagaga

SEQ ID NO: 2434045 - RNA, 19 nt, Artificial Sequence
  Description of Artificial Sequence: Synthetic oligonucleotide
  Antisense strand to SEQ ID NO: 2434044
ucucuacuaauaaacuaca

SEQ ID NO: 2434046 - RNA, 19 nt, Artificial Sequence
  Description of Artificial Sequence: Synthetic oligonucleotide
  Sense strand starting at position 187 of SEQ ID NO: 1886899
ggaauaucaucucaguggu

SEQ ID NO: 2434047 - RNA, 19 nt, Artificial Sequence
  Description of Artificial Sequence: Synthetic oligonucleotide
  Antisense strand to SEQ ID NO: 2434046
accacugagaugauauucc

SEQ ID NO: 2434048 - RNA, 19 nt, Artificial Sequence
  Description of Artificial Sequence: Synthetic oligonucleotide
  Sense strand starting at position 190 of SEQ ID NO: 1886899
auaucaucucaguggucau

SEQ ID NO: 2434049 - RNA, 19 nt, Artificial Sequence
  Description of Artificial Sequence: Synthetic oligonucleotide
  Antisense strand to SEQ ID NO: 2434048
augaccacugagaugauau

SEQ ID NO: 2434050 - RNA, 19 nt, Artificial Sequence
  Description of Artificial Sequence: Synthetic oligonucleotide
  Sense strand starting at position 193 of SEQ ID NO: 1886899
ucaucucaguggucauuau

SEQ ID NO: 2434051 - RNA, 19 nt, Artificial Sequence
  Description of Artificial Sequence: Synthetic oligonucleotide
  Antisense strand to SEQ ID NO: 2434050
auaaugaccacugagauga

SEQ ID NO: 2434052 - RNA, 19 nt, Artificial Sequence
  Description of Artificial Sequence: Synthetic oligonucleotide
  Sense strand starting at position 232 of SEQ ID NO: 1886899
gggaauucuuccuugucag

SEQ ID NO: 2434053 - RNA, 19 nt, Artificial Sequence
  Description of Artificial Sequence: Synthetic oligonucleotide
  Antisense strand to SEQ ID NO: 2434052
cugacaaggaagaauuccc

SEQ ID NO: 2434054 - RNA, 19 nt, Artificial Sequence
  Description of Artificial Sequence: Synthetic oligonucleotide
  Sense strand starting at position 233 of SEQ ID NO: 1886899
ggaauucuuccuugucagg

SEQ ID NO: 2434055 - RNA, 19 nt, Artificial Sequence
  Description of Artificial Sequence: Synthetic oligonucleotide
  Antisense strand to SEQ ID NO: 2434054
ccugacaaggaagaauucc

SEQ ID NO: 2434056 - RNA, 19 nt, Artificial Sequence
  Description of Artificial Sequence: Synthetic oligonucleotide
  Sense strand starting at position 235 of SEQ ID NO: 1886899
aauucuuccuugucaggga

SEQ ID NO: 2434057 - RNA, 19 nt, Artificial Sequence
  Description of Artificial Sequence: Synthetic oligonucleotide
  Antisense strand to SEQ ID NO: 2434056
ucccugacaaggaagaauu

SEQ ID NO: 2434058 - RNA, 19 nt, Artificial Sequence
  Description of Artificial Sequence: Synthetic oligonucleotide
  Sense strand starting at position 239 of SEQ ID NO: 1886899
cuuccuugucagggauucu

SEQ ID NO: 2434059 - RNA, 19 nt, Artificial Sequence
  Description of Artificial Sequence: Synthetic oligonucleotide
  Antisense strand to SEQ ID NO: 2434058
agaaucccugacaaggaag

SEQ ID NO: 2434060 - RNA, 19 nt, Artificial Sequence
  Description of Artificial Sequence: Synthetic oligonucleotide
  Sense strand starting at position 310 of SEQ ID NO: 1886899
gagggaaagucucuuuguc

SEQ ID NO: 2434061 - RNA, 19 nt, Artificial Sequence
  Description of Artificial Sequence: Synthetic oligonucleotide
  Antisense strand to SEQ ID NO: 2434060
gacaaagagacuuucccuc

SEQ ID NO: 2434062 - RNA, 19 nt, Artificial Sequence
  Description of Artificial Sequence: Synthetic oligonucleotide
  Sense strand starting at position 312 of SEQ ID NO: 1886899
gggaaagucucuuuguccu

SEQ ID NO: 2434063 - RNA, 19 nt, Artificial Sequence
  Description of Artificial Sequence: Synthetic oligonucleotide
  Antisense strand to SEQ ID NO: 2434062
aggacaaagagacuuuccc

SEQ ID NO: 2434064 - RNA, 19 nt, Artificial Sequence
  Description of Artificial Sequence: Synthetic oligonucleotide
  Sense strand starting at position 362 of SEQ ID NO: 1886899
acacauaacgcugaucuga

SEQ ID NO: 2434065 - RNA, 19 nt, Artificial Sequence
  Description of Artificial Sequence: Synthetic oligonucleotide
  Antisense strand to SEQ ID NO: 2434064
ucagaucagcguuaugugu

SEQ ID NO: 2434066 - RNA, 19 nt, Artificial Sequence
  Description of Artificial Sequence: Synthetic oligonucleotide
  Sense strand starting at position 373 of SEQ ID NO: 1886899
ugaucugaacuuugagagu

SEQ ID NO: 2434067 - RNA, 19 nt, Artificial Sequence
  Description of Artificial Sequence: Synthetic oligonucleotide
  Antisense strand to SEQ ID NO: 2434066
acucucaaaguucagauca

SEQ ID NO: 2434068 - RNA, 19 nt, Artificial Sequence
  Description of Artificial Sequence: Synthetic oligonucleotide
  Sense strand starting at position 379 of SEQ ID NO: 1886899
gaacuuugagagugcucua

SEQ ID NO: 2434069 - RNA, 19 nt, Artificial Sequence
  Description of Artificial Sequence: Synthetic oligonucleotide
  Antisense strand to SEQ ID NO: 2434068
uagagcacucucaaaguuc

SEQ ID NO: 2434070 - RNA, 19 nt, Artificial Sequence
  Description of Artificial Sequence: Synthetic oligonucleotide
  Sense strand starting at position 382 of SEQ ID NO: 1886899
cuuugagagugcucuaagu

SEQ ID NO: 2434071 - RNA, 19 nt, Artificial Sequence
  Description of Artificial Sequence: Synthetic oligonucleotide
  Antisense strand to SEQ ID NO: 2434070
acuuagagcacucucaaag

SEQ ID NO: 2434072 - RNA, 19 nt, Artificial Sequence
  Description of Artificial Sequence: Synthetic oligonucleotide
  Sense strand starting at position 384 of SEQ ID NO: 1886899
uugagagugcucuaaguua

SEQ ID NO: 2434073 - RNA, 19 nt, Artificial Sequence
  Description of Artificial Sequence: Synthetic oligonucleotide
  Antisense strand to SEQ ID NO: 2434072
uaacuuagagcacucucaa

SEQ ID NO: 2434074 - RNA, 19 nt, Artificial Sequence
  Description of Artificial Sequence: Synthetic oligonucleotide
  Sense strand starting at position 669 of SEQ ID NO: 1886899
augugucugccugggaguu

SEQ ID NO: 2434075 - RNA, 19 nt, Artificial Sequence
  Description of Artificial Sequence: Synthetic oligonucleotide
  Antisense strand to SEQ ID NO: 2434074
aacucccaggcagacacau

SEQ ID NO: 2434076 - RNA, 19 nt, Artificial Sequence
  Description of Artificial Sequence: Synthetic oligonucleotide
  Sense strand starting at position 733 of SEQ ID NO: 1886899
gggauaguggugugaugau

SEQ ID NO: 2434077 - RNA, 19 nt, Artificial Sequence
  Description of Artificial Sequence: Synthetic oligonucleotide
  Antisense strand to SEQ ID NO: 2434076
aucaucacaccacuauccc

SEQ ID NO: 2434078 - RNA, 19 nt, Artificial Sequence
  Description of Artificial Sequence: Synthetic oligonucleotide
  Sense strand starting at position 740 of SEQ ID NO: 1886899
uggugugaugauuguaaau

SEQ ID NO: 2434079 - RNA, 19 nt, Artificial Sequence
  Description of Artificial Sequence: Synthetic oligonucleotide
  Antisense strand to SEQ ID NO: 2434078
auuuacaaucaucacacca

SEQ ID NO: 2434080 - RNA, 19 nt, Artificial Sequence
  Description of Artificial Sequence: Synthetic oligonucleotide
  Sense strand starting at position 942 of SEQ ID NO: 1886899
gaagguuucucccuuagag

SEQ ID NO: 2434081 - RNA, 19 nt, Artificial Sequence
  Description of Artificial Sequence: Synthetic oligonucleotide
  Antisense strand to SEQ ID NO: 2434080
cucuaagggagaaaccuuc

SEQ ID NO: 2434082 - RNA, 19 nt, Artificial Sequence
  Description of Artificial Sequence: Synthetic oligonucleotide
  Sense strand starting at position 944 of SEQ ID NO: 1886899
agguuucucccuuagaguc

SEQ ID NO: 2434083 - RNA, 19 nt, Artificial Sequence
  Description of Artificial Sequence: Synthetic oligonucleotide
  Antisense strand to SEQ ID NO: 2434082
gacucuaagggagaaaccu

SEQ ID NO: 2434084 - RNA, 19 nt, Artificial Sequence
  Description of Artificial Sequence: Synthetic oligonucleotide
  Sense strand starting at position 952 of SEQ ID NO: 1886899
cccuuagagucucuucuuu

SEQ ID NO: 2434085 - RNA, 19 nt, Artificial Sequence
  Description of Artificial Sequence: Synthetic oligonucleotide
  Antisense strand to SEQ ID NO: 2434084
aaagaagagacucuaaggg

SEQ ID NO: 2434086 - RNA, 19 nt, Artificial Sequence
  Description of Artificial Sequence: Synthetic oligonucleotide
  Sense strand starting at position 1227 of SEQ ID NO: 1886899
gaguccuggguuuaauaga

SEQ ID NO: 2434087 - RNA, 19 nt, Artificial Sequence
  Description of Artificial Sequence: Synthetic oligonucleotide
  Antisense strand to SEQ ID NO: 2434086
ucuauuaaacccaggacuc

SEQ ID NO: 2434088 - RNA, 19 nt, Artificial Sequence
  Description of Artificial Sequence: Synthetic oligonucleotide
  Sense strand starting at position 1253 of SEQ ID NO: 1886899
cccauacgcuuguauuuau

SEQ ID NO: 2434089 - RNA, 19 nt, Artificial Sequence
  Description of Artificial Sequence: Synthetic oligonucleotide
  Antisense strand to SEQ ID NO: 2434088
auaaauacaagcguauggg

SEQ ID NO: 2434090 - RNA, 19 nt, Artificial Sequence
  Description of Artificial Sequence: Synthetic oligonucleotide
  Sense strand starting at position 1260 of SEQ ID NO: 1886899
gcuuguauuuaucagcaau

SEQ ID NO: 2434091 - RNA, 19 nt, Artificial Sequence
  Description of Artificial Sequence: Synthetic oligonucleotide
  Antisense strand to SEQ ID NO: 2434090
auugcugauaaauacaagc

SEQ ID NO: 2434092 - RNA, 19 nt, Artificial Sequence
  Description of Artificial Sequence: Synthetic oligonucleotide
  Sense strand starting at position 1718 of SEQ ID NO: 1886899
ccgaguucccuuggaugaa

SEQ ID NO: 2434093 - RNA, 19 nt, Artificial Sequence
  Description of Artificial Sequence: Synthetic oligonucleotide
  Antisense strand to SEQ ID NO: 2434092
uucauccaagggaacucgg

SEQ ID NO: 2434094 - RNA, 19 nt, Artificial Sequence
  Description of Artificial Sequence: Synthetic oligonucleotide
  Sense strand starting at position 1719 of SEQ ID NO: 1886899
cgaguucccuuggaugaaa

SEQ ID NO: 2434095 - RNA, 19 nt, Artificial Sequence
  Description of Artificial Sequence: Synthetic oligonucleotide
  Antisense strand to SEQ ID NO: 2434094
uuucauccaagggaacucg

SEQ ID NO: 2434096 - RNA, 19 nt, Artificial Sequence
  Description of Artificial Sequence: Synthetic oligonucleotide
  Sense strand starting at position 1721 of SEQ ID NO: 1886899
aguucccuuggaugaaaga

SEQ ID NO: 2434097 - RNA, 19 nt, Artificial Sequence
  Description of Artificial Sequence: Synthetic oligonucleotide
  Antisense strand to SEQ ID NO: 2434096
ucuuucauccaagggaacu

SEQ ID NO: 2434098 - RNA, 19 nt, Artificial Sequence
  Description of Artificial Sequence: Synthetic oligonucleotide
  Sense strand starting at position 2272 of SEQ ID NO: 1886899
uccgguugaguuggaaagu

SEQ ID NO: 2434099 - RNA, 19 nt, Artificial Sequence
  Description of Artificial Sequence: Synthetic oligonucleotide
  Antisense strand to SEQ ID NO: 2434098
acuuuccaacucaaccgga

SEQ ID NO: 2434100 - RNA, 19 nt, Artificial Sequence
  Description of Artificial Sequence: Synthetic oligonucleotide
  Sense strand starting at position 2282 of SEQ ID NO: 1886899
uuggaaaguuccgaauuga

SEQ ID NO: 2434101 - RNA, 19 nt, Artificial Sequence
  Description of Artificial Sequence: Synthetic oligonucleotide
  Antisense strand to SEQ ID NO: 2434100
ucaauucggaacuuuccaa

SEQ ID NO: 2434102 - RNA, 19 nt, Artificial Sequence
  Description of Artificial Sequence: Synthetic oligonucleotide
  Sense strand starting at position 2996 of SEQ ID NO: 1886899
gccuuuagccguucgcuua

SEQ ID NO: 2434103 - RNA, 19 nt, Artificial Sequence
  Description of Artificial Sequence: Synthetic oligonucleotide
  Antisense strand to SEQ ID NO: 2434102
uaagcgaacggcuaaaggc

SEQ ID NO: 2434104 - RNA, 19 nt, Artificial Sequence
  Description of Artificial Sequence: Synthetic oligonucleotide
  Sense strand starting at position 3358 of SEQ ID NO: 1886899
cccucagucgcauagacuu

SEQ ID NO: 2434105 - RNA, 19 nt, Artificial Sequence
  Description of Artificial Sequence: Synthetic oligonucleotide
  Antisense strand to SEQ ID NO: 2434104
aagucuaugcgacugaggg

SEQ ID NO: 2434106 - RNA, 19 nt, Artificial Sequence
  Description of Artificial Sequence: Synthetic oligonucleotide
  Sense strand starting at position 3364 of SEQ ID NO: 1886899
gucgcauagacuuaugugu

SEQ ID NO: 2434107 - RNA, 19 nt, Artificial Sequence
  Description of Artificial Sequence: Synthetic oligonucleotide
  Antisense strand to SEQ ID NO: 2434106
acacauaagucuaugcgac

SEQ ID NO: 2434108 - RNA, 19 nt, Artificial Sequence
  Description of Artificial Sequence: Synthetic oligonucleotide
  Sense strand starting at position 3398 of SEQ ID NO: 1886899
guauuacugaauuagcguu

SEQ ID NO: 2434109 - RNA, 19 nt, Artificial Sequence
  Description of Artificial Sequence: Synthetic oligonucleotide
  Antisense strand to SEQ ID NO: 2434108
aacgcuaauucaguaauac

SEQ ID NO: 2434110 - RNA, 19 nt, Artificial Sequence
  Description of Artificial Sequence: Synthetic oligonucleotide
  Sense strand starting at position 3405 of SEQ ID NO: 1886899
ugaauuagcguuuaaucca

SEQ ID NO: 2434111 - RNA, 19 nt, Artificial Sequence
  Description of Artificial Sequence: Synthetic oligonucleotide
  Antisense strand to SEQ ID NO: 2434110
uggauuaaacgcuaauuca

SEQ ID NO: 2434112 - RNA, 19 nt, Artificial Sequence
  Description of Artificial Sequence: Synthetic oligonucleotide
  Sense strand starting at position 3450 of SEQ ID NO: 1886899
ugggcacucgguuaucuuu

SEQ ID NO: 2434113 - RNA, 19 nt, Artificial Sequence
  Description of Artificial Sequence: Synthetic oligonucleotide
  Antisense strand to SEQ ID NO: 2434112
aaagauaaccgagugccca

SEQ ID NO: 2434114 - RNA, 19 nt, Artificial Sequence
  Description of Artificial Sequence: Synthetic oligonucleotide
  Sense strand starting at position 3494 of SEQ ID NO: 1886899
uugguagacuccuuccaau

SEQ ID NO: 2434115 - RNA, 19 nt, Artificial Sequence
  Description of Artificial Sequence: Synthetic oligonucleotide
  Antisense strand to SEQ ID NO: 2434114
auuggaaggagucuaccaa

SEQ ID NO: 2434116 - RNA, 19 nt, Artificial Sequence
  Description of Artificial Sequence: Synthetic oligonucleotide
  Sense strand starting at position 3497 of SEQ ID NO: 1886899
guagacuccuuccaaugaa

SEQ ID NO: 2434117 - RNA, 19 nt, Artificial Sequence
  Description of Artificial Sequence: Synthetic oligonucleotide
  Antisense strand to SEQ ID NO: 2434116
uucauuggaaggagucuac

SEQ ID NO: 2434118 - RNA, 19 nt, Artificial Sequence
  Description of Artificial Sequence: Synthetic oligonucleotide
  Sense strand starting at position 3697 of SEQ ID NO: 1886899
acgaguguuuguguuggga

SEQ ID NO: 2434119 - RNA, 19 nt, Artificial Sequence
  Description of Artificial Sequence: Synthetic oligonucleotide
  Antisense strand to SEQ ID NO: 2434118
ucccaacacaaacacucgu

SEQ ID NO: 2434120 - RNA, 19 nt, Artificial Sequence
  Description of Artificial Sequence: Synthetic oligonucleotide
  Sense strand starting at position 3768 of SEQ ID NO: 1886899
gugcgaaguugauuagguu

SEQ ID NO: 2434121 - RNA, 19 nt, Artificial Sequence
  Description of Artificial Sequence: Synthetic oligonucleotide
  Antisense strand to SEQ ID NO: 2434120
aaccuaaucaacuucgcac

SEQ ID NO: 2434122 - RNA, 19 nt, Artificial Sequence
  Description of Artificial Sequence: Synthetic oligonucleotide
  Sense strand starting at position 3836 of SEQ ID NO: 1886899
guacaaaggugacccgauu

SEQ ID NO: 2434123 - RNA, 19 nt, Artificial Sequence
  Description of Artificial Sequence: Synthetic oligonucleotide
  Antisense strand to SEQ ID NO: 2434122
aaucgggucaccuuuguac

SEQ ID NO: 2434124 - RNA, 19 nt, Artificial Sequence
  Description of Artificial Sequence: Synthetic oligonucleotide
  Sense strand starting at position 3962 of SEQ ID NO: 1886899
gggccucugcuuggaaaua

SEQ ID NO: 2434125 - RNA, 19 nt, Artificial Sequence
  Description of Artificial Sequence: Synthetic oligonucleotide
  Antisense strand to SEQ ID NO: 2434124
uauuuccaagcagaggccc

SEQ ID NO: 2434126 - RNA, 19 nt, Artificial Sequence
  Description of Artificial Sequence: Synthetic oligonucleotide
  Sense strand starting at position 170 of SEQ ID NO: 1886900
aaguaugagccuggcuaca

SEQ ID NO: 2434127 - RNA, 19 nt, Artificial Sequence
  Description of Artificial Sequence: Synthetic oligonucleotide
  Antisense strand to SEQ ID NO: 2434126
uguagccaggcucauacuu

SEQ ID NO: 2434128 - RNA, 19 nt, Artificial Sequence
  Description of Artificial Sequence: Synthetic oligonucleotide
  Sense strand starting at position 333 of SEQ ID NO: 1886900
guguuacgauauuucguuu

SEQ ID NO: 2434129 - RNA, 19 nt, Artificial Sequence
  Description of Artificial Sequence: Synthetic oligonucleotide
  Antisense strand to SEQ ID NO: 2434128
aaacgaaauaucguaacac

SEQ ID NO: 2434130 - RNA, 19 nt, Artificial Sequence
  Description of Artificial Sequence: Synthetic oligonucleotide
  Sense strand starting at position 336 of SEQ ID NO: 1886900
uuacgauauuucguuuggu

SEQ ID NO: 2434131 - RNA, 19 nt, Artificial Sequence
  Description of Artificial Sequence: Synthetic oligonucleotide
  Antisense strand to SEQ ID NO: 2434130
accaaacgaaauaucguaa

SEQ ID NO: 2434132 - RNA, 19 nt, Artificial Sequence
  Description of Artificial Sequence: Synthetic oligonucleotide
  Sense strand starting at position 337 of SEQ ID NO: 1886900
uacgauauuucguuugguc

SEQ ID NO: 2434133 - RNA, 19 nt, Artificial Sequence
  Description of Artificial Sequence: Synthetic oligonucleotide
  Antisense strand to SEQ ID NO: 2434132
gaccaaacgaaauaucgua

SEQ ID NO: 2434134 - RNA, 19 nt, Artificial Sequence
  Description of Artificial Sequence: Synthetic oligonucleotide
  Sense strand starting at position 339 of SEQ ID NO: 1886900
cgauauuucguuuggucuu

SEQ ID NO: 2434135 - RNA, 19 nt, Artificial Sequence
  Description of Artificial Sequence: Synthetic oligonucleotide
  Antisense strand to SEQ ID NO: 2434134
aagaccaaacgaaauaucg

SEQ ID NO: 2434136 - RNA, 19 nt, Artificial Sequence
  Description of Artificial Sequence: Synthetic oligonucleotide
  Sense strand starting at position 384 of SEQ ID NO: 1886900
uggacugguuaucuuguua

SEQ ID NO: 2434137 - RNA, 19 nt, Artificial Sequence
  Description of Artificial Sequence: Synthetic oligonucleotide
  Antisense strand to SEQ ID NO: 2434136
uaacaagauaaccagucca

SEQ ID NO: 2434138 - RNA, 19 nt, Artificial Sequence
  Description of Artificial Sequence: Synthetic oligonucleotide
  Sense strand starting at position 388 of SEQ ID NO: 1886900
cugguuaucuuguuauuau

SEQ ID NO: 2434139 - RNA, 19 nt, Artificial Sequence
  Description of Artificial Sequence: Synthetic oligonucleotide
  Antisense strand to SEQ ID NO: 2434138
auaauaacaagauaaccag

SEQ ID NO: 2434140 - RNA, 19 nt, Artificial Sequence
  Description of Artificial Sequence: Synthetic oligonucleotide
  Sense strand starting at position 872 of SEQ ID NO: 1886900
aggccuggucugggaguau

SEQ ID NO: 2434141 - RNA, 19 nt, Artificial Sequence
  Description of Artificial Sequence: Synthetic oligonucleotide
  Antisense strand to SEQ ID NO: 2434140
auacucccagaccaggccu

SEQ ID NO: 2434142 - RNA, 19 nt, Artificial Sequence
  Description of Artificial Sequence: Synthetic oligonucleotide
  Sense strand starting at position 925 of SEQ ID NO: 1886900
uuguguauuucucugugaa

SEQ ID NO: 2434143 - RNA, 19 nt, Artificial Sequence
  Description of Artificial Sequence: Synthetic oligonucleotide
  Antisense strand to SEQ ID NO: 2434142
uucacagagaaauacacaa

SEQ ID NO: 2434144 - RNA, 19 nt, Artificial Sequence
  Description of Artificial Sequence: Synthetic oligonucleotide
  Sense strand starting at position 926 of SEQ ID NO: 1886900
uguguauuucucugugaau

SEQ ID NO: 2434145 - RNA, 19 nt, Artificial Sequence
  Description of Artificial Sequence: Synthetic oligonucleotide
  Antisense strand to SEQ ID NO: 2434144
auucacagagaaauacaca

SEQ ID NO: 2434146 - RNA, 19 nt, Artificial Sequence
  Description of Artificial Sequence: Synthetic oligonucleotide
  Sense strand starting at position 927 of SEQ ID NO: 1886900
guguauuucucugugaauc

SEQ ID NO: 2434147 - RNA, 19 nt, Artificial Sequence
  Description of Artificial Sequence: Synthetic oligonucleotide
  Antisense strand to SEQ ID NO: 2434146
gauucacagagaaauacac

SEQ ID NO: 2434148 - RNA, 19 nt, Artificial Sequence
  Description of Artificial Sequence: Synthetic oligonucleotide
  Sense strand starting at position 984 of SEQ ID NO: 1886900
gggauagucugggucagac

SEQ ID NO: 2434149 - RNA, 19 nt, Artificial Sequence
  Description of Artificial Sequence: Synthetic oligonucleotide
  Antisense strand to SEQ ID NO: 2434148
gucugacccagacuauccc

SEQ ID NO: 2434150 - RNA, 19 nt, Artificial Sequence
  Description of Artificial Sequence: Synthetic oligonucleotide
  Sense strand starting at position 1111 of SEQ ID NO: 1886900
uugguauuuguuuguagcu

SEQ ID NO: 2434151 - RNA, 19 nt, Artificial Sequence
  Description of Artificial Sequence: Synthetic oligonucleotide
  Antisense strand to SEQ ID NO: 2434150
agcuacaaacaaauaccaa

SEQ ID NO: 2434152 - RNA, 19 nt, Artificial Sequence
  Description of Artificial Sequence: Synthetic oligonucleotide
  Sense strand starting at position 1112 of SEQ ID NO: 1886900
ugguauuuguuuguagcuu

SEQ ID NO: 2434153 - RNA, 19 nt, Artificial Sequence
  Description of Artificial Sequence: Synthetic oligonucleotide
  Antisense strand to SEQ ID NO: 2434152
aagcuacaaacaaauacca

SEQ ID NO: 2434154 - RNA, 19 nt, Artificial Sequence
  Description of Artificial Sequence: Synthetic oligonucleotide
  Sense strand starting at position 1124 of SEQ ID NO: 1886900
guagcuuuccuggaaguca

SEQ ID NO: 2434155 - RNA, 19 nt, Artificial Sequence
  Description of Artificial Sequence: Synthetic oligonucleotide
  Antisense strand to SEQ ID NO: 2434154
ugacuuccaggaaagcuac

SEQ ID NO: 2434156 - RNA, 19 nt, Artificial Sequence
  Description of Artificial Sequence: Synthetic oligonucleotide
  Sense strand starting at position 1298 of SEQ ID NO: 1886900
aagucacuggcuuggucaa

SEQ ID NO: 2434157 - RNA, 19 nt, Artificial Sequence
  Description of Artificial Sequence: Synthetic oligonucleotide
  Antisense strand to SEQ ID NO: 2434156
uugaccaagccagugacuu

SEQ ID NO: 2434158 - RNA, 19 nt, Artificial Sequence
  Description of Artificial Sequence: Synthetic oligonucleotide
  Sense strand starting at position 1811 of SEQ ID NO: 1886900
gagucaagucuggacacuu

SEQ ID NO: 2434159 - RNA, 19 nt, Artificial Sequence
  Description of Artificial Sequence: Synthetic oligonucleotide
  Antisense strand to SEQ ID NO: 2434158
aaguguccagacuugacuc

SEQ ID NO: 2434160 - RNA, 19 nt, Artificial Sequence
  Description of Artificial Sequence: Synthetic oligonucleotide
  Sense strand starting at position 1822 of SEQ ID NO: 1886900
ggacacuuacccggucaau

SEQ ID NO: 2434161 - RNA, 19 nt, Artificial Sequence
  Description of Artificial Sequence: Synthetic oligonucleotide
  Antisense strand to SEQ ID NO: 2434160
auugaccggguaagugucc

SEQ ID NO: 2434162 - RNA, 19 nt, Artificial Sequence
  Description of Artificial Sequence: Synthetic oligonucleotide
  Sense strand starting at position 1995 of SEQ ID NO: 1886900
cuaugacauuuagauguca

SEQ ID NO: 2434163 - RNA, 19 nt, Artificial Sequence
  Description of Artificial Sequence: Synthetic oligonucleotide
  Antisense strand to SEQ ID NO: 2434162
ugacaucuaaaugucauag

SEQ ID NO: 2434164 - RNA, 19 nt, Artificial Sequence
  Description of Artificial Sequence: Synthetic oligonucleotide
  Sense strand starting at position 2076 of SEQ ID NO: 1886900
cccucacuggcucgagaaa

SEQ ID NO: 2434165 - RNA, 19 nt, Artificial Sequence
  Description of Artificial Sequence: Synthetic oligonucleotide
  Antisense strand to SEQ ID NO: 2434164
uuucucgagccagugaggg

SEQ ID NO: 2434166 - RNA, 19 nt, Artificial Sequence
  Description of Artificial Sequence: Synthetic oligonucleotide
  Sense strand starting at position 2089 of SEQ ID NO: 1886900
gagaaagucacgugagguc

SEQ ID NO: 2434167 - RNA, 19 nt, Artificial Sequence
  Description of Artificial Sequence: Synthetic oligonucleotide
  Antisense strand to SEQ ID NO: 2434166
gaccucacgugacuuucuc

SEQ ID NO: 2434168 - RNA, 19 nt, Artificial Sequence
  Description of Artificial Sequence: Synthetic oligonucleotide
  Sense strand starting at position 2096 of SEQ ID NO: 1886900
ucacgugagguccauaaag

SEQ ID NO: 2434169 - RNA, 19 nt, Artificial Sequence
  Description of Artificial Sequence: Synthetic oligonucleotide
  Antisense strand to SEQ ID NO: 2434168
cuuuauggaccucacguga

SEQ ID NO: 2434170 - RNA, 19 nt, Artificial Sequence
  Description of Artificial Sequence: Synthetic oligonucleotide
  Sense strand starting at position 2098 of SEQ ID NO: 1886900
acgugagguccauaaaguu

SEQ ID NO: 2434171 - RNA, 19 nt, Artificial Sequence
  Description of Artificial Sequence: Synthetic oligonucleotide
  Antisense strand to SEQ ID NO: 2434170
aacuuuauggaccucacgu

SEQ ID NO: 2434172 - RNA, 19 nt, Artificial Sequence
  Description of Artificial Sequence: Synthetic oligonucleotide
  Sense strand starting at position 2282 of SEQ ID NO: 1886900
gccagcauucccgcaguaa

SEQ ID NO: 2434173 - RNA, 19 nt, Artificial Sequence
  Description of Artificial Sequence: Synthetic oligonucleotide
  Antisense strand to SEQ ID NO: 2434172
uuacugcgggaaugcuggc

SEQ ID NO: 2434174 - RNA, 19 nt, Artificial Sequence
  Description of Artificial Sequence: Synthetic oligonucleotide
  Sense strand starting at position 2431 of SEQ ID NO: 1886900
gggacugggugccugaaau

SEQ ID NO: 2434175 - RNA, 19 nt, Artificial Sequence
  Description of Artificial Sequence: Synthetic oligonucleotide
  Antisense strand to SEQ ID NO: 2434174
auuucaggcacccaguccc

SEQ ID NO: 2434176 - RNA, 19 nt, Artificial Sequence
  Description of Artificial Sequence: Synthetic oligonucleotide
  Sense strand starting at position 2444 of SEQ ID NO: 1886900
ugaaaugagugcucucagu

SEQ ID NO: 2434177 - RNA, 19 nt, Artificial Sequence
  Description of Artificial Sequence: Synthetic oligonucleotide
  Antisense strand to SEQ ID NO: 2434176
acugagagcacucauuuca

SEQ ID NO: 2434178 - RNA, 19 nt, Artificial Sequence
  Description of Artificial Sequence: Synthetic oligonucleotide
  Sense strand starting at position 2594 of SEQ ID NO: 1886900
ggguguauauugcugaaag

SEQ ID NO: 2434179 - RNA, 19 nt, Artificial Sequence
  Description of Artificial Sequence: Synthetic oligonucleotide
  Antisense strand to SEQ ID NO: 2434178
cuuucagcaauauacaccc

SEQ ID NO: 2434180 - RNA, 19 nt, Artificial Sequence
  Description of Artificial Sequence: Synthetic oligonucleotide
  Sense strand starting at position 2596 of SEQ ID NO: 1886900
guguauauugcugaaagaa

SEQ ID NO: 2434181 - RNA, 19 nt, Artificial Sequence
  Description of Artificial Sequence: Synthetic oligonucleotide
  Antisense strand to SEQ ID NO: 2434180
uucuuucagcaauauacac

SEQ ID NO: 2434182 - RNA, 19 nt, Artificial Sequence
  Description of Artificial Sequence: Synthetic oligonucleotide
  Sense strand starting at position 2695 of SEQ ID NO: 1886900
cauucauuugucggaggug

SEQ ID NO: 2434183 - RNA, 19 nt, Artificial Sequence
  Description of Artificial Sequence: Synthetic oligonucleotide
  Antisense strand to SEQ ID NO: 2434182
caccuccgacaaaugaaug

SEQ ID NO: 2434184 - RNA, 19 nt, Artificial Sequence
  Description of Artificial Sequence: Synthetic oligonucleotide
  Sense strand starting at position 2698 of SEQ ID NO: 1886900
ucauuugucggaggugugu

SEQ ID NO: 2434185 - RNA, 19 nt, Artificial Sequence
  Description of Artificial Sequence: Synthetic oligonucleotide
  Antisense strand to SEQ ID NO: 2434184
acacaccuccgacaaauga

SEQ ID NO: 2434186 - RNA, 19 nt, Artificial Sequence
  Description of Artificial Sequence: Synthetic oligonucleotide
  Sense strand starting at position 2745 of SEQ ID NO: 1886900
ggauacaucugagcugaga

SEQ ID NO: 2434187 - RNA, 19 nt, Artificial Sequence
  Description of Artificial Sequence: Synthetic oligonucleotide
  Antisense strand to SEQ ID NO: 2434186
ucucagcucagauguaucc

SEQ ID NO: 2434188 - RNA, 19 nt, Artificial Sequence
  Description of Artificial Sequence: Synthetic oligonucleotide
  Sense strand starting at position 3052 of SEQ ID NO: 1886900
ggaagagcuucuucucuug

SEQ ID NO: 2434189 - RNA, 19 nt, Artificial Sequence
  Description of Artificial Sequence: Synthetic oligonucleotide
  Antisense strand to SEQ ID NO: 2434188
caagagaagaagcucuucc

SEQ ID NO: 2434190 - RNA, 19 nt, Artificial Sequence
  Description of Artificial Sequence: Synthetic oligonucleotide
  Sense strand starting at position 3071 of SEQ ID NO: 1886900
ccuagagguguuagguguu

SEQ ID NO: 2434191 - RNA, 19 nt, Artificial Sequence
  Description of Artificial Sequence: Synthetic oligonucleotide
  Antisense strand to SEQ ID NO: 2434190
aacaccuaacaccucuagg

SEQ ID NO: 2434192 - RNA, 19 nt, Artificial Sequence
  Description of Artificial Sequence: Synthetic oligonucleotide
  Sense strand starting at position 3074 of SEQ ID NO: 1886900
agagguguuagguguuuaa

SEQ ID NO: 2434193 - RNA, 19 nt, Artificial Sequence
  Description of Artificial Sequence: Synthetic oligonucleotide
  Antisense strand to SEQ ID NO: 2434192
uuaaacaccuaacaccucu

SEQ ID NO: 2434194 - RNA, 19 nt, Artificial Sequence
  Description of Artificial Sequence: Synthetic oligonucleotide
  Sense strand starting at position 3078 of SEQ ID NO: 1886900
guguuagguguuuaaguag

SEQ ID NO: 2434195 - RNA, 19 nt, Artificial Sequence
  Description of Artificial Sequence: Synthetic oligonucleotide
  Antisense strand to SEQ ID NO: 2434194
cuacuuaaacaccuaacac

SEQ ID NO: 2434196 - RNA, 19 nt, Artificial Sequence
  Description of Artificial Sequence: Synthetic oligonucleotide
  Sense strand starting at position 3084 of SEQ ID NO: 1886900
gguguuuaaguagaacucu

SEQ ID NO: 2434197 - RNA, 19 nt, Artificial Sequence
  Description of Artificial Sequence: Synthetic oligonucleotide
  Antisense strand to SEQ ID NO: 2434196
agaguucuacuuaaacacc

SEQ ID NO: 2434198 - RNA, 19 nt, Artificial Sequence
  Description of Artificial Sequence: Synthetic oligonucleotide
  Sense strand starting at position 3090 of SEQ ID NO: 1886900
uaaguagaacucuggcaag

SEQ ID NO: 2434199 - RNA, 19 nt, Artificial Sequence
  Description of Artificial Sequence: Synthetic oligonucleotide
  Antisense strand to SEQ ID NO: 2434198
cuugccagaguucuacuua

SEQ ID NO: 2434200 - RNA, 19 nt, Artificial Sequence
  Description of Artificial Sequence: Synthetic oligonucleotide
  Sense strand starting at position 3471 of SEQ ID NO: 1886900
aguuucugggauuggauau

SEQ ID NO: 2434201 - RNA, 19 nt, Artificial Sequence
  Description of Artificial Sequence: Synthetic oligonucleotide
  Antisense strand to SEQ ID NO: 2434200
auauccaaucccagaaacu

SEQ ID NO: 2434202 - RNA, 19 nt, Artificial Sequence
  Description of Artificial Sequence: Synthetic oligonucleotide
  Sense strand starting at position 3505 of SEQ ID NO: 1886900
gcuucugaucuuugggaca

SEQ ID NO: 2434203 - RNA, 19 nt, Artificial Sequence
  Description of Artificial Sequence: Synthetic oligonucleotide
  Antisense strand to SEQ ID NO: 2434202
ugucccaaagaucagaagc

SEQ ID NO: 2434204 - RNA, 19 nt, Artificial Sequence
  Description of Artificial Sequence: Synthetic oligonucleotide
  Sense strand starting at position 3674 of SEQ ID NO: 1886900
cagagucacccugguuuga

SEQ ID NO: 2434205 - RNA, 19 nt, Artificial Sequence
  Description of Artificial Sequence: Synthetic oligonucleotide
  Antisense strand to SEQ ID NO: 2434204
ucaaaccagggugacucug

SEQ ID NO: 2434206 - RNA, 19 nt, Artificial Sequence
  Description of Artificial Sequence: Synthetic oligonucleotide
  Sense strand starting at position 334 of SEQ ID NO: 1886901
uugaaucggcccuaacgau

SEQ ID NO: 2434207 - RNA, 19 nt, Artificial Sequence
  Description of Artificial Sequence: Synthetic oligonucleotide
  Antisense strand to SEQ ID NO: 2434206
aucguuagggccgauucaa

SEQ ID NO: 2434208 - RNA, 19 nt, Artificial Sequence
  Description of Artificial Sequence: Synthetic oligonucleotide
  Sense strand starting at position 354 of SEQ ID NO: 1886901
cucggaucgucauuauuug

SEQ ID NO: 2434209 - RNA, 19 nt, Artificial Sequence
  Description of Artificial Sequence: Synthetic oligonucleotide
  Antisense strand to SEQ ID NO: 2434208
caaauaaugacgauccgag

SEQ ID NO: 2434210 - RNA, 19 nt, Artificial Sequence
  Description of Artificial Sequence: Synthetic oligonucleotide
  Sense strand starting at position 358 of SEQ ID NO: 1886901
gaucgucauuauuuguaac

SEQ ID NO: 2434211 - RNA, 19 nt, Artificial Sequence
  Description of Artificial Sequence: Synthetic oligonucleotide
  Antisense strand to SEQ ID NO: 2434210
guuacaaauaaugacgauc

SEQ ID NO: 2434212 - RNA, 19 nt, Artificial Sequence
  Description of Artificial Sequence: Synthetic oligonucleotide
  Sense strand starting at position 360 of SEQ ID NO: 1886901
ucgucauuauuuguaacca

SEQ ID NO: 2434213 - RNA, 19 nt, Artificial Sequence
  Description of Artificial Sequence: Synthetic oligonucleotide
  Antisense strand to SEQ ID NO: 2434212
ugguuacaaauaaugacga

SEQ ID NO: 2434214 - RNA, 19 nt, Artificial Sequence
  Description of Artificial Sequence: Synthetic oligonucleotide
  Sense strand starting at position 398 of SEQ ID NO: 1886901
ugaggucaucagcgagaau

SEQ ID NO: 2434215 - RNA, 19 nt, Artificial Sequence
  Description of Artificial Sequence: Synthetic oligonucleotide
  Antisense strand to SEQ ID NO: 2434214
auucucgcugaugaccuca

SEQ ID NO: 2434216 - RNA, 19 nt, Artificial Sequence
  Description of Artificial Sequence: Synthetic oligonucleotide
  Sense strand starting at position 399 of SEQ ID NO: 1886901
gaggucaucagcgagaauu

SEQ ID NO: 2434217 - RNA, 19 nt, Artificial Sequence
  Description of Artificial Sequence: Synthetic oligonucleotide
  Antisense strand to SEQ ID NO: 2434216
aauucucgcugaugaccuc

SEQ ID NO: 2434218 - RNA, 19 nt, Artificial Sequence
  Description of Artificial Sequence: Synthetic oligonucleotide
  Sense strand starting at position 542 of SEQ ID NO: 1886901
aucauaaaucgugaagcac

SEQ ID NO: 2434219 - RNA, 19 nt, Artificial Sequence
  Description of Artificial Sequence: Synthetic oligonucleotide
  Antisense strand to SEQ ID NO: 2434218
gugcuucacgauuuaugau

SEQ ID NO: 2434220 - RNA, 19 nt, Artificial Sequence
  Description of Artificial Sequence: Synthetic oligonucleotide
  Sense strand starting at position 551 of SEQ ID NO: 1886901
cgugaagcacaggguuaua

SEQ ID NO: 2434221 - RNA, 19 nt, Artificial Sequence
  Description of Artificial Sequence: Synthetic oligonucleotide
  Antisense strand to SEQ ID NO: 2434220
uauaacccugugcuucacg

SEQ ID NO: 2434222 - RNA, 19 nt, Artificial Sequence
  Description of Artificial Sequence: Synthetic oligonucleotide
  Sense strand starting at position 660 of SEQ ID NO: 1886901
cggacuaucaguugcuaaa

SEQ ID NO: 2434223 - RNA, 19 nt, Artificial Sequence
  Description of Artificial Sequence: Synthetic oligonucleotide
  Antisense strand to SEQ ID NO: 2434222
uuuagcaacugauaguccg

SEQ ID NO: 2434224 - RNA, 19 nt, Artificial Sequence
  Description of Artificial Sequence: Synthetic oligonucleotide
  Sense strand starting at position 737 of SEQ ID NO: 1886901
ggcucuuacggcuacaauu

SEQ ID NO: 2434225 - RNA, 19 nt, Artificial Sequence
  Description of Artificial Sequence: Synthetic oligonucleotide
  Antisense strand to SEQ ID NO: 2434224
aauuguagccguaagagcc

SEQ ID NO: 2434226 - RNA, 19 nt, Artificial Sequence
  Description of Artificial Sequence: Synthetic oligonucleotide
  Sense strand starting at position 1159 of SEQ ID NO: 1886901
ucacaucagccaugguaau

SEQ ID NO: 2434227 - RNA, 19 nt, Artificial Sequence
  Description of Artificial Sequence: Synthetic oligonucleotide
  Antisense strand to SEQ ID NO: 2434226
auuaccauggcugauguga

SEQ ID NO: 2434228 - RNA, 19 nt, Artificial Sequence
  Description of Artificial Sequence: Synthetic oligonucleotide
  Sense strand starting at position 1241 of SEQ ID NO: 1886901
caaggagagcuuggcuuua

SEQ ID NO: 2434229 - RNA, 19 nt, Artificial Sequence
  Description of Artificial Sequence: Synthetic oligonucleotide
  Antisense strand to SEQ ID NO: 2434228
uaaagccaagcucuccuug

SEQ ID NO: 2434230 - RNA, 19 nt, Artificial Sequence
  Description of Artificial Sequence: Synthetic oligonucleotide
  Sense strand starting at position 1336 of SEQ ID NO: 1886901
aagggucucucuguuaaga

SEQ ID NO: 2434231 - RNA, 19 nt, Artificial Sequence
  Description of Artificial Sequence: Synthetic oligonucleotide
  Antisense strand to SEQ ID NO: 2434230
ucuuaacagagagacccuu

SEQ ID NO: 2434232 - RNA, 19 nt, Artificial Sequence
  Description of Artificial Sequence: Synthetic oligonucleotide
  Sense strand starting at position 1482 of SEQ ID NO: 1886901
ugagacugucgcuagcaaa

SEQ ID NO: 2434233 - RNA, 19 nt, Artificial Sequence
  Description of Artificial Sequence: Synthetic oligonucleotide
  Antisense strand to SEQ ID NO: 2434232
uuugcuagcgacagucuca

SEQ ID NO: 2434234 - RNA, 19 nt, Artificial Sequence
  Description of Artificial Sequence: Synthetic oligonucleotide
  Sense strand starting at position 1675 of SEQ ID NO: 1886901
agaaaucgagcuugaaugu

SEQ ID NO: 2434235 - RNA, 19 nt, Artificial Sequence
  Description of Artificial Sequence: Synthetic oligonucleotide
  Antisense strand to SEQ ID NO: 2434234
acauucaagcucgauuucu

SEQ ID NO: 2434236 - RNA, 19 nt, Artificial Sequence
  Description of Artificial Sequence: Synthetic oligonucleotide
  Sense strand starting at position 1789 of SEQ ID NO: 1886901
ccuuaaccggaauaauguu

SEQ ID NO: 2434237 - RNA, 19 nt, Artificial Sequence
  Description of Artificial Sequence: Synthetic oligonucleotide
  Antisense strand to SEQ ID NO: 2434236
aacauuauuccgguuaagg

SEQ ID NO: 2434238 - RNA, 19 nt, Artificial Sequence
  Description of Artificial Sequence: Synthetic oligonucleotide
  Sense strand starting at position 1824 of SEQ ID NO: 1886901
cuaucugcuccagauauga

SEQ ID NO: 2434239 - RNA, 19 nt, Artificial Sequence
  Description of Artificial Sequence: Synthetic oligonucleotide
  Antisense strand to SEQ ID NO: 2434238
ucauaucuggagcagauag

SEQ ID NO: 2434240 - RNA, 19 nt, Artificial Sequence
  Description of Artificial Sequence: Synthetic oligonucleotide
  Sense strand starting at position 2042 of SEQ ID NO: 1886901
aaguaugagccuggcuaca

SEQ ID NO: 2434241 - RNA, 19 nt, Artificial Sequence
  Description of Artificial Sequence: Synthetic oligonucleotide
  Antisense strand to SEQ ID NO: 2434240
uguagccaggcucauacuu

SEQ ID NO: 2434242 - RNA, 19 nt, Artificial Sequence
  Description of Artificial Sequence: Synthetic oligonucleotide
  Sense strand starting at position 2205 of SEQ ID NO: 1886901
guguuacgauauuucguuu

SEQ ID NO: 2434243 - RNA, 19 nt, Artificial Sequence
  Description of Artificial Sequence: Synthetic oligonucleotide
  Antisense strand to SEQ ID NO: 2434242
aaacgaaauaucguaacac

SEQ ID NO: 2434244 - RNA, 19 nt, Artificial Sequence
  Description of Artificial Sequence: Synthetic oligonucleotide
  Sense strand starting at position 2208 of SEQ ID NO: 1886901
uuacgauauuucguuuggu

SEQ ID NO: 2434245 - RNA, 19 nt, Artificial Sequence
  Description of Artificial Sequence: Synthetic oligonucleotide
  Antisense strand to SEQ ID NO: 2434244
accaaacgaaauaucguaa

SEQ ID NO: 2434246 - RNA, 19 nt, Artificial Sequence
  Description of Artificial Sequence: Synthetic oligonucleotide
  Sense strand starting at position 2209 of SEQ ID NO: 1886901
uacgauauuucguuugguc

SEQ ID NO: 2434247 - RNA, 19 nt, Artificial Sequence
  Description of Artificial Sequence: Synthetic oligonucleotide
  Antisense strand to SEQ ID NO: 2434246
gaccaaacgaaauaucgua

SEQ ID NO: 2434248 - RNA, 19 nt, Artificial Sequence
  Description of Artificial Sequence: Synthetic oligonucleotide
  Sense strand starting at position 2211 of SEQ ID NO: 1886901
cgauauuucguuuggucuu

SEQ ID NO: 2434249 - RNA, 19 nt, Artificial Sequence
  Description of Artificial Sequence: Synthetic oligonucleotide
  Antisense strand to SEQ ID NO: 2434248
aagaccaaacgaaauaucg

SEQ ID NO: 2434250 - RNA, 19 nt, Artificial Sequence
  Description of Artificial Sequence: Synthetic oligonucleotide
  Sense strand starting at position 2256 of SEQ ID NO: 1886901
uggacugguuaucuuguua

SEQ ID NO: 2434251 - RNA, 19 nt, Artificial Sequence
  Description of Artificial Sequence: Synthetic oligonucleotide
  Antisense strand to SEQ ID NO: 2434250
uaacaagauaaccagucca

SEQ ID NO: 2434252 - RNA, 19 nt, Artificial Sequence
  Description of Artificial Sequence: Synthetic oligonucleotide
  Sense strand starting at position 2260 of SEQ ID NO: 1886901
cugguuaucuuguuauuau

SEQ ID NO: 2434253 - RNA, 19 nt, Artificial Sequence
  Description of Artificial Sequence: Synthetic oligonucleotide
  Antisense strand to SEQ ID NO: 2434252
auaauaacaagauaaccag

SEQ ID NO: 2434254 - RNA, 19 nt, Artificial Sequence
  Description of Artificial Sequence: Synthetic oligonucleotide
  Sense strand starting at position 2744 of SEQ ID NO: 1886901
aggccuggucugggaguau

SEQ ID NO: 2434255 - RNA, 19 nt, Artificial Sequence
  Description of Artificial Sequence: Synthetic oligonucleotide
  Antisense strand to SEQ ID NO: 2434254
auacucccagaccaggccu

SEQ ID NO: 2434256 - RNA, 19 nt, Artificial Sequence
  Description of Artificial Sequence: Synthetic oligonucleotide
  Sense strand starting at position 2797 of SEQ ID NO: 1886901
uuguguauuucucugugaa

SEQ ID NO: 2434257 - RNA, 19 nt, Artificial Sequence
  Description of Artificial Sequence: Synthetic oligonucleotide
  Antisense strand to SEQ ID NO: 2434256
uucacagagaaauacacaa

SEQ ID NO: 2434258 - RNA, 19 nt, Artificial Sequence
  Description of Artificial Sequence: Synthetic oligonucleotide
  Sense strand starting at position 2798 of SEQ ID NO: 1886901
uguguauuucucugugaau

SEQ ID NO: 2434259 - RNA, 19 nt, Artificial Sequence
  Description of Artificial Sequence: Synthetic oligonucleotide
  Antisense strand to SEQ ID NO: 2434258
auucacagagaaauacaca

SEQ ID NO: 2434260 - RNA, 19 nt, Artificial Sequence
  Description of Artificial Sequence: Synthetic oligonucleotide
  Sense strand starting at position 2799 of SEQ ID NO: 1886901
guguauuucucugugaauc

SEQ ID NO: 2434261 - RNA, 19 nt, Artificial Sequence
  Description of Artificial Sequence: Synthetic oligonucleotide
  Antisense strand to SEQ ID NO: 2434260
gauucacagagaaauacac

SEQ ID NO: 2434262 - RNA, 19 nt, Artificial Sequence
  Description of Artificial Sequence: Synthetic oligonucleotide
  Sense strand starting at position 2856 of SEQ ID NO: 1886901
gggauagucugggucagac

SEQ ID NO: 2434263 - RNA, 19 nt, Artificial Sequence
  Description of Artificial Sequence: Synthetic oligonucleotide
  Antisense strand to SEQ ID NO: 2434262
gucugacccagacuauccc

SEQ ID NO: 2434264 - RNA, 19 nt, Artificial Sequence
  Description of Artificial Sequence: Synthetic oligonucleotide
  Sense strand starting at position 2983 of SEQ ID NO: 1886901
uugguauuuguuuguagcu

SEQ ID NO: 2434265 - RNA, 19 nt, Artificial Sequence
  Description of Artificial Sequence: Synthetic oligonucleotide
  Antisense strand to SEQ ID NO: 2434264
agcuacaaacaaauaccaa

SEQ ID NO: 2434266 - RNA, 19 nt, Artificial Sequence
  Description of Artificial Sequence: Synthetic oligonucleotide
  Sense strand starting at position 2984 of SEQ ID NO: 1886901
ugguauuuguuuguagcuu

SEQ ID NO: 2434267 - RNA, 19 nt, Artificial Sequence
  Description of Artificial Sequence: Synthetic oligonucleotide
  Antisense strand to SEQ ID NO: 2434266
aagcuacaaacaaauacca

SEQ ID NO: 2434268 - RNA, 19 nt, Artificial Sequence
  Description of Artificial Sequence: Synthetic oligonucleotide
  Sense strand starting at position 2996 of SEQ ID NO: 1886901
guagcuuuccuggaaguca

SEQ ID NO: 2434269 - RNA, 19 nt, Artificial Sequence
  Description of Artificial Sequence: Synthetic oligonucleotide
  Antisense strand to SEQ ID NO: 2434268
ugacuuccaggaaagcuac

SEQ ID NO: 2434270 - RNA, 19 nt, Artificial Sequence
  Description of Artificial Sequence: Synthetic oligonucleotide
  Sense strand starting at position 3170 of SEQ ID NO: 1886901
aagucacuggcuuggucaa

SEQ ID NO: 2434271 - RNA, 19 nt, Artificial Sequence
  Description of Artificial Sequence: Synthetic oligonucleotide
  Antisense strand to SEQ ID NO: 2434270
uugaccaagccagugacuu

SEQ ID NO: 2434272 - RNA, 19 nt, Artificial Sequence
  Description of Artificial Sequence: Synthetic oligonucleotide
  Sense strand starting at position 3683 of SEQ ID NO: 1886901
gagucaagucuggacacuu

SEQ ID NO: 2434273 - RNA, 19 nt, Artificial Sequence
  Description of Artificial Sequence: Synthetic oligonucleotide
  Antisense strand to SEQ ID NO: 2434272
aaguguccagacuugacuc

SEQ ID NO: 2434274 - RNA, 19 nt, Artificial Sequence
  Description of Artificial Sequence: Synthetic oligonucleotide
  Sense strand starting at position 3694 of SEQ ID NO: 1886901
ggacacuuacccggucaau

SEQ ID NO: 2434275 - RNA, 19 nt, Artificial Sequence
  Description of Artificial Sequence: Synthetic oligonucleotide
  Antisense strand to SEQ ID NO: 2434274
auugaccggguaagugucc

SEQ ID NO: 2434276 - RNA, 19 nt, Artificial Sequence
  Description of Artificial Sequence: Synthetic oligonucleotide
  Sense strand starting at position 3867 of SEQ ID NO: 1886901
cuaugacauuuagauguca

SEQ ID NO: 2434277 - RNA, 19 nt, Artificial Sequence
  Description of Artificial Sequence: Synthetic oligonucleotide
  Antisense strand to SEQ ID NO: 2434276
ugacaucuaaaugucauag

SEQ ID NO: 2434278 - RNA, 19 nt, Artificial Sequence
  Description of Artificial Sequence: Synthetic oligonucleotide
  Sense strand starting at position 3948 of SEQ ID NO: 1886901
cccucacuggcucgagaaa

SEQ ID NO: 2434279 - RNA, 19 nt, Artificial Sequence
  Description of Artificial Sequence: Synthetic oligonucleotide
  Antisense strand to SEQ ID NO: 2434278
uuucucgagccagugaggg

SEQ ID NO: 2434280 - RNA, 19 nt, Artificial Sequence
  Description of Artificial Sequence: Synthetic oligonucleotide
  Sense strand starting at position 3961 of SEQ ID NO: 1886901
gagaaagucacgugagguc

SEQ ID NO: 2434281 - RNA, 19 nt, Artificial Sequence
  Description of Artificial Sequence: Synthetic oligonucleotide
  Antisense strand to SEQ ID NO: 2434280
gaccucacgugacuuucuc

SEQ ID NO: 2434282 - RNA, 19 nt, Artificial Sequence
  Description of Artificial Sequence: Synthetic oligonucleotide
  Sense strand starting at position 3968 of SEQ ID NO: 1886901
ucacgugagguccauaaag

SEQ ID NO: 2434283 - RNA, 19 nt, Artificial Sequence
  Description of Artificial Sequence: Synthetic oligonucleotide
  Antisense strand to SEQ ID NO: 2434282
cuuuauggaccucacguga

SEQ ID NO: 2434284 - RNA, 19 nt, Artificial Sequence
  Description of Artificial Sequence: Synthetic oligonucleotide
  Sense strand starting at position 3970 of SEQ ID NO: 1886901
acgugagguccauaaaguu

SEQ ID NO: 2434285 - RNA, 19 nt, Artificial Sequence
  Description of Artificial Sequence: Synthetic oligonucleotide
  Antisense strand to SEQ ID NO: 2434284
aacuuuauggaccucacgu

SEQ ID NO: 2434286 - RNA, 19 nt, Artificial Sequence
  Description of Artificial Sequence: Synthetic oligonucleotide
  Sense strand starting at position 41 of SEQ ID NO: 1886902
cggccuucuaccgcgagaa

SEQ ID NO: 2434287 - RNA, 19 nt, Artificial Sequence
  Description of Artificial Sequence: Synthetic oligonucleotide
  Antisense strand to SEQ ID NO: 2434286
uucucgcgguagaaggccg

SEQ ID NO: 2434288 - RNA, 19 nt, Artificial Sequence
  Description of Artificial Sequence: Synthetic oligonucleotide
  Sense strand starting at position 42 of SEQ ID NO: 1886902
ggccuucuaccgcgagaaa

SEQ ID NO: 2434289 - RNA, 19 nt, Artificial Sequence
  Description of Artificial Sequence: Synthetic oligonucleotide
  Antisense strand to SEQ ID NO: 2434288
uuucucgcgguagaaggcc

SEQ ID NO: 2434290 - RNA, 19 nt, Artificial Sequence
  Description of Artificial Sequence: Synthetic oligonucleotide
  Sense strand starting at position 144 of SEQ ID NO: 1886902
gagcguguucggcgagaca

SEQ ID NO: 2434291 - RNA, 19 nt, Artificial Sequence
  Description of Artificial Sequence: Synthetic oligonucleotide
  Antisense strand to SEQ ID NO: 2434290
ugucucgccgaacacgcuc

SEQ ID NO: 2434292 - RNA, 19 nt, Artificial Sequence
  Description of Artificial Sequence: Synthetic oligonucleotide
  Sense strand starting at position 146 of SEQ ID NO: 1886902
gcguguucggcgagacaga

SEQ ID NO: 2434293 - RNA, 19 nt, Artificial Sequence
  Description of Artificial Sequence: Synthetic oligonucleotide
  Antisense strand to SEQ ID NO: 2434292
ucugucucgccgaacacgc

SEQ ID NO: 2434294 - RNA, 19 nt, Artificial Sequence
  Description of Artificial Sequence: Synthetic oligonucleotide
  Sense strand starting at position 147 of SEQ ID NO: 1886902
cguguucggcgagacagaa

SEQ ID NO: 2434295 - RNA, 19 nt, Artificial Sequence
  Description of Artificial Sequence: Synthetic oligonucleotide
  Antisense strand to SEQ ID NO: 2434294
uucugucucgccgaacacg

SEQ ID NO: 2434296 - RNA, 19 nt, Artificial Sequence
  Description of Artificial Sequence: Synthetic oligonucleotide
  Sense strand starting at position 203 of SEQ ID NO: 1886902
agcggaugaauucgugcaa

SEQ ID NO: 2434297 - RNA, 19 nt, Artificial Sequence
  Description of Artificial Sequence: Synthetic oligonucleotide
  Antisense strand to SEQ ID NO: 2434296
uugcacgaauucauccgcu

SEQ ID NO: 2434298 - RNA, 19 nt, Artificial Sequence
  Description of Artificial Sequence: Synthetic oligonucleotide
  Sense strand starting at position 207 of SEQ ID NO: 1886902
gaugaauucgugcaacagu

SEQ ID NO: 2434299 - RNA, 19 nt, Artificial Sequence
  Description of Artificial Sequence: Synthetic oligonucleotide
  Antisense strand to SEQ ID NO: 2434298
acuguugcacgaauucauc

SEQ ID NO: 2434300 - RNA, 19 nt, Artificial Sequence
  Description of Artificial Sequence: Synthetic oligonucleotide
  Sense strand starting at position 328 of SEQ ID NO: 1886902
gugggcaucucaguuagga

SEQ ID NO: 2434301 - RNA, 19 nt, Artificial Sequence
  Description of Artificial Sequence: Synthetic oligonucleotide
  Antisense strand to SEQ ID NO: 2434300
uccuaacugagaugcccac

SEQ ID NO: 2434302 - RNA, 19 nt, Artificial Sequence
  Description of Artificial Sequence: Synthetic oligonucleotide
  Sense strand starting at position 330 of SEQ ID NO: 1886902
gggcaucucaguuaggaga

SEQ ID NO: 2434303 - RNA, 19 nt, Artificial Sequence
  Description of Artificial Sequence: Synthetic oligonucleotide
  Antisense strand to SEQ ID NO: 2434302
ucuccuaacugagaugccc

SEQ ID NO: 2434304 - RNA, 19 nt, Artificial Sequence
  Description of Artificial Sequence: Synthetic oligonucleotide
  Sense strand starting at position 332 of SEQ ID NO: 1886902
gcaucucaguuaggagaua

SEQ ID NO: 2434305 - RNA, 19 nt, Artificial Sequence
  Description of Artificial Sequence: Synthetic oligonucleotide
  Antisense strand to SEQ ID NO: 2434304
uaucuccuaacugagaugc

SEQ ID NO: 2434306 - RNA, 19 nt, Artificial Sequence
  Description of Artificial Sequence: Synthetic oligonucleotide
  Sense strand starting at position 391 of SEQ ID NO: 1886902
cccuauuaggcaggaguua

SEQ ID NO: 2434307 - RNA, 19 nt, Artificial Sequence
  Description of Artificial Sequence: Synthetic oligonucleotide
  Antisense strand to SEQ ID NO: 2434306
uaacuccugccuaauaggg

SEQ ID NO: 2434308 - RNA, 19 nt, Artificial Sequence
  Description of Artificial Sequence: Synthetic oligonucleotide
  Sense strand starting at position 406 of SEQ ID NO: 1886902
guuacaaaguuugcaaagu

SEQ ID NO: 2434309 - RNA, 19 nt, Artificial Sequence
  Description of Artificial Sequence: Synthetic oligonucleotide
  Antisense strand to SEQ ID NO: 2434308
acuuugcaaacuuuguaac

SEQ ID NO: 2434310 - RNA, 19 nt, Artificial Sequence
  Description of Artificial Sequence: Synthetic oligonucleotide
  Sense strand starting at position 607 of SEQ ID NO: 1886902
aacggagugcgucaugcaa

SEQ ID NO: 2434311 - RNA, 19 nt, Artificial Sequence
  Description of Artificial Sequence: Synthetic oligonucleotide
  Antisense strand to SEQ ID NO: 2434310
uugcaugacgcacuccguu

SEQ ID NO: 2434312 - RNA, 19 nt, Artificial Sequence
  Description of Artificial Sequence: Synthetic oligonucleotide
  Sense strand starting at position 808 of SEQ ID NO: 1886902
gggucucagguuggauuau

SEQ ID NO: 2434313 - RNA, 19 nt, Artificial Sequence
  Description of Artificial Sequence: Synthetic oligonucleotide
  Antisense strand to SEQ ID NO: 2434312
auaauccaaccugagaccc

SEQ ID NO: 2434314 - RNA, 19 nt, Artificial Sequence
  Description of Artificial Sequence: Synthetic oligonucleotide
  Sense strand starting at position 809 of SEQ ID NO: 1886902
ggucucagguuggauuauu

SEQ ID NO: 2434315 - RNA, 19 nt, Artificial Sequence
  Description of Artificial Sequence: Synthetic oligonucleotide
  Antisense strand to SEQ ID NO: 2434314
aauaauccaaccugagacc

SEQ ID NO: 2434316 - RNA, 19 nt, Artificial Sequence
  Description of Artificial Sequence: Synthetic oligonucleotide
  Sense strand starting at position 819 of SEQ ID NO: 1886902
uggauuauuuguuggccuu

SEQ ID NO: 2434317 - RNA, 19 nt, Artificial Sequence
  Description of Artificial Sequence: Synthetic oligonucleotide
  Antisense strand to SEQ ID NO: 2434316
aaggccaacaaauaaucca

SEQ ID NO: 2434318 - RNA, 19 nt, Artificial Sequence
  Description of Artificial Sequence: Synthetic oligonucleotide
  Sense strand starting at position 832 of SEQ ID NO: 1886902
ggccuuaagucccaacuga

SEQ ID NO: 2434319 - RNA, 19 nt, Artificial Sequence
  Description of Artificial Sequence: Synthetic oligonucleotide
  Antisense strand to SEQ ID NO: 2434318
ucaguugggacuuaaggcc

SEQ ID NO: 2434320 - RNA, 19 nt, Artificial Sequence
  Description of Artificial Sequence: Synthetic oligonucleotide
  Sense strand starting at position 883 of SEQ ID NO: 1886902
guuaauguggacuauggau

SEQ ID NO: 2434321 - RNA, 19 nt, Artificial Sequence
  Description of Artificial Sequence: Synthetic oligonucleotide
  Antisense strand to SEQ ID NO: 2434320
auccauaguccacauuaac

SEQ ID NO: 2434322 - RNA, 19 nt, Artificial Sequence
  Description of Artificial Sequence: Synthetic oligonucleotide
  Sense strand starting at position 890 of SEQ ID NO: 1886902
uggacuauggaucgaucua

SEQ ID NO: 2434323 - RNA, 19 nt, Artificial Sequence
  Description of Artificial Sequence: Synthetic oligonucleotide
  Antisense strand to SEQ ID NO: 2434322
uagaucgauccauagucca

SEQ ID NO: 2434324 - RNA, 19 nt, Artificial Sequence
  Description of Artificial Sequence: Synthetic oligonucleotide
  Sense strand starting at position 897 of SEQ ID NO: 1886902
uggaucgaucuacgucauu

SEQ ID NO: 2434325 - RNA, 19 nt, Artificial Sequence
  Description of Artificial Sequence: Synthetic oligonucleotide
  Antisense strand to SEQ ID NO: 2434324
aaugacguagaucgaucca

SEQ ID NO: 2434326 - RNA, 19 nt, Artificial Sequence
  Description of Artificial Sequence: Synthetic oligonucleotide
  Sense strand starting at position 902 of SEQ ID NO: 1886902
cgaucuacgucauuacgga

SEQ ID NO: 2434327 - RNA, 19 nt, Artificial Sequence
  Description of Artificial Sequence: Synthetic oligonucleotide
  Antisense strand to SEQ ID NO: 2434326
uccguaaugacguagaucg

SEQ ID NO: 2434328 - RNA, 19 nt, Artificial Sequence
  Description of Artificial Sequence: Synthetic oligonucleotide
  Sense strand starting at position 903 of SEQ ID NO: 1886902
gaucuacgucauuacggau

SEQ ID NO: 2434329 - RNA, 19 nt, Artificial Sequence
  Description of Artificial Sequence: Synthetic oligonucleotide
  Antisense strand to SEQ ID NO: 2434328
auccguaaugacguagauc

SEQ ID NO: 2434330 - RNA, 19 nt, Artificial Sequence
  Description of Artificial Sequence: Synthetic oligonucleotide
  Sense strand starting at position 1199 of SEQ ID NO: 1886902
ggcuggagucuguguucga

SEQ ID NO: 2434331 - RNA, 19 nt, Artificial Sequence
  Description of Artificial Sequence: Synthetic oligonucleotide
  Antisense strand to SEQ ID NO: 2434330
ucgaacacagacuccagcc

SEQ ID NO: 2434332 - RNA, 19 nt, Artificial Sequence
  Description of Artificial Sequence: Synthetic oligonucleotide
  Sense strand starting at position 1206 of SEQ ID NO: 1886902
gucuguguucgagggucga

SEQ ID NO: 2434333 - RNA, 19 nt, Artificial Sequence
  Description of Artificial Sequence: Synthetic oligonucleotide
  Antisense strand to SEQ ID NO: 2434332
ucgacccucgaacacagac

SEQ ID NO: 2434334 - RNA, 19 nt, Artificial Sequence
  Description of Artificial Sequence: Synthetic oligonucleotide
  Sense strand starting at position 1802 of SEQ ID NO: 1886902
aggcuuccuggugagaacu

SEQ ID NO: 2434335 - RNA, 19 nt, Artificial Sequence
  Description of Artificial Sequence: Synthetic oligonucleotide
  Antisense strand to SEQ ID NO: 2434334
aguucucaccaggaagccu

SEQ ID NO: 2434336 - RNA, 19 nt, Artificial Sequence
  Description of Artificial Sequence: Synthetic oligonucleotide
  Sense strand starting at position 1804 of SEQ ID NO: 1886902
gcuuccuggugagaacuga

SEQ ID NO: 2434337 - RNA, 19 nt, Artificial Sequence
  Description of Artificial Sequence: Synthetic oligonucleotide
  Antisense strand to SEQ ID NO: 2434336
ucaguucucaccaggaagc

SEQ ID NO: 2434338 - RNA, 19 nt, Artificial Sequence
  Description of Artificial Sequence: Synthetic oligonucleotide
  Sense strand starting at position 1825 of SEQ ID NO: 1886902
agcggacucacuugauguu

SEQ ID NO: 2434339 - RNA, 19 nt, Artificial Sequence
  Description of Artificial Sequence: Synthetic oligonucleotide
  Antisense strand to SEQ ID NO: 2434338
aacaucaagugaguccgcu

SEQ ID NO: 2434340 - RNA, 19 nt, Artificial Sequence
  Description of Artificial Sequence: Synthetic oligonucleotide
  Sense strand starting at position 1826 of SEQ ID NO: 1886902
gcggacucacuugauguuu

SEQ ID NO: 2434341 - RNA, 19 nt, Artificial Sequence
  Description of Artificial Sequence: Synthetic oligonucleotide
  Antisense strand to SEQ ID NO: 2434340
aaacaucaagugaguccgc

SEQ ID NO: 2434342 - RNA, 19 nt, Artificial Sequence
  Description of Artificial Sequence: Synthetic oligonucleotide
  Sense strand starting at position 2087 of SEQ ID NO: 1886902
guguuuguagucuugucuu

SEQ ID NO: 2434343 - RNA, 19 nt, Artificial Sequence
  Description of Artificial Sequence: Synthetic oligonucleotide
  Antisense strand to SEQ ID NO: 2434342
aagacaagacuacaaacac

SEQ ID NO: 2434344 - RNA, 19 nt, Artificial Sequence
  Description of Artificial Sequence: Synthetic oligonucleotide
  Sense strand starting at position 2103 of SEQ ID NO: 1886902
cuuagcucuggacgugaaa

SEQ ID NO: 2434345 - RNA, 19 nt, Artificial Sequence
  Description of Artificial Sequence: Synthetic oligonucleotide
  Antisense strand to SEQ ID NO: 2434344
uuucacguccagagcuaag

SEQ ID NO: 2434346 - RNA, 19 nt, Artificial Sequence
  Description of Artificial Sequence: Synthetic oligonucleotide
  Sense strand starting at position 2115 of SEQ ID NO: 1886902
cgugaaauacuucgaugau

SEQ ID NO: 2434347 - RNA, 19 nt, Artificial Sequence
  Description of Artificial Sequence: Synthetic oligonucleotide
  Antisense strand to SEQ ID NO: 2434346
aucaucgaaguauuucacg

SEQ ID NO: 2434348 - RNA, 19 nt, Artificial Sequence
  Description of Artificial Sequence: Synthetic oligonucleotide
  Sense strand starting at position 2116 of SEQ ID NO: 1886902
gugaaauacuucgaugaug

SEQ ID NO: 2434349 - RNA, 19 nt, Artificial Sequence
  Description of Artificial Sequence: Synthetic oligonucleotide
  Antisense strand to SEQ ID NO: 2434348
caucaucgaaguauuucac

SEQ ID NO: 2434350 - RNA, 19 nt, Artificial Sequence
  Description of Artificial Sequence: Synthetic oligonucleotide
  Sense strand starting at position 2118 of SEQ ID NO: 1886902
gaaauacuucgaugaugau

SEQ ID NO: 2434351 - RNA, 19 nt, Artificial Sequence
  Description of Artificial Sequence: Synthetic oligonucleotide
  Antisense strand to SEQ ID NO: 2434350
aucaucaucgaaguauuuc

SEQ ID NO: 2434352 - RNA, 19 nt, Artificial Sequence
  Description of Artificial Sequence: Synthetic oligonucleotide
  Sense strand starting at position 2330 of SEQ ID NO: 1886902
cccuguucgacugggaagu

SEQ ID NO: 2434353 - RNA, 19 nt, Artificial Sequence
  Description of Artificial Sequence: Synthetic oligonucleotide
  Antisense strand to SEQ ID NO: 2434352
acuucccagucgaacaggg

SEQ ID NO: 2434354 - RNA, 19 nt, Artificial Sequence
  Description of Artificial Sequence: Synthetic oligonucleotide
  Sense strand starting at position 2331 of SEQ ID NO: 1886902
ccuguucgacugggaaguu

SEQ ID NO: 2434355 - RNA, 19 nt, Artificial Sequence
  Description of Artificial Sequence: Synthetic oligonucleotide
  Antisense strand to SEQ ID NO: 2434354
aacuucccagucgaacagg

SEQ ID NO: 2434356 - RNA, 19 nt, Artificial Sequence
  Description of Artificial Sequence: Synthetic oligonucleotide
  Sense strand starting at position 2332 of SEQ ID NO: 1886902
cuguucgacugggaaguua

SEQ ID NO: 2434357 - RNA, 19 nt, Artificial Sequence
  Description of Artificial Sequence: Synthetic oligonucleotide
  Antisense strand to SEQ ID NO: 2434356
uaacuucccagucgaacag

SEQ ID NO: 2434358 - RNA, 19 nt, Artificial Sequence
  Description of Artificial Sequence: Synthetic oligonucleotide
  Sense strand starting at position 2343 of SEQ ID NO: 1886902
ggaaguuacagcugagaua

SEQ ID NO: 2434359 - RNA, 19 nt, Artificial Sequence
  Description of Artificial Sequence: Synthetic oligonucleotide
  Antisense strand to SEQ ID NO: 2434358
uaucucagcuguaacuucc

SEQ ID NO: 2434360 - RNA, 19 nt, Artificial Sequence
  Description of Artificial Sequence: Synthetic oligonucleotide
  Sense strand starting at position 2461 of SEQ ID NO: 1886902
ggugcugugucccucucau

SEQ ID NO: 2434361 - RNA, 19 nt, Artificial Sequence
  Description of Artificial Sequence: Synthetic oligonucleotide
  Antisense strand to SEQ ID NO: 2434360
augagagggacacagcacc

SEQ ID NO: 2434362 - RNA, 19 nt, Artificial Sequence
  Description of Artificial Sequence: Synthetic oligonucleotide
  Sense strand starting at position 2483 of SEQ ID NO: 1886902
cuagccuuuccucguguau

SEQ ID NO: 2434363 - RNA, 19 nt, Artificial Sequence
  Description of Artificial Sequence: Synthetic oligonucleotide
  Antisense strand to SEQ ID NO: 2434362
auacacgaggaaaggcuag

SEQ ID NO: 2434364 - RNA, 19 nt, Artificial Sequence
  Description of Artificial Sequence: Synthetic oligonucleotide
  Sense strand starting at position 2895 of SEQ ID NO: 1886902
gugucauccucucaaccca

SEQ ID NO: 2434365 - RNA, 19 nt, Artificial Sequence
  Description of Artificial Sequence: Synthetic oligonucleotide
  Antisense strand to SEQ ID NO: 2434364
uggguugagaggaugacac

SEQ ID NO: 2434366 - RNA, 19 nt, Artificial Sequence
  Description of Artificial Sequence: Synthetic oligonucleotide
  Sense strand starting at position 806 of SEQ ID NO: 1886903
aaugcauguuugugugguu

SEQ ID NO: 2434367 - RNA, 19 nt, Artificial Sequence
  Description of Artificial Sequence: Synthetic oligonucleotide
  Antisense strand to SEQ ID NO: 2434366
aaccacacaaacaugcauu

SEQ ID NO: 2434368 - RNA, 19 nt, Artificial Sequence
  Description of Artificial Sequence: Synthetic oligonucleotide
  Sense strand starting at position 807 of SEQ ID NO: 1886903
augcauguuugugugguua

SEQ ID NO: 2434369 - RNA, 19 nt, Artificial Sequence
  Description of Artificial Sequence: Synthetic oligonucleotide
  Antisense strand to SEQ ID NO: 2434368
uaaccacacaaacaugcau

SEQ ID NO: 2434370 - RNA, 19 nt, Artificial Sequence
  Description of Artificial Sequence: Synthetic oligonucleotide
  Sense strand starting at position 809 of SEQ ID NO: 1886903
gcauguuugugugguuauc

SEQ ID NO: 2434371 - RNA, 19 nt, Artificial Sequence
  Description of Artificial Sequence: Synthetic oligonucleotide
  Antisense strand to SEQ ID NO: 2434370
gauaaccacacaaacaugc

SEQ ID NO: 2434372 - RNA, 19 nt, Artificial Sequence
  Description of Artificial Sequence: Synthetic oligonucleotide
  Sense strand starting at position 1046 of SEQ ID NO: 1886903
ggucuuugcugguccuaag

SEQ ID NO: 2434373 - RNA, 19 nt, Artificial Sequence
  Description of Artificial Sequence: Synthetic oligonucleotide
  Antisense strand to SEQ ID NO: 2434372
cuuaggaccagcaaagacc

SEQ ID NO: 2434374 - RNA, 19 nt, Artificial Sequence
  Description of Artificial Sequence: Synthetic oligonucleotide
  Sense strand starting at position 1339 of SEQ ID NO: 1886903
gagcguaauuuauaaugaa

SEQ ID NO: 2434375 - RNA, 19 nt, Artificial Sequence
  Description of Artificial Sequence: Synthetic oligonucleotide
  Antisense strand to SEQ ID NO: 2434374
uucauuauaaauuacgcuc

SEQ ID NO: 2434376 - RNA, 19 nt, Artificial Sequence
  Description of Artificial Sequence: Synthetic oligonucleotide
  Sense strand starting at position 2045 of SEQ ID NO: 1886903
gggcccuugucuucccaga

SEQ ID NO: 2434377 - RNA, 19 nt, Artificial Sequence
  Description of Artificial Sequence: Synthetic oligonucleotide
  Antisense strand to SEQ ID NO: 2434376
ucugggaagacaagggccc

SEQ ID NO: 2434378 - RNA, 19 nt, Artificial Sequence
  Description of Artificial Sequence: Synthetic oligonucleotide
  Sense strand starting at position 2094 of SEQ ID NO: 1886903
ugcucaucucaucaugaga

SEQ ID NO: 2434379 - RNA, 19 nt, Artificial Sequence
  Description of Artificial Sequence: Synthetic oligonucleotide
  Antisense strand to SEQ ID NO: 2434378
ucucaugaugagaugagca

SEQ ID NO: 2434380 - RNA, 19 nt, Artificial Sequence
  Description of Artificial Sequence: Synthetic oligonucleotide
  Sense strand starting at position 2468 of SEQ ID NO: 1886903
gccggauucugucacacug

SEQ ID NO: 2434381 - RNA, 19 nt, Artificial Sequence
  Description of Artificial Sequence: Synthetic oligonucleotide
  Antisense strand to SEQ ID NO: 2434380
cagugugacagaauccggc

SEQ ID NO: 2434382 - RNA, 19 nt, Artificial Sequence
  Description of Artificial Sequence: Synthetic oligonucleotide
  Sense strand starting at position 2564 of SEQ ID NO: 1886903
gcuggaggucaucauguuu

SEQ ID NO: 2434383 - RNA, 19 nt, Artificial Sequence
  Description of Artificial Sequence: Synthetic oligonucleotide
  Antisense strand to SEQ ID NO: 2434382
aaacaugaugaccuccagc

SEQ ID NO: 2434384 - RNA, 19 nt, Artificial Sequence
  Description of Artificial Sequence: Synthetic oligonucleotide
  Sense strand starting at position 2738 of SEQ ID NO: 1886903
acaggaagaugcuuaguca

SEQ ID NO: 2434385 - RNA, 19 nt, Artificial Sequence
  Description of Artificial Sequence: Synthetic oligonucleotide
  Antisense strand to SEQ ID NO: 2434384
ugacuaagcaucuuccugu

SEQ ID NO: 2434386 - RNA, 19 nt, Artificial Sequence
  Description of Artificial Sequence: Synthetic oligonucleotide
  Sense strand starting at position 2741 of SEQ ID NO: 1886903
ggaagaugcuuagucacgu

SEQ ID NO: 2434387 - RNA, 19 nt, Artificial Sequence
  Description of Artificial Sequence: Synthetic oligonucleotide
  Antisense strand to SEQ ID NO: 2434386
acgugacuaagcaucuucc

SEQ ID NO: 2434388 - RNA, 19 nt, Artificial Sequence
  Description of Artificial Sequence: Synthetic oligonucleotide
  Sense strand starting at position 2745 of SEQ ID NO: 1886903
gaugcuuagucacguguuu

SEQ ID NO: 2434389 - RNA, 19 nt, Artificial Sequence
  Description of Artificial Sequence: Synthetic oligonucleotide
  Antisense strand to SEQ ID NO: 2434388
aaacacgugacuaagcauc

SEQ ID NO: 2434390 - RNA, 19 nt, Artificial Sequence
  Description of Artificial Sequence: Synthetic oligonucleotide
  Sense strand starting at position 2858 of SEQ ID NO: 1886903
cgggcugcuucucagaaga

SEQ ID NO: 2434391 - RNA, 19 nt, Artificial Sequence
  Description of Artificial Sequence: Synthetic oligonucleotide
  Antisense strand to SEQ ID NO: 2434390
ucuucugagaagcagcccg

SEQ ID NO: 2434392 - RNA, 19 nt, Artificial Sequence
  Description of Artificial Sequence: Synthetic oligonucleotide
  Sense strand starting at position 2989 of SEQ ID NO: 1886903
gggccuugcgucuagcuaa

SEQ ID NO: 2434393 - RNA, 19 nt, Artificial Sequence
  Description of Artificial Sequence: Synthetic oligonucleotide
  Antisense strand to SEQ ID NO: 2434392
uuagcuagacgcaaggccc

SEQ ID NO: 2434394 - RNA, 19 nt, Artificial Sequence
  Description of Artificial Sequence: Synthetic oligonucleotide
  Sense strand starting at position 3096 of SEQ ID NO: 1886903
gaggauuucucauguugag

SEQ ID NO: 2434395 - RNA, 19 nt, Artificial Sequence
  Description of Artificial Sequence: Synthetic oligonucleotide
  Antisense strand to SEQ ID NO: 2434394
cucaacaugagaaauccuc

SEQ ID NO: 2434396 - RNA, 19 nt, Artificial Sequence
  Description of Artificial Sequence: Synthetic oligonucleotide
  Sense strand starting at position 3099 of SEQ ID NO: 1886903
gauuucucauguugaguuc

SEQ ID NO: 2434397 - RNA, 19 nt, Artificial Sequence
  Description of Artificial Sequence: Synthetic oligonucleotide
  Antisense strand to SEQ ID NO: 2434396
gaacucaacaugagaaauc

SEQ ID NO: 2434398 - RNA, 19 nt, Artificial Sequence
  Description of Artificial Sequence: Synthetic oligonucleotide
  Sense strand starting at position 3106 of SEQ ID NO: 1886903
cauguugaguucuaguguu

SEQ ID NO: 2434399 - RNA, 19 nt, Artificial Sequence
  Description of Artificial Sequence: Synthetic oligonucleotide
  Antisense strand to SEQ ID NO: 2434398
aacacuagaacucaacaug

SEQ ID NO: 2434400 - RNA, 19 nt, Artificial Sequence
  Description of Artificial Sequence: Synthetic oligonucleotide
  Sense strand starting at position 3112 of SEQ ID NO: 1886903
gaguucuaguguugaugau

SEQ ID NO: 2434401 - RNA, 19 nt, Artificial Sequence
  Description of Artificial Sequence: Synthetic oligonucleotide
  Antisense strand to SEQ ID NO: 2434400
aucaucaacacuagaacuc

SEQ ID NO: 2434402 - RNA, 19 nt, Artificial Sequence
  Description of Artificial Sequence: Synthetic oligonucleotide
  Sense strand starting at position 3116 of SEQ ID NO: 1886903
ucuaguguugaugaugcua

SEQ ID NO: 2434403 - RNA, 19 nt, Artificial Sequence
  Description of Artificial Sequence: Synthetic oligonucleotide
  Antisense strand to SEQ ID NO: 2434402
uagcaucaucaacacuaga

SEQ ID NO: 2434404 - RNA, 19 nt, Artificial Sequence
  Description of Artificial Sequence: Synthetic oligonucleotide
  Sense strand starting at position 3118 of SEQ ID NO: 1886903
uaguguugaugaugcuaau

SEQ ID NO: 2434405 - RNA, 19 nt, Artificial Sequence
  Description of Artificial Sequence: Synthetic oligonucleotide
  Antisense strand to SEQ ID NO: 2434404
auuagcaucaucaacacua

SEQ ID NO: 2434406 - RNA, 19 nt, Artificial Sequence
  Description of Artificial Sequence: Synthetic oligonucleotide
  Sense strand starting at position 3586 of SEQ ID NO: 1886903
cugucagucucuuccugau

SEQ ID NO: 2434407 - RNA, 19 nt, Artificial Sequence
  Description of Artificial Sequence: Synthetic oligonucleotide
  Antisense strand to SEQ ID NO: 2434406
aucaggaagagacugacag

SEQ ID NO: 2434408 - RNA, 19 nt, Artificial Sequence
  Description of Artificial Sequence: Synthetic oligonucleotide
  Sense strand starting at position 3588 of SEQ ID NO: 1886903
gucagucucuuccugauuu

SEQ ID NO: 2434409 - RNA, 19 nt, Artificial Sequence
  Description of Artificial Sequence: Synthetic oligonucleotide
  Antisense strand to SEQ ID NO: 2434408
aaaucaggaagagacugac

SEQ ID NO: 2434410 - RNA, 19 nt, Artificial Sequence
  Description of Artificial Sequence: Synthetic oligonucleotide
  Sense strand starting at position 3802 of SEQ ID NO: 1886903
cggagugcucgcugccauu

SEQ ID NO: 2434411 - RNA, 19 nt, Artificial Sequence
  Description of Artificial Sequence: Synthetic oligonucleotide
  Antisense strand to SEQ ID NO: 2434410
aauggcagcgagcacuccg

SEQ ID NO: 2434412 - RNA, 19 nt, Artificial Sequence
  Description of Artificial Sequence: Synthetic oligonucleotide
  Sense strand starting at position 3804 of SEQ ID NO: 1886903
gagugcucgcugccauuau

SEQ ID NO: 2434413 - RNA, 19 nt, Artificial Sequence
  Description of Artificial Sequence: Synthetic oligonucleotide
  Antisense strand to SEQ ID NO: 2434412
auaauggcagcgagcacuc

SEQ ID NO: 2434414 - RNA, 19 nt, Artificial Sequence
  Description of Artificial Sequence: Synthetic oligonucleotide
  Sense strand starting at position 3805 of SEQ ID NO: 1886903
agugcucgcugccauuauu

SEQ ID NO: 2434415 - RNA, 19 nt, Artificial Sequence
  Description of Artificial Sequence: Synthetic oligonucleotide
  Antisense strand to SEQ ID NO: 2434414
aauaauggcagcgagcacu

SEQ ID NO: 2434416 - RNA, 19 nt, Artificial Sequence
  Description of Artificial Sequence: Synthetic oligonucleotide
  Sense strand starting at position 3813 of SEQ ID NO: 1886903
cugccauuauuguuauuau

SEQ ID NO: 2434417 - RNA, 19 nt, Artificial Sequence
  Description of Artificial Sequence: Synthetic oligonucleotide
  Antisense strand to SEQ ID NO: 2434416
auaauaacaauaauggcag

SEQ ID NO: 2434418 - RNA, 19 nt, Artificial Sequence
  Description of Artificial Sequence: Synthetic oligonucleotide
  Sense strand starting at position 92 of SEQ ID NO: 1886904
gaaaguaauuggccuaaug

SEQ ID NO: 2434419 - RNA, 19 nt, Artificial Sequence
  Description of Artificial Sequence: Synthetic oligonucleotide
  Antisense strand to SEQ ID NO: 2434418
cauuaggccaauuacuuuc

SEQ ID NO: 2434420 - RNA, 19 nt, Artificial Sequence
  Description of Artificial Sequence: Synthetic oligonucleotide
  Sense strand starting at position 108 of SEQ ID NO: 1886904
augaguuuagcccacauac

SEQ ID NO: 2434421 - RNA, 19 nt, Artificial Sequence
  Description of Artificial Sequence: Synthetic oligonucleotide
  Antisense strand to SEQ ID NO: 2434420
guaugugggcuaaacucau

SEQ ID NO: 2434422 - RNA, 19 nt, Artificial Sequence
  Description of Artificial Sequence: Synthetic oligonucleotide
  Sense strand starting at position 185 of SEQ ID NO: 1886904
cuggaacuguaacuauaua

SEQ ID NO: 2434423 - RNA, 19 nt, Artificial Sequence
  Description of Artificial Sequence: Synthetic oligonucleotide
  Antisense strand to SEQ ID NO: 2434422
uauauaguuacaguuccag

SEQ ID NO: 2434424 - RNA, 19 nt, Artificial Sequence
  Description of Artificial Sequence: Synthetic oligonucleotide
  Sense strand starting at position 363 of SEQ ID NO: 1886904
uguucuaaagcaugaaagu

SEQ ID NO: 2434425 - RNA, 19 nt, Artificial Sequence
  Description of Artificial Sequence: Synthetic oligonucleotide
  Antisense strand to SEQ ID NO: 2434424
acuuucaugcuuuagaaca

SEQ ID NO: 2434426 - RNA, 19 nt, Artificial Sequence
  Description of Artificial Sequence: Synthetic oligonucleotide
  Sense strand starting at position 364 of SEQ ID NO: 1886904
guucuaaagcaugaaaguc

SEQ ID NO: 2434427 - RNA, 19 nt, Artificial Sequence
  Description of Artificial Sequence: Synthetic oligonucleotide
  Antisense strand to SEQ ID NO: 2434426
gacuuucaugcuuuagaac

SEQ ID NO: 2434428 - RNA, 19 nt, Artificial Sequence
  Description of Artificial Sequence: Synthetic oligonucleotide
  Sense strand starting at position 433 of SEQ ID NO: 1886904
ggcgaaggaugaguuucuu

SEQ ID NO: 2434429 - RNA, 19 nt, Artificial Sequence
  Description of Artificial Sequence: Synthetic oligonucleotide
  Antisense strand to SEQ ID NO: 2434428
aagaaacucauccuucgcc

SEQ ID NO: 2434430 - RNA, 19 nt, Artificial Sequence
  Description of Artificial Sequence: Synthetic oligonucleotide
  Sense strand starting at position 441 of SEQ ID NO: 1886904
augaguuucuuauccugag

SEQ ID NO: 2434431 - RNA, 19 nt, Artificial Sequence
  Description of Artificial Sequence: Synthetic oligonucleotide
  Antisense strand to SEQ ID NO: 2434430
cucaggauaagaaacucau

SEQ ID NO: 2434432 - RNA, 19 nt, Artificial Sequence
  Description of Artificial Sequence: Synthetic oligonucleotide
  Sense strand starting at position 445 of SEQ ID NO: 1886904
guuucuuauccugagccca

SEQ ID NO: 2434433 - RNA, 19 nt, Artificial Sequence
  Description of Artificial Sequence: Synthetic oligonucleotide
  Antisense strand to SEQ ID NO: 2434432
ugggcucaggauaagaaac

SEQ ID NO: 2434434 - RNA, 19 nt, Artificial Sequence
  Description of Artificial Sequence: Synthetic oligonucleotide
  Sense strand starting at position 491 of SEQ ID NO: 1886904
aagugccauccguaccaaa

SEQ ID NO: 2434435 - RNA, 19 nt, Artificial Sequence
  Description of Artificial Sequence: Synthetic oligonucleotide
  Antisense strand to SEQ ID NO: 2434434
uuugguacggauggcacuu

SEQ ID NO: 2434436 - RNA, 19 nt, Artificial Sequence
  Description of Artificial Sequence: Synthetic oligonucleotide
  Sense strand starting at position 523 of SEQ ID NO: 1886904
gucuuaauucuggaucacu

SEQ ID NO: 2434437 - RNA, 19 nt, Artificial Sequence
  Description of Artificial Sequence: Synthetic oligonucleotide
  Antisense strand to SEQ ID NO: 2434436
agugauccagaauuaagac

SEQ ID NO: 2434438 - RNA, 19 nt, Artificial Sequence
  Description of Artificial Sequence: Synthetic oligonucleotide
  Sense strand starting at position 633 of SEQ ID NO: 1886904
acuguuuguugauccuaau

SEQ ID NO: 2434439 - RNA, 19 nt, Artificial Sequence
  Description of Artificial Sequence: Synthetic oligonucleotide
  Antisense strand to SEQ ID NO: 2434438
auuaggaucaacaaacagu

SEQ ID NO: 2434440 - RNA, 19 nt, Artificial Sequence
  Description of Artificial Sequence: Synthetic oligonucleotide
  Sense strand starting at position 738 of SEQ ID NO: 1886904
uuuaauaggucccuauguu

SEQ ID NO: 2434441 - RNA, 19 nt, Artificial Sequence
  Description of Artificial Sequence: Synthetic oligonucleotide
  Antisense strand to SEQ ID NO: 2434440
aacauagggaccuauuaaa

SEQ ID NO: 2434442 - RNA, 19 nt, Artificial Sequence
  Description of Artificial Sequence: Synthetic oligonucleotide
  Sense strand starting at position 739 of SEQ ID NO: 1886904
uuaauaggucccuauguug

SEQ ID NO: 2434443 - RNA, 19 nt, Artificial Sequence
  Description of Artificial Sequence: Synthetic oligonucleotide
  Antisense strand to SEQ ID NO: 2434442
caacauagggaccuauuaa

SEQ ID NO: 2434444 - RNA, 19 nt, Artificial Sequence
  Description of Artificial Sequence: Synthetic oligonucleotide
  Sense strand starting at position 809 of SEQ ID NO: 1886904
uacugucaccugggaaaug

SEQ ID NO: 2434445 - RNA, 19 nt, Artificial Sequence
  Description of Artificial Sequence: Synthetic oligonucleotide
  Antisense strand to SEQ ID NO: 2434444
cauuucccaggugacagua

SEQ ID NO: 2434446 - RNA, 19 nt, Artificial Sequence
  Description of Artificial Sequence: Synthetic oligonucleotide
  Sense strand starting at position 868 of SEQ ID NO: 1886904
ggaaucuucugcucuaaua

SEQ ID NO: 2434447 - RNA, 19 nt, Artificial Sequence
  Description of Artificial Sequence: Synthetic oligonucleotide
  Antisense strand to SEQ ID NO: 2434446
uauuagagcagaagauucc

SEQ ID NO: 2434448 - RNA, 19 nt, Artificial Sequence
  Description of Artificial Sequence: Synthetic oligonucleotide
  Sense strand starting at position 945 of SEQ ID NO: 1886904
uaguauuacuaguuagagg

SEQ ID NO: 2434449 - RNA, 19 nt, Artificial Sequence
  Description of Artificial Sequence: Synthetic oligonucleotide
  Antisense strand to SEQ ID NO: 2434448
ccucuaacuaguaauacua

SEQ ID NO: 2434450 - RNA, 19 nt, Artificial Sequence
  Description of Artificial Sequence: Synthetic oligonucleotide
  Sense strand starting at position 1155 of SEQ ID NO: 1886904
cuccaugagucgguggaaa

SEQ ID NO: 2434451 - RNA, 19 nt, Artificial Sequence
  Description of Artificial Sequence: Synthetic oligonucleotide
  Antisense strand to SEQ ID NO: 2434450
uuuccaccgacucauggag

SEQ ID NO: 2434452 - RNA, 19 nt, Artificial Sequence
  Description of Artificial Sequence: Synthetic oligonucleotide
  Sense strand starting at position 1178 of SEQ ID NO: 1886904
agcaaaucacugggcagaa

SEQ ID NO: 2434453 - RNA, 19 nt, Artificial Sequence
  Description of Artificial Sequence: Synthetic oligonucleotide
  Antisense strand to SEQ ID NO: 2434452
uucugcccagugauuugcu

SEQ ID NO: 2434454 - RNA, 19 nt, Artificial Sequence
  Description of Artificial Sequence: Synthetic oligonucleotide
  Sense strand starting at position 1310 of SEQ ID NO: 1886904
acuucucugucuccaggaa

SEQ ID NO: 2434455 - RNA, 19 nt, Artificial Sequence
  Description of Artificial Sequence: Synthetic oligonucleotide
  Antisense strand to SEQ ID NO: 2434454
uuccuggagacagagaagu

SEQ ID NO: 2434456 - RNA, 19 nt, Artificial Sequence
  Description of Artificial Sequence: Synthetic oligonucleotide
  Sense strand starting at position 1311 of SEQ ID NO: 1886904
cuucucugucuccaggaau

SEQ ID NO: 2434457 - RNA, 19 nt, Artificial Sequence
  Description of Artificial Sequence: Synthetic oligonucleotide
  Antisense strand to SEQ ID NO: 2434456
auuccuggagacagagaag

SEQ ID NO: 2434458 - RNA, 19 nt, Artificial Sequence
  Description of Artificial Sequence: Synthetic oligonucleotide
  Sense strand starting at position 1314 of SEQ ID NO: 1886904
cucugucuccaggaaucau

SEQ ID NO: 2434459 - RNA, 19 nt, Artificial Sequence
  Description of Artificial Sequence: Synthetic oligonucleotide
  Antisense strand to SEQ ID NO: 2434458
augauuccuggagacagag

SEQ ID NO: 2434460 - RNA, 19 nt, Artificial Sequence
  Description of Artificial Sequence: Synthetic oligonucleotide
  Sense strand starting at position 1325 of SEQ ID NO: 1886904
ggaaucauccaaggcacaa

SEQ ID NO: 2434461 - RNA, 19 nt, Artificial Sequence
  Description of Artificial Sequence: Synthetic oligonucleotide
  Antisense strand to SEQ ID NO: 2434460
uugugccuuggaugauucc

SEQ ID NO: 2434462 - RNA, 19 nt, Artificial Sequence
  Description of Artificial Sequence: Synthetic oligonucleotide
  Sense strand starting at position 1814 of SEQ ID NO: 1886904
ccggguugucgauacaaag

SEQ ID NO: 2434463 - RNA, 19 nt, Artificial Sequence
  Description of Artificial Sequence: Synthetic oligonucleotide
  Antisense strand to SEQ ID NO: 2434462
cuuuguaucgacaacccgg

SEQ ID NO: 2434464 - RNA, 19 nt, Artificial Sequence
  Description of Artificial Sequence: Synthetic oligonucleotide
  Sense strand starting at position 2087 of SEQ ID NO: 1886904
uuagaaaugugauucuggu

SEQ ID NO: 2434465 - RNA, 19 nt, Artificial Sequence
  Description of Artificial Sequence: Synthetic oligonucleotide
  Antisense strand to SEQ ID NO: 2434464
accagaaucacauuucuaa

SEQ ID NO: 2434466 - RNA, 19 nt, Artificial Sequence
  Description of Artificial Sequence: Synthetic oligonucleotide
  Sense strand starting at position 2189 of SEQ ID NO: 1886904
acaggauugccauggcauu

SEQ ID NO: 2434467 - RNA, 19 nt, Artificial Sequence
  Description of Artificial Sequence: Synthetic oligonucleotide
  Antisense strand to SEQ ID NO: 2434466
aaugccauggcaauccugu

SEQ ID NO: 2434468 - RNA, 19 nt, Artificial Sequence
  Description of Artificial Sequence: Synthetic oligonucleotide
  Sense strand starting at position 2290 of SEQ ID NO: 1886904
ugugccuucccagaaccaa

SEQ ID NO: 2434469 - RNA, 19 nt, Artificial Sequence
  Description of Artificial Sequence: Synthetic oligonucleotide
  Antisense strand to SEQ ID NO: 2434468
uugguucugggaaggcaca

SEQ ID NO: 2434470 - RNA, 19 nt, Artificial Sequence
  Description of Artificial Sequence: Synthetic oligonucleotide
  Sense strand starting at position 2322 of SEQ ID NO: 1886904
caggauuugugggagaauu

SEQ ID NO: 2434471 - RNA, 19 nt, Artificial Sequence
  Description of Artificial Sequence: Synthetic oligonucleotide
  Antisense strand to SEQ ID NO: 2434470
aauucucccacaaauccug

SEQ ID NO: 2434472 - RNA, 19 nt, Artificial Sequence
  Description of Artificial Sequence: Synthetic oligonucleotide
  Sense strand starting at position 2473 of SEQ ID NO: 1886904
ucaggaauucucuggaauc

SEQ ID NO: 2434473 - RNA, 19 nt, Artificial Sequence
  Description of Artificial Sequence: Synthetic oligonucleotide
  Antisense strand to SEQ ID NO: 2434472
gauuccagagaauuccuga

SEQ ID NO: 2434474 - RNA, 19 nt, Artificial Sequence
  Description of Artificial Sequence: Synthetic oligonucleotide
  Sense strand starting at position 2512 of SEQ ID NO: 1886904
gcacuucuucugggaagag

SEQ ID NO: 2434475 - RNA, 19 nt, Artificial Sequence
  Description of Artificial Sequence: Synthetic oligonucleotide
  Antisense strand to SEQ ID NO: 2434474
cucuucccagaagaagugc

SEQ ID NO: 2434476 - RNA, 19 nt, Artificial Sequence
  Description of Artificial Sequence: Synthetic oligonucleotide
  Sense strand starting at position 2560 of SEQ ID NO: 1886904
gaagucugaucacucagaa

SEQ ID NO: 2434477 - RNA, 19 nt, Artificial Sequence
  Description of Artificial Sequence: Synthetic oligonucleotide
  Antisense strand to SEQ ID NO: 2434476
uucugagugaucagacuuc

SEQ ID NO: 2434478 - RNA, 19 nt, Artificial Sequence
  Description of Artificial Sequence: Synthetic oligonucleotide
  Sense strand starting at position 2653 of SEQ ID NO: 1886904
aacguuuauuuggcaacuu

SEQ ID NO: 2434479 - RNA, 19 nt, Artificial Sequence
  Description of Artificial Sequence: Synthetic oligonucleotide
  Antisense strand to SEQ ID NO: 2434478
aaguugccaaauaaacguu

SEQ ID NO: 2434480 - RNA, 19 nt, Artificial Sequence
  Description of Artificial Sequence: Synthetic oligonucleotide
  Sense strand starting at position 2678 of SEQ ID NO: 1886904
accagauauugugcuagga

SEQ ID NO: 2434481 - RNA, 19 nt, Artificial Sequence
  Description of Artificial Sequence: Synthetic oligonucleotide
  Antisense strand to SEQ ID NO: 2434480
uccuagcacaauaucuggu

SEQ ID NO: 2434482 - RNA, 19 nt, Artificial Sequence
  Description of Artificial Sequence: Synthetic oligonucleotide
  Sense strand starting at position 2687 of SEQ ID NO: 1886904
ugugcuaggagcuggaaau

SEQ ID NO: 2434483 - RNA, 19 nt, Artificial Sequence
  Description of Artificial Sequence: Synthetic oligonucleotide
  Antisense strand to SEQ ID NO: 2434482
auuuccagcuccuagcaca

SEQ ID NO: 2434484 - RNA, 19 nt, Artificial Sequence
  Description of Artificial Sequence: Synthetic oligonucleotide
  Sense strand starting at position 2688 of SEQ ID NO: 1886904
gugcuaggagcuggaaaua

SEQ ID NO: 2434485 - RNA, 19 nt, Artificial Sequence
  Description of Artificial Sequence: Synthetic oligonucleotide
  Antisense strand to SEQ ID NO: 2434484
uauuuccagcuccuagcac

SEQ ID NO: 2434486 - RNA, 19 nt, Artificial Sequence
  Description of Artificial Sequence: Synthetic oligonucleotide
  Sense strand starting at position 3717 of SEQ ID NO: 1886904
agcuaauauuugggauuua

SEQ ID NO: 2434487 - RNA, 19 nt, Artificial Sequence
  Description of Artificial Sequence: Synthetic oligonucleotide
  Antisense strand to SEQ ID NO: 2434486
uaaaucccaaauauuagcu

SEQ ID NO: 2434488 - RNA, 19 nt, Artificial Sequence
  Description of Artificial Sequence: Synthetic oligonucleotide
  Sense strand starting at position 3792 of SEQ ID NO: 1886904
aaucuugugacguagguaa

SEQ ID NO: 2434489 - RNA, 19 nt, Artificial Sequence
  Description of Artificial Sequence: Synthetic oligonucleotide
  Antisense strand to SEQ ID NO: 2434488
uuaccuacgucacaagauu

SEQ ID NO: 2434490 - RNA, 19 nt, Artificial Sequence
  Description of Artificial Sequence: Synthetic oligonucleotide
  Sense strand starting at position 3796 of SEQ ID NO: 1886904
uugugacguagguaauauu

SEQ ID NO: 2434491 - RNA, 19 nt, Artificial Sequence
  Description of Artificial Sequence: Synthetic oligonucleotide
  Antisense strand to SEQ ID NO: 2434490
aauauuaccuacgucacaa

SEQ ID NO: 2434492 - RNA, 19 nt, Artificial Sequence
  Description of Artificial Sequence: Synthetic oligonucleotide
  Sense strand starting at position 3898 of SEQ ID NO: 1886904
agugcaaacauugguuuga

SEQ ID NO: 2434493 - RNA, 19 nt, Artificial Sequence
  Description of Artificial Sequence: Synthetic oligonucleotide
  Antisense strand to SEQ ID NO: 2434492
ucaaaccaauguuugcacu

SEQ ID NO: 2434494 - RNA, 19 nt, Artificial Sequence
  Description of Artificial Sequence: Synthetic oligonucleotide
  Sense strand starting at position 3909 of SEQ ID NO: 1886904
ugguuugagggacgaauga

SEQ ID NO: 2434495 - RNA, 19 nt, Artificial Sequence
  Description of Artificial Sequence: Synthetic oligonucleotide
  Antisense strand to SEQ ID NO: 2434494
ucauucgucccucaaacca

SEQ ID NO: 2434496 - RNA, 19 nt, Artificial Sequence
  Description of Artificial Sequence: Synthetic oligonucleotide
  Sense strand starting at position 3937 of SEQ ID NO: 1886904
guggguaugaacuaaguga

SEQ ID NO: 2434497 - RNA, 19 nt, Artificial Sequence
  Description of Artificial Sequence: Synthetic oligonucleotide
  Antisense strand to SEQ ID NO: 2434496
ucacuuaguucauacccac

SEQ ID NO: 2434498 - RNA, 19 nt, Artificial Sequence
  Description of Artificial Sequence: Synthetic oligonucleotide
  Sense strand starting at position 76 of SEQ ID NO: 1886905
ugccauaaacccugugaac

SEQ ID NO: 2434499 - RNA, 19 nt, Artificial Sequence
  Description of Artificial Sequence: Synthetic oligonucleotide
  Antisense strand to SEQ ID NO: 2434498
guucacaggguuuauggca

SEQ ID NO: 2434500 - RNA, 19 nt, Artificial Sequence
  Description of Artificial Sequence: Synthetic oligonucleotide
  Sense strand starting at position 87 of SEQ ID NO: 1886905
cugugaacucuugacucuu

SEQ ID NO: 2434501 - RNA, 19 nt, Artificial Sequence
  Description of Artificial Sequence: Synthetic oligonucleotide
  Antisense strand to SEQ ID NO: 2434500
aagagucaagaguucacag

SEQ ID NO: 2434502 - RNA, 19 nt, Artificial Sequence
  Description of Artificial Sequence: Synthetic oligonucleotide
  Sense strand starting at position 98 of SEQ ID NO: 1886905
ugacucuugcacuaagcaa

SEQ ID NO: 2434503 - RNA, 19 nt, Artificial Sequence
  Description of Artificial Sequence: Synthetic oligonucleotide
  Antisense strand to SEQ ID NO: 2434502
uugcuuagugcaagaguca

SEQ ID NO: 2434504 - RNA, 19 nt, Artificial Sequence
  Description of Artificial Sequence: Synthetic oligonucleotide
  Sense strand starting at position 105 of SEQ ID NO: 1886905
ugcacuaagcaaugagaga

SEQ ID NO: 2434505 - RNA, 19 nt, Artificial Sequence
  Description of Artificial Sequence: Synthetic oligonucleotide
  Antisense strand to SEQ ID NO: 2434504
ucucucauugcuuagugca

SEQ ID NO: 2434506 - RNA, 19 nt, Artificial Sequence
  Description of Artificial Sequence: Synthetic oligonucleotide
  Sense strand starting at position 227 of SEQ ID NO: 1886905
ugcuuauuugguugccuaa

SEQ ID NO: 2434507 - RNA, 19 nt, Artificial Sequence
  Description of Artificial Sequence: Synthetic oligonucleotide
  Antisense strand to SEQ ID NO: 2434506
uuaggcaaccaaauaagca

SEQ ID NO: 2434508 - RNA, 19 nt, Artificial Sequence
  Description of Artificial Sequence: Synthetic oligonucleotide
  Sense strand starting at position 229 of SEQ ID NO: 1886905
cuuauuugguugccuaauu

SEQ ID NO: 2434509 - RNA, 19 nt, Artificial Sequence
  Description of Artificial Sequence: Synthetic oligonucleotide
  Antisense strand to SEQ ID NO: 2434508
aauuaggcaaccaaauaag

SEQ ID NO: 2434510 - RNA, 19 nt, Artificial Sequence
  Description of Artificial Sequence: Synthetic oligonucleotide
  Sense strand starting at position 230 of SEQ ID NO: 1886905
uuauuugguugccuaauua

SEQ ID NO: 2434511 - RNA, 19 nt, Artificial Sequence
  Description of Artificial Sequence: Synthetic oligonucleotide
  Antisense strand to SEQ ID NO: 2434510
uaauuaggcaaccaaauaa

SEQ ID NO: 2434512 - RNA, 19 nt, Artificial Sequence
  Description of Artificial Sequence: Synthetic oligonucleotide
  Sense strand starting at position 342 of SEQ ID NO: 1886905
ggcuuugccuuauuuggua

SEQ ID NO: 2434513 - RNA, 19 nt, Artificial Sequence
  Description of Artificial Sequence: Synthetic oligonucleotide
  Antisense strand to SEQ ID NO: 2434512
uaccaaauaaggcaaagcc

SEQ ID NO: 2434514 - RNA, 19 nt, Artificial Sequence
  Description of Artificial Sequence: Synthetic oligonucleotide
  Sense strand starting at position 458 of SEQ ID NO: 1886905
acuauuuauguguguaugu

SEQ ID NO: 2434515 - RNA, 19 nt, Artificial Sequence
  Description of Artificial Sequence: Synthetic oligonucleotide
  Antisense strand to SEQ ID NO: 2434514
acauacacacauaaauagu

SEQ ID NO: 2434516 - RNA, 19 nt, Artificial Sequence
  Description of Artificial Sequence: Synthetic oligonucleotide
  Sense strand starting at position 614 of SEQ ID NO: 1886905
uuugguauuugagaacuau

SEQ ID NO: 2434517 - RNA, 19 nt, Artificial Sequence
  Description of Artificial Sequence: Synthetic oligonucleotide
  Antisense strand to SEQ ID NO: 2434516
auaguucucaaauaccaaa

SEQ ID NO: 2434518 - RNA, 19 nt, Artificial Sequence
  Description of Artificial Sequence: Synthetic oligonucleotide
  Sense strand starting at position 629 of SEQ ID NO: 1886905
cuaugacuaugcuugagag

SEQ ID NO: 2434519 - RNA, 19 nt, Artificial Sequence
  Description of Artificial Sequence: Synthetic oligonucleotide
  Antisense strand to SEQ ID NO: 2434518
cucucaagcauagucauag

SEQ ID NO: 2434520 - RNA, 19 nt, Artificial Sequence
  Description of Artificial Sequence: Synthetic oligonucleotide
  Sense strand starting at position 630 of SEQ ID NO: 1886905
uaugacuaugcuugagagu

SEQ ID NO: 2434521 - RNA, 19 nt, Artificial Sequence
  Description of Artificial Sequence: Synthetic oligonucleotide
  Antisense strand to SEQ ID NO: 2434520
acucucaagcauagucaua

SEQ ID NO: 2434522 - RNA, 19 nt, Artificial Sequence
  Description of Artificial Sequence: Synthetic oligonucleotide
  Sense strand starting at position 668 of SEQ ID NO: 1886905
uggaaauucgcagaaaccu

SEQ ID NO: 2434523 - RNA, 19 nt, Artificial Sequence
  Description of Artificial Sequence: Synthetic oligonucleotide
  Antisense strand to SEQ ID NO: 2434522
agguuucugcgaauuucca

SEQ ID NO: 2434524 - RNA, 19 nt, Artificial Sequence
  Description of Artificial Sequence: Synthetic oligonucleotide
  Sense strand starting at position 716 of SEQ ID NO: 1886905
uaguguaacuuugugggaa

SEQ ID NO: 2434525 - RNA, 19 nt, Artificial Sequence
  Description of Artificial Sequence: Synthetic oligonucleotide
  Antisense strand to SEQ ID NO: 2434524
uucccacaaaguuacacua

SEQ ID NO: 2434526 - RNA, 19 nt, Artificial Sequence
  Description of Artificial Sequence: Synthetic oligonucleotide
  Sense strand starting at position 779 of SEQ ID NO: 1886905
gcagaagugacguauaaug

SEQ ID NO: 2434527 - RNA, 19 nt, Artificial Sequence
  Description of Artificial Sequence: Synthetic oligonucleotide
  Antisense strand to SEQ ID NO: 2434526
cauuauacgucacuucugc

SEQ ID NO: 2434528 - RNA, 19 nt, Artificial Sequence
  Description of Artificial Sequence: Synthetic oligonucleotide
  Sense strand starting at position 789 of SEQ ID NO: 1886905
cguauaaugccggauauug

SEQ ID NO: 2434529 - RNA, 19 nt, Artificial Sequence
  Description of Artificial Sequence: Synthetic oligonucleotide
  Antisense strand to SEQ ID NO: 2434528
caauauccggcauuauacg

SEQ ID NO: 2434530 - RNA, 19 nt, Artificial Sequence
  Description of Artificial Sequence: Synthetic oligonucleotide
  Sense strand starting at position 886 of SEQ ID NO: 1886905
ugccgaauuugaugauuua

SEQ ID NO: 2434531 - RNA, 19 nt, Artificial Sequence
  Description of Artificial Sequence: Synthetic oligonucleotide
  Antisense strand to SEQ ID NO: 2434530
uaaaucaucaaauucggca

SEQ ID NO: 2434532 - RNA, 19 nt, Artificial Sequence
  Description of Artificial Sequence: Synthetic oligonucleotide
  Sense strand starting at position 1001 of SEQ ID NO: 1886905
aacuuuaaagggugguaga

SEQ ID NO: 2434533 - RNA, 19 nt, Artificial Sequence
  Description of Artificial Sequence: Synthetic oligonucleotide
  Antisense strand to SEQ ID NO: 2434532
ucuaccacccuuuaaaguu

SEQ ID NO: 2434534 - RNA, 19 nt, Artificial Sequence
  Description of Artificial Sequence: Synthetic oligonucleotide
  Sense strand starting at position 1002 of SEQ ID NO: 1886905
acuuuaaagggugguagaa

SEQ ID NO: 2434535 - RNA, 19 nt, Artificial Sequence
  Description of Artificial Sequence: Synthetic oligonucleotide
  Antisense strand to SEQ ID NO: 2434534
uucuaccacccuuuaaagu

SEQ ID NO: 2434536 - RNA, 19 nt, Artificial Sequence
  Description of Artificial Sequence: Synthetic oligonucleotide
  Sense strand starting at position 1017 of SEQ ID NO: 1886905
agaauuacacuuuguguga

SEQ ID NO: 2434537 - RNA, 19 nt, Artificial Sequence
  Description of Artificial Sequence: Synthetic oligonucleotide
  Antisense strand to SEQ ID NO: 2434536
ucacacaaaguguaauucu

SEQ ID NO: 2434538 - RNA, 19 nt, Artificial Sequence
  Description of Artificial Sequence: Synthetic oligonucleotide
  Sense strand starting at position 1116 of SEQ ID NO: 1886905
auauaaaguucuguacuga

SEQ ID NO: 2434539 - RNA, 19 nt, Artificial Sequence
  Description of Artificial Sequence: Synthetic oligonucleotide
  Antisense strand to SEQ ID NO: 2434538
ucaguacagaacuuuauau

SEQ ID NO: 2434540 - RNA, 19 nt, Artificial Sequence
  Description of Artificial Sequence: Synthetic oligonucleotide
  Sense strand starting at position 1131 of SEQ ID NO: 1886905
cugauaaacuggucaugag

SEQ ID NO: 2434541 - RNA, 19 nt, Artificial Sequence
  Description of Artificial Sequence: Synthetic oligonucleotide
  Antisense strand to SEQ ID NO: 2434540
cucaugaccaguuuaucag

SEQ ID NO: 2434542 - RNA, 19 nt, Artificial Sequence
  Description of Artificial Sequence: Synthetic oligonucleotide
  Sense strand starting at position 1232 of SEQ ID NO: 1886905
uauggaguucuuuguuaaa

SEQ ID NO: 2434543 - RNA, 19 nt, Artificial Sequence
  Description of Artificial Sequence: Synthetic oligonucleotide
  Antisense strand to SEQ ID NO: 2434542
uuuaacaaagaacuccaua

SEQ ID NO: 2434544 - RNA, 19 nt, Artificial Sequence
  Description of Artificial Sequence: Synthetic oligonucleotide
  Sense strand starting at position 1234 of SEQ ID NO: 1886905
uggaguucuuuguuaaacu

SEQ ID NO: 2434545 - RNA, 19 nt, Artificial Sequence
  Description of Artificial Sequence: Synthetic oligonucleotide
  Antisense strand to SEQ ID NO: 2434544
aguuuaacaaagaacucca

SEQ ID NO: 2434546 - RNA, 19 nt, Artificial Sequence
  Description of Artificial Sequence: Synthetic oligonucleotide
  Sense strand starting at position 1637 of SEQ ID NO: 1886905
gggagcuuucugcaggguu

SEQ ID NO: 2434547 - RNA, 19 nt, Artificial Sequence
  Description of Artificial Sequence: Synthetic oligonucleotide
  Antisense strand to SEQ ID NO: 2434546
aacccugcagaaagcuccc

SEQ ID NO: 2434548 - RNA, 19 nt, Artificial Sequence
  Description of Artificial Sequence: Synthetic oligonucleotide
  Sense strand starting at position 1649 of SEQ ID NO: 1886905
caggguuagccuuggaaua

SEQ ID NO: 2434549 - RNA, 19 nt, Artificial Sequence
  Description of Artificial Sequence: Synthetic oligonucleotide
  Antisense strand to SEQ ID NO: 2434548
uauuccaaggcuaacccug

SEQ ID NO: 2434550 - RNA, 19 nt, Artificial Sequence
  Description of Artificial Sequence: Synthetic oligonucleotide
  Sense strand starting at position 1650 of SEQ ID NO: 1886905
aggguuagccuuggaauag

SEQ ID NO: 2434551 - RNA, 19 nt, Artificial Sequence
  Description of Artificial Sequence: Synthetic oligonucleotide
  Antisense strand to SEQ ID NO: 2434550
cuauuccaaggcuaacccu

SEQ ID NO: 2434552 - RNA, 19 nt, Artificial Sequence
  Description of Artificial Sequence: Synthetic oligonucleotide
  Sense strand starting at position 2843 of SEQ ID NO: 1886905
guuaguuguaacuagaaag

SEQ ID NO: 2434553 - RNA, 19 nt, Artificial Sequence
  Description of Artificial Sequence: Synthetic oligonucleotide
  Antisense strand to SEQ ID NO: 2434552
cuuucuaguuacaacuaac

SEQ ID NO: 2434554 - RNA, 19 nt, Artificial Sequence
  Description of Artificial Sequence: Synthetic oligonucleotide
  Sense strand starting at position 3002 of SEQ ID NO: 1886905
uuuccuuuggcguucuauu

SEQ ID NO: 2434555 - RNA, 19 nt, Artificial Sequence
  Description of Artificial Sequence: Synthetic oligonucleotide
  Antisense strand to SEQ ID NO: 2434554
aauagaacgccaaaggaaa

SEQ ID NO: 2434556 - RNA, 19 nt, Artificial Sequence
  Description of Artificial Sequence: Synthetic oligonucleotide
  Sense strand starting at position 3160 of SEQ ID NO: 1886905
guaucacaacucugauugu

SEQ ID NO: 2434557 - RNA, 19 nt, Artificial Sequence
  Description of Artificial Sequence: Synthetic oligonucleotide
  Antisense strand to SEQ ID NO: 2434556
acaaucagaguugugauac

SEQ ID NO: 2434558 - RNA, 19 nt, Artificial Sequence
  Description of Artificial Sequence: Synthetic oligonucleotide
  Sense strand starting at position 3437 of SEQ ID NO: 1886905
uuggaaucccaauguggau

SEQ ID NO: 2434559 - RNA, 19 nt, Artificial Sequence
  Description of Artificial Sequence: Synthetic oligonucleotide
  Antisense strand to SEQ ID NO: 2434558
auccacauugggauuccaa

SEQ ID NO: 2434560 - RNA, 19 nt, Artificial Sequence
  Description of Artificial Sequence: Synthetic oligonucleotide
  Sense strand starting at position 3515 of SEQ ID NO: 1886905
acaugauggcgccacuuua

SEQ ID NO: 2434561 - RNA, 19 nt, Artificial Sequence
  Description of Artificial Sequence: Synthetic oligonucleotide
  Antisense strand to SEQ ID NO: 2434560
uaaaguggcgccaucaugu

SEQ ID NO: 2434562 - RNA, 19 nt, Artificial Sequence
  Description of Artificial Sequence: Synthetic oligonucleotide
  Sense strand starting at position 3620 of SEQ ID NO: 1886905
acuguacuugaggguguua

SEQ ID NO: 2434563 - RNA, 19 nt, Artificial Sequence
  Description of Artificial Sequence: Synthetic oligonucleotide
  Antisense strand to SEQ ID NO: 2434562
uaacacccucaaguacagu

SEQ ID NO: 2434564 - RNA, 19 nt, Artificial Sequence
  Description of Artificial Sequence: Synthetic oligonucleotide
  Sense strand starting at position 3622 of SEQ ID NO: 1886905
uguacuugaggguguuaga

SEQ ID NO: 2434565 - RNA, 19 nt, Artificial Sequence
  Description of Artificial Sequence: Synthetic oligonucleotide
  Antisense strand to SEQ ID NO: 2434564
ucuaacacccucaaguaca

SEQ ID NO: 2434566 - RNA, 19 nt, Artificial Sequence
  Description of Artificial Sequence: Synthetic oligonucleotide
  Sense strand starting at position 3631 of SEQ ID NO: 1886905
ggguguuagaagcacaacu

SEQ ID NO: 2434567 - RNA, 19 nt, Artificial Sequence
  Description of Artificial Sequence: Synthetic oligonucleotide
  Antisense strand to SEQ ID NO: 2434566
aguugugcuucuaacaccc

SEQ ID NO: 2434568 - RNA, 19 nt, Artificial Sequence
  Description of Artificial Sequence: Synthetic oligonucleotide
  Sense strand starting at position 3713 of SEQ ID NO: 1886905
cgagaaaucucucuuccuc

SEQ ID NO: 2434569 - RNA, 19 nt, Artificial Sequence
  Description of Artificial Sequence: Synthetic oligonucleotide
  Antisense strand to SEQ ID NO: 2434568
gaggaagagagauuucucg

SEQ ID NO: 2434570 - RNA, 19 nt, Artificial Sequence
  Description of Artificial Sequence: Synthetic oligonucleotide
  Sense strand starting at position 3872 of SEQ ID NO: 1886905
uuucgcuuuggagagauca

SEQ ID NO: 2434571 - RNA, 19 nt, Artificial Sequence
  Description of Artificial Sequence: Synthetic oligonucleotide
  Antisense strand to SEQ ID NO: 2434570
ugaucucuccaaagcgaaa

SEQ ID NO: 2434572 - RNA, 19 nt, Artificial Sequence
  Description of Artificial Sequence: Synthetic oligonucleotide
  Sense strand starting at position 3874 of SEQ ID NO: 1886905
ucgcuuuggagagaucaaa

SEQ ID NO: 2434573 - RNA, 19 nt, Artificial Sequence
  Description of Artificial Sequence: Synthetic oligonucleotide
  Antisense strand to SEQ ID NO: 2434572
uuugaucucuccaaagcga

SEQ ID NO: 2434574 - RNA, 19 nt, Artificial Sequence
  Description of Artificial Sequence: Synthetic oligonucleotide
  Sense strand starting at position 3980 of SEQ ID NO: 1886905
auaguuauagauugcuacu

SEQ ID NO: 2434575 - RNA, 19 nt, Artificial Sequence
  Description of Artificial Sequence: Synthetic oligonucleotide
  Antisense strand to SEQ ID NO: 2434574
aguagcaaucuauaacuau

SEQ ID NO: 2434576 - RNA, 19 nt, Artificial Sequence
  Description of Artificial Sequence: Synthetic oligonucleotide
  Sense strand starting at position 3982 of SEQ ID NO: 1886905
aguuauagauugcuacuga

SEQ ID NO: 2434577 - RNA, 19 nt, Artificial Sequence
  Description of Artificial Sequence: Synthetic oligonucleotide
  Antisense strand to SEQ ID NO: 2434576
ucaguagcaaucuauaacu

SEQ ID NO: 2434578 - RNA, 19 nt, Artificial Sequence
  Description of Artificial Sequence: Synthetic oligonucleotide
  Sense strand starting at position 48 of SEQ ID NO: 1886906
gguguauucuuucuaauua

SEQ ID NO: 2434579 - RNA, 19 nt, Artificial Sequence
  Description of Artificial Sequence: Synthetic oligonucleotide
  Antisense strand to SEQ ID NO: 2434578
uaauuagaaagaauacacc

SEQ ID NO: 2434580 - RNA, 19 nt, Artificial Sequence
  Description of Artificial Sequence: Synthetic oligonucleotide
  Sense strand starting at position 147 of SEQ ID NO: 1886906
cgagcucauuaccuggaaa

SEQ ID NO: 2434581 - RNA, 19 nt, Artificial Sequence
  Description of Artificial Sequence: Synthetic oligonucleotide
  Antisense strand to SEQ ID NO: 2434580
uuuccagguaaugagcucg

SEQ ID NO: 2434582 - RNA, 19 nt, Artificial Sequence
  Description of Artificial Sequence: Synthetic oligonucleotide
  Sense strand starting at position 417 of SEQ ID NO: 1886906
guuaauacagagugaacuu

SEQ ID NO: 2434583 - RNA, 19 nt, Artificial Sequence
  Description of Artificial Sequence: Synthetic oligonucleotide
  Antisense strand to SEQ ID NO: 2434582
aaguucacucuguauuaac

SEQ ID NO: 2434584 - RNA, 19 nt, Artificial Sequence
  Description of Artificial Sequence: Synthetic oligonucleotide
  Sense strand starting at position 426 of SEQ ID NO: 1886906
gagugaacuugucuacccu

SEQ ID NO: 2434585 - RNA, 19 nt, Artificial Sequence
  Description of Artificial Sequence: Synthetic oligonucleotide
  Antisense strand to SEQ ID NO: 2434584
aggguagacaaguucacuc

SEQ ID NO: 2434586 - RNA, 19 nt, Artificial Sequence
  Description of Artificial Sequence: Synthetic oligonucleotide
  Sense strand starting at position 610 of SEQ ID NO: 1886906
gggcuuggugaacaguaua

SEQ ID NO: 2434587 - RNA, 19 nt, Artificial Sequence
  Description of Artificial Sequence: Synthetic oligonucleotide
  Antisense strand to SEQ ID NO: 2434586
uauacuguucaccaagccc

SEQ ID NO: 2434588 - RNA, 19 nt, Artificial Sequence
  Description of Artificial Sequence: Synthetic oligonucleotide
  Sense strand starting at position 613 of SEQ ID NO: 1886906
cuuggugaacaguauaauc

SEQ ID NO: 2434589 - RNA, 19 nt, Artificial Sequence
  Description of Artificial Sequence: Synthetic oligonucleotide
  Antisense strand to SEQ ID NO: 2434588
gauuauacuguucaccaag

SEQ ID NO: 2434590 - RNA, 19 nt, Artificial Sequence
  Description of Artificial Sequence: Synthetic oligonucleotide
  Sense strand starting at position 752 of SEQ ID NO: 1886906
cuuguuaaggcaggaguaa

SEQ ID NO: 2434591 - RNA, 19 nt, Artificial Sequence
  Description of Artificial Sequence: Synthetic oligonucleotide
  Antisense strand to SEQ ID NO: 2434590
uuacuccugccuuaacaag

SEQ ID NO: 2434592 - RNA, 19 nt, Artificial Sequence
  Description of Artificial Sequence: Synthetic oligonucleotide
  Sense strand starting at position 862 of SEQ ID NO: 1886906
agaaccuuuccuugaauug

SEQ ID NO: 2434593 - RNA, 19 nt, Artificial Sequence
  Description of Artificial Sequence: Synthetic oligonucleotide
  Antisense strand to SEQ ID NO: 2434592
caauucaaggaaagguucu

SEQ ID NO: 2434594 - RNA, 19 nt, Artificial Sequence
  Description of Artificial Sequence: Synthetic oligonucleotide
  Sense strand starting at position 971 of SEQ ID NO: 1886906
gaggccuuacgagguuuaa

SEQ ID NO: 2434595 - RNA, 19 nt, Artificial Sequence
  Description of Artificial Sequence: Synthetic oligonucleotide
  Antisense strand to SEQ ID NO: 2434594
uuaaaccucguaaggccuc

SEQ ID NO: 2434596 - RNA, 19 nt, Artificial Sequence
  Description of Artificial Sequence: Synthetic oligonucleotide
  Sense strand starting at position 975 of SEQ ID NO: 1886906
ccuuacgagguuuaaauaa

SEQ ID NO: 2434597 - RNA, 19 nt, Artificial Sequence
  Description of Artificial Sequence: Synthetic oligonucleotide
  Antisense strand to SEQ ID NO: 2434596
uuauuuaaaccucguaagg

SEQ ID NO: 2434598 - RNA, 19 nt, Artificial Sequence
  Description of Artificial Sequence: Synthetic oligonucleotide
  Sense strand starting at position 1005 of SEQ ID NO: 1886906
gacacauuugaucgcucga

SEQ ID NO: 2434599 - RNA, 19 nt, Artificial Sequence
  Description of Artificial Sequence: Synthetic oligonucleotide
  Antisense strand to SEQ ID NO: 2434598
ucgagcgaucaaauguguc

SEQ ID NO: 2434600 - RNA, 19 nt, Artificial Sequence
  Description of Artificial Sequence: Synthetic oligonucleotide
  Sense strand starting at position 1007 of SEQ ID NO: 1886906
cacauuugaucgcucgaga

SEQ ID NO: 2434601 - RNA, 19 nt, Artificial Sequence
  Description of Artificial Sequence: Synthetic oligonucleotide
  Antisense strand to SEQ ID NO: 2434600
ucucgagcgaucaaaugug

SEQ ID NO: 2434602 - RNA, 19 nt, Artificial Sequence
  Description of Artificial Sequence: Synthetic oligonucleotide
  Sense strand starting at position 1204 of SEQ ID NO: 1886906
cccgguuaacacugaaguu

SEQ ID NO: 2434603 - RNA, 19 nt, Artificial Sequence
  Description of Artificial Sequence: Synthetic oligonucleotide
  Antisense strand to SEQ ID NO: 2434602
aacuucaguguuaaccggg

SEQ ID NO: 2434604 - RNA, 19 nt, Artificial Sequence
  Description of Artificial Sequence: Synthetic oligonucleotide
  Sense strand starting at position 1457 of SEQ ID NO: 1886906
uaaguaauucgcgaacagu

SEQ ID NO: 2434605 - RNA, 19 nt, Artificial Sequence
  Description of Artificial Sequence: Synthetic oligonucleotide
  Antisense strand to SEQ ID NO: 2434604
acuguucgcgaauuacuua

SEQ ID NO: 2434606 - RNA, 19 nt, Artificial Sequence
  Description of Artificial Sequence: Synthetic oligonucleotide
  Sense strand starting at position 2451 of SEQ ID NO: 1886906
ccagaucaugccuauauag

SEQ ID NO: 2434607 - RNA, 19 nt, Artificial Sequence
  Description of Artificial Sequence: Synthetic oligonucleotide
  Antisense strand to SEQ ID NO: 2434606
cuauauaggcaugaucugg

SEQ ID NO: 2434608 - RNA, 19 nt, Artificial Sequence
  Description of Artificial Sequence: Synthetic oligonucleotide
  Sense strand starting at position 2453 of SEQ ID NO: 1886906
agaucaugccuauauaguu

SEQ ID NO: 2434609 - RNA, 19 nt, Artificial Sequence
  Description of Artificial Sequence: Synthetic oligonucleotide
  Antisense strand to SEQ ID NO: 2434608
aacuauauaggcaugaucu

SEQ ID NO: 2434610 - RNA, 19 nt, Artificial Sequence
  Description of Artificial Sequence: Synthetic oligonucleotide
  Sense strand starting at position 2508 of SEQ ID NO: 1886906
cugagacaugcuuggaaca

SEQ ID NO: 2434611 - RNA, 19 nt, Artificial Sequence
  Description of Artificial Sequence: Synthetic oligonucleotide
  Antisense strand to SEQ ID NO: 2434610
uguuccaagcaugucucag

SEQ ID NO: 2434612 - RNA, 19 nt, Artificial Sequence
  Description of Artificial Sequence: Synthetic oligonucleotide
  Sense strand starting at position 2596 of SEQ ID NO: 1886906
gcgagauacuggguuugga

SEQ ID NO: 2434613 - RNA, 19 nt, Artificial Sequence
  Description of Artificial Sequence: Synthetic oligonucleotide
  Antisense strand to SEQ ID NO: 2434612
uccaaacccaguaucucgc

SEQ ID NO: 2434614 - RNA, 19 nt, Artificial Sequence
  Description of Artificial Sequence: Synthetic oligonucleotide
  Sense strand starting at position 2620 of SEQ ID NO: 1886906
gggcgagagcgucuguguu

SEQ ID NO: 2434615 - RNA, 19 nt, Artificial Sequence
  Description of Artificial Sequence: Synthetic oligonucleotide
  Antisense strand to SEQ ID NO: 2434614
aacacagacgcucucgccc

SEQ ID NO: 2434616 - RNA, 19 nt, Artificial Sequence
  Description of Artificial Sequence: Synthetic oligonucleotide
  Sense strand starting at position 2711 of SEQ ID NO: 1886906
ggucuuaaaccuuggcaaa

SEQ ID NO: 2434617 - RNA, 19 nt, Artificial Sequence
  Description of Artificial Sequence: Synthetic oligonucleotide
  Antisense strand to SEQ ID NO: 2434616
uuugccaagguuuaagacc

SEQ ID NO: 2434618 - RNA, 19 nt, Artificial Sequence
  Description of Artificial Sequence: Synthetic oligonucleotide
  Sense strand starting at position 2712 of SEQ ID NO: 1886906
gucuuaaaccuuggcaaag

SEQ ID NO: 2434619 - RNA, 19 nt, Artificial Sequence
  Description of Artificial Sequence: Synthetic oligonucleotide
  Antisense strand to SEQ ID NO: 2434618
cuuugccaagguuuaagac

SEQ ID NO: 2434620 - RNA, 19 nt, Artificial Sequence
  Description of Artificial Sequence: Synthetic oligonucleotide
  Sense strand starting at position 2734 of SEQ ID NO: 1886906
gggacucagcacuauucuu

SEQ ID NO: 2434621 - RNA, 19 nt, Artificial Sequence
  Description of Artificial Sequence: Synthetic oligonucleotide
  Antisense strand to SEQ ID NO: 2434620
aagaauagugcugaguccc

SEQ ID NO: 2434622 - RNA, 19 nt, Artificial Sequence
  Description of Artificial Sequence: Synthetic oligonucleotide
  Sense strand starting at position 2825 of SEQ ID NO: 1886906
aaaguugccuuccugaaag

SEQ ID NO: 2434623 - RNA, 19 nt, Artificial Sequence
  Description of Artificial Sequence: Synthetic oligonucleotide
  Antisense strand to SEQ ID NO: 2434622
cuuucaggaaggcaacuuu

SEQ ID NO: 2434624 - RNA, 19 nt, Artificial Sequence
  Description of Artificial Sequence: Synthetic oligonucleotide
  Sense strand starting at position 2827 of SEQ ID NO: 1886906
aguugccuuccugaaagaa

SEQ ID NO: 2434625 - RNA, 19 nt, Artificial Sequence
  Description of Artificial Sequence: Synthetic oligonucleotide
  Antisense strand to SEQ ID NO: 2434624
uucuuucaggaaggcaacu

SEQ ID NO: 2434626 - RNA, 19 nt, Artificial Sequence
  Description of Artificial Sequence: Synthetic oligonucleotide
  Sense strand starting at position 2943 of SEQ ID NO: 1886906
guauuaauaccuggcuuga

SEQ ID NO: 2434627 - RNA, 19 nt, Artificial Sequence
  Description of Artificial Sequence: Synthetic oligonucleotide
  Antisense strand to SEQ ID NO: 2434626
ucaagccagguauuaauac

SEQ ID NO: 2434628 - RNA, 19 nt, Artificial Sequence
  Description of Artificial Sequence: Synthetic oligonucleotide
  Sense strand starting at position 3180 of SEQ ID NO: 1886906
gaaauaagguguuauuuga

SEQ ID NO: 2434629 - RNA, 19 nt, Artificial Sequence
  Description of Artificial Sequence: Synthetic oligonucleotide
  Antisense strand to SEQ ID NO: 2434628
ucaaauaacaccuuauuuc

SEQ ID NO: 2434630 - RNA, 19 nt, Artificial Sequence
  Description of Artificial Sequence: Synthetic oligonucleotide
  Sense strand starting at position 3311 of SEQ ID NO: 1886906
uguacauuaucuguacacu

SEQ ID NO: 2434631 - RNA, 19 nt, Artificial Sequence
  Description of Artificial Sequence: Synthetic oligonucleotide
  Antisense strand to SEQ ID NO: 2434630
aguguacagauaauguaca

SEQ ID NO: 2434632 - RNA, 19 nt, Artificial Sequence
  Description of Artificial Sequence: Synthetic oligonucleotide
  Sense strand starting at position 3312 of SEQ ID NO: 1886906
guacauuaucuguacacuu

SEQ ID NO: 2434633 - RNA, 19 nt, Artificial Sequence
  Description of Artificial Sequence: Synthetic oligonucleotide
  Antisense strand to SEQ ID NO: 2434632
aaguguacagauaauguac

SEQ ID NO: 2434634 - RNA, 19 nt, Artificial Sequence
  Description of Artificial Sequence: Synthetic oligonucleotide
  Sense strand starting at position 3412 of SEQ ID NO: 1886906
agagauguuaauugaagca

SEQ ID NO: 2434635 - RNA, 19 nt, Artificial Sequence
  Description of Artificial Sequence: Synthetic oligonucleotide
  Antisense strand to SEQ ID NO: 2434634
ugcuucaauuaacaucucu

SEQ ID NO: 2434636 - RNA, 19 nt, Artificial Sequence
  Description of Artificial Sequence: Synthetic oligonucleotide
  Sense strand starting at position 3446 of SEQ ID NO: 1886906
ggauaaggucaaggccauu

SEQ ID NO: 2434637 - RNA, 19 nt, Artificial Sequence
  Description of Artificial Sequence: Synthetic oligonucleotide
  Antisense strand to SEQ ID NO: 2434636
aauggccuugaccuuaucc

SEQ ID NO: 2434638 - RNA, 19 nt, Artificial Sequence
  Description of Artificial Sequence: Synthetic oligonucleotide
  Sense strand starting at position 3514 of SEQ ID NO: 1886906
uguucuuggucuccauaag

SEQ ID NO: 2434639 - RNA, 19 nt, Artificial Sequence
  Description of Artificial Sequence: Synthetic oligonucleotide
  Antisense strand to SEQ ID NO: 2434638
cuuauggagaccaagaaca

SEQ ID NO: 2434640 - RNA, 19 nt, Artificial Sequence
  Description of Artificial Sequence: Synthetic oligonucleotide
  Sense strand starting at position 3515 of SEQ ID NO: 1886906
guucuuggucuccauaaga

SEQ ID NO: 2434641 - RNA, 19 nt, Artificial Sequence
  Description of Artificial Sequence: Synthetic oligonucleotide
  Antisense strand to SEQ ID NO: 2434640
ucuuauggagaccaagaac

SEQ ID NO: 2434642 - RNA, 19 nt, Artificial Sequence
  Description of Artificial Sequence: Synthetic oligonucleotide
  Sense strand starting at position 3604 of SEQ ID NO: 1886906
uuggauuccugaguuguag

SEQ ID NO: 2434643 - RNA, 19 nt, Artificial Sequence
  Description of Artificial Sequence: Synthetic oligonucleotide
  Antisense strand to SEQ ID NO: 2434642
cuacaacucaggaauccaa

SEQ ID NO: 2434644 - RNA, 19 nt, Artificial Sequence
  Description of Artificial Sequence: Synthetic oligonucleotide
  Sense strand starting at position 3606 of SEQ ID NO: 1886906
ggauuccugaguuguagaa

SEQ ID NO: 2434645 - RNA, 19 nt, Artificial Sequence
  Description of Artificial Sequence: Synthetic oligonucleotide
  Antisense strand to SEQ ID NO: 2434644
uucuacaacucaggaaucc

SEQ ID NO: 2434646 - RNA, 19 nt, Artificial Sequence
  Description of Artificial Sequence: Synthetic oligonucleotide
  Sense strand starting at position 3610 of SEQ ID NO: 1886906
uccugaguuguagaaucuc

SEQ ID NO: 2434647 - RNA, 19 nt, Artificial Sequence
  Description of Artificial Sequence: Synthetic oligonucleotide
  Antisense strand to SEQ ID NO: 2434646
gagauucuacaacucagga

SEQ ID NO: 2434648 - RNA, 19 nt, Artificial Sequence
  Description of Artificial Sequence: Synthetic oligonucleotide
  Sense strand starting at position 3634 of SEQ ID NO: 1886906
agcuguagcguccuuguau

SEQ ID NO: 2434649 - RNA, 19 nt, Artificial Sequence
  Description of Artificial Sequence: Synthetic oligonucleotide
  Antisense strand to SEQ ID NO: 2434648
auacaaggacgcuacagcu

SEQ ID NO: 2434650 - RNA, 19 nt, Artificial Sequence
  Description of Artificial Sequence: Synthetic oligonucleotide
  Sense strand starting at position 3791 of SEQ ID NO: 1886906
agugucguugaguauaaau

SEQ ID NO: 2434651 - RNA, 19 nt, Artificial Sequence
  Description of Artificial Sequence: Synthetic oligonucleotide
  Antisense strand to SEQ ID NO: 2434650
auuuauacucaacgacacu

SEQ ID NO: 2434652 - RNA, 19 nt, Artificial Sequence
  Description of Artificial Sequence: Synthetic oligonucleotide
  Sense strand starting at position 3821 of SEQ ID NO: 1886906
ggcucacacguagauagau

SEQ ID NO: 2434653 - RNA, 19 nt, Artificial Sequence
  Description of Artificial Sequence: Synthetic oligonucleotide
  Antisense strand to SEQ ID NO: 2434652
aucuaucuacgugugagcc

SEQ ID NO: 2434654 - RNA, 19 nt, Artificial Sequence
  Description of Artificial Sequence: Synthetic oligonucleotide
  Sense strand starting at position 3827 of SEQ ID NO: 1886906
cacguagauagauggguau

SEQ ID NO: 2434655 - RNA, 19 nt, Artificial Sequence
  Description of Artificial Sequence: Synthetic oligonucleotide
  Antisense strand to SEQ ID NO: 2434654
auacccaucuaucuacgug

SEQ ID NO: 2434656 - RNA, 19 nt, Artificial Sequence
  Description of Artificial Sequence: Synthetic oligonucleotide
  Sense strand starting at position 3982 of SEQ ID NO: 1886906
gggaauagcugcucuaaac

SEQ ID NO: 2434657 - RNA, 19 nt, Artificial Sequence
  Description of Artificial Sequence: Synthetic oligonucleotide
  Antisense strand to SEQ ID NO: 2434656
guuuagagcagcuauuccc

SEQ ID NO: 2434658 - RNA, 19 nt, Artificial Sequence
  Description of Artificial Sequence: Synthetic oligonucleotide
  Sense strand starting at position 89 of SEQ ID NO: 1886908
gacuuuagugauggcaaau

SEQ ID NO: 2434659 - RNA, 19 nt, Artificial Sequence
  Description of Artificial Sequence: Synthetic oligonucleotide
  Antisense strand to SEQ ID NO: 2434658
auuugccaucacuaaaguc

SEQ ID NO: 2434660 - RNA, 19 nt, Artificial Sequence
  Description of Artificial Sequence: Synthetic oligonucleotide
  Sense strand starting at position 134 of SEQ ID NO: 1886908
ugguaagaaagcuauagcu

SEQ ID NO: 2434661 - RNA, 19 nt, Artificial Sequence
  Description of Artificial Sequence: Synthetic oligonucleotide
  Antisense strand to SEQ ID NO: 2434660
agcuauagcuuucuuacca

SEQ ID NO: 2434662 - RNA, 19 nt, Artificial Sequence
  Description of Artificial Sequence: Synthetic oligonucleotide
  Sense strand starting at position 136 of SEQ ID NO: 1886908
guaagaaagcuauagcuuu

SEQ ID NO: 2434663 - RNA, 19 nt, Artificial Sequence
  Description of Artificial Sequence: Synthetic oligonucleotide
  Antisense strand to SEQ ID NO: 2434662
aaagcuauagcuuucuuac

SEQ ID NO: 2434664 - RNA, 19 nt, Artificial Sequence
  Description of Artificial Sequence: Synthetic oligonucleotide
  Sense strand starting at position 187 of SEQ ID NO: 1886908
ggguguuacagacagucau

SEQ ID NO: 2434665 - RNA, 19 nt, Artificial Sequence
  Description of Artificial Sequence: Synthetic oligonucleotide
  Antisense strand to SEQ ID NO: 2434664
augacugucuguaacaccc

SEQ ID NO: 2434666 - RNA, 19 nt, Artificial Sequence
  Description of Artificial Sequence: Synthetic oligonucleotide
  Sense strand starting at position 204 of SEQ ID NO: 1886908
auacucauuuaggcguuua

SEQ ID NO: 2434667 - RNA, 19 nt, Artificial Sequence
  Description of Artificial Sequence: Synthetic oligonucleotide
  Antisense strand to SEQ ID NO: 2434666
uaaacgccuaaaugaguau

SEQ ID NO: 2434668 - RNA, 19 nt, Artificial Sequence
  Description of Artificial Sequence: Synthetic oligonucleotide
  Sense strand starting at position 219 of SEQ ID NO: 1886908
uuuacuuacuggcuggaau

SEQ ID NO: 2434669 - RNA, 19 nt, Artificial Sequence
  Description of Artificial Sequence: Synthetic oligonucleotide
  Antisense strand to SEQ ID NO: 2434668
auuccagccaguaaguaaa

SEQ ID NO: 2434670 - RNA, 19 nt, Artificial Sequence
  Description of Artificial Sequence: Synthetic oligonucleotide
  Sense strand starting at position 220 of SEQ ID NO: 1886908
uuacuuacuggcuggaauu

SEQ ID NO: 2434671 - RNA, 19 nt, Artificial Sequence
  Description of Artificial Sequence: Synthetic oligonucleotide
  Antisense strand to SEQ ID NO: 2434670
aauuccagccaguaaguaa

SEQ ID NO: 2434672 - RNA, 19 nt, Artificial Sequence
  Description of Artificial Sequence: Synthetic oligonucleotide
  Sense strand starting at position 240 of SEQ ID NO: 1886908
gcaaucuuugccuggacaa

SEQ ID NO: 2434673 - RNA, 19 nt, Artificial Sequence
  Description of Artificial Sequence: Synthetic oligonucleotide
  Antisense strand to SEQ ID NO: 2434672
uuguccaggcaaagauugc

SEQ ID NO: 2434674 - RNA, 19 nt, Artificial Sequence
  Description of Artificial Sequence: Synthetic oligonucleotide
  Sense strand starting at position 280 of SEQ ID NO: 1886908
uucuguagcguguuuguua

SEQ ID NO: 2434675 - RNA, 19 nt, Artificial Sequence
  Description of Artificial Sequence: Synthetic oligonucleotide
  Antisense strand to SEQ ID NO: 2434674
uaacaaacacgcuacagaa

SEQ ID NO: 2434676 - RNA, 19 nt, Artificial Sequence
  Description of Artificial Sequence: Synthetic oligonucleotide
  Sense strand starting at position 331 of SEQ ID NO: 1886908
acugaaaucuuugcuugag

SEQ ID NO: 2434677 - RNA, 19 nt, Artificial Sequence
  Description of Artificial Sequence: Synthetic oligonucleotide
  Antisense strand to SEQ ID NO: 2434676
cucaagcaaagauuucagu

SEQ ID NO: 2434678 - RNA, 19 nt, Artificial Sequence
  Description of Artificial Sequence: Synthetic oligonucleotide
  Sense strand starting at position 332 of SEQ ID NO: 1886908
cugaaaucuuugcuugaga

SEQ ID NO: 2434679 - RNA, 19 nt, Artificial Sequence
  Description of Artificial Sequence: Synthetic oligonucleotide
  Antisense strand to SEQ ID NO: 2434678
ucucaagcaaagauuucag

SEQ ID NO: 2434680 - RNA, 19 nt, Artificial Sequence
  Description of Artificial Sequence: Synthetic oligonucleotide
  Sense strand starting at position 333 of SEQ ID NO: 1886908
ugaaaucuuugcuugagau

SEQ ID NO: 2434681 - RNA, 19 nt, Artificial Sequence
  Description of Artificial Sequence: Synthetic oligonucleotide
  Antisense strand to SEQ ID NO: 2434680
aucucaagcaaagauuuca

SEQ ID NO: 2434682 - RNA, 19 nt, Artificial Sequence
  Description of Artificial Sequence: Synthetic oligonucleotide
  Sense strand starting at position 334 of SEQ ID NO: 1886908
gaaaucuuugcuugagaug

SEQ ID NO: 2434683 - RNA, 19 nt, Artificial Sequence
  Description of Artificial Sequence: Synthetic oligonucleotide
  Antisense strand to SEQ ID NO: 2434682
caucucaagcaaagauuuc

SEQ ID NO: 2434684 - RNA, 19 nt, Artificial Sequence
  Description of Artificial Sequence: Synthetic oligonucleotide
  Sense strand starting at position 339 of SEQ ID NO: 1886908
cuuugcuugagauggacau

SEQ ID NO: 2434685 - RNA, 19 nt, Artificial Sequence
  Description of Artificial Sequence: Synthetic oligonucleotide
  Antisense strand to SEQ ID NO: 2434684
auguccaucucaagcaaag

SEQ ID NO: 2434686 - RNA, 19 nt, Artificial Sequence
  Description of Artificial Sequence: Synthetic oligonucleotide
  Sense strand starting at position 340 of SEQ ID NO: 1886908
uuugcuugagauggacauu

SEQ ID NO: 2434687 - RNA, 19 nt, Artificial Sequence
  Description of Artificial Sequence: Synthetic oligonucleotide
  Antisense strand to SEQ ID NO: 2434686
aauguccaucucaagcaaa

SEQ ID NO: 2434688 - RNA, 19 nt, Artificial Sequence
  Description of Artificial Sequence: Synthetic oligonucleotide
  Sense strand starting at position 439 of SEQ ID NO: 1886908
gccaacaucagugggaguu

SEQ ID NO: 2434689 - RNA, 19 nt, Artificial Sequence
  Description of Artificial Sequence: Synthetic oligonucleotide
  Antisense strand to SEQ ID NO: 2434688
aacucccacugauguuggc

SEQ ID NO: 2434690 - RNA, 19 nt, Artificial Sequence
  Description of Artificial Sequence: Synthetic oligonucleotide
  Sense strand starting at position 440 of SEQ ID NO: 1886908
ccaacaucagugggaguuu

SEQ ID NO: 2434691 - RNA, 19 nt, Artificial Sequence
  Description of Artificial Sequence: Synthetic oligonucleotide
  Antisense strand to SEQ ID NO: 2434690
aaacucccacugauguugg

SEQ ID NO: 2434692 - RNA, 19 nt, Artificial Sequence
  Description of Artificial Sequence: Synthetic oligonucleotide
  Sense strand starting at position 670 of SEQ ID NO: 1886908
caggauagguuuccaucaa

SEQ ID NO: 2434693 - RNA, 19 nt, Artificial Sequence
  Description of Artificial Sequence: Synthetic oligonucleotide
  Antisense strand to SEQ ID NO: 2434692
uugauggaaaccuauccug

SEQ ID NO: 2434694 - RNA, 19 nt, Artificial Sequence
  Description of Artificial Sequence: Synthetic oligonucleotide
  Sense strand starting at position 674 of SEQ ID NO: 1886908
auagguuuccaucaaucug

SEQ ID NO: 2434695 - RNA, 19 nt, Artificial Sequence
  Description of Artificial Sequence: Synthetic oligonucleotide
  Antisense strand to SEQ ID NO: 2434694
cagauugauggaaaccuau

SEQ ID NO: 2434696 - RNA, 19 nt, Artificial Sequence
  Description of Artificial Sequence: Synthetic oligonucleotide
  Sense strand starting at position 766 of SEQ ID NO: 1886908
agcugagugcuauauggga

SEQ ID NO: 2434697 - RNA, 19 nt, Artificial Sequence
  Description of Artificial Sequence: Synthetic oligonucleotide
  Antisense strand to SEQ ID NO: 2434696
ucccauauagcacucagcu

SEQ ID NO: 2434698 - RNA, 19 nt, Artificial Sequence
  Description of Artificial Sequence: Synthetic oligonucleotide
  Sense strand starting at position 768 of SEQ ID NO: 1886908
cugagugcuauaugggaua

SEQ ID NO: 2434699 - RNA, 19 nt, Artificial Sequence
  Description of Artificial Sequence: Synthetic oligonucleotide
  Antisense strand to SEQ ID NO: 2434698
uaucccauauagcacucag

SEQ ID NO: 2434700 - RNA, 19 nt, Artificial Sequence
  Description of Artificial Sequence: Synthetic oligonucleotide
  Sense strand starting at position 781 of SEQ ID NO: 1886908
gggauauaagaugguguga

SEQ ID NO: 2434701 - RNA, 19 nt, Artificial Sequence
  Description of Artificial Sequence: Synthetic oligonucleotide
  Antisense strand to SEQ ID NO: 2434700
ucacaccaucuuauauccc

SEQ ID NO: 2434702 - RNA, 19 nt, Artificial Sequence
  Description of Artificial Sequence: Synthetic oligonucleotide
  Sense strand starting at position 811 of SEQ ID NO: 1886908
ugccuuuaaguugagaacu

SEQ ID NO: 2434703 - RNA, 19 nt, Artificial Sequence
  Description of Artificial Sequence: Synthetic oligonucleotide
  Antisense strand to SEQ ID NO: 2434702
aguucucaacuuaaaggca

SEQ ID NO: 2434704 - RNA, 19 nt, Artificial Sequence
  Description of Artificial Sequence: Synthetic oligonucleotide
  Sense strand starting at position 828 of SEQ ID NO: 1886908
cuuaaaggugaauacguaa

SEQ ID NO: 2434705 - RNA, 19 nt, Artificial Sequence
  Description of Artificial Sequence: Synthetic oligonucleotide
  Antisense strand to SEQ ID NO: 2434704
uuacguauucaccuuuaag

SEQ ID NO: 2434706 - RNA, 19 nt, Artificial Sequence
  Description of Artificial Sequence: Synthetic oligonucleotide
  Sense strand starting at position 831 of SEQ ID NO: 1886908
aaaggugaauacguaaagu

SEQ ID NO: 2434707 - RNA, 19 nt, Artificial Sequence
  Description of Artificial Sequence: Synthetic oligonucleotide
  Antisense strand to SEQ ID NO: 2434706
acuuuacguauucaccuuu

SEQ ID NO: 2434708 - RNA, 19 nt, Artificial Sequence
  Description of Artificial Sequence: Synthetic oligonucleotide
  Sense strand starting at position 875 of SEQ ID NO: 1886908
cuggaaaugguuuaagugu

SEQ ID NO: 2434709 - RNA, 19 nt, Artificial Sequence
  Description of Artificial Sequence: Synthetic oligonucleotide
  Antisense strand to SEQ ID NO: 2434708
acacuuaaaccauuuccag

SEQ ID NO: 2434710 - RNA, 19 nt, Artificial Sequence
  Description of Artificial Sequence: Synthetic oligonucleotide
  Sense strand starting at position 981 of SEQ ID NO: 1886908
cuagauuugcagcggcaaa

SEQ ID NO: 2434711 - RNA, 19 nt, Artificial Sequence
  Description of Artificial Sequence: Synthetic oligonucleotide
  Antisense strand to SEQ ID NO: 2434710
uuugccgcugcaaaucuag

SEQ ID NO: 2434712 - RNA, 19 nt, Artificial Sequence
  Description of Artificial Sequence: Synthetic oligonucleotide
  Sense strand starting at position 1040 of SEQ ID NO: 1886908
gaccuaaaccagugacugu

SEQ ID NO: 2434713 - RNA, 19 nt, Artificial Sequence
  Description of Artificial Sequence: Synthetic oligonucleotide
  Antisense strand to SEQ ID NO: 2434712
acagucacugguuuagguc

SEQ ID NO: 2434714 - RNA, 19 nt, Artificial Sequence
  Description of Artificial Sequence: Synthetic oligonucleotide
  Sense strand starting at position 1203 of SEQ ID NO: 1886908
gacccaguucuggaugcau

SEQ ID NO: 2434715 - RNA, 19 nt, Artificial Sequence
  Description of Artificial Sequence: Synthetic oligonucleotide
  Antisense strand to SEQ ID NO: 2434714
augcauccagaacuggguc

SEQ ID NO: 2434716 - RNA, 19 nt, Artificial Sequence
  Description of Artificial Sequence: Synthetic oligonucleotide
  Sense strand starting at position 1268 of SEQ ID NO: 1886908
ugcagaucucagugggaug

SEQ ID NO: 2434717 - RNA, 19 nt, Artificial Sequence
  Description of Artificial Sequence: Synthetic oligonucleotide
  Antisense strand to SEQ ID NO: 2434716
caucccacugagaucugca

SEQ ID NO: 2434718 - RNA, 19 nt, Artificial Sequence
  Description of Artificial Sequence: Synthetic oligonucleotide
  Sense strand starting at position 1269 of SEQ ID NO: 1886908
gcagaucucagugggaugu

SEQ ID NO: 2434719 - RNA, 19 nt, Artificial Sequence
  Description of Artificial Sequence: Synthetic oligonucleotide
  Antisense strand to SEQ ID NO: 2434718
acaucccacugagaucugc

SEQ ID NO: 2434720 - RNA, 19 nt, Artificial Sequence
  Description of Artificial Sequence: Synthetic oligonucleotide
  Sense strand starting at position 1531 of SEQ ID NO: 1886908
gggaccgaucuacgagaaa

SEQ ID NO: 2434721 - RNA, 19 nt, Artificial Sequence
  Description of Artificial Sequence: Synthetic oligonucleotide
  Antisense strand to SEQ ID NO: 2434720
uuucucguagaucgguccc

SEQ ID NO: 2434722 - RNA, 19 nt, Artificial Sequence
  Description of Artificial Sequence: Synthetic oligonucleotide
  Sense strand starting at position 2194 of SEQ ID NO: 1886908
aagaucuucccgugaccca

SEQ ID NO: 2434723 - RNA, 19 nt, Artificial Sequence
  Description of Artificial Sequence: Synthetic oligonucleotide
  Antisense strand to SEQ ID NO: 2434722
ugggucacgggaagaucuu

SEQ ID NO: 2434724 - RNA, 19 nt, Artificial Sequence
  Description of Artificial Sequence: Synthetic oligonucleotide
  Sense strand starting at position 2571 of SEQ ID NO: 1886908
gggaaacauuacgcagaca

SEQ ID NO: 2434725 - RNA, 19 nt, Artificial Sequence
  Description of Artificial Sequence: Synthetic oligonucleotide
  Antisense strand to SEQ ID NO: 2434724
ugucugcguaauguuuccc

SEQ ID NO: 2434726 - RNA, 19 nt, Artificial Sequence
  Description of Artificial Sequence: Synthetic oligonucleotide
  Sense strand starting at position 2645 of SEQ ID NO: 1886908
ggcagcuuccaggauucga

SEQ ID NO: 2434727 - RNA, 19 nt, Artificial Sequence
  Description of Artificial Sequence: Synthetic oligonucleotide
  Antisense strand to SEQ ID NO: 2434726
ucgaauccuggaagcugcc

SEQ ID NO: 2434728 - RNA, 19 nt, Artificial Sequence
  Description of Artificial Sequence: Synthetic oligonucleotide
  Sense strand starting at position 2653 of SEQ ID NO: 1886908
ccaggauucgaacguauag

SEQ ID NO: 2434729 - RNA, 19 nt, Artificial Sequence
  Description of Artificial Sequence: Synthetic oligonucleotide
  Antisense strand to SEQ ID NO: 2434728
cuauacguucgaauccugg

SEQ ID NO: 2434730 - RNA, 19 nt, Artificial Sequence
  Description of Artificial Sequence: Synthetic oligonucleotide
  Sense strand starting at position 2655 of SEQ ID NO: 1886908
aggauucgaacguauagag

SEQ ID NO: 2434731 - RNA, 19 nt, Artificial Sequence
  Description of Artificial Sequence: Synthetic oligonucleotide
  Antisense strand to SEQ ID NO: 2434730
cucuauacguucgaauccu

SEQ ID NO: 2434732 - RNA, 19 nt, Artificial Sequence
  Description of Artificial Sequence: Synthetic oligonucleotide
  Sense strand starting at position 3127 of SEQ ID NO: 1886908
acugauguugcgggaaauc

SEQ ID NO: 2434733 - RNA, 19 nt, Artificial Sequence
  Description of Artificial Sequence: Synthetic oligonucleotide
  Antisense strand to SEQ ID NO: 2434732
gauuucccgcaacaucagu

SEQ ID NO: 2434734 - RNA, 19 nt, Artificial Sequence
  Description of Artificial Sequence: Synthetic oligonucleotide
  Sense strand starting at position 3373 of SEQ ID NO: 1886908
cugucaguugaggauguau

SEQ ID NO: 2434735 - RNA, 19 nt, Artificial Sequence
  Description of Artificial Sequence: Synthetic oligonucleotide
  Antisense strand to SEQ ID NO: 2434734
auacauccucaacugacag

SEQ ID NO: 2434736 - RNA, 19 nt, Artificial Sequence
  Description of Artificial Sequence: Synthetic oligonucleotide
  Sense strand starting at position 3375 of SEQ ID NO: 1886908
gucaguugaggauguauau

SEQ ID NO: 2434737 - RNA, 19 nt, Artificial Sequence
  Description of Artificial Sequence: Synthetic oligonucleotide
  Antisense strand to SEQ ID NO: 2434736
auauacauccucaacugac

SEQ ID NO: 2434738 - RNA, 19 nt, Artificial Sequence
  Description of Artificial Sequence: Synthetic oligonucleotide
  Sense strand starting at position 5 of SEQ ID NO: 1886907
guguuugggcacuaugguu

SEQ ID NO: 2434739 - RNA, 19 nt, Artificial Sequence
  Description of Artificial Sequence: Synthetic oligonucleotide
  Antisense strand to SEQ ID NO: 2434738
aaccauagugcccaaacac

SEQ ID NO: 2434740 - RNA, 19 nt, Artificial Sequence
  Description of Artificial Sequence: Synthetic oligonucleotide
  Sense strand starting at position 146 of SEQ ID NO: 1886907
ggcugugcucgcaagguuu

SEQ ID NO: 2434741 - RNA, 19 nt, Artificial Sequence
  Description of Artificial Sequence: Synthetic oligonucleotide
  Antisense strand to SEQ ID NO: 2434740
aaaccuugcgagcacagcc

SEQ ID NO: 2434742 - RNA, 19 nt, Artificial Sequence
  Description of Artificial Sequence: Synthetic oligonucleotide
  Sense strand starting at position 286 of SEQ ID NO: 1886907
gucauuuaccucugguucu

SEQ ID NO: 2434743 - RNA, 19 nt, Artificial Sequence
  Description of Artificial Sequence: Synthetic oligonucleotide
  Antisense strand to SEQ ID NO: 2434742
agaaccagagguaaaugac

SEQ ID NO: 2434744 - RNA, 19 nt, Artificial Sequence
  Description of Artificial Sequence: Synthetic oligonucleotide
  Sense strand starting at position 524 of SEQ ID NO: 1886907
auuccagcaucccugagaa

SEQ ID NO: 2434745 - RNA, 19 nt, Artificial Sequence
  Description of Artificial Sequence: Synthetic oligonucleotide
  Antisense strand to SEQ ID NO: 2434744
uucucagggaugcuggaau

SEQ ID NO: 2434746 - RNA, 19 nt, Artificial Sequence
  Description of Artificial Sequence: Synthetic oligonucleotide
  Sense strand starting at position 924 of SEQ ID NO: 1886907
ggguaugaagacugagguu

SEQ ID NO: 2434747 - RNA, 19 nt, Artificial Sequence
  Description of Artificial Sequence: Synthetic oligonucleotide
  Antisense strand to SEQ ID NO: 2434746
aaccucagucuucauaccc

SEQ ID NO: 2434748 - RNA, 19 nt, Artificial Sequence
  Description of Artificial Sequence: Synthetic oligonucleotide
  Sense strand starting at position 933 of SEQ ID NO: 1886907
gacugagguuuggaggagu

SEQ ID NO: 2434749 - RNA, 19 nt, Artificial Sequence
  Description of Artificial Sequence: Synthetic oligonucleotide
  Antisense strand to SEQ ID NO: 2434748
acuccuccaaaccucaguc

SEQ ID NO: 2434750 - RNA, 19 nt, Artificial Sequence
  Description of Artificial Sequence: Synthetic oligonucleotide
  Sense strand starting at position 944 of SEQ ID NO: 1886907
ggaggaguuuccuuccuac

SEQ ID NO: 2434751 - RNA, 19 nt, Artificial Sequence
  Description of Artificial Sequence: Synthetic oligonucleotide
  Antisense strand to SEQ ID NO: 2434750
guaggaaggaaacuccucc

SEQ ID NO: 2434752 - RNA, 19 nt, Artificial Sequence
  Description of Artificial Sequence: Synthetic oligonucleotide
  Sense strand starting at position 1097 of SEQ ID NO: 1886907
gcuuaucaugagggaaugu

SEQ ID NO: 2434753 - RNA, 19 nt, Artificial Sequence
  Description of Artificial Sequence: Synthetic oligonucleotide
  Antisense strand to SEQ ID NO: 2434752
acauucccucaugauaagc

SEQ ID NO: 2434754 - RNA, 19 nt, Artificial Sequence
  Description of Artificial Sequence: Synthetic oligonucleotide
  Sense strand starting at position 1125 of SEQ ID NO: 1886907
gggaacaaguucuuccagu

SEQ ID NO: 2434755 - RNA, 19 nt, Artificial Sequence
  Description of Artificial Sequence: Synthetic oligonucleotide
  Antisense strand to SEQ ID NO: 2434754
acuggaagaacuuguuccc

SEQ ID NO: 2434756 - RNA, 19 nt, Artificial Sequence
  Description of Artificial Sequence: Synthetic oligonucleotide
  Sense strand starting at position 1126 of SEQ ID NO: 1886907
ggaacaaguucuuccaguu

SEQ ID NO: 2434757 - RNA, 19 nt, Artificial Sequence
  Description of Artificial Sequence: Synthetic oligonucleotide
  Antisense strand to SEQ ID NO: 2434756
aacuggaagaacuuguucc

SEQ ID NO: 2434758 - RNA, 19 nt, Artificial Sequence
  Description of Artificial Sequence: Synthetic oligonucleotide
  Sense strand starting at position 1461 of SEQ ID NO: 1886907
cuacucacauccgaaggau

SEQ ID NO: 2434759 - RNA, 19 nt, Artificial Sequence
  Description of Artificial Sequence: Synthetic oligonucleotide
  Antisense strand to SEQ ID NO: 2434758
auccuucggaugugaguag

SEQ ID NO: 2434760 - RNA, 19 nt, Artificial Sequence
  Description of Artificial Sequence: Synthetic oligonucleotide
  Sense strand starting at position 1518 of SEQ ID NO: 1886907
cauugugcuucucuuggga

SEQ ID NO: 2434761 - RNA, 19 nt, Artificial Sequence
  Description of Artificial Sequence: Synthetic oligonucleotide
  Antisense strand to SEQ ID NO: 2434760
ucccaagagaagcacaaug

SEQ ID NO: 2434762 - RNA, 19 nt, Artificial Sequence
  Description of Artificial Sequence: Synthetic oligonucleotide
  Sense strand starting at position 1605 of SEQ ID NO: 1886907
aaauguagagucugcagaa

SEQ ID NO: 2434763 - RNA, 19 nt, Artificial Sequence
  Description of Artificial Sequence: Synthetic oligonucleotide
  Antisense strand to SEQ ID NO: 2434762
uucugcagacucuacauuu

SEQ ID NO: 2434764 - RNA, 19 nt, Artificial Sequence
  Description of Artificial Sequence: Synthetic oligonucleotide
  Sense strand starting at position 1606 of SEQ ID NO: 1886907
aauguagagucugcagaaa

SEQ ID NO: 2434765 - RNA, 19 nt, Artificial Sequence
  Description of Artificial Sequence: Synthetic oligonucleotide
  Antisense strand to SEQ ID NO: 2434764
uuucugcagacucuacauu

SEQ ID NO: 2434766 - RNA, 19 nt, Artificial Sequence
  Description of Artificial Sequence: Synthetic oligonucleotide
  Sense strand starting at position 1676 of SEQ ID NO: 1886907
aguuuacugccuugaggau

SEQ ID NO: 2434767 - RNA, 19 nt, Artificial Sequence
  Description of Artificial Sequence: Synthetic oligonucleotide
  Antisense strand to SEQ ID NO: 2434766
auccucaaggcaguaaacu

SEQ ID NO: 2434768 - RNA, 19 nt, Artificial Sequence
  Description of Artificial Sequence: Synthetic oligonucleotide
  Sense strand starting at position 2282 of SEQ ID NO: 1886907
cuaaaugucuuagcuguca

SEQ ID NO: 2434769 - RNA, 19 nt, Artificial Sequence
  Description of Artificial Sequence: Synthetic oligonucleotide
  Antisense strand to SEQ ID NO: 2434768
ugacagcuaagacauuuag

SEQ ID NO: 2434770 - RNA, 19 nt, Artificial Sequence
  Description of Artificial Sequence: Synthetic oligonucleotide
  Sense strand starting at position 2314 of SEQ ID NO: 1886907
ucuuaaggaucccagucaa

SEQ ID NO: 2434771 - RNA, 19 nt, Artificial Sequence
  Description of Artificial Sequence: Synthetic oligonucleotide
  Antisense strand to SEQ ID NO: 2434770
uugacugggauccuuaaga

SEQ ID NO: 2434772 - RNA, 19 nt, Artificial Sequence
  Description of Artificial Sequence: Synthetic oligonucleotide
  Sense strand starting at position 2328 of SEQ ID NO: 1886907
gucaauguggcagacucau

SEQ ID NO: 2434773 - RNA, 19 nt, Artificial Sequence
  Description of Artificial Sequence: Synthetic oligonucleotide
  Antisense strand to SEQ ID NO: 2434772
augagucugccacauugac

SEQ ID NO: 2434774 - RNA, 19 nt, Artificial Sequence
  Description of Artificial Sequence: Synthetic oligonucleotide
  Sense strand starting at position 2334 of SEQ ID NO: 1886907
guggcagacucaucuugca

SEQ ID NO: 2434775 - RNA, 19 nt, Artificial Sequence
  Description of Artificial Sequence: Synthetic oligonucleotide
  Antisense strand to SEQ ID NO: 2434774
ugcaagaugagucugccac

SEQ ID NO: 2434776 - RNA, 19 nt, Artificial Sequence
  Description of Artificial Sequence: Synthetic oligonucleotide
  Sense strand starting at position 2377 of SEQ ID NO: 1886907
gccaaauugggcuacaaau

SEQ ID NO: 2434777 - RNA, 19 nt, Artificial Sequence
  Description of Artificial Sequence: Synthetic oligonucleotide
  Antisense strand to SEQ ID NO: 2434776
auuuguagcccaauuuggc

SEQ ID NO: 2434778 - RNA, 19 nt, Artificial Sequence
  Description of Artificial Sequence: Synthetic oligonucleotide
  Sense strand starting at position 2390 of SEQ ID NO: 1886907
acaaaucauggcugacauu

SEQ ID NO: 2434779 - RNA, 19 nt, Artificial Sequence
  Description of Artificial Sequence: Synthetic oligonucleotide
  Antisense strand to SEQ ID NO: 2434778
aaugucagccaugauuugu

SEQ ID NO: 2434780 - RNA, 19 nt, Artificial Sequence
  Description of Artificial Sequence: Synthetic oligonucleotide
  Sense strand starting at position 2895 of SEQ ID NO: 1886907
ugagcaguuugcuucagag

SEQ ID NO: 2434781 - RNA, 19 nt, Artificial Sequence
  Description of Artificial Sequence: Synthetic oligonucleotide
  Antisense strand to SEQ ID NO: 2434780
cucugaagcaaacugcuca

SEQ ID NO: 2434782 - RNA, 19 nt, Artificial Sequence
  Description of Artificial Sequence: Synthetic oligonucleotide
  Sense strand starting at position 3113 of SEQ ID NO: 1886907
gcaaucuacugagaccuuu

SEQ ID NO: 2434783 - RNA, 19 nt, Artificial Sequence
  Description of Artificial Sequence: Synthetic oligonucleotide
  Antisense strand to SEQ ID NO: 2434782
aaaggucucaguagauugc

SEQ ID NO: 2434784 - RNA, 19 nt, Artificial Sequence
  Description of Artificial Sequence: Synthetic oligonucleotide
  Sense strand starting at position 3122 of SEQ ID NO: 1886907
ugagaccuuucuuauguca

SEQ ID NO: 2434785 - RNA, 19 nt, Artificial Sequence
  Description of Artificial Sequence: Synthetic oligonucleotide
  Antisense strand to SEQ ID NO: 2434784
ugacauaagaaaggucuca

SEQ ID NO: 2434786 - RNA, 19 nt, Artificial Sequence
  Description of Artificial Sequence: Synthetic oligonucleotide
  Sense strand starting at position 3159 of SEQ ID NO: 1886907
cugcuacuguaagaggaau

SEQ ID NO: 2434787 - RNA, 19 nt, Artificial Sequence
  Description of Artificial Sequence: Synthetic oligonucleotide
  Antisense strand to SEQ ID NO: 2434786
auuccucuuacaguagcag

SEQ ID NO: 2434788 - RNA, 19 nt, Artificial Sequence
  Description of Artificial Sequence: Synthetic oligonucleotide
  Sense strand starting at position 3199 of SEQ ID NO: 1886907
guuaucaccugaucaaaug

SEQ ID NO: 2434789 - RNA, 19 nt, Artificial Sequence
  Description of Artificial Sequence: Synthetic oligonucleotide
  Antisense strand to SEQ ID NO: 2434788
cauuugaucaggugauaac

SEQ ID NO: 2434790 - RNA, 19 nt, Artificial Sequence
  Description of Artificial Sequence: Synthetic oligonucleotide
  Sense strand starting at position 3216 of SEQ ID NO: 1886907
ugucaauuaucuggaagaa

SEQ ID NO: 2434791 - RNA, 19 nt, Artificial Sequence
  Description of Artificial Sequence: Synthetic oligonucleotide
  Antisense strand to SEQ ID NO: 2434790
uucuuccagauaauugaca

SEQ ID NO: 2434792 - RNA, 19 nt, Artificial Sequence
  Description of Artificial Sequence: Synthetic oligonucleotide
  Sense strand starting at position 3228 of SEQ ID NO: 1886907
ggaagaauauugcuuuguu

SEQ ID NO: 2434793 - RNA, 19 nt, Artificial Sequence
  Description of Artificial Sequence: Synthetic oligonucleotide
  Antisense strand to SEQ ID NO: 2434792
aacaaagcaauauucuucc

SEQ ID NO: 2434794 - RNA, 19 nt, Artificial Sequence
  Description of Artificial Sequence: Synthetic oligonucleotide
  Sense strand starting at position 3229 of SEQ ID NO: 1886907
gaagaauauugcuuuguuc

SEQ ID NO: 2434795 - RNA, 19 nt, Artificial Sequence
  Description of Artificial Sequence: Synthetic oligonucleotide
  Antisense strand to SEQ ID NO: 2434794
gaacaaagcaauauucuuc

SEQ ID NO: 2434796 - RNA, 19 nt, Artificial Sequence
  Description of Artificial Sequence: Synthetic oligonucleotide
  Sense strand starting at position 3293 of SEQ ID NO: 1886907
cuuagcauuugcugaauua

SEQ ID NO: 2434797 - RNA, 19 nt, Artificial Sequence
  Description of Artificial Sequence: Synthetic oligonucleotide
  Antisense strand to SEQ ID NO: 2434796
uaauucagcaaaugcuaag

SEQ ID NO: 2434798 - RNA, 19 nt, Artificial Sequence
  Description of Artificial Sequence: Synthetic oligonucleotide
  Sense strand starting at position 3389 of SEQ ID NO: 1886907
gggaccacgucuuuacuuu

SEQ ID NO: 2434799 - RNA, 19 nt, Artificial Sequence
  Description of Artificial Sequence: Synthetic oligonucleotide
  Antisense strand to SEQ ID NO: 2434798
aaaguaaagacgugguccc

SEQ ID NO: 2434800 - RNA, 19 nt, Artificial Sequence
  Description of Artificial Sequence: Synthetic oligonucleotide
  Sense strand starting at position 3390 of SEQ ID NO: 1886907
ggaccacgucuuuacuuua

SEQ ID NO: 2434801 - RNA, 19 nt, Artificial Sequence
  Description of Artificial Sequence: Synthetic oligonucleotide
  Antisense strand to SEQ ID NO: 2434800
uaaaguaaagacguggucc

SEQ ID NO: 2434802 - RNA, 19 nt, Artificial Sequence
  Description of Artificial Sequence: Synthetic oligonucleotide
  Sense strand starting at position 3393 of SEQ ID NO: 1886907
ccacgucuuuacuuuaaag

SEQ ID NO: 2434803 - RNA, 19 nt, Artificial Sequence
  Description of Artificial Sequence: Synthetic oligonucleotide
  Antisense strand to SEQ ID NO: 2434802
cuuuaaaguaaagacgugg

SEQ ID NO: 2434804 - RNA, 19 nt, Artificial Sequence
  Description of Artificial Sequence: Synthetic oligonucleotide
  Sense strand starting at position 3395 of SEQ ID NO: 1886907
acgucuuuacuuuaaagga

SEQ ID NO: 2434805 - RNA, 19 nt, Artificial Sequence
  Description of Artificial Sequence: Synthetic oligonucleotide
  Antisense strand to SEQ ID NO: 2434804
uccuuuaaaguaaagacgu

SEQ ID NO: 2434806 - RNA, 19 nt, Artificial Sequence
  Description of Artificial Sequence: Synthetic oligonucleotide
  Sense strand starting at position 3794 of SEQ ID NO: 1886907
uguaguuuguaagucauuu

SEQ ID NO: 2434807 - RNA, 19 nt, Artificial Sequence
  Description of Artificial Sequence: Synthetic oligonucleotide
  Antisense strand to SEQ ID NO: 2434806
aaaugacuuacaaacuaca

SEQ ID NO: 2434808 - RNA, 19 nt, Artificial Sequence
  Description of Artificial Sequence: Synthetic oligonucleotide
  Sense strand starting at position 3802 of SEQ ID NO: 1886907
guaagucauuuauagauga

SEQ ID NO: 2434809 - RNA, 19 nt, Artificial Sequence
  Description of Artificial Sequence: Synthetic oligonucleotide
  Antisense strand to SEQ ID NO: 2434808
ucaucuauaaaugacuuac

SEQ ID NO: 2434810 - RNA, 19 nt, Artificial Sequence
  Description of Artificial Sequence: Synthetic oligonucleotide
  Sense strand starting at position 3835 of SEQ ID NO: 1886907
agacucauguacucauaua

SEQ ID NO: 2434811 - RNA, 19 nt, Artificial Sequence
  Description of Artificial Sequence: Synthetic oligonucleotide
  Antisense strand to SEQ ID NO: 2434810
uauaugaguacaugagucu

SEQ ID NO: 2434812 - RNA, 19 nt, Artificial Sequence
  Description of Artificial Sequence: Synthetic oligonucleotide
  Sense strand starting at position 3890 of SEQ ID NO: 1886907
uuauacaugccagagcaau

SEQ ID NO: 2434813 - RNA, 19 nt, Artificial Sequence
  Description of Artificial Sequence: Synthetic oligonucleotide
  Antisense strand to SEQ ID NO: 2434812
auugcucuggcauguauaa

SEQ ID NO: 2434814 - RNA, 19 nt, Artificial Sequence
  Description of Artificial Sequence: Synthetic oligonucleotide
  Sense strand starting at position 3915 of SEQ ID NO: 1886907
cugcaaugcuagccugaga

SEQ ID NO: 2434815 - RNA, 19 nt, Artificial Sequence
  Description of Artificial Sequence: Synthetic oligonucleotide
  Antisense strand to SEQ ID NO: 2434814
ucucaggcuagcauugcag

SEQ ID NO: 2434816 - RNA, 19 nt, Artificial Sequence
  Description of Artificial Sequence: Synthetic oligonucleotide
  Sense strand starting at position 3965 of SEQ ID NO: 1886907
uacuguucgugccucuaaa

SEQ ID NO: 2434817 - RNA, 19 nt, Artificial Sequence
  Description of Artificial Sequence: Synthetic oligonucleotide
  Antisense strand to SEQ ID NO: 2434816
uuuagaggcacgaacagua

SEQ ID NO: 2434818 - RNA, 19 nt, Artificial Sequence
  Description of Artificial Sequence: Synthetic oligonucleotide
  Sense strand starting at position 202 of SEQ ID NO: 1886909
ucagcuccuuggucugaga

SEQ ID NO: 2434819 - RNA, 19 nt, Artificial Sequence
  Description of Artificial Sequence: Synthetic oligonucleotide
  Antisense strand to SEQ ID NO: 2434818
ucucagaccaaggagcuga

SEQ ID NO: 2434820 - RNA, 19 nt, Artificial Sequence
  Description of Artificial Sequence: Synthetic oligonucleotide
  Sense strand starting at position 204 of SEQ ID NO: 1886909
agcuccuuggucugagaca

SEQ ID NO: 2434821 - RNA, 19 nt, Artificial Sequence
  Description of Artificial Sequence: Synthetic oligonucleotide
  Antisense strand to SEQ ID NO: 2434820
ugucucagaccaaggagcu

SEQ ID NO: 2434822 - RNA, 19 nt, Artificial Sequence
  Description of Artificial Sequence: Synthetic oligonucleotide
  Sense strand starting at position 762 of SEQ ID NO: 1886909
ggcugcagcccugaggauu

SEQ ID NO: 2434823 - RNA, 19 nt, Artificial Sequence
  Description of Artificial Sequence: Synthetic oligonucleotide
  Antisense strand to SEQ ID NO: 2434822
aauccucagggcugcagcc

SEQ ID NO: 2434824 - RNA, 19 nt, Artificial Sequence
  Description of Artificial Sequence: Synthetic oligonucleotide
  Sense strand starting at position 869 of SEQ ID NO: 1886909
ucacuugguccugaaguca

SEQ ID NO: 2434825 - RNA, 19 nt, Artificial Sequence
  Description of Artificial Sequence: Synthetic oligonucleotide
  Antisense strand to SEQ ID NO: 2434824
ugacuucaggaccaaguga

SEQ ID NO: 2434826 - RNA, 19 nt, Artificial Sequence
  Description of Artificial Sequence: Synthetic oligonucleotide
  Sense strand starting at position 999 of SEQ ID NO: 1886909
cuuacuacuugagcgugaa

SEQ ID NO: 2434827 - RNA, 19 nt, Artificial Sequence
  Description of Artificial Sequence: Synthetic oligonucleotide
  Antisense strand to SEQ ID NO: 2434826
uucacgcucaaguaguaag

SEQ ID NO: 2434828 - RNA, 19 nt, Artificial Sequence
  Description of Artificial Sequence: Synthetic oligonucleotide
  Sense strand starting at position 1000 of SEQ ID NO: 1886909
uuacuacuugagcgugaaa

SEQ ID NO: 2434829 - RNA, 19 nt, Artificial Sequence
  Description of Artificial Sequence: Synthetic oligonucleotide
  Antisense strand to SEQ ID NO: 2434828
uuucacgcucaaguaguaa

SEQ ID NO: 2434830 - RNA, 19 nt, Artificial Sequence
  Description of Artificial Sequence: Synthetic oligonucleotide
  Sense strand starting at position 1172 of SEQ ID NO: 1886909
ugaacccuugcaggaaaua

SEQ ID NO: 2434831 - RNA, 19 nt, Artificial Sequence
  Description of Artificial Sequence: Synthetic oligonucleotide
  Antisense strand to SEQ ID NO: 2434830
uauuuccugcaaggguuca

SEQ ID NO: 2434832 - RNA, 19 nt, Artificial Sequence
  Description of Artificial Sequence: Synthetic oligonucleotide
  Sense strand starting at position 1362 of SEQ ID NO: 1886909
cucagugcuccauacacca

SEQ ID NO: 2434833 - RNA, 19 nt, Artificial Sequence
  Description of Artificial Sequence: Synthetic oligonucleotide
  Antisense strand to SEQ ID NO: 2434832
ugguguauggagcacugag

SEQ ID NO: 2434834 - RNA, 19 nt, Artificial Sequence
  Description of Artificial Sequence: Synthetic oligonucleotide
  Sense strand starting at position 2149 of SEQ ID NO: 1886909
cgcugugugcuggcucaga

SEQ ID NO: 2434835 - RNA, 19 nt, Artificial Sequence
  Description of Artificial Sequence: Synthetic oligonucleotide
  Antisense strand to SEQ ID NO: 2434834
ucugagccagcacacagcg

SEQ ID NO: 2434836 - RNA, 19 nt, Artificial Sequence
  Description of Artificial Sequence: Synthetic oligonucleotide
  Sense strand starting at position 2368 of SEQ ID NO: 1886909
gugacagccuuggcugaaa

SEQ ID NO: 2434837 - RNA, 19 nt, Artificial Sequence
  Description of Artificial Sequence: Synthetic oligonucleotide
  Antisense strand to SEQ ID NO: 2434836
uuucagccaaggcugucac

SEQ ID NO: 2434838 - RNA, 19 nt, Artificial Sequence
  Description of Artificial Sequence: Synthetic oligonucleotide
  Sense strand starting at position 2370 of SEQ ID NO: 1886909
gacagccuuggcugaaaga

SEQ ID NO: 2434839 - RNA, 19 nt, Artificial Sequence
  Description of Artificial Sequence: Synthetic oligonucleotide
  Antisense strand to SEQ ID NO: 2434838
ucuuucagccaaggcuguc

SEQ ID NO: 2434840 - RNA, 19 nt, Artificial Sequence
  Description of Artificial Sequence: Synthetic oligonucleotide
  Sense strand starting at position 2572 of SEQ ID NO: 1886909
agucccuucugguucuaaa

SEQ ID NO: 2434841 - RNA, 19 nt, Artificial Sequence
  Description of Artificial Sequence: Synthetic oligonucleotide
  Antisense strand to SEQ ID NO: 2434840
uuuagaaccagaagggacu

SEQ ID NO: 2434842 - RNA, 19 nt, Artificial Sequence
  Description of Artificial Sequence: Synthetic oligonucleotide
  Sense strand starting at position 2653 of SEQ ID NO: 1886909
ccgggaucuccagaagugu

SEQ ID NO: 2434843 - RNA, 19 nt, Artificial Sequence
  Description of Artificial Sequence: Synthetic oligonucleotide
  Antisense strand to SEQ ID NO: 2434842
acacuucuggagaucccgg

SEQ ID NO: 2434844 - RNA, 19 nt, Artificial Sequence
  Description of Artificial Sequence: Synthetic oligonucleotide
  Sense strand starting at position 2662 of SEQ ID NO: 1886909
ccagaagugugugcaccau

SEQ ID NO: 2434845 - RNA, 19 nt, Artificial Sequence
  Description of Artificial Sequence: Synthetic oligonucleotide
  Antisense strand to SEQ ID NO: 2434844
auggugcacacacuucugg

SEQ ID NO: 2434846 - RNA, 19 nt, Artificial Sequence
  Description of Artificial Sequence: Synthetic oligonucleotide
  Sense strand starting at position 2666 of SEQ ID NO: 1886909
aagugugugcaccauacaa

SEQ ID NO: 2434847 - RNA, 19 nt, Artificial Sequence
  Description of Artificial Sequence: Synthetic oligonucleotide
  Antisense strand to SEQ ID NO: 2434846
uuguauggugcacacacuu

SEQ ID NO: 2434848 - RNA, 19 nt, Artificial Sequence
  Description of Artificial Sequence: Synthetic oligonucleotide
  Sense strand starting at position 3303 of SEQ ID NO: 1886909
guguguuguacgguucugu

SEQ ID NO: 2434849 - RNA, 19 nt, Artificial Sequence
  Description of Artificial Sequence: Synthetic oligonucleotide
  Antisense strand to SEQ ID NO: 2434848
acagaaccguacaacacac

SEQ ID NO: 2434850 - RNA, 19 nt, Artificial Sequence
  Description of Artificial Sequence: Synthetic oligonucleotide
  Sense strand starting at position 3305 of SEQ ID NO: 1886909
guguuguacgguucuguga

SEQ ID NO: 2434851 - RNA, 19 nt, Artificial Sequence
  Description of Artificial Sequence: Synthetic oligonucleotide
  Antisense strand to SEQ ID NO: 2434850
ucacagaaccguacaacac

SEQ ID NO: 2434852 - RNA, 19 nt, Artificial Sequence
  Description of Artificial Sequence: Synthetic oligonucleotide
  Sense strand starting at position 3338 of SEQ ID NO: 1886909
ggcguuauuccugccacca

SEQ ID NO: 2434853 - RNA, 19 nt, Artificial Sequence
  Description of Artificial Sequence: Synthetic oligonucleotide
  Antisense strand to SEQ ID NO: 2434852
ugguggcaggaauaacgcc

SEQ ID NO: 2434854 - RNA, 19 nt, Artificial Sequence
  Description of Artificial Sequence: Synthetic oligonucleotide
  Sense strand starting at position 3339 of SEQ ID NO: 1886909
gcguuauuccugccaccag

SEQ ID NO: 2434855 - RNA, 19 nt, Artificial Sequence
  Description of Artificial Sequence: Synthetic oligonucleotide
  Antisense strand to SEQ ID NO: 2434854
cugguggcaggaauaacgc

SEQ ID NO: 2434856 - RNA, 19 nt, Artificial Sequence
  Description of Artificial Sequence: Synthetic oligonucleotide
  Sense strand starting at position 3340 of SEQ ID NO: 1886909
cguuauuccugccaccagu

SEQ ID NO: 2434857 - RNA, 19 nt, Artificial Sequence
  Description of Artificial Sequence: Synthetic oligonucleotide
  Antisense strand to SEQ ID NO: 2434856
acugguggcaggaauaacg

SEQ ID NO: 2434858 - RNA, 19 nt, Artificial Sequence
  Description of Artificial Sequence: Synthetic oligonucleotide
  Sense strand starting at position 3444 of SEQ ID NO: 1886909
gccuguucuccuugccuaa

SEQ ID NO: 2434859 - RNA, 19 nt, Artificial Sequence
  Description of Artificial Sequence: Synthetic oligonucleotide
  Antisense strand to SEQ ID NO: 2434858
uuaggcaaggagaacaggc

SEQ ID NO: 2434860 - RNA, 19 nt, Artificial Sequence
  Description of Artificial Sequence: Synthetic oligonucleotide
  Sense strand starting at position 3457 of SEQ ID NO: 1886909
gccuaagccuguucuguca

SEQ ID NO: 2434861 - RNA, 19 nt, Artificial Sequence
  Description of Artificial Sequence: Synthetic oligonucleotide
  Antisense strand to SEQ ID NO: 2434860
ugacagaacaggcuuaggc

SEQ ID NO: 2434862 - RNA, 19 nt, Artificial Sequence
  Description of Artificial Sequence: Synthetic oligonucleotide
  Sense strand starting at position 3912 of SEQ ID NO: 1886909
gcaauuccuugucucagca

SEQ ID NO: 2434863 - RNA, 19 nt, Artificial Sequence
  Description of Artificial Sequence: Synthetic oligonucleotide
  Antisense strand to SEQ ID NO: 2434862
ugcugagacaaggaauugc

SEQ ID NO: 2434864 - RNA, 19 nt, Artificial Sequence
  Description of Artificial Sequence: Synthetic oligonucleotide
  Sense strand starting at position 3963 of SEQ ID NO: 1886909
uggucacucugggaucaga

SEQ ID NO: 2434865 - RNA, 19 nt, Artificial Sequence
  Description of Artificial Sequence: Synthetic oligonucleotide
  Antisense strand to SEQ ID NO: 2434864
ucugaucccagagugacca

SEQ ID NO: 2434866 - RNA, 19 nt, Artificial Sequence
  Description of Artificial Sequence: Synthetic oligonucleotide
  Sense strand starting at position 198 of SEQ ID NO: 1886910
ucagcuccuuggucugaga

SEQ ID NO: 2434867 - RNA, 19 nt, Artificial Sequence
  Description of Artificial Sequence: Synthetic oligonucleotide
  Antisense strand to SEQ ID NO: 2434866
ucucagaccaaggagcuga

SEQ ID NO: 2434868 - RNA, 19 nt, Artificial Sequence
  Description of Artificial Sequence: Synthetic oligonucleotide
  Sense strand starting at position 205 of SEQ ID NO: 1886910
cuuggucugagacgggaaa

SEQ ID NO: 2434869 - RNA, 19 nt, Artificial Sequence
  Description of Artificial Sequence: Synthetic oligonucleotide
  Antisense strand to SEQ ID NO: 2434868
uuucccgucucagaccaag

SEQ ID NO: 2434870 - RNA, 19 nt, Artificial Sequence
  Description of Artificial Sequence: Synthetic oligonucleotide
  Sense strand starting at position 1426 of SEQ ID NO: 1886910
ugcagucuuugaucucacu

SEQ ID NO: 2434871 - RNA, 19 nt, Artificial Sequence
  Description of Artificial Sequence: Synthetic oligonucleotide
  Antisense strand to SEQ ID NO: 2434870
agugagaucaaagacugca

SEQ ID NO: 2434872 - RNA, 19 nt, Artificial Sequence
  Description of Artificial Sequence: Synthetic oligonucleotide
  Sense strand starting at position 205 of SEQ ID NO: 1886911
agcuccuuggucugagaca

SEQ ID NO: 2434873 - RNA, 19 nt, Artificial Sequence
  Description of Artificial Sequence: Synthetic oligonucleotide
  Antisense strand to SEQ ID NO: 2434872
ugucucagaccaaggagcu

SEQ ID NO: 2434874 - RNA, 19 nt, Artificial Sequence
  Description of Artificial Sequence: Synthetic oligonucleotide
  Sense strand starting at position 1992 of SEQ ID NO: 1886912
cguucauuuccugggcaga

SEQ ID NO: 2434875 - RNA, 19 nt, Artificial Sequence
  Description of Artificial Sequence: Synthetic oligonucleotide
  Antisense strand to SEQ ID NO: 2434874
ucugcccaggaaaugaacg

SEQ ID NO: 2434876 - RNA, 19 nt, Artificial Sequence
  Description of Artificial Sequence: Synthetic oligonucleotide
  Sense strand starting at position 2063 of SEQ ID NO: 1886912
gccuucucucccugggaga

SEQ ID NO: 2434877 - RNA, 19 nt, Artificial Sequence
  Description of Artificial Sequence: Synthetic oligonucleotide
  Antisense strand to SEQ ID NO: 2434876
ucucccagggagagaaggc

SEQ ID NO: 2434878 - RNA, 19 nt, Artificial Sequence
  Description of Artificial Sequence: Synthetic oligonucleotide
  Sense strand starting at position 2151 of SEQ ID NO: 1886912
ggagauggauguugucauu

SEQ ID NO: 2434879 - RNA, 19 nt, Artificial Sequence
  Description of Artificial Sequence: Synthetic oligonucleotide
  Antisense strand to SEQ ID NO: 2434878
aaugacaacauccaucucc

SEQ ID NO: 2434880 - RNA, 19 nt, Artificial Sequence
  Description of Artificial Sequence: Synthetic oligonucleotide
  Sense strand starting at position 2154 of SEQ ID NO: 1886912
gauggauguugucauuacu

SEQ ID NO: 2434881 - RNA, 19 nt, Artificial Sequence
  Description of Artificial Sequence: Synthetic oligonucleotide
  Antisense strand to SEQ ID NO: 2434880
aguaaugacaacauccauc

SEQ ID NO: 2434882 - RNA, 19 nt, Artificial Sequence
  Description of Artificial Sequence: Synthetic oligonucleotide
  Sense strand starting at position 2157 of SEQ ID NO: 1886912
ggauguugucauuacucaa

SEQ ID NO: 2434883 - RNA, 19 nt, Artificial Sequence
  Description of Artificial Sequence: Synthetic oligonucleotide
  Antisense strand to SEQ ID NO: 2434882
uugaguaaugacaacaucc

SEQ ID NO: 2434884 - RNA, 19 nt, Artificial Sequence
  Description of Artificial Sequence: Synthetic oligonucleotide
  Sense strand starting at position 2160 of SEQ ID NO: 1886912
uguugucauuacucaaaca

SEQ ID NO: 2434885 - RNA, 19 nt, Artificial Sequence
  Description of Artificial Sequence: Synthetic oligonucleotide
  Antisense strand to SEQ ID NO: 2434884
uguuugaguaaugacaaca

SEQ ID NO: 2434886 - RNA, 19 nt, Artificial Sequence
  Description of Artificial Sequence: Synthetic oligonucleotide
  Sense strand starting at position 2426 of SEQ ID NO: 1886912
agcaaauguuaaucugcua

SEQ ID NO: 2434887 - RNA, 19 nt, Artificial Sequence
  Description of Artificial Sequence: Synthetic oligonucleotide
  Antisense strand to SEQ ID NO: 2434886
uagcagauuaacauuugcu

SEQ ID NO: 2434888 - RNA, 19 nt, Artificial Sequence
  Description of Artificial Sequence: Synthetic oligonucleotide
  Sense strand starting at position 2429 of SEQ ID NO: 1886912
aaauguuaaucugcuagag

SEQ ID NO: 2434889 - RNA, 19 nt, Artificial Sequence
  Description of Artificial Sequence: Synthetic oligonucleotide
  Antisense strand to SEQ ID NO: 2434888
cucuagcagauuaacauuu

SEQ ID NO: 2434890 - RNA, 19 nt, Artificial Sequence
  Description of Artificial Sequence: Synthetic oligonucleotide
  Sense strand starting at position 2431 of SEQ ID NO: 1886912
auguuaaucugcuagagga

SEQ ID NO: 2434891 - RNA, 19 nt, Artificial Sequence
  Description of Artificial Sequence: Synthetic oligonucleotide
  Antisense strand to SEQ ID NO: 2434890
uccucuagcagauuaacau

SEQ ID NO: 2434892 - RNA, 19 nt, Artificial Sequence
  Description of Artificial Sequence: Synthetic oligonucleotide
  Sense strand starting at position 2500 of SEQ ID NO: 1886912
uccugcuucucagggagua

SEQ ID NO: 2434893 - RNA, 19 nt, Artificial Sequence
  Description of Artificial Sequence: Synthetic oligonucleotide
  Antisense strand to SEQ ID NO: 2434892
uacucccugagaagcagga

SEQ ID NO: 2434894 - RNA, 19 nt, Artificial Sequence
  Description of Artificial Sequence: Synthetic oligonucleotide
  Sense strand starting at position 2615 of SEQ ID NO: 1886912
ucucuauccuuggguugga

SEQ ID NO: 2434895 - RNA, 19 nt, Artificial Sequence
  Description of Artificial Sequence: Synthetic oligonucleotide
  Antisense strand to SEQ ID NO: 2434894
uccaacccaaggauagaga

SEQ ID NO: 2434896 - RNA, 19 nt, Artificial Sequence
  Description of Artificial Sequence: Synthetic oligonucleotide
  Sense strand starting at position 2815 of SEQ ID NO: 1886912
uuuguaucaguugagauaa

SEQ ID NO: 2434897 - RNA, 19 nt, Artificial Sequence
  Description of Artificial Sequence: Synthetic oligonucleotide
  Antisense strand to SEQ ID NO: 2434896
uuaucucaacugauacaaa

SEQ ID NO: 2434898 - RNA, 19 nt, Artificial Sequence
  Description of Artificial Sequence: Synthetic oligonucleotide
  Sense strand starting at position 2817 of SEQ ID NO: 1886912
uguaucaguugagauaaug

SEQ ID NO: 2434899 - RNA, 19 nt, Artificial Sequence
  Description of Artificial Sequence: Synthetic oligonucleotide
  Antisense strand to SEQ ID NO: 2434898
cauuaucucaacugauaca

SEQ ID NO: 2434900 - RNA, 19 nt, Artificial Sequence
  Description of Artificial Sequence: Synthetic oligonucleotide
  Sense strand starting at position 2826 of SEQ ID NO: 1886912
ugagauaauggcugugagu

SEQ ID NO: 2434901 - RNA, 19 nt, Artificial Sequence
  Description of Artificial Sequence: Synthetic oligonucleotide
  Antisense strand to SEQ ID NO: 2434900
acucacagccauuaucuca

SEQ ID NO: 2434902 - RNA, 19 nt, Artificial Sequence
  Description of Artificial Sequence: Synthetic oligonucleotide
  Sense strand starting at position 2828 of SEQ ID NO: 1886912
agauaauggcugugaguca

SEQ ID NO: 2434903 - RNA, 19 nt, Artificial Sequence
  Description of Artificial Sequence: Synthetic oligonucleotide
  Antisense strand to SEQ ID NO: 2434902
ugacucacagccauuaucu

SEQ ID NO: 2434904 - RNA, 19 nt, Artificial Sequence
  Description of Artificial Sequence: Synthetic oligonucleotide
  Sense strand starting at position 2906 of SEQ ID NO: 1886912
aguaauuaguauugugugu

SEQ ID NO: 2434905 - RNA, 19 nt, Artificial Sequence
  Description of Artificial Sequence: Synthetic oligonucleotide
  Antisense strand to SEQ ID NO: 2434904
acacacaauacuaauuacu

SEQ ID NO: 2434906 - RNA, 19 nt, Artificial Sequence
  Description of Artificial Sequence: Synthetic oligonucleotide
  Sense strand starting at position 2908 of SEQ ID NO: 1886912
uaauuaguauuguguguuc

SEQ ID NO: 2434907 - RNA, 19 nt, Artificial Sequence
  Description of Artificial Sequence: Synthetic oligonucleotide
  Antisense strand to SEQ ID NO: 2434906
gaacacacaauacuaauua

SEQ ID NO: 2434908 - RNA, 19 nt, Artificial Sequence
  Description of Artificial Sequence: Synthetic oligonucleotide
  Sense strand starting at position 2910 of SEQ ID NO: 1886912
auuaguauuguguguucuu

SEQ ID NO: 2434909 - RNA, 19 nt, Artificial Sequence
  Description of Artificial Sequence: Synthetic oligonucleotide
  Antisense strand to SEQ ID NO: 2434908
aagaacacacaauacuaau

SEQ ID NO: 2434910 - RNA, 19 nt, Artificial Sequence
  Description of Artificial Sequence: Synthetic oligonucleotide
  Sense strand starting at position 2911 of SEQ ID NO: 1886912
uuaguauuguguguucuua

SEQ ID NO: 2434911 - RNA, 19 nt, Artificial Sequence
  Description of Artificial Sequence: Synthetic oligonucleotide
  Antisense strand to SEQ ID NO: 2434910
uaagaacacacaauacuaa

SEQ ID NO: 2434912 - RNA, 19 nt, Artificial Sequence
  Description of Artificial Sequence: Synthetic oligonucleotide
  Sense strand starting at position 2913 of SEQ ID NO: 1886912
aguauuguguguucuuaca

SEQ ID NO: 2434913 - RNA, 19 nt, Artificial Sequence
  Description of Artificial Sequence: Synthetic oligonucleotide
  Antisense strand to SEQ ID NO: 2434912
uguaagaacacacaauacu

SEQ ID NO: 2434914 - RNA, 19 nt, Artificial Sequence
  Description of Artificial Sequence: Synthetic oligonucleotide
  Sense strand starting at position 2915 of SEQ ID NO: 1886912
uauuguguguucuuacacu

SEQ ID NO: 2434915 - RNA, 19 nt, Artificial Sequence
  Description of Artificial Sequence: Synthetic oligonucleotide
  Antisense strand to SEQ ID NO: 2434914
aguguaagaacacacaaua

SEQ ID NO: 2434916 - RNA, 19 nt, Artificial Sequence
  Description of Artificial Sequence: Synthetic oligonucleotide
  Sense strand starting at position 3338 of SEQ ID NO: 1886912
ccaguaugaagcuggaauu

SEQ ID NO: 2434917 - RNA, 19 nt, Artificial Sequence
  Description of Artificial Sequence: Synthetic oligonucleotide
  Antisense strand to SEQ ID NO: 2434916
aauuccagcuucauacugg

SEQ ID NO: 2434918 - RNA, 19 nt, Artificial Sequence
  Description of Artificial Sequence: Synthetic oligonucleotide
  Sense strand starting at position 3339 of SEQ ID NO: 1886912
caguaugaagcuggaauua

SEQ ID NO: 2434919 - RNA, 19 nt, Artificial Sequence
  Description of Artificial Sequence: Synthetic oligonucleotide
  Antisense strand to SEQ ID NO: 2434918
uaauuccagcuucauacug

SEQ ID NO: 2434920 - RNA, 19 nt, Artificial Sequence
  Description of Artificial Sequence: Synthetic oligonucleotide
  Sense strand starting at position 3385 of SEQ ID NO: 1886912
agacgugggcuccaugaga

SEQ ID NO: 2434921 - RNA, 19 nt, Artificial Sequence
  Description of Artificial Sequence: Synthetic oligonucleotide
  Antisense strand to SEQ ID NO: 2434920
ucucauggagcccacgucu

SEQ ID NO: 2434922 - RNA, 19 nt, Artificial Sequence
  Description of Artificial Sequence: Synthetic oligonucleotide
  Sense strand starting at position 3502 of SEQ ID NO: 1886912
cucugacccuccugggaau

SEQ ID NO: 2434923 - RNA, 19 nt, Artificial Sequence
  Description of Artificial Sequence: Synthetic oligonucleotide
  Antisense strand to SEQ ID NO: 2434922
auucccaggagggucagag

SEQ ID NO: 2434924 - RNA, 19 nt, Artificial Sequence
  Description of Artificial Sequence: Synthetic oligonucleotide
  Sense strand starting at position 3730 of SEQ ID NO: 1886912
ggauuaccuuucugugucu

SEQ ID NO: 2434925 - RNA, 19 nt, Artificial Sequence
  Description of Artificial Sequence: Synthetic oligonucleotide
  Antisense strand to SEQ ID NO: 2434924
agacacagaaagguaaucc

SEQ ID NO: 2434926 - RNA, 19 nt, Artificial Sequence
  Description of Artificial Sequence: Synthetic oligonucleotide
  Sense strand starting at position 3820 of SEQ ID NO: 1886912
agcggugguaggugucaau

SEQ ID NO: 2434927 - RNA, 19 nt, Artificial Sequence
  Description of Artificial Sequence: Synthetic oligonucleotide
  Antisense strand to SEQ ID NO: 2434926
auugacaccuaccaccgcu

SEQ ID NO: 2434928 - RNA, 19 nt, Artificial Sequence
  Description of Artificial Sequence: Synthetic oligonucleotide
  Sense strand starting at position 3821 of SEQ ID NO: 1886912
gcggugguaggugucaauu

SEQ ID NO: 2434929 - RNA, 19 nt, Artificial Sequence
  Description of Artificial Sequence: Synthetic oligonucleotide
  Antisense strand to SEQ ID NO: 2434928
aauugacaccuaccaccgc

SEQ ID NO: 2434930 - RNA, 19 nt, Artificial Sequence
  Description of Artificial Sequence: Synthetic oligonucleotide
  Sense strand starting at position 3823 of SEQ ID NO: 1886912
ggugguaggugucaauuag

SEQ ID NO: 2434931 - RNA, 19 nt, Artificial Sequence
  Description of Artificial Sequence: Synthetic oligonucleotide
  Antisense strand to SEQ ID NO: 2434930
cuaauugacaccuaccacc

SEQ ID NO: 2434932 - RNA, 19 nt, Artificial Sequence
  Description of Artificial Sequence: Synthetic oligonucleotide
  Sense strand starting at position 3974 of SEQ ID NO: 1886912
ccauguuuaucgcagcaua

SEQ ID NO: 2434933 - RNA, 19 nt, Artificial Sequence
  Description of Artificial Sequence: Synthetic oligonucleotide
  Antisense strand to SEQ ID NO: 2434932
uaugcugcgauaaacaugg

SEQ ID NO: 2434934 - RNA, 19 nt, Artificial Sequence
  Description of Artificial Sequence: Synthetic oligonucleotide
  Sense strand starting at position 3977 of SEQ ID NO: 1886912
uguuuaucgcagcauaacu

SEQ ID NO: 2434935 - RNA, 19 nt, Artificial Sequence
  Description of Artificial Sequence: Synthetic oligonucleotide
  Antisense strand to SEQ ID NO: 2434934
aguuaugcugcgauaaaca

SEQ ID NO: 2434936 - RNA, 19 nt, Artificial Sequence
  Description of Artificial Sequence: Synthetic oligonucleotide
  Sense strand starting at position 392 of SEQ ID NO: 1886913
auaauuauguugcucagga

SEQ ID NO: 2434937 - RNA, 19 nt, Artificial Sequence
  Description of Artificial Sequence: Synthetic oligonucleotide
  Antisense strand to SEQ ID NO: 2434936
uccugagcaacauaauuau

SEQ ID NO: 2434938 - RNA, 19 nt, Artificial Sequence
  Description of Artificial Sequence: Synthetic oligonucleotide
  Sense strand starting at position 393 of SEQ ID NO: 1886913
uaauuauguugcucaggaa

SEQ ID NO: 2434939 - RNA, 19 nt, Artificial Sequence
  Description of Artificial Sequence: Synthetic oligonucleotide
  Antisense strand to SEQ ID NO: 2434938
uuccugagcaacauaauua

SEQ ID NO: 2434940 - RNA, 19 nt, Artificial Sequence
  Description of Artificial Sequence: Synthetic oligonucleotide
  Sense strand starting at position 394 of SEQ ID NO: 1886913
aauuauguugcucaggaaa

SEQ ID NO: 2434941 - RNA, 19 nt, Artificial Sequence
  Description of Artificial Sequence: Synthetic oligonucleotide
  Antisense strand to SEQ ID NO: 2434940
uuuccugagcaacauaauu

SEQ ID NO: 2434942 - RNA, 19 nt, Artificial Sequence
  Description of Artificial Sequence: Synthetic oligonucleotide
  Sense strand starting at position 397 of SEQ ID NO: 1886913
uauguugcucaggaaaggu

SEQ ID NO: 2434943 - RNA, 19 nt, Artificial Sequence
  Description of Artificial Sequence: Synthetic oligonucleotide
  Antisense strand to SEQ ID NO: 2434942
accuuuccugagcaacaua

SEQ ID NO: 2434944 - RNA, 19 nt, Artificial Sequence
  Description of Artificial Sequence: Synthetic oligonucleotide
  Sense strand starting at position 606 of SEQ ID NO: 1886913
acucuaucugguuacugua

SEQ ID NO: 2434945 - RNA, 19 nt, Artificial Sequence
  Description of Artificial Sequence: Synthetic oligonucleotide
  Antisense strand to SEQ ID NO: 2434944
uacaguaaccagauagagu

SEQ ID NO: 2434946 - RNA, 19 nt, Artificial Sequence
  Description of Artificial Sequence: Synthetic oligonucleotide
  Sense strand starting at position 618 of SEQ ID NO: 1886913
uacuguauggcauggaaga

SEQ ID NO: 2434947 - RNA, 19 nt, Artificial Sequence
  Description of Artificial Sequence: Synthetic oligonucleotide
  Antisense strand to SEQ ID NO: 2434946
ucuuccaugccauacagua

SEQ ID NO: 2434948 - RNA, 19 nt, Artificial Sequence
  Description of Artificial Sequence: Synthetic oligonucleotide
  Sense strand starting at position 619 of SEQ ID NO: 1886913
acuguauggcauggaagaa

SEQ ID NO: 2434949 - RNA, 19 nt, Artificial Sequence
  Description of Artificial Sequence: Synthetic oligonucleotide
  Antisense strand to SEQ ID NO: 2434948
uucuuccaugccauacagu

SEQ ID NO: 2434950 - RNA, 19 nt, Artificial Sequence
  Description of Artificial Sequence: Synthetic oligonucleotide
  Sense strand starting at position 717 of SEQ ID NO: 1886913
uggcuaagacccgaaauua

SEQ ID NO: 2434951 - RNA, 19 nt, Artificial Sequence
  Description of Artificial Sequence: Synthetic oligonucleotide
  Antisense strand to SEQ ID NO: 2434950
uaauuucgggucuuagcca

SEQ ID NO: 2434952 - RNA, 19 nt, Artificial Sequence
  Description of Artificial Sequence: Synthetic oligonucleotide
  Sense strand starting at position 725 of SEQ ID NO: 1886913
acccgaaauuaagcaauga

SEQ ID NO: 2434953 - RNA, 19 nt, Artificial Sequence
  Description of Artificial Sequence: Synthetic oligonucleotide
  Antisense strand to SEQ ID NO: 2434952
ucauugcuuaauuucgggu

SEQ ID NO: 2434954 - RNA, 19 nt, Artificial Sequence
  Description of Artificial Sequence: Synthetic oligonucleotide
  Sense strand starting at position 801 of SEQ ID NO: 1886913
cuucgucauguugaucaaa

SEQ ID NO: 2434955 - RNA, 19 nt, Artificial Sequence
  Description of Artificial Sequence: Synthetic oligonucleotide
  Antisense strand to SEQ ID NO: 2434954
uuugaucaacaugacgaag

SEQ ID NO: 2434956 - RNA, 19 nt, Artificial Sequence
  Description of Artificial Sequence: Synthetic oligonucleotide
  Sense strand starting at position 1353 of SEQ ID NO: 1886913
ggaaucuaggcccaguaau

SEQ ID NO: 2434957 - RNA, 19 nt, Artificial Sequence
  Description of Artificial Sequence: Synthetic oligonucleotide
  Antisense strand to SEQ ID NO: 2434956
auuacugggccuagauucc

SEQ ID NO: 2434958 - RNA, 19 nt, Artificial Sequence
  Description of Artificial Sequence: Synthetic oligonucleotide
  Sense strand starting at position 1430 of SEQ ID NO: 1886913
ggacaccaauugucuuaga

SEQ ID NO: 2434959 - RNA, 19 nt, Artificial Sequence
  Description of Artificial Sequence: Synthetic oligonucleotide
  Antisense strand to SEQ ID NO: 2434958
ucuaagacaauuggugucc

SEQ ID NO: 2434960 - RNA, 19 nt, Artificial Sequence
  Description of Artificial Sequence: Synthetic oligonucleotide
  Sense strand starting at position 1441 of SEQ ID NO: 1886913
gucuuagacugacuacauu

SEQ ID NO: 2434961 - RNA, 19 nt, Artificial Sequence
  Description of Artificial Sequence: Synthetic oligonucleotide
  Antisense strand to SEQ ID NO: 2434960
aauguagucagucuaagac

SEQ ID NO: 2434962 - RNA, 19 nt, Artificial Sequence
  Description of Artificial Sequence: Synthetic oligonucleotide
  Sense strand starting at position 1991 of SEQ ID NO: 1886913
ggccuuaacuggccuagaa

SEQ ID NO: 2434963 - RNA, 19 nt, Artificial Sequence
  Description of Artificial Sequence: Synthetic oligonucleotide
  Antisense strand to SEQ ID NO: 2434962
uucuaggccaguuaaggcc

SEQ ID NO: 2434964 - RNA, 19 nt, Artificial Sequence
  Description of Artificial Sequence: Synthetic oligonucleotide
  Sense strand starting at position 2060 of SEQ ID NO: 1886913
gcgguuggucuuagugcua

SEQ ID NO: 2434965 - RNA, 19 nt, Artificial Sequence
  Description of Artificial Sequence: Synthetic oligonucleotide
  Antisense strand to SEQ ID NO: 2434964
uagcacuaagaccaaccgc

SEQ ID NO: 2434966 - RNA, 19 nt, Artificial Sequence
  Description of Artificial Sequence: Synthetic oligonucleotide
  Sense strand starting at position 2463 of SEQ ID NO: 1886913
ucaagaugaucugccuaga

SEQ ID NO: 2434967 - RNA, 19 nt, Artificial Sequence
  Description of Artificial Sequence: Synthetic oligonucleotide
  Antisense strand to SEQ ID NO: 2434966
ucuaggcagaucaucuuga

SEQ ID NO: 2434968 - RNA, 19 nt, Artificial Sequence
  Description of Artificial Sequence: Synthetic oligonucleotide
  Sense strand starting at position 2506 of SEQ ID NO: 1886913
uguauuugaucauaagcaa

SEQ ID NO: 2434969 - RNA, 19 nt, Artificial Sequence
  Description of Artificial Sequence: Synthetic oligonucleotide
  Antisense strand to SEQ ID NO: 2434968
uugcuuaugaucaaauaca

SEQ ID NO: 2434970 - RNA, 19 nt, Artificial Sequence
  Description of Artificial Sequence: Synthetic oligonucleotide
  Sense strand starting at position 2561 of SEQ ID NO: 1886913
aacaaaugauaguugcaga

SEQ ID NO: 2434971 - RNA, 19 nt, Artificial Sequence
  Description of Artificial Sequence: Synthetic oligonucleotide
  Antisense strand to SEQ ID NO: 2434970
ucugcaacuaucauuuguu

SEQ ID NO: 2434972 - RNA, 19 nt, Artificial Sequence
  Description of Artificial Sequence: Synthetic oligonucleotide
  Sense strand starting at position 2566 of SEQ ID NO: 1886913
augauaguugcagacaacu

SEQ ID NO: 2434973 - RNA, 19 nt, Artificial Sequence
  Description of Artificial Sequence: Synthetic oligonucleotide
  Antisense strand to SEQ ID NO: 2434972
aguugucugcaacuaucau

SEQ ID NO: 2434974 - RNA, 19 nt, Artificial Sequence
  Description of Artificial Sequence: Synthetic oligonucleotide
  Sense strand starting at position 2781 of SEQ ID NO: 1886913
augaauucaguguguggaa

SEQ ID NO: 2434975 - RNA, 19 nt, Artificial Sequence
  Description of Artificial Sequence: Synthetic oligonucleotide
  Antisense strand to SEQ ID NO: 2434974
uuccacacacugaauucau

SEQ ID NO: 2434976 - RNA, 19 nt, Artificial Sequence
  Description of Artificial Sequence: Synthetic oligonucleotide
  Sense strand starting at position 2782 of SEQ ID NO: 1886913
ugaauucaguguguggaau

SEQ ID NO: 2434977 - RNA, 19 nt, Artificial Sequence
  Description of Artificial Sequence: Synthetic oligonucleotide
  Antisense strand to SEQ ID NO: 2434976
auuccacacacugaauuca

SEQ ID NO: 2434978 - RNA, 19 nt, Artificial Sequence
  Description of Artificial Sequence: Synthetic oligonucleotide
  Sense strand starting at position 2793 of SEQ ID NO: 1886913
uguggaaugauacgauaac

SEQ ID NO: 2434979 - RNA, 19 nt, Artificial Sequence
  Description of Artificial Sequence: Synthetic oligonucleotide
  Antisense strand to SEQ ID NO: 2434978
guuaucguaucauuccaca

SEQ ID NO: 2434980 - RNA, 19 nt, Artificial Sequence
  Description of Artificial Sequence: Synthetic oligonucleotide
  Sense strand starting at position 2800 of SEQ ID NO: 1886913
ugauacgauaaccggaaua

SEQ ID NO: 2434981 - RNA, 19 nt, Artificial Sequence
  Description of Artificial Sequence: Synthetic oligonucleotide
  Antisense strand to SEQ ID NO: 2434980
uauuccgguuaucguauca

SEQ ID NO: 2434982 - RNA, 19 nt, Artificial Sequence
  Description of Artificial Sequence: Synthetic oligonucleotide
  Sense strand starting at position 2867 of SEQ ID NO: 1886913
ugaggaauugcacauguac

SEQ ID NO: 2434983 - RNA, 19 nt, Artificial Sequence
  Description of Artificial Sequence: Synthetic oligonucleotide
  Antisense strand to SEQ ID NO: 2434982
guacaugugcaauuccuca

SEQ ID NO: 2434984 - RNA, 19 nt, Artificial Sequence
  Description of Artificial Sequence: Synthetic oligonucleotide
  Sense strand starting at position 2971 of SEQ ID NO: 1886913
gaguauuccuuugugaauu

SEQ ID NO: 2434985 - RNA, 19 nt, Artificial Sequence
  Description of Artificial Sequence: Synthetic oligonucleotide
  Antisense strand to SEQ ID NO: 2434984
aauucacaaaggaauacuc

SEQ ID NO: 2434986 - RNA, 19 nt, Artificial Sequence
  Description of Artificial Sequence: Synthetic oligonucleotide
  Sense strand starting at position 2979 of SEQ ID NO: 1886913
cuuugugaauuccuggaug

SEQ ID NO: 2434987 - RNA, 19 nt, Artificial Sequence
  Description of Artificial Sequence: Synthetic oligonucleotide
  Antisense strand to SEQ ID NO: 2434986
cauccaggaauucacaaag

SEQ ID NO: 2434988 - RNA, 19 nt, Artificial Sequence
  Description of Artificial Sequence: Synthetic oligonucleotide
  Sense strand starting at position 3027 of SEQ ID NO: 1886913
gaaauugcugaauggguga

SEQ ID NO: 2434989 - RNA, 19 nt, Artificial Sequence
  Description of Artificial Sequence: Synthetic oligonucleotide
  Antisense strand to SEQ ID NO: 2434988
ucacccauucagcaauuuc

SEQ ID NO: 2434990 - RNA, 19 nt, Artificial Sequence
  Description of Artificial Sequence: Synthetic oligonucleotide
  Sense strand starting at position 3032 of SEQ ID NO: 1886913
ugcugaaugggugagcauu

SEQ ID NO: 2434991 - RNA, 19 nt, Artificial Sequence
  Description of Artificial Sequence: Synthetic oligonucleotide
  Antisense strand to SEQ ID NO: 2434990
aaugcucacccauucagca

SEQ ID NO: 2434992 - RNA, 19 nt, Artificial Sequence
  Description of Artificial Sequence: Synthetic oligonucleotide
  Sense strand starting at position 3129 of SEQ ID NO: 1886913
ggaacucuagcauguaauu

SEQ ID NO: 2434993 - RNA, 19 nt, Artificial Sequence
  Description of Artificial Sequence: Synthetic oligonucleotide
  Antisense strand to SEQ ID NO: 2434992
aauuacaugcuagaguucc

SEQ ID NO: 2434994 - RNA, 19 nt, Artificial Sequence
  Description of Artificial Sequence: Synthetic oligonucleotide
  Sense strand starting at position 3138 of SEQ ID NO: 1886913
gcauguaauuugccacauu

SEQ ID NO: 2434995 - RNA, 19 nt, Artificial Sequence
  Description of Artificial Sequence: Synthetic oligonucleotide
  Antisense strand to SEQ ID NO: 2434994
aauguggcaaauuacaugc

SEQ ID NO: 2434996 - RNA, 19 nt, Artificial Sequence
  Description of Artificial Sequence: Synthetic oligonucleotide
  Sense strand starting at position 3166 of SEQ ID NO: 1886913
auguuaaguuucucucacu

SEQ ID NO: 2434997 - RNA, 19 nt, Artificial Sequence
  Description of Artificial Sequence: Synthetic oligonucleotide
  Antisense strand to SEQ ID NO: 2434996
agugagagaaacuuaacau

SEQ ID NO: 2434998 - RNA, 19 nt, Artificial Sequence
  Description of Artificial Sequence: Synthetic oligonucleotide
  Sense strand starting at position 3167 of SEQ ID NO: 1886913
uguuaaguuucucucacua

SEQ ID NO: 2434999 - RNA, 19 nt, Artificial Sequence
  Description of Artificial Sequence: Synthetic oligonucleotide
  Antisense strand to SEQ ID NO: 2434998
uagugagagaaacuuaaca

SEQ ID NO: 2435000 - RNA, 19 nt, Artificial Sequence
  Description of Artificial Sequence: Synthetic oligonucleotide
  Sense strand starting at position 3188 of SEQ ID NO: 1886913
cucugaaguccucgaggac

SEQ ID NO: 2435001 - RNA, 19 nt, Artificial Sequence
  Description of Artificial Sequence: Synthetic oligonucleotide
  Antisense strand to SEQ ID NO: 2435000
guccucgaggacuucagag

SEQ ID NO: 2435002 - RNA, 19 nt, Artificial Sequence
  Description of Artificial Sequence: Synthetic oligonucleotide
  Sense strand starting at position 3189 of SEQ ID NO: 1886913
ucugaaguccucgaggaca

SEQ ID NO: 2435003 - RNA, 19 nt, Artificial Sequence
  Description of Artificial Sequence: Synthetic oligonucleotide
  Antisense strand to SEQ ID NO: 2435002
uguccucgaggacuucaga

SEQ ID NO: 2435004 - RNA, 19 nt, Artificial Sequence
  Description of Artificial Sequence: Synthetic oligonucleotide
  Sense strand starting at position 3268 of SEQ ID NO: 1886913
ggaacaauuaggugcuaac

SEQ ID NO: 2435005 - RNA, 19 nt, Artificial Sequence
  Description of Artificial Sequence: Synthetic oligonucleotide
  Antisense strand to SEQ ID NO: 2435004
guuagcaccuaauuguucc

SEQ ID NO: 2435006 - RNA, 19 nt, Artificial Sequence
  Description of Artificial Sequence: Synthetic oligonucleotide
  Sense strand starting at position 3588 of SEQ ID NO: 1886913
ggcaaagucuauccaaaug

SEQ ID NO: 2435007 - RNA, 19 nt, Artificial Sequence
  Description of Artificial Sequence: Synthetic oligonucleotide
  Antisense strand to SEQ ID NO: 2435006
cauuuggauagacuuugcc

SEQ ID NO: 2435008 - RNA, 19 nt, Artificial Sequence
  Description of Artificial Sequence: Synthetic oligonucleotide
  Sense strand starting at position 3706 of SEQ ID NO: 1886913
aaggacuuaugaguaguua

SEQ ID NO: 2435009 - RNA, 19 nt, Artificial Sequence
  Description of Artificial Sequence: Synthetic oligonucleotide
  Antisense strand to SEQ ID NO: 2435008
uaacuacucauaaguccuu

SEQ ID NO: 2435010 - RNA, 19 nt, Artificial Sequence
  Description of Artificial Sequence: Synthetic oligonucleotide
  Sense strand starting at position 3789 of SEQ ID NO: 1886913
uccugaaagucugucuuaa

SEQ ID NO: 2435011 - RNA, 19 nt, Artificial Sequence
  Description of Artificial Sequence: Synthetic oligonucleotide
  Antisense strand to SEQ ID NO: 2435010
uuaagacagacuuucagga

SEQ ID NO: 2435012 - RNA, 19 nt, Artificial Sequence
  Description of Artificial Sequence: Synthetic oligonucleotide
  Sense strand starting at position 3791 of SEQ ID NO: 1886913
cugaaagucugucuuaaau

SEQ ID NO: 2435013 - RNA, 19 nt, Artificial Sequence
  Description of Artificial Sequence: Synthetic oligonucleotide
  Antisense strand to SEQ ID NO: 2435012
auuuaagacagacuuucag

SEQ ID NO: 2435014 - RNA, 19 nt, Artificial Sequence
  Description of Artificial Sequence: Synthetic oligonucleotide
  Sense strand starting at position 3956 of SEQ ID NO: 1886913
cugagauuagcucaaaccu

SEQ ID NO: 2435015 - RNA, 19 nt, Artificial Sequence
  Description of Artificial Sequence: Synthetic oligonucleotide
  Antisense strand to SEQ ID NO: 2435014
agguuugagcuaaucucag

SEQ ID NO: 2435016 - RNA, 19 nt, Artificial Sequence
  Description of Artificial Sequence: Synthetic oligonucleotide
  Sense strand starting at position 170 of SEQ ID NO: 1886914
ccagcaucgccugagaagu

SEQ ID NO: 2435017 - RNA, 19 nt, Artificial Sequence
  Description of Artificial Sequence: Synthetic oligonucleotide
  Antisense strand to SEQ ID NO: 2435016
acuucucaggcgaugcugg

SEQ ID NO: 2435018 - RNA, 19 nt, Artificial Sequence
  Description of Artificial Sequence: Synthetic oligonucleotide
  Sense strand starting at position 224 of SEQ ID NO: 1886914
guggaauccugcuuccucu

SEQ ID NO: 2435019 - RNA, 19 nt, Artificial Sequence
  Description of Artificial Sequence: Synthetic oligonucleotide
  Antisense strand to SEQ ID NO: 2435018
agaggaagcaggauuccac

SEQ ID NO: 2435020 - RNA, 19 nt, Artificial Sequence
  Description of Artificial Sequence: Synthetic oligonucleotide
  Sense strand starting at position 489 of SEQ ID NO: 1886914
ucugacugguuuccaggaa

SEQ ID NO: 2435021 - RNA, 19 nt, Artificial Sequence
  Description of Artificial Sequence: Synthetic oligonucleotide
  Antisense strand to SEQ ID NO: 2435020
uuccuggaaaccagucaga

SEQ ID NO: 2435022 - RNA, 19 nt, Artificial Sequence
  Description of Artificial Sequence: Synthetic oligonucleotide
  Sense strand starting at position 493 of SEQ ID NO: 1886914
acugguuuccaggaacugu

SEQ ID NO: 2435023 - RNA, 19 nt, Artificial Sequence
  Description of Artificial Sequence: Synthetic oligonucleotide
  Antisense strand to SEQ ID NO: 2435022
acaguuccuggaaaccagu

SEQ ID NO: 2435024 - RNA, 19 nt, Artificial Sequence
  Description of Artificial Sequence: Synthetic oligonucleotide
  Sense strand starting at position 619 of SEQ ID NO: 1886914
gacugaaugccucggauga

SEQ ID NO: 2435025 - RNA, 19 nt, Artificial Sequence
  Description of Artificial Sequence: Synthetic oligonucleotide
  Antisense strand to SEQ ID NO: 2435024
ucauccgaggcauucaguc

SEQ ID NO: 2435026 - RNA, 19 nt, Artificial Sequence
  Description of Artificial Sequence: Synthetic oligonucleotide
  Sense strand starting at position 777 of SEQ ID NO: 1886914
ugaagacuccugugagagg

SEQ ID NO: 2435027 - RNA, 19 nt, Artificial Sequence
  Description of Artificial Sequence: Synthetic oligonucleotide
  Antisense strand to SEQ ID NO: 2435026
ccucucacaggagucuuca

SEQ ID NO: 2435028 - RNA, 19 nt, Artificial Sequence
  Description of Artificial Sequence: Synthetic oligonucleotide
  Sense strand starting at position 778 of SEQ ID NO: 1886914
gaagacuccugugagagga

SEQ ID NO: 2435029 - RNA, 19 nt, Artificial Sequence
  Description of Artificial Sequence: Synthetic oligonucleotide
  Antisense strand to SEQ ID NO: 2435028
uccucucacaggagucuuc

SEQ ID NO: 2435030 - RNA, 19 nt, Artificial Sequence
  Description of Artificial Sequence: Synthetic oligonucleotide
  Sense strand starting at position 895 of SEQ ID NO: 1886914
ccgcuuccuuggccugaga

SEQ ID NO: 2435031 - RNA, 19 nt, Artificial Sequence
  Description of Artificial Sequence: Synthetic oligonucleotide
  Antisense strand to SEQ ID NO: 2435030
ucucaggccaaggaagcgg

SEQ ID NO: 2435032 - RNA, 19 nt, Artificial Sequence
  Description of Artificial Sequence: Synthetic oligonucleotide
  Sense strand starting at position 897 of SEQ ID NO: 1886914
gcuuccuuggccugagaga

SEQ ID NO: 2435033 - RNA, 19 nt, Artificial Sequence
  Description of Artificial Sequence: Synthetic oligonucleotide
  Antisense strand to SEQ ID NO: 2435032
ucucucaggccaaggaagc

SEQ ID NO: 2435034 - RNA, 19 nt, Artificial Sequence
  Description of Artificial Sequence: Synthetic oligonucleotide
  Sense strand starting at position 898 of SEQ ID NO: 1886914
cuuccuuggccugagagau

SEQ ID NO: 2435035 - RNA, 19 nt, Artificial Sequence
  Description of Artificial Sequence: Synthetic oligonucleotide
  Antisense strand to SEQ ID NO: 2435034
aucucucaggccaaggaag

SEQ ID NO: 2435036 - RNA, 19 nt, Artificial Sequence
  Description of Artificial Sequence: Synthetic oligonucleotide
  Sense strand starting at position 1153 of SEQ ID NO: 1886914
gcugguuucucccuguuga

SEQ ID NO: 2435037 - RNA, 19 nt, Artificial Sequence
  Description of Artificial Sequence: Synthetic oligonucleotide
  Antisense strand to SEQ ID NO: 2435036
ucaacagggagaaaccagc

SEQ ID NO: 2435038 - RNA, 19 nt, Artificial Sequence
  Description of Artificial Sequence: Synthetic oligonucleotide
  Sense strand starting at position 1154 of SEQ ID NO: 1886914
cugguuucucccuguugau

SEQ ID NO: 2435039 - RNA, 19 nt, Artificial Sequence
  Description of Artificial Sequence: Synthetic oligonucleotide
  Antisense strand to SEQ ID NO: 2435038
aucaacagggagaaaccag

SEQ ID NO: 2435040 - RNA, 19 nt, Artificial Sequence
  Description of Artificial Sequence: Synthetic oligonucleotide
  Sense strand starting at position 1256 of SEQ ID NO: 1886914
cugugucucuucccuuaaa

SEQ ID NO: 2435041 - RNA, 19 nt, Artificial Sequence
  Description of Artificial Sequence: Synthetic oligonucleotide
  Antisense strand to SEQ ID NO: 2435040
uuuaagggaagagacacag

SEQ ID NO: 2435042 - RNA, 19 nt, Artificial Sequence
  Description of Artificial Sequence: Synthetic oligonucleotide
  Sense strand starting at position 1337 of SEQ ID NO: 1886914
ggagcucuuucucccugau

SEQ ID NO: 2435043 - RNA, 19 nt, Artificial Sequence
  Description of Artificial Sequence: Synthetic oligonucleotide
  Antisense strand to SEQ ID NO: 2435042
aucagggagaaagagcucc

SEQ ID NO: 2435044 - RNA, 19 nt, Artificial Sequence
  Description of Artificial Sequence: Synthetic oligonucleotide
  Sense strand starting at position 1340 of SEQ ID NO: 1886914
gcucuuucucccugaugug

SEQ ID NO: 2435045 - RNA, 19 nt, Artificial Sequence
  Description of Artificial Sequence: Synthetic oligonucleotide
  Antisense strand to SEQ ID NO: 2435044
cacaucagggagaaagagc

SEQ ID NO: 2435046 - RNA, 19 nt, Artificial Sequence
  Description of Artificial Sequence: Synthetic oligonucleotide
  Sense strand starting at position 1341 of SEQ ID NO: 1886914
cucuuucucccugauguga

SEQ ID NO: 2435047 - RNA, 19 nt, Artificial Sequence
  Description of Artificial Sequence: Synthetic oligonucleotide
  Antisense strand to SEQ ID NO: 2435046
ucacaucagggagaaagag

SEQ ID NO: 2435048 - RNA, 19 nt, Artificial Sequence
  Description of Artificial Sequence: Synthetic oligonucleotide
  Sense strand starting at position 1710 of SEQ ID NO: 1886914
agagcaagccaucaucuau

SEQ ID NO: 2435049 - RNA, 19 nt, Artificial Sequence
  Description of Artificial Sequence: Synthetic oligonucleotide
  Antisense strand to SEQ ID NO: 2435048
auagaugauggcuugcucu

SEQ ID NO: 2435050 - RNA, 19 nt, Artificial Sequence
  Description of Artificial Sequence: Synthetic oligonucleotide
  Sense strand starting at position 1761 of SEQ ID NO: 1886914
ggagcauuccuuugcagag

SEQ ID NO: 2435051 - RNA, 19 nt, Artificial Sequence
  Description of Artificial Sequence: Synthetic oligonucleotide
  Antisense strand to SEQ ID NO: 2435050
cucugcaaaggaaugcucc

SEQ ID NO: 2435052 - RNA, 19 nt, Artificial Sequence
  Description of Artificial Sequence: Synthetic oligonucleotide
  Sense strand starting at position 1946 of SEQ ID NO: 1886914
cugggagccuuguuauuga

SEQ ID NO: 2435053 - RNA, 19 nt, Artificial Sequence
  Description of Artificial Sequence: Synthetic oligonucleotide
  Antisense strand to SEQ ID NO: 2435052
ucaauaacaaggcucccag

SEQ ID NO: 2435054 - RNA, 19 nt, Artificial Sequence
  Description of Artificial Sequence: Synthetic oligonucleotide
  Sense strand starting at position 1951 of SEQ ID NO: 1886914
agccuuguuauugaguguu

SEQ ID NO: 2435055 - RNA, 19 nt, Artificial Sequence
  Description of Artificial Sequence: Synthetic oligonucleotide
  Antisense strand to SEQ ID NO: 2435054
aacacucaauaacaaggcu

SEQ ID NO: 2435056 - RNA, 19 nt, Artificial Sequence
  Description of Artificial Sequence: Synthetic oligonucleotide
  Sense strand starting at position 1954 of SEQ ID NO: 1886914
cuuguuauugaguguuucu

SEQ ID NO: 2435057 - RNA, 19 nt, Artificial Sequence
  Description of Artificial Sequence: Synthetic oligonucleotide
  Antisense strand to SEQ ID NO: 2435056
agaaacacucaauaacaag

SEQ ID NO: 2435058 - RNA, 19 nt, Artificial Sequence
  Description of Artificial Sequence: Synthetic oligonucleotide
  Sense strand starting at position 1957 of SEQ ID NO: 1886914
guuauugaguguuucuggu

SEQ ID NO: 2435059 - RNA, 19 nt, Artificial Sequence
  Description of Artificial Sequence: Synthetic oligonucleotide
  Antisense strand to SEQ ID NO: 2435058
accagaaacacucaauaac

SEQ ID NO: 2435060 - RNA, 19 nt, Artificial Sequence
  Description of Artificial Sequence: Synthetic oligonucleotide
  Sense strand starting at position 1964 of SEQ ID NO: 1886914
aguguuucugguugacgca

SEQ ID NO: 2435061 - RNA, 19 nt, Artificial Sequence
  Description of Artificial Sequence: Synthetic oligonucleotide
  Antisense strand to SEQ ID NO: 2435060
ugcgucaaccagaaacacu

SEQ ID NO: 2435062 - RNA, 19 nt, Artificial Sequence
  Description of Artificial Sequence: Synthetic oligonucleotide
  Sense strand starting at position 1991 of SEQ ID NO: 1886914
agcaaaguuucauggagag

SEQ ID NO: 2435063 - RNA, 19 nt, Artificial Sequence
  Description of Artificial Sequence: Synthetic oligonucleotide
  Antisense strand to SEQ ID NO: 2435062
cucuccaugaaacuuugcu

SEQ ID NO: 2435064 - RNA, 19 nt, Artificial Sequence
  Description of Artificial Sequence: Synthetic oligonucleotide
  Sense strand starting at position 2010 of SEQ ID NO: 1886914
ggaccagaguuucuaaucu

SEQ ID NO: 2435065 - RNA, 19 nt, Artificial Sequence
  Description of Artificial Sequence: Synthetic oligonucleotide
  Antisense strand to SEQ ID NO: 2435064
agauuagaaacucuggucc

SEQ ID NO: 2435066 - RNA, 19 nt, Artificial Sequence
  Description of Artificial Sequence: Synthetic oligonucleotide
  Sense strand starting at position 2039 of SEQ ID NO: 1886914
agggucaggcauuguguua

SEQ ID NO: 2435067 - RNA, 19 nt, Artificial Sequence
  Description of Artificial Sequence: Synthetic oligonucleotide
  Antisense strand to SEQ ID NO: 2435066
uaacacaaugccugacccu

SEQ ID NO: 2435068 - RNA, 19 nt, Artificial Sequence
  Description of Artificial Sequence: Synthetic oligonucleotide
  Sense strand starting at position 2046 of SEQ ID NO: 1886914
ggcauuguguuagcuauga

SEQ ID NO: 2435069 - RNA, 19 nt, Artificial Sequence
  Description of Artificial Sequence: Synthetic oligonucleotide
  Antisense strand to SEQ ID NO: 2435068
ucauagcuaacacaaugcc

SEQ ID NO: 2435070 - RNA, 19 nt, Artificial Sequence
  Description of Artificial Sequence: Synthetic oligonucleotide
  Sense strand starting at position 2050 of SEQ ID NO: 1886914
uuguguuagcuaugaucac

SEQ ID NO: 2435071 - RNA, 19 nt, Artificial Sequence
  Description of Artificial Sequence: Synthetic oligonucleotide
  Antisense strand to SEQ ID NO: 2435070
gugaucauagcuaacacaa

SEQ ID NO: 2435072 - RNA, 19 nt, Artificial Sequence
  Description of Artificial Sequence: Synthetic oligonucleotide
  Sense strand starting at position 2558 of SEQ ID NO: 1886914
ugucacaggccuuguagua

SEQ ID NO: 2435073 - RNA, 19 nt, Artificial Sequence
  Description of Artificial Sequence: Synthetic oligonucleotide
  Antisense strand to SEQ ID NO: 2435072
uacuacaaggccugugaca

SEQ ID NO: 2435074 - RNA, 19 nt, Artificial Sequence
  Description of Artificial Sequence: Synthetic oligonucleotide
  Sense strand starting at position 2567 of SEQ ID NO: 1886914
ccuuguaguaacuagugau

SEQ ID NO: 2435075 - RNA, 19 nt, Artificial Sequence
  Description of Artificial Sequence: Synthetic oligonucleotide
  Antisense strand to SEQ ID NO: 2435074
aucacuaguuacuacaagg

SEQ ID NO: 2435076 - RNA, 19 nt, Artificial Sequence
  Description of Artificial Sequence: Synthetic oligonucleotide
  Sense strand starting at position 2684 of SEQ ID NO: 1886914
caaauaugcugggugcgau

SEQ ID NO: 2435077 - RNA, 19 nt, Artificial Sequence
  Description of Artificial Sequence: Synthetic oligonucleotide
  Antisense strand to SEQ ID NO: 2435076
aucgcacccagcauauuug

SEQ ID NO: 2435078 - RNA, 19 nt, Artificial Sequence
  Description of Artificial Sequence: Synthetic oligonucleotide
  Sense strand starting at position 2910 of SEQ ID NO: 1886914
gcaguaaaccaagaucgau

SEQ ID NO: 2435079 - RNA, 19 nt, Artificial Sequence
  Description of Artificial Sequence: Synthetic oligonucleotide
  Antisense strand to SEQ ID NO: 2435078
aucgaucuugguuuacugc

SEQ ID NO: 2435080 - RNA, 19 nt, Artificial Sequence
  Description of Artificial Sequence: Synthetic oligonucleotide
  Sense strand starting at position 3094 of SEQ ID NO: 1886914
aagggaucuuaacaggaag

SEQ ID NO: 2435081 - RNA, 19 nt, Artificial Sequence
  Description of Artificial Sequence: Synthetic oligonucleotide
  Antisense strand to SEQ ID NO: 2435080
cuuccuguuaagaucccuu

SEQ ID NO: 2435082 - RNA, 19 nt, Artificial Sequence
  Description of Artificial Sequence: Synthetic oligonucleotide
  Sense strand starting at position 3118 of SEQ ID NO: 1886914
aggagucaaugcccgagaa

SEQ ID NO: 2435083 - RNA, 19 nt, Artificial Sequence
  Description of Artificial Sequence: Synthetic oligonucleotide
  Antisense strand to SEQ ID NO: 2435082
uucucgggcauugacuccu

SEQ ID NO: 2435084 - RNA, 19 nt, Artificial Sequence
  Description of Artificial Sequence: Synthetic oligonucleotide
  Sense strand starting at position 3225 of SEQ ID NO: 1886914
gaacaagucucuccuggag

SEQ ID NO: 2435085 - RNA, 19 nt, Artificial Sequence
  Description of Artificial Sequence: Synthetic oligonucleotide
  Antisense strand to SEQ ID NO: 2435084
cuccaggagagacuuguuc

SEQ ID NO: 2435086 - RNA, 19 nt, Artificial Sequence
  Description of Artificial Sequence: Synthetic oligonucleotide
  Sense strand starting at position 3287 of SEQ ID NO: 1886914
cccuaagacccauguugga

SEQ ID NO: 2435087 - RNA, 19 nt, Artificial Sequence
  Description of Artificial Sequence: Synthetic oligonucleotide
  Antisense strand to SEQ ID NO: 2435086
uccaacaugggucuuaggg

SEQ ID NO: 2435088 - RNA, 19 nt, Artificial Sequence
  Description of Artificial Sequence: Synthetic oligonucleotide
  Sense strand starting at position 3328 of SEQ ID NO: 1886914
aggauaaauguguguugcu

SEQ ID NO: 2435089 - RNA, 19 nt, Artificial Sequence
  Description of Artificial Sequence: Synthetic oligonucleotide
  Antisense strand to SEQ ID NO: 2435088
agcaacacacauuuauccu

SEQ ID NO: 2435090 - RNA, 19 nt, Artificial Sequence
  Description of Artificial Sequence: Synthetic oligonucleotide
  Sense strand starting at position 3329 of SEQ ID NO: 1886914
ggauaaauguguguugcuu

SEQ ID NO: 2435091 - RNA, 19 nt, Artificial Sequence
  Description of Artificial Sequence: Synthetic oligonucleotide
  Antisense strand to SEQ ID NO: 2435090
aagcaacacacauuuaucc

SEQ ID NO: 2435092 - RNA, 19 nt, Artificial Sequence
  Description of Artificial Sequence: Synthetic oligonucleotide
  Sense strand starting at position 3333 of SEQ ID NO: 1886914
aaauguguguugcuuuaau

SEQ ID NO: 2435093 - RNA, 19 nt, Artificial Sequence
  Description of Artificial Sequence: Synthetic oligonucleotide
  Antisense strand to SEQ ID NO: 2435092
auuaaagcaacacacauuu

SEQ ID NO: 2435094 - RNA, 19 nt, Artificial Sequence
  Description of Artificial Sequence: Synthetic oligonucleotide
  Sense strand starting at position 3447 of SEQ ID NO: 1886914
guguuagaauuauugggag

SEQ ID NO: 2435095 - RNA, 19 nt, Artificial Sequence
  Description of Artificial Sequence: Synthetic oligonucleotide
  Antisense strand to SEQ ID NO: 2435094
cucccaauaauucuaacac

SEQ ID NO: 2435096 - RNA, 19 nt, Artificial Sequence
  Description of Artificial Sequence: Synthetic oligonucleotide
  Sense strand starting at position 38 of SEQ ID NO: 1886915
uuuccucgugcccacaaua

SEQ ID NO: 2435097 - RNA, 19 nt, Artificial Sequence
  Description of Artificial Sequence: Synthetic oligonucleotide
  Antisense strand to SEQ ID NO: 2435096
uauugugggcacgaggaaa

SEQ ID NO: 2435098 - RNA, 19 nt, Artificial Sequence
  Description of Artificial Sequence: Synthetic oligonucleotide
  Sense strand starting at position 245 of SEQ ID NO: 1886915
gagauaagguguccaauaa

SEQ ID NO: 2435099 - RNA, 19 nt, Artificial Sequence
  Description of Artificial Sequence: Synthetic oligonucleotide
  Antisense strand to SEQ ID NO: 2435098
uuauuggacaccuuaucuc

SEQ ID NO: 2435100 - RNA, 19 nt, Artificial Sequence
  Description of Artificial Sequence: Synthetic oligonucleotide
  Sense strand starting at position 288 of SEQ ID NO: 1886915
ggcuccaggucaguaauga

SEQ ID NO: 2435101 - RNA, 19 nt, Artificial Sequence
  Description of Artificial Sequence: Synthetic oligonucleotide
  Antisense strand to SEQ ID NO: 2435100
ucauuacugaccuggagcc

SEQ ID NO: 2435102 - RNA, 19 nt, Artificial Sequence
  Description of Artificial Sequence: Synthetic oligonucleotide
  Sense strand starting at position 289 of SEQ ID NO: 1886915
gcuccaggucaguaaugaa

SEQ ID NO: 2435103 - RNA, 19 nt, Artificial Sequence
  Description of Artificial Sequence: Synthetic oligonucleotide
  Antisense strand to SEQ ID NO: 2435102
uucauuacugaccuggagc

SEQ ID NO: 2435104 - RNA, 19 nt, Artificial Sequence
  Description of Artificial Sequence: Synthetic oligonucleotide
  Sense strand starting at position 435 of SEQ ID NO: 1886915
uugggugguggaugaaaga

SEQ ID NO: 2435105 - RNA, 19 nt, Artificial Sequence
  Description of Artificial Sequence: Synthetic oligonucleotide
  Antisense strand to SEQ ID NO: 2435104
ucuuucauccaccacccaa

SEQ ID NO: 2435106 - RNA, 19 nt, Artificial Sequence
  Description of Artificial Sequence: Synthetic oligonucleotide
  Sense strand starting at position 569 of SEQ ID NO: 1886915
cccuaaacuguacgggaaa

SEQ ID NO: 2435107 - RNA, 19 nt, Artificial Sequence
  Description of Artificial Sequence: Synthetic oligonucleotide
  Antisense strand to SEQ ID NO: 2435106
uuucccguacaguuuaggg

SEQ ID NO: 2435108 - RNA, 19 nt, Artificial Sequence
  Description of Artificial Sequence: Synthetic oligonucleotide
  Sense strand starting at position 571 of SEQ ID NO: 1886915
cuaaacuguacgggaaaca

SEQ ID NO: 2435109 - RNA, 19 nt, Artificial Sequence
  Description of Artificial Sequence: Synthetic oligonucleotide
  Antisense strand to SEQ ID NO: 2435108
uguuucccguacaguuuag

SEQ ID NO: 2435110 - RNA, 19 nt, Artificial Sequence
  Description of Artificial Sequence: Synthetic oligonucleotide
  Sense strand starting at position 792 of SEQ ID NO: 1886915
agcucuuuguucuuccaca

SEQ ID NO: 2435111 - RNA, 19 nt, Artificial Sequence
  Description of Artificial Sequence: Synthetic oligonucleotide
  Antisense strand to SEQ ID NO: 2435110
uguggaagaacaaagagcu

SEQ ID NO: 2435112 - RNA, 19 nt, Artificial Sequence
  Description of Artificial Sequence: Synthetic oligonucleotide
  Sense strand starting at position 839 of SEQ ID NO: 1886915
ggagaucucagcuaagcac

SEQ ID NO: 2435113 - RNA, 19 nt, Artificial Sequence
  Description of Artificial Sequence: Synthetic oligonucleotide
  Antisense strand to SEQ ID NO: 2435112
gugcuuagcugagaucucc

SEQ ID NO: 2435114 - RNA, 19 nt, Artificial Sequence
  Description of Artificial Sequence: Synthetic oligonucleotide
  Sense strand starting at position 969 of SEQ ID NO: 1886915
cugcgaguccuuuaacgac

SEQ ID NO: 2435115 - RNA, 19 nt, Artificial Sequence
  Description of Artificial Sequence: Synthetic oligonucleotide
  Antisense strand to SEQ ID NO: 2435114
gucguuaaaggacucgcag

SEQ ID NO: 2435116 - RNA, 19 nt, Artificial Sequence
  Description of Artificial Sequence: Synthetic oligonucleotide
  Sense strand starting at position 1598 of SEQ ID NO: 1886915
ucaccuuauccagacaguu

SEQ ID NO: 2435117 - RNA, 19 nt, Artificial Sequence
  Description of Artificial Sequence: Synthetic oligonucleotide
  Antisense strand to SEQ ID NO: 2435116
aacugucuggauaagguga

SEQ ID NO: 2435118 - RNA, 19 nt, Artificial Sequence
  Description of Artificial Sequence: Synthetic oligonucleotide
  Sense strand starting at position 2163 of SEQ ID NO: 1886915
cuuucuacccggcaugaau

SEQ ID NO: 2435119 - RNA, 19 nt, Artificial Sequence
  Description of Artificial Sequence: Synthetic oligonucleotide
  Antisense strand to SEQ ID NO: 2435118
auucaugccggguagaaag

SEQ ID NO: 2435120 - RNA, 19 nt, Artificial Sequence
  Description of Artificial Sequence: Synthetic oligonucleotide
  Sense strand starting at position 2175 of SEQ ID NO: 1886915
caugaaucugcggaccgaa

SEQ ID NO: 2435121 - RNA, 19 nt, Artificial Sequence
  Description of Artificial Sequence: Synthetic oligonucleotide
  Antisense strand to SEQ ID NO: 2435120
uucgguccgcagauucaug

SEQ ID NO: 2435122 - RNA, 19 nt, Artificial Sequence
  Description of Artificial Sequence: Synthetic oligonucleotide
  Sense strand starting at position 2819 of SEQ ID NO: 1886915
ucagaugggucagacaguu

SEQ ID NO: 2435123 - RNA, 19 nt, Artificial Sequence
  Description of Artificial Sequence: Synthetic oligonucleotide
  Antisense strand to SEQ ID NO: 2435122
aacugucugacccaucuga

SEQ ID NO: 2435124 - RNA, 19 nt, Artificial Sequence
  Description of Artificial Sequence: Synthetic oligonucleotide
  Sense strand starting at position 2855 of SEQ ID NO: 1886915
gggacaggauguuuccaau

SEQ ID NO: 2435125 - RNA, 19 nt, Artificial Sequence
  Description of Artificial Sequence: Synthetic oligonucleotide
  Antisense strand to SEQ ID NO: 2435124
auuggaaacauccuguccc

SEQ ID NO: 2435126 - RNA, 19 nt, Artificial Sequence
  Description of Artificial Sequence: Synthetic oligonucleotide
  Sense strand starting at position 3044 of SEQ ID NO: 1886915
guuauaacccagugcaaac

SEQ ID NO: 2435127 - RNA, 19 nt, Artificial Sequence
  Description of Artificial Sequence: Synthetic oligonucleotide
  Antisense strand to SEQ ID NO: 2435126
guuugcacuggguuauaac

SEQ ID NO: 2435128 - RNA, 19 nt, Artificial Sequence
  Description of Artificial Sequence: Synthetic oligonucleotide
  Sense strand starting at position 3072 of SEQ ID NO: 1886915
cgaacacaguguuucucaa

SEQ ID NO: 2435129 - RNA, 19 nt, Artificial Sequence
  Description of Artificial Sequence: Synthetic oligonucleotide
  Antisense strand to SEQ ID NO: 2435128
uugagaaacacuguguucg

SEQ ID NO: 2435130 - RNA, 19 nt, Artificial Sequence
  Description of Artificial Sequence: Synthetic oligonucleotide
  Sense strand starting at position 3086 of SEQ ID NO: 1886915
cucaaauuugaacgugcau

SEQ ID NO: 2435131 - RNA, 19 nt, Artificial Sequence
  Description of Artificial Sequence: Synthetic oligonucleotide
  Antisense strand to SEQ ID NO: 2435130
augcacguucaaauuugag

SEQ ID NO: 2435132 - RNA, 19 nt, Artificial Sequence
  Description of Artificial Sequence: Synthetic oligonucleotide
  Sense strand starting at position 3093 of SEQ ID NO: 1886915
uugaacgugcaucagaauu

SEQ ID NO: 2435133 - RNA, 19 nt, Artificial Sequence
  Description of Artificial Sequence: Synthetic oligonucleotide
  Antisense strand to SEQ ID NO: 2435132
aauucugaugcacguucaa

SEQ ID NO: 2435134 - RNA, 19 nt, Artificial Sequence
  Description of Artificial Sequence: Synthetic oligonucleotide
  Sense strand starting at position 3320 of SEQ ID NO: 1886915
acuguugggccggaggaaa

SEQ ID NO: 2435135 - RNA, 19 nt, Artificial Sequence
  Description of Artificial Sequence: Synthetic oligonucleotide
  Antisense strand to SEQ ID NO: 2435134
uuuccuccggcccaacagu

SEQ ID NO: 2435136 - RNA, 19 nt, Artificial Sequence
  Description of Artificial Sequence: Synthetic oligonucleotide
  Sense strand starting at position 3342 of SEQ ID NO: 1886915
guaagugugacgggagaca

SEQ ID NO: 2435137 - RNA, 19 nt, Artificial Sequence
  Description of Artificial Sequence: Synthetic oligonucleotide
  Antisense strand to SEQ ID NO: 2435136
ugucucccgucacacuuac

SEQ ID NO: 2435138 - RNA, 19 nt, Artificial Sequence
  Description of Artificial Sequence: Synthetic oligonucleotide
  Sense strand starting at position 3463 of SEQ ID NO: 1886915
ccggaaugugguuguguca

SEQ ID NO: 2435139 - RNA, 19 nt, Artificial Sequence
  Description of Artificial Sequence: Synthetic oligonucleotide
  Antisense strand to SEQ ID NO: 2435138
ugacacaaccacauuccgg

SEQ ID NO: 2435140 - RNA, 19 nt, Artificial Sequence
  Description of Artificial Sequence: Synthetic oligonucleotide
  Sense strand starting at position 3522 of SEQ ID NO: 1886915
cuccuauuacugugagcug

SEQ ID NO: 2435141 - RNA, 19 nt, Artificial Sequence
  Description of Artificial Sequence: Synthetic oligonucleotide
  Antisense strand to SEQ ID NO: 2435140
cagcucacaguaauaggag

SEQ ID NO: 2435142 - RNA, 19 nt, Artificial Sequence
  Description of Artificial Sequence: Synthetic oligonucleotide
  Sense strand starting at position 3525 of SEQ ID NO: 1886915
cuauuacugugagcuguau

SEQ ID NO: 2435143 - RNA, 19 nt, Artificial Sequence
  Description of Artificial Sequence: Synthetic oligonucleotide
  Antisense strand to SEQ ID NO: 2435142
auacagcucacaguaauag

SEQ ID NO: 2435144 - RNA, 19 nt, Artificial Sequence
  Description of Artificial Sequence: Synthetic oligonucleotide
  Sense strand starting at position 3537 of SEQ ID NO: 1886915
gcuguaucucuaggcugaa

SEQ ID NO: 2435145 - RNA, 19 nt, Artificial Sequence
  Description of Artificial Sequence: Synthetic oligonucleotide
  Antisense strand to SEQ ID NO: 2435144
uucagccuagagauacagc

SEQ ID NO: 2435146 - RNA, 19 nt, Artificial Sequence
  Description of Artificial Sequence: Synthetic oligonucleotide
  Sense strand starting at position 3622 of SEQ ID NO: 1886915
uccuuuaggccuugaacuu

SEQ ID NO: 2435147 - RNA, 19 nt, Artificial Sequence
  Description of Artificial Sequence: Synthetic oligonucleotide
  Antisense strand to SEQ ID NO: 2435146
aaguucaaggccuaaagga

SEQ ID NO: 2435148 - RNA, 19 nt, Artificial Sequence
  Description of Artificial Sequence: Synthetic oligonucleotide
  Sense strand starting at position 3623 of SEQ ID NO: 1886915
ccuuuaggccuugaacuuu

SEQ ID NO: 2435149 - RNA, 19 nt, Artificial Sequence
  Description of Artificial Sequence: Synthetic oligonucleotide
  Antisense strand to SEQ ID NO: 2435148
aaaguucaaggccuaaagg

SEQ ID NO: 2435150 - RNA, 19 nt, Artificial Sequence
  Description of Artificial Sequence: Synthetic oligonucleotide
  Sense strand starting at position 3633 of SEQ ID NO: 1886915
uugaacuuuccauguauag

SEQ ID NO: 2435151 - RNA, 19 nt, Artificial Sequence
  Description of Artificial Sequence: Synthetic oligonucleotide
  Antisense strand to SEQ ID NO: 2435150
cuauacauggaaaguucaa

SEQ ID NO: 2435152 - RNA, 19 nt, Artificial Sequence
  Description of Artificial Sequence: Synthetic oligonucleotide
  Sense strand starting at position 3642 of SEQ ID NO: 1886915
ccauguauagcuuaucaag

SEQ ID NO: 2435153 - RNA, 19 nt, Artificial Sequence
  Description of Artificial Sequence: Synthetic oligonucleotide
  Antisense strand to SEQ ID NO: 2435152
cuugauaagcuauacaugg

SEQ ID NO: 2435154 - RNA, 19 nt, Artificial Sequence
  Description of Artificial Sequence: Synthetic oligonucleotide
  Sense strand starting at position 3669 of SEQ ID NO: 1886915
cugccuaugagcugaguca

SEQ ID NO: 2435155 - RNA, 19 nt, Artificial Sequence
  Description of Artificial Sequence: Synthetic oligonucleotide
  Antisense strand to SEQ ID NO: 2435154
ugacucagcucauaggcag

SEQ ID NO: 2435156 - RNA, 19 nt, Artificial Sequence
  Description of Artificial Sequence: Synthetic oligonucleotide
  Sense strand starting at position 3670 of SEQ ID NO: 1886915
ugccuaugagcugagucaa

SEQ ID NO: 2435157 - RNA, 19 nt, Artificial Sequence
  Description of Artificial Sequence: Synthetic oligonucleotide
  Antisense strand to SEQ ID NO: 2435156
uugacucagcucauaggca

SEQ ID NO: 2435158 - RNA, 19 nt, Artificial Sequence
  Description of Artificial Sequence: Synthetic oligonucleotide
  Sense strand starting at position 3744 of SEQ ID NO: 1886915
guucgaguucgcgaguaua

SEQ ID NO: 2435159 - RNA, 19 nt, Artificial Sequence
  Description of Artificial Sequence: Synthetic oligonucleotide
  Antisense strand to SEQ ID NO: 2435158
uauacucgcgaacucgaac

SEQ ID NO: 2435160 - RNA, 19 nt, Artificial Sequence
  Description of Artificial Sequence: Synthetic oligonucleotide
  Sense strand starting at position 3746 of SEQ ID NO: 1886915
ucgaguucgcgaguauaug

SEQ ID NO: 2435161 - RNA, 19 nt, Artificial Sequence
  Description of Artificial Sequence: Synthetic oligonucleotide
  Antisense strand to SEQ ID NO: 2435160
cauauacucgcgaacucga

SEQ ID NO: 2435162 - RNA, 19 nt, Artificial Sequence
  Description of Artificial Sequence: Synthetic oligonucleotide
  Sense strand starting at position 3747 of SEQ ID NO: 1886915
cgaguucgcgaguauauga

SEQ ID NO: 2435163 - RNA, 19 nt, Artificial Sequence
  Description of Artificial Sequence: Synthetic oligonucleotide
  Antisense strand to SEQ ID NO: 2435162
ucauauacucgcgaacucg

SEQ ID NO: 2435164 - RNA, 19 nt, Artificial Sequence
  Description of Artificial Sequence: Synthetic oligonucleotide
  Sense strand starting at position 3778 of SEQ ID NO: 1886915
uuggauuacuucuccuagu

SEQ ID NO: 2435165 - RNA, 19 nt, Artificial Sequence
  Description of Artificial Sequence: Synthetic oligonucleotide
  Antisense strand to SEQ ID NO: 2435164
acuaggagaaguaauccaa

SEQ ID NO: 2435166 - RNA, 19 nt, Artificial Sequence
  Description of Artificial Sequence: Synthetic oligonucleotide
  Sense strand starting at position 3779 of SEQ ID NO: 1886915
uggauuacuucuccuaguu

SEQ ID NO: 2435167 - RNA, 19 nt, Artificial Sequence
  Description of Artificial Sequence: Synthetic oligonucleotide
  Antisense strand to SEQ ID NO: 2435166
aacuaggagaaguaaucca

SEQ ID NO: 2435168 - RNA, 19 nt, Artificial Sequence
  Description of Artificial Sequence: Synthetic oligonucleotide
  Sense strand starting at position 3866 of SEQ ID NO: 1886915
acguuaaaccaaugggcau

SEQ ID NO: 2435169 - RNA, 19 nt, Artificial Sequence
  Description of Artificial Sequence: Synthetic oligonucleotide
  Antisense strand to SEQ ID NO: 2435168
augcccauugguuuaacgu

SEQ ID NO: 2435170 - RNA, 19 nt, Artificial Sequence
  Description of Artificial Sequence: Synthetic oligonucleotide
  Sense strand starting at position 3879 of SEQ ID NO: 1886915
gggcaucggagauggaaau

SEQ ID NO: 2435171 - RNA, 19 nt, Artificial Sequence
  Description of Artificial Sequence: Synthetic oligonucleotide
  Antisense strand to SEQ ID NO: 2435170
auuuccaucuccgaugccc

SEQ ID NO: 2435172 - RNA, 19 nt, Artificial Sequence
  Description of Artificial Sequence: Synthetic oligonucleotide
  Sense strand starting at position 3906 of SEQ ID NO: 1886915
gccuuuguucuccaacuga

SEQ ID NO: 2435173 - RNA, 19 nt, Artificial Sequence
  Description of Artificial Sequence: Synthetic oligonucleotide
  Antisense strand to SEQ ID NO: 2435172
ucaguuggagaacaaaggc

SEQ ID NO: 2435174 - RNA, 19 nt, Artificial Sequence
  Description of Artificial Sequence: Synthetic oligonucleotide
  Sense strand starting at position 3924 of SEQ ID NO: 1886915
agaguacuggugcgcuuau

SEQ ID NO: 2435175 - RNA, 19 nt, Artificial Sequence
  Description of Artificial Sequence: Synthetic oligonucleotide
  Antisense strand to SEQ ID NO: 2435174
auaagcgcaccaguacucu

SEQ ID NO: 2435176 - RNA, 19 nt, Artificial Sequence
  Description of Artificial Sequence: Synthetic oligonucleotide
  Sense strand starting at position 27 of SEQ ID NO: 1886916
caggcuuccucucaugagu

SEQ ID NO: 2435177 - RNA, 19 nt, Artificial Sequence
  Description of Artificial Sequence: Synthetic oligonucleotide
  Antisense strand to SEQ ID NO: 2435176
acucaugagaggaagccug

SEQ ID NO: 2435178 - RNA, 19 nt, Artificial Sequence
  Description of Artificial Sequence: Synthetic oligonucleotide
  Sense strand starting at position 29 of SEQ ID NO: 1886916
ggcuuccucucaugaguaa

SEQ ID NO: 2435179 - RNA, 19 nt, Artificial Sequence
  Description of Artificial Sequence: Synthetic oligonucleotide
  Antisense strand to SEQ ID NO: 2435178
uuacucaugagaggaagcc

SEQ ID NO: 2435180 - RNA, 19 nt, Artificial Sequence
  Description of Artificial Sequence: Synthetic oligonucleotide
  Sense strand starting at position 30 of SEQ ID NO: 1886916
gcuuccucucaugaguaag

SEQ ID NO: 2435181 - RNA, 19 nt, Artificial Sequence
  Description of Artificial Sequence: Synthetic oligonucleotide
  Antisense strand to SEQ ID NO: 2435180
cuuacucaugagaggaagc

SEQ ID NO: 2435182 - RNA, 19 nt, Artificial Sequence
  Description of Artificial Sequence: Synthetic oligonucleotide
  Sense strand starting at position 36 of SEQ ID NO: 1886916
ucucaugaguaagcugaga

SEQ ID NO: 2435183 - RNA, 19 nt, Artificial Sequence
  Description of Artificial Sequence: Synthetic oligonucleotide
  Antisense strand to SEQ ID NO: 2435182
ucucagcuuacucaugaga

SEQ ID NO: 2435184 - RNA, 19 nt, Artificial Sequence
  Description of Artificial Sequence: Synthetic oligonucleotide
  Sense strand starting at position 41 of SEQ ID NO: 1886916
ugaguaagcugagaacauc

SEQ ID NO: 2435185 - RNA, 19 nt, Artificial Sequence
  Description of Artificial Sequence: Synthetic oligonucleotide
  Antisense strand to SEQ ID NO: 2435184
gauguucucagcuuacuca

SEQ ID NO: 2435186 - RNA, 19 nt, Artificial Sequence
  Description of Artificial Sequence: Synthetic oligonucleotide
  Sense strand starting at position 77 of SEQ ID NO: 1886916
cagugcuuccuggaccaca

SEQ ID NO: 2435187 - RNA, 19 nt, Artificial Sequence
  Description of Artificial Sequence: Synthetic oligonucleotide
  Antisense strand to SEQ ID NO: 2435186
ugugguccaggaagcacug

SEQ ID NO: 2435188 - RNA, 19 nt, Artificial Sequence
  Description of Artificial Sequence: Synthetic oligonucleotide
  Sense strand starting at position 289 of SEQ ID NO: 1886916
ccaagugaggcuuaauugu

SEQ ID NO: 2435189 - RNA, 19 nt, Artificial Sequence
  Description of Artificial Sequence: Synthetic oligonucleotide
  Antisense strand to SEQ ID NO: 2435188
acaauuaagccucacuugg

SEQ ID NO: 2435190 - RNA, 19 nt, Artificial Sequence
  Description of Artificial Sequence: Synthetic oligonucleotide
  Sense strand starting at position 411 of SEQ ID NO: 1886916
cucugauguccguaggaua

SEQ ID NO: 2435191 - RNA, 19 nt, Artificial Sequence
  Description of Artificial Sequence: Synthetic oligonucleotide
  Antisense strand to SEQ ID NO: 2435190
uauccuacggacaucagag

SEQ ID NO: 2435192 - RNA, 19 nt, Artificial Sequence
  Description of Artificial Sequence: Synthetic oligonucleotide
  Sense strand starting at position 414 of SEQ ID NO: 1886916
ugauguccguaggauaauu

SEQ ID NO: 2435193 - RNA, 19 nt, Artificial Sequence
  Description of Artificial Sequence: Synthetic oligonucleotide
  Antisense strand to SEQ ID NO: 2435192
aauuauccuacggacauca

SEQ ID NO: 2435194 - RNA, 19 nt, Artificial Sequence
  Description of Artificial Sequence: Synthetic oligonucleotide
  Sense strand starting at position 443 of SEQ ID NO: 1886916
auccaaggauuagaaagua

SEQ ID NO: 2435195 - RNA, 19 nt, Artificial Sequence
  Description of Artificial Sequence: Synthetic oligonucleotide
  Antisense strand to SEQ ID NO: 2435194
uacuuucuaauccuuggau

SEQ ID NO: 2435196 - RNA, 19 nt, Artificial Sequence
  Description of Artificial Sequence: Synthetic oligonucleotide
  Sense strand starting at position 657 of SEQ ID NO: 1886916
ugaggugucauuggugaca

SEQ ID NO: 2435197 - RNA, 19 nt, Artificial Sequence
  Description of Artificial Sequence: Synthetic oligonucleotide
  Antisense strand to SEQ ID NO: 2435196
ugucaccaaugacaccuca

SEQ ID NO: 2435198 - RNA, 19 nt, Artificial Sequence
  Description of Artificial Sequence: Synthetic oligonucleotide
  Sense strand starting at position 704 of SEQ ID NO: 1886916
auucuuucucucuggaguu

SEQ ID NO: 2435199 - RNA, 19 nt, Artificial Sequence
  Description of Artificial Sequence: Synthetic oligonucleotide
  Antisense strand to SEQ ID NO: 2435198
aacuccagagagaaagaau

SEQ ID NO: 2435200 - RNA, 19 nt, Artificial Sequence
  Description of Artificial Sequence: Synthetic oligonucleotide
  Sense strand starting at position 706 of SEQ ID NO: 1886916
ucuuucucucuggaguuua

SEQ ID NO: 2435201 - RNA, 19 nt, Artificial Sequence
  Description of Artificial Sequence: Synthetic oligonucleotide
  Antisense strand to SEQ ID NO: 2435200
uaaacuccagagagaaaga

SEQ ID NO: 2435202 - RNA, 19 nt, Artificial Sequence
  Description of Artificial Sequence: Synthetic oligonucleotide
  Sense strand starting at position 953 of SEQ ID NO: 1886916
gugagauccuaugacagga

SEQ ID NO: 2435203 - RNA, 19 nt, Artificial Sequence
  Description of Artificial Sequence: Synthetic oligonucleotide
  Antisense strand to SEQ ID NO: 2435202
uccugucauaggaucucac

SEQ ID NO: 2435204 - RNA, 19 nt, Artificial Sequence
  Description of Artificial Sequence: Synthetic oligonucleotide
  Sense strand starting at position 1508 of SEQ ID NO: 1886916
cguccuuacugucccagaa

SEQ ID NO: 2435205 - RNA, 19 nt, Artificial Sequence
  Description of Artificial Sequence: Synthetic oligonucleotide
  Antisense strand to SEQ ID NO: 2435204
uucugggacaguaaggacg

SEQ ID NO: 2435206 - RNA, 19 nt, Artificial Sequence
  Description of Artificial Sequence: Synthetic oligonucleotide
  Sense strand starting at position 1609 of SEQ ID NO: 1886916
cucagucaacacugucaaa

SEQ ID NO: 2435207 - RNA, 19 nt, Artificial Sequence
  Description of Artificial Sequence: Synthetic oligonucleotide
  Antisense strand to SEQ ID NO: 2435206
uuugacaguguugacugag

SEQ ID NO: 2435208 - RNA, 19 nt, Artificial Sequence
  Description of Artificial Sequence: Synthetic oligonucleotide
  Sense strand starting at position 1627 of SEQ ID NO: 1886916
agccaugacucgugggaag

SEQ ID NO: 2435209 - RNA, 19 nt, Artificial Sequence
  Description of Artificial Sequence: Synthetic oligonucleotide
  Antisense strand to SEQ ID NO: 2435208
cuucccacgagucauggcu

SEQ ID NO: 2435210 - RNA, 19 nt, Artificial Sequence
  Description of Artificial Sequence: Synthetic oligonucleotide
  Sense strand starting at position 1629 of SEQ ID NO: 1886916
ccaugacucgugggaagga

SEQ ID NO: 2435211 - RNA, 19 nt, Artificial Sequence
  Description of Artificial Sequence: Synthetic oligonucleotide
  Antisense strand to SEQ ID NO: 2435210
uccuucccacgagucaugg

SEQ ID NO: 2435212 - RNA, 19 nt, Artificial Sequence
  Description of Artificial Sequence: Synthetic oligonucleotide
  Sense strand starting at position 1707 of SEQ ID NO: 1886916
ugauauuucugcccugcuu

SEQ ID NO: 2435213 - RNA, 19 nt, Artificial Sequence
  Description of Artificial Sequence: Synthetic oligonucleotide
  Antisense strand to SEQ ID NO: 2435212
aagcagggcagaaauauca

SEQ ID NO: 2435214 - RNA, 19 nt, Artificial Sequence
  Description of Artificial Sequence: Synthetic oligonucleotide
  Sense strand starting at position 2033 of SEQ ID NO: 1886916
gagagaaagguaugguacu

SEQ ID NO: 2435215 - RNA, 19 nt, Artificial Sequence
  Description of Artificial Sequence: Synthetic oligonucleotide
  Antisense strand to SEQ ID NO: 2435214
aguaccauaccuuucucuc

SEQ ID NO: 2435216 - RNA, 19 nt, Artificial Sequence
  Description of Artificial Sequence: Synthetic oligonucleotide
  Sense strand starting at position 2402 of SEQ ID NO: 1886916
ccgccugaacuuuaugaag

SEQ ID NO: 2435217 - RNA, 19 nt, Artificial Sequence
  Description of Artificial Sequence: Synthetic oligonucleotide
  Antisense strand to SEQ ID NO: 2435216
cuucauaaaguucaggcgg

SEQ ID NO: 2435218 - RNA, 19 nt, Artificial Sequence
  Description of Artificial Sequence: Synthetic oligonucleotide
  Sense strand starting at position 2404 of SEQ ID NO: 1886916
gccugaacuuuaugaagau

SEQ ID NO: 2435219 - RNA, 19 nt, Artificial Sequence
  Description of Artificial Sequence: Synthetic oligonucleotide
  Antisense strand to SEQ ID NO: 2435218
aucuucauaaaguucaggc

SEQ ID NO: 2435220 - RNA, 19 nt, Artificial Sequence
  Description of Artificial Sequence: Synthetic oligonucleotide
  Sense strand starting at position 2405 of SEQ ID NO: 1886916
ccugaacuuuaugaagauu

SEQ ID NO: 2435221 - RNA, 19 nt, Artificial Sequence
  Description of Artificial Sequence: Synthetic oligonucleotide
  Antisense strand to SEQ ID NO: 2435220
aaucuucauaaaguucagg

SEQ ID NO: 2435222 - RNA, 19 nt, Artificial Sequence
  Description of Artificial Sequence: Synthetic oligonucleotide
  Sense strand starting at position 2416 of SEQ ID NO: 1886916
ugaagauucucagacucuu

SEQ ID NO: 2435223 - RNA, 19 nt, Artificial Sequence
  Description of Artificial Sequence: Synthetic oligonucleotide
  Antisense strand to SEQ ID NO: 2435222
aagagucugagaaucuuca

SEQ ID NO: 2435224 - RNA, 19 nt, Artificial Sequence
  Description of Artificial Sequence: Synthetic oligonucleotide
  Sense strand starting at position 2646 of SEQ ID NO: 1886916
agagaagucuuggacauga

SEQ ID NO: 2435225 - RNA, 19 nt, Artificial Sequence
  Description of Artificial Sequence: Synthetic oligonucleotide
  Antisense strand to SEQ ID NO: 2435224
ucauguccaagacuucucu

SEQ ID NO: 2435226 - RNA, 19 nt, Artificial Sequence
  Description of Artificial Sequence: Synthetic oligonucleotide
  Sense strand starting at position 2767 of SEQ ID NO: 1886916
cagcgaugugcuggugaga

SEQ ID NO: 2435227 - RNA, 19 nt, Artificial Sequence
  Description of Artificial Sequence: Synthetic oligonucleotide
  Antisense strand to SEQ ID NO: 2435226
ucucaccagcacaucgcug

SEQ ID NO: 2435228 - RNA, 19 nt, Artificial Sequence
  Description of Artificial Sequence: Synthetic oligonucleotide
  Sense strand starting at position 2993 of SEQ ID NO: 1886916
ccauuauguuccuggauca

SEQ ID NO: 2435229 - RNA, 19 nt, Artificial Sequence
  Description of Artificial Sequence: Synthetic oligonucleotide
  Antisense strand to SEQ ID NO: 2435228
ugauccaggaacauaaugg

SEQ ID NO: 2435230 - RNA, 19 nt, Artificial Sequence
  Description of Artificial Sequence: Synthetic oligonucleotide
  Sense strand starting at position 3064 of SEQ ID NO: 1886916
aagggaaauucuuugcgau

SEQ ID NO: 2435231 - RNA, 19 nt, Artificial Sequence
  Description of Artificial Sequence: Synthetic oligonucleotide
  Antisense strand to SEQ ID NO: 2435230
aucgcaaagaauuucccuu

SEQ ID NO: 2435232 - RNA, 19 nt, Artificial Sequence
  Description of Artificial Sequence: Synthetic oligonucleotide
  Sense strand starting at position 3065 of SEQ ID NO: 1886916
agggaaauucuuugcgauc

SEQ ID NO: 2435233 - RNA, 19 nt, Artificial Sequence
  Description of Artificial Sequence: Synthetic oligonucleotide
  Antisense strand to SEQ ID NO: 2435232
gaucgcaaagaauuucccu

SEQ ID NO: 2435234 - RNA, 19 nt, Artificial Sequence
  Description of Artificial Sequence: Synthetic oligonucleotide
  Sense strand starting at position 3114 of SEQ ID NO: 1886916
gcacaucauuuguaggcaa

SEQ ID NO: 2435235 - RNA, 19 nt, Artificial Sequence
  Description of Artificial Sequence: Synthetic oligonucleotide
  Antisense strand to SEQ ID NO: 2435234
uugccuacaaaugaugugc

SEQ ID NO: 2435236 - RNA, 19 nt, Artificial Sequence
  Description of Artificial Sequence: Synthetic oligonucleotide
  Sense strand starting at position 3132 of SEQ ID NO: 1886916
aucacaaauugauugcgau

SEQ ID NO: 2435237 - RNA, 19 nt, Artificial Sequence
  Description of Artificial Sequence: Synthetic oligonucleotide
  Antisense strand to SEQ ID NO: 2435236
aucgcaaucaauuugugau

SEQ ID NO: 2435238 - RNA, 19 nt, Artificial Sequence
  Description of Artificial Sequence: Synthetic oligonucleotide
  Sense strand starting at position 3133 of SEQ ID NO: 1886916
ucacaaauugauugcgaua

SEQ ID NO: 2435239 - RNA, 19 nt, Artificial Sequence
  Description of Artificial Sequence: Synthetic oligonucleotide
  Antisense strand to SEQ ID NO: 2435238
uaucgcaaucaauuuguga

SEQ ID NO: 2435240 - RNA, 19 nt, Artificial Sequence
  Description of Artificial Sequence: Synthetic oligonucleotide
  Sense strand starting at position 3138 of SEQ ID NO: 1886916
aauugauugcgauacgcaa

SEQ ID NO: 2435241 - RNA, 19 nt, Artificial Sequence
  Description of Artificial Sequence: Synthetic oligonucleotide
  Antisense strand to SEQ ID NO: 2435240
uugcguaucgcaaucaauu

SEQ ID NO: 2435242 - RNA, 19 nt, Artificial Sequence
  Description of Artificial Sequence: Synthetic oligonucleotide
  Sense strand starting at position 3320 of SEQ ID NO: 1886916
agacccugucccuacauau

SEQ ID NO: 2435243 - RNA, 19 nt, Artificial Sequence
  Description of Artificial Sequence: Synthetic oligonucleotide
  Antisense strand to SEQ ID NO: 2435242
auauguagggacagggucu

SEQ ID NO: 2435244 - RNA, 19 nt, Artificial Sequence
  Description of Artificial Sequence: Synthetic oligonucleotide
  Sense strand starting at position 3539 of SEQ ID NO: 1886916
cuuggugaguuguaauaca

SEQ ID NO: 2435245 - RNA, 19 nt, Artificial Sequence
  Description of Artificial Sequence: Synthetic oligonucleotide
  Antisense strand to SEQ ID NO: 2435244
uguauuacaacucaccaag

SEQ ID NO: 2435246 - RNA, 19 nt, Artificial Sequence
  Description of Artificial Sequence: Synthetic oligonucleotide
  Sense strand starting at position 3729 of SEQ ID NO: 1886916
cagaguagcccucggcaau

SEQ ID NO: 2435247 - RNA, 19 nt, Artificial Sequence
  Description of Artificial Sequence: Synthetic oligonucleotide
  Antisense strand to SEQ ID NO: 2435246
auugccgagggcuacucug

SEQ ID NO: 2435248 - RNA, 19 nt, Artificial Sequence
  Description of Artificial Sequence: Synthetic oligonucleotide
  Sense strand starting at position 3730 of SEQ ID NO: 1886916
agaguagcccucggcaaua

SEQ ID NO: 2435249 - RNA, 19 nt, Artificial Sequence
  Description of Artificial Sequence: Synthetic oligonucleotide
  Antisense strand to SEQ ID NO: 2435248
uauugccgagggcuacucu

SEQ ID NO: 2435250 - RNA, 19 nt, Artificial Sequence
  Description of Artificial Sequence: Synthetic oligonucleotide
  Sense strand starting at position 3820 of SEQ ID NO: 1886916
cuugaaguguuguucaagu

SEQ ID NO: 2435251 - RNA, 19 nt, Artificial Sequence
  Description of Artificial Sequence: Synthetic oligonucleotide
  Antisense strand to SEQ ID NO: 2435250
acuugaacaacacuucaag

SEQ ID NO: 2435252 - RNA, 19 nt, Artificial Sequence
  Description of Artificial Sequence: Synthetic oligonucleotide
  Sense strand starting at position 3822 of SEQ ID NO: 1886916
ugaaguguuguucaaguca

SEQ ID NO: 2435253 - RNA, 19 nt, Artificial Sequence
  Description of Artificial Sequence: Synthetic oligonucleotide
  Antisense strand to SEQ ID NO: 2435252
ugacuugaacaacacuuca

SEQ ID NO: 2435254 - RNA, 19 nt, Artificial Sequence
  Description of Artificial Sequence: Synthetic oligonucleotide
  Sense strand starting at position 3903 of SEQ ID NO: 1886916
gagucuuugagaggcugga

SEQ ID NO: 2435255 - RNA, 19 nt, Artificial Sequence
  Description of Artificial Sequence: Synthetic oligonucleotide
  Antisense strand to SEQ ID NO: 2435254
uccagccucucaaagacuc

SEQ ID NO: 2435256 - RNA, 19 nt, Artificial Sequence
  Description of Artificial Sequence: Synthetic oligonucleotide
  Sense strand starting at position 24 of SEQ ID NO: 1886917
acguuugaacucuaaguug

SEQ ID NO: 2435257 - RNA, 19 nt, Artificial Sequence
  Description of Artificial Sequence: Synthetic oligonucleotide
  Antisense strand to SEQ ID NO: 2435256
caacuuagaguucaaacgu

SEQ ID NO: 2435258 - RNA, 19 nt, Artificial Sequence
  Description of Artificial Sequence: Synthetic oligonucleotide
  Sense strand starting at position 32 of SEQ ID NO: 1886917
acucuaaguugcuugaagu

SEQ ID NO: 2435259 - RNA, 19 nt, Artificial Sequence
  Description of Artificial Sequence: Synthetic oligonucleotide
  Antisense strand to SEQ ID NO: 2435258
acuucaagcaacuuagagu

SEQ ID NO: 2435260 - RNA, 19 nt, Artificial Sequence
  Description of Artificial Sequence: Synthetic oligonucleotide
  Sense strand starting at position 33 of SEQ ID NO: 1886917
cucuaaguugcuugaagua

SEQ ID NO: 2435261 - RNA, 19 nt, Artificial Sequence
  Description of Artificial Sequence: Synthetic oligonucleotide
  Antisense strand to SEQ ID NO: 2435260
uacuucaagcaacuuagag

SEQ ID NO: 2435262 - RNA, 19 nt, Artificial Sequence
  Description of Artificial Sequence: Synthetic oligonucleotide
  Sense strand starting at position 286 of SEQ ID NO: 1886917
cuccgaauccuugaucuga

SEQ ID NO: 2435263 - RNA, 19 nt, Artificial Sequence
  Description of Artificial Sequence: Synthetic oligonucleotide
  Antisense strand to SEQ ID NO: 2435262
ucagaucaaggauucggag

SEQ ID NO: 2435264 - RNA, 19 nt, Artificial Sequence
  Description of Artificial Sequence: Synthetic oligonucleotide
  Sense strand starting at position 288 of SEQ ID NO: 1886917
ccgaauccuugaucugaga

SEQ ID NO: 2435265 - RNA, 19 nt, Artificial Sequence
  Description of Artificial Sequence: Synthetic oligonucleotide
  Antisense strand to SEQ ID NO: 2435264
ucucagaucaaggauucgg

SEQ ID NO: 2435266 - RNA, 19 nt, Artificial Sequence
  Description of Artificial Sequence: Synthetic oligonucleotide
  Sense strand starting at position 364 of SEQ ID NO: 1886917
gauaaacgcugaccagaaa

SEQ ID NO: 2435267 - RNA, 19 nt, Artificial Sequence
  Description of Artificial Sequence: Synthetic oligonucleotide
  Antisense strand to SEQ ID NO: 2435266
uuucuggucagcguuuauc

SEQ ID NO: 2435268 - RNA, 19 nt, Artificial Sequence
  Description of Artificial Sequence: Synthetic oligonucleotide
  Sense strand starting at position 376 of SEQ ID NO: 1886917
ccagaaaccguagguguau

SEQ ID NO: 2435269 - RNA, 19 nt, Artificial Sequence
  Description of Artificial Sequence: Synthetic oligonucleotide
  Antisense strand to SEQ ID NO: 2435268
auacaccuacgguuucugg

SEQ ID NO: 2435270 - RNA, 19 nt, Artificial Sequence
  Description of Artificial Sequence: Synthetic oligonucleotide
  Sense strand starting at position 377 of SEQ ID NO: 1886917
cagaaaccguagguguauu

SEQ ID NO: 2435271 - RNA, 19 nt, Artificial Sequence
  Description of Artificial Sequence: Synthetic oligonucleotide
  Antisense strand to SEQ ID NO: 2435270
aauacaccuacgguuucug

SEQ ID NO: 2435272 - RNA, 19 nt, Artificial Sequence
  Description of Artificial Sequence: Synthetic oligonucleotide
  Sense strand starting at position 487 of SEQ ID NO: 1886917
cgaacacugucauccacaa

SEQ ID NO: 2435273 - RNA, 19 nt, Artificial Sequence
  Description of Artificial Sequence: Synthetic oligonucleotide
  Antisense strand to SEQ ID NO: 2435272
uuguggaugacaguguucg

SEQ ID NO: 2435274 - RNA, 19 nt, Artificial Sequence
  Description of Artificial Sequence: Synthetic oligonucleotide
  Sense strand starting at position 690 of SEQ ID NO: 1886917
gagcuuacuguacauugau

SEQ ID NO: 2435275 - RNA, 19 nt, Artificial Sequence
  Description of Artificial Sequence: Synthetic oligonucleotide
  Antisense strand to SEQ ID NO: 2435274
aucaauguacaguaagcuc

SEQ ID NO: 2435276 - RNA, 19 nt, Artificial Sequence
  Description of Artificial Sequence: Synthetic oligonucleotide
  Sense strand starting at position 743 of SEQ ID NO: 1886917
guaaccuauuccuugaaga

SEQ ID NO: 2435277 - RNA, 19 nt, Artificial Sequence
  Description of Artificial Sequence: Synthetic oligonucleotide
  Antisense strand to SEQ ID NO: 2435276
ucuucaaggaauagguuac

SEQ ID NO: 2435278 - RNA, 19 nt, Artificial Sequence
  Description of Artificial Sequence: Synthetic oligonucleotide
  Sense strand starting at position 759 of SEQ ID NO: 1886917
agacacucuugucucagua

SEQ ID NO: 2435279 - RNA, 19 nt, Artificial Sequence
  Description of Artificial Sequence: Synthetic oligonucleotide
  Antisense strand to SEQ ID NO: 2435278
uacugagacaagagugucu

SEQ ID NO: 2435280 - RNA, 19 nt, Artificial Sequence
  Description of Artificial Sequence: Synthetic oligonucleotide
  Sense strand starting at position 1161 of SEQ ID NO: 1886917
uuccguaaccugggaucuu

SEQ ID NO: 2435281 - RNA, 19 nt, Artificial Sequence
  Description of Artificial Sequence: Synthetic oligonucleotide
  Antisense strand to SEQ ID NO: 2435280
aagaucccagguuacggaa

SEQ ID NO: 2435282 - RNA, 19 nt, Artificial Sequence
  Description of Artificial Sequence: Synthetic oligonucleotide
  Sense strand starting at position 1223 of SEQ ID NO: 1886917
guugcagagcuuugaagag

SEQ ID NO: 2435283 - RNA, 19 nt, Artificial Sequence
  Description of Artificial Sequence: Synthetic oligonucleotide
  Antisense strand to SEQ ID NO: 2435282
cucuucaaagcucugcaac

SEQ ID NO: 2435284 - RNA, 19 nt, Artificial Sequence
  Description of Artificial Sequence: Synthetic oligonucleotide
  Sense strand starting at position 1442 of SEQ ID NO: 1886917
cacggaagagggcguuauu

SEQ ID NO: 2435285 - RNA, 19 nt, Artificial Sequence
  Description of Artificial Sequence: Synthetic oligonucleotide
  Antisense strand to SEQ ID NO: 2435284
aauaacgcccucuuccgug

SEQ ID NO: 2435286 - RNA, 19 nt, Artificial Sequence
  Description of Artificial Sequence: Synthetic oligonucleotide
  Sense strand starting at position 1445 of SEQ ID NO: 1886917
ggaagagggcguuauugag

SEQ ID NO: 2435287 - RNA, 19 nt, Artificial Sequence
  Description of Artificial Sequence: Synthetic oligonucleotide
  Antisense strand to SEQ ID NO: 2435286
cucaauaacgcccucuucc

SEQ ID NO: 2435288 - RNA, 19 nt, Artificial Sequence
  Description of Artificial Sequence: Synthetic oligonucleotide
  Sense strand starting at position 1455 of SEQ ID NO: 1886917
guuauugagcugggugacu

SEQ ID NO: 2435289 - RNA, 19 nt, Artificial Sequence
  Description of Artificial Sequence: Synthetic oligonucleotide
  Antisense strand to SEQ ID NO: 2435288
agucacccagcucaauaac

SEQ ID NO: 2435290 - RNA, 19 nt, Artificial Sequence
  Description of Artificial Sequence: Synthetic oligonucleotide
  Sense strand starting at position 1536 of SEQ ID NO: 1886917
uggcuuccggacuguaaga

SEQ ID NO: 2435291 - RNA, 19 nt, Artificial Sequence
  Description of Artificial Sequence: Synthetic oligonucleotide
  Antisense strand to SEQ ID NO: 2435290
ucuuacaguccggaagcca

SEQ ID NO: 2435292 - RNA, 19 nt, Artificial Sequence
  Description of Artificial Sequence: Synthetic oligonucleotide
  Sense strand starting at position 1745 of SEQ ID NO: 1886917
gccucugcgcucuuaaaca

SEQ ID NO: 2435293 - RNA, 19 nt, Artificial Sequence
  Description of Artificial Sequence: Synthetic oligonucleotide
  Antisense strand to SEQ ID NO: 2435292
uguuuaagagcgcagaggc

SEQ ID NO: 2435294 - RNA, 19 nt, Artificial Sequence
  Description of Artificial Sequence: Synthetic oligonucleotide
  Sense strand starting at position 1917 of SEQ ID NO: 1886917
ccuggugucaucuguggaa

SEQ ID NO: 2435295 - RNA, 19 nt, Artificial Sequence
  Description of Artificial Sequence: Synthetic oligonucleotide
  Antisense strand to SEQ ID NO: 2435294
uuccacagaugacaccagg

SEQ ID NO: 2435296 - RNA, 19 nt, Artificial Sequence
  Description of Artificial Sequence: Synthetic oligonucleotide
  Sense strand starting at position 2106 of SEQ ID NO: 1886917
ucccauuagugucccaagu

SEQ ID NO: 2435297 - RNA, 19 nt, Artificial Sequence
  Description of Artificial Sequence: Synthetic oligonucleotide
  Antisense strand to SEQ ID NO: 2435296
acuugggacacuaauggga

SEQ ID NO: 2435298 - RNA, 19 nt, Artificial Sequence
  Description of Artificial Sequence: Synthetic oligonucleotide
  Sense strand starting at position 2115 of SEQ ID NO: 1886917
ugucccaagucuuugagau

SEQ ID NO: 2435299 - RNA, 19 nt, Artificial Sequence
  Description of Artificial Sequence: Synthetic oligonucleotide
  Antisense strand to SEQ ID NO: 2435298
aucucaaagacuugggaca

SEQ ID NO: 2435300 - RNA, 19 nt, Artificial Sequence
  Description of Artificial Sequence: Synthetic oligonucleotide
  Sense strand starting at position 2116 of SEQ ID NO: 1886917
gucccaagucuuugagaug

SEQ ID NO: 2435301 - RNA, 19 nt, Artificial Sequence
  Description of Artificial Sequence: Synthetic oligonucleotide
  Antisense strand to SEQ ID NO: 2435300
caucucaaagacuugggac

SEQ ID NO: 2435302 - RNA, 19 nt, Artificial Sequence
  Description of Artificial Sequence: Synthetic oligonucleotide
  Sense strand starting at position 2122 of SEQ ID NO: 1886917
agucuuugagauggguaaa

SEQ ID NO: 2435303 - RNA, 19 nt, Artificial Sequence
  Description of Artificial Sequence: Synthetic oligonucleotide
  Antisense strand to SEQ ID NO: 2435302
uuuacccaucucaaagacu

SEQ ID NO: 2435304 - RNA, 19 nt, Artificial Sequence
  Description of Artificial Sequence: Synthetic oligonucleotide
  Sense strand starting at position 2123 of SEQ ID NO: 1886917
gucuuugagauggguaaag

SEQ ID NO: 2435305 - RNA, 19 nt, Artificial Sequence
  Description of Artificial Sequence: Synthetic oligonucleotide
  Antisense strand to SEQ ID NO: 2435304
cuuuacccaucucaaagac

SEQ ID NO: 2435306 - RNA, 19 nt, Artificial Sequence
  Description of Artificial Sequence: Synthetic oligonucleotide
  Sense strand starting at position 2140 of SEQ ID NO: 1886917
agagguucucagggcugau

SEQ ID NO: 2435307 - RNA, 19 nt, Artificial Sequence
  Description of Artificial Sequence: Synthetic oligonucleotide
  Antisense strand to SEQ ID NO: 2435306
aucagcccugagaaccucu

SEQ ID NO: 2435308 - RNA, 19 nt, Artificial Sequence
  Description of Artificial Sequence: Synthetic oligonucleotide
  Sense strand starting at position 2288 of SEQ ID NO: 1886917
aggccuaaauccuuuauga

SEQ ID NO: 2435309 - RNA, 19 nt, Artificial Sequence
  Description of Artificial Sequence: Synthetic oligonucleotide
  Antisense strand to SEQ ID NO: 2435308
ucauaaaggauuuaggccu

SEQ ID NO: 2435310 - RNA, 19 nt, Artificial Sequence
  Description of Artificial Sequence: Synthetic oligonucleotide
  Sense strand starting at position 2310 of SEQ ID NO: 1886917
uuaugaaagcuaugucccu

SEQ ID NO: 2435311 - RNA, 19 nt, Artificial Sequence
  Description of Artificial Sequence: Synthetic oligonucleotide
  Antisense strand to SEQ ID NO: 2435310
agggacauagcuuucauaa

SEQ ID NO: 2435312 - RNA, 19 nt, Artificial Sequence
  Description of Artificial Sequence: Synthetic oligonucleotide
  Sense strand starting at position 2662 of SEQ ID NO: 1886917
guauacaauccagggaguu

SEQ ID NO: 2435313 - RNA, 19 nt, Artificial Sequence
  Description of Artificial Sequence: Synthetic oligonucleotide
  Antisense strand to SEQ ID NO: 2435312
aacucccuggauuguauac

SEQ ID NO: 2435314 - RNA, 19 nt, Artificial Sequence
  Description of Artificial Sequence: Synthetic oligonucleotide
  Sense strand starting at position 2775 of SEQ ID NO: 1886917
agcugaucauucguuuauu

SEQ ID NO: 2435315 - RNA, 19 nt, Artificial Sequence
  Description of Artificial Sequence: Synthetic oligonucleotide
  Antisense strand to SEQ ID NO: 2435314
aauaaacgaaugaucagcu

SEQ ID NO: 2435316 - RNA, 19 nt, Artificial Sequence
  Description of Artificial Sequence: Synthetic oligonucleotide
  Sense strand starting at position 2776 of SEQ ID NO: 1886917
gcugaucauucguuuauuu

SEQ ID NO: 2435317 - RNA, 19 nt, Artificial Sequence
  Description of Artificial Sequence: Synthetic oligonucleotide
  Antisense strand to SEQ ID NO: 2435316
aaauaaacgaaugaucagc

SEQ ID NO: 2435318 - RNA, 19 nt, Artificial Sequence
  Description of Artificial Sequence: Synthetic oligonucleotide
  Sense strand starting at position 2853 of SEQ ID NO: 1886917
gcgaucucggcugacaaca

SEQ ID NO: 2435319 - RNA, 19 nt, Artificial Sequence
  Description of Artificial Sequence: Synthetic oligonucleotide
  Antisense strand to SEQ ID NO: 2435318
uguugucagccgagaucgc

SEQ ID NO: 2435320 - RNA, 19 nt, Artificial Sequence
  Description of Artificial Sequence: Synthetic oligonucleotide
  Sense strand starting at position 3387 of SEQ ID NO: 1886917
agagcuuucugccuaucuu

SEQ ID NO: 2435321 - RNA, 19 nt, Artificial Sequence
  Description of Artificial Sequence: Synthetic oligonucleotide
  Antisense strand to SEQ ID NO: 2435320
aagauaggcagaaagcucu

SEQ ID NO: 2435322 - RNA, 19 nt, Artificial Sequence
  Description of Artificial Sequence: Synthetic oligonucleotide
  Sense strand starting at position 3398 of SEQ ID NO: 1886917
ccuaucuuccaaggagguu

SEQ ID NO: 2435323 - RNA, 19 nt, Artificial Sequence
  Description of Artificial Sequence: Synthetic oligonucleotide
  Antisense strand to SEQ ID NO: 2435322
aaccuccuuggaagauagg

SEQ ID NO: 2435324 - RNA, 19 nt, Artificial Sequence
  Description of Artificial Sequence: Synthetic oligonucleotide
  Sense strand starting at position 3423 of SEQ ID NO: 1886917
cugccaagagcucacagau

SEQ ID NO: 2435325 - RNA, 19 nt, Artificial Sequence
  Description of Artificial Sequence: Synthetic oligonucleotide
  Antisense strand to SEQ ID NO: 2435324
aucugugagcucuuggcag

SEQ ID NO: 2435326 - RNA, 19 nt, Artificial Sequence
  Description of Artificial Sequence: Synthetic oligonucleotide
  Sense strand starting at position 3549 of SEQ ID NO: 1886917
gaaugaugcuuucuuggac

SEQ ID NO: 2435327 - RNA, 19 nt, Artificial Sequence
  Description of Artificial Sequence: Synthetic oligonucleotide
  Antisense strand to SEQ ID NO: 2435326
guccaagaaagcaucauuc

SEQ ID NO: 2435328 - RNA, 19 nt, Artificial Sequence
  Description of Artificial Sequence: Synthetic oligonucleotide
  Sense strand starting at position 3691 of SEQ ID NO: 1886917
gguaacugcaagugaaaga

SEQ ID NO: 2435329 - RNA, 19 nt, Artificial Sequence
  Description of Artificial Sequence: Synthetic oligonucleotide
  Antisense strand to SEQ ID NO: 2435328
ucuuucacuugcaguuacc

SEQ ID NO: 2435330 - RNA, 19 nt, Artificial Sequence
  Description of Artificial Sequence: Synthetic oligonucleotide
  Sense strand starting at position 3727 of SEQ ID NO: 1886917
ucuggaagcugugccaaau

SEQ ID NO: 2435331 - RNA, 19 nt, Artificial Sequence
  Description of Artificial Sequence: Synthetic oligonucleotide
  Antisense strand to SEQ ID NO: 2435330
auuuggcacagcuuccaga

SEQ ID NO: 2435332 - RNA, 19 nt, Artificial Sequence
  Description of Artificial Sequence: Synthetic oligonucleotide
  Sense strand starting at position 3967 of SEQ ID NO: 1886917
uguggcaucaguuaagcaa

SEQ ID NO: 2435333 - RNA, 19 nt, Artificial Sequence
  Description of Artificial Sequence: Synthetic oligonucleotide
  Antisense strand to SEQ ID NO: 2435332
uugcuuaacugaugccaca

SEQ ID NO: 2435334 - RNA, 19 nt, Artificial Sequence
  Description of Artificial Sequence: Synthetic oligonucleotide
  Sense strand starting at position 3971 of SEQ ID NO: 1886917
gcaucaguuaagcaaagga

SEQ ID NO: 2435335 - RNA, 19 nt, Artificial Sequence
  Description of Artificial Sequence: Synthetic oligonucleotide
  Antisense strand to SEQ ID NO: 2435334
uccuuugcuuaacugaugc

SEQ ID NO: 2435336 - RNA, 19 nt, Artificial Sequence
  Description of Artificial Sequence: Synthetic oligonucleotide
  Sense strand starting at position 199 of SEQ ID NO: 1886918
cauuguguaguuuagacaa

SEQ ID NO: 2435337 - RNA, 19 nt, Artificial Sequence
  Description of Artificial Sequence: Synthetic oligonucleotide
  Antisense strand to SEQ ID NO: 2435336
uugucuaaacuacacaaug

SEQ ID NO: 2435338 - RNA, 19 nt, Artificial Sequence
  Description of Artificial Sequence: Synthetic oligonucleotide
  Sense strand starting at position 340 of SEQ ID NO: 1886918
cucugaugguacuugaagu

SEQ ID NO: 2435339 - RNA, 19 nt, Artificial Sequence
  Description of Artificial Sequence: Synthetic oligonucleotide
  Antisense strand to SEQ ID NO: 2435338
acuucaaguaccaucagag

SEQ ID NO: 2435340 - RNA, 19 nt, Artificial Sequence
  Description of Artificial Sequence: Synthetic oligonucleotide
  Sense strand starting at position 346 of SEQ ID NO: 1886918
ugguacuugaagugacaga

SEQ ID NO: 2435341 - RNA, 19 nt, Artificial Sequence
  Description of Artificial Sequence: Synthetic oligonucleotide
  Antisense strand to SEQ ID NO: 2435340
ucugucacuucaaguacca

SEQ ID NO: 2435342 - RNA, 19 nt, Artificial Sequence
  Description of Artificial Sequence: Synthetic oligonucleotide
  Sense strand starting at position 797 of SEQ ID NO: 1886918
ggaauugggcacugauucu

SEQ ID NO: 2435343 - RNA, 19 nt, Artificial Sequence
  Description of Artificial Sequence: Synthetic oligonucleotide
  Antisense strand to SEQ ID NO: 2435342
agaaucagugcccaauucc

SEQ ID NO: 2435344 - RNA, 19 nt, Artificial Sequence
  Description of Artificial Sequence: Synthetic oligonucleotide
  Sense strand starting at position 1272 of SEQ ID NO: 1886918
gguuuaugcgaaugaagca

SEQ ID NO: 2435345 - RNA, 19 nt, Artificial Sequence
  Description of Artificial Sequence: Synthetic oligonucleotide
  Antisense strand to SEQ ID NO: 2435344
ugcuucauucgcauaaacc

SEQ ID NO: 2435346 - RNA, 19 nt, Artificial Sequence
  Description of Artificial Sequence: Synthetic oligonucleotide
  Sense strand starting at position 1273 of SEQ ID NO: 1886918
guuuaugcgaaugaagcaa

SEQ ID NO: 2435347 - RNA, 19 nt, Artificial Sequence
  Description of Artificial Sequence: Synthetic oligonucleotide
  Antisense strand to SEQ ID NO: 2435346
uugcuucauucgcauaaac

SEQ ID NO: 2435348 - RNA, 19 nt, Artificial Sequence
  Description of Artificial Sequence: Synthetic oligonucleotide
  Sense strand starting at position 1318 of SEQ ID NO: 1886918
gaacuugguccagaaaugc

SEQ ID NO: 2435349 - RNA, 19 nt, Artificial Sequence
  Description of Artificial Sequence: Synthetic oligonucleotide
  Antisense strand to SEQ ID NO: 2435348
gcauuucuggaccaaguuc

SEQ ID NO: 2435350 - RNA, 19 nt, Artificial Sequence
  Description of Artificial Sequence: Synthetic oligonucleotide
  Sense strand starting at position 1328 of SEQ ID NO: 1886918
cagaaaugccuguggagcu

SEQ ID NO: 2435351 - RNA, 19 nt, Artificial Sequence
  Description of Artificial Sequence: Synthetic oligonucleotide
  Antisense strand to SEQ ID NO: 2435350
agcuccacaggcauuucug

SEQ ID NO: 2435352 - RNA, 19 nt, Artificial Sequence
  Description of Artificial Sequence: Synthetic oligonucleotide
  Sense strand starting at position 1404 of SEQ ID NO: 1886918
ggccgaggucuucagucua

SEQ ID NO: 2435353 - RNA, 19 nt, Artificial Sequence
  Description of Artificial Sequence: Synthetic oligonucleotide
  Antisense strand to SEQ ID NO: 2435352
uagacugaagaccucggcc

SEQ ID NO: 2435354 - RNA, 19 nt, Artificial Sequence
  Description of Artificial Sequence: Synthetic oligonucleotide
  Sense strand starting at position 1459 of SEQ ID NO: 1886918
aggcauuccugucccaagu

SEQ ID NO: 2435355 - RNA, 19 nt, Artificial Sequence
  Description of Artificial Sequence: Synthetic oligonucleotide
  Antisense strand to SEQ ID NO: 2435354
acuugggacaggaaugccu

SEQ ID NO: 2435356 - RNA, 19 nt, Artificial Sequence
  Description of Artificial Sequence: Synthetic oligonucleotide
  Sense strand starting at position 1499 of SEQ ID NO: 1886918
guuugucuuaugcaagagu

SEQ ID NO: 2435357 - RNA, 19 nt, Artificial Sequence
  Description of Artificial Sequence: Synthetic oligonucleotide
  Antisense strand to SEQ ID NO: 2435356
acucuugcauaagacaaac

SEQ ID NO: 2435358 - RNA, 19 nt, Artificial Sequence
  Description of Artificial Sequence: Synthetic oligonucleotide
  Sense strand starting at position 1502 of SEQ ID NO: 1886918
ugucuuaugcaagaguguu

SEQ ID NO: 2435359 - RNA, 19 nt, Artificial Sequence
  Description of Artificial Sequence: Synthetic oligonucleotide
  Antisense strand to SEQ ID NO: 2435358
aacacucuugcauaagaca

SEQ ID NO: 2435360 - RNA, 19 nt, Artificial Sequence
  Description of Artificial Sequence: Synthetic oligonucleotide
  Sense strand starting at position 1508 of SEQ ID NO: 1886918
augcaagaguguuuagaua

SEQ ID NO: 2435361 - RNA, 19 nt, Artificial Sequence
  Description of Artificial Sequence: Synthetic oligonucleotide
  Antisense strand to SEQ ID NO: 2435360
uaucuaaacacucuugcau

SEQ ID NO: 2435362 - RNA, 19 nt, Artificial Sequence
  Description of Artificial Sequence: Synthetic oligonucleotide
  Sense strand starting at position 1577 of SEQ ID NO: 1886918
ucuuccugugcugaguaaa

SEQ ID NO: 2435363 - RNA, 19 nt, Artificial Sequence
  Description of Artificial Sequence: Synthetic oligonucleotide
  Antisense strand to SEQ ID NO: 2435362
uuuacucagcacaggaaga

SEQ ID NO: 2435364 - RNA, 19 nt, Artificial Sequence
  Description of Artificial Sequence: Synthetic oligonucleotide
  Sense strand starting at position 1721 of SEQ ID NO: 1886918
cuuucucuccugcacgaau

SEQ ID NO: 2435365 - RNA, 19 nt, Artificial Sequence
  Description of Artificial Sequence: Synthetic oligonucleotide
  Antisense strand to SEQ ID NO: 2435364
auucgugcaggagagaaag

SEQ ID NO: 2435366 - RNA, 19 nt, Artificial Sequence
  Description of Artificial Sequence: Synthetic oligonucleotide
  Sense strand starting at position 1737 of SEQ ID NO: 1886918
aaugaaucguuucccguga

SEQ ID NO: 2435367 - RNA, 19 nt, Artificial Sequence
  Description of Artificial Sequence: Synthetic oligonucleotide
  Antisense strand to SEQ ID NO: 2435366
ucacgggaaacgauucauu

SEQ ID NO: 2435368 - RNA, 19 nt, Artificial Sequence
  Description of Artificial Sequence: Synthetic oligonucleotide
  Sense strand starting at position 1738 of SEQ ID NO: 1886918
augaaucguuucccgugaa

SEQ ID NO: 2435369 - RNA, 19 nt, Artificial Sequence
  Description of Artificial Sequence: Synthetic oligonucleotide
  Antisense strand to SEQ ID NO: 2435368
uucacgggaaacgauucau

SEQ ID NO: 2435370 - RNA, 19 nt, Artificial Sequence
  Description of Artificial Sequence: Synthetic oligonucleotide
  Sense strand starting at position 2122 of SEQ ID NO: 1886918
agaaaccucguguaaguga

SEQ ID NO: 2435371 - RNA, 19 nt, Artificial Sequence
  Description of Artificial Sequence: Synthetic oligonucleotide
  Antisense strand to SEQ ID NO: 2435370
ucacuuacacgagguuucu

SEQ ID NO: 2435372 - RNA, 19 nt, Artificial Sequence
  Description of Artificial Sequence: Synthetic oligonucleotide
  Sense strand starting at position 2229 of SEQ ID NO: 1886918
auaauauucccucguacag

SEQ ID NO: 2435373 - RNA, 19 nt, Artificial Sequence
  Description of Artificial Sequence: Synthetic oligonucleotide
  Antisense strand to SEQ ID NO: 2435372
cuguacgagggaauauuau

SEQ ID NO: 2435374 - RNA, 19 nt, Artificial Sequence
  Description of Artificial Sequence: Synthetic oligonucleotide
  Sense strand starting at position 2379 of SEQ ID NO: 1886918
aguggccuccucugagauu

SEQ ID NO: 2435375 - RNA, 19 nt, Artificial Sequence
  Description of Artificial Sequence: Synthetic oligonucleotide
  Antisense strand to SEQ ID NO: 2435374
aaucucagaggaggccacu

SEQ ID NO: 2435376 - RNA, 19 nt, Artificial Sequence
  Description of Artificial Sequence: Synthetic oligonucleotide
  Sense strand starting at position 2416 of SEQ ID NO: 1886918
uuuaaacagcguuauugaa

SEQ ID NO: 2435377 - RNA, 19 nt, Artificial Sequence
  Description of Artificial Sequence: Synthetic oligonucleotide
  Antisense strand to SEQ ID NO: 2435376
uucaauaacgcuguuuaaa

SEQ ID NO: 2435378 - RNA, 19 nt, Artificial Sequence
  Description of Artificial Sequence: Synthetic oligonucleotide
  Sense strand starting at position 2418 of SEQ ID NO: 1886918
uaaacagcguuauugaaau

SEQ ID NO: 2435379 - RNA, 19 nt, Artificial Sequence
  Description of Artificial Sequence: Synthetic oligonucleotide
  Antisense strand to SEQ ID NO: 2435378
auuucaauaacgcuguuua

SEQ ID NO: 2435380 - RNA, 19 nt, Artificial Sequence
  Description of Artificial Sequence: Synthetic oligonucleotide
  Sense strand starting at position 2424 of SEQ ID NO: 1886918
gcguuauugaaauguaauu

SEQ ID NO: 2435381 - RNA, 19 nt, Artificial Sequence
  Description of Artificial Sequence: Synthetic oligonucleotide
  Antisense strand to SEQ ID NO: 2435380
aauuacauuucaauaacgc

SEQ ID NO: 2435382 - RNA, 19 nt, Artificial Sequence
  Description of Artificial Sequence: Synthetic oligonucleotide
  Sense strand starting at position 2769 of SEQ ID NO: 1886918
ucauacaauccguggucuu

SEQ ID NO: 2435383 - RNA, 19 nt, Artificial Sequence
  Description of Artificial Sequence: Synthetic oligonucleotide
  Antisense strand to SEQ ID NO: 2435382
aagaccacggauuguauga

SEQ ID NO: 2435384 - RNA, 19 nt, Artificial Sequence
  Description of Artificial Sequence: Synthetic oligonucleotide
  Sense strand starting at position 2770 of SEQ ID NO: 1886918
cauacaauccguggucuuu

SEQ ID NO: 2435385 - RNA, 19 nt, Artificial Sequence
  Description of Artificial Sequence: Synthetic oligonucleotide
  Antisense strand to SEQ ID NO: 2435384
aaagaccacggauuguaug

SEQ ID NO: 2435386 - RNA, 19 nt, Artificial Sequence
  Description of Artificial Sequence: Synthetic oligonucleotide
  Sense strand starting at position 2890 of SEQ ID NO: 1886918
auggauucauugguggaca

SEQ ID NO: 2435387 - RNA, 19 nt, Artificial Sequence
  Description of Artificial Sequence: Synthetic oligonucleotide
  Antisense strand to SEQ ID NO: 2435386
uguccaccaaugaauccau

SEQ ID NO: 2435388 - RNA, 19 nt, Artificial Sequence
  Description of Artificial Sequence: Synthetic oligonucleotide
  Sense strand starting at position 2892 of SEQ ID NO: 1886918
ggauucauugguggacauu

SEQ ID NO: 2435389 - RNA, 19 nt, Artificial Sequence
  Description of Artificial Sequence: Synthetic oligonucleotide
  Antisense strand to SEQ ID NO: 2435388
aauguccaccaaugaaucc

SEQ ID NO: 2435390 - RNA, 19 nt, Artificial Sequence
  Description of Artificial Sequence: Synthetic oligonucleotide
  Sense strand starting at position 2906 of SEQ ID NO: 1886918
acauuuaugucguuucuau

SEQ ID NO: 2435391 - RNA, 19 nt, Artificial Sequence
  Description of Artificial Sequence: Synthetic oligonucleotide
  Antisense strand to SEQ ID NO: 2435390
auagaaacgacauaaaugu

SEQ ID NO: 2435392 - RNA, 19 nt, Artificial Sequence
  Description of Artificial Sequence: Synthetic oligonucleotide
  Sense strand starting at position 2919 of SEQ ID NO: 1886918
uucuaucuuugggcuauua

SEQ ID NO: 2435393 - RNA, 19 nt, Artificial Sequence
  Description of Artificial Sequence: Synthetic oligonucleotide
  Antisense strand to SEQ ID NO: 2435392
uaauagcccaaagauagaa

SEQ ID NO: 2435394 - RNA, 19 nt, Artificial Sequence
  Description of Artificial Sequence: Synthetic oligonucleotide
  Sense strand starting at position 2921 of SEQ ID NO: 1886918
cuaucuuugggcuauuaca

SEQ ID NO: 2435395 - RNA, 19 nt, Artificial Sequence
  Description of Artificial Sequence: Synthetic oligonucleotide
  Antisense strand to SEQ ID NO: 2435394
uguaauagcccaaagauag

SEQ ID NO: 2435396 - RNA, 19 nt, Artificial Sequence
  Description of Artificial Sequence: Synthetic oligonucleotide
  Sense strand starting at position 3034 of SEQ ID NO: 1886918
cacgguaacucuguguaau

SEQ ID NO: 2435397 - RNA, 19 nt, Artificial Sequence
  Description of Artificial Sequence: Synthetic oligonucleotide
  Antisense strand to SEQ ID NO: 2435396
auuacacagaguuaccgug

SEQ ID NO: 2435398 - RNA, 19 nt, Artificial Sequence
  Description of Artificial Sequence: Synthetic oligonucleotide
  Sense strand starting at position 3035 of SEQ ID NO: 1886918
acgguaacucuguguaauc

SEQ ID NO: 2435399 - RNA, 19 nt, Artificial Sequence
  Description of Artificial Sequence: Synthetic oligonucleotide
  Antisense strand to SEQ ID NO: 2435398
gauuacacagaguuaccgu

SEQ ID NO: 2435400 - RNA, 19 nt, Artificial Sequence
  Description of Artificial Sequence: Synthetic oligonucleotide
  Sense strand starting at position 3037 of SEQ ID NO: 1886918
gguaacucuguguaaucgu

SEQ ID NO: 2435401 - RNA, 19 nt, Artificial Sequence
  Description of Artificial Sequence: Synthetic oligonucleotide
  Antisense strand to SEQ ID NO: 2435400
acgauuacacagaguuacc

SEQ ID NO: 2435402 - RNA, 19 nt, Artificial Sequence
  Description of Artificial Sequence: Synthetic oligonucleotide
  Sense strand starting at position 3045 of SEQ ID NO: 1886918
uguguaaucguuugaggac

SEQ ID NO: 2435403 - RNA, 19 nt, Artificial Sequence
  Description of Artificial Sequence: Synthetic oligonucleotide
  Antisense strand to SEQ ID NO: 2435402
guccucaaacgauuacaca

SEQ ID NO: 2435404 - RNA, 19 nt, Artificial Sequence
  Description of Artificial Sequence: Synthetic oligonucleotide
  Sense strand starting at position 3223 of SEQ ID NO: 1886918
acaucaucaccauggucua

SEQ ID NO: 2435405 - RNA, 19 nt, Artificial Sequence
  Description of Artificial Sequence: Synthetic oligonucleotide
  Antisense strand to SEQ ID NO: 2435404
uagaccauggugaugaugu

SEQ ID NO: 2435406 - RNA, 19 nt, Artificial Sequence
  Description of Artificial Sequence: Synthetic oligonucleotide
  Sense strand starting at position 3341 of SEQ ID NO: 1886918
cuaggaacuuucucgugaa

SEQ ID NO: 2435407 - RNA, 19 nt, Artificial Sequence
  Description of Artificial Sequence: Synthetic oligonucleotide
  Antisense strand to SEQ ID NO: 2435406
uucacgagaaaguuccuag

SEQ ID NO: 2435408 - RNA, 19 nt, Artificial Sequence
  Description of Artificial Sequence: Synthetic oligonucleotide
  Sense strand starting at position 3345 of SEQ ID NO: 1886918
gaacuuucucgugaaguca

SEQ ID NO: 2435409 - RNA, 19 nt, Artificial Sequence
  Description of Artificial Sequence: Synthetic oligonucleotide
  Antisense strand to SEQ ID NO: 2435408
ugacuucacgagaaaguuc

SEQ ID NO: 2435410 - RNA, 19 nt, Artificial Sequence
  Description of Artificial Sequence: Synthetic oligonucleotide
  Sense strand starting at position 3465 of SEQ ID NO: 1886918
agaaauggcuucucucauc

SEQ ID NO: 2435411 - RNA, 19 nt, Artificial Sequence
  Description of Artificial Sequence: Synthetic oligonucleotide
  Antisense strand to SEQ ID NO: 2435410
gaugagagaagccauuucu

SEQ ID NO: 2435412 - RNA, 19 nt, Artificial Sequence
  Description of Artificial Sequence: Synthetic oligonucleotide
  Sense strand starting at position 3746 of SEQ ID NO: 1886918
ggguuaagggcccaucuua

SEQ ID NO: 2435413 - RNA, 19 nt, Artificial Sequence
  Description of Artificial Sequence: Synthetic oligonucleotide
  Antisense strand to SEQ ID NO: 2435412
uaagaugggcccuuaaccc

SEQ ID NO: 2435414 - RNA, 19 nt, Artificial Sequence
  Description of Artificial Sequence: Synthetic oligonucleotide
  Sense strand starting at position 3754 of SEQ ID NO: 1886918
ggcccaucuuacucuagua

SEQ ID NO: 2435415 - RNA, 19 nt, Artificial Sequence
  Description of Artificial Sequence: Synthetic oligonucleotide
  Antisense strand to SEQ ID NO: 2435414
uacuagaguaagaugggcc

SEQ ID NO: 2435416 - RNA, 19 nt, Artificial Sequence
  Description of Artificial Sequence: Synthetic oligonucleotide
  Sense strand starting at position 359 of SEQ ID NO: 1886919
gagguacaguggugagauc

SEQ ID NO: 2435417 - RNA, 19 nt, Artificial Sequence
  Description of Artificial Sequence: Synthetic oligonucleotide
  Antisense strand to SEQ ID NO: 2435416
gaucucaccacuguaccuc

SEQ ID NO: 2435418 - RNA, 19 nt, Artificial Sequence
  Description of Artificial Sequence: Synthetic oligonucleotide
  Sense strand starting at position 637 of SEQ ID NO: 1886919
auggaaccauccuugacuu

SEQ ID NO: 2435419 - RNA, 19 nt, Artificial Sequence
  Description of Artificial Sequence: Synthetic oligonucleotide
  Antisense strand to SEQ ID NO: 2435418
aagucaaggaugguuccau

SEQ ID NO: 2435420 - RNA, 19 nt, Artificial Sequence
  Description of Artificial Sequence: Synthetic oligonucleotide
  Sense strand starting at position 679 of SEQ ID NO: 1886919
uccaaucuaucgggaaauu

SEQ ID NO: 2435421 - RNA, 19 nt, Artificial Sequence
  Description of Artificial Sequence: Synthetic oligonucleotide
  Antisense strand to SEQ ID NO: 2435420
aauuucccgauagauugga

SEQ ID NO: 2435422 - RNA, 19 nt, Artificial Sequence
  Description of Artificial Sequence: Synthetic oligonucleotide
  Sense strand starting at position 688 of SEQ ID NO: 1886919
ucgggaaauucuguugagu

SEQ ID NO: 2435423 - RNA, 19 nt, Artificial Sequence
  Description of Artificial Sequence: Synthetic oligonucleotide
  Antisense strand to SEQ ID NO: 2435422
acucaacagaauuucccga

SEQ ID NO: 2435424 - RNA, 19 nt, Artificial Sequence
  Description of Artificial Sequence: Synthetic oligonucleotide
  Sense strand starting at position 690 of SEQ ID NO: 1886919
gggaaauucuguugagucc

SEQ ID NO: 2435425 - RNA, 19 nt, Artificial Sequence
  Description of Artificial Sequence: Synthetic oligonucleotide
  Antisense strand to SEQ ID NO: 2435424
ggacucaacagaauuuccc

SEQ ID NO: 2435426 - RNA, 19 nt, Artificial Sequence
  Description of Artificial Sequence: Synthetic oligonucleotide
  Sense strand starting at position 691 of SEQ ID NO: 1886919
ggaaauucuguugagucca

SEQ ID NO: 2435427 - RNA, 19 nt, Artificial Sequence
  Description of Artificial Sequence: Synthetic oligonucleotide
  Antisense strand to SEQ ID NO: 2435426
uggacucaacagaauuucc

SEQ ID NO: 2435428 - RNA, 19 nt, Artificial Sequence
  Description of Artificial Sequence: Synthetic oligonucleotide
  Sense strand starting at position 789 of SEQ ID NO: 1886919
ucgucauguucuccucacu

SEQ ID NO: 2435429 - RNA, 19 nt, Artificial Sequence
  Description of Artificial Sequence: Synthetic oligonucleotide
  Antisense strand to SEQ ID NO: 2435428
agugaggagaacaugacga

SEQ ID NO: 2435430 - RNA, 19 nt, Artificial Sequence
  Description of Artificial Sequence: Synthetic oligonucleotide
  Sense strand starting at position 862 of SEQ ID NO: 1886919
augucagccucugcucaaa

SEQ ID NO: 2435431 - RNA, 19 nt, Artificial Sequence
  Description of Artificial Sequence: Synthetic oligonucleotide
  Antisense strand to SEQ ID NO: 2435430
uuugagcagaggcugacau

SEQ ID NO: 2435432 - RNA, 19 nt, Artificial Sequence
  Description of Artificial Sequence: Synthetic oligonucleotide
  Sense strand starting at position 1010 of SEQ ID NO: 1886919
agcauuugcugaggaacaa

SEQ ID NO: 2435433 - RNA, 19 nt, Artificial Sequence
  Description of Artificial Sequence: Synthetic oligonucleotide
  Antisense strand to SEQ ID NO: 2435432
uuguuccucagcaaaugcu

SEQ ID NO: 2435434 - RNA, 19 nt, Artificial Sequence
  Description of Artificial Sequence: Synthetic oligonucleotide
  Sense strand starting at position 1161 of SEQ ID NO: 1886919
ugagcaagccucugguauu

SEQ ID NO: 2435435 - RNA, 19 nt, Artificial Sequence
  Description of Artificial Sequence: Synthetic oligonucleotide
  Antisense strand to SEQ ID NO: 2435434
aauaccagaggcuugcuca

SEQ ID NO: 2435436 - RNA, 19 nt, Artificial Sequence
  Description of Artificial Sequence: Synthetic oligonucleotide
  Sense strand starting at position 1162 of SEQ ID NO: 1886919
gagcaagccucugguauuu

SEQ ID NO: 2435437 - RNA, 19 nt, Artificial Sequence
  Description of Artificial Sequence: Synthetic oligonucleotide
  Antisense strand to SEQ ID NO: 2435436
aaauaccagaggcuugcuc

SEQ ID NO: 2435438 - RNA, 19 nt, Artificial Sequence
  Description of Artificial Sequence: Synthetic oligonucleotide
  Sense strand starting at position 1164 of SEQ ID NO: 1886919
gcaagccucugguauuuaa

SEQ ID NO: 2435439 - RNA, 19 nt, Artificial Sequence
  Description of Artificial Sequence: Synthetic oligonucleotide
  Antisense strand to SEQ ID NO: 2435438
uuaaauaccagaggcuugc

SEQ ID NO: 2435440 - RNA, 19 nt, Artificial Sequence
  Description of Artificial Sequence: Synthetic oligonucleotide
  Sense strand starting at position 1304 of SEQ ID NO: 1886919
ccacaagacuucuaggugu

SEQ ID NO: 2435441 - RNA, 19 nt, Artificial Sequence
  Description of Artificial Sequence: Synthetic oligonucleotide
  Antisense strand to SEQ ID NO: 2435440
acaccuagaagucuugugg

SEQ ID NO: 2435442 - RNA, 19 nt, Artificial Sequence
  Description of Artificial Sequence: Synthetic oligonucleotide
  Sense strand starting at position 1341 of SEQ ID NO: 1886919
gggugaagguuaucaugac

SEQ ID NO: 2435443 - RNA, 19 nt, Artificial Sequence
  Description of Artificial Sequence: Synthetic oligonucleotide
  Antisense strand to SEQ ID NO: 2435442
gucaugauaaccuucaccc

SEQ ID NO: 2435444 - RNA, 19 nt, Artificial Sequence
  Description of Artificial Sequence: Synthetic oligonucleotide
  Sense strand starting at position 1824 of SEQ ID NO: 1886919
agacguaaugcucacacua

SEQ ID NO: 2435445 - RNA, 19 nt, Artificial Sequence
  Description of Artificial Sequence: Synthetic oligonucleotide
  Antisense strand to SEQ ID NO: 2435444
uagugugagcauuacgucu

SEQ ID NO: 2435446 - RNA, 19 nt, Artificial Sequence
  Description of Artificial Sequence: Synthetic oligonucleotide
  Sense strand starting at position 1826 of SEQ ID NO: 1886919
acguaaugcucacacuaac

SEQ ID NO: 2435447 - RNA, 19 nt, Artificial Sequence
  Description of Artificial Sequence: Synthetic oligonucleotide
  Antisense strand to SEQ ID NO: 2435446
guuagugugagcauuacgu

SEQ ID NO: 2435448 - RNA, 19 nt, Artificial Sequence
  Description of Artificial Sequence: Synthetic oligonucleotide
  Sense strand starting at position 2094 of SEQ ID NO: 1886919
caaugugaccuuugcaaug

SEQ ID NO: 2435449 - RNA, 19 nt, Artificial Sequence
  Description of Artificial Sequence: Synthetic oligonucleotide
  Antisense strand to SEQ ID NO: 2435448
cauugcaaaggucacauug

SEQ ID NO: 2435450 - RNA, 19 nt, Artificial Sequence
  Description of Artificial Sequence: Synthetic oligonucleotide
  Sense strand starting at position 2155 of SEQ ID NO: 1886919
ggaaacuuccucugaaucu

SEQ ID NO: 2435451 - RNA, 19 nt, Artificial Sequence
  Description of Artificial Sequence: Synthetic oligonucleotide
  Antisense strand to SEQ ID NO: 2435450
agauucagaggaaguuucc

SEQ ID NO: 2435452 - RNA, 19 nt, Artificial Sequence
  Description of Artificial Sequence: Synthetic oligonucleotide
  Sense strand starting at position 2205 of SEQ ID NO: 1886919
uggagcauucagcgagaua

SEQ ID NO: 2435453 - RNA, 19 nt, Artificial Sequence
  Description of Artificial Sequence: Synthetic oligonucleotide
  Antisense strand to SEQ ID NO: 2435452
uaucucgcugaaugcucca

SEQ ID NO: 2435454 - RNA, 19 nt, Artificial Sequence
  Description of Artificial Sequence: Synthetic oligonucleotide
  Sense strand starting at position 2591 of SEQ ID NO: 1886919
agggcuuauccacauacca

SEQ ID NO: 2435455 - RNA, 19 nt, Artificial Sequence
  Description of Artificial Sequence: Synthetic oligonucleotide
  Antisense strand to SEQ ID NO: 2435454
ugguauguggauaagcccu

SEQ ID NO: 2435456 - RNA, 19 nt, Artificial Sequence
  Description of Artificial Sequence: Synthetic oligonucleotide
  Sense strand starting at position 2785 of SEQ ID NO: 1886919
agugaugaaucacugacuu

SEQ ID NO: 2435457 - RNA, 19 nt, Artificial Sequence
  Description of Artificial Sequence: Synthetic oligonucleotide
  Antisense strand to SEQ ID NO: 2435456
aagucagugauucaucacu

SEQ ID NO: 2435458 - RNA, 19 nt, Artificial Sequence
  Description of Artificial Sequence: Synthetic oligonucleotide
  Sense strand starting at position 3086 of SEQ ID NO: 1886919
guaauuaaagcuggugaca

SEQ ID NO: 2435459 - RNA, 19 nt, Artificial Sequence
  Description of Artificial Sequence: Synthetic oligonucleotide
  Antisense strand to SEQ ID NO: 2435458
ugucaccagcuuuaauuac

SEQ ID NO: 2435460 - RNA, 19 nt, Artificial Sequence
  Description of Artificial Sequence: Synthetic oligonucleotide
  Sense strand starting at position 3236 of SEQ ID NO: 1886919
cugggugucaguggacauu

SEQ ID NO: 2435461 - RNA, 19 nt, Artificial Sequence
  Description of Artificial Sequence: Synthetic oligonucleotide
  Antisense strand to SEQ ID NO: 2435460
aauguccacugacacccag

SEQ ID NO: 2435462 - RNA, 19 nt, Artificial Sequence
  Description of Artificial Sequence: Synthetic oligonucleotide
  Sense strand starting at position 3387 of SEQ ID NO: 1886919
ccaucacguggucaggaau

SEQ ID NO: 2435463 - RNA, 19 nt, Artificial Sequence
  Description of Artificial Sequence: Synthetic oligonucleotide
  Antisense strand to SEQ ID NO: 2435462
auuccugaccacgugaugg

SEQ ID NO: 2435464 - RNA, 19 nt, Artificial Sequence
  Description of Artificial Sequence: Synthetic oligonucleotide
  Sense strand starting at position 3400 of SEQ ID NO: 1886919
aggaauggugucugccuuu

SEQ ID NO: 2435465 - RNA, 19 nt, Artificial Sequence
  Description of Artificial Sequence: Synthetic oligonucleotide
  Antisense strand to SEQ ID NO: 2435464
aaaggcagacaccauuccu

SEQ ID NO: 2435466 - RNA, 19 nt, Artificial Sequence
  Description of Artificial Sequence: Synthetic oligonucleotide
  Sense strand starting at position 3403 of SEQ ID NO: 1886919
aauggugucugccuuugau

SEQ ID NO: 2435467 - RNA, 19 nt, Artificial Sequence
  Description of Artificial Sequence: Synthetic oligonucleotide
  Antisense strand to SEQ ID NO: 2435466
aucaaaggcagacaccauu

SEQ ID NO: 2435468 - RNA, 19 nt, Artificial Sequence
  Description of Artificial Sequence: Synthetic oligonucleotide
  Sense strand starting at position 3409 of SEQ ID NO: 1886919
gucugccuuugauagguga

SEQ ID NO: 2435469 - RNA, 19 nt, Artificial Sequence
  Description of Artificial Sequence: Synthetic oligonucleotide
  Antisense strand to SEQ ID NO: 2435468
ucaccuaucaaaggcagac

SEQ ID NO: 2435470 - RNA, 19 nt, Artificial Sequence
  Description of Artificial Sequence: Synthetic oligonucleotide
  Sense strand starting at position 3412 of SEQ ID NO: 1886919
ugccuuugauaggugagga

SEQ ID NO: 2435471 - RNA, 19 nt, Artificial Sequence
  Description of Artificial Sequence: Synthetic oligonucleotide
  Antisense strand to SEQ ID NO: 2435470
uccucaccuaucaaaggca

SEQ ID NO: 2435472 - RNA, 19 nt, Artificial Sequence
  Description of Artificial Sequence: Synthetic oligonucleotide
  Sense strand starting at position 3413 of SEQ ID NO: 1886919
gccuuugauaggugaggac

SEQ ID NO: 2435473 - RNA, 19 nt, Artificial Sequence
  Description of Artificial Sequence: Synthetic oligonucleotide
  Antisense strand to SEQ ID NO: 2435472
guccucaccuaucaaaggc

SEQ ID NO: 2435474 - RNA, 19 nt, Artificial Sequence
  Description of Artificial Sequence: Synthetic oligonucleotide
  Sense strand starting at position 3443 of SEQ ID NO: 1886919
aggaucugcugcucuaaau

SEQ ID NO: 2435475 - RNA, 19 nt, Artificial Sequence
  Description of Artificial Sequence: Synthetic oligonucleotide
  Antisense strand to SEQ ID NO: 2435474
auuuagagcagcagauccu

SEQ ID NO: 2435476 - RNA, 19 nt, Artificial Sequence
  Description of Artificial Sequence: Synthetic oligonucleotide
  Sense strand starting at position 3586 of SEQ ID NO: 1886919
ggacuagacaagugucuuc

SEQ ID NO: 2435477 - RNA, 19 nt, Artificial Sequence
  Description of Artificial Sequence: Synthetic oligonucleotide
  Antisense strand to SEQ ID NO: 2435476
gaagacacuugucuagucc

SEQ ID NO: 2435478 - RNA, 19 nt, Artificial Sequence
  Description of Artificial Sequence: Synthetic oligonucleotide
  Sense strand starting at position 3703 of SEQ ID NO: 1886919
cacaguacgugcuuaauca

SEQ ID NO: 2435479 - RNA, 19 nt, Artificial Sequence
  Description of Artificial Sequence: Synthetic oligonucleotide
  Antisense strand to SEQ ID NO: 2435478
ugauuaagcacguacugug

SEQ ID NO: 2435480 - RNA, 19 nt, Artificial Sequence
  Description of Artificial Sequence: Synthetic oligonucleotide
  Sense strand starting at position 3704 of SEQ ID NO: 1886919
acaguacgugcuuaaucaa

SEQ ID NO: 2435481 - RNA, 19 nt, Artificial Sequence
  Description of Artificial Sequence: Synthetic oligonucleotide
  Antisense strand to SEQ ID NO: 2435480
uugauuaagcacguacugu

SEQ ID NO: 2435482 - RNA, 19 nt, Artificial Sequence
  Description of Artificial Sequence: Synthetic oligonucleotide
  Sense strand starting at position 3707 of SEQ ID NO: 1886919
guacgugcuuaaucaauac

SEQ ID NO: 2435483 - RNA, 19 nt, Artificial Sequence
  Description of Artificial Sequence: Synthetic oligonucleotide
  Antisense strand to SEQ ID NO: 2435482
guauugauuaagcacguac

SEQ ID NO: 2435484 - RNA, 19 nt, Artificial Sequence
  Description of Artificial Sequence: Synthetic oligonucleotide
  Sense strand starting at position 3711 of SEQ ID NO: 1886919
gugcuuaaucaauacagaa

SEQ ID NO: 2435485 - RNA, 19 nt, Artificial Sequence
  Description of Artificial Sequence: Synthetic oligonucleotide
  Antisense strand to SEQ ID NO: 2435484
uucuguauugauuaagcac

SEQ ID NO: 2435486 - RNA, 19 nt, Artificial Sequence
  Description of Artificial Sequence: Synthetic oligonucleotide
  Sense strand starting at position 3884 of SEQ ID NO: 1886919
uggugucaugagggugaaa

SEQ ID NO: 2435487 - RNA, 19 nt, Artificial Sequence
  Description of Artificial Sequence: Synthetic oligonucleotide
  Antisense strand to SEQ ID NO: 2435486
uuucacccucaugacacca

SEQ ID NO: 2435488 - RNA, 19 nt, Artificial Sequence
  Description of Artificial Sequence: Synthetic oligonucleotide
  Sense strand starting at position 3886 of SEQ ID NO: 1886919
gugucaugagggugaaaca

SEQ ID NO: 2435489 - RNA, 19 nt, Artificial Sequence
  Description of Artificial Sequence: Synthetic oligonucleotide
  Antisense strand to SEQ ID NO: 2435488
uguuucacccucaugacac

SEQ ID NO: 2435490 - RNA, 19 nt, Artificial Sequence
  Description of Artificial Sequence: Synthetic oligonucleotide
  Sense strand starting at position 3934 of SEQ ID NO: 1886919
cugugauggccgccagcau

SEQ ID NO: 2435491 - RNA, 19 nt, Artificial Sequence
  Description of Artificial Sequence: Synthetic oligonucleotide
  Antisense strand to SEQ ID NO: 2435490
augcuggcggccaucacag

SEQ ID NO: 2435492 - RNA, 19 nt, Artificial Sequence
  Description of Artificial Sequence: Synthetic oligonucleotide
  Sense strand starting at position 3948 of SEQ ID NO: 1886919
agcauuaguagcguuguua

SEQ ID NO: 2435493 - RNA, 19 nt, Artificial Sequence
  Description of Artificial Sequence: Synthetic oligonucleotide
  Antisense strand to SEQ ID NO: 2435492
uaacaacgcuacuaaugcu

SEQ ID NO: 2435494 - RNA, 19 nt, Artificial Sequence
  Description of Artificial Sequence: Synthetic oligonucleotide
  Sense strand starting at position 3949 of SEQ ID NO: 1886919
gcauuaguagcguuguuac

SEQ ID NO: 2435495 - RNA, 19 nt, Artificial Sequence
  Description of Artificial Sequence: Synthetic oligonucleotide
  Antisense strand to SEQ ID NO: 2435494
guaacaacgcuacuaaugc

SEQ ID NO: 2435496 - RNA, 19 nt, Artificial Sequence
  Description of Artificial Sequence: Synthetic oligonucleotide
  Sense strand starting at position 2 of SEQ ID NO: 1886920
ggaaguaguuuguucaggu

SEQ ID NO: 2435497 - RNA, 19 nt, Artificial Sequence
  Description of Artificial Sequence: Synthetic oligonucleotide
  Antisense strand to SEQ ID NO: 2435496
accugaacaaacuacuucc

SEQ ID NO: 2435498 - RNA, 19 nt, Artificial Sequence
  Description of Artificial Sequence: Synthetic oligonucleotide
  Sense strand starting at position 9 of SEQ ID NO: 1886920
guuuguucagguugguaaa

SEQ ID NO: 2435499 - RNA, 19 nt, Artificial Sequence
  Description of Artificial Sequence: Synthetic oligonucleotide
  Antisense strand to SEQ ID NO: 2435498
uuuaccaaccugaacaaac

SEQ ID NO: 2435500 - RNA, 19 nt, Artificial Sequence
  Description of Artificial Sequence: Synthetic oligonucleotide
  Sense strand starting at position 19 of SEQ ID NO: 1886920
guugguaaauggccagaua

SEQ ID NO: 2435501 - RNA, 19 nt, Artificial Sequence
  Description of Artificial Sequence: Synthetic oligonucleotide
  Antisense strand to SEQ ID NO: 2435500
uaucuggccauuuaccaac

SEQ ID NO: 2435502 - RNA, 19 nt, Artificial Sequence
  Description of Artificial Sequence: Synthetic oligonucleotide
  Sense strand starting at position 20 of SEQ ID NO: 1886920
uugguaaauggccagauau

SEQ ID NO: 2435503 - RNA, 19 nt, Artificial Sequence
  Description of Artificial Sequence: Synthetic oligonucleotide
  Antisense strand to SEQ ID NO: 2435502
auaucuggccauuuaccaa

SEQ ID NO: 2435504 - RNA, 19 nt, Artificial Sequence
  Description of Artificial Sequence: Synthetic oligonucleotide
  Sense strand starting at position 128 of SEQ ID NO: 1886920
gcucuaacccagggcaaau

SEQ ID NO: 2435505 - RNA, 19 nt, Artificial Sequence
  Description of Artificial Sequence: Synthetic oligonucleotide
  Antisense strand to SEQ ID NO: 2435504
auuugcccuggguuagagc

SEQ ID NO: 2435506 - RNA, 19 nt, Artificial Sequence
  Description of Artificial Sequence: Synthetic oligonucleotide
  Sense strand starting at position 753 of SEQ ID NO: 1886920
gccaguaccugaccugaua

SEQ ID NO: 2435507 - RNA, 19 nt, Artificial Sequence
  Description of Artificial Sequence: Synthetic oligonucleotide
  Antisense strand to SEQ ID NO: 2435506
uaucaggucagguacuggc

SEQ ID NO: 2435508 - RNA, 19 nt, Artificial Sequence
  Description of Artificial Sequence: Synthetic oligonucleotide
  Sense strand starting at position 892 of SEQ ID NO: 1886920
uuuauucuguggucaaugu

SEQ ID NO: 2435509 - RNA, 19 nt, Artificial Sequence
  Description of Artificial Sequence: Synthetic oligonucleotide
  Antisense strand to SEQ ID NO: 2435508
acauugaccacagaauaaa

SEQ ID NO: 2435510 - RNA, 19 nt, Artificial Sequence
  Description of Artificial Sequence: Synthetic oligonucleotide
  Sense strand starting at position 1067 of SEQ ID NO: 1886920
accucaccagauuguaaga

SEQ ID NO: 2435511 - RNA, 19 nt, Artificial Sequence
  Description of Artificial Sequence: Synthetic oligonucleotide
  Antisense strand to SEQ ID NO: 2435510
ucuuacaaucuggugaggu

SEQ ID NO: 2435512 - RNA, 19 nt, Artificial Sequence
  Description of Artificial Sequence: Synthetic oligonucleotide
  Sense strand starting at position 1125 of SEQ ID NO: 1886920
aguugugagcaccaguaau

SEQ ID NO: 2435513 - RNA, 19 nt, Artificial Sequence
  Description of Artificial Sequence: Synthetic oligonucleotide
  Antisense strand to SEQ ID NO: 2435512
auuacuggugcucacaacu

SEQ ID NO: 2435514 - RNA, 19 nt, Artificial Sequence
  Description of Artificial Sequence: Synthetic oligonucleotide
  Sense strand starting at position 1310 of SEQ ID NO: 1886920
gucccauccuccuugagga

SEQ ID NO: 2435515 - RNA, 19 nt, Artificial Sequence
  Description of Artificial Sequence: Synthetic oligonucleotide
  Antisense strand to SEQ ID NO: 2435514
uccucaaggaggaugggac

SEQ ID NO: 2435516 - RNA, 19 nt, Artificial Sequence
  Description of Artificial Sequence: Synthetic oligonucleotide
  Sense strand starting at position 1403 of SEQ ID NO: 1886920
caccucuaguccgucagau

SEQ ID NO: 2435517 - RNA, 19 nt, Artificial Sequence
  Description of Artificial Sequence: Synthetic oligonucleotide
  Antisense strand to SEQ ID NO: 2435516
aucugacggacuagaggug

SEQ ID NO: 2435518 - RNA, 19 nt, Artificial Sequence
  Description of Artificial Sequence: Synthetic oligonucleotide
  Sense strand starting at position 1405 of SEQ ID NO: 1886920
ccucuaguccgucagaugu

SEQ ID NO: 2435519 - RNA, 19 nt, Artificial Sequence
  Description of Artificial Sequence: Synthetic oligonucleotide
  Antisense strand to SEQ ID NO: 2435518
acaucugacggacuagagg

SEQ ID NO: 2435520 - RNA, 19 nt, Artificial Sequence
  Description of Artificial Sequence: Synthetic oligonucleotide
  Sense strand starting at position 1488 of SEQ ID NO: 1886920
cacaucugucugcaaggua

SEQ ID NO: 2435521 - RNA, 19 nt, Artificial Sequence
  Description of Artificial Sequence: Synthetic oligonucleotide
  Antisense strand to SEQ ID NO: 2435520
uaccuugcagacagaugug

SEQ ID NO: 2435522 - RNA, 19 nt, Artificial Sequence
  Description of Artificial Sequence: Synthetic oligonucleotide
  Sense strand starting at position 1491 of SEQ ID NO: 1886920
aucugucugcaagguaaca

SEQ ID NO: 2435523 - RNA, 19 nt, Artificial Sequence
  Description of Artificial Sequence: Synthetic oligonucleotide
  Antisense strand to SEQ ID NO: 2435522
uguuaccuugcagacagau

SEQ ID NO: 2435524 - RNA, 19 nt, Artificial Sequence
  Description of Artificial Sequence: Synthetic oligonucleotide
  Sense strand starting at position 1504 of SEQ ID NO: 1886920
guaacaacaguguguucuu

SEQ ID NO: 2435525 - RNA, 19 nt, Artificial Sequence
  Description of Artificial Sequence: Synthetic oligonucleotide
  Antisense strand to SEQ ID NO: 2435524
aagaacacacuguuguuac

SEQ ID NO: 2435526 - RNA, 19 nt, Artificial Sequence
  Description of Artificial Sequence: Synthetic oligonucleotide
  Sense strand starting at position 1521 of SEQ ID NO: 1886920
uugccagcccagugagaua

SEQ ID NO: 2435527 - RNA, 19 nt, Artificial Sequence
  Description of Artificial Sequence: Synthetic oligonucleotide
  Antisense strand to SEQ ID NO: 2435526
uaucucacugggcuggcaa

SEQ ID NO: 2435528 - RNA, 19 nt, Artificial Sequence
  Description of Artificial Sequence: Synthetic oligonucleotide
  Sense strand starting at position 1534 of SEQ ID NO: 1886920
gagauagagcagggucauu

SEQ ID NO: 2435529 - RNA, 19 nt, Artificial Sequence
  Description of Artificial Sequence: Synthetic oligonucleotide
  Antisense strand to SEQ ID NO: 2435528
aaugacccugcucuaucuc

SEQ ID NO: 2435530 - RNA, 19 nt, Artificial Sequence
  Description of Artificial Sequence: Synthetic oligonucleotide
  Sense strand starting at position 1690 of SEQ ID NO: 1886920
guaguacucacccgaggga

SEQ ID NO: 2435531 - RNA, 19 nt, Artificial Sequence
  Description of Artificial Sequence: Synthetic oligonucleotide
  Antisense strand to SEQ ID NO: 2435530
ucccucgggugaguacuac

SEQ ID NO: 2435532 - RNA, 19 nt, Artificial Sequence
  Description of Artificial Sequence: Synthetic oligonucleotide
  Sense strand starting at position 1776 of SEQ ID NO: 1886920
aggcccucuuucuuggaaa

SEQ ID NO: 2435533 - RNA, 19 nt, Artificial Sequence
  Description of Artificial Sequence: Synthetic oligonucleotide
  Antisense strand to SEQ ID NO: 2435532
uuuccaagaaagagggccu

SEQ ID NO: 2435534 - RNA, 19 nt, Artificial Sequence
  Description of Artificial Sequence: Synthetic oligonucleotide
  Sense strand starting at position 1904 of SEQ ID NO: 1886920
gcagcugugcaugacaaga

SEQ ID NO: 2435535 - RNA, 19 nt, Artificial Sequence
  Description of Artificial Sequence: Synthetic oligonucleotide
  Antisense strand to SEQ ID NO: 2435534
ucuugucaugcacagcugc

SEQ ID NO: 2435536 - RNA, 19 nt, Artificial Sequence
  Description of Artificial Sequence: Synthetic oligonucleotide
  Sense strand starting at position 2022 of SEQ ID NO: 1886920
gcaggagguucagugaaga

SEQ ID NO: 2435537 - RNA, 19 nt, Artificial Sequence
  Description of Artificial Sequence: Synthetic oligonucleotide
  Antisense strand to SEQ ID NO: 2435536
ucuucacugaaccuccugc

SEQ ID NO: 2435538 - RNA, 19 nt, Artificial Sequence
  Description of Artificial Sequence: Synthetic oligonucleotide
  Sense strand starting at position 2121 of SEQ ID NO: 1886920
aacccagauguucggguaa

SEQ ID NO: 2435539 - RNA, 19 nt, Artificial Sequence
  Description of Artificial Sequence: Synthetic oligonucleotide
  Antisense strand to SEQ ID NO: 2435538
uuacccgaacaucuggguu

SEQ ID NO: 2435540 - RNA, 19 nt, Artificial Sequence
  Description of Artificial Sequence: Synthetic oligonucleotide
  Sense strand starting at position 2132 of SEQ ID NO: 1886920
ucggguaacgcucacauuu

SEQ ID NO: 2435541 - RNA, 19 nt, Artificial Sequence
  Description of Artificial Sequence: Synthetic oligonucleotide
  Antisense strand to SEQ ID NO: 2435540
aaaugugagcguuacccga

SEQ ID NO: 2435542 - RNA, 19 nt, Artificial Sequence
  Description of Artificial Sequence: Synthetic oligonucleotide
  Sense strand starting at position 2645 of SEQ ID NO: 1886920
aaacauggugugcauugaa

SEQ ID NO: 2435543 - RNA, 19 nt, Artificial Sequence
  Description of Artificial Sequence: Synthetic oligonucleotide
  Antisense strand to SEQ ID NO: 2435542
uucaaugcacaccauguuu

SEQ ID NO: 2435544 - RNA, 19 nt, Artificial Sequence
  Description of Artificial Sequence: Synthetic oligonucleotide
  Sense strand starting at position 2707 of SEQ ID NO: 1886920
ccuauaaagucugauuuag

SEQ ID NO: 2435545 - RNA, 19 nt, Artificial Sequence
  Description of Artificial Sequence: Synthetic oligonucleotide
  Antisense strand to SEQ ID NO: 2435544
cuaaaucagacuuuauagg

SEQ ID NO: 2435546 - RNA, 19 nt, Artificial Sequence
  Description of Artificial Sequence: Synthetic oligonucleotide
  Sense strand starting at position 2715 of SEQ ID NO: 1886920
gucugauuuaguuggucug

SEQ ID NO: 2435547 - RNA, 19 nt, Artificial Sequence
  Description of Artificial Sequence: Synthetic oligonucleotide
  Antisense strand to SEQ ID NO: 2435546
cagaccaacuaaaucagac

SEQ ID NO: 2435548 - RNA, 19 nt, Artificial Sequence
  Description of Artificial Sequence: Synthetic oligonucleotide
  Sense strand starting at position 2722 of SEQ ID NO: 1886920
uuaguuggucuggaugcaa

SEQ ID NO: 2435549 - RNA, 19 nt, Artificial Sequence
  Description of Artificial Sequence: Synthetic oligonucleotide
  Antisense strand to SEQ ID NO: 2435548
uugcauccagaccaacuaa

SEQ ID NO: 2435550 - RNA, 19 nt, Artificial Sequence
  Description of Artificial Sequence: Synthetic oligonucleotide
  Sense strand starting at position 2813 of SEQ ID NO: 1886920
ggccaaacugcuuaaagga

SEQ ID NO: 2435551 - RNA, 19 nt, Artificial Sequence
  Description of Artificial Sequence: Synthetic oligonucleotide
  Antisense strand to SEQ ID NO: 2435550
uccuuuaagcaguuuggcc

SEQ ID NO: 2435552 - RNA, 19 nt, Artificial Sequence
  Description of Artificial Sequence: Synthetic oligonucleotide
  Sense strand starting at position 2848 of SEQ ID NO: 1886920
aggccuuaguaagugaaau

SEQ ID NO: 2435553 - RNA, 19 nt, Artificial Sequence
  Description of Artificial Sequence: Synthetic oligonucleotide
  Antisense strand to SEQ ID NO: 2435552
auuucacuuacuaaggccu

SEQ ID NO: 2435554 - RNA, 19 nt, Artificial Sequence
  Description of Artificial Sequence: Synthetic oligonucleotide
  Sense strand starting at position 2849 of SEQ ID NO: 1886920
ggccuuaguaagugaaaug

SEQ ID NO: 2435555 - RNA, 19 nt, Artificial Sequence
  Description of Artificial Sequence: Synthetic oligonucleotide
  Antisense strand to SEQ ID NO: 2435554
cauuucacuuacuaaggcc

SEQ ID NO: 2435556 - RNA, 19 nt, Artificial Sequence
  Description of Artificial Sequence: Synthetic oligonucleotide
  Sense strand starting at position 2850 of SEQ ID NO: 1886920
gccuuaguaagugaaaugu

SEQ ID NO: 2435557 - RNA, 19 nt, Artificial Sequence
  Description of Artificial Sequence: Synthetic oligonucleotide
  Antisense strand to SEQ ID NO: 2435556
acauuucacuuacuaaggc

SEQ ID NO: 2435558 - RNA, 19 nt, Artificial Sequence
  Description of Artificial Sequence: Synthetic oligonucleotide
  Sense strand starting at position 2860 of SEQ ID NO: 1886920
gugaaauguuuaccacuag

SEQ ID NO: 2435559 - RNA, 19 nt, Artificial Sequence
  Description of Artificial Sequence: Synthetic oligonucleotide
  Antisense strand to SEQ ID NO: 2435558
cuagugguaaacauuucac

SEQ ID NO: 2435560 - RNA, 19 nt, Artificial Sequence
  Description of Artificial Sequence: Synthetic oligonucleotide
  Sense strand starting at position 3446 of SEQ ID NO: 1886920
cuauaaauagcugggauua

SEQ ID NO: 2435561 - RNA, 19 nt, Artificial Sequence
  Description of Artificial Sequence: Synthetic oligonucleotide
  Antisense strand to SEQ ID NO: 2435560
uaaucccagcuauuuauag

SEQ ID NO: 2435562 - RNA, 19 nt, Artificial Sequence
  Description of Artificial Sequence: Synthetic oligonucleotide
  Sense strand starting at position 3665 of SEQ ID NO: 1886920
aguauuacauguucuaguu

SEQ ID NO: 2435563 - RNA, 19 nt, Artificial Sequence
  Description of Artificial Sequence: Synthetic oligonucleotide
  Antisense strand to SEQ ID NO: 2435562
aacuagaacauguaauacu

SEQ ID NO: 2435564 - RNA, 19 nt, Artificial Sequence
  Description of Artificial Sequence: Synthetic oligonucleotide
  Sense strand starting at position 3777 of SEQ ID NO: 1886920
gcauaugacuuguuccauu

SEQ ID NO: 2435565 - RNA, 19 nt, Artificial Sequence
  Description of Artificial Sequence: Synthetic oligonucleotide
  Antisense strand to SEQ ID NO: 2435564
aauggaacaagucauaugc

SEQ ID NO: 2435566 - RNA, 19 nt, Artificial Sequence
  Description of Artificial Sequence: Synthetic oligonucleotide
  Sense strand starting at position 3795 of SEQ ID NO: 1886920
ucauuaugcugggcacuua

SEQ ID NO: 2435567 - RNA, 19 nt, Artificial Sequence
  Description of Artificial Sequence: Synthetic oligonucleotide
  Antisense strand to SEQ ID NO: 2435566
uaagugcccagcauaauga

SEQ ID NO: 2435568 - RNA, 19 nt, Artificial Sequence
  Description of Artificial Sequence: Synthetic oligonucleotide
  Sense strand starting at position 3855 of SEQ ID NO: 1886920
gccugugagagguagcuuu

SEQ ID NO: 2435569 - RNA, 19 nt, Artificial Sequence
  Description of Artificial Sequence: Synthetic oligonucleotide
  Antisense strand to SEQ ID NO: 2435568
aaagcuaccucucacaggc

SEQ ID NO: 2435570 - RNA, 19 nt, Artificial Sequence
  Description of Artificial Sequence: Synthetic oligonucleotide
  Sense strand starting at position 3901 of SEQ ID NO: 1886920
gaaaguugugccuggagua

SEQ ID NO: 2435571 - RNA, 19 nt, Artificial Sequence
  Description of Artificial Sequence: Synthetic oligonucleotide
  Antisense strand to SEQ ID NO: 2435570
uacuccaggcacaacuuuc

SEQ ID NO: 2435572 - RNA, 19 nt, Artificial Sequence
  Description of Artificial Sequence: Synthetic oligonucleotide
  Sense strand starting at position 3902 of SEQ ID NO: 1886920
aaaguugugccuggaguag

SEQ ID NO: 2435573 - RNA, 19 nt, Artificial Sequence
  Description of Artificial Sequence: Synthetic oligonucleotide
  Antisense strand to SEQ ID NO: 2435572
cuacuccaggcacaacuuu

SEQ ID NO: 2435574 - RNA, 19 nt, Artificial Sequence
  Description of Artificial Sequence: Synthetic oligonucleotide
  Sense strand starting at position 3914 of SEQ ID NO: 1886920
ggaguaguggcuuaugcua

SEQ ID NO: 2435575 - RNA, 19 nt, Artificial Sequence
  Description of Artificial Sequence: Synthetic oligonucleotide
  Antisense strand to SEQ ID NO: 2435574
uagcauaagccacuacucc

SEQ ID NO: 2435576 - RNA, 19 nt, Artificial Sequence
  Description of Artificial Sequence: Synthetic oligonucleotide
  Sense strand starting at position 284 of SEQ ID NO: 1886921
uggcucuuguaaucaguga

SEQ ID NO: 2435577 - RNA, 19 nt, Artificial Sequence
  Description of Artificial Sequence: Synthetic oligonucleotide
  Antisense strand to SEQ ID NO: 2435576
ucacugauuacaagagcca

SEQ ID NO: 2435578 - RNA, 19 nt, Artificial Sequence
  Description of Artificial Sequence: Synthetic oligonucleotide
  Sense strand starting at position 285 of SEQ ID NO: 1886921
ggcucuuguaaucagugaa

SEQ ID NO: 2435579 - RNA, 19 nt, Artificial Sequence
  Description of Artificial Sequence: Synthetic oligonucleotide
  Antisense strand to SEQ ID NO: 2435578
uucacugauuacaagagcc

SEQ ID NO: 2435580 - RNA, 19 nt, Artificial Sequence
  Description of Artificial Sequence: Synthetic oligonucleotide
  Sense strand starting at position 309 of SEQ ID NO: 1886921
aggcuaacuuggccuuaaa

SEQ ID NO: 2435581 - RNA, 19 nt, Artificial Sequence
  Description of Artificial Sequence: Synthetic oligonucleotide
  Antisense strand to SEQ ID NO: 2435580
uuuaaggccaaguuagccu

SEQ ID NO: 2435582 - RNA, 19 nt, Artificial Sequence
  Description of Artificial Sequence: Synthetic oligonucleotide
  Sense strand starting at position 406 of SEQ ID NO: 1886921
aauguaucauuguggcuca

SEQ ID NO: 2435583 - RNA, 19 nt, Artificial Sequence
  Description of Artificial Sequence: Synthetic oligonucleotide
  Antisense strand to SEQ ID NO: 2435582
ugagccacaaugauacauu

SEQ ID NO: 2435584 - RNA, 19 nt, Artificial Sequence
  Description of Artificial Sequence: Synthetic oligonucleotide
  Sense strand starting at position 409 of SEQ ID NO: 1886921
guaucauuguggcucauag

SEQ ID NO: 2435585 - RNA, 19 nt, Artificial Sequence
  Description of Artificial Sequence: Synthetic oligonucleotide
  Antisense strand to SEQ ID NO: 2435584
cuaugagccacaaugauac

SEQ ID NO: 2435586 - RNA, 19 nt, Artificial Sequence
  Description of Artificial Sequence: Synthetic oligonucleotide
  Sense strand starting at position 586 of SEQ ID NO: 1886921
agcaguugcucuucuguua

SEQ ID NO: 2435587 - RNA, 19 nt, Artificial Sequence
  Description of Artificial Sequence: Synthetic oligonucleotide
  Antisense strand to SEQ ID NO: 2435586
uaacagaagagcaacugcu

SEQ ID NO: 2435588 - RNA, 19 nt, Artificial Sequence
  Description of Artificial Sequence: Synthetic oligonucleotide
  Sense strand starting at position 593 of SEQ ID NO: 1886921
gcucuucuguuacaggaaa

SEQ ID NO: 2435589 - RNA, 19 nt, Artificial Sequence
  Description of Artificial Sequence: Synthetic oligonucleotide
  Antisense strand to SEQ ID NO: 2435588
uuuccuguaacagaagagc

SEQ ID NO: 2435590 - RNA, 19 nt, Artificial Sequence
  Description of Artificial Sequence: Synthetic oligonucleotide
  Sense strand starting at position 644 of SEQ ID NO: 1886921
uuggaucucccgcaagaau

SEQ ID NO: 2435591 - RNA, 19 nt, Artificial Sequence
  Description of Artificial Sequence: Synthetic oligonucleotide
  Antisense strand to SEQ ID NO: 2435590
auucuugcgggagauccaa

SEQ ID NO: 2435592 - RNA, 19 nt, Artificial Sequence
  Description of Artificial Sequence: Synthetic oligonucleotide
  Sense strand starting at position 655 of SEQ ID NO: 1886921
gcaagaauucaaggugagu

SEQ ID NO: 2435593 - RNA, 19 nt, Artificial Sequence
  Description of Artificial Sequence: Synthetic oligonucleotide
  Antisense strand to SEQ ID NO: 2435592
acucaccuugaauucuugc

SEQ ID NO: 2435594 - RNA, 19 nt, Artificial Sequence
  Description of Artificial Sequence: Synthetic oligonucleotide
  Sense strand starting at position 856 of SEQ ID NO: 1886921
cugacauugcaguggcauu

SEQ ID NO: 2435595 - RNA, 19 nt, Artificial Sequence
  Description of Artificial Sequence: Synthetic oligonucleotide
  Antisense strand to SEQ ID NO: 2435594
aaugccacugcaaugucag

SEQ ID NO: 2435596 - RNA, 19 nt, Artificial Sequence
  Description of Artificial Sequence: Synthetic oligonucleotide
  Sense strand starting at position 1053 of SEQ ID NO: 1886921
ugccuuaacugccuggaua

SEQ ID NO: 2435597 - RNA, 19 nt, Artificial Sequence
  Description of Artificial Sequence: Synthetic oligonucleotide
  Antisense strand to SEQ ID NO: 2435596
uauccaggcaguuaaggca

SEQ ID NO: 2435598 - RNA, 19 nt, Artificial Sequence
  Description of Artificial Sequence: Synthetic oligonucleotide
  Sense strand starting at position 1070 of SEQ ID NO: 1886921
uaggcaguccaguaaguuu

SEQ ID NO: 2435599 - RNA, 19 nt, Artificial Sequence
  Description of Artificial Sequence: Synthetic oligonucleotide
  Antisense strand to SEQ ID NO: 2435598
aaacuuacuggacugccua

SEQ ID NO: 2435600 - RNA, 19 nt, Artificial Sequence
  Description of Artificial Sequence: Synthetic oligonucleotide
  Sense strand starting at position 1317 of SEQ ID NO: 1886921
ccaggacgcuuucccuauu

SEQ ID NO: 2435601 - RNA, 19 nt, Artificial Sequence
  Description of Artificial Sequence: Synthetic oligonucleotide
  Antisense strand to SEQ ID NO: 2435600
aauagggaaagcguccugg

SEQ ID NO: 2435602 - RNA, 19 nt, Artificial Sequence
  Description of Artificial Sequence: Synthetic oligonucleotide
  Sense strand starting at position 1320 of SEQ ID NO: 1886921
ggacgcuuucccuauuaag

SEQ ID NO: 2435603 - RNA, 19 nt, Artificial Sequence
  Description of Artificial Sequence: Synthetic oligonucleotide
  Antisense strand to SEQ ID NO: 2435602
cuuaauagggaaagcgucc

SEQ ID NO: 2435604 - RNA, 19 nt, Artificial Sequence
  Description of Artificial Sequence: Synthetic oligonucleotide
  Sense strand starting at position 1331 of SEQ ID NO: 1886921
cuauuaagccacuggcaga

SEQ ID NO: 2435605 - RNA, 19 nt, Artificial Sequence
  Description of Artificial Sequence: Synthetic oligonucleotide
  Antisense strand to SEQ ID NO: 2435604
ucugccaguggcuuaauag

SEQ ID NO: 2435606 - RNA, 19 nt, Artificial Sequence
  Description of Artificial Sequence: Synthetic oligonucleotide
  Sense strand starting at position 1394 of SEQ ID NO: 1886921
gggagagaauccagaggua

SEQ ID NO: 2435607 - RNA, 19 nt, Artificial Sequence
  Description of Artificial Sequence: Synthetic oligonucleotide
  Antisense strand to SEQ ID NO: 2435606
uaccucuggauucucuccc

SEQ ID NO: 2435608 - RNA, 19 nt, Artificial Sequence
  Description of Artificial Sequence: Synthetic oligonucleotide
  Sense strand starting at position 1397 of SEQ ID NO: 1886921
agagaauccagagguaggu

SEQ ID NO: 2435609 - RNA, 19 nt, Artificial Sequence
  Description of Artificial Sequence: Synthetic oligonucleotide
  Antisense strand to SEQ ID NO: 2435608
accuaccucuggauucucu

SEQ ID NO: 2435610 - RNA, 19 nt, Artificial Sequence
  Description of Artificial Sequence: Synthetic oligonucleotide
  Sense strand starting at position 1462 of SEQ ID NO: 1886921
ccgcauucuacuggaagga

SEQ ID NO: 2435611 - RNA, 19 nt, Artificial Sequence
  Description of Artificial Sequence: Synthetic oligonucleotide
  Antisense strand to SEQ ID NO: 2435610
uccuuccaguagaaugcgg

SEQ ID NO: 2435612 - RNA, 19 nt, Artificial Sequence
  Description of Artificial Sequence: Synthetic oligonucleotide
  Sense strand starting at position 1481 of SEQ ID NO: 1886921
ggaggaagauggguuuagu

SEQ ID NO: 2435613 - RNA, 19 nt, Artificial Sequence
  Description of Artificial Sequence: Synthetic oligonucleotide
  Antisense strand to SEQ ID NO: 2435612
acuaaacccaucuuccucc

SEQ ID NO: 2435614 - RNA, 19 nt, Artificial Sequence
  Description of Artificial Sequence: Synthetic oligonucleotide
  Sense strand starting at position 1484 of SEQ ID NO: 1886921
ggaagauggguuuaguucu

SEQ ID NO: 2435615 - RNA, 19 nt, Artificial Sequence
  Description of Artificial Sequence: Synthetic oligonucleotide
  Antisense strand to SEQ ID NO: 2435614
agaacuaaacccaucuucc

SEQ ID NO: 2435616 - RNA, 19 nt, Artificial Sequence
  Description of Artificial Sequence: Synthetic oligonucleotide
  Sense strand starting at position 1494 of SEQ ID NO: 1886921
uuuaguucuucccagggca

SEQ ID NO: 2435617 - RNA, 19 nt, Artificial Sequence
  Description of Artificial Sequence: Synthetic oligonucleotide
  Antisense strand to SEQ ID NO: 2435616
ugcccugggaagaacuaaa

SEQ ID NO: 2435618 - RNA, 19 nt, Artificial Sequence
  Description of Artificial Sequence: Synthetic oligonucleotide
  Sense strand starting at position 1686 of SEQ ID NO: 1886921
ugcccugauucagagguga

SEQ ID NO: 2435619 - RNA, 19 nt, Artificial Sequence
  Description of Artificial Sequence: Synthetic oligonucleotide
  Antisense strand to SEQ ID NO: 2435618
ucaccucugaaucagggca

SEQ ID NO: 2435620 - RNA, 19 nt, Artificial Sequence
  Description of Artificial Sequence: Synthetic oligonucleotide
  Sense strand starting at position 1791 of SEQ ID NO: 1886921
cugggacuucuguauuauu

SEQ ID NO: 2435621 - RNA, 19 nt, Artificial Sequence
  Description of Artificial Sequence: Synthetic oligonucleotide
  Antisense strand to SEQ ID NO: 2435620
aauaauacagaagucccag

SEQ ID NO: 2435622 - RNA, 19 nt, Artificial Sequence
  Description of Artificial Sequence: Synthetic oligonucleotide
  Sense strand starting at position 1933 of SEQ ID NO: 1886921
gguaucuccaagcgaggua

SEQ ID NO: 2435623 - RNA, 19 nt, Artificial Sequence
  Description of Artificial Sequence: Synthetic oligonucleotide
  Antisense strand to SEQ ID NO: 2435622
uaccucgcuuggagauacc

SEQ ID NO: 2435624 - RNA, 19 nt, Artificial Sequence
  Description of Artificial Sequence: Synthetic oligonucleotide
  Sense strand starting at position 2619 of SEQ ID NO: 1886921
cagguaaagucaggauaau

SEQ ID NO: 2435625 - RNA, 19 nt, Artificial Sequence
  Description of Artificial Sequence: Synthetic oligonucleotide
  Antisense strand to SEQ ID NO: 2435624
auuauccugacuuuaccug

SEQ ID NO: 2435626 - RNA, 19 nt, Artificial Sequence
  Description of Artificial Sequence: Synthetic oligonucleotide
  Sense strand starting at position 2859 of SEQ ID NO: 1886921
gccuguagccaaugaguug

SEQ ID NO: 2435627 - RNA, 19 nt, Artificial Sequence
  Description of Artificial Sequence: Synthetic oligonucleotide
  Antisense strand to SEQ ID NO: 2435626
caacucauuggcuacaggc

SEQ ID NO: 2435628 - RNA, 19 nt, Artificial Sequence
  Description of Artificial Sequence: Synthetic oligonucleotide
  Sense strand starting at position 2870 of SEQ ID NO: 1886921
augaguuguuucugccauc

SEQ ID NO: 2435629 - RNA, 19 nt, Artificial Sequence
  Description of Artificial Sequence: Synthetic oligonucleotide
  Antisense strand to SEQ ID NO: 2435628
gauggcagaaacaacucau

SEQ ID NO: 2435630 - RNA, 19 nt, Artificial Sequence
  Description of Artificial Sequence: Synthetic oligonucleotide
  Sense strand starting at position 2871 of SEQ ID NO: 1886921
ugaguuguuucugccauca

SEQ ID NO: 2435631 - RNA, 19 nt, Artificial Sequence
  Description of Artificial Sequence: Synthetic oligonucleotide
  Antisense strand to SEQ ID NO: 2435630
ugauggcagaaacaacuca

SEQ ID NO: 2435632 - RNA, 19 nt, Artificial Sequence
  Description of Artificial Sequence: Synthetic oligonucleotide
  Sense strand starting at position 2873 of SEQ ID NO: 1886921
aguuguuucugccaucaaa

SEQ ID NO: 2435633 - RNA, 19 nt, Artificial Sequence
  Description of Artificial Sequence: Synthetic oligonucleotide
  Antisense strand to SEQ ID NO: 2435632
uuugauggcagaaacaacu

SEQ ID NO: 2435634 - RNA, 19 nt, Artificial Sequence
  Description of Artificial Sequence: Synthetic oligonucleotide
  Sense strand starting at position 3208 of SEQ ID NO: 1886921
ccuguuaagccaugccaca

SEQ ID NO: 2435635 - RNA, 19 nt, Artificial Sequence
  Description of Artificial Sequence: Synthetic oligonucleotide
  Antisense strand to SEQ ID NO: 2435634
uguggcauggcuuaacagg

SEQ ID NO: 2435636 - RNA, 19 nt, Artificial Sequence
  Description of Artificial Sequence: Synthetic oligonucleotide
  Sense strand starting at position 3250 of SEQ ID NO: 1886921
agcucaagucccgaaguua

SEQ ID NO: 2435637 - RNA, 19 nt, Artificial Sequence
  Description of Artificial Sequence: Synthetic oligonucleotide
  Antisense strand to SEQ ID NO: 2435636
uaacuucgggacuugagcu

SEQ ID NO: 2435638 - RNA, 19 nt, Artificial Sequence
  Description of Artificial Sequence: Synthetic oligonucleotide
  Sense strand starting at position 3299 of SEQ ID NO: 1886921
aagggcuuccuaugacagu

SEQ ID NO: 2435639 - RNA, 19 nt, Artificial Sequence
  Description of Artificial Sequence: Synthetic oligonucleotide
  Antisense strand to SEQ ID NO: 2435638
acugucauaggaagcccuu

SEQ ID NO: 2435640 - RNA, 19 nt, Artificial Sequence
  Description of Artificial Sequence: Synthetic oligonucleotide
  Sense strand starting at position 3300 of SEQ ID NO: 1886921
agggcuuccuaugacaguu

SEQ ID NO: 2435641 - RNA, 19 nt, Artificial Sequence
  Description of Artificial Sequence: Synthetic oligonucleotide
  Antisense strand to SEQ ID NO: 2435640
aacugucauaggaagcccu

SEQ ID NO: 2435642 - RNA, 19 nt, Artificial Sequence
  Description of Artificial Sequence: Synthetic oligonucleotide
  Sense strand starting at position 3308 of SEQ ID NO: 1886921
cuaugacaguucugaaaua

SEQ ID NO: 2435643 - RNA, 19 nt, Artificial Sequence
  Description of Artificial Sequence: Synthetic oligonucleotide
  Antisense strand to SEQ ID NO: 2435642
uauuucagaacugucauag

SEQ ID NO: 2435644 - RNA, 19 nt, Artificial Sequence
  Description of Artificial Sequence: Synthetic oligonucleotide
  Sense strand starting at position 3786 of SEQ ID NO: 1886921
ggagacaaaugagaggauu

SEQ ID NO: 2435645 - RNA, 19 nt, Artificial Sequence
  Description of Artificial Sequence: Synthetic oligonucleotide
  Antisense strand to SEQ ID NO: 2435644
aauccucucauuugucucc

SEQ ID NO: 2435646 - RNA, 19 nt, Artificial Sequence
  Description of Artificial Sequence: Synthetic oligonucleotide
  Sense strand starting at position 3847 of SEQ ID NO: 1886921
ccuccuucgucagcggaaa

SEQ ID NO: 2435647 - RNA, 19 nt, Artificial Sequence
  Description of Artificial Sequence: Synthetic oligonucleotide
  Antisense strand to SEQ ID NO: 2435646
uuuccgcugacgaaggagg

SEQ ID NO: 2435648 - RNA, 19 nt, Artificial Sequence
  Description of Artificial Sequence: Synthetic oligonucleotide
  Sense strand starting at position 3870 of SEQ ID NO: 1886921
cuucuccagucuucugaca

SEQ ID NO: 2435649 - RNA, 19 nt, Artificial Sequence
  Description of Artificial Sequence: Synthetic oligonucleotide
  Antisense strand to SEQ ID NO: 2435648
ugucagaagacuggagaag

SEQ ID NO: 2435650 - RNA, 19 nt, Artificial Sequence
  Description of Artificial Sequence: Synthetic oligonucleotide
  Sense strand starting at position 3872 of SEQ ID NO: 1886921
ucuccagucuucugacaca

SEQ ID NO: 2435651 - RNA, 19 nt, Artificial Sequence
  Description of Artificial Sequence: Synthetic oligonucleotide
  Antisense strand to SEQ ID NO: 2435650
ugugucagaagacuggaga

SEQ ID NO: 2435652 - RNA, 19 nt, Artificial Sequence
  Description of Artificial Sequence: Synthetic oligonucleotide
  Sense strand starting at position 3966 of SEQ ID NO: 1886921
ccucgacugucuccagaau

SEQ ID NO: 2435653 - RNA, 19 nt, Artificial Sequence
  Description of Artificial Sequence: Synthetic oligonucleotide
  Antisense strand to SEQ ID NO: 2435652
auucuggagacagucgagg

SEQ ID NO: 2435654 - RNA, 19 nt, Artificial Sequence
  Description of Artificial Sequence: Synthetic oligonucleotide
  Sense strand starting at position 60 of SEQ ID NO: 1886922
cagaauguggguugagaaa

SEQ ID NO: 2435655 - RNA, 19 nt, Artificial Sequence
  Description of Artificial Sequence: Synthetic oligonucleotide
  Antisense strand to SEQ ID NO: 2435654
uuucucaacccacauucug

SEQ ID NO: 2435656 - RNA, 19 nt, Artificial Sequence
  Description of Artificial Sequence: Synthetic oligonucleotide
  Sense strand starting at position 222 of SEQ ID NO: 1886922
cgcaguuuccucucauugu

SEQ ID NO: 2435657 - RNA, 19 nt, Artificial Sequence
  Description of Artificial Sequence: Synthetic oligonucleotide
  Antisense strand to SEQ ID NO: 2435656
acaaugagaggaaacugcg

SEQ ID NO: 2435658 - RNA, 19 nt, Artificial Sequence
  Description of Artificial Sequence: Synthetic oligonucleotide
  Sense strand starting at position 310 of SEQ ID NO: 1886922
acgcguauucuguucucca

SEQ ID NO: 2435659 - RNA, 19 nt, Artificial Sequence
  Description of Artificial Sequence: Synthetic oligonucleotide
  Antisense strand to SEQ ID NO: 2435658
uggagaacagaauacgcgu

SEQ ID NO: 2435660 - RNA, 19 nt, Artificial Sequence
  Description of Artificial Sequence: Synthetic oligonucleotide
  Sense strand starting at position 445 of SEQ ID NO: 1886922
uuggauccaucuucugauu

SEQ ID NO: 2435661 - RNA, 19 nt, Artificial Sequence
  Description of Artificial Sequence: Synthetic oligonucleotide
  Antisense strand to SEQ ID NO: 2435660
aaucagaagauggauccaa

SEQ ID NO: 2435662 - RNA, 19 nt, Artificial Sequence
  Description of Artificial Sequence: Synthetic oligonucleotide
  Sense strand starting at position 507 of SEQ ID NO: 1886922
ugagaacugccuugacuga

SEQ ID NO: 2435663 - RNA, 19 nt, Artificial Sequence
  Description of Artificial Sequence: Synthetic oligonucleotide
  Antisense strand to SEQ ID NO: 2435662
ucagucaaggcaguucuca

SEQ ID NO: 2435664 - RNA, 19 nt, Artificial Sequence
  Description of Artificial Sequence: Synthetic oligonucleotide
  Sense strand starting at position 597 of SEQ ID NO: 1886922
ccaggaaacucaucccagu

SEQ ID NO: 2435665 - RNA, 19 nt, Artificial Sequence
  Description of Artificial Sequence: Synthetic oligonucleotide
  Antisense strand to SEQ ID NO: 2435664
acugggaugaguuuccugg

SEQ ID NO: 2435666 - RNA, 19 nt, Artificial Sequence
  Description of Artificial Sequence: Synthetic oligonucleotide
  Sense strand starting at position 746 of SEQ ID NO: 1886922
aggacagaaguuuguacua

SEQ ID NO: 2435667 - RNA, 19 nt, Artificial Sequence
  Description of Artificial Sequence: Synthetic oligonucleotide
  Antisense strand to SEQ ID NO: 2435666
uaguacaaacuucuguccu

SEQ ID NO: 2435668 - RNA, 19 nt, Artificial Sequence
  Description of Artificial Sequence: Synthetic oligonucleotide
  Sense strand starting at position 814 of SEQ ID NO: 1886922
cacauauuaccuugugagg

SEQ ID NO: 2435669 - RNA, 19 nt, Artificial Sequence
  Description of Artificial Sequence: Synthetic oligonucleotide
  Antisense strand to SEQ ID NO: 2435668
ccucacaagguaauaugug

SEQ ID NO: 2435670 - RNA, 19 nt, Artificial Sequence
  Description of Artificial Sequence: Synthetic oligonucleotide
  Sense strand starting at position 1004 of SEQ ID NO: 1886922
cauacaaguggugggaaau

SEQ ID NO: 2435671 - RNA, 19 nt, Artificial Sequence
  Description of Artificial Sequence: Synthetic oligonucleotide
  Antisense strand to SEQ ID NO: 2435670
auuucccaccacuuguaug

SEQ ID NO: 2435672 - RNA, 19 nt, Artificial Sequence
  Description of Artificial Sequence: Synthetic oligonucleotide
  Sense strand starting at position 1005 of SEQ ID NO: 1886922
auacaaguggugggaaauu

SEQ ID NO: 2435673 - RNA, 19 nt, Artificial Sequence
  Description of Artificial Sequence: Synthetic oligonucleotide
  Antisense strand to SEQ ID NO: 2435672
aauuucccaccacuuguau

SEQ ID NO: 2435674 - RNA, 19 nt, Artificial Sequence
  Description of Artificial Sequence: Synthetic oligonucleotide
  Sense strand starting at position 1301 of SEQ ID NO: 1886922
augguugaguucccaggaa

SEQ ID NO: 2435675 - RNA, 19 nt, Artificial Sequence
  Description of Artificial Sequence: Synthetic oligonucleotide
  Antisense strand to SEQ ID NO: 2435674
uuccugggaacucaaccau

SEQ ID NO: 2435676 - RNA, 19 nt, Artificial Sequence
  Description of Artificial Sequence: Synthetic oligonucleotide
  Sense strand starting at position 1414 of SEQ ID NO: 1886922
aucugacauccauguagau

SEQ ID NO: 2435677 - RNA, 19 nt, Artificial Sequence
  Description of Artificial Sequence: Synthetic oligonucleotide
  Antisense strand to SEQ ID NO: 2435676
aucuacauggaugucagau

SEQ ID NO: 2435678 - RNA, 19 nt, Artificial Sequence
  Description of Artificial Sequence: Synthetic oligonucleotide
  Sense strand starting at position 1470 of SEQ ID NO: 1886922
gagauuacaucuccacgau

SEQ ID NO: 2435679 - RNA, 19 nt, Artificial Sequence
  Description of Artificial Sequence: Synthetic oligonucleotide
  Antisense strand to SEQ ID NO: 2435678
aucguggagauguaaucuc

SEQ ID NO: 2435680 - RNA, 19 nt, Artificial Sequence
  Description of Artificial Sequence: Synthetic oligonucleotide
  Sense strand starting at position 1473 of SEQ ID NO: 1886922
auuacaucuccacgaugaa

SEQ ID NO: 2435681 - RNA, 19 nt, Artificial Sequence
  Description of Artificial Sequence: Synthetic oligonucleotide
  Antisense strand to SEQ ID NO: 2435680
uucaucguggagauguaau

SEQ ID NO: 2435682 - RNA, 19 nt, Artificial Sequence
  Description of Artificial Sequence: Synthetic oligonucleotide
  Sense strand starting at position 1512 of SEQ ID NO: 1886922
agaaacuaagucgaguuau

SEQ ID NO: 2435683 - RNA, 19 nt, Artificial Sequence
  Description of Artificial Sequence: Synthetic oligonucleotide
  Antisense strand to SEQ ID NO: 2435682
auaacucgacuuaguuucu

SEQ ID NO: 2435684 - RNA, 19 nt, Artificial Sequence
  Description of Artificial Sequence: Synthetic oligonucleotide
  Sense strand starting at position 1617 of SEQ ID NO: 1886922
caaugaccuguggaguuau

SEQ ID NO: 2435685 - RNA, 19 nt, Artificial Sequence
  Description of Artificial Sequence: Synthetic oligonucleotide
  Antisense strand to SEQ ID NO: 2435684
auaacuccacaggucauug

SEQ ID NO: 2435686 - RNA, 19 nt, Artificial Sequence
  Description of Artificial Sequence: Synthetic oligonucleotide
  Sense strand starting at position 2035 of SEQ ID NO: 1886922
gaguucuaucauggaaauu

SEQ ID NO: 2435687 - RNA, 19 nt, Artificial Sequence
  Description of Artificial Sequence: Synthetic oligonucleotide
  Antisense strand to SEQ ID NO: 2435686
aauuuccaugauagaacuc

SEQ ID NO: 2435688 - RNA, 19 nt, Artificial Sequence
  Description of Artificial Sequence: Synthetic oligonucleotide
  Sense strand starting at position 2046 of SEQ ID NO: 1886922
uggaaauuaugcuuuggga

SEQ ID NO: 2435689 - RNA, 19 nt, Artificial Sequence
  Description of Artificial Sequence: Synthetic oligonucleotide
  Antisense strand to SEQ ID NO: 2435688
ucccaaagcauaauuucca

SEQ ID NO: 2435690 - RNA, 19 nt, Artificial Sequence
  Description of Artificial Sequence: Synthetic oligonucleotide
  Sense strand starting at position 2048 of SEQ ID NO: 1886922
gaaauuaugcuuugggaca

SEQ ID NO: 2435691 - RNA, 19 nt, Artificial Sequence
  Description of Artificial Sequence: Synthetic oligonucleotide
  Antisense strand to SEQ ID NO: 2435690
ugucccaaagcauaauuuc

SEQ ID NO: 2435692 - RNA, 19 nt, Artificial Sequence
  Description of Artificial Sequence: Synthetic oligonucleotide
  Sense strand starting at position 2448 of SEQ ID NO: 1886922
uugagauucucagccugaa

SEQ ID NO: 2435693 - RNA, 19 nt, Artificial Sequence
  Description of Artificial Sequence: Synthetic oligonucleotide
  Antisense strand to SEQ ID NO: 2435692
uucaggcugagaaucucaa

SEQ ID NO: 2435694 - RNA, 19 nt, Artificial Sequence
  Description of Artificial Sequence: Synthetic oligonucleotide
  Sense strand starting at position 2508 of SEQ ID NO: 1886922
gugggacucaucuagagua

SEQ ID NO: 2435695 - RNA, 19 nt, Artificial Sequence
  Description of Artificial Sequence: Synthetic oligonucleotide
  Antisense strand to SEQ ID NO: 2435694
uacucuagaugagucccac

SEQ ID NO: 2435696 - RNA, 19 nt, Artificial Sequence
  Description of Artificial Sequence: Synthetic oligonucleotide
  Sense strand starting at position 2518 of SEQ ID NO: 1886922
ucuagaguagggugaucau

SEQ ID NO: 2435697 - RNA, 19 nt, Artificial Sequence
  Description of Artificial Sequence: Synthetic oligonucleotide
  Antisense strand to SEQ ID NO: 2435696
augaucacccuacucuaga

SEQ ID NO: 2435698 - RNA, 19 nt, Artificial Sequence
  Description of Artificial Sequence: Synthetic oligonucleotide
  Sense strand starting at position 2667 of SEQ ID NO: 1886922
aggauuuaauaagggacua

SEQ ID NO: 2435699 - RNA, 19 nt, Artificial Sequence
  Description of Artificial Sequence: Synthetic oligonucleotide
  Antisense strand to SEQ ID NO: 2435698
uagucccuuauuaaauccu

SEQ ID NO: 2435700 - RNA, 19 nt, Artificial Sequence
  Description of Artificial Sequence: Synthetic oligonucleotide
  Sense strand starting at position 2790 of SEQ ID NO: 1886922
cuccacaguccugacauua

SEQ ID NO: 2435701 - RNA, 19 nt, Artificial Sequence
  Description of Artificial Sequence: Synthetic oligonucleotide
  Antisense strand to SEQ ID NO: 2435700
uaaugucaggacuguggag

SEQ ID NO: 2435702 - RNA, 19 nt, Artificial Sequence
  Description of Artificial Sequence: Synthetic oligonucleotide
  Sense strand starting at position 2940 of SEQ ID NO: 1886922
agaugugagacaugaaguu

SEQ ID NO: 2435703 - RNA, 19 nt, Artificial Sequence
  Description of Artificial Sequence: Synthetic oligonucleotide
  Antisense strand to SEQ ID NO: 2435702
aacuucaugucucacaucu

SEQ ID NO: 2435704 - RNA, 19 nt, Artificial Sequence
  Description of Artificial Sequence: Synthetic oligonucleotide
  Sense strand starting at position 3002 of SEQ ID NO: 1886922
gaaccaaggcacugugaau

SEQ ID NO: 2435705 - RNA, 19 nt, Artificial Sequence
  Description of Artificial Sequence: Synthetic oligonucleotide
  Antisense strand to SEQ ID NO: 2435704
auucacagugccuugguuc

SEQ ID NO: 2435706 - RNA, 19 nt, Artificial Sequence
  Description of Artificial Sequence: Synthetic oligonucleotide
  Sense strand starting at position 3009 of SEQ ID NO: 1886922
ggcacugugaaucaaguau

SEQ ID NO: 2435707 - RNA, 19 nt, Artificial Sequence
  Description of Artificial Sequence: Synthetic oligonucleotide
  Antisense strand to SEQ ID NO: 2435706
auacuugauucacagugcc

SEQ ID NO: 2435708 - RNA, 19 nt, Artificial Sequence
  Description of Artificial Sequence: Synthetic oligonucleotide
  Sense strand starting at position 3013 of SEQ ID NO: 1886922
cugugaaucaaguauugug

SEQ ID NO: 2435709 - RNA, 19 nt, Artificial Sequence
  Description of Artificial Sequence: Synthetic oligonucleotide
  Antisense strand to SEQ ID NO: 2435708
cacaauacuugauucacag

SEQ ID NO: 2435710 - RNA, 19 nt, Artificial Sequence
  Description of Artificial Sequence: Synthetic oligonucleotide
  Sense strand starting at position 3020 of SEQ ID NO: 1886922
ucaaguauuguggacagua

SEQ ID NO: 2435711 - RNA, 19 nt, Artificial Sequence
  Description of Artificial Sequence: Synthetic oligonucleotide
  Antisense strand to SEQ ID NO: 2435710
uacuguccacaauacuuga

SEQ ID NO: 2435712 - RNA, 19 nt, Artificial Sequence
  Description of Artificial Sequence: Synthetic oligonucleotide
  Sense strand starting at position 3171 of SEQ ID NO: 1886922
uuuaauuaggcugggauga

SEQ ID NO: 2435713 - RNA, 19 nt, Artificial Sequence
  Description of Artificial Sequence: Synthetic oligonucleotide
  Antisense strand to SEQ ID NO: 2435712
ucaucccagccuaauuaaa

SEQ ID NO: 2435714 - RNA, 19 nt, Artificial Sequence
  Description of Artificial Sequence: Synthetic oligonucleotide
  Sense strand starting at position 3232 of SEQ ID NO: 1886922
gcuggaagacuggaauguu

SEQ ID NO: 2435715 - RNA, 19 nt, Artificial Sequence
  Description of Artificial Sequence: Synthetic oligonucleotide
  Antisense strand to SEQ ID NO: 2435714
aacauuccagucuuccagc

SEQ ID NO: 2435716 - RNA, 19 nt, Artificial Sequence
  Description of Artificial Sequence: Synthetic oligonucleotide
  Sense strand starting at position 3235 of SEQ ID NO: 1886922
ggaagacuggaauguuucu

SEQ ID NO: 2435717 - RNA, 19 nt, Artificial Sequence
  Description of Artificial Sequence: Synthetic oligonucleotide
  Antisense strand to SEQ ID NO: 2435716
agaaacauuccagucuucc

SEQ ID NO: 2435718 - RNA, 19 nt, Artificial Sequence
  Description of Artificial Sequence: Synthetic oligonucleotide
  Sense strand starting at position 3324 of SEQ ID NO: 1886922
gggcaagagugauccauua

SEQ ID NO: 2435719 - RNA, 19 nt, Artificial Sequence
  Description of Artificial Sequence: Synthetic oligonucleotide
  Antisense strand to SEQ ID NO: 2435718
uaauggaucacucuugccc

SEQ ID NO: 2435720 - RNA, 19 nt, Artificial Sequence
  Description of Artificial Sequence: Synthetic oligonucleotide
  Sense strand starting at position 3506 of SEQ ID NO: 1886922
cuaguaagucuugagcaag

SEQ ID NO: 2435721 - RNA, 19 nt, Artificial Sequence
  Description of Artificial Sequence: Synthetic oligonucleotide
  Antisense strand to SEQ ID NO: 2435720
cuugcucaagacuuacuag

SEQ ID NO: 2435722 - RNA, 19 nt, Artificial Sequence
  Description of Artificial Sequence: Synthetic oligonucleotide
  Sense strand starting at position 3534 of SEQ ID NO: 1886922
agcugauguccucaacaug

SEQ ID NO: 2435723 - RNA, 19 nt, Artificial Sequence
  Description of Artificial Sequence: Synthetic oligonucleotide
  Antisense strand to SEQ ID NO: 2435722
cauguugaggacaucagcu

SEQ ID NO: 2435724 - RNA, 19 nt, Artificial Sequence
  Description of Artificial Sequence: Synthetic oligonucleotide
  Sense strand starting at position 3683 of SEQ ID NO: 1886922
cucacauaaugcuuuggga

SEQ ID NO: 2435725 - RNA, 19 nt, Artificial Sequence
  Description of Artificial Sequence: Synthetic oligonucleotide
  Antisense strand to SEQ ID NO: 2435724
ucccaaagcauuaugugag

SEQ ID NO: 2435726 - RNA, 19 nt, Artificial Sequence
  Description of Artificial Sequence: Synthetic oligonucleotide
  Sense strand starting at position 3826 of SEQ ID NO: 1886922
cgauuugacugguauuuaa

SEQ ID NO: 2435727 - RNA, 19 nt, Artificial Sequence
  Description of Artificial Sequence: Synthetic oligonucleotide
  Antisense strand to SEQ ID NO: 2435726
uuaaauaccagucaaaucg

SEQ ID NO: 2435728 - RNA, 19 nt, Artificial Sequence
  Description of Artificial Sequence: Synthetic oligonucleotide
  Sense strand starting at position 3836 of SEQ ID NO: 1886922
gguauuuaaugcuuucuca

SEQ ID NO: 2435729 - RNA, 19 nt, Artificial Sequence
  Description of Artificial Sequence: Synthetic oligonucleotide
  Antisense strand to SEQ ID NO: 2435728
ugagaaagcauuaaauacc

SEQ ID NO: 2435730 - RNA, 19 nt, Artificial Sequence
  Description of Artificial Sequence: Synthetic oligonucleotide
  Sense strand starting at position 3932 of SEQ ID NO: 1886922
ucuccacuuguguaauaaa

SEQ ID NO: 2435731 - RNA, 19 nt, Artificial Sequence
  Description of Artificial Sequence: Synthetic oligonucleotide
  Antisense strand to SEQ ID NO: 2435730
uuuauuacacaaguggaga

SEQ ID NO: 2435732 - RNA, 19 nt, Artificial Sequence
  Description of Artificial Sequence: Synthetic oligonucleotide
  Sense strand starting at position 3974 of SEQ ID NO: 1886922
gaacaaggucccugacuga

SEQ ID NO: 2435733 - RNA, 19 nt, Artificial Sequence
  Description of Artificial Sequence: Synthetic oligonucleotide
  Antisense strand to SEQ ID NO: 2435732
ucagucagggaccuuguuc

SEQ ID NO: 2435734 - RNA, 19 nt, Artificial Sequence
  Description of Artificial Sequence: Synthetic oligonucleotide
  Sense strand starting at position 45 of SEQ ID NO: 1886923
caaugacugucucugagga

SEQ ID NO: 2435735 - RNA, 19 nt, Artificial Sequence
  Description of Artificial Sequence: Synthetic oligonucleotide
  Antisense strand to SEQ ID NO: 2435734
uccucagagacagucauug

SEQ ID NO: 2435736 - RNA, 19 nt, Artificial Sequence
  Description of Artificial Sequence: Synthetic oligonucleotide
  Sense strand starting at position 95 of SEQ ID NO: 1886923
guuaauuucuguuccucga

SEQ ID NO: 2435737 - RNA, 19 nt, Artificial Sequence
  Description of Artificial Sequence: Synthetic oligonucleotide
  Antisense strand to SEQ ID NO: 2435736
ucgaggaacagaaauuaac

SEQ ID NO: 2435738 - RNA, 19 nt, Artificial Sequence
  Description of Artificial Sequence: Synthetic oligonucleotide
  Sense strand starting at position 99 of SEQ ID NO: 1886923
auuucuguuccucgaucca

SEQ ID NO: 2435739 - RNA, 19 nt, Artificial Sequence
  Description of Artificial Sequence: Synthetic oligonucleotide
  Antisense strand to SEQ ID NO: 2435738
uggaucgaggaacagaaau

SEQ ID NO: 2435740 - RNA, 19 nt, Artificial Sequence
  Description of Artificial Sequence: Synthetic oligonucleotide
  Sense strand starting at position 129 of SEQ ID NO: 1886923
ucugcccuucgacagaauu

SEQ ID NO: 2435741 - RNA, 19 nt, Artificial Sequence
  Description of Artificial Sequence: Synthetic oligonucleotide
  Antisense strand to SEQ ID NO: 2435740
aauucugucgaagggcaga

SEQ ID NO: 2435742 - RNA, 19 nt, Artificial Sequence
  Description of Artificial Sequence: Synthetic oligonucleotide
  Sense strand starting at position 371 of SEQ ID NO: 1886923
acauaaggauccuccaguu

SEQ ID NO: 2435743 - RNA, 19 nt, Artificial Sequence
  Description of Artificial Sequence: Synthetic oligonucleotide
  Antisense strand to SEQ ID NO: 2435742
aacuggaggauccuuaugu

SEQ ID NO: 2435744 - RNA, 19 nt, Artificial Sequence
  Description of Artificial Sequence: Synthetic oligonucleotide
  Sense strand starting at position 445 of SEQ ID NO: 1886923
gaggacaccugggauuuaa

SEQ ID NO: 2435745 - RNA, 19 nt, Artificial Sequence
  Description of Artificial Sequence: Synthetic oligonucleotide
  Antisense strand to SEQ ID NO: 2435744
uuaaaucccagguguccuc

SEQ ID NO: 2435746 - RNA, 19 nt, Artificial Sequence
  Description of Artificial Sequence: Synthetic oligonucleotide
  Sense strand starting at position 803 of SEQ ID NO: 1886923
uggugcuuugcucaggaaa

SEQ ID NO: 2435747 - RNA, 19 nt, Artificial Sequence
  Description of Artificial Sequence: Synthetic oligonucleotide
  Antisense strand to SEQ ID NO: 2435746
uuuccugagcaaagcacca

SEQ ID NO: 2435748 - RNA, 19 nt, Artificial Sequence
  Description of Artificial Sequence: Synthetic oligonucleotide
  Sense strand starting at position 806 of SEQ ID NO: 1886923
ugcuuugcucaggaaaugu

SEQ ID NO: 2435749 - RNA, 19 nt, Artificial Sequence
  Description of Artificial Sequence: Synthetic oligonucleotide
  Antisense strand to SEQ ID NO: 2435748
acauuuccugagcaaagca

SEQ ID NO: 2435750 - RNA, 19 nt, Artificial Sequence
  Description of Artificial Sequence: Synthetic oligonucleotide
  Sense strand starting at position 815 of SEQ ID NO: 1886923
caggaaauguugguugaau

SEQ ID NO: 2435751 - RNA, 19 nt, Artificial Sequence
  Description of Artificial Sequence: Synthetic oligonucleotide
  Antisense strand to SEQ ID NO: 2435750
auucaaccaacauuuccug

SEQ ID NO: 2435752 - RNA, 19 nt, Artificial Sequence
  Description of Artificial Sequence: Synthetic oligonucleotide
  Sense strand starting at position 817 of SEQ ID NO: 1886923
ggaaauguugguugaauua

SEQ ID NO: 2435753 - RNA, 19 nt, Artificial Sequence
  Description of Artificial Sequence: Synthetic oligonucleotide
  Antisense strand to SEQ ID NO: 2435752
uaauucaaccaacauuucc

SEQ ID NO: 2435754 - RNA, 19 nt, Artificial Sequence
  Description of Artificial Sequence: Synthetic oligonucleotide
  Sense strand starting at position 829 of SEQ ID NO: 1886923
ugaauuaaaccggagcacu

SEQ ID NO: 2435755 - RNA, 19 nt, Artificial Sequence
  Description of Artificial Sequence: Synthetic oligonucleotide
  Antisense strand to SEQ ID NO: 2435754
agugcuccgguuuaauuca

SEQ ID NO: 2435756 - RNA, 19 nt, Artificial Sequence
  Description of Artificial Sequence: Synthetic oligonucleotide
  Sense strand starting at position 903 of SEQ ID NO: 1886923
ggagauaguucuuuaaauu

SEQ ID NO: 2435757 - RNA, 19 nt, Artificial Sequence
  Description of Artificial Sequence: Synthetic oligonucleotide
  Antisense strand to SEQ ID NO: 2435756
aauuuaaagaacuaucucc

SEQ ID NO: 2435758 - RNA, 19 nt, Artificial Sequence
  Description of Artificial Sequence: Synthetic oligonucleotide
  Sense strand starting at position 1226 of SEQ ID NO: 1886923
augaguggauucucagcaa

SEQ ID NO: 2435759 - RNA, 19 nt, Artificial Sequence
  Description of Artificial Sequence: Synthetic oligonucleotide
  Antisense strand to SEQ ID NO: 2435758
uugcugagaauccacucau

SEQ ID NO: 2435760 - RNA, 19 nt, Artificial Sequence
  Description of Artificial Sequence: Synthetic oligonucleotide
  Sense strand starting at position 1252 of SEQ ID NO: 1886923
agccacucgccucauauau

SEQ ID NO: 2435761 - RNA, 19 nt, Artificial Sequence
  Description of Artificial Sequence: Synthetic oligonucleotide
  Antisense strand to SEQ ID NO: 2435760
auauaugaggcgaguggcu

SEQ ID NO: 2435762 - RNA, 19 nt, Artificial Sequence
  Description of Artificial Sequence: Synthetic oligonucleotide
  Sense strand starting at position 1282 of SEQ ID NO: 1886923
uugagaauccacggugucu

SEQ ID NO: 2435763 - RNA, 19 nt, Artificial Sequence
  Description of Artificial Sequence: Synthetic oligonucleotide
  Antisense strand to SEQ ID NO: 2435762
agacaccguggauucucaa

SEQ ID NO: 2435764 - RNA, 19 nt, Artificial Sequence
  Description of Artificial Sequence: Synthetic oligonucleotide
  Sense strand starting at position 1423 of SEQ ID NO: 1886923
cuaugagguugcucugauc

SEQ ID NO: 2435765 - RNA, 19 nt, Artificial Sequence
  Description of Artificial Sequence: Synthetic oligonucleotide
  Antisense strand to SEQ ID NO: 2435764
gaucagagcaaccucauag

SEQ ID NO: 2435766 - RNA, 19 nt, Artificial Sequence
  Description of Artificial Sequence: Synthetic oligonucleotide
  Sense strand starting at position 1509 of SEQ ID NO: 1886923
ggaugucaacuccaucacu

SEQ ID NO: 2435767 - RNA, 19 nt, Artificial Sequence
  Description of Artificial Sequence: Synthetic oligonucleotide
  Antisense strand to SEQ ID NO: 2435766
agugauggaguugacaucc

SEQ ID NO: 2435768 - RNA, 19 nt, Artificial Sequence
  Description of Artificial Sequence: Synthetic oligonucleotide
  Sense strand starting at position 1726 of SEQ ID NO: 1886923
cccagaggucacugcaaua

SEQ ID NO: 2435769 - RNA, 19 nt, Artificial Sequence
  Description of Artificial Sequence: Synthetic oligonucleotide
  Antisense strand to SEQ ID NO: 2435768
uauugcagugaccucuggg

SEQ ID NO: 2435770 - RNA, 19 nt, Artificial Sequence
  Description of Artificial Sequence: Synthetic oligonucleotide
  Sense strand starting at position 1759 of SEQ ID NO: 1886923
gaggcuuaucuggguagag

SEQ ID NO: 2435771 - RNA, 19 nt, Artificial Sequence
  Description of Artificial Sequence: Synthetic oligonucleotide
  Antisense strand to SEQ ID NO: 2435770
cucuacccagauaagccuc

SEQ ID NO: 2435772 - RNA, 19 nt, Artificial Sequence
  Description of Artificial Sequence: Synthetic oligonucleotide
  Sense strand starting at position 1809 of SEQ ID NO: 1886923
gacagugcagaucacauau

SEQ ID NO: 2435773 - RNA, 19 nt, Artificial Sequence
  Description of Artificial Sequence: Synthetic oligonucleotide
  Antisense strand to SEQ ID NO: 2435772
auaugugaucugcacuguc

SEQ ID NO: 2435774 - RNA, 19 nt, Artificial Sequence
  Description of Artificial Sequence: Synthetic oligonucleotide
  Sense strand starting at position 1852 of SEQ ID NO: 1886923
cacgcaugggcuuacuuua

SEQ ID NO: 2435775 - RNA, 19 nt, Artificial Sequence
  Description of Artificial Sequence: Synthetic oligonucleotide
  Antisense strand to SEQ ID NO: 2435774
uaaaguaagcccaugcgug

SEQ ID NO: 2435776 - RNA, 19 nt, Artificial Sequence
  Description of Artificial Sequence: Synthetic oligonucleotide
  Sense strand starting at position 2025 of SEQ ID NO: 1886923
gucauaccuccuggaggau

SEQ ID NO: 2435777 - RNA, 19 nt, Artificial Sequence
  Description of Artificial Sequence: Synthetic oligonucleotide
  Antisense strand to SEQ ID NO: 2435776
auccuccaggagguaugac

SEQ ID NO: 2435778 - RNA, 19 nt, Artificial Sequence
  Description of Artificial Sequence: Synthetic oligonucleotide
  Sense strand starting at position 2372 of SEQ ID NO: 1886923
ugauaugaagcaugauuaa

SEQ ID NO: 2435779 - RNA, 19 nt, Artificial Sequence
  Description of Artificial Sequence: Synthetic oligonucleotide
  Antisense strand to SEQ ID NO: 2435778
uuaaucaugcuucauauca

SEQ ID NO: 2435780 - RNA, 19 nt, Artificial Sequence
  Description of Artificial Sequence: Synthetic oligonucleotide
  Sense strand starting at position 2411 of SEQ ID NO: 1886923
gcaugaguucguuaccuga

SEQ ID NO: 2435781 - RNA, 19 nt, Artificial Sequence
  Description of Artificial Sequence: Synthetic oligonucleotide
  Antisense strand to SEQ ID NO: 2435780
ucagguaacgaacucaugc

SEQ ID NO: 2435782 - RNA, 19 nt, Artificial Sequence
  Description of Artificial Sequence: Synthetic oligonucleotide
  Sense strand starting at position 2413 of SEQ ID NO: 1886923
augaguucguuaccugauu

SEQ ID NO: 2435783 - RNA, 19 nt, Artificial Sequence
  Description of Artificial Sequence: Synthetic oligonucleotide
  Antisense strand to SEQ ID NO: 2435782
aaucagguaacgaacucau

SEQ ID NO: 2435784 - RNA, 19 nt, Artificial Sequence
  Description of Artificial Sequence: Synthetic oligonucleotide
  Sense strand starting at position 2648 of SEQ ID NO: 1886923
cucuuuaagucuccaguua

SEQ ID NO: 2435785 - RNA, 19 nt, Artificial Sequence
  Description of Artificial Sequence: Synthetic oligonucleotide
  Antisense strand to SEQ ID NO: 2435784
uaacuggagacuuaaagag

SEQ ID NO: 2435786 - RNA, 19 nt, Artificial Sequence
  Description of Artificial Sequence: Synthetic oligonucleotide
  Sense strand starting at position 2649 of SEQ ID NO: 1886923
ucuuuaagucuccaguuac

SEQ ID NO: 2435787 - RNA, 19 nt, Artificial Sequence
  Description of Artificial Sequence: Synthetic oligonucleotide
  Antisense strand to SEQ ID NO: 2435786
guaacuggagacuuaaaga

SEQ ID NO: 2435788 - RNA, 19 nt, Artificial Sequence
  Description of Artificial Sequence: Synthetic oligonucleotide
  Sense strand starting at position 2709 of SEQ ID NO: 1886923
auuguugcacaguaagacu

SEQ ID NO: 2435789 - RNA, 19 nt, Artificial Sequence
  Description of Artificial Sequence: Synthetic oligonucleotide
  Antisense strand to SEQ ID NO: 2435788
agucuuacugugcaacaau

SEQ ID NO: 2435790 - RNA, 19 nt, Artificial Sequence
  Description of Artificial Sequence: Synthetic oligonucleotide
  Sense strand starting at position 2741 of SEQ ID NO: 1886923
uuugcuuaaacguaugagu

SEQ ID NO: 2435791 - RNA, 19 nt, Artificial Sequence
  Description of Artificial Sequence: Synthetic oligonucleotide
  Antisense strand to SEQ ID NO: 2435790
acucauacguuuaagcaaa

SEQ ID NO: 2435792 - RNA, 19 nt, Artificial Sequence
  Description of Artificial Sequence: Synthetic oligonucleotide
  Sense strand starting at position 3102 of SEQ ID NO: 1886923
acuuuaaggucauuaaaug

SEQ ID NO: 2435793 - RNA, 19 nt, Artificial Sequence
  Description of Artificial Sequence: Synthetic oligonucleotide
  Antisense strand to SEQ ID NO: 2435792
cauuuaaugaccuuaaagu

SEQ ID NO: 2435794 - RNA, 19 nt, Artificial Sequence
  Description of Artificial Sequence: Synthetic oligonucleotide
  Sense strand starting at position 3148 of SEQ ID NO: 1886923
acuuucuggcccuaagaga

SEQ ID NO: 2435795 - RNA, 19 nt, Artificial Sequence
  Description of Artificial Sequence: Synthetic oligonucleotide
  Antisense strand to SEQ ID NO: 2435794
ucucuuagggccagaaagu

SEQ ID NO: 2435796 - RNA, 19 nt, Artificial Sequence
  Description of Artificial Sequence: Synthetic oligonucleotide
  Sense strand starting at position 3709 of SEQ ID NO: 1886923
ugcaguugcaggcauagaa

SEQ ID NO: 2435797 - RNA, 19 nt, Artificial Sequence
  Description of Artificial Sequence: Synthetic oligonucleotide
  Antisense strand to SEQ ID NO: 2435796
uucuaugccugcaacugca

SEQ ID NO: 2435798 - RNA, 19 nt, Artificial Sequence
  Description of Artificial Sequence: Synthetic oligonucleotide
  Sense strand starting at position 3729 of SEQ ID NO: 1886923
aucugacaucuuugcaaga

SEQ ID NO: 2435799 - RNA, 19 nt, Artificial Sequence
  Description of Artificial Sequence: Synthetic oligonucleotide
  Antisense strand to SEQ ID NO: 2435798
ucuugcaaagaugucagau

SEQ ID NO: 2435800 - RNA, 19 nt, Artificial Sequence
  Description of Artificial Sequence: Synthetic oligonucleotide
  Sense strand starting at position 3730 of SEQ ID NO: 1886923
ucugacaucuuugcaagaa

SEQ ID NO: 2435801 - RNA, 19 nt, Artificial Sequence
  Description of Artificial Sequence: Synthetic oligonucleotide
  Antisense strand to SEQ ID NO: 2435800
uucuugcaaagaugucaga

SEQ ID NO: 2435802 - RNA, 19 nt, Artificial Sequence
  Description of Artificial Sequence: Synthetic oligonucleotide
  Sense strand starting at position 3740 of SEQ ID NO: 1886923
uugcaagaaucaucgugga

SEQ ID NO: 2435803 - RNA, 19 nt, Artificial Sequence
  Description of Artificial Sequence: Synthetic oligonucleotide
  Antisense strand to SEQ ID NO: 2435802
uccacgaugauucuugcaa

SEQ ID NO: 2435804 - RNA, 19 nt, Artificial Sequence
  Description of Artificial Sequence: Synthetic oligonucleotide
  Sense strand starting at position 3744 of SEQ ID NO: 1886923
aagaaucaucguggaugua

SEQ ID NO: 2435805 - RNA, 19 nt, Artificial Sequence
  Description of Artificial Sequence: Synthetic oligonucleotide
  Antisense strand to SEQ ID NO: 2435804
uacauccacgaugauucuu

SEQ ID NO: 2435806 - RNA, 19 nt, Artificial Sequence
  Description of Artificial Sequence: Synthetic oligonucleotide
  Sense strand starting at position 3820 of SEQ ID NO: 1886923
ugccaagaagcaugccaaa

SEQ ID NO: 2435807 - RNA, 19 nt, Artificial Sequence
  Description of Artificial Sequence: Synthetic oligonucleotide
  Antisense strand to SEQ ID NO: 2435806
uuuggcaugcuucuuggca

SEQ ID NO: 2435808 - RNA, 19 nt, Artificial Sequence
  Description of Artificial Sequence: Synthetic oligonucleotide
  Sense strand starting at position 3904 of SEQ ID NO: 1886923
uuacguaaaucacccugaa

SEQ ID NO: 2435809 - RNA, 19 nt, Artificial Sequence
  Description of Artificial Sequence: Synthetic oligonucleotide
  Antisense strand to SEQ ID NO: 2435808
uucagggugauuuacguaa

SEQ ID NO: 2435810 - RNA, 19 nt, Artificial Sequence
  Description of Artificial Sequence: Synthetic oligonucleotide
  Sense strand starting at position 3907 of SEQ ID NO: 1886923
cguaaaucacccugaacau

SEQ ID NO: 2435811 - RNA, 19 nt, Artificial Sequence
  Description of Artificial Sequence: Synthetic oligonucleotide
  Antisense strand to SEQ ID NO: 2435810
auguucagggugauuuacg

SEQ ID NO: 2435812 - RNA, 19 nt, Artificial Sequence
  Description of Artificial Sequence: Synthetic oligonucleotide
  Sense strand starting at position 3918 of SEQ ID NO: 1886923
cugaacauguuugcaucaa

SEQ ID NO: 2435813 - RNA, 19 nt, Artificial Sequence
  Description of Artificial Sequence: Synthetic oligonucleotide
  Antisense strand to SEQ ID NO: 2435812
uugaugcaaacauguucag

SEQ ID NO: 2435814 - RNA, 19 nt, Artificial Sequence
  Description of Artificial Sequence: Synthetic oligonucleotide
  Sense strand starting at position 906 of SEQ ID NO: 1886924
augagucaaucauuaagua

SEQ ID NO: 2435815 - RNA, 19 nt, Artificial Sequence
  Description of Artificial Sequence: Synthetic oligonucleotide
  Antisense strand to SEQ ID NO: 2435814
uacuuaaugauugacucau

SEQ ID NO: 2435816 - RNA, 19 nt, Artificial Sequence
  Description of Artificial Sequence: Synthetic oligonucleotide
  Sense strand starting at position 933 of SEQ ID NO: 1886924
auacaagcauaguuguaaa

SEQ ID NO: 2435817 - RNA, 19 nt, Artificial Sequence
  Description of Artificial Sequence: Synthetic oligonucleotide
  Antisense strand to SEQ ID NO: 2435816
uuuacaacuaugcuuguau

SEQ ID NO: 2435818 - RNA, 19 nt, Artificial Sequence
  Description of Artificial Sequence: Synthetic oligonucleotide
  Sense strand starting at position 960 of SEQ ID NO: 1886924
uugcaaguaugcugacaug

SEQ ID NO: 2435819 - RNA, 19 nt, Artificial Sequence
  Description of Artificial Sequence: Synthetic oligonucleotide
  Antisense strand to SEQ ID NO: 2435818
caugucagcauacuugcaa

SEQ ID NO: 2435820 - RNA, 19 nt, Artificial Sequence
  Description of Artificial Sequence: Synthetic oligonucleotide
  Sense strand starting at position 963 of SEQ ID NO: 1886924
caaguaugcugacaugcaa

SEQ ID NO: 2435821 - RNA, 19 nt, Artificial Sequence
  Description of Artificial Sequence: Synthetic oligonucleotide
  Antisense strand to SEQ ID NO: 2435820
uugcaugucagcauacuug

SEQ ID NO: 2435822 - RNA, 19 nt, Artificial Sequence
  Description of Artificial Sequence: Synthetic oligonucleotide
  Sense strand starting at position 1021 of SEQ ID NO: 1886924
acuugaguuugagcaccua

SEQ ID NO: 2435823 - RNA, 19 nt, Artificial Sequence
  Description of Artificial Sequence: Synthetic oligonucleotide
  Antisense strand to SEQ ID NO: 2435822
uaggugcucaaacucaagu

SEQ ID NO: 2435824 - RNA, 19 nt, Artificial Sequence
  Description of Artificial Sequence: Synthetic oligonucleotide
  Sense strand starting at position 1112 of SEQ ID NO: 1886924
aaucguuuacauuguggau

SEQ ID NO: 2435825 - RNA, 19 nt, Artificial Sequence
  Description of Artificial Sequence: Synthetic oligonucleotide
  Antisense strand to SEQ ID NO: 2435824
auccacaauguaaacgauu

SEQ ID NO: 2435826 - RNA, 19 nt, Artificial Sequence
  Description of Artificial Sequence: Synthetic oligonucleotide
  Sense strand starting at position 1114 of SEQ ID NO: 1886924
ucguuuacauuguggauuu

SEQ ID NO: 2435827 - RNA, 19 nt, Artificial Sequence
  Description of Artificial Sequence: Synthetic oligonucleotide
  Antisense strand to SEQ ID NO: 2435826
aaauccacaauguaaacga

SEQ ID NO: 2435828 - RNA, 19 nt, Artificial Sequence
  Description of Artificial Sequence: Synthetic oligonucleotide
  Sense strand starting at position 1175 of SEQ ID NO: 1886924
gaaagaagcuggcauuucu

SEQ ID NO: 2435829 - RNA, 19 nt, Artificial Sequence
  Description of Artificial Sequence: Synthetic oligonucleotide
  Antisense strand to SEQ ID NO: 2435828
agaaaugccagcuucuuuc

SEQ ID NO: 2435830 - RNA, 19 nt, Artificial Sequence
  Description of Artificial Sequence: Synthetic oligonucleotide
  Sense strand starting at position 1182 of SEQ ID NO: 1886924
gcuggcauuucuuauucuu

SEQ ID NO: 2435831 - RNA, 19 nt, Artificial Sequence
  Description of Artificial Sequence: Synthetic oligonucleotide
  Antisense strand to SEQ ID NO: 2435830
aagaauaagaaaugccagc

SEQ ID NO: 2435832 - RNA, 19 nt, Artificial Sequence
  Description of Artificial Sequence: Synthetic oligonucleotide
  Sense strand starting at position 1266 of SEQ ID NO: 1886924
uggaaucaauacccgagau

SEQ ID NO: 2435833 - RNA, 19 nt, Artificial Sequence
  Description of Artificial Sequence: Synthetic oligonucleotide
  Antisense strand to SEQ ID NO: 2435832
aucucggguauugauucca

SEQ ID NO: 2435834 - RNA, 19 nt, Artificial Sequence
  Description of Artificial Sequence: Synthetic oligonucleotide
  Sense strand starting at position 2011 of SEQ ID NO: 1886924
gugggcuucccugagggau

SEQ ID NO: 2435835 - RNA, 19 nt, Artificial Sequence
  Description of Artificial Sequence: Synthetic oligonucleotide
  Antisense strand to SEQ ID NO: 2435834
aucccucagggaagcccac

SEQ ID NO: 2435836 - RNA, 19 nt, Artificial Sequence
  Description of Artificial Sequence: Synthetic oligonucleotide
  Sense strand starting at position 2026 of SEQ ID NO: 1886924
ggaugaagcuaacauuuau

SEQ ID NO: 2435837 - RNA, 19 nt, Artificial Sequence
  Description of Artificial Sequence: Synthetic oligonucleotide
  Antisense strand to SEQ ID NO: 2435836
auaaauguuagcuucaucc

SEQ ID NO: 2435838 - RNA, 19 nt, Artificial Sequence
  Description of Artificial Sequence: Synthetic oligonucleotide
  Sense strand starting at position 2051 of SEQ ID NO: 1886924
ccuacacugggccagauau

SEQ ID NO: 2435839 - RNA, 19 nt, Artificial Sequence
  Description of Artificial Sequence: Synthetic oligonucleotide
  Antisense strand to SEQ ID NO: 2435838
auaucuggcccaguguagg

SEQ ID NO: 2435840 - RNA, 19 nt, Artificial Sequence
  Description of Artificial Sequence: Synthetic oligonucleotide
  Sense strand starting at position 2069 of SEQ ID NO: 1886924
ucguacauguggugcaauu

SEQ ID NO: 2435841 - RNA, 19 nt, Artificial Sequence
  Description of Artificial Sequence: Synthetic oligonucleotide
  Antisense strand to SEQ ID NO: 2435840
aauugcaccacauguacga

SEQ ID NO: 2435842 - RNA, 19 nt, Artificial Sequence
  Description of Artificial Sequence: Synthetic oligonucleotide
  Sense strand starting at position 2122 of SEQ ID NO: 1886924
cagagauggucagaaacuu

SEQ ID NO: 2435843 - RNA, 19 nt, Artificial Sequence
  Description of Artificial Sequence: Synthetic oligonucleotide
  Antisense strand to SEQ ID NO: 2435842
aaguuucugaccaucucug

SEQ ID NO: 2435844 - RNA, 19 nt, Artificial Sequence
  Description of Artificial Sequence: Synthetic oligonucleotide
  Sense strand starting at position 2154 of SEQ ID NO: 1886924
auagcuuagaugugucaga

SEQ ID NO: 2435845 - RNA, 19 nt, Artificial Sequence
  Description of Artificial Sequence: Synthetic oligonucleotide
  Antisense strand to SEQ ID NO: 2435844
ucugacacaucuaagcuau

SEQ ID NO: 2435846 - RNA, 19 nt, Artificial Sequence
  Description of Artificial Sequence: Synthetic oligonucleotide
  Sense strand starting at position 2159 of SEQ ID NO: 1886924
uuagaugugucagagacca

SEQ ID NO: 2435847 - RNA, 19 nt, Artificial Sequence
  Description of Artificial Sequence: Synthetic oligonucleotide
  Antisense strand to SEQ ID NO: 2435846
uggucucugacacaucuaa

SEQ ID NO: 2435848 - RNA, 19 nt, Artificial Sequence
  Description of Artificial Sequence: Synthetic oligonucleotide
  Sense strand starting at position 3366 of SEQ ID NO: 1886924
uaguguuguacacagagag

SEQ ID NO: 2435849 - RNA, 19 nt, Artificial Sequence
  Description of Artificial Sequence: Synthetic oligonucleotide
  Antisense strand to SEQ ID NO: 2435848
cucucuguguacaacacua

SEQ ID NO: 2435850 - RNA, 19 nt, Artificial Sequence
  Description of Artificial Sequence: Synthetic oligonucleotide
  Sense strand starting at position 3512 of SEQ ID NO: 1886924
uauuuauucuuagacggag

SEQ ID NO: 2435851 - RNA, 19 nt, Artificial Sequence
  Description of Artificial Sequence: Synthetic oligonucleotide
  Antisense strand to SEQ ID NO: 2435850
cuccgucuaagaauaaaua

SEQ ID NO: 2435852 - RNA, 19 nt, Artificial Sequence
  Description of Artificial Sequence: Synthetic oligonucleotide
  Sense strand starting at position 55 of SEQ ID NO: 1886925
gagucagucuaagcacaga

SEQ ID NO: 2435853 - RNA, 19 nt, Artificial Sequence
  Description of Artificial Sequence: Synthetic oligonucleotide
  Antisense strand to SEQ ID NO: 2435852
ucugugcuuagacugacuc

SEQ ID NO: 2435854 - RNA, 19 nt, Artificial Sequence
  Description of Artificial Sequence: Synthetic oligonucleotide
  Sense strand starting at position 291 of SEQ ID NO: 1886925
gaccaagagugaucccuga

SEQ ID NO: 2435855 - RNA, 19 nt, Artificial Sequence
  Description of Artificial Sequence: Synthetic oligonucleotide
  Antisense strand to SEQ ID NO: 2435854
ucagggaucacucuugguc

SEQ ID NO: 2435856 - RNA, 19 nt, Artificial Sequence
  Description of Artificial Sequence: Synthetic oligonucleotide
  Sense strand starting at position 295 of SEQ ID NO: 1886925
aagagugaucccugacagc

SEQ ID NO: 2435857 - RNA, 19 nt, Artificial Sequence
  Description of Artificial Sequence: Synthetic oligonucleotide
  Antisense strand to SEQ ID NO: 2435856
gcugucagggaucacucuu

SEQ ID NO: 2435858 - RNA, 19 nt, Artificial Sequence
  Description of Artificial Sequence: Synthetic oligonucleotide
  Sense strand starting at position 314 of SEQ ID NO: 1886925
gucagauuccuaugcagaa

SEQ ID NO: 2435859 - RNA, 19 nt, Artificial Sequence
  Description of Artificial Sequence: Synthetic oligonucleotide
  Antisense strand to SEQ ID NO: 2435858
uucugcauaggaaucugac

SEQ ID NO: 2435860 - RNA, 19 nt, Artificial Sequence
  Description of Artificial Sequence: Synthetic oligonucleotide
  Sense strand starting at position 315 of SEQ ID NO: 1886925
ucagauuccuaugcagaag

SEQ ID NO: 2435861 - RNA, 19 nt, Artificial Sequence
  Description of Artificial Sequence: Synthetic oligonucleotide
  Antisense strand to SEQ ID NO: 2435860
cuucugcauaggaaucuga

SEQ ID NO: 2435862 - RNA, 19 nt, Artificial Sequence
  Description of Artificial Sequence: Synthetic oligonucleotide
  Sense strand starting at position 333 of SEQ ID NO: 1886925
gggacugcugggugggaaa

SEQ ID NO: 2435863 - RNA, 19 nt, Artificial Sequence
  Description of Artificial Sequence: Synthetic oligonucleotide
  Antisense strand to SEQ ID NO: 2435862
uuucccacccagcaguccc

SEQ ID NO: 2435864 - RNA, 19 nt, Artificial Sequence
  Description of Artificial Sequence: Synthetic oligonucleotide
  Sense strand starting at position 353 of SEQ ID NO: 1886925
ggaucaccgacagguucua

SEQ ID NO: 2435865 - RNA, 19 nt, Artificial Sequence
  Description of Artificial Sequence: Synthetic oligonucleotide
  Antisense strand to SEQ ID NO: 2435864
uagaaccugucggugaucc

SEQ ID NO: 2435866 - RNA, 19 nt, Artificial Sequence
  Description of Artificial Sequence: Synthetic oligonucleotide
  Sense strand starting at position 502 of SEQ ID NO: 1886925
ggaggacccugguuaaucu

SEQ ID NO: 2435867 - RNA, 19 nt, Artificial Sequence
  Description of Artificial Sequence: Synthetic oligonucleotide
  Antisense strand to SEQ ID NO: 2435866
agauuaaccaggguccucc

SEQ ID NO: 2435868 - RNA, 19 nt, Artificial Sequence
  Description of Artificial Sequence: Synthetic oligonucleotide
  Sense strand starting at position 759 of SEQ ID NO: 1886925
gguggucucacuggacuga

SEQ ID NO: 2435869 - RNA, 19 nt, Artificial Sequence
  Description of Artificial Sequence: Synthetic oligonucleotide
  Antisense strand to SEQ ID NO: 2435868
ucaguccagugagaccacc

SEQ ID NO: 2435870 - RNA, 19 nt, Artificial Sequence
  Description of Artificial Sequence: Synthetic oligonucleotide
  Sense strand starting at position 1416 of SEQ ID NO: 1886925
agcuguuaagcagaacaaa

SEQ ID NO: 2435871 - RNA, 19 nt, Artificial Sequence
  Description of Artificial Sequence: Synthetic oligonucleotide
  Antisense strand to SEQ ID NO: 2435870
uuuguucugcuuaacagcu

SEQ ID NO: 2435872 - RNA, 19 nt, Artificial Sequence
  Description of Artificial Sequence: Synthetic oligonucleotide
  Sense strand starting at position 1450 of SEQ ID NO: 1886925
agaagaggucgugggucuu

SEQ ID NO: 2435873 - RNA, 19 nt, Artificial Sequence
  Description of Artificial Sequence: Synthetic oligonucleotide
  Antisense strand to SEQ ID NO: 2435872
aagacccacgaccucuucu

SEQ ID NO: 2435874 - RNA, 19 nt, Artificial Sequence
  Description of Artificial Sequence: Synthetic oligonucleotide
  Sense strand starting at position 1489 of SEQ ID NO: 1886925
ccaaguaauccacguuaag

SEQ ID NO: 2435875 - RNA, 19 nt, Artificial Sequence
  Description of Artificial Sequence: Synthetic oligonucleotide
  Antisense strand to SEQ ID NO: 2435874
cuuaacguggauuacuugg

SEQ ID NO: 2435876 - RNA, 19 nt, Artificial Sequence
  Description of Artificial Sequence: Synthetic oligonucleotide
  Sense strand starting at position 1789 of SEQ ID NO: 1886925
gggaaagccucucugccaa

SEQ ID NO: 2435877 - RNA, 19 nt, Artificial Sequence
  Description of Artificial Sequence: Synthetic oligonucleotide
  Antisense strand to SEQ ID NO: 2435876
uuggcagagaggcuuuccc

SEQ ID NO: 2435878 - RNA, 19 nt, Artificial Sequence
  Description of Artificial Sequence: Synthetic oligonucleotide
  Sense strand starting at position 2097 of SEQ ID NO: 1886925
cggcuuccugggagucgua

SEQ ID NO: 2435879 - RNA, 19 nt, Artificial Sequence
  Description of Artificial Sequence: Synthetic oligonucleotide
  Antisense strand to SEQ ID NO: 2435878
uacgacucccaggaagccg

SEQ ID NO: 2435880 - RNA, 19 nt, Artificial Sequence
  Description of Artificial Sequence: Synthetic oligonucleotide
  Sense strand starting at position 2109 of SEQ ID NO: 1886925
agucguaguucgacuacgu

SEQ ID NO: 2435881 - RNA, 19 nt, Artificial Sequence
  Description of Artificial Sequence: Synthetic oligonucleotide
  Antisense strand to SEQ ID NO: 2435880
acguagucgaacuacgacu

SEQ ID NO: 2435882 - RNA, 19 nt, Artificial Sequence
  Description of Artificial Sequence: Synthetic oligonucleotide
  Sense strand starting at position 2110 of SEQ ID NO: 1886925
gucguaguucgacuacgua

SEQ ID NO: 2435883 - RNA, 19 nt, Artificial Sequence
  Description of Artificial Sequence: Synthetic oligonucleotide
  Antisense strand to SEQ ID NO: 2435882
uacguagucgaacuacgac

SEQ ID NO: 2435884 - RNA, 19 nt, Artificial Sequence
  Description of Artificial Sequence: Synthetic oligonucleotide
  Sense strand starting at position 2123 of SEQ ID NO: 1886925
uacguaguccugucguagu

SEQ ID NO: 2435885 - RNA, 19 nt, Artificial Sequence
  Description of Artificial Sequence: Synthetic oligonucleotide
  Antisense strand to SEQ ID NO: 2435884
acuacgacaggacuacgua

SEQ ID NO: 2435886 - RNA, 19 nt, Artificial Sequence
  Description of Artificial Sequence: Synthetic oligonucleotide
  Sense strand starting at position 2130 of SEQ ID NO: 1886925
uccugucguagucagaaca

SEQ ID NO: 2435887 - RNA, 19 nt, Artificial Sequence
  Description of Artificial Sequence: Synthetic oligonucleotide
  Antisense strand to SEQ ID NO: 2435886
uguucugacuacgacagga

SEQ ID NO: 2435888 - RNA, 19 nt, Artificial Sequence
  Description of Artificial Sequence: Synthetic oligonucleotide
  Sense strand starting at position 2454 of SEQ ID NO: 1886925
cugagaccugguggucauu

SEQ ID NO: 2435889 - RNA, 19 nt, Artificial Sequence
  Description of Artificial Sequence: Synthetic oligonucleotide
  Antisense strand to SEQ ID NO: 2435888
aaugaccaccaggucucag

SEQ ID NO: 2435890 - RNA, 19 nt, Artificial Sequence
  Description of Artificial Sequence: Synthetic oligonucleotide
  Sense strand starting at position 2480 of SEQ ID NO: 1886925
uuaggcguuccuuaucuua

SEQ ID NO: 2435891 - RNA, 19 nt, Artificial Sequence
  Description of Artificial Sequence: Synthetic oligonucleotide
  Antisense strand to SEQ ID NO: 2435890
uaagauaaggaacgccuaa

SEQ ID NO: 2435892 - RNA, 19 nt, Artificial Sequence
  Description of Artificial Sequence: Synthetic oligonucleotide
  Sense strand starting at position 2549 of SEQ ID NO: 1886925
ggucuucuccguguaucuu

SEQ ID NO: 2435893 - RNA, 19 nt, Artificial Sequence
  Description of Artificial Sequence: Synthetic oligonucleotide
  Antisense strand to SEQ ID NO: 2435892
aagauacacggagaagacc

SEQ ID NO: 2435894 - RNA, 19 nt, Artificial Sequence
  Description of Artificial Sequence: Synthetic oligonucleotide
  Sense strand starting at position 2631 of SEQ ID NO: 1886925
gccagucauauuggauaag

SEQ ID NO: 2435895 - RNA, 19 nt, Artificial Sequence
  Description of Artificial Sequence: Synthetic oligonucleotide
  Antisense strand to SEQ ID NO: 2435894
cuuauccaauaugacuggc

SEQ ID NO: 2435896 - RNA, 19 nt, Artificial Sequence
  Description of Artificial Sequence: Synthetic oligonucleotide
  Sense strand starting at position 2664 of SEQ ID NO: 1886925
ccaguacgaccucaucauu

SEQ ID NO: 2435897 - RNA, 19 nt, Artificial Sequence
  Description of Artificial Sequence: Synthetic oligonucleotide
  Antisense strand to SEQ ID NO: 2435896
aaugaugaggucguacugg

SEQ ID NO: 2435898 - RNA, 19 nt, Artificial Sequence
  Description of Artificial Sequence: Synthetic oligonucleotide
  Sense strand starting at position 2667 of SEQ ID NO: 1886925
guacgaccucaucauuaac

SEQ ID NO: 2435899 - RNA, 19 nt, Artificial Sequence
  Description of Artificial Sequence: Synthetic oligonucleotide
  Antisense strand to SEQ ID NO: 2435898
guuaaugaugaggucguac

SEQ ID NO: 2435900 - RNA, 19 nt, Artificial Sequence
  Description of Artificial Sequence: Synthetic oligonucleotide
  Sense strand starting at position 2835 of SEQ ID NO: 1886925
agccauugugacuaaccaa

SEQ ID NO: 2435901 - RNA, 19 nt, Artificial Sequence
  Description of Artificial Sequence: Synthetic oligonucleotide
  Antisense strand to SEQ ID NO: 2435900
uugguuagucacaauggcu

SEQ ID NO: 2435902 - RNA, 19 nt, Artificial Sequence
  Description of Artificial Sequence: Synthetic oligonucleotide
  Sense strand starting at position 2974 of SEQ ID NO: 1886925
ugggauugcuggagaggaa

SEQ ID NO: 2435903 - RNA, 19 nt, Artificial Sequence
  Description of Artificial Sequence: Synthetic oligonucleotide
  Antisense strand to SEQ ID NO: 2435902
uuccucuccagcaauccca

SEQ ID NO: 2435904 - RNA, 19 nt, Artificial Sequence
  Description of Artificial Sequence: Synthetic oligonucleotide
  Sense strand starting at position 3289 of SEQ ID NO: 1886925
ggcauuaguauugaaagua

SEQ ID NO: 2435905 - RNA, 19 nt, Artificial Sequence
  Description of Artificial Sequence: Synthetic oligonucleotide
  Antisense strand to SEQ ID NO: 2435904
uacuuucaauacuaaugcc

SEQ ID NO: 2435906 - RNA, 19 nt, Artificial Sequence
  Description of Artificial Sequence: Synthetic oligonucleotide
  Sense strand starting at position 3487 of SEQ ID NO: 1886925
gcugacauucccggagagu

SEQ ID NO: 2435907 - RNA, 19 nt, Artificial Sequence
  Description of Artificial Sequence: Synthetic oligonucleotide
  Antisense strand to SEQ ID NO: 2435906
acucuccgggaaugucagc

SEQ ID NO: 2435908 - RNA, 19 nt, Artificial Sequence
  Description of Artificial Sequence: Synthetic oligonucleotide
  Sense strand starting at position 3488 of SEQ ID NO: 1886925
cugacauucccggagaguc

SEQ ID NO: 2435909 - RNA, 19 nt, Artificial Sequence
  Description of Artificial Sequence: Synthetic oligonucleotide
  Antisense strand to SEQ ID NO: 2435908
gacucuccgggaaugucag

SEQ ID NO: 2435910 - RNA, 19 nt, Artificial Sequence
  Description of Artificial Sequence: Synthetic oligonucleotide
  Sense strand starting at position 3569 of SEQ ID NO: 1886925
cuugcuuccagguaagaga

SEQ ID NO: 2435911 - RNA, 19 nt, Artificial Sequence
  Description of Artificial Sequence: Synthetic oligonucleotide
  Antisense strand to SEQ ID NO: 2435910
ucucuuaccuggaagcaag

SEQ ID NO: 2435912 - RNA, 19 nt, Artificial Sequence
  Description of Artificial Sequence: Synthetic oligonucleotide
  Sense strand starting at position 3596 of SEQ ID NO: 1886925
ggccaagaugaaugucaaa

SEQ ID NO: 2435913 - RNA, 19 nt, Artificial Sequence
  Description of Artificial Sequence: Synthetic oligonucleotide
  Antisense strand to SEQ ID NO: 2435912
uuugacauucaucuuggcc

SEQ ID NO: 2435914 - RNA, 19 nt, Artificial Sequence
  Description of Artificial Sequence: Synthetic oligonucleotide
  Sense strand starting at position 3607 of SEQ ID NO: 1886925
augucaaaggcagggauau

SEQ ID NO: 2435915 - RNA, 19 nt, Artificial Sequence
  Description of Artificial Sequence: Synthetic oligonucleotide
  Antisense strand to SEQ ID NO: 2435914
auaucccugccuuugacau

SEQ ID NO: 2435916 - RNA, 19 nt, Artificial Sequence
  Description of Artificial Sequence: Synthetic oligonucleotide
  Sense strand starting at position 3649 of SEQ ID NO: 1886925
acaggauauugaggauaac

SEQ ID NO: 2435917 - RNA, 19 nt, Artificial Sequence
  Description of Artificial Sequence: Synthetic oligonucleotide
  Antisense strand to SEQ ID NO: 2435916
guuauccucaauauccugu

SEQ ID NO: 2435918 - RNA, 19 nt, Artificial Sequence
  Description of Artificial Sequence: Synthetic oligonucleotide
  Sense strand starting at position 3726 of SEQ ID NO: 1886925
auauuccuagcauacgaaa

SEQ ID NO: 2435919 - RNA, 19 nt, Artificial Sequence
  Description of Artificial Sequence: Synthetic oligonucleotide
  Antisense strand to SEQ ID NO: 2435918
uuucguaugcuaggaauau

SEQ ID NO: 2435920 - RNA, 19 nt, Artificial Sequence
  Description of Artificial Sequence: Synthetic oligonucleotide
  Sense strand starting at position 3784 of SEQ ID NO: 1886925
cugacuaugcaugguuauu

SEQ ID NO: 2435921 - RNA, 19 nt, Artificial Sequence
  Description of Artificial Sequence: Synthetic oligonucleotide
  Antisense strand to SEQ ID NO: 2435920
aauaaccaugcauagucag

SEQ ID NO: 2435922 - RNA, 19 nt, Artificial Sequence
  Description of Artificial Sequence: Synthetic oligonucleotide
  Sense strand starting at position 3805 of SEQ ID NO: 1886925
uuucuccugcguuauaauu

SEQ ID NO: 2435923 - RNA, 19 nt, Artificial Sequence
  Description of Artificial Sequence: Synthetic oligonucleotide
  Antisense strand to SEQ ID NO: 2435922
aauuauaacgcaggagaaa

SEQ ID NO: 2435924 - RNA, 19 nt, Artificial Sequence
  Description of Artificial Sequence: Synthetic oligonucleotide
  Sense strand starting at position 3830 of SEQ ID NO: 1886925
aguccucagucuucuuaaa

SEQ ID NO: 2435925 - RNA, 19 nt, Artificial Sequence
  Description of Artificial Sequence: Synthetic oligonucleotide
  Antisense strand to SEQ ID NO: 2435924
uuuaagaagacugaggacu

SEQ ID NO: 2435926 - RNA, 19 nt, Artificial Sequence
  Description of Artificial Sequence: Synthetic oligonucleotide
  Sense strand starting at position 3924 of SEQ ID NO: 1886925
uucucauugcugugagauu

SEQ ID NO: 2435927 - RNA, 19 nt, Artificial Sequence
  Description of Artificial Sequence: Synthetic oligonucleotide
  Antisense strand to SEQ ID NO: 2435926
aaucucacagcaaugagaa

SEQ ID NO: 2435928 - RNA, 19 nt, Artificial Sequence
  Description of Artificial Sequence: Synthetic oligonucleotide
  Sense strand starting at position 3951 of SEQ ID NO: 1886925
ccagguaaagcuggaauca

SEQ ID NO: 2435929 - RNA, 19 nt, Artificial Sequence
  Description of Artificial Sequence: Synthetic oligonucleotide
  Antisense strand to SEQ ID NO: 2435928
ugauuccagcuuuaccugg

SEQ ID NO: 2435930 - RNA, 19 nt, Artificial Sequence
  Description of Artificial Sequence: Synthetic oligonucleotide
  Sense strand starting at position 3963 of SEQ ID NO: 1886925
ggaaucaugucucuuccuu

SEQ ID NO: 2435931 - RNA, 19 nt, Artificial Sequence
  Description of Artificial Sequence: Synthetic oligonucleotide
  Antisense strand to SEQ ID NO: 2435930
aaggaagagacaugauucc

SEQ ID NO: 2435932 - RNA, 19 nt, Artificial Sequence
  Description of Artificial Sequence: Synthetic oligonucleotide
  Sense strand starting at position 201 of SEQ ID NO: 1886926
aguuaaugauuccuggcaa

SEQ ID NO: 2435933 - RNA, 19 nt, Artificial Sequence
  Description of Artificial Sequence: Synthetic oligonucleotide
  Antisense strand to SEQ ID NO: 2435932
uugccaggaaucauuaacu

SEQ ID NO: 2435934 - RNA, 19 nt, Artificial Sequence
  Description of Artificial Sequence: Synthetic oligonucleotide
  Sense strand starting at position 202 of SEQ ID NO: 1886926
guuaaugauuccuggcaau

SEQ ID NO: 2435935 - RNA, 19 nt, Artificial Sequence
  Description of Artificial Sequence: Synthetic oligonucleotide
  Antisense strand to SEQ ID NO: 2435934
auugccaggaaucauuaac

SEQ ID NO: 2435936 - RNA, 19 nt, Artificial Sequence
  Description of Artificial Sequence: Synthetic oligonucleotide
  Sense strand starting at position 239 of SEQ ID NO: 1886926
aacugucaugaagguaaua

SEQ ID NO: 2435937 - RNA, 19 nt, Artificial Sequence
  Description of Artificial Sequence: Synthetic oligonucleotide
  Antisense strand to SEQ ID NO: 2435936
uauuaccuucaugacaguu

SEQ ID NO: 2435938 - RNA, 19 nt, Artificial Sequence
  Description of Artificial Sequence: Synthetic oligonucleotide
  Sense strand starting at position 405 of SEQ ID NO: 1886926
aagucuagugugggcaaau

SEQ ID NO: 2435939 - RNA, 19 nt, Artificial Sequence
  Description of Artificial Sequence: Synthetic oligonucleotide
  Antisense strand to SEQ ID NO: 2435938
auuugcccacacuagacuu

SEQ ID NO: 2435940 - RNA, 19 nt, Artificial Sequence
  Description of Artificial Sequence: Synthetic oligonucleotide
  Sense strand starting at position 406 of SEQ ID NO: 1886926
agucuagugugggcaaaua

SEQ ID NO: 2435941 - RNA, 19 nt, Artificial Sequence
  Description of Artificial Sequence: Synthetic oligonucleotide
  Antisense strand to SEQ ID NO: 2435940
uauuugcccacacuagacu

SEQ ID NO: 2435942 - RNA, 19 nt, Artificial Sequence
  Description of Artificial Sequence: Synthetic oligonucleotide
  Sense strand starting at position 416 of SEQ ID NO: 1886926
gggcaaauauaauuacagu

SEQ ID NO: 2435943 - RNA, 19 nt, Artificial Sequence
  Description of Artificial Sequence: Synthetic oligonucleotide
  Antisense strand to SEQ ID NO: 2435942
acuguaauuauauuugccc

SEQ ID NO: 2435944 - RNA, 19 nt, Artificial Sequence
  Description of Artificial Sequence: Synthetic oligonucleotide
  Sense strand starting at position 603 of SEQ ID NO: 1886926
guggcaugucccuguaaga

SEQ ID NO: 2435945 - RNA, 19 nt, Artificial Sequence
  Description of Artificial Sequence: Synthetic oligonucleotide
  Antisense strand to SEQ ID NO: 2435944
ucuuacagggacaugccac

SEQ ID NO: 2435946 - RNA, 19 nt, Artificial Sequence
  Description of Artificial Sequence: Synthetic oligonucleotide
  Sense strand starting at position 648 of SEQ ID NO: 1886926
acguaccuguaauguuaaa

SEQ ID NO: 2435947 - RNA, 19 nt, Artificial Sequence
  Description of Artificial Sequence: Synthetic oligonucleotide
  Antisense strand to SEQ ID NO: 2435946
uuuaacauuacagguacgu

SEQ ID NO: 2435948 - RNA, 19 nt, Artificial Sequence
  Description of Artificial Sequence: Synthetic oligonucleotide
  Sense strand starting at position 778 of SEQ ID NO: 1886926
aacagaaaguuuguucgaa

SEQ ID NO: 2435949 - RNA, 19 nt, Artificial Sequence
  Description of Artificial Sequence: Synthetic oligonucleotide
  Antisense strand to SEQ ID NO: 2435948
uucgaacaaacuuucuguu

SEQ ID NO: 2435950 - RNA, 19 nt, Artificial Sequence
  Description of Artificial Sequence: Synthetic oligonucleotide
  Sense strand starting at position 779 of SEQ ID NO: 1886926
acagaaaguuuguucgaaa

SEQ ID NO: 2435951 - RNA, 19 nt, Artificial Sequence
  Description of Artificial Sequence: Synthetic oligonucleotide
  Antisense strand to SEQ ID NO: 2435950
uuucgaacaaacuuucugu

SEQ ID NO: 2435952 - RNA, 19 nt, Artificial Sequence
  Description of Artificial Sequence: Synthetic oligonucleotide
  Sense strand starting at position 796 of SEQ ID NO: 1886926
aaauuuguaugaggacaua

SEQ ID NO: 2435953 - RNA, 19 nt, Artificial Sequence
  Description of Artificial Sequence: Synthetic oligonucleotide
  Antisense strand to SEQ ID NO: 2435952
uauguccucauacaaauuu

SEQ ID NO: 2435954 - RNA, 19 nt, Artificial Sequence
  Description of Artificial Sequence: Synthetic oligonucleotide
  Sense strand starting at position 807 of SEQ ID NO: 1886926
aggacauacuuagaauugu

SEQ ID NO: 2435955 - RNA, 19 nt, Artificial Sequence
  Description of Artificial Sequence: Synthetic oligonucleotide
  Antisense strand to SEQ ID NO: 2435954
acaauucuaaguauguccu

SEQ ID NO: 2435956 - RNA, 19 nt, Artificial Sequence
  Description of Artificial Sequence: Synthetic oligonucleotide
  Sense strand starting at position 1038 of SEQ ID NO: 1886926
gugaguuuaagguguguga

SEQ ID NO: 2435957 - RNA, 19 nt, Artificial Sequence
  Description of Artificial Sequence: Synthetic oligonucleotide
  Antisense strand to SEQ ID NO: 2435956
ucacacaccuuaaacucac

SEQ ID NO: 2435958 - RNA, 19 nt, Artificial Sequence
  Description of Artificial Sequence: Synthetic oligonucleotide
  Sense strand starting at position 1110 of SEQ ID NO: 1886926
gugggugugugcaagguaa

SEQ ID NO: 2435959 - RNA, 19 nt, Artificial Sequence
  Description of Artificial Sequence: Synthetic oligonucleotide
  Antisense strand to SEQ ID NO: 2435958
uuaccuugcacacacccac

SEQ ID NO: 2435960 - RNA, 19 nt, Artificial Sequence
  Description of Artificial Sequence: Synthetic oligonucleotide
  Sense strand starting at position 1112 of SEQ ID NO: 1886926
gggugugugcaagguaaca

SEQ ID NO: 2435961 - RNA, 19 nt, Artificial Sequence
  Description of Artificial Sequence: Synthetic oligonucleotide
  Antisense strand to SEQ ID NO: 2435960
uguuaccuugcacacaccc

SEQ ID NO: 2435962 - RNA, 19 nt, Artificial Sequence
  Description of Artificial Sequence: Synthetic oligonucleotide
  Sense strand starting at position 1318 of SEQ ID NO: 1886926
ccaagacuuuccgaccuga

SEQ ID NO: 2435963 - RNA, 19 nt, Artificial Sequence
  Description of Artificial Sequence: Synthetic oligonucleotide
  Antisense strand to SEQ ID NO: 2435962
ucaggucggaaagucuugg

SEQ ID NO: 2435964 - RNA, 19 nt, Artificial Sequence
  Description of Artificial Sequence: Synthetic oligonucleotide
  Sense strand starting at position 2188 of SEQ ID NO: 1886926
ggguuuaguguccggucca

SEQ ID NO: 2435965 - RNA, 19 nt, Artificial Sequence
  Description of Artificial Sequence: Synthetic oligonucleotide
  Antisense strand to SEQ ID NO: 2435964
uggaccggacacuaaaccc

SEQ ID NO: 2435966 - RNA, 19 nt, Artificial Sequence
  Description of Artificial Sequence: Synthetic oligonucleotide
  Sense strand starting at position 2321 of SEQ ID NO: 1886926
ccgggaacuugucguauuu

SEQ ID NO: 2435967 - RNA, 19 nt, Artificial Sequence
  Description of Artificial Sequence: Synthetic oligonucleotide
  Antisense strand to SEQ ID NO: 2435966
aaauacgacaaguucccgg

SEQ ID NO: 2435968 - RNA, 19 nt, Artificial Sequence
  Description of Artificial Sequence: Synthetic oligonucleotide
  Sense strand starting at position 2323 of SEQ ID NO: 1886926
gggaacuugucguauuucu

SEQ ID NO: 2435969 - RNA, 19 nt, Artificial Sequence
  Description of Artificial Sequence: Synthetic oligonucleotide
  Antisense strand to SEQ ID NO: 2435968
agaaauacgacaaguuccc

SEQ ID NO: 2435970 - RNA, 19 nt, Artificial Sequence
  Description of Artificial Sequence: Synthetic oligonucleotide
  Sense strand starting at position 2332 of SEQ ID NO: 1886926
ucguauuucuggcgaggga

SEQ ID NO: 2435971 - RNA, 19 nt, Artificial Sequence
  Description of Artificial Sequence: Synthetic oligonucleotide
  Antisense strand to SEQ ID NO: 2435970
ucccucgccagaaauacga

SEQ ID NO: 2435972 - RNA, 19 nt, Artificial Sequence
  Description of Artificial Sequence: Synthetic oligonucleotide
  Sense strand starting at position 2367 of SEQ ID NO: 1886926
cgccgaugguuccagcaaa

SEQ ID NO: 2435973 - RNA, 19 nt, Artificial Sequence
  Description of Artificial Sequence: Synthetic oligonucleotide
  Antisense strand to SEQ ID NO: 2435972
uuugcuggaaccaucggcg

SEQ ID NO: 2435974 - RNA, 19 nt, Artificial Sequence
  Description of Artificial Sequence: Synthetic oligonucleotide
  Sense strand starting at position 2393 of SEQ ID NO: 1886926
gagugcuguuccuggucuu

SEQ ID NO: 2435975 - RNA, 19 nt, Artificial Sequence
  Description of Artificial Sequence: Synthetic oligonucleotide
  Antisense strand to SEQ ID NO: 2435974
aagaccaggaacagcacuc

SEQ ID NO: 2435976 - RNA, 19 nt, Artificial Sequence
  Description of Artificial Sequence: Synthetic oligonucleotide
  Sense strand starting at position 2396 of SEQ ID NO: 1886926
ugcuguuccuggucuugua

SEQ ID NO: 2435977 - RNA, 19 nt, Artificial Sequence
  Description of Artificial Sequence: Synthetic oligonucleotide
  Antisense strand to SEQ ID NO: 2435976
uacaagaccaggaacagca

SEQ ID NO: 2435978 - RNA, 19 nt, Artificial Sequence
  Description of Artificial Sequence: Synthetic oligonucleotide
  Sense strand starting at position 2432 of SEQ ID NO: 1886926
ggacucaccugguggagaa

SEQ ID NO: 2435979 - RNA, 19 nt, Artificial Sequence
  Description of Artificial Sequence: Synthetic oligonucleotide
  Antisense strand to SEQ ID NO: 2435978
uucuccaccaggugagucc

SEQ ID NO: 2435980 - RNA, 19 nt, Artificial Sequence
  Description of Artificial Sequence: Synthetic oligonucleotide
  Sense strand starting at position 2500 of SEQ ID NO: 1886926
gggagaugauacgucuuaa

SEQ ID NO: 2435981 - RNA, 19 nt, Artificial Sequence
  Description of Artificial Sequence: Synthetic oligonucleotide
  Antisense strand to SEQ ID NO: 2435980
uuaagacguaucaucuccc

SEQ ID NO: 2435982 - RNA, 19 nt, Artificial Sequence
  Description of Artificial Sequence: Synthetic oligonucleotide
  Sense strand starting at position 2504 of SEQ ID NO: 1886926
gaugauacgucuuaaagaa

SEQ ID NO: 2435983 - RNA, 19 nt, Artificial Sequence
  Description of Artificial Sequence: Synthetic oligonucleotide
  Antisense strand to SEQ ID NO: 2435982
uucuuuaagacguaucauc

SEQ ID NO: 2435984 - RNA, 19 nt, Artificial Sequence
  Description of Artificial Sequence: Synthetic oligonucleotide
  Sense strand starting at position 2529 of SEQ ID NO: 1886926
agauaaaccuuggaguaac

SEQ ID NO: 2435985 - RNA, 19 nt, Artificial Sequence
  Description of Artificial Sequence: Synthetic oligonucleotide
  Antisense strand to SEQ ID NO: 2435984
guuacuccaagguuuaucu

SEQ ID NO: 2435986 - RNA, 19 nt, Artificial Sequence
  Description of Artificial Sequence: Synthetic oligonucleotide
  Sense strand starting at position 2532 of SEQ ID NO: 1886926
uaaaccuuggaguaacgua

SEQ ID NO: 2435987 - RNA, 19 nt, Artificial Sequence
  Description of Artificial Sequence: Synthetic oligonucleotide
  Antisense strand to SEQ ID NO: 2435986
uacguuacuccaagguuua

SEQ ID NO: 2435988 - RNA, 19 nt, Artificial Sequence
  Description of Artificial Sequence: Synthetic oligonucleotide
  Sense strand starting at position 2537 of SEQ ID NO: 1886926
cuuggaguaacguaugaag

SEQ ID NO: 2435989 - RNA, 19 nt, Artificial Sequence
  Description of Artificial Sequence: Synthetic oligonucleotide
  Antisense strand to SEQ ID NO: 2435988
cuucauacguuacuccaag

SEQ ID NO: 2435990 - RNA, 19 nt, Artificial Sequence
  Description of Artificial Sequence: Synthetic oligonucleotide
  Sense strand starting at position 2539 of SEQ ID NO: 1886926
uggaguaacguaugaagag

SEQ ID NO: 2435991 - RNA, 19 nt, Artificial Sequence
  Description of Artificial Sequence: Synthetic oligonucleotide
  Antisense strand to SEQ ID NO: 2435990
cucuucauacguuacucca

SEQ ID NO: 2435992 - RNA, 19 nt, Artificial Sequence
  Description of Artificial Sequence: Synthetic oligonucleotide
  Sense strand starting at position 2540 of SEQ ID NO: 1886926
ggaguaacguaugaagagu

SEQ ID NO: 2435993 - RNA, 19 nt, Artificial Sequence
  Description of Artificial Sequence: Synthetic oligonucleotide
  Antisense strand to SEQ ID NO: 2435992
acucuucauacguuacucc

SEQ ID NO: 2435994 - RNA, 19 nt, Artificial Sequence
  Description of Artificial Sequence: Synthetic oligonucleotide
  Sense strand starting at position 2574 of SEQ ID NO: 1886926
guauuuaucucaggagcag

SEQ ID NO: 2435995 - RNA, 19 nt, Artificial Sequence
  Description of Artificial Sequence: Synthetic oligonucleotide
  Antisense strand to SEQ ID NO: 2435994
cugcuccugagauaaauac

SEQ ID NO: 2435996 - RNA, 19 nt, Artificial Sequence
  Description of Artificial Sequence: Synthetic oligonucleotide
  Sense strand starting at position 2807 of SEQ ID NO: 1886926
cacguuuaggagggacauu

SEQ ID NO: 2435997 - RNA, 19 nt, Artificial Sequence
  Description of Artificial Sequence: Synthetic oligonucleotide
  Antisense strand to SEQ ID NO: 2435996
aaugucccuccuaaacgug

SEQ ID NO: 2435998 - RNA, 19 nt, Artificial Sequence
  Description of Artificial Sequence: Synthetic oligonucleotide
  Sense strand starting at position 2934 of SEQ ID NO: 1886926
gcccuauuguguccagaau

SEQ ID NO: 2435999 - RNA, 19 nt, Artificial Sequence
  Description of Artificial Sequence: Synthetic oligonucleotide
  Antisense strand to SEQ ID NO: 2435998
auucuggacacaauagggc

SEQ ID NO: 2436000 - RNA, 19 nt, Artificial Sequence
  Description of Artificial Sequence: Synthetic oligonucleotide
  Sense strand starting at position 3037 of SEQ ID NO: 1886926
ggaguucguuccuucuuga

SEQ ID NO: 2436001 - RNA, 19 nt, Artificial Sequence
  Description of Artificial Sequence: Synthetic oligonucleotide
  Antisense strand to SEQ ID NO: 2436000
ucaagaaggaacgaacucc

SEQ ID NO: 2436002 - RNA, 19 nt, Artificial Sequence
  Description of Artificial Sequence: Synthetic oligonucleotide
  Sense strand starting at position 3055 of SEQ ID NO: 1886926
accuuaagauguguucgga

SEQ ID NO: 2436003 - RNA, 19 nt, Artificial Sequence
  Description of Artificial Sequence: Synthetic oligonucleotide
  Antisense strand to SEQ ID NO: 2436002
uccgaacacaucuuaaggu

SEQ ID NO: 2436004 - RNA, 19 nt, Artificial Sequence
  Description of Artificial Sequence: Synthetic oligonucleotide
  Sense strand starting at position 3102 of SEQ ID NO: 1886926
ucacuagcucgggagugaa

SEQ ID NO: 2436005 - RNA, 19 nt, Artificial Sequence
  Description of Artificial Sequence: Synthetic oligonucleotide
  Antisense strand to SEQ ID NO: 2436004
uucacucccgagcuaguga

SEQ ID NO: 2436006 - RNA, 19 nt, Artificial Sequence
  Description of Artificial Sequence: Synthetic oligonucleotide
  Sense strand starting at position 3189 of SEQ ID NO: 1886926
gugagcuuguugucuuacu

SEQ ID NO: 2436007 - RNA, 19 nt, Artificial Sequence
  Description of Artificial Sequence: Synthetic oligonucleotide
  Antisense strand to SEQ ID NO: 2436006
aguaagacaacaagcucac

SEQ ID NO: 2436008 - RNA, 19 nt, Artificial Sequence
  Description of Artificial Sequence: Synthetic oligonucleotide
  Sense strand starting at position 3201 of SEQ ID NO: 1886926
ucuuacugccuuuaggaua

SEQ ID NO: 2436009 - RNA, 19 nt, Artificial Sequence
  Description of Artificial Sequence: Synthetic oligonucleotide
  Antisense strand to SEQ ID NO: 2436008
uauccuaaaggcaguaaga

SEQ ID NO: 2436010 - RNA, 19 nt, Artificial Sequence
  Description of Artificial Sequence: Synthetic oligonucleotide
  Sense strand starting at position 3226 of SEQ ID NO: 1886926
ggagacuuacguggugagu

SEQ ID NO: 2436011 - RNA, 19 nt, Artificial Sequence
  Description of Artificial Sequence: Synthetic oligonucleotide
  Antisense strand to SEQ ID NO: 2436010
acucaccacguaagucucc

SEQ ID NO: 2436012 - RNA, 19 nt, Artificial Sequence
  Description of Artificial Sequence: Synthetic oligonucleotide
  Sense strand starting at position 147 of SEQ ID NO: 1886927
uggacuuugggucaguuaa

SEQ ID NO: 2436013 - RNA, 19 nt, Artificial Sequence
  Description of Artificial Sequence: Synthetic oligonucleotide
  Antisense strand to SEQ ID NO: 2436012
uuaacugacccaaagucca

SEQ ID NO: 2436014 - RNA, 19 nt, Artificial Sequence
  Description of Artificial Sequence: Synthetic oligonucleotide
  Sense strand starting at position 149 of SEQ ID NO: 1886927
gacuuugggucaguuaacu

SEQ ID NO: 2436015 - RNA, 19 nt, Artificial Sequence
  Description of Artificial Sequence: Synthetic oligonucleotide
  Antisense strand to SEQ ID NO: 2436014
aguuaacugacccaaaguc

SEQ ID NO: 2436016 - RNA, 19 nt, Artificial Sequence
  Description of Artificial Sequence: Synthetic oligonucleotide
  Sense strand starting at position 190 of SEQ ID NO: 1886927
augcuugacaucuggugua

SEQ ID NO: 2436017 - RNA, 19 nt, Artificial Sequence
  Description of Artificial Sequence: Synthetic oligonucleotide
  Antisense strand to SEQ ID NO: 2436016
uacaccagaugucaagcau

SEQ ID NO: 2436018 - RNA, 19 nt, Artificial Sequence
  Description of Artificial Sequence: Synthetic oligonucleotide
  Sense strand starting at position 407 of SEQ ID NO: 1886927
uagguaugggcuuaccuua

SEQ ID NO: 2436019 - RNA, 19 nt, Artificial Sequence
  Description of Artificial Sequence: Synthetic oligonucleotide
  Antisense strand to SEQ ID NO: 2436018
uaagguaagcccauaccua

SEQ ID NO: 2436020 - RNA, 19 nt, Artificial Sequence
  Description of Artificial Sequence: Synthetic oligonucleotide
  Sense strand starting at position 469 of SEQ ID NO: 1886927
cugagagucagguguaauc

SEQ ID NO: 2436021 - RNA, 19 nt, Artificial Sequence
  Description of Artificial Sequence: Synthetic oligonucleotide
  Antisense strand to SEQ ID NO: 2436020
gauuacaccugacucucag

SEQ ID NO: 2436022 - RNA, 19 nt, Artificial Sequence
  Description of Artificial Sequence: Synthetic oligonucleotide
  Sense strand starting at position 661 of SEQ ID NO: 1886927
ccuggagacagcuguccau

SEQ ID NO: 2436023 - RNA, 19 nt, Artificial Sequence
  Description of Artificial Sequence: Synthetic oligonucleotide
  Antisense strand to SEQ ID NO: 2436022
auggacagcugucuccagg

SEQ ID NO: 2436024 - RNA, 19 nt, Artificial Sequence
  Description of Artificial Sequence: Synthetic oligonucleotide
  Sense strand starting at position 718 of SEQ ID NO: 1886927
cugggacucugucuugaug

SEQ ID NO: 2436025 - RNA, 19 nt, Artificial Sequence
  Description of Artificial Sequence: Synthetic oligonucleotide
  Antisense strand to SEQ ID NO: 2436024
caucaagacagagucccag

SEQ ID NO: 2436026 - RNA, 19 nt, Artificial Sequence
  Description of Artificial Sequence: Synthetic oligonucleotide
  Sense strand starting at position 721 of SEQ ID NO: 1886927
ggacucugucuugauguga

SEQ ID NO: 2436027 - RNA, 19 nt, Artificial Sequence
  Description of Artificial Sequence: Synthetic oligonucleotide
  Antisense strand to SEQ ID NO: 2436026
ucacaucaagacagagucc

SEQ ID NO: 2436028 - RNA, 19 nt, Artificial Sequence
  Description of Artificial Sequence: Synthetic oligonucleotide
  Sense strand starting at position 784 of SEQ ID NO: 1886927
ugagcugugacaugcaacu

SEQ ID NO: 2436029 - RNA, 19 nt, Artificial Sequence
  Description of Artificial Sequence: Synthetic oligonucleotide
  Antisense strand to SEQ ID NO: 2436028
aguugcaugucacagcuca

SEQ ID NO: 2436030 - RNA, 19 nt, Artificial Sequence
  Description of Artificial Sequence: Synthetic oligonucleotide
  Sense strand starting at position 796 of SEQ ID NO: 1886927
ugcaacucagcggaugaaa

SEQ ID NO: 2436031 - RNA, 19 nt, Artificial Sequence
  Description of Artificial Sequence: Synthetic oligonucleotide
  Antisense strand to SEQ ID NO: 2436030
uuucauccgcugaguugca

SEQ ID NO: 2436032 - RNA, 19 nt, Artificial Sequence
  Description of Artificial Sequence: Synthetic oligonucleotide
  Sense strand starting at position 923 of SEQ ID NO: 1886927
ggaggugugugcacugagu

SEQ ID NO: 2436033 - RNA, 19 nt, Artificial Sequence
  Description of Artificial Sequence: Synthetic oligonucleotide
  Antisense strand to SEQ ID NO: 2436032
acucagugcacacaccucc

SEQ ID NO: 2436034 - RNA, 19 nt, Artificial Sequence
  Description of Artificial Sequence: Synthetic oligonucleotide
  Sense strand starting at position 1147 of SEQ ID NO: 1886927
agcagagauucuucccaac

SEQ ID NO: 2436035 - RNA, 19 nt, Artificial Sequence
  Description of Artificial Sequence: Synthetic oligonucleotide
  Antisense strand to SEQ ID NO: 2436034
guugggaagaaucucugcu

SEQ ID NO: 2436036 - RNA, 19 nt, Artificial Sequence
  Description of Artificial Sequence: Synthetic oligonucleotide
  Sense strand starting at position 1150 of SEQ ID NO: 1886927
agagauucuucccaacaga

SEQ ID NO: 2436037 - RNA, 19 nt, Artificial Sequence
  Description of Artificial Sequence: Synthetic oligonucleotide
  Antisense strand to SEQ ID NO: 2436036
ucuguugggaagaaucucu

SEQ ID NO: 2436038 - RNA, 19 nt, Artificial Sequence
  Description of Artificial Sequence: Synthetic oligonucleotide
  Sense strand starting at position 1210 of SEQ ID NO: 1886927
agggauaacuucccauugu

SEQ ID NO: 2436039 - RNA, 19 nt, Artificial Sequence
  Description of Artificial Sequence: Synthetic oligonucleotide
  Antisense strand to SEQ ID NO: 2436038
acaaugggaaguuaucccu

SEQ ID NO: 2436040 - RNA, 19 nt, Artificial Sequence
  Description of Artificial Sequence: Synthetic oligonucleotide
  Sense strand starting at position 1238 of SEQ ID NO: 1886927
ccaggaucauucgugguau

SEQ ID NO: 2436041 - RNA, 19 nt, Artificial Sequence
  Description of Artificial Sequence: Synthetic oligonucleotide
  Antisense strand to SEQ ID NO: 2436040
auaccacgaaugauccugg

SEQ ID NO: 2436042 - RNA, 19 nt, Artificial Sequence
  Description of Artificial Sequence: Synthetic oligonucleotide
  Sense strand starting at position 1240 of SEQ ID NO: 1886927
aggaucauucgugguauau

SEQ ID NO: 2436043 - RNA, 19 nt, Artificial Sequence
  Description of Artificial Sequence: Synthetic oligonucleotide
  Antisense strand to SEQ ID NO: 2436042
auauaccacgaaugauccu

SEQ ID NO: 2436044 - RNA, 19 nt, Artificial Sequence
  Description of Artificial Sequence: Synthetic oligonucleotide
  Sense strand starting at position 1571 of SEQ ID NO: 1886927
acagacaugucugcauaca

SEQ ID NO: 2436045 - RNA, 19 nt, Artificial Sequence
  Description of Artificial Sequence: Synthetic oligonucleotide
  Antisense strand to SEQ ID NO: 2436044
uguaugcagacaugucugu

SEQ ID NO: 2436046 - RNA, 19 nt, Artificial Sequence
  Description of Artificial Sequence: Synthetic oligonucleotide
  Sense strand starting at position 1572 of SEQ ID NO: 1886927
cagacaugucugcauacag

SEQ ID NO: 2436047 - RNA, 19 nt, Artificial Sequence
  Description of Artificial Sequence: Synthetic oligonucleotide
  Antisense strand to SEQ ID NO: 2436046
cuguaugcagacaugucug

SEQ ID NO: 2436048 - RNA, 19 nt, Artificial Sequence
  Description of Artificial Sequence: Synthetic oligonucleotide
  Sense strand starting at position 2100 of SEQ ID NO: 1886927
gucugacaucacuguuaau

SEQ ID NO: 2436049 - RNA, 19 nt, Artificial Sequence
  Description of Artificial Sequence: Synthetic oligonucleotide
  Antisense strand to SEQ ID NO: 2436048
auuaacagugaugucagac

SEQ ID NO: 2436050 - RNA, 19 nt, Artificial Sequence
  Description of Artificial Sequence: Synthetic oligonucleotide
  Sense strand starting at position 2219 of SEQ ID NO: 1886927
ggcugaucugugccuuguu

SEQ ID NO: 2436051 - RNA, 19 nt, Artificial Sequence
  Description of Artificial Sequence: Synthetic oligonucleotide
  Antisense strand to SEQ ID NO: 2436050
aacaaggcacagaucagcc

SEQ ID NO: 2436052 - RNA, 19 nt, Artificial Sequence
  Description of Artificial Sequence: Synthetic oligonucleotide
  Sense strand starting at position 2392 of SEQ ID NO: 1886927
uagacaagaguuuguaaga

SEQ ID NO: 2436053 - RNA, 19 nt, Artificial Sequence
  Description of Artificial Sequence: Synthetic oligonucleotide
  Antisense strand to SEQ ID NO: 2436052
ucuuacaaacucuugucua

SEQ ID NO: 2436054 - RNA, 19 nt, Artificial Sequence
  Description of Artificial Sequence: Synthetic oligonucleotide
  Sense strand starting at position 2393 of SEQ ID NO: 1886927
agacaagaguuuguaagau

SEQ ID NO: 2436055 - RNA, 19 nt, Artificial Sequence
  Description of Artificial Sequence: Synthetic oligonucleotide
  Antisense strand to SEQ ID NO: 2436054
aucuuacaaacucuugucu

SEQ ID NO: 2436056 - RNA, 19 nt, Artificial Sequence
  Description of Artificial Sequence: Synthetic oligonucleotide
  Sense strand starting at position 2430 of SEQ ID NO: 1886927
ugcuguaagaauuggucca

SEQ ID NO: 2436057 - RNA, 19 nt, Artificial Sequence
  Description of Artificial Sequence: Synthetic oligonucleotide
  Antisense strand to SEQ ID NO: 2436056
uggaccaauucuuacagca

SEQ ID NO: 2436058 - RNA, 19 nt, Artificial Sequence
  Description of Artificial Sequence: Synthetic oligonucleotide
  Sense strand starting at position 2431 of SEQ ID NO: 1886927
gcuguaagaauugguccau

SEQ ID NO: 2436059 - RNA, 19 nt, Artificial Sequence
  Description of Artificial Sequence: Synthetic oligonucleotide
  Antisense strand to SEQ ID NO: 2436058
auggaccaauucuuacagc

SEQ ID NO: 2436060 - RNA, 19 nt, Artificial Sequence
  Description of Artificial Sequence: Synthetic oligonucleotide
  Sense strand starting at position 2435 of SEQ ID NO: 1886927
uaagaauugguccauguua

SEQ ID NO: 2436061 - RNA, 19 nt, Artificial Sequence
  Description of Artificial Sequence: Synthetic oligonucleotide
  Antisense strand to SEQ ID NO: 2436060
uaacauggaccaauucuua

SEQ ID NO: 2436062 - RNA, 19 nt, Artificial Sequence
  Description of Artificial Sequence: Synthetic oligonucleotide
  Sense strand starting at position 2437 of SEQ ID NO: 1886927
agaauugguccauguuagc

SEQ ID NO: 2436063 - RNA, 19 nt, Artificial Sequence
  Description of Artificial Sequence: Synthetic oligonucleotide
  Antisense strand to SEQ ID NO: 2436062
gcuaacauggaccaauucu

SEQ ID NO: 2436064 - RNA, 19 nt, Artificial Sequence
  Description of Artificial Sequence: Synthetic oligonucleotide
  Sense strand starting at position 2446 of SEQ ID NO: 1886927
ccauguuagcaagagaagu

SEQ ID NO: 2436065 - RNA, 19 nt, Artificial Sequence
  Description of Artificial Sequence: Synthetic oligonucleotide
  Antisense strand to SEQ ID NO: 2436064
acuucucuugcuaacaugg

SEQ ID NO: 2436066 - RNA, 19 nt, Artificial Sequence
  Description of Artificial Sequence: Synthetic oligonucleotide
  Sense strand starting at position 2448 of SEQ ID NO: 1886927
auguuagcaagagaaguuu

SEQ ID NO: 2436067 - RNA, 19 nt, Artificial Sequence
  Description of Artificial Sequence: Synthetic oligonucleotide
  Antisense strand to SEQ ID NO: 2436066
aaacuucucuugcuaacau

SEQ ID NO: 2436068 - RNA, 19 nt, Artificial Sequence
  Description of Artificial Sequence: Synthetic oligonucleotide
  Sense strand starting at position 2495 of SEQ ID NO: 1886927
gacggaaggaucugaguuc

SEQ ID NO: 2436069 - RNA, 19 nt, Artificial Sequence
  Description of Artificial Sequence: Synthetic oligonucleotide
  Antisense strand to SEQ ID NO: 2436068
gaacucagauccuuccguc

SEQ ID NO: 2436070 - RNA, 19 nt, Artificial Sequence
  Description of Artificial Sequence: Synthetic oligonucleotide
  Sense strand starting at position 2502 of SEQ ID NO: 1886927
ggaucugaguucccuagga

SEQ ID NO: 2436071 - RNA, 19 nt, Artificial Sequence
  Description of Artificial Sequence: Synthetic oligonucleotide
  Antisense strand to SEQ ID NO: 2436070
uccuagggaacucagaucc

SEQ ID NO: 2436072 - RNA, 19 nt, Artificial Sequence
  Description of Artificial Sequence: Synthetic oligonucleotide
  Sense strand starting at position 2506 of SEQ ID NO: 1886927
cugaguucccuaggauaau

SEQ ID NO: 2436073 - RNA, 19 nt, Artificial Sequence
  Description of Artificial Sequence: Synthetic oligonucleotide
  Antisense strand to SEQ ID NO: 2436072
auuauccuagggaacucag

SEQ ID NO: 2436074 - RNA, 19 nt, Artificial Sequence
  Description of Artificial Sequence: Synthetic oligonucleotide
  Sense strand starting at position 2626 of SEQ ID NO: 1886927
guggauucuguguggacca

SEQ ID NO: 2436075 - RNA, 19 nt, Artificial Sequence
  Description of Artificial Sequence: Synthetic oligonucleotide
  Antisense strand to SEQ ID NO: 2436074
ugguccacacagaauccac

SEQ ID NO: 2436076 - RNA, 19 nt, Artificial Sequence
  Description of Artificial Sequence: Synthetic oligonucleotide
  Sense strand starting at position 2628 of SEQ ID NO: 1886927
ggauucuguguggaccaaa

SEQ ID NO: 2436077 - RNA, 19 nt, Artificial Sequence
  Description of Artificial Sequence: Synthetic oligonucleotide
  Antisense strand to SEQ ID NO: 2436076
uuugguccacacagaaucc

SEQ ID NO: 2436078 - RNA, 19 nt, Artificial Sequence
  Description of Artificial Sequence: Synthetic oligonucleotide
  Sense strand starting at position 2790 of SEQ ID NO: 1886927
cauugaugggagcgaucuu

SEQ ID NO: 2436079 - RNA, 19 nt, Artificial Sequence
  Description of Artificial Sequence: Synthetic oligonucleotide
  Antisense strand to SEQ ID NO: 2436078
aagaucgcucccaucaaug

SEQ ID NO: 2436080 - RNA, 19 nt, Artificial Sequence
  Description of Artificial Sequence: Synthetic oligonucleotide
  Sense strand starting at position 2791 of SEQ ID NO: 1886927
auugaugggagcgaucuua

SEQ ID NO: 2436081 - RNA, 19 nt, Artificial Sequence
  Description of Artificial Sequence: Synthetic oligonucleotide
  Antisense strand to SEQ ID NO: 2436080
uaagaucgcucccaucaau

SEQ ID NO: 2436082 - RNA, 19 nt, Artificial Sequence
  Description of Artificial Sequence: Synthetic oligonucleotide
  Sense strand starting at position 2951 of SEQ ID NO: 1886927
gccucaguuuacccagaua

SEQ ID NO: 2436083 - RNA, 19 nt, Artificial Sequence
  Description of Artificial Sequence: Synthetic oligonucleotide
  Antisense strand to SEQ ID NO: 2436082
uaucuggguaaacugaggc

SEQ ID NO: 2436084 - RNA, 19 nt, Artificial Sequence
  Description of Artificial Sequence: Synthetic oligonucleotide
  Sense strand starting at position 3016 of SEQ ID NO: 1886927
ugagaauaaguagguggau

SEQ ID NO: 2436085 - RNA, 19 nt, Artificial Sequence
  Description of Artificial Sequence: Synthetic oligonucleotide
  Antisense strand to SEQ ID NO: 2436084
auccaccuacuuauucuca

SEQ ID NO: 2436086 - RNA, 19 nt, Artificial Sequence
  Description of Artificial Sequence: Synthetic oligonucleotide
  Sense strand starting at position 3850 of SEQ ID NO: 1886927
cuuuguuucugggucaacu

SEQ ID NO: 2436087 - RNA, 19 nt, Artificial Sequence
  Description of Artificial Sequence: Synthetic oligonucleotide
  Antisense strand to SEQ ID NO: 2436086
aguugacccagaaacaaag

SEQ ID NO: 2436088 - RNA, 19 nt, Artificial Sequence
  Description of Artificial Sequence: Synthetic oligonucleotide
  Sense strand starting at position 3868 of SEQ ID NO: 1886927
uggcaugguuggucaaugu

SEQ ID NO: 2436089 - RNA, 19 nt, Artificial Sequence
  Description of Artificial Sequence: Synthetic oligonucleotide
  Antisense strand to SEQ ID NO: 2436088
acauugaccaaccaugcca

SEQ ID NO: 2436090 - RNA, 19 nt, Artificial Sequence
  Description of Artificial Sequence: Synthetic oligonucleotide
  Sense strand starting at position 3960 of SEQ ID NO: 1886927
cuggcaaaucgcuaaccau

SEQ ID NO: 2436091 - RNA, 19 nt, Artificial Sequence
  Description of Artificial Sequence: Synthetic oligonucleotide
  Antisense strand to SEQ ID NO: 2436090
augguuagcgauuugccag

SEQ ID NO: 2436092 - RNA, 19 nt, Artificial Sequence
  Description of Artificial Sequence: Synthetic oligonucleotide
  Sense strand starting at position 88 of SEQ ID NO: 1886929
uggaauccaucccuuugaa

SEQ ID NO: 2436093 - RNA, 19 nt, Artificial Sequence
  Description of Artificial Sequence: Synthetic oligonucleotide
  Antisense strand to SEQ ID NO: 2436092
uucaaagggauggauucca

SEQ ID NO: 2436094 - RNA, 19 nt, Artificial Sequence
  Description of Artificial Sequence: Synthetic oligonucleotide
  Sense strand starting at position 178 of SEQ ID NO: 1886929
ggaaaugaauauucuuguu

SEQ ID NO: 2436095 - RNA, 19 nt, Artificial Sequence
  Description of Artificial Sequence: Synthetic oligonucleotide
  Antisense strand to SEQ ID NO: 2436094
aacaagaauauucauuucc

SEQ ID NO: 2436096 - RNA, 19 nt, Artificial Sequence
  Description of Artificial Sequence: Synthetic oligonucleotide
  Sense strand starting at position 430 of SEQ ID NO: 1886929
auaauuguucucugauaga

SEQ ID NO: 2436097 - RNA, 19 nt, Artificial Sequence
  Description of Artificial Sequence: Synthetic oligonucleotide
  Antisense strand to SEQ ID NO: 2436096
ucuaucagagaacaauuau

SEQ ID NO: 2436098 - RNA, 19 nt, Artificial Sequence
  Description of Artificial Sequence: Synthetic oligonucleotide
  Sense strand starting at position 433 of SEQ ID NO: 1886929
auuguucucugauagagga

SEQ ID NO: 2436099 - RNA, 19 nt, Artificial Sequence
  Description of Artificial Sequence: Synthetic oligonucleotide
  Antisense strand to SEQ ID NO: 2436098
uccucuaucagagaacaau

SEQ ID NO: 2436100 - RNA, 19 nt, Artificial Sequence
  Description of Artificial Sequence: Synthetic oligonucleotide
  Sense strand starting at position 612 of SEQ ID NO: 1886929
uugucuuguccacaccaau

SEQ ID NO: 2436101 - RNA, 19 nt, Artificial Sequence
  Description of Artificial Sequence: Synthetic oligonucleotide
  Antisense strand to SEQ ID NO: 2436100
auugguguggacaagacaa

SEQ ID NO: 2436102 - RNA, 19 nt, Artificial Sequence
  Description of Artificial Sequence: Synthetic oligonucleotide
  Sense strand starting at position 658 of SEQ ID NO: 1886929
uuucuuauucuccacguuu

SEQ ID NO: 2436103 - RNA, 19 nt, Artificial Sequence
  Description of Artificial Sequence: Synthetic oligonucleotide
  Antisense strand to SEQ ID NO: 2436102
aaacguggagaauaagaaa

SEQ ID NO: 2436104 - RNA, 19 nt, Artificial Sequence
  Description of Artificial Sequence: Synthetic oligonucleotide
  Sense strand starting at position 1378 of SEQ ID NO: 1886929
agagaaaucuuacaccagu

SEQ ID NO: 2436105 - RNA, 19 nt, Artificial Sequence
  Description of Artificial Sequence: Synthetic oligonucleotide
  Antisense strand to SEQ ID NO: 2436104
acugguguaagauuucucu

SEQ ID NO: 2436106 - RNA, 19 nt, Artificial Sequence
  Description of Artificial Sequence: Synthetic oligonucleotide
  Sense strand starting at position 1524 of SEQ ID NO: 1886929
gggcgacuuccuuguuugu

SEQ ID NO: 2436107 - RNA, 19 nt, Artificial Sequence
  Description of Artificial Sequence: Synthetic oligonucleotide
  Antisense strand to SEQ ID NO: 2436106
acaaacaaggaagucgccc

SEQ ID NO: 2436108 - RNA, 19 nt, Artificial Sequence
  Description of Artificial Sequence: Synthetic oligonucleotide
  Sense strand starting at position 1526 of SEQ ID NO: 1886929
gcgacuuccuuguuuguau

SEQ ID NO: 2436109 - RNA, 19 nt, Artificial Sequence
  Description of Artificial Sequence: Synthetic oligonucleotide
  Antisense strand to SEQ ID NO: 2436108
auacaaacaaggaagucgc

SEQ ID NO: 2436110 - RNA, 19 nt, Artificial Sequence
  Description of Artificial Sequence: Synthetic oligonucleotide
  Sense strand starting at position 1528 of SEQ ID NO: 1886929
gacuuccuuguuuguauga

SEQ ID NO: 2436111 - RNA, 19 nt, Artificial Sequence
  Description of Artificial Sequence: Synthetic oligonucleotide
  Antisense strand to SEQ ID NO: 2436110
ucauacaaacaaggaaguc

SEQ ID NO: 2436112 - RNA, 19 nt, Artificial Sequence
  Description of Artificial Sequence: Synthetic oligonucleotide
  Sense strand starting at position 1583 of SEQ ID NO: 1886929
acaagauaggucuguggaa

SEQ ID NO: 2436113 - RNA, 19 nt, Artificial Sequence
  Description of Artificial Sequence: Synthetic oligonucleotide
  Antisense strand to SEQ ID NO: 2436112
uuccacagaccuaucuugu

SEQ ID NO: 2436114 - RNA, 19 nt, Artificial Sequence
  Description of Artificial Sequence: Synthetic oligonucleotide
  Sense strand starting at position 1584 of SEQ ID NO: 1886929
caagauaggucuguggaag

SEQ ID NO: 2436115 - RNA, 19 nt, Artificial Sequence
  Description of Artificial Sequence: Synthetic oligonucleotide
  Antisense strand to SEQ ID NO: 2436114
cuuccacagaccuaucuug

SEQ ID NO: 2436116 - RNA, 19 nt, Artificial Sequence
  Description of Artificial Sequence: Synthetic oligonucleotide
  Sense strand starting at position 1585 of SEQ ID NO: 1886929
aagauaggucuguggaaga

SEQ ID NO: 2436117 - RNA, 19 nt, Artificial Sequence
  Description of Artificial Sequence: Synthetic oligonucleotide
  Antisense strand to SEQ ID NO: 2436116
ucuuccacagaccuaucuu

SEQ ID NO: 2436118 - RNA, 19 nt, Artificial Sequence
  Description of Artificial Sequence: Synthetic oligonucleotide
  Sense strand starting at position 2058 of SEQ ID NO: 1886929
ggaagccucccuuaauuaa

SEQ ID NO: 2436119 - RNA, 19 nt, Artificial Sequence
  Description of Artificial Sequence: Synthetic oligonucleotide
  Antisense strand to SEQ ID NO: 2436118
uuaauuaagggaggcuucc

SEQ ID NO: 2436120 - RNA, 19 nt, Artificial Sequence
  Description of Artificial Sequence: Synthetic oligonucleotide
  Sense strand starting at position 2129 of SEQ ID NO: 1886929
ucgcaccucguuguuuaua

SEQ ID NO: 2436121 - RNA, 19 nt, Artificial Sequence
  Description of Artificial Sequence: Synthetic oligonucleotide
  Antisense strand to SEQ ID NO: 2436120
uauaaacaacgaggugcga

SEQ ID NO: 2436122 - RNA, 19 nt, Artificial Sequence
  Description of Artificial Sequence: Synthetic oligonucleotide
  Sense strand starting at position 2220 of SEQ ID NO: 1886929
ggacccucaucaguacuua

SEQ ID NO: 2436123 - RNA, 19 nt, Artificial Sequence
  Description of Artificial Sequence: Synthetic oligonucleotide
  Antisense strand to SEQ ID NO: 2436122
uaaguacugaugagggucc

SEQ ID NO: 2436124 - RNA, 19 nt, Artificial Sequence
  Description of Artificial Sequence: Synthetic oligonucleotide
  Sense strand starting at position 2246 of SEQ ID NO: 1886929
uucucugcgcuagucuaau

SEQ ID NO: 2436125 - RNA, 19 nt, Artificial Sequence
  Description of Artificial Sequence: Synthetic oligonucleotide
  Antisense strand to SEQ ID NO: 2436124
auuagacuagcgcagagaa

SEQ ID NO: 2436126 - RNA, 19 nt, Artificial Sequence
  Description of Artificial Sequence: Synthetic oligonucleotide
  Sense strand starting at position 2259 of SEQ ID NO: 1886929
ucuaauuagugccuggcaa

SEQ ID NO: 2436127 - RNA, 19 nt, Artificial Sequence
  Description of Artificial Sequence: Synthetic oligonucleotide
  Antisense strand to SEQ ID NO: 2436126
uugccaggcacuaauuaga

SEQ ID NO: 2436128 - RNA, 19 nt, Artificial Sequence
  Description of Artificial Sequence: Synthetic oligonucleotide
  Sense strand starting at position 2260 of SEQ ID NO: 1886929
cuaauuagugccuggcaag

SEQ ID NO: 2436129 - RNA, 19 nt, Artificial Sequence
  Description of Artificial Sequence: Synthetic oligonucleotide
  Antisense strand to SEQ ID NO: 2436128
cuugccaggcacuaauuag

SEQ ID NO: 2436130 - RNA, 19 nt, Artificial Sequence
  Description of Artificial Sequence: Synthetic oligonucleotide
  Sense strand starting at position 2261 of SEQ ID NO: 1886929
uaauuagugccuggcaagu

SEQ ID NO: 2436131 - RNA, 19 nt, Artificial Sequence
  Description of Artificial Sequence: Synthetic oligonucleotide
  Antisense strand to SEQ ID NO: 2436130
acuugccaggcacuaauua

SEQ ID NO: 2436132 - RNA, 19 nt, Artificial Sequence
  Description of Artificial Sequence: Synthetic oligonucleotide
  Sense strand starting at position 2278 of SEQ ID NO: 1886929
guugaaggcgcucaguaaa

SEQ ID NO: 2436133 - RNA, 19 nt, Artificial Sequence
  Description of Artificial Sequence: Synthetic oligonucleotide
  Antisense strand to SEQ ID NO: 2436132
uuuacugagcgccuucaac

SEQ ID NO: 2436134 - RNA, 19 nt, Artificial Sequence
  Description of Artificial Sequence: Synthetic oligonucleotide
  Sense strand starting at position 2327 of SEQ ID NO: 1886929
gcguaaugagcacgacaca

SEQ ID NO: 2436135 - RNA, 19 nt, Artificial Sequence
  Description of Artificial Sequence: Synthetic oligonucleotide
  Antisense strand to SEQ ID NO: 2436134
ugugucgugcucauuacgc

SEQ ID NO: 2436136 - RNA, 19 nt, Artificial Sequence
  Description of Artificial Sequence: Synthetic oligonucleotide
  Sense strand starting at position 2451 of SEQ ID NO: 1886929
gggugcucuggaggaagau

SEQ ID NO: 2436137 - RNA, 19 nt, Artificial Sequence
  Description of Artificial Sequence: Synthetic oligonucleotide
  Antisense strand to SEQ ID NO: 2436136
aucuuccuccagagcaccc

SEQ ID NO: 2436138 - RNA, 19 nt, Artificial Sequence
  Description of Artificial Sequence: Synthetic oligonucleotide
  Sense strand starting at position 2485 of SEQ ID NO: 1886929
cagcaagguugggauaaau

SEQ ID NO: 2436139 - RNA, 19 nt, Artificial Sequence
  Description of Artificial Sequence: Synthetic oligonucleotide
  Antisense strand to SEQ ID NO: 2436138
auuuaucccaaccuugcug

SEQ ID NO: 2436140 - RNA, 19 nt, Artificial Sequence
  Description of Artificial Sequence: Synthetic oligonucleotide
  Sense strand starting at position 2529 of SEQ ID NO: 1886929
ccuguagcgucagcauuua

SEQ ID NO: 2436141 - RNA, 19 nt, Artificial Sequence
  Description of Artificial Sequence: Synthetic oligonucleotide
  Antisense strand to SEQ ID NO: 2436140
uaaaugcugacgcuacagg

SEQ ID NO: 2436142 - RNA, 19 nt, Artificial Sequence
  Description of Artificial Sequence: Synthetic oligonucleotide
  Sense strand starting at position 2620 of SEQ ID NO: 1886929
gcaagaagguaucauagau

SEQ ID NO: 2436143 - RNA, 19 nt, Artificial Sequence
  Description of Artificial Sequence: Synthetic oligonucleotide
  Antisense strand to SEQ ID NO: 2436142
aucuaugauaccuucuugc

SEQ ID NO: 2436144 - RNA, 19 nt, Artificial Sequence
  Description of Artificial Sequence: Synthetic oligonucleotide
  Sense strand starting at position 2628 of SEQ ID NO: 1886929
guaucauagauccgauagu

SEQ ID NO: 2436145 - RNA, 19 nt, Artificial Sequence
  Description of Artificial Sequence: Synthetic oligonucleotide
  Antisense strand to SEQ ID NO: 2436144
acuaucggaucuaugauac

SEQ ID NO: 2436146 - RNA, 19 nt, Artificial Sequence
  Description of Artificial Sequence: Synthetic oligonucleotide
  Sense strand starting at position 2645 of SEQ ID NO: 1886929
gugacacucagucagucau

SEQ ID NO: 2436147 - RNA, 19 nt, Artificial Sequence
  Description of Artificial Sequence: Synthetic oligonucleotide
  Antisense strand to SEQ ID NO: 2436146
augacugacugagugucac

SEQ ID NO: 2436148 - RNA, 19 nt, Artificial Sequence
  Description of Artificial Sequence: Synthetic oligonucleotide
  Sense strand starting at position 2765 of SEQ ID NO: 1886929
gagggcucuacgugcauua

SEQ ID NO: 2436149 - RNA, 19 nt, Artificial Sequence
  Description of Artificial Sequence: Synthetic oligonucleotide
  Antisense strand to SEQ ID NO: 2436148
uaaugcacguagagcccuc

SEQ ID NO: 2436150 - RNA, 19 nt, Artificial Sequence
  Description of Artificial Sequence: Synthetic oligonucleotide
  Sense strand starting at position 2797 of SEQ ID NO: 1886929
acucgacagcccuaagaga

SEQ ID NO: 2436151 - RNA, 19 nt, Artificial Sequence
  Description of Artificial Sequence: Synthetic oligonucleotide
  Antisense strand to SEQ ID NO: 2436150
ucucuuagggcugucgagu

SEQ ID NO: 2436152 - RNA, 19 nt, Artificial Sequence
  Description of Artificial Sequence: Synthetic oligonucleotide
  Sense strand starting at position 2808 of SEQ ID NO: 1886929
cuaagagaugggcguuauu

SEQ ID NO: 2436153 - RNA, 19 nt, Artificial Sequence
  Description of Artificial Sequence: Synthetic oligonucleotide
  Antisense strand to SEQ ID NO: 2436152
aauaacgcccaucucuuag

SEQ ID NO: 2436154 - RNA, 19 nt, Artificial Sequence
  Description of Artificial Sequence: Synthetic oligonucleotide
  Sense strand starting at position 2811 of SEQ ID NO: 1886929
agagaugggcguuauuauu

SEQ ID NO: 2436155 - RNA, 19 nt, Artificial Sequence
  Description of Artificial Sequence: Synthetic oligonucleotide
  Antisense strand to SEQ ID NO: 2436154
aauaauaacgcccaucucu

SEQ ID NO: 2436156 - RNA, 19 nt, Artificial Sequence
  Description of Artificial Sequence: Synthetic oligonucleotide
  Sense strand starting at position 2850 of SEQ ID NO: 1886929
ugaggucauuccucuaggu

SEQ ID NO: 2436157 - RNA, 19 nt, Artificial Sequence
  Description of Artificial Sequence: Synthetic oligonucleotide
  Antisense strand to SEQ ID NO: 2436156
accuagaggaaugaccuca

SEQ ID NO: 2436158 - RNA, 19 nt, Artificial Sequence
  Description of Artificial Sequence: Synthetic oligonucleotide
  Sense strand starting at position 2852 of SEQ ID NO: 1886929
aggucauuccucuagguuc

SEQ ID NO: 2436159 - RNA, 19 nt, Artificial Sequence
  Description of Artificial Sequence: Synthetic oligonucleotide
  Antisense strand to SEQ ID NO: 2436158
gaaccuagaggaaugaccu

SEQ ID NO: 2436160 - RNA, 19 nt, Artificial Sequence
  Description of Artificial Sequence: Synthetic oligonucleotide
  Sense strand starting at position 2854 of SEQ ID NO: 1886929
gucauuccucuagguucga

SEQ ID NO: 2436161 - RNA, 19 nt, Artificial Sequence
  Description of Artificial Sequence: Synthetic oligonucleotide
  Antisense strand to SEQ ID NO: 2436160
ucgaaccuagaggaaugac

SEQ ID NO: 2436162 - RNA, 19 nt, Artificial Sequence
  Description of Artificial Sequence: Synthetic oligonucleotide
  Sense strand starting at position 2855 of SEQ ID NO: 1886929
ucauuccucuagguucgaa

SEQ ID NO: 2436163 - RNA, 19 nt, Artificial Sequence
  Description of Artificial Sequence: Synthetic oligonucleotide
  Antisense strand to SEQ ID NO: 2436162
uucgaaccuagaggaauga

SEQ ID NO: 2436164 - RNA, 19 nt, Artificial Sequence
  Description of Artificial Sequence: Synthetic oligonucleotide
  Sense strand starting at position 2943 of SEQ ID NO: 1886929
ucucgauuauaagauaauc

SEQ ID NO: 2436165 - RNA, 19 nt, Artificial Sequence
  Description of Artificial Sequence: Synthetic oligonucleotide
  Antisense strand to SEQ ID NO: 2436164
gauuaucuuauaaucgaga

SEQ ID NO: 2436166 - RNA, 19 nt, Artificial Sequence
  Description of Artificial Sequence: Synthetic oligonucleotide
  Sense strand starting at position 3024 of SEQ ID NO: 1886929
gcaaguguuucccucauuu

SEQ ID NO: 2436167 - RNA, 19 nt, Artificial Sequence
  Description of Artificial Sequence: Synthetic oligonucleotide
  Antisense strand to SEQ ID NO: 2436166
aaaugagggaaacacuugc

SEQ ID NO: 2436168 - RNA, 19 nt, Artificial Sequence
  Description of Artificial Sequence: Synthetic oligonucleotide
  Sense strand starting at position 3083 of SEQ ID NO: 1886929
ucuauuacccugugaagug

SEQ ID NO: 2436169 - RNA, 19 nt, Artificial Sequence
  Description of Artificial Sequence: Synthetic oligonucleotide
  Antisense strand to SEQ ID NO: 2436168
cacuucacaggguaauaga

SEQ ID NO: 2436170 - RNA, 19 nt, Artificial Sequence
  Description of Artificial Sequence: Synthetic oligonucleotide
  Sense strand starting at position 3605 of SEQ ID NO: 1886929
ugccaagugggccaaagau

SEQ ID NO: 2436171 - RNA, 19 nt, Artificial Sequence
  Description of Artificial Sequence: Synthetic oligonucleotide
  Antisense strand to SEQ ID NO: 2436170
aucuuuggcccacuuggca

SEQ ID NO: 2436172 - RNA, 19 nt, Artificial Sequence
  Description of Artificial Sequence: Synthetic oligonucleotide
  Sense strand starting at position 117 of SEQ ID NO: 1886930
gagcaaguccuccacgacu

SEQ ID NO: 2436173 - RNA, 19 nt, Artificial Sequence
  Description of Artificial Sequence: Synthetic oligonucleotide
  Antisense strand to SEQ ID NO: 2436172
agucguggaggacuugcuc

SEQ ID NO: 2436174 - RNA, 19 nt, Artificial Sequence
  Description of Artificial Sequence: Synthetic oligonucleotide
  Sense strand starting at position 464 of SEQ ID NO: 1886930
ucccaagacuguguuaguu

SEQ ID NO: 2436175 - RNA, 19 nt, Artificial Sequence
  Description of Artificial Sequence: Synthetic oligonucleotide
  Antisense strand to SEQ ID NO: 2436174
aacuaacacagucuuggga

SEQ ID NO: 2436176 - RNA, 19 nt, Artificial Sequence
  Description of Artificial Sequence: Synthetic oligonucleotide
  Sense strand starting at position 563 of SEQ ID NO: 1886930
uggucucuccgacaagacu

SEQ ID NO: 2436177 - RNA, 19 nt, Artificial Sequence
  Description of Artificial Sequence: Synthetic oligonucleotide
  Antisense strand to SEQ ID NO: 2436176
agucuugucggagagacca

SEQ ID NO: 2436178 - RNA, 19 nt, Artificial Sequence
  Description of Artificial Sequence: Synthetic oligonucleotide
  Sense strand starting at position 646 of SEQ ID NO: 1886930
agaguaggcccucagugau

SEQ ID NO: 2436179 - RNA, 19 nt, Artificial Sequence
  Description of Artificial Sequence: Synthetic oligonucleotide
  Antisense strand to SEQ ID NO: 2436178
aucacugagggccuacucu

SEQ ID NO: 2436180 - RNA, 19 nt, Artificial Sequence
  Description of Artificial Sequence: Synthetic oligonucleotide
  Sense strand starting at position 656 of SEQ ID NO: 1886930
cucagugauuacccauuga

SEQ ID NO: 2436181 - RNA, 19 nt, Artificial Sequence
  Description of Artificial Sequence: Synthetic oligonucleotide
  Antisense strand to SEQ ID NO: 2436180
ucaauggguaaucacugag

SEQ ID NO: 2436182 - RNA, 19 nt, Artificial Sequence
  Description of Artificial Sequence: Synthetic oligonucleotide
  Sense strand starting at position 660 of SEQ ID NO: 1886930
gugauuacccauugaauga

SEQ ID NO: 2436183 - RNA, 19 nt, Artificial Sequence
  Description of Artificial Sequence: Synthetic oligonucleotide
  Antisense strand to SEQ ID NO: 2436182
ucauucaauggguaaucac

SEQ ID NO: 2436184 - RNA, 19 nt, Artificial Sequence
  Description of Artificial Sequence: Synthetic oligonucleotide
  Sense strand starting at position 816 of SEQ ID NO: 1886930
cccugagguuucccuccau

SEQ ID NO: 2436185 - RNA, 19 nt, Artificial Sequence
  Description of Artificial Sequence: Synthetic oligonucleotide
  Antisense strand to SEQ ID NO: 2436184
auggagggaaaccucaggg

SEQ ID NO: 2436186 - RNA, 19 nt, Artificial Sequence
  Description of Artificial Sequence: Synthetic oligonucleotide
  Sense strand starting at position 898 of SEQ ID NO: 1886930
aggaaucauguuugagagu

SEQ ID NO: 2436187 - RNA, 19 nt, Artificial Sequence
  Description of Artificial Sequence: Synthetic oligonucleotide
  Antisense strand to SEQ ID NO: 2436186
acucucaaacaugauuccu

SEQ ID NO: 2436188 - RNA, 19 nt, Artificial Sequence
  Description of Artificial Sequence: Synthetic oligonucleotide
  Sense strand starting at position 909 of SEQ ID NO: 1886930
uugagaguuuggccugagu

SEQ ID NO: 2436189 - RNA, 19 nt, Artificial Sequence
  Description of Artificial Sequence: Synthetic oligonucleotide
  Antisense strand to SEQ ID NO: 2436188
acucaggccaaacucucaa

SEQ ID NO: 2436190 - RNA, 19 nt, Artificial Sequence
  Description of Artificial Sequence: Synthetic oligonucleotide
  Sense strand starting at position 911 of SEQ ID NO: 1886930
gagaguuuggccugaguuc

SEQ ID NO: 2436191 - RNA, 19 nt, Artificial Sequence
  Description of Artificial Sequence: Synthetic oligonucleotide
  Antisense strand to SEQ ID NO: 2436190
gaacucaggccaaacucuc

SEQ ID NO: 2436192 - RNA, 19 nt, Artificial Sequence
  Description of Artificial Sequence: Synthetic oligonucleotide
  Sense strand starting at position 921 of SEQ ID NO: 1886930
ccugaguucgggugaggau

SEQ ID NO: 2436193 - RNA, 19 nt, Artificial Sequence
  Description of Artificial Sequence: Synthetic oligonucleotide
  Antisense strand to SEQ ID NO: 2436192
auccucacccgaacucagg

SEQ ID NO: 2436194 - RNA, 19 nt, Artificial Sequence
  Description of Artificial Sequence: Synthetic oligonucleotide
  Sense strand starting at position 986 of SEQ ID NO: 1886930
gagggauucccggguggga

SEQ ID NO: 2436195 - RNA, 19 nt, Artificial Sequence
  Description of Artificial Sequence: Synthetic oligonucleotide
  Antisense strand to SEQ ID NO: 2436194
ucccacccgggaaucccuc

SEQ ID NO: 2436196 - RNA, 19 nt, Artificial Sequence
  Description of Artificial Sequence: Synthetic oligonucleotide
  Sense strand starting at position 1034 of SEQ ID NO: 1886930
aggacacaugagugucaca

SEQ ID NO: 2436197 - RNA, 19 nt, Artificial Sequence
  Description of Artificial Sequence: Synthetic oligonucleotide
  Antisense strand to SEQ ID NO: 2436196
ugugacacucauguguccu

SEQ ID NO: 2436198 - RNA, 19 nt, Artificial Sequence
  Description of Artificial Sequence: Synthetic oligonucleotide
  Sense strand starting at position 1846 of SEQ ID NO: 1886930
guugcaucauuucuugaac

SEQ ID NO: 2436199 - RNA, 19 nt, Artificial Sequence
  Description of Artificial Sequence: Synthetic oligonucleotide
  Antisense strand to SEQ ID NO: 2436198
guucaagaaaugaugcaac

SEQ ID NO: 2436200 - RNA, 19 nt, Artificial Sequence
  Description of Artificial Sequence: Synthetic oligonucleotide
  Sense strand starting at position 1860 of SEQ ID NO: 1886930
ugaacuuucuuucugguuu

SEQ ID NO: 2436201 - RNA, 19 nt, Artificial Sequence
  Description of Artificial Sequence: Synthetic oligonucleotide
  Antisense strand to SEQ ID NO: 2436200
aaaccagaaagaaaguuca

SEQ ID NO: 2436202 - RNA, 19 nt, Artificial Sequence
  Description of Artificial Sequence: Synthetic oligonucleotide
  Sense strand starting at position 1894 of SEQ ID NO: 1886930
agacaaucccaguggaucu

SEQ ID NO: 2436203 - RNA, 19 nt, Artificial Sequence
  Description of Artificial Sequence: Synthetic oligonucleotide
  Antisense strand to SEQ ID NO: 2436202
agauccacugggauugucu

SEQ ID NO: 2436204 - RNA, 19 nt, Artificial Sequence
  Description of Artificial Sequence: Synthetic oligonucleotide
  Sense strand starting at position 1953 of SEQ ID NO: 1886930
ccuguuugggccugagaug

SEQ ID NO: 2436205 - RNA, 19 nt, Artificial Sequence
  Description of Artificial Sequence: Synthetic oligonucleotide
  Antisense strand to SEQ ID NO: 2436204
caucucaggcccaaacagg

SEQ ID NO: 2436206 - RNA, 19 nt, Artificial Sequence
  Description of Artificial Sequence: Synthetic oligonucleotide
  Sense strand starting at position 2071 of SEQ ID NO: 1886930
ucuagagauuuggguagau

SEQ ID NO: 2436207 - RNA, 19 nt, Artificial Sequence
  Description of Artificial Sequence: Synthetic oligonucleotide
  Antisense strand to SEQ ID NO: 2436206
aucuacccaaaucucuaga

SEQ ID NO: 2436208 - RNA, 19 nt, Artificial Sequence
  Description of Artificial Sequence: Synthetic oligonucleotide
  Sense strand starting at position 2718 of SEQ ID NO: 1886930
auaauugcucaaggccaua

SEQ ID NO: 2436209 - RNA, 19 nt, Artificial Sequence
  Description of Artificial Sequence: Synthetic oligonucleotide
  Antisense strand to SEQ ID NO: 2436208
uauggccuugagcaauuau

SEQ ID NO: 2436210 - RNA, 19 nt, Artificial Sequence
  Description of Artificial Sequence: Synthetic oligonucleotide
  Sense strand starting at position 2780 of SEQ ID NO: 1886930
ggaauuauaucuuugcuug

SEQ ID NO: 2436211 - RNA, 19 nt, Artificial Sequence
  Description of Artificial Sequence: Synthetic oligonucleotide
  Antisense strand to SEQ ID NO: 2436210
caagcaaagauauaauucc

SEQ ID NO: 2436212 - RNA, 19 nt, Artificial Sequence
  Description of Artificial Sequence: Synthetic oligonucleotide
  Sense strand starting at position 2877 of SEQ ID NO: 1886930
ucauaaucccaguguccuu

SEQ ID NO: 2436213 - RNA, 19 nt, Artificial Sequence
  Description of Artificial Sequence: Synthetic oligonucleotide
  Antisense strand to SEQ ID NO: 2436212
aaggacacugggauuauga

SEQ ID NO: 2436214 - RNA, 19 nt, Artificial Sequence
  Description of Artificial Sequence: Synthetic oligonucleotide
  Sense strand starting at position 2888 of SEQ ID NO: 1886930
guguccuuggaucagacuu

SEQ ID NO: 2436215 - RNA, 19 nt, Artificial Sequence
  Description of Artificial Sequence: Synthetic oligonucleotide
  Antisense strand to SEQ ID NO: 2436214
aagucugauccaaggacac

SEQ ID NO: 2436216 - RNA, 19 nt, Artificial Sequence
  Description of Artificial Sequence: Synthetic oligonucleotide
  Sense strand starting at position 2896 of SEQ ID NO: 1886930
ggaucagacuuccuagauu

SEQ ID NO: 2436217 - RNA, 19 nt, Artificial Sequence
  Description of Artificial Sequence: Synthetic oligonucleotide
  Antisense strand to SEQ ID NO: 2436216
aaucuaggaagucugaucc

SEQ ID NO: 2436218 - RNA, 19 nt, Artificial Sequence
  Description of Artificial Sequence: Synthetic oligonucleotide
  Sense strand starting at position 3046 of SEQ ID NO: 1886930
aggguuuauucccuuaucu

SEQ ID NO: 2436219 - RNA, 19 nt, Artificial Sequence
  Description of Artificial Sequence: Synthetic oligonucleotide
  Antisense strand to SEQ ID NO: 2436218
agauaagggaauaaacccu

SEQ ID NO: 2436220 - RNA, 19 nt, Artificial Sequence
  Description of Artificial Sequence: Synthetic oligonucleotide
  Sense strand starting at position 3048 of SEQ ID NO: 1886930
gguuuauucccuuaucuua

SEQ ID NO: 2436221 - RNA, 19 nt, Artificial Sequence
  Description of Artificial Sequence: Synthetic oligonucleotide
  Antisense strand to SEQ ID NO: 2436220
uaagauaagggaauaaacc

SEQ ID NO: 2436222 - RNA, 19 nt, Artificial Sequence
  Description of Artificial Sequence: Synthetic oligonucleotide
  Sense strand starting at position 3105 of SEQ ID NO: 1886930
ugcgcaaucaguguuaguc

SEQ ID NO: 2436223 - RNA, 19 nt, Artificial Sequence
  Description of Artificial Sequence: Synthetic oligonucleotide
  Antisense strand to SEQ ID NO: 2436222
gacuaacacugauugcgca

SEQ ID NO: 2436224 - RNA, 19 nt, Artificial Sequence
  Description of Artificial Sequence: Synthetic oligonucleotide
  Sense strand starting at position 3115 of SEQ ID NO: 1886930
guguuaguccuugcuccuu

SEQ ID NO: 2436225 - RNA, 19 nt, Artificial Sequence
  Description of Artificial Sequence: Synthetic oligonucleotide
  Antisense strand to SEQ ID NO: 2436224
aaggagcaaggacuaacac

SEQ ID NO: 2436226 - RNA, 19 nt, Artificial Sequence
  Description of Artificial Sequence: Synthetic oligonucleotide
  Sense strand starting at position 3138 of SEQ ID NO: 1886930
guggacaauuguucuuaca

SEQ ID NO: 2436227 - RNA, 19 nt, Artificial Sequence
  Description of Artificial Sequence: Synthetic oligonucleotide
  Antisense strand to SEQ ID NO: 2436226
uguaagaacaauuguccac

SEQ ID NO: 2436228 - RNA, 19 nt, Artificial Sequence
  Description of Artificial Sequence: Synthetic oligonucleotide
  Sense strand starting at position 3140 of SEQ ID NO: 1886930
ggacaauuguucuuacacu

SEQ ID NO: 2436229 - RNA, 19 nt, Artificial Sequence
  Description of Artificial Sequence: Synthetic oligonucleotide
  Antisense strand to SEQ ID NO: 2436228
aguguaagaacaauugucc

SEQ ID NO: 2436230 - RNA, 19 nt, Artificial Sequence
  Description of Artificial Sequence: Synthetic oligonucleotide
  Sense strand starting at position 3203 of SEQ ID NO: 1886930
gugccuccuggcuauagaa

SEQ ID NO: 2436231 - RNA, 19 nt, Artificial Sequence
  Description of Artificial Sequence: Synthetic oligonucleotide
  Antisense strand to SEQ ID NO: 2436230
uucuauagccaggaggcac

SEQ ID NO: 2436232 - RNA, 19 nt, Artificial Sequence
  Description of Artificial Sequence: Synthetic oligonucleotide
  Sense strand starting at position 3222 of SEQ ID NO: 1886930
gccagaaauuagccuucca

SEQ ID NO: 2436233 - RNA, 19 nt, Artificial Sequence
  Description of Artificial Sequence: Synthetic oligonucleotide
  Antisense strand to SEQ ID NO: 2436232
uggaaggcuaauuucuggc

SEQ ID NO: 2436234 - RNA, 19 nt, Artificial Sequence
  Description of Artificial Sequence: Synthetic oligonucleotide
  Sense strand starting at position 3405 of SEQ ID NO: 1886930
gugauagcgccaaguggaa

SEQ ID NO: 2436235 - RNA, 19 nt, Artificial Sequence
  Description of Artificial Sequence: Synthetic oligonucleotide
  Antisense strand to SEQ ID NO: 2436234
uuccacuuggcgcuaucac

SEQ ID NO: 2436236 - RNA, 19 nt, Artificial Sequence
  Description of Artificial Sequence: Synthetic oligonucleotide
  Sense strand starting at position 3504 of SEQ ID NO: 1886930
cgaguucuuccuggagagu

SEQ ID NO: 2436237 - RNA, 19 nt, Artificial Sequence
  Description of Artificial Sequence: Synthetic oligonucleotide
  Antisense strand to SEQ ID NO: 2436236
acucuccaggaagaacucg

SEQ ID NO: 2436238 - RNA, 19 nt, Artificial Sequence
  Description of Artificial Sequence: Synthetic oligonucleotide
  Sense strand starting at position 3505 of SEQ ID NO: 1886930
gaguucuuccuggagaguc

SEQ ID NO: 2436239 - RNA, 19 nt, Artificial Sequence
  Description of Artificial Sequence: Synthetic oligonucleotide
  Antisense strand to SEQ ID NO: 2436238
gacucuccaggaagaacuc

SEQ ID NO: 2436240 - RNA, 19 nt, Artificial Sequence
  Description of Artificial Sequence: Synthetic oligonucleotide
  Sense strand starting at position 3507 of SEQ ID NO: 1886930
guucuuccuggagagucua

SEQ ID NO: 2436241 - RNA, 19 nt, Artificial Sequence
  Description of Artificial Sequence: Synthetic oligonucleotide
  Antisense strand to SEQ ID NO: 2436240
uagacucuccaggaagaac

SEQ ID NO: 2436242 - RNA, 19 nt, Artificial Sequence
  Description of Artificial Sequence: Synthetic oligonucleotide
  Sense strand starting at position 3519 of SEQ ID NO: 1886930
gagucuauggcuuaccuaa

SEQ ID NO: 2436243 - RNA, 19 nt, Artificial Sequence
  Description of Artificial Sequence: Synthetic oligonucleotide
  Antisense strand to SEQ ID NO: 2436242
uuagguaagccauagacuc

SEQ ID NO: 2436244 - RNA, 19 nt, Artificial Sequence
  Description of Artificial Sequence: Synthetic oligonucleotide
  Sense strand starting at position 3521 of SEQ ID NO: 1886930
gucuauggcuuaccuaaca

SEQ ID NO: 2436245 - RNA, 19 nt, Artificial Sequence
  Description of Artificial Sequence: Synthetic oligonucleotide
  Antisense strand to SEQ ID NO: 2436244
uguuagguaagccauagac

SEQ ID NO: 2436246 - RNA, 19 nt, Artificial Sequence
  Description of Artificial Sequence: Synthetic oligonucleotide
  Sense strand starting at position 3592 of SEQ ID NO: 1886930
cccugauggcuacagaauu

SEQ ID NO: 2436247 - RNA, 19 nt, Artificial Sequence
  Description of Artificial Sequence: Synthetic oligonucleotide
  Antisense strand to SEQ ID NO: 2436246
aauucuguagccaucaggg

SEQ ID NO: 2436248 - RNA, 19 nt, Artificial Sequence
  Description of Artificial Sequence: Synthetic oligonucleotide
  Sense strand starting at position 3605 of SEQ ID NO: 1886930
agaauuuaguaacaagugu

SEQ ID NO: 2436249 - RNA, 19 nt, Artificial Sequence
  Description of Artificial Sequence: Synthetic oligonucleotide
  Antisense strand to SEQ ID NO: 2436248
acacuuguuacuaaauucu

SEQ ID NO: 2436250 - RNA, 19 nt, Artificial Sequence
  Description of Artificial Sequence: Synthetic oligonucleotide
  Sense strand starting at position 3623 of SEQ ID NO: 1886930
ugauuacuggcaugagacu

SEQ ID NO: 2436251 - RNA, 19 nt, Artificial Sequence
  Description of Artificial Sequence: Synthetic oligonucleotide
  Antisense strand to SEQ ID NO: 2436250
agucucaugccaguaauca

SEQ ID NO: 2436252 - RNA, 19 nt, Artificial Sequence
  Description of Artificial Sequence: Synthetic oligonucleotide
  Sense strand starting at position 676 of SEQ ID NO: 1886931
ugauuuauugcuggugcca

SEQ ID NO: 2436253 - RNA, 19 nt, Artificial Sequence
  Description of Artificial Sequence: Synthetic oligonucleotide
  Antisense strand to SEQ ID NO: 2436252
uggcaccagcaauaaauca

SEQ ID NO: 2436254 - RNA, 19 nt, Artificial Sequence
  Description of Artificial Sequence: Synthetic oligonucleotide
  Sense strand starting at position 718 of SEQ ID NO: 1886931
ggaagacagaucggugguu

SEQ ID NO: 2436255 - RNA, 19 nt, Artificial Sequence
  Description of Artificial Sequence: Synthetic oligonucleotide
  Antisense strand to SEQ ID NO: 2436254
aaccaccgaucugucuucc

SEQ ID NO: 2436256 - RNA, 19 nt, Artificial Sequence
  Description of Artificial Sequence: Synthetic oligonucleotide
  Sense strand starting at position 719 of SEQ ID NO: 1886931
gaagacagaucggugguuu

SEQ ID NO: 2436257 - RNA, 19 nt, Artificial Sequence
  Description of Artificial Sequence: Synthetic oligonucleotide
  Antisense strand to SEQ ID NO: 2436256
aaaccaccgaucugucuuc

SEQ ID NO: 2436258 - RNA, 19 nt, Artificial Sequence
  Description of Artificial Sequence: Synthetic oligonucleotide
  Sense strand starting at position 1266 of SEQ ID NO: 1886931
aaguauggacuuugacuga

SEQ ID NO: 2436259 - RNA, 19 nt, Artificial Sequence
  Description of Artificial Sequence: Synthetic oligonucleotide
  Antisense strand to SEQ ID NO: 2436258
ucagucaaaguccauacuu

SEQ ID NO: 2436260 - RNA, 19 nt, Artificial Sequence
  Description of Artificial Sequence: Synthetic oligonucleotide
  Sense strand starting at position 1270 of SEQ ID NO: 1886931
auggacuuugacugauagu

SEQ ID NO: 2436261 - RNA, 19 nt, Artificial Sequence
  Description of Artificial Sequence: Synthetic oligonucleotide
  Antisense strand to SEQ ID NO: 2436260
acuaucagucaaaguccau

SEQ ID NO: 2436262 - RNA, 19 nt, Artificial Sequence
  Description of Artificial Sequence: Synthetic oligonucleotide
  Sense strand starting at position 1277 of SEQ ID NO: 1886931
uugacugauagugauaugu

SEQ ID NO: 2436263 - RNA, 19 nt, Artificial Sequence
  Description of Artificial Sequence: Synthetic oligonucleotide
  Antisense strand to SEQ ID NO: 2436262
acauaucacuaucagucaa

SEQ ID NO: 2436264 - RNA, 19 nt, Artificial Sequence
  Description of Artificial Sequence: Synthetic oligonucleotide
  Sense strand starting at position 1345 of SEQ ID NO: 1886931
uugauaacacgagaugcua

SEQ ID NO: 2436265 - RNA, 19 nt, Artificial Sequence
  Description of Artificial Sequence: Synthetic oligonucleotide
  Antisense strand to SEQ ID NO: 2436264
uagcaucucguguuaucaa

SEQ ID NO: 2436266 - RNA, 19 nt, Artificial Sequence
  Description of Artificial Sequence: Synthetic oligonucleotide
  Sense strand starting at position 1369 of SEQ ID NO: 1886931
guuugagggcagcagauau

SEQ ID NO: 2436267 - RNA, 19 nt, Artificial Sequence
  Description of Artificial Sequence: Synthetic oligonucleotide
  Antisense strand to SEQ ID NO: 2436266
auaucugcugcccucaaac

SEQ ID NO: 2436268 - RNA, 19 nt, Artificial Sequence
  Description of Artificial Sequence: Synthetic oligonucleotide
  Sense strand starting at position 1388 of SEQ ID NO: 1886931
acaggaaaucuguguaccu

SEQ ID NO: 2436269 - RNA, 19 nt, Artificial Sequence
  Description of Artificial Sequence: Synthetic oligonucleotide
  Antisense strand to SEQ ID NO: 2436268
agguacacagauuuccugu

SEQ ID NO: 2436270 - RNA, 19 nt, Artificial Sequence
  Description of Artificial Sequence: Synthetic oligonucleotide
  Sense strand starting at position 1534 of SEQ ID NO: 1886931
guuaguguuauagaugaau

SEQ ID NO: 2436271 - RNA, 19 nt, Artificial Sequence
  Description of Artificial Sequence: Synthetic oligonucleotide
  Antisense strand to SEQ ID NO: 2436270
auucaucuauaacacuaac

SEQ ID NO: 2436272 - RNA, 19 nt, Artificial Sequence
  Description of Artificial Sequence: Synthetic oligonucleotide
  Sense strand starting at position 1563 of SEQ ID NO: 1886931
uagguugucagagagacuu

SEQ ID NO: 2436273 - RNA, 19 nt, Artificial Sequence
  Description of Artificial Sequence: Synthetic oligonucleotide
  Antisense strand to SEQ ID NO: 2436272
aagucucucugacaaccua

SEQ ID NO: 2436274 - RNA, 19 nt, Artificial Sequence
  Description of Artificial Sequence: Synthetic oligonucleotide
  Sense strand starting at position 1585 of SEQ ID NO: 1886931
agugucauuucuucucuau

SEQ ID NO: 2436275 - RNA, 19 nt, Artificial Sequence
  Description of Artificial Sequence: Synthetic oligonucleotide
  Antisense strand to SEQ ID NO: 2436274
auagagaagaaaugacacu

SEQ ID NO: 2436276 - RNA, 19 nt, Artificial Sequence
  Description of Artificial Sequence: Synthetic oligonucleotide
  Sense strand starting at position 1676 of SEQ ID NO: 1886931
ugaagcaauuaauuacgaa

SEQ ID NO: 2436277 - RNA, 19 nt, Artificial Sequence
  Description of Artificial Sequence: Synthetic oligonucleotide
  Antisense strand to SEQ ID NO: 2436276
uucguaauuaauugcuuca

SEQ ID NO: 2436278 - RNA, 19 nt, Artificial Sequence
  Description of Artificial Sequence: Synthetic oligonucleotide
  Sense strand starting at position 1813 of SEQ ID NO: 1886931
aaggaaaucuucuuuggua

SEQ ID NO: 2436279 - RNA, 19 nt, Artificial Sequence
  Description of Artificial Sequence: Synthetic oligonucleotide
  Antisense strand to SEQ ID NO: 2436278
uaccaaagaagauuuccuu

SEQ ID NO: 2436280 - RNA, 19 nt, Artificial Sequence
  Description of Artificial Sequence: Synthetic oligonucleotide
  Sense strand starting at position 1814 of SEQ ID NO: 1886931
aggaaaucuucuuugguau

SEQ ID NO: 2436281 - RNA, 19 nt, Artificial Sequence
  Description of Artificial Sequence: Synthetic oligonucleotide
  Antisense strand to SEQ ID NO: 2436280
auaccaaagaagauuuccu

SEQ ID NO: 2436282 - RNA, 19 nt, Artificial Sequence
  Description of Artificial Sequence: Synthetic oligonucleotide
  Sense strand starting at position 1815 of SEQ ID NO: 1886931
ggaaaucuucuuugguauu

SEQ ID NO: 2436283 - RNA, 19 nt, Artificial Sequence
  Description of Artificial Sequence: Synthetic oligonucleotide
  Antisense strand to SEQ ID NO: 2436282
aauaccaaagaagauuucc

SEQ ID NO: 2436284 - RNA, 19 nt, Artificial Sequence
  Description of Artificial Sequence: Synthetic oligonucleotide
  Sense strand starting at position 2017 of SEQ ID NO: 1886931
acacuuagauaucugugaa

SEQ ID NO: 2436285 - RNA, 19 nt, Artificial Sequence
  Description of Artificial Sequence: Synthetic oligonucleotide
  Antisense strand to SEQ ID NO: 2436284
uucacagauaucuaagugu

SEQ ID NO: 2436286 - RNA, 19 nt, Artificial Sequence
  Description of Artificial Sequence: Synthetic oligonucleotide
  Sense strand starting at position 2020 of SEQ ID NO: 1886931
cuuagauaucugugaaauu

SEQ ID NO: 2436287 - RNA, 19 nt, Artificial Sequence
  Description of Artificial Sequence: Synthetic oligonucleotide
  Antisense strand to SEQ ID NO: 2436286
aauuucacagauaucuaag

SEQ ID NO: 2436288 - RNA, 19 nt, Artificial Sequence
  Description of Artificial Sequence: Synthetic oligonucleotide
  Sense strand starting at position 2242 of SEQ ID NO: 1886931
guugacuuaugacuugaca

SEQ ID NO: 2436289 - RNA, 19 nt, Artificial Sequence
  Description of Artificial Sequence: Synthetic oligonucleotide
  Antisense strand to SEQ ID NO: 2436288
ugucaagucauaagucaac

SEQ ID NO: 2436290 - RNA, 19 nt, Artificial Sequence
  Description of Artificial Sequence: Synthetic oligonucleotide
  Sense strand starting at position 2250 of SEQ ID NO: 1886931
augacuugacaauguggau

SEQ ID NO: 2436291 - RNA, 19 nt, Artificial Sequence
  Description of Artificial Sequence: Synthetic oligonucleotide
  Antisense strand to SEQ ID NO: 2436290
auccacauugucaagucau

SEQ ID NO: 2436292 - RNA, 19 nt, Artificial Sequence
  Description of Artificial Sequence: Synthetic oligonucleotide
  Sense strand starting at position 2414 of SEQ ID NO: 1886931
gcaacucaucuggaagucu

SEQ ID NO: 2436293 - RNA, 19 nt, Artificial Sequence
  Description of Artificial Sequence: Synthetic oligonucleotide
  Antisense strand to SEQ ID NO: 2436292
agacuuccagaugaguugc

SEQ ID NO: 2436294 - RNA, 19 nt, Artificial Sequence
  Description of Artificial Sequence: Synthetic oligonucleotide
  Sense strand starting at position 2571 of SEQ ID NO: 1886931
ggaccuauggcugagucuu

SEQ ID NO: 2436295 - RNA, 19 nt, Artificial Sequence
  Description of Artificial Sequence: Synthetic oligonucleotide
  Antisense strand to SEQ ID NO: 2436294
aagacucagccauaggucc

SEQ ID NO: 2436296 - RNA, 19 nt, Artificial Sequence
  Description of Artificial Sequence: Synthetic oligonucleotide
  Sense strand starting at position 2611 of SEQ ID NO: 1886931
cuauuagaaugucuggcaa

SEQ ID NO: 2436297 - RNA, 19 nt, Artificial Sequence
  Description of Artificial Sequence: Synthetic oligonucleotide
  Antisense strand to SEQ ID NO: 2436296
uugccagacauucuaauag

SEQ ID NO: 2436298 - RNA, 19 nt, Artificial Sequence
  Description of Artificial Sequence: Synthetic oligonucleotide
  Sense strand starting at position 2896 of SEQ ID NO: 1886931
ggaugugaagaaugcucau

SEQ ID NO: 2436299 - RNA, 19 nt, Artificial Sequence
  Description of Artificial Sequence: Synthetic oligonucleotide
  Antisense strand to SEQ ID NO: 2436298
augagcauucuucacaucc

SEQ ID NO: 2436300 - RNA, 19 nt, Artificial Sequence
  Description of Artificial Sequence: Synthetic oligonucleotide
  Sense strand starting at position 2899 of SEQ ID NO: 1886931
ugugaagaaugcucauuau

SEQ ID NO: 2436301 - RNA, 19 nt, Artificial Sequence
  Description of Artificial Sequence: Synthetic oligonucleotide
  Antisense strand to SEQ ID NO: 2436300
auaaugagcauucuucaca

SEQ ID NO: 2436302 - RNA, 19 nt, Artificial Sequence
  Description of Artificial Sequence: Synthetic oligonucleotide
  Sense strand starting at position 2930 of SEQ ID NO: 1886931
cucucagguuauuucguaa

SEQ ID NO: 2436303 - RNA, 19 nt, Artificial Sequence
  Description of Artificial Sequence: Synthetic oligonucleotide
  Antisense strand to SEQ ID NO: 2436302
uuacgaaauaaccugagag

SEQ ID NO: 2436304 - RNA, 19 nt, Artificial Sequence
  Description of Artificial Sequence: Synthetic oligonucleotide
  Sense strand starting at position 2933 of SEQ ID NO: 1886931
ucagguuauuucguaagug

SEQ ID NO: 2436305 - RNA, 19 nt, Artificial Sequence
  Description of Artificial Sequence: Synthetic oligonucleotide
  Antisense strand to SEQ ID NO: 2436304
cacuuacgaaauaaccuga

SEQ ID NO: 2436306 - RNA, 19 nt, Artificial Sequence
  Description of Artificial Sequence: Synthetic oligonucleotide
  Sense strand starting at position 2938 of SEQ ID NO: 1886931
uuauuucguaagugucauu

SEQ ID NO: 2436307 - RNA, 19 nt, Artificial Sequence
  Description of Artificial Sequence: Synthetic oligonucleotide
  Antisense strand to SEQ ID NO: 2436306
aaugacacuuacgaaauaa

SEQ ID NO: 2436308 - RNA, 19 nt, Artificial Sequence
  Description of Artificial Sequence: Synthetic oligonucleotide
  Sense strand starting at position 2962 of SEQ ID NO: 1886931
cugauccaaguuuaaguaa

SEQ ID NO: 2436309 - RNA, 19 nt, Artificial Sequence
  Description of Artificial Sequence: Synthetic oligonucleotide
  Antisense strand to SEQ ID NO: 2436308
uuacuuaaacuuggaucag

SEQ ID NO: 2436310 - RNA, 19 nt, Artificial Sequence
  Description of Artificial Sequence: Synthetic oligonucleotide
  Sense strand starting at position 3061 of SEQ ID NO: 1886931
cuauuaggaugucuaagaa

SEQ ID NO: 2436311 - RNA, 19 nt, Artificial Sequence
  Description of Artificial Sequence: Synthetic oligonucleotide
  Antisense strand to SEQ ID NO: 2436310
uucuuagacauccuaauag

SEQ ID NO: 2436312 - RNA, 19 nt, Artificial Sequence
  Description of Artificial Sequence: Synthetic oligonucleotide
  Sense strand starting at position 3091 of SEQ ID NO: 1886931
auuagagucaugcaaguga

SEQ ID NO: 2436313 - RNA, 19 nt, Artificial Sequence
  Description of Artificial Sequence: Synthetic oligonucleotide
  Antisense strand to SEQ ID NO: 2436312
ucacuugcaugacucuaau

SEQ ID NO: 2436314 - RNA, 19 nt, Artificial Sequence
  Description of Artificial Sequence: Synthetic oligonucleotide
  Sense strand starting at position 3112 of SEQ ID NO: 1886931
ugaauuauugggugcuaaa

SEQ ID NO: 2436315 - RNA, 19 nt, Artificial Sequence
  Description of Artificial Sequence: Synthetic oligonucleotide
  Antisense strand to SEQ ID NO: 2436314
uuuagcacccaauaauuca

SEQ ID NO: 2436316 - RNA, 19 nt, Artificial Sequence
  Description of Artificial Sequence: Synthetic oligonucleotide
  Sense strand starting at position 3173 of SEQ ID NO: 1886931
agauuauaccggcagauac

SEQ ID NO: 2436317 - RNA, 19 nt, Artificial Sequence
  Description of Artificial Sequence: Synthetic oligonucleotide
  Antisense strand to SEQ ID NO: 2436316
guaucugccgguauaaucu

SEQ ID NO: 2436318 - RNA, 19 nt, Artificial Sequence
  Description of Artificial Sequence: Synthetic oligonucleotide
  Sense strand starting at position 3196 of SEQ ID NO: 1886931
aagacuagguuucccugaa

SEQ ID NO: 2436319 - RNA, 19 nt, Artificial Sequence
  Description of Artificial Sequence: Synthetic oligonucleotide
  Antisense strand to SEQ ID NO: 2436318
uucagggaaaccuagucuu

SEQ ID NO: 2436320 - RNA, 19 nt, Artificial Sequence
  Description of Artificial Sequence: Synthetic oligonucleotide
  Sense strand starting at position 3200 of SEQ ID NO: 1886931
cuagguuucccugaagcaa

SEQ ID NO: 2436321 - RNA, 19 nt, Artificial Sequence
  Description of Artificial Sequence: Synthetic oligonucleotide
  Antisense strand to SEQ ID NO: 2436320
uugcuucagggaaaccuag

SEQ ID NO: 2436322 - RNA, 19 nt, Artificial Sequence
  Description of Artificial Sequence: Synthetic oligonucleotide
  Sense strand starting at position 3626 of SEQ ID NO: 1886931
auguccauccaguaauuga

SEQ ID NO: 2436323 - RNA, 19 nt, Artificial Sequence
  Description of Artificial Sequence: Synthetic oligonucleotide
  Antisense strand to SEQ ID NO: 2436322
ucaauuacuggauggacau

SEQ ID NO: 2436324 - RNA, 19 nt, Artificial Sequence
  Description of Artificial Sequence: Synthetic oligonucleotide
  Sense strand starting at position 3634 of SEQ ID NO: 1886931
ccaguaauugacuagcuau

SEQ ID NO: 2436325 - RNA, 19 nt, Artificial Sequence
  Description of Artificial Sequence: Synthetic oligonucleotide
  Antisense strand to SEQ ID NO: 2436324
auagcuagucaauuacugg

SEQ ID NO: 2436326 - RNA, 19 nt, Artificial Sequence
  Description of Artificial Sequence: Synthetic oligonucleotide
  Sense strand starting at position 3669 of SEQ ID NO: 1886931
uuuagacacugucucuaua

SEQ ID NO: 2436327 - RNA, 19 nt, Artificial Sequence
  Description of Artificial Sequence: Synthetic oligonucleotide
  Antisense strand to SEQ ID NO: 2436326
uauagagacagugucuaaa

SEQ ID NO: 2436328 - RNA, 19 nt, Artificial Sequence
  Description of Artificial Sequence: Synthetic oligonucleotide
  Sense strand starting at position 3873 of SEQ ID NO: 1886931
uguguaaagugauuucuuu

SEQ ID NO: 2436329 - RNA, 19 nt, Artificial Sequence
  Description of Artificial Sequence: Synthetic oligonucleotide
  Antisense strand to SEQ ID NO: 2436328
aaagaaaucacuuuacaca

SEQ ID NO: 2436330 - RNA, 19 nt, Artificial Sequence
  Description of Artificial Sequence: Synthetic oligonucleotide
  Sense strand starting at position 3925 of SEQ ID NO: 1886931
acgugauguagauacucuu

SEQ ID NO: 2436331 - RNA, 19 nt, Artificial Sequence
  Description of Artificial Sequence: Synthetic oligonucleotide
  Antisense strand to SEQ ID NO: 2436330
aagaguaucuacaucacgu

SEQ ID NO: 2436332 - RNA, 19 nt, Artificial Sequence
  Description of Artificial Sequence: Synthetic oligonucleotide
  Sense strand starting at position 5 of SEQ ID NO: 1886932
uugcuugaacuugagaguu

SEQ ID NO: 2436333 - RNA, 19 nt, Artificial Sequence
  Description of Artificial Sequence: Synthetic oligonucleotide
  Antisense strand to SEQ ID NO: 2436332
aacucucaaguucaagcaa

SEQ ID NO: 2436334 - RNA, 19 nt, Artificial Sequence
  Description of Artificial Sequence: Synthetic oligonucleotide
  Sense strand starting at position 156 of SEQ ID NO: 1886932
acuggugaaccaggacuau

SEQ ID NO: 2436335 - RNA, 19 nt, Artificial Sequence
  Description of Artificial Sequence: Synthetic oligonucleotide
  Antisense strand to SEQ ID NO: 2436334
auaguccugguucaccagu

SEQ ID NO: 2436336 - RNA, 19 nt, Artificial Sequence
  Description of Artificial Sequence: Synthetic oligonucleotide
  Sense strand starting at position 167 of SEQ ID NO: 1886932
aggacuauggcaugugaaa

SEQ ID NO: 2436337 - RNA, 19 nt, Artificial Sequence
  Description of Artificial Sequence: Synthetic oligonucleotide
  Antisense strand to SEQ ID NO: 2436336
uuucacaugccauaguccu

SEQ ID NO: 2436338 - RNA, 19 nt, Artificial Sequence
  Description of Artificial Sequence: Synthetic oligonucleotide
  Sense strand starting at position 650 of SEQ ID NO: 1886932
ggcugaugucagggagaga

SEQ ID NO: 2436339 - RNA, 19 nt, Artificial Sequence
  Description of Artificial Sequence: Synthetic oligonucleotide
  Antisense strand to SEQ ID NO: 2436338
ucucucccugacaucagcc

SEQ ID NO: 2436340 - RNA, 19 nt, Artificial Sequence
  Description of Artificial Sequence: Synthetic oligonucleotide
  Sense strand starting at position 893 of SEQ ID NO: 1886932
ugaggucuggcuuagauua

SEQ ID NO: 2436341 - RNA, 19 nt, Artificial Sequence
  Description of Artificial Sequence: Synthetic oligonucleotide
  Antisense strand to SEQ ID NO: 2436340
uaaucuaagccagaccuca

SEQ ID NO: 2436342 - RNA, 19 nt, Artificial Sequence
  Description of Artificial Sequence: Synthetic oligonucleotide
  Sense strand starting at position 918 of SEQ ID NO: 1886932
ggcugagagacccaugcua

SEQ ID NO: 2436343 - RNA, 19 nt, Artificial Sequence
  Description of Artificial Sequence: Synthetic oligonucleotide
  Antisense strand to SEQ ID NO: 2436342
uagcaugggucucucagcc

SEQ ID NO: 2436344 - RNA, 19 nt, Artificial Sequence
  Description of Artificial Sequence: Synthetic oligonucleotide
  Sense strand starting at position 920 of SEQ ID NO: 1886932
cugagagacccaugcuaau

SEQ ID NO: 2436345 - RNA, 19 nt, Artificial Sequence
  Description of Artificial Sequence: Synthetic oligonucleotide
  Antisense strand to SEQ ID NO: 2436344
auuagcaugggucucucag

SEQ ID NO: 2436346 - RNA, 19 nt, Artificial Sequence
  Description of Artificial Sequence: Synthetic oligonucleotide
  Sense strand starting at position 934 of SEQ ID NO: 1886932
cuaauuuagugccugcaau

SEQ ID NO: 2436347 - RNA, 19 nt, Artificial Sequence
  Description of Artificial Sequence: Synthetic oligonucleotide
  Antisense strand to SEQ ID NO: 2436346
auugcaggcacuaaauuag

SEQ ID NO: 2436348 - RNA, 19 nt, Artificial Sequence
  Description of Artificial Sequence: Synthetic oligonucleotide
  Sense strand starting at position 961 of SEQ ID NO: 1886932
ccucuaaucguguucugcu

SEQ ID NO: 2436349 - RNA, 19 nt, Artificial Sequence
  Description of Artificial Sequence: Synthetic oligonucleotide
  Antisense strand to SEQ ID NO: 2436348
agcagaacacgauuagagg

SEQ ID NO: 2436350 - RNA, 19 nt, Artificial Sequence
  Description of Artificial Sequence: Synthetic oligonucleotide
  Sense strand starting at position 968 of SEQ ID NO: 1886932
ucguguucugcucuuugua

SEQ ID NO: 2436351 - RNA, 19 nt, Artificial Sequence
  Description of Artificial Sequence: Synthetic oligonucleotide
  Antisense strand to SEQ ID NO: 2436350
uacaaagagcagaacacga

SEQ ID NO: 2436352 - RNA, 19 nt, Artificial Sequence
  Description of Artificial Sequence: Synthetic oligonucleotide
  Sense strand starting at position 1095 of SEQ ID NO: 1886932
uaugaucugugacccugaa

SEQ ID NO: 2436353 - RNA, 19 nt, Artificial Sequence
  Description of Artificial Sequence: Synthetic oligonucleotide
  Antisense strand to SEQ ID NO: 2436352
uucagggucacagaucaua

SEQ ID NO: 2436354 - RNA, 19 nt, Artificial Sequence
  Description of Artificial Sequence: Synthetic oligonucleotide
  Sense strand starting at position 1117 of SEQ ID NO: 1886932
gagugaaauugauuggcaa

SEQ ID NO: 2436355 - RNA, 19 nt, Artificial Sequence
  Description of Artificial Sequence: Synthetic oligonucleotide
  Antisense strand to SEQ ID NO: 2436354
uugccaaucaauuucacuc

SEQ ID NO: 2436356 - RNA, 19 nt, Artificial Sequence
  Description of Artificial Sequence: Synthetic oligonucleotide
  Sense strand starting at position 1118 of SEQ ID NO: 1886932
agugaaauugauuggcaau

SEQ ID NO: 2436357 - RNA, 19 nt, Artificial Sequence
  Description of Artificial Sequence: Synthetic oligonucleotide
  Antisense strand to SEQ ID NO: 2436356
auugccaaucaauuucacu

SEQ ID NO: 2436358 - RNA, 19 nt, Artificial Sequence
  Description of Artificial Sequence: Synthetic oligonucleotide
  Sense strand starting at position 1119 of SEQ ID NO: 1886932
gugaaauugauuggcaaug

SEQ ID NO: 2436359 - RNA, 19 nt, Artificial Sequence
  Description of Artificial Sequence: Synthetic oligonucleotide
  Antisense strand to SEQ ID NO: 2436358
cauugccaaucaauuucac

SEQ ID NO: 2436360 - RNA, 19 nt, Artificial Sequence
  Description of Artificial Sequence: Synthetic oligonucleotide
  Sense strand starting at position 1124 of SEQ ID NO: 1886932
auugauuggcaaugaggga

SEQ ID NO: 2436361 - RNA, 19 nt, Artificial Sequence
  Description of Artificial Sequence: Synthetic oligonucleotide
  Antisense strand to SEQ ID NO: 2436360
ucccucauugccaaucaau

SEQ ID NO: 2436362 - RNA, 19 nt, Artificial Sequence
  Description of Artificial Sequence: Synthetic oligonucleotide
  Sense strand starting at position 1294 of SEQ ID NO: 1886932
gagugcauuugucugaggu

SEQ ID NO: 2436363 - RNA, 19 nt, Artificial Sequence
  Description of Artificial Sequence: Synthetic oligonucleotide
  Antisense strand to SEQ ID NO: 2436362
accucagacaaaugcacuc

SEQ ID NO: 2436364 - RNA, 19 nt, Artificial Sequence
  Description of Artificial Sequence: Synthetic oligonucleotide
  Sense strand starting at position 1295 of SEQ ID NO: 1886932
agugcauuugucugaggug

SEQ ID NO: 2436365 - RNA, 19 nt, Artificial Sequence
  Description of Artificial Sequence: Synthetic oligonucleotide
  Antisense strand to SEQ ID NO: 2436364
caccucagacaaaugcacu

SEQ ID NO: 2436366 - RNA, 19 nt, Artificial Sequence
  Description of Artificial Sequence: Synthetic oligonucleotide
  Sense strand starting at position 1300 of SEQ ID NO: 1886932
auuugucugaggugucauc

SEQ ID NO: 2436367 - RNA, 19 nt, Artificial Sequence
  Description of Artificial Sequence: Synthetic oligonucleotide
  Antisense strand to SEQ ID NO: 2436366
gaugacaccucagacaaau

SEQ ID NO: 2436368 - RNA, 19 nt, Artificial Sequence
  Description of Artificial Sequence: Synthetic oligonucleotide
  Sense strand starting at position 1355 of SEQ ID NO: 1886932
ugagaaugaucagccuuug

SEQ ID NO: 2436369 - RNA, 19 nt, Artificial Sequence
  Description of Artificial Sequence: Synthetic oligonucleotide
  Antisense strand to SEQ ID NO: 2436368
caaaggcugaucauucuca

SEQ ID NO: 2436370 - RNA, 19 nt, Artificial Sequence
  Description of Artificial Sequence: Synthetic oligonucleotide
  Sense strand starting at position 1401 of SEQ ID NO: 1886932
ggaaacaagcugcauaguu

SEQ ID NO: 2436371 - RNA, 19 nt, Artificial Sequence
  Description of Artificial Sequence: Synthetic oligonucleotide
  Antisense strand to SEQ ID NO: 2436370
aacuaugcagcuuguuucc

SEQ ID NO: 2436372 - RNA, 19 nt, Artificial Sequence
  Description of Artificial Sequence: Synthetic oligonucleotide
  Sense strand starting at position 1464 of SEQ ID NO: 1886932
ggugggugaguugaaagau

SEQ ID NO: 2436373 - RNA, 19 nt, Artificial Sequence
  Description of Artificial Sequence: Synthetic oligonucleotide
  Antisense strand to SEQ ID NO: 2436372
aucuuucaacucacccacc

SEQ ID NO: 2436374 - RNA, 19 nt, Artificial Sequence
  Description of Artificial Sequence: Synthetic oligonucleotide
  Sense strand starting at position 1472 of SEQ ID NO: 1886932
aguugaaagauggguggau

SEQ ID NO: 2436375 - RNA, 19 nt, Artificial Sequence
  Description of Artificial Sequence: Synthetic oligonucleotide
  Antisense strand to SEQ ID NO: 2436374
auccacccaucuuucaacu

SEQ ID NO: 2436376 - RNA, 19 nt, Artificial Sequence
  Description of Artificial Sequence: Synthetic oligonucleotide
  Sense strand starting at position 1681 of SEQ ID NO: 1886932
gcuacaugccgucuucgau

SEQ ID NO: 2436377 - RNA, 19 nt, Artificial Sequence
  Description of Artificial Sequence: Synthetic oligonucleotide
  Antisense strand to SEQ ID NO: 2436376
aucgaagacggcauguagc

SEQ ID NO: 2436378 - RNA, 19 nt, Artificial Sequence
  Description of Artificial Sequence: Synthetic oligonucleotide
  Sense strand starting at position 2447 of SEQ ID NO: 1886932
cugaucaaguaugcaaaua

SEQ ID NO: 2436379 - RNA, 19 nt, Artificial Sequence
  Description of Artificial Sequence: Synthetic oligonucleotide
  Antisense strand to SEQ ID NO: 2436378
uauuugcauacuugaucag

SEQ ID NO: 2436380 - RNA, 19 nt, Artificial Sequence
  Description of Artificial Sequence: Synthetic oligonucleotide
  Sense strand starting at position 2789 of SEQ ID NO: 1886932
gcaugcuuucugccaccuu

SEQ ID NO: 2436381 - RNA, 19 nt, Artificial Sequence
  Description of Artificial Sequence: Synthetic oligonucleotide
  Antisense strand to SEQ ID NO: 2436380
aagguggcagaaagcaugc

SEQ ID NO: 2436382 - RNA, 19 nt, Artificial Sequence
  Description of Artificial Sequence: Synthetic oligonucleotide
  Sense strand starting at position 2889 of SEQ ID NO: 1886932
acuggaccuugauuacuua

SEQ ID NO: 2436383 - RNA, 19 nt, Artificial Sequence
  Description of Artificial Sequence: Synthetic oligonucleotide
  Antisense strand to SEQ ID NO: 2436382
uaaguaaucaagguccagu

SEQ ID NO: 2436384 - RNA, 19 nt, Artificial Sequence
  Description of Artificial Sequence: Synthetic oligonucleotide
  Sense strand starting at position 2893 of SEQ ID NO: 1886932
gaccuugauuacuuaggau

SEQ ID NO: 2436385 - RNA, 19 nt, Artificial Sequence
  Description of Artificial Sequence: Synthetic oligonucleotide
  Antisense strand to SEQ ID NO: 2436384
auccuaaguaaucaagguc

SEQ ID NO: 2436386 - RNA, 19 nt, Artificial Sequence
  Description of Artificial Sequence: Synthetic oligonucleotide
  Sense strand starting at position 2940 of SEQ ID NO: 1886932
ucuauuuaugucugcacau

SEQ ID NO: 2436387 - RNA, 19 nt, Artificial Sequence
  Description of Artificial Sequence: Synthetic oligonucleotide
  Antisense strand to SEQ ID NO: 2436386
augugcagacauaaauaga

SEQ ID NO: 2436388 - RNA, 19 nt, Artificial Sequence
  Description of Artificial Sequence: Synthetic oligonucleotide
  Sense strand starting at position 2941 of SEQ ID NO: 1886932
cuauuuaugucugcacauu

SEQ ID NO: 2436389 - RNA, 19 nt, Artificial Sequence
  Description of Artificial Sequence: Synthetic oligonucleotide
  Antisense strand to SEQ ID NO: 2436388
aaugugcagacauaaauag

SEQ ID NO: 2436390 - RNA, 19 nt, Artificial Sequence
  Description of Artificial Sequence: Synthetic oligonucleotide
  Sense strand starting at position 3010 of SEQ ID NO: 1886932
acuucugaugucuauccua

SEQ ID NO: 2436391 - RNA, 19 nt, Artificial Sequence
  Description of Artificial Sequence: Synthetic oligonucleotide
  Antisense strand to SEQ ID NO: 2436390
uaggauagacaucagaagu

SEQ ID NO: 2436392 - RNA, 19 nt, Artificial Sequence
  Description of Artificial Sequence: Synthetic oligonucleotide
  Sense strand starting at position 3032 of SEQ ID NO: 1886932
cuugucuugguugauaaca

SEQ ID NO: 2436393 - RNA, 19 nt, Artificial Sequence
  Description of Artificial Sequence: Synthetic oligonucleotide
  Antisense strand to SEQ ID NO: 2436392
uguuaucaaccaagacaag

SEQ ID NO: 2436394 - RNA, 19 nt, Artificial Sequence
  Description of Artificial Sequence: Synthetic oligonucleotide
  Sense strand starting at position 3079 of SEQ ID NO: 1886932
ggaaaugagacuuguuauc

SEQ ID NO: 2436395 - RNA, 19 nt, Artificial Sequence
  Description of Artificial Sequence: Synthetic oligonucleotide
  Antisense strand to SEQ ID NO: 2436394
gauaacaagucucauuucc

SEQ ID NO: 2436396 - RNA, 19 nt, Artificial Sequence
  Description of Artificial Sequence: Synthetic oligonucleotide
  Sense strand starting at position 3081 of SEQ ID NO: 1886932
aaaugagacuuguuaucag

SEQ ID NO: 2436397 - RNA, 19 nt, Artificial Sequence
  Description of Artificial Sequence: Synthetic oligonucleotide
  Antisense strand to SEQ ID NO: 2436396
cugauaacaagucucauuu

SEQ ID NO: 2436398 - RNA, 19 nt, Artificial Sequence
  Description of Artificial Sequence: Synthetic oligonucleotide
  Sense strand starting at position 3290 of SEQ ID NO: 1886932
gggugugucauugcuguac

SEQ ID NO: 2436399 - RNA, 19 nt, Artificial Sequence
  Description of Artificial Sequence: Synthetic oligonucleotide
  Antisense strand to SEQ ID NO: 2436398
guacagcaaugacacaccc

SEQ ID NO: 2436400 - RNA, 19 nt, Artificial Sequence
  Description of Artificial Sequence: Synthetic oligonucleotide
  Sense strand starting at position 3623 of SEQ ID NO: 1886932
gagagagugucucugagaa

SEQ ID NO: 2436401 - RNA, 19 nt, Artificial Sequence
  Description of Artificial Sequence: Synthetic oligonucleotide
  Antisense strand to SEQ ID NO: 2436400
uucucagagacacucucuc

SEQ ID NO: 2436402 - RNA, 19 nt, Artificial Sequence
  Description of Artificial Sequence: Synthetic oligonucleotide
  Sense strand starting at position 3723 of SEQ ID NO: 1886932
cuucuaaagcacugagaac

SEQ ID NO: 2436403 - RNA, 19 nt, Artificial Sequence
  Description of Artificial Sequence: Synthetic oligonucleotide
  Antisense strand to SEQ ID NO: 2436402
guucucagugcuuuagaag

SEQ ID NO: 2436404 - RNA, 19 nt, Artificial Sequence
  Description of Artificial Sequence: Synthetic oligonucleotide
  Sense strand starting at position 3759 of SEQ ID NO: 1886932
gcgggugagggauaugacu

SEQ ID NO: 2436405 - RNA, 19 nt, Artificial Sequence
  Description of Artificial Sequence: Synthetic oligonucleotide
  Antisense strand to SEQ ID NO: 2436404
agucauaucccucacccgc

SEQ ID NO: 2436406 - RNA, 19 nt, Artificial Sequence
  Description of Artificial Sequence: Synthetic oligonucleotide
  Sense strand starting at position 3761 of SEQ ID NO: 1886932
gggugagggauaugacuuu

SEQ ID NO: 2436407 - RNA, 19 nt, Artificial Sequence
  Description of Artificial Sequence: Synthetic oligonucleotide
  Antisense strand to SEQ ID NO: 2436406
aaagucauaucccucaccc

SEQ ID NO: 2436408 - RNA, 19 nt, Artificial Sequence
  Description of Artificial Sequence: Synthetic oligonucleotide
  Sense strand starting at position 3859 of SEQ ID NO: 1886932
gaguguuggguugaagauu

SEQ ID NO: 2436409 - RNA, 19 nt, Artificial Sequence
  Description of Artificial Sequence: Synthetic oligonucleotide
  Antisense strand to SEQ ID NO: 2436408
aaucuucaacccaacacuc

SEQ ID NO: 2436410 - RNA, 19 nt, Artificial Sequence
  Description of Artificial Sequence: Synthetic oligonucleotide
  Sense strand starting at position 3868 of SEQ ID NO: 1886932
guugaagauuaggcagaca

SEQ ID NO: 2436411 - RNA, 19 nt, Artificial Sequence
  Description of Artificial Sequence: Synthetic oligonucleotide
  Antisense strand to SEQ ID NO: 2436410
ugucugccuaaucuucaac

SEQ ID NO: 2436412 - RNA, 19 nt, Artificial Sequence
  Description of Artificial Sequence: Synthetic oligonucleotide
  Sense strand starting at position 6 of SEQ ID NO: 1886933
acuauauacuguucuagac

SEQ ID NO: 2436413 - RNA, 19 nt, Artificial Sequence
  Description of Artificial Sequence: Synthetic oligonucleotide
  Antisense strand to SEQ ID NO: 2436412
gucuagaacaguauauagu

SEQ ID NO: 2436414 - RNA, 19 nt, Artificial Sequence
  Description of Artificial Sequence: Synthetic oligonucleotide
  Sense strand starting at position 174 of SEQ ID NO: 1886933
gcagcaaaucuguauauga

SEQ ID NO: 2436415 - RNA, 19 nt, Artificial Sequence
  Description of Artificial Sequence: Synthetic oligonucleotide
  Antisense strand to SEQ ID NO: 2436414
ucauauacagauuugcugc

SEQ ID NO: 2436416 - RNA, 19 nt, Artificial Sequence
  Description of Artificial Sequence: Synthetic oligonucleotide
  Sense strand starting at position 480 of SEQ ID NO: 1886933
guugcggugggcuaagauu

SEQ ID NO: 2436417 - RNA, 19 nt, Artificial Sequence
  Description of Artificial Sequence: Synthetic oligonucleotide
  Antisense strand to SEQ ID NO: 2436416
aaucuuagcccaccgcaac

SEQ ID NO: 2436418 - RNA, 19 nt, Artificial Sequence
  Description of Artificial Sequence: Synthetic oligonucleotide
  Sense strand starting at position 726 of SEQ ID NO: 1886933
ccgagaccagccuaggaau

SEQ ID NO: 2436419 - RNA, 19 nt, Artificial Sequence
  Description of Artificial Sequence: Synthetic oligonucleotide
  Antisense strand to SEQ ID NO: 2436418
auuccuaggcuggucucgg

SEQ ID NO: 2436420 - RNA, 19 nt, Artificial Sequence
  Description of Artificial Sequence: Synthetic oligonucleotide
  Sense strand starting at position 836 of SEQ ID NO: 1886933
ggaggaucccuugagugcu

SEQ ID NO: 2436421 - RNA, 19 nt, Artificial Sequence
  Description of Artificial Sequence: Synthetic oligonucleotide
  Antisense strand to SEQ ID NO: 2436420
agcacucaagggauccucc

SEQ ID NO: 2436422 - RNA, 19 nt, Artificial Sequence
  Description of Artificial Sequence: Synthetic oligonucleotide
  Sense strand starting at position 948 of SEQ ID NO: 1886933
gugucauccuaagcuaagu

SEQ ID NO: 2436423 - RNA, 19 nt, Artificial Sequence
  Description of Artificial Sequence: Synthetic oligonucleotide
  Antisense strand to SEQ ID NO: 2436422
acuuagcuuaggaugacac

SEQ ID NO: 2436424 - RNA, 19 nt, Artificial Sequence
  Description of Artificial Sequence: Synthetic oligonucleotide
  Sense strand starting at position 953 of SEQ ID NO: 1886933
auccuaagcuaaguagaaa

SEQ ID NO: 2436425 - RNA, 19 nt, Artificial Sequence
  Description of Artificial Sequence: Synthetic oligonucleotide
  Antisense strand to SEQ ID NO: 2436424
uuucuacuuagcuuaggau

SEQ ID NO: 2436426 - RNA, 19 nt, Artificial Sequence
  Description of Artificial Sequence: Synthetic oligonucleotide
  Sense strand starting at position 1047 of SEQ ID NO: 1886933
gcuuacuuucuacaaagga

SEQ ID NO: 2436427 - RNA, 19 nt, Artificial Sequence
  Description of Artificial Sequence: Synthetic oligonucleotide
  Antisense strand to SEQ ID NO: 2436426
uccuuuguagaaaguaagc

SEQ ID NO: 2436428 - RNA, 19 nt, Artificial Sequence
  Description of Artificial Sequence: Synthetic oligonucleotide
  Sense strand starting at position 1153 of SEQ ID NO: 1886933
aagagcauucuguaagccu

SEQ ID NO: 2436429 - RNA, 19 nt, Artificial Sequence
  Description of Artificial Sequence: Synthetic oligonucleotide
  Antisense strand to SEQ ID NO: 2436428
aggcuuacagaaugcucuu

SEQ ID NO: 2436430 - RNA, 19 nt, Artificial Sequence
  Description of Artificial Sequence: Synthetic oligonucleotide
  Sense strand starting at position 1180 of SEQ ID NO: 1886933
gcuauuaaagguugagaaa

SEQ ID NO: 2436431 - RNA, 19 nt, Artificial Sequence
  Description of Artificial Sequence: Synthetic oligonucleotide
  Antisense strand to SEQ ID NO: 2436430
uuucucaaccuuuaauagc

SEQ ID NO: 2436432 - RNA, 19 nt, Artificial Sequence
  Description of Artificial Sequence: Synthetic oligonucleotide
  Sense strand starting at position 1260 of SEQ ID NO: 1886933
cagagaugccugugaggaa

SEQ ID NO: 2436433 - RNA, 19 nt, Artificial Sequence
  Description of Artificial Sequence: Synthetic oligonucleotide
  Antisense strand to SEQ ID NO: 2436432
uuccucacaggcaucucug

SEQ ID NO: 2436434 - RNA, 19 nt, Artificial Sequence
  Description of Artificial Sequence: Synthetic oligonucleotide
  Sense strand starting at position 1273 of SEQ ID NO: 1886933
gaggaauugcacgguuuga

SEQ ID NO: 2436435 - RNA, 19 nt, Artificial Sequence
  Description of Artificial Sequence: Synthetic oligonucleotide
  Antisense strand to SEQ ID NO: 2436434
ucaaaccgugcaauuccuc

SEQ ID NO: 2436436 - RNA, 19 nt, Artificial Sequence
  Description of Artificial Sequence: Synthetic oligonucleotide
  Sense strand starting at position 1429 of SEQ ID NO: 1886933
cuuccuauggaggguuaau

SEQ ID NO: 2436437 - RNA, 19 nt, Artificial Sequence
  Description of Artificial Sequence: Synthetic oligonucleotide
  Antisense strand to SEQ ID NO: 2436436
auuaacccuccauaggaag

SEQ ID NO: 2436438 - RNA, 19 nt, Artificial Sequence
  Description of Artificial Sequence: Synthetic oligonucleotide
  Sense strand starting at position 1438 of SEQ ID NO: 1886933
gaggguuaauucccuggca

SEQ ID NO: 2436439 - RNA, 19 nt, Artificial Sequence
  Description of Artificial Sequence: Synthetic oligonucleotide
  Antisense strand to SEQ ID NO: 2436438
ugccagggaauuaacccuc

SEQ ID NO: 2436440 - RNA, 19 nt, Artificial Sequence
  Description of Artificial Sequence: Synthetic oligonucleotide
  Sense strand starting at position 1439 of SEQ ID NO: 1886933
aggguuaauucccuggcau

SEQ ID NO: 2436441 - RNA, 19 nt, Artificial Sequence
  Description of Artificial Sequence: Synthetic oligonucleotide
  Antisense strand to SEQ ID NO: 2436440
augccagggaauuaacccu

SEQ ID NO: 2436442 - RNA, 19 nt, Artificial Sequence
  Description of Artificial Sequence: Synthetic oligonucleotide
  Sense strand starting at position 1440 of SEQ ID NO: 1886933
ggguuaauucccuggcauu

SEQ ID NO: 2436443 - RNA, 19 nt, Artificial Sequence
  Description of Artificial Sequence: Synthetic oligonucleotide
  Antisense strand to SEQ ID NO: 2436442
aaugccagggaauuaaccc

SEQ ID NO: 2436444 - RNA, 19 nt, Artificial Sequence
  Description of Artificial Sequence: Synthetic oligonucleotide
  Sense strand starting at position 1441 of SEQ ID NO: 1886933
gguuaauucccuggcauuu

SEQ ID NO: 2436445 - RNA, 19 nt, Artificial Sequence
  Description of Artificial Sequence: Synthetic oligonucleotide
  Antisense strand to SEQ ID NO: 2436444
aaaugccagggaauuaacc

SEQ ID NO: 2436446 - RNA, 19 nt, Artificial Sequence
  Description of Artificial Sequence: Synthetic oligonucleotide
  Sense strand starting at position 1665 of SEQ ID NO: 1886933
gucucauuaguguaucuga

SEQ ID NO: 2436447 - RNA, 19 nt, Artificial Sequence
  Description of Artificial Sequence: Synthetic oligonucleotide
  Antisense strand to SEQ ID NO: 2436446
ucagauacacuaaugagac

SEQ ID NO: 2436448 - RNA, 19 nt, Artificial Sequence
  Description of Artificial Sequence: Synthetic oligonucleotide
  Sense strand starting at position 1668 of SEQ ID NO: 1886933
ucauuaguguaucugaaga

SEQ ID NO: 2436449 - RNA, 19 nt, Artificial Sequence
  Description of Artificial Sequence: Synthetic oligonucleotide
  Antisense strand to SEQ ID NO: 2436448
ucuucagauacacuaauga

SEQ ID NO: 2436450 - RNA, 19 nt, Artificial Sequence
  Description of Artificial Sequence: Synthetic oligonucleotide
  Sense strand starting at position 1673 of SEQ ID NO: 1886933
aguguaucugaagaguacu

SEQ ID NO: 2436451 - RNA, 19 nt, Artificial Sequence
  Description of Artificial Sequence: Synthetic oligonucleotide
  Antisense strand to SEQ ID NO: 2436450
aguacucuucagauacacu

SEQ ID NO: 2436452 - RNA, 19 nt, Artificial Sequence
  Description of Artificial Sequence: Synthetic oligonucleotide
  Sense strand starting at position 1684 of SEQ ID NO: 1886933
agaguacuacauuguacau

SEQ ID NO: 2436453 - RNA, 19 nt, Artificial Sequence
  Description of Artificial Sequence: Synthetic oligonucleotide
  Antisense strand to SEQ ID NO: 2436452
auguacaauguaguacucu

SEQ ID NO: 2436454 - RNA, 19 nt, Artificial Sequence
  Description of Artificial Sequence: Synthetic oligonucleotide
  Sense strand starting at position 1696 of SEQ ID NO: 1886933
uguacauugucuuccagag

SEQ ID NO: 2436455 - RNA, 19 nt, Artificial Sequence
  Description of Artificial Sequence: Synthetic oligonucleotide
  Antisense strand to SEQ ID NO: 2436454
cucuggaagacaauguaca

SEQ ID NO: 2436456 - RNA, 19 nt, Artificial Sequence
  Description of Artificial Sequence: Synthetic oligonucleotide
  Sense strand starting at position 1753 of SEQ ID NO: 1886933
aagggaaagucugcauucu

SEQ ID NO: 2436457 - RNA, 19 nt, Artificial Sequence
  Description of Artificial Sequence: Synthetic oligonucleotide
  Antisense strand to SEQ ID NO: 2436456
agaaugcagacuuucccuu

SEQ ID NO: 2436458 - RNA, 19 nt, Artificial Sequence
  Description of Artificial Sequence: Synthetic oligonucleotide
  Sense strand starting at position 1764 of SEQ ID NO: 1886933
ugcauucugcacuaaguuu

SEQ ID NO: 2436459 - RNA, 19 nt, Artificial Sequence
  Description of Artificial Sequence: Synthetic oligonucleotide
  Antisense strand to SEQ ID NO: 2436458
aaacuuagugcagaaugca

SEQ ID NO: 2436460 - RNA, 19 nt, Artificial Sequence
  Description of Artificial Sequence: Synthetic oligonucleotide
  Sense strand starting at position 1797 of SEQ ID NO: 1886933
aguuuaaauuguccucagu

SEQ ID NO: 2436461 - RNA, 19 nt, Artificial Sequence
  Description of Artificial Sequence: Synthetic oligonucleotide
  Antisense strand to SEQ ID NO: 2436460
acugaggacaauuuaaacu

SEQ ID NO: 2436462 - RNA, 19 nt, Artificial Sequence
  Description of Artificial Sequence: Synthetic oligonucleotide
  Sense strand starting at position 1799 of SEQ ID NO: 1886933
uuuaaauuguccucaguuc

SEQ ID NO: 2436463 - RNA, 19 nt, Artificial Sequence
  Description of Artificial Sequence: Synthetic oligonucleotide
  Antisense strand to SEQ ID NO: 2436462
gaacugaggacaauuuaaa

SEQ ID NO: 2436464 - RNA, 19 nt, Artificial Sequence
  Description of Artificial Sequence: Synthetic oligonucleotide
  Sense strand starting at position 1800 of SEQ ID NO: 1886933
uuaaauuguccucaguucu

SEQ ID NO: 2436465 - RNA, 19 nt, Artificial Sequence
  Description of Artificial Sequence: Synthetic oligonucleotide
  Antisense strand to SEQ ID NO: 2436464
agaacugaggacaauuuaa

SEQ ID NO: 2436466 - RNA, 19 nt, Artificial Sequence
  Description of Artificial Sequence: Synthetic oligonucleotide
  Sense strand starting at position 1819 of SEQ ID NO: 1886933
agcaaagaauguucuuaaa

SEQ ID NO: 2436467 - RNA, 19 nt, Artificial Sequence
  Description of Artificial Sequence: Synthetic oligonucleotide
  Antisense strand to SEQ ID NO: 2436466
uuuaagaacauucuuugcu

SEQ ID NO: 2436468 - RNA, 19 nt, Artificial Sequence
  Description of Artificial Sequence: Synthetic oligonucleotide
  Sense strand starting at position 2531 of SEQ ID NO: 1886933
agggcagcaucauucugaa

SEQ ID NO: 2436469 - RNA, 19 nt, Artificial Sequence
  Description of Artificial Sequence: Synthetic oligonucleotide
  Antisense strand to SEQ ID NO: 2436468
uucagaaugaugcugcccu

SEQ ID NO: 2436470 - RNA, 19 nt, Artificial Sequence
  Description of Artificial Sequence: Synthetic oligonucleotide
  Sense strand starting at position 2586 of SEQ ID NO: 1886933
guauaaacaugucuuucgu

SEQ ID NO: 2436471 - RNA, 19 nt, Artificial Sequence
  Description of Artificial Sequence: Synthetic oligonucleotide
  Antisense strand to SEQ ID NO: 2436470
acgaaagacauguuuauac

SEQ ID NO: 2436472 - RNA, 19 nt, Artificial Sequence
  Description of Artificial Sequence: Synthetic oligonucleotide
  Sense strand starting at position 2588 of SEQ ID NO: 1886933
auaaacaugucuuucguca

SEQ ID NO: 2436473 - RNA, 19 nt, Artificial Sequence
  Description of Artificial Sequence: Synthetic oligonucleotide
  Antisense strand to SEQ ID NO: 2436472
ugacgaaagacauguuuau

SEQ ID NO: 2436474 - RNA, 19 nt, Artificial Sequence
  Description of Artificial Sequence: Synthetic oligonucleotide
  Sense strand starting at position 2737 of SEQ ID NO: 1886933
uaaucugagguuuguauau

SEQ ID NO: 2436475 - RNA, 19 nt, Artificial Sequence
  Description of Artificial Sequence: Synthetic oligonucleotide
  Antisense strand to SEQ ID NO: 2436474
auauacaaaccucagauua

SEQ ID NO: 2436476 - RNA, 19 nt, Artificial Sequence
  Description of Artificial Sequence: Synthetic oligonucleotide
  Sense strand starting at position 2748 of SEQ ID NO: 1886933
uuguauauaugucugagua

SEQ ID NO: 2436477 - RNA, 19 nt, Artificial Sequence
  Description of Artificial Sequence: Synthetic oligonucleotide
  Antisense strand to SEQ ID NO: 2436476
uacucagacauauauacaa

SEQ ID NO: 2436478 - RNA, 19 nt, Artificial Sequence
  Description of Artificial Sequence: Synthetic oligonucleotide
  Sense strand starting at position 2749 of SEQ ID NO: 1886933
uguauauaugucugaguaa

SEQ ID NO: 2436479 - RNA, 19 nt, Artificial Sequence
  Description of Artificial Sequence: Synthetic oligonucleotide
  Antisense strand to SEQ ID NO: 2436478
uuacucagacauauauaca

SEQ ID NO: 2436480 - RNA, 19 nt, Artificial Sequence
  Description of Artificial Sequence: Synthetic oligonucleotide
  Sense strand starting at position 2752 of SEQ ID NO: 1886933
auauaugucugaguaagac

SEQ ID NO: 2436481 - RNA, 19 nt, Artificial Sequence
  Description of Artificial Sequence: Synthetic oligonucleotide
  Antisense strand to SEQ ID NO: 2436480
gucuuacucagacauauau

SEQ ID NO: 2436482 - RNA, 19 nt, Artificial Sequence
  Description of Artificial Sequence: Synthetic oligonucleotide
  Sense strand starting at position 2762 of SEQ ID NO: 1886933
gaguaagacugggaaacua

SEQ ID NO: 2436483 - RNA, 19 nt, Artificial Sequence
  Description of Artificial Sequence: Synthetic oligonucleotide
  Antisense strand to SEQ ID NO: 2436482
uaguuucccagucuuacuc

SEQ ID NO: 2436484 - RNA, 19 nt, Artificial Sequence
  Description of Artificial Sequence: Synthetic oligonucleotide
  Sense strand starting at position 2928 of SEQ ID NO: 1886933
aguguuaaauuugccagua

SEQ ID NO: 2436485 - RNA, 19 nt, Artificial Sequence
  Description of Artificial Sequence: Synthetic oligonucleotide
  Antisense strand to SEQ ID NO: 2436484
uacuggcaaauuuaacacu

SEQ ID NO: 2436486 - RNA, 19 nt, Artificial Sequence
  Description of Artificial Sequence: Synthetic oligonucleotide
  Sense strand starting at position 2929 of SEQ ID NO: 1886933
guguuaaauuugccaguaa

SEQ ID NO: 2436487 - RNA, 19 nt, Artificial Sequence
  Description of Artificial Sequence: Synthetic oligonucleotide
  Antisense strand to SEQ ID NO: 2436486
uuacuggcaaauuuaacac

SEQ ID NO: 2436488 - RNA, 19 nt, Artificial Sequence
  Description of Artificial Sequence: Synthetic oligonucleotide
  Sense strand starting at position 3651 of SEQ ID NO: 1886933
aagccaggaguuugaguau

SEQ ID NO: 2436489 - RNA, 19 nt, Artificial Sequence
  Description of Artificial Sequence: Synthetic oligonucleotide
  Antisense strand to SEQ ID NO: 2436488
auacucaaacuccuggcuu

SEQ ID NO: 2436490 - RNA, 19 nt, Artificial Sequence
  Description of Artificial Sequence: Synthetic oligonucleotide
  Sense strand starting at position 3883 of SEQ ID NO: 1886933
agauauaucucccugucua

SEQ ID NO: 2436491 - RNA, 19 nt, Artificial Sequence
  Description of Artificial Sequence: Synthetic oligonucleotide
  Antisense strand to SEQ ID NO: 2436490
uagacagggagauauaucu

SEQ ID NO: 2436492 - RNA, 19 nt, Artificial Sequence
  Description of Artificial Sequence: Synthetic oligonucleotide
  Sense strand starting at position 7 of SEQ ID NO: 1886934
ggcagcugcucuguaauuu

SEQ ID NO: 2436493 - RNA, 19 nt, Artificial Sequence
  Description of Artificial Sequence: Synthetic oligonucleotide
  Antisense strand to SEQ ID NO: 2436492
aaauuacagagcagcugcc

SEQ ID NO: 2436494 - RNA, 19 nt, Artificial Sequence
  Description of Artificial Sequence: Synthetic oligonucleotide
  Sense strand starting at position 8 of SEQ ID NO: 1886934
gcagcugcucuguaauuug

SEQ ID NO: 2436495 - RNA, 19 nt, Artificial Sequence
  Description of Artificial Sequence: Synthetic oligonucleotide
  Antisense strand to SEQ ID NO: 2436494
caaauuacagagcagcugc

SEQ ID NO: 2436496 - RNA, 19 nt, Artificial Sequence
  Description of Artificial Sequence: Synthetic oligonucleotide
  Sense strand starting at position 11 of SEQ ID NO: 1886934
gcugcucuguaauuugauu

SEQ ID NO: 2436497 - RNA, 19 nt, Artificial Sequence
  Description of Artificial Sequence: Synthetic oligonucleotide
  Antisense strand to SEQ ID NO: 2436496
aaucaaauuacagagcagc

SEQ ID NO: 2436498 - RNA, 19 nt, Artificial Sequence
  Description of Artificial Sequence: Synthetic oligonucleotide
  Sense strand starting at position 367 of SEQ ID NO: 1886934
cuaugucaagcuugaguaa

SEQ ID NO: 2436499 - RNA, 19 nt, Artificial Sequence
  Description of Artificial Sequence: Synthetic oligonucleotide
  Antisense strand to SEQ ID NO: 2436498
uuacucaagcuugacauag

SEQ ID NO: 2436500 - RNA, 19 nt, Artificial Sequence
  Description of Artificial Sequence: Synthetic oligonucleotide
  Sense strand starting at position 368 of SEQ ID NO: 1886934
uaugucaagcuugaguaaa

SEQ ID NO: 2436501 - RNA, 19 nt, Artificial Sequence
  Description of Artificial Sequence: Synthetic oligonucleotide
  Antisense strand to SEQ ID NO: 2436500
uuuacucaagcuugacaua

SEQ ID NO: 2436502 - RNA, 19 nt, Artificial Sequence
  Description of Artificial Sequence: Synthetic oligonucleotide
  Sense strand starting at position 418 of SEQ ID NO: 1886934
agaacaucauguguaaaca

SEQ ID NO: 2436503 - RNA, 19 nt, Artificial Sequence
  Description of Artificial Sequence: Synthetic oligonucleotide
  Antisense strand to SEQ ID NO: 2436502
uguuuacacaugauguucu

SEQ ID NO: 2436504 - RNA, 19 nt, Artificial Sequence
  Description of Artificial Sequence: Synthetic oligonucleotide
  Sense strand starting at position 489 of SEQ ID NO: 1886934
auuuaaguuucgcccaauc

SEQ ID NO: 2436505 - RNA, 19 nt, Artificial Sequence
  Description of Artificial Sequence: Synthetic oligonucleotide
  Antisense strand to SEQ ID NO: 2436504
gauugggcgaaacuuaaau

SEQ ID NO: 2436506 - RNA, 19 nt, Artificial Sequence
  Description of Artificial Sequence: Synthetic oligonucleotide
  Sense strand starting at position 491 of SEQ ID NO: 1886934
uuaaguuucgcccaaucac

SEQ ID NO: 2436507 - RNA, 19 nt, Artificial Sequence
  Description of Artificial Sequence: Synthetic oligonucleotide
  Antisense strand to SEQ ID NO: 2436506
gugauugggcgaaacuuaa

SEQ ID NO: 2436508 - RNA, 19 nt, Artificial Sequence
  Description of Artificial Sequence: Synthetic oligonucleotide
  Sense strand starting at position 898 of SEQ ID NO: 1886934
ccuauuggaucacugcaga

SEQ ID NO: 2436509 - RNA, 19 nt, Artificial Sequence
  Description of Artificial Sequence: Synthetic oligonucleotide
  Antisense strand to SEQ ID NO: 2436508
ucugcagugauccaauagg

SEQ ID NO: 2436510 - RNA, 19 nt, Artificial Sequence
  Description of Artificial Sequence: Synthetic oligonucleotide
  Sense strand starting at position 938 of SEQ ID NO: 1886934
ugugaaauccugcauggca

SEQ ID NO: 2436511 - RNA, 19 nt, Artificial Sequence
  Description of Artificial Sequence: Synthetic oligonucleotide
  Antisense strand to SEQ ID NO: 2436510
ugccaugcaggauuucaca

SEQ ID NO: 2436512 - RNA, 19 nt, Artificial Sequence
  Description of Artificial Sequence: Synthetic oligonucleotide
  Sense strand starting at position 971 of SEQ ID NO: 1886934
uugaucauugcguagaaua

SEQ ID NO: 2436513 - RNA, 19 nt, Artificial Sequence
  Description of Artificial Sequence: Synthetic oligonucleotide
  Antisense strand to SEQ ID NO: 2436512
uauucuacgcaaugaucaa

SEQ ID NO: 2436514 - RNA, 19 nt, Artificial Sequence
  Description of Artificial Sequence: Synthetic oligonucleotide
  Sense strand starting at position 973 of SEQ ID NO: 1886934
gaucauugcguagaauaga

SEQ ID NO: 2436515 - RNA, 19 nt, Artificial Sequence
  Description of Artificial Sequence: Synthetic oligonucleotide
  Antisense strand to SEQ ID NO: 2436514
ucuauucuacgcaaugauc

SEQ ID NO: 2436516 - RNA, 19 nt, Artificial Sequence
  Description of Artificial Sequence: Synthetic oligonucleotide
  Sense strand starting at position 1015 of SEQ ID NO: 1886934
auaaauaguucugcaagaa

SEQ ID NO: 2436517 - RNA, 19 nt, Artificial Sequence
  Description of Artificial Sequence: Synthetic oligonucleotide
  Antisense strand to SEQ ID NO: 2436516
uucuugcagaacuauuuau

SEQ ID NO: 2436518 - RNA, 19 nt, Artificial Sequence
  Description of Artificial Sequence: Synthetic oligonucleotide
  Sense strand starting at position 1019 of SEQ ID NO: 1886934
auaguucugcaagaaauca

SEQ ID NO: 2436519 - RNA, 19 nt, Artificial Sequence
  Description of Artificial Sequence: Synthetic oligonucleotide
  Antisense strand to SEQ ID NO: 2436518
ugauuucuugcagaacuau

SEQ ID NO: 2436520 - RNA, 19 nt, Artificial Sequence
  Description of Artificial Sequence: Synthetic oligonucleotide
  Sense strand starting at position 1185 of SEQ ID NO: 1886934
ucagauuggcuuugaacuu

SEQ ID NO: 2436521 - RNA, 19 nt, Artificial Sequence
  Description of Artificial Sequence: Synthetic oligonucleotide
  Antisense strand to SEQ ID NO: 2436520
aaguucaaagccaaucuga

SEQ ID NO: 2436522 - RNA, 19 nt, Artificial Sequence
  Description of Artificial Sequence: Synthetic oligonucleotide
  Sense strand starting at position 1270 of SEQ ID NO: 1886934
ucaaauguccagugauaca

SEQ ID NO: 2436523 - RNA, 19 nt, Artificial Sequence
  Description of Artificial Sequence: Synthetic oligonucleotide
  Antisense strand to SEQ ID NO: 2436522
uguaucacuggacauuuga

SEQ ID NO: 2436524 - RNA, 19 nt, Artificial Sequence
  Description of Artificial Sequence: Synthetic oligonucleotide
  Sense strand starting at position 1418 of SEQ ID NO: 1886934
caaguuaacgucuaaaguu

SEQ ID NO: 2436525 - RNA, 19 nt, Artificial Sequence
  Description of Artificial Sequence: Synthetic oligonucleotide
  Antisense strand to SEQ ID NO: 2436524
aacuuuagacguuaacuug

SEQ ID NO: 2436526 - RNA, 19 nt, Artificial Sequence
  Description of Artificial Sequence: Synthetic oligonucleotide
  Sense strand starting at position 1453 of SEQ ID NO: 1886934
acuccuuggugcucaauua

SEQ ID NO: 2436527 - RNA, 19 nt, Artificial Sequence
  Description of Artificial Sequence: Synthetic oligonucleotide
  Antisense strand to SEQ ID NO: 2436526
uaauugagcaccaaggagu

SEQ ID NO: 2436528 - RNA, 19 nt, Artificial Sequence
  Description of Artificial Sequence: Synthetic oligonucleotide
  Sense strand starting at position 1454 of SEQ ID NO: 1886934
cuccuuggugcucaauuaa

SEQ ID NO: 2436529 - RNA, 19 nt, Artificial Sequence
  Description of Artificial Sequence: Synthetic oligonucleotide
  Antisense strand to SEQ ID NO: 2436528
uuaauugagcaccaaggag

SEQ ID NO: 2436530 - RNA, 19 nt, Artificial Sequence
  Description of Artificial Sequence: Synthetic oligonucleotide
  Sense strand starting at position 1618 of SEQ ID NO: 1886934
cuuaccucuggucaguauu

SEQ ID NO: 2436531 - RNA, 19 nt, Artificial Sequence
  Description of Artificial Sequence: Synthetic oligonucleotide
  Antisense strand to SEQ ID NO: 2436530
aauacugaccagagguaag

SEQ ID NO: 2436532 - RNA, 19 nt, Artificial Sequence
  Description of Artificial Sequence: Synthetic oligonucleotide
  Sense strand starting at position 1679 of SEQ ID NO: 1886934
guggcuggauuguugauau

SEQ ID NO: 2436533 - RNA, 19 nt, Artificial Sequence
  Description of Artificial Sequence: Synthetic oligonucleotide
  Antisense strand to SEQ ID NO: 2436532
auaucaacaauccagccac

SEQ ID NO: 2436534 - RNA, 19 nt, Artificial Sequence
  Description of Artificial Sequence: Synthetic oligonucleotide
  Sense strand starting at position 1703 of SEQ ID NO: 1886934
gucaacugucagugacaga

SEQ ID NO: 2436535 - RNA, 19 nt, Artificial Sequence
  Description of Artificial Sequence: Synthetic oligonucleotide
  Antisense strand to SEQ ID NO: 2436534
ucugucacugacaguugac

SEQ ID NO: 2436536 - RNA, 19 nt, Artificial Sequence
  Description of Artificial Sequence: Synthetic oligonucleotide
  Sense strand starting at position 1793 of SEQ ID NO: 1886934
uggaucuaagagugcaaau

SEQ ID NO: 2436537 - RNA, 19 nt, Artificial Sequence
  Description of Artificial Sequence: Synthetic oligonucleotide
  Antisense strand to SEQ ID NO: 2436536
auuugcacucuuagaucca

SEQ ID NO: 2436538 - RNA, 19 nt, Artificial Sequence
  Description of Artificial Sequence: Synthetic oligonucleotide
  Sense strand starting at position 1808 of SEQ ID NO: 1886934
aaaucaugucaugggaucu

SEQ ID NO: 2436539 - RNA, 19 nt, Artificial Sequence
  Description of Artificial Sequence: Synthetic oligonucleotide
  Antisense strand to SEQ ID NO: 2436538
agaucccaugacaugauuu

SEQ ID NO: 2436540 - RNA, 19 nt, Artificial Sequence
  Description of Artificial Sequence: Synthetic oligonucleotide
  Sense strand starting at position 1940 of SEQ ID NO: 1886934
uuuccucauggcuagcaau

SEQ ID NO: 2436541 - RNA, 19 nt, Artificial Sequence
  Description of Artificial Sequence: Synthetic oligonucleotide
  Antisense strand to SEQ ID NO: 2436540
auugcuagccaugaggaaa

SEQ ID NO: 2436542 - RNA, 19 nt, Artificial Sequence
  Description of Artificial Sequence: Synthetic oligonucleotide
  Sense strand starting at position 1981 of SEQ ID NO: 1886934
uugcauccaucuuuggaaa

SEQ ID NO: 2436543 - RNA, 19 nt, Artificial Sequence
  Description of Artificial Sequence: Synthetic oligonucleotide
  Antisense strand to SEQ ID NO: 2436542
uuuccaaagauggaugcaa

SEQ ID NO: 2436544 - RNA, 19 nt, Artificial Sequence
  Description of Artificial Sequence: Synthetic oligonucleotide
  Sense strand starting at position 2035 of SEQ ID NO: 1886934
aauugugugauagggagaa

SEQ ID NO: 2436545 - RNA, 19 nt, Artificial Sequence
  Description of Artificial Sequence: Synthetic oligonucleotide
  Antisense strand to SEQ ID NO: 2436544
uucucccuaucacacaauu

SEQ ID NO: 2436546 - RNA, 19 nt, Artificial Sequence
  Description of Artificial Sequence: Synthetic oligonucleotide
  Sense strand starting at position 2399 of SEQ ID NO: 1886934
ugaagugauggacggcuua

SEQ ID NO: 2436547 - RNA, 19 nt, Artificial Sequence
  Description of Artificial Sequence: Synthetic oligonucleotide
  Antisense strand to SEQ ID NO: 2436546
uaagccguccaucacuuca

SEQ ID NO: 2436548 - RNA, 19 nt, Artificial Sequence
  Description of Artificial Sequence: Synthetic oligonucleotide
  Sense strand starting at position 2410 of SEQ ID NO: 1886934
acggcuuaauuagaauuua

SEQ ID NO: 2436549 - RNA, 19 nt, Artificial Sequence
  Description of Artificial Sequence: Synthetic oligonucleotide
  Antisense strand to SEQ ID NO: 2436548
uaaauucuaauuaagccgu

SEQ ID NO: 2436550 - RNA, 19 nt, Artificial Sequence
  Description of Artificial Sequence: Synthetic oligonucleotide
  Sense strand starting at position 2494 of SEQ ID NO: 1886934
ugguuucuaggagauaugu

SEQ ID NO: 2436551 - RNA, 19 nt, Artificial Sequence
  Description of Artificial Sequence: Synthetic oligonucleotide
  Antisense strand to SEQ ID NO: 2436550
acauaucuccuagaaacca

SEQ ID NO: 2436552 - RNA, 19 nt, Artificial Sequence
  Description of Artificial Sequence: Synthetic oligonucleotide
  Sense strand starting at position 2603 of SEQ ID NO: 1886934
cagugagaggcacaucuua

SEQ ID NO: 2436553 - RNA, 19 nt, Artificial Sequence
  Description of Artificial Sequence: Synthetic oligonucleotide
  Antisense strand to SEQ ID NO: 2436552
uaagaugugccucucacug

SEQ ID NO: 2436554 - RNA, 19 nt, Artificial Sequence
  Description of Artificial Sequence: Synthetic oligonucleotide
  Sense strand starting at position 2683 of SEQ ID NO: 1886934
uugugcucugguuaucaua

SEQ ID NO: 2436555 - RNA, 19 nt, Artificial Sequence
  Description of Artificial Sequence: Synthetic oligonucleotide
  Antisense strand to SEQ ID NO: 2436554
uaugauaaccagagcacaa

SEQ ID NO: 2436556 - RNA, 19 nt, Artificial Sequence
  Description of Artificial Sequence: Synthetic oligonucleotide
  Sense strand starting at position 2691 of SEQ ID NO: 1886934
ugguuaucauauucccaca

SEQ ID NO: 2436557 - RNA, 19 nt, Artificial Sequence
  Description of Artificial Sequence: Synthetic oligonucleotide
  Antisense strand to SEQ ID NO: 2436556
ugugggaauaugauaacca

SEQ ID NO: 2436558 - RNA, 19 nt, Artificial Sequence
  Description of Artificial Sequence: Synthetic oligonucleotide
  Sense strand starting at position 3065 of SEQ ID NO: 1886934
ccuuuauuguacuuuauag

SEQ ID NO: 2436559 - RNA, 19 nt, Artificial Sequence
  Description of Artificial Sequence: Synthetic oligonucleotide
  Antisense strand to SEQ ID NO: 2436558
cuauaaaguacaauaaagg

SEQ ID NO: 2436560 - RNA, 19 nt, Artificial Sequence
  Description of Artificial Sequence: Synthetic oligonucleotide
  Sense strand starting at position 3343 of SEQ ID NO: 1886934
aaaccaggcuuucugguaa

SEQ ID NO: 2436561 - RNA, 19 nt, Artificial Sequence
  Description of Artificial Sequence: Synthetic oligonucleotide
  Antisense strand to SEQ ID NO: 2436560
uuaccagaaagccugguuu

SEQ ID NO: 2436562 - RNA, 19 nt, Artificial Sequence
  Description of Artificial Sequence: Synthetic oligonucleotide
  Sense strand starting at position 3480 of SEQ ID NO: 1886934
uucuuaucauaccuaggga

SEQ ID NO: 2436563 - RNA, 19 nt, Artificial Sequence
  Description of Artificial Sequence: Synthetic oligonucleotide
  Antisense strand to SEQ ID NO: 2436562
ucccuagguaugauaagaa

SEQ ID NO: 2436564 - RNA, 19 nt, Artificial Sequence
  Description of Artificial Sequence: Synthetic oligonucleotide
  Sense strand starting at position 3501 of SEQ ID NO: 1886934
gaaggugugcuccacaacu

SEQ ID NO: 2436565 - RNA, 19 nt, Artificial Sequence
  Description of Artificial Sequence: Synthetic oligonucleotide
  Antisense strand to SEQ ID NO: 2436564
aguuguggagcacaccuuc

SEQ ID NO: 2436566 - RNA, 19 nt, Artificial Sequence
  Description of Artificial Sequence: Synthetic oligonucleotide
  Sense strand starting at position 3545 of SEQ ID NO: 1886934
ucuccauauuuggagaucu

SEQ ID NO: 2436567 - RNA, 19 nt, Artificial Sequence
  Description of Artificial Sequence: Synthetic oligonucleotide
  Antisense strand to SEQ ID NO: 2436566
agaucuccaaauauggaga

SEQ ID NO: 2436568 - RNA, 19 nt, Artificial Sequence
  Description of Artificial Sequence: Synthetic oligonucleotide
  Sense strand starting at position 3601 of SEQ ID NO: 1886934
uccaucuucuuuguauuga

SEQ ID NO: 2436569 - RNA, 19 nt, Artificial Sequence
  Description of Artificial Sequence: Synthetic oligonucleotide
  Antisense strand to SEQ ID NO: 2436568
ucaauacaaagaagaugga

SEQ ID NO: 2436570 - RNA, 19 nt, Artificial Sequence
  Description of Artificial Sequence: Synthetic oligonucleotide
  Sense strand starting at position 3982 of SEQ ID NO: 1886934
ggcauaagccacugauccu

SEQ ID NO: 2436571 - RNA, 19 nt, Artificial Sequence
  Description of Artificial Sequence: Synthetic oligonucleotide
  Antisense strand to SEQ ID NO: 2436570
aggaucaguggcuuaugcc

SEQ ID NO: 2436572 - RNA, 19 nt, Artificial Sequence
  Description of Artificial Sequence: Synthetic oligonucleotide
  Sense strand starting at position 72 of SEQ ID NO: 1886935
ucugaauagcaggguugaa

SEQ ID NO: 2436573 - RNA, 19 nt, Artificial Sequence
  Description of Artificial Sequence: Synthetic oligonucleotide
  Antisense strand to SEQ ID NO: 2436572
uucaacccugcuauucaga

SEQ ID NO: 2436574 - RNA, 19 nt, Artificial Sequence
  Description of Artificial Sequence: Synthetic oligonucleotide
  Sense strand starting at position 119 of SEQ ID NO: 1886935
cgcaguaucugacuauaga

SEQ ID NO: 2436575 - RNA, 19 nt, Artificial Sequence
  Description of Artificial Sequence: Synthetic oligonucleotide
  Antisense strand to SEQ ID NO: 2436574
ucuauagucagauacugcg

SEQ ID NO: 2436576 - RNA, 19 nt, Artificial Sequence
  Description of Artificial Sequence: Synthetic oligonucleotide
  Sense strand starting at position 120 of SEQ ID NO: 1886935
gcaguaucugacuauagaa

SEQ ID NO: 2436577 - RNA, 19 nt, Artificial Sequence
  Description of Artificial Sequence: Synthetic oligonucleotide
  Antisense strand to SEQ ID NO: 2436576
uucuauagucagauacugc

SEQ ID NO: 2436578 - RNA, 19 nt, Artificial Sequence
  Description of Artificial Sequence: Synthetic oligonucleotide
  Sense strand starting at position 366 of SEQ ID NO: 1886935
gagggauugcagugagcag

SEQ ID NO: 2436579 - RNA, 19 nt, Artificial Sequence
  Description of Artificial Sequence: Synthetic oligonucleotide
  Antisense strand to SEQ ID NO: 2436578
cugcucacugcaaucccuc

SEQ ID NO: 2436580 - RNA, 19 nt, Artificial Sequence
  Description of Artificial Sequence: Synthetic oligonucleotide
  Sense strand starting at position 462 of SEQ ID NO: 1886935
uacuguguacgcuauuaaa

SEQ ID NO: 2436581 - RNA, 19 nt, Artificial Sequence
  Description of Artificial Sequence: Synthetic oligonucleotide
  Antisense strand to SEQ ID NO: 2436580
uuuaauagcguacacagua

SEQ ID NO: 2436582 - RNA, 19 nt, Artificial Sequence
  Description of Artificial Sequence: Synthetic oligonucleotide
  Sense strand starting at position 504 of SEQ ID NO: 1886935
gccucaguaagugauguau

SEQ ID NO: 2436583 - RNA, 19 nt, Artificial Sequence
  Description of Artificial Sequence: Synthetic oligonucleotide
  Antisense strand to SEQ ID NO: 2436582
auacaucacuuacugaggc

SEQ ID NO: 2436584 - RNA, 19 nt, Artificial Sequence
  Description of Artificial Sequence: Synthetic oligonucleotide
  Sense strand starting at position 510 of SEQ ID NO: 1886935
guaagugauguauauacuu

SEQ ID NO: 2436585 - RNA, 19 nt, Artificial Sequence
  Description of Artificial Sequence: Synthetic oligonucleotide
  Antisense strand to SEQ ID NO: 2436584
aaguauauacaucacuuac

SEQ ID NO: 2436586 - RNA, 19 nt, Artificial Sequence
  Description of Artificial Sequence: Synthetic oligonucleotide
  Sense strand starting at position 675 of SEQ ID NO: 1886935
ccuuaugagguagguacaa

SEQ ID NO: 2436587 - RNA, 19 nt, Artificial Sequence
  Description of Artificial Sequence: Synthetic oligonucleotide
  Antisense strand to SEQ ID NO: 2436586
uuguaccuaccucauaagg

SEQ ID NO: 2436588 - RNA, 19 nt, Artificial Sequence
  Description of Artificial Sequence: Synthetic oligonucleotide
  Sense strand starting at position 757 of SEQ ID NO: 1886935
uugcacuaucagugaauga

SEQ ID NO: 2436589 - RNA, 19 nt, Artificial Sequence
  Description of Artificial Sequence: Synthetic oligonucleotide
  Antisense strand to SEQ ID NO: 2436588
ucauucacugauagugcaa

SEQ ID NO: 2436590 - RNA, 19 nt, Artificial Sequence
  Description of Artificial Sequence: Synthetic oligonucleotide
  Sense strand starting at position 793 of SEQ ID NO: 1886935
cccaaacagugucauuuaa

SEQ ID NO: 2436591 - RNA, 19 nt, Artificial Sequence
  Description of Artificial Sequence: Synthetic oligonucleotide
  Antisense strand to SEQ ID NO: 2436590
uuaaaugacacuguuuggg

SEQ ID NO: 2436592 - RNA, 19 nt, Artificial Sequence
  Description of Artificial Sequence: Synthetic oligonucleotide
  Sense strand starting at position 891 of SEQ ID NO: 1886935
ccacaaauauugucugagu

SEQ ID NO: 2436593 - RNA, 19 nt, Artificial Sequence
  Description of Artificial Sequence: Synthetic oligonucleotide
  Antisense strand to SEQ ID NO: 2436592
acucagacaauauuugugg

SEQ ID NO: 2436594 - RNA, 19 nt, Artificial Sequence
  Description of Artificial Sequence: Synthetic oligonucleotide
  Sense strand starting at position 925 of SEQ ID NO: 1886935
uguguuugccaagugcuau

SEQ ID NO: 2436595 - RNA, 19 nt, Artificial Sequence
  Description of Artificial Sequence: Synthetic oligonucleotide
  Antisense strand to SEQ ID NO: 2436594
auagcacuuggcaaacaca

SEQ ID NO: 2436596 - RNA, 19 nt, Artificial Sequence
  Description of Artificial Sequence: Synthetic oligonucleotide
  Sense strand starting at position 931 of SEQ ID NO: 1886935
ugccaagugcuauagauau

SEQ ID NO: 2436597 - RNA, 19 nt, Artificial Sequence
  Description of Artificial Sequence: Synthetic oligonucleotide
  Antisense strand to SEQ ID NO: 2436596
auaucuauagcacuuggca

SEQ ID NO: 2436598 - RNA, 19 nt, Artificial Sequence
  Description of Artificial Sequence: Synthetic oligonucleotide
  Sense strand starting at position 986 of SEQ ID NO: 1886935
uggaaauuacaguguggag

SEQ ID NO: 2436599 - RNA, 19 nt, Artificial Sequence
  Description of Artificial Sequence: Synthetic oligonucleotide
  Antisense strand to SEQ ID NO: 2436598
cuccacacuguaauuucca

SEQ ID NO: 2436600 - RNA, 19 nt, Artificial Sequence
  Description of Artificial Sequence: Synthetic oligonucleotide
  Sense strand starting at position 1027 of SEQ ID NO: 1886935
cuacgaagaccauguagau

SEQ ID NO: 2436601 - RNA, 19 nt, Artificial Sequence
  Description of Artificial Sequence: Synthetic oligonucleotide
  Antisense strand to SEQ ID NO: 2436600
aucuacauggucuucguag

SEQ ID NO: 2436602 - RNA, 19 nt, Artificial Sequence
  Description of Artificial Sequence: Synthetic oligonucleotide
  Sense strand starting at position 1385 of SEQ ID NO: 1886935
uauugaauguucucugggu

SEQ ID NO: 2436603 - RNA, 19 nt, Artificial Sequence
  Description of Artificial Sequence: Synthetic oligonucleotide
  Antisense strand to SEQ ID NO: 2436602
acccagagaacauucaaua

SEQ ID NO: 2436604 - RNA, 19 nt, Artificial Sequence
  Description of Artificial Sequence: Synthetic oligonucleotide
  Sense strand starting at position 1410 of SEQ ID NO: 1886935
cguuaaucugggcacuuua

SEQ ID NO: 2436605 - RNA, 19 nt, Artificial Sequence
  Description of Artificial Sequence: Synthetic oligonucleotide
  Antisense strand to SEQ ID NO: 2436604
uaaagugcccagauuaacg

SEQ ID NO: 2436606 - RNA, 19 nt, Artificial Sequence
  Description of Artificial Sequence: Synthetic oligonucleotide
  Sense strand starting at position 1693 of SEQ ID NO: 1886935
gggaguaacuucuuuagca

SEQ ID NO: 2436607 - RNA, 19 nt, Artificial Sequence
  Description of Artificial Sequence: Synthetic oligonucleotide
  Antisense strand to SEQ ID NO: 2436606
ugcuaaagaaguuacuccc

SEQ ID NO: 2436608 - RNA, 19 nt, Artificial Sequence
  Description of Artificial Sequence: Synthetic oligonucleotide
  Sense strand starting at position 1694 of SEQ ID NO: 1886935
ggaguaacuucuuuagcag

SEQ ID NO: 2436609 - RNA, 19 nt, Artificial Sequence
  Description of Artificial Sequence: Synthetic oligonucleotide
  Antisense strand to SEQ ID NO: 2436608
cugcuaaagaaguuacucc

SEQ ID NO: 2436610 - RNA, 19 nt, Artificial Sequence
  Description of Artificial Sequence: Synthetic oligonucleotide
  Sense strand starting at position 1700 of SEQ ID NO: 1886935
acuucuuuagcagggcaga

SEQ ID NO: 2436611 - RNA, 19 nt, Artificial Sequence
  Description of Artificial Sequence: Synthetic oligonucleotide
  Antisense strand to SEQ ID NO: 2436610
ucugcccugcuaaagaagu

SEQ ID NO: 2436612 - RNA, 19 nt, Artificial Sequence
  Description of Artificial Sequence: Synthetic oligonucleotide
  Sense strand starting at position 1713 of SEQ ID NO: 1886935
ggcagagaaagcugugaau

SEQ ID NO: 2436613 - RNA, 19 nt, Artificial Sequence
  Description of Artificial Sequence: Synthetic oligonucleotide
  Antisense strand to SEQ ID NO: 2436612
auucacagcuuucucugcc

SEQ ID NO: 2436614 - RNA, 19 nt, Artificial Sequence
  Description of Artificial Sequence: Synthetic oligonucleotide
  Sense strand starting at position 1715 of SEQ ID NO: 1886935
cagagaaagcugugaauaa

SEQ ID NO: 2436615 - RNA, 19 nt, Artificial Sequence
  Description of Artificial Sequence: Synthetic oligonucleotide
  Antisense strand to SEQ ID NO: 2436614
uuauucacagcuuucucug

SEQ ID NO: 2436616 - RNA, 19 nt, Artificial Sequence
  Description of Artificial Sequence: Synthetic oligonucleotide
  Sense strand starting at position 1733 of SEQ ID NO: 1886935
aaagcagagggcugagaau

SEQ ID NO: 2436617 - RNA, 19 nt, Artificial Sequence
  Description of Artificial Sequence: Synthetic oligonucleotide
  Antisense strand to SEQ ID NO: 2436616
auucucagcccucugcuuu

SEQ ID NO: 2436618 - RNA, 19 nt, Artificial Sequence
  Description of Artificial Sequence: Synthetic oligonucleotide
  Sense strand starting at position 2112 of SEQ ID NO: 1886935
gggagugagucuuuccaag

SEQ ID NO: 2436619 - RNA, 19 nt, Artificial Sequence
  Description of Artificial Sequence: Synthetic oligonucleotide
  Antisense strand to SEQ ID NO: 2436618
cuuggaaagacucacuccc

SEQ ID NO: 2436620 - RNA, 19 nt, Artificial Sequence
  Description of Artificial Sequence: Synthetic oligonucleotide
  Sense strand starting at position 2114 of SEQ ID NO: 1886935
gagugagucuuuccaagac

SEQ ID NO: 2436621 - RNA, 19 nt, Artificial Sequence
  Description of Artificial Sequence: Synthetic oligonucleotide
  Antisense strand to SEQ ID NO: 2436620
gucuuggaaagacucacuc

SEQ ID NO: 2436622 - RNA, 19 nt, Artificial Sequence
  Description of Artificial Sequence: Synthetic oligonucleotide
  Sense strand starting at position 2208 of SEQ ID NO: 1886935
cgugauuggcugccuaagu

SEQ ID NO: 2436623 - RNA, 19 nt, Artificial Sequence
  Description of Artificial Sequence: Synthetic oligonucleotide
  Antisense strand to SEQ ID NO: 2436622
acuuaggcagccaaucacg

SEQ ID NO: 2436624 - RNA, 19 nt, Artificial Sequence
  Description of Artificial Sequence: Synthetic oligonucleotide
  Sense strand starting at position 2512 of SEQ ID NO: 1886935
aaaugucauccuuggagag

SEQ ID NO: 2436625 - RNA, 19 nt, Artificial Sequence
  Description of Artificial Sequence: Synthetic oligonucleotide
  Antisense strand to SEQ ID NO: 2436624
cucuccaaggaugacauuu

SEQ ID NO: 2436626 - RNA, 19 nt, Artificial Sequence
  Description of Artificial Sequence: Synthetic oligonucleotide
  Sense strand starting at position 2513 of SEQ ID NO: 1886935
aaugucauccuuggagaga

SEQ ID NO: 2436627 - RNA, 19 nt, Artificial Sequence
  Description of Artificial Sequence: Synthetic oligonucleotide
  Antisense strand to SEQ ID NO: 2436626
ucucuccaaggaugacauu

SEQ ID NO: 2436628 - RNA, 19 nt, Artificial Sequence
  Description of Artificial Sequence: Synthetic oligonucleotide
  Sense strand starting at position 2577 of SEQ ID NO: 1886935
uuggaaagauaugagaaga

SEQ ID NO: 2436629 - RNA, 19 nt, Artificial Sequence
  Description of Artificial Sequence: Synthetic oligonucleotide
  Antisense strand to SEQ ID NO: 2436628
ucuucucauaucuuuccaa

SEQ ID NO: 2436630 - RNA, 19 nt, Artificial Sequence
  Description of Artificial Sequence: Synthetic oligonucleotide
  Sense strand starting at position 2618 of SEQ ID NO: 1886935
uuuauuaaucagugaggaa

SEQ ID NO: 2436631 - RNA, 19 nt, Artificial Sequence
  Description of Artificial Sequence: Synthetic oligonucleotide
  Antisense strand to SEQ ID NO: 2436630
uuccucacugauuaauaaa

SEQ ID NO: 2436632 - RNA, 19 nt, Artificial Sequence
  Description of Artificial Sequence: Synthetic oligonucleotide
  Sense strand starting at position 2688 of SEQ ID NO: 1886935
ggaacuuuaucuuuccaug

SEQ ID NO: 2436633 - RNA, 19 nt, Artificial Sequence
  Description of Artificial Sequence: Synthetic oligonucleotide
  Antisense strand to SEQ ID NO: 2436632
cauggaaagauaaaguucc

SEQ ID NO: 2436634 - RNA, 19 nt, Artificial Sequence
  Description of Artificial Sequence: Synthetic oligonucleotide
  Sense strand starting at position 2947 of SEQ ID NO: 1886935
cagccuguagacugaaaga

SEQ ID NO: 2436635 - RNA, 19 nt, Artificial Sequence
  Description of Artificial Sequence: Synthetic oligonucleotide
  Antisense strand to SEQ ID NO: 2436634
ucuuucagucuacaggcug

SEQ ID NO: 2436636 - RNA, 19 nt, Artificial Sequence
  Description of Artificial Sequence: Synthetic oligonucleotide
  Sense strand starting at position 3291 of SEQ ID NO: 1886935
ccaagauugcgccacggaa

SEQ ID NO: 2436637 - RNA, 19 nt, Artificial Sequence
  Description of Artificial Sequence: Synthetic oligonucleotide
  Antisense strand to SEQ ID NO: 2436636
uuccguggcgcaaucuugg

SEQ ID NO: 2436638 - RNA, 19 nt, Artificial Sequence
  Description of Artificial Sequence: Synthetic oligonucleotide
  Sense strand starting at position 3563 of SEQ ID NO: 1886935
aagagagaugcuugagugu

SEQ ID NO: 2436639 - RNA, 19 nt, Artificial Sequence
  Description of Artificial Sequence: Synthetic oligonucleotide
  Antisense strand to SEQ ID NO: 2436638
acacucaagcaucucucuu

SEQ ID NO: 2436640 - RNA, 19 nt, Artificial Sequence
  Description of Artificial Sequence: Synthetic oligonucleotide
  Sense strand starting at position 3585 of SEQ ID NO: 1886935
cagacuauucccggaagua

SEQ ID NO: 2436641 - RNA, 19 nt, Artificial Sequence
  Description of Artificial Sequence: Synthetic oligonucleotide
  Antisense strand to SEQ ID NO: 2436640
uacuuccgggaauagucug

SEQ ID NO: 2436642 - RNA, 19 nt, Artificial Sequence
  Description of Artificial Sequence: Synthetic oligonucleotide
  Sense strand starting at position 3586 of SEQ ID NO: 1886935
agacuauucccggaaguau

SEQ ID NO: 2436643 - RNA, 19 nt, Artificial Sequence
  Description of Artificial Sequence: Synthetic oligonucleotide
  Antisense strand to SEQ ID NO: 2436642
auacuuccgggaauagucu

SEQ ID NO: 2436644 - RNA, 19 nt, Artificial Sequence
  Description of Artificial Sequence: Synthetic oligonucleotide
  Sense strand starting at position 3835 of SEQ ID NO: 1886935
ggcauacaaccuuggacua

SEQ ID NO: 2436645 - RNA, 19 nt, Artificial Sequence
  Description of Artificial Sequence: Synthetic oligonucleotide
  Antisense strand to SEQ ID NO: 2436644
uaguccaagguuguaugcc

SEQ ID NO: 2436646 - RNA, 19 nt, Artificial Sequence
  Description of Artificial Sequence: Synthetic oligonucleotide
  Sense strand starting at position 3836 of SEQ ID NO: 1886935
gcauacaaccuuggacuau

SEQ ID NO: 2436647 - RNA, 19 nt, Artificial Sequence
  Description of Artificial Sequence: Synthetic oligonucleotide
  Antisense strand to SEQ ID NO: 2436646
auaguccaagguuguaugc

SEQ ID NO: 2436648 - RNA, 19 nt, Artificial Sequence
  Description of Artificial Sequence: Synthetic oligonucleotide
  Sense strand starting at position 3846 of SEQ ID NO: 1886935
uuggacuauguccacgaua

SEQ ID NO: 2436649 - RNA, 19 nt, Artificial Sequence
  Description of Artificial Sequence: Synthetic oligonucleotide
  Antisense strand to SEQ ID NO: 2436648
uaucguggacauaguccaa

SEQ ID NO: 2436650 - RNA, 19 nt, Artificial Sequence
  Description of Artificial Sequence: Synthetic oligonucleotide
  Sense strand starting at position 3848 of SEQ ID NO: 1886935
ggacuauguccacgauaaa

SEQ ID NO: 2436651 - RNA, 19 nt, Artificial Sequence
  Description of Artificial Sequence: Synthetic oligonucleotide
  Antisense strand to SEQ ID NO: 2436650
uuuaucguggacauagucc

SEQ ID NO: 2436652 - RNA, 19 nt, Artificial Sequence
  Description of Artificial Sequence: Synthetic oligonucleotide
  Sense strand starting at position 28 of SEQ ID NO: 1886936
cuggcucuucuccaaaguu

SEQ ID NO: 2436653 - RNA, 19 nt, Artificial Sequence
  Description of Artificial Sequence: Synthetic oligonucleotide
  Antisense strand to SEQ ID NO: 2436652
aacuuuggagaagagccag

SEQ ID NO: 2436654 - RNA, 19 nt, Artificial Sequence
  Description of Artificial Sequence: Synthetic oligonucleotide
  Sense strand starting at position 201 of SEQ ID NO: 1886936
auuugauuguuagaaagac

SEQ ID NO: 2436655 - RNA, 19 nt, Artificial Sequence
  Description of Artificial Sequence: Synthetic oligonucleotide
  Antisense strand to SEQ ID NO: 2436654
gucuuucuaacaaucaaau

SEQ ID NO: 2436656 - RNA, 19 nt, Artificial Sequence
  Description of Artificial Sequence: Synthetic oligonucleotide
  Sense strand starting at position 302 of SEQ ID NO: 1886936
uugacuugaaggugggauu

SEQ ID NO: 2436657 - RNA, 19 nt, Artificial Sequence
  Description of Artificial Sequence: Synthetic oligonucleotide
  Antisense strand to SEQ ID NO: 2436656
aaucccaccuucaagucaa

SEQ ID NO: 2436658 - RNA, 19 nt, Artificial Sequence
  Description of Artificial Sequence: Synthetic oligonucleotide
  Sense strand starting at position 501 of SEQ ID NO: 1886936
cucaguccuggcugagaga

SEQ ID NO: 2436659 - RNA, 19 nt, Artificial Sequence
  Description of Artificial Sequence: Synthetic oligonucleotide
  Antisense strand to SEQ ID NO: 2436658
ucucucagccaggacugag

SEQ ID NO: 2436660 - RNA, 19 nt, Artificial Sequence
  Description of Artificial Sequence: Synthetic oligonucleotide
  Sense strand starting at position 525 of SEQ ID NO: 1886936
ggacuuacuagcugugaga

SEQ ID NO: 2436661 - RNA, 19 nt, Artificial Sequence
  Description of Artificial Sequence: Synthetic oligonucleotide
  Antisense strand to SEQ ID NO: 2436660
ucucacagcuaguaagucc

SEQ ID NO: 2436662 - RNA, 19 nt, Artificial Sequence
  Description of Artificial Sequence: Synthetic oligonucleotide
  Sense strand starting at position 594 of SEQ ID NO: 1886936
augagaugcuacccaggaa

SEQ ID NO: 2436663 - RNA, 19 nt, Artificial Sequence
  Description of Artificial Sequence: Synthetic oligonucleotide
  Antisense strand to SEQ ID NO: 2436662
uuccuggguagcaucucau

SEQ ID NO: 2436664 - RNA, 19 nt, Artificial Sequence
  Description of Artificial Sequence: Synthetic oligonucleotide
  Sense strand starting at position 832 of SEQ ID NO: 1886936
aaaguucgacauuguagau

SEQ ID NO: 2436665 - RNA, 19 nt, Artificial Sequence
  Description of Artificial Sequence: Synthetic oligonucleotide
  Antisense strand to SEQ ID NO: 2436664
aucuacaaugucgaacuuu

SEQ ID NO: 2436666 - RNA, 19 nt, Artificial Sequence
  Description of Artificial Sequence: Synthetic oligonucleotide
  Sense strand starting at position 838 of SEQ ID NO: 1886936
cgacauuguagauauggca

SEQ ID NO: 2436667 - RNA, 19 nt, Artificial Sequence
  Description of Artificial Sequence: Synthetic oligonucleotide
  Antisense strand to SEQ ID NO: 2436666
ugccauaucuacaaugucg

SEQ ID NO: 2436668 - RNA, 19 nt, Artificial Sequence
  Description of Artificial Sequence: Synthetic oligonucleotide
  Sense strand starting at position 921 of SEQ ID NO: 1886936
gaugguguccacuggaaau

SEQ ID NO: 2436669 - RNA, 19 nt, Artificial Sequence
  Description of Artificial Sequence: Synthetic oligonucleotide
  Antisense strand to SEQ ID NO: 2436668
auuuccaguggacaccauc

SEQ ID NO: 2436670 - RNA, 19 nt, Artificial Sequence
  Description of Artificial Sequence: Synthetic oligonucleotide
  Sense strand starting at position 978 of SEQ ID NO: 1886936
ucaguaagauucucaugag

SEQ ID NO: 2436671 - RNA, 19 nt, Artificial Sequence
  Description of Artificial Sequence: Synthetic oligonucleotide
  Antisense strand to SEQ ID NO: 2436670
cucaugagaaucuuacuga

SEQ ID NO: 2436672 - RNA, 19 nt, Artificial Sequence
  Description of Artificial Sequence: Synthetic oligonucleotide
  Sense strand starting at position 1027 of SEQ ID NO: 1886936
gagagugaacugugcacuu

SEQ ID NO: 2436673 - RNA, 19 nt, Artificial Sequence
  Description of Artificial Sequence: Synthetic oligonucleotide
  Antisense strand to SEQ ID NO: 2436672
aagugcacaguucacucuc

SEQ ID NO: 2436674 - RNA, 19 nt, Artificial Sequence
  Description of Artificial Sequence: Synthetic oligonucleotide
  Sense strand starting at position 1188 of SEQ ID NO: 1886936
ugugaaacuggccacuaaa

SEQ ID NO: 2436675 - RNA, 19 nt, Artificial Sequence
  Description of Artificial Sequence: Synthetic oligonucleotide
  Antisense strand to SEQ ID NO: 2436674
uuuaguggccaguuucaca

SEQ ID NO: 2436676 - RNA, 19 nt, Artificial Sequence
  Description of Artificial Sequence: Synthetic oligonucleotide
  Sense strand starting at position 1248 of SEQ ID NO: 1886936
ugcaguuuccaugaauauc

SEQ ID NO: 2436677 - RNA, 19 nt, Artificial Sequence
  Description of Artificial Sequence: Synthetic oligonucleotide
  Antisense strand to SEQ ID NO: 2436676
gauauucauggaaacugca

SEQ ID NO: 2436678 - RNA, 19 nt, Artificial Sequence
  Description of Artificial Sequence: Synthetic oligonucleotide
  Sense strand starting at position 1324 of SEQ ID NO: 1886936
gagacagaguucuugcuga

SEQ ID NO: 2436679 - RNA, 19 nt, Artificial Sequence
  Description of Artificial Sequence: Synthetic oligonucleotide
  Antisense strand to SEQ ID NO: 2436678
ucagcaagaacucugucuc

SEQ ID NO: 2436680 - RNA, 19 nt, Artificial Sequence
  Description of Artificial Sequence: Synthetic oligonucleotide
  Sense strand starting at position 1329 of SEQ ID NO: 1886936
agaguucuugcugaaggag

SEQ ID NO: 2436681 - RNA, 19 nt, Artificial Sequence
  Description of Artificial Sequence: Synthetic oligonucleotide
  Antisense strand to SEQ ID NO: 2436680
cuccuucagcaagaacucu

SEQ ID NO: 2436682 - RNA, 19 nt, Artificial Sequence
  Description of Artificial Sequence: Synthetic oligonucleotide
  Sense strand starting at position 1398 of SEQ ID NO: 1886936
agggaauuccugcagucag

SEQ ID NO: 2436683 - RNA, 19 nt, Artificial Sequence
  Description of Artificial Sequence: Synthetic oligonucleotide
  Antisense strand to SEQ ID NO: 2436682
cugacugcaggaauucccu

SEQ ID NO: 2436684 - RNA, 19 nt, Artificial Sequence
  Description of Artificial Sequence: Synthetic oligonucleotide
  Sense strand starting at position 1418 of SEQ ID NO: 1886936
ugcuguagacaccaguuaa

SEQ ID NO: 2436685 - RNA, 19 nt, Artificial Sequence
  Description of Artificial Sequence: Synthetic oligonucleotide
  Antisense strand to SEQ ID NO: 2436684
uuaacuggugucuacagca

SEQ ID NO: 2436686 - RNA, 19 nt, Artificial Sequence
  Description of Artificial Sequence: Synthetic oligonucleotide
  Sense strand starting at position 1511 of SEQ ID NO: 1886936
cacauaucugauggucaug

SEQ ID NO: 2436687 - RNA, 19 nt, Artificial Sequence
  Description of Artificial Sequence: Synthetic oligonucleotide
  Antisense strand to SEQ ID NO: 2436686
caugaccaucagauaugug

SEQ ID NO: 2436688 - RNA, 19 nt, Artificial Sequence
  Description of Artificial Sequence: Synthetic oligonucleotide
  Sense strand starting at position 1513 of SEQ ID NO: 1886936
cauaucugauggucauguu

SEQ ID NO: 2436689 - RNA, 19 nt, Artificial Sequence
  Description of Artificial Sequence: Synthetic oligonucleotide
  Antisense strand to SEQ ID NO: 2436688
aacaugaccaucagauaug

SEQ ID NO: 2436690 - RNA, 19 nt, Artificial Sequence
  Description of Artificial Sequence: Synthetic oligonucleotide
  Sense strand starting at position 1596 of SEQ ID NO: 1886936
guuguuaccuucuuagaua

SEQ ID NO: 2436691 - RNA, 19 nt, Artificial Sequence
  Description of Artificial Sequence: Synthetic oligonucleotide
  Antisense strand to SEQ ID NO: 2436690
uaucuaagaagguaacaac

SEQ ID NO: 2436692 - RNA, 19 nt, Artificial Sequence
  Description of Artificial Sequence: Synthetic oligonucleotide
  Sense strand starting at position 1895 of SEQ ID NO: 1886936
aagcaucaugccuguagaa

SEQ ID NO: 2436693 - RNA, 19 nt, Artificial Sequence
  Description of Artificial Sequence: Synthetic oligonucleotide
  Antisense strand to SEQ ID NO: 2436692
uucuacaggcaugaugcuu

SEQ ID NO: 2436694 - RNA, 19 nt, Artificial Sequence
  Description of Artificial Sequence: Synthetic oligonucleotide
  Sense strand starting at position 1897 of SEQ ID NO: 1886936
gcaucaugccuguagaauc

SEQ ID NO: 2436695 - RNA, 19 nt, Artificial Sequence
  Description of Artificial Sequence: Synthetic oligonucleotide
  Antisense strand to SEQ ID NO: 2436694
gauucuacaggcaugaugc

SEQ ID NO: 2436696 - RNA, 19 nt, Artificial Sequence
  Description of Artificial Sequence: Synthetic oligonucleotide
  Sense strand starting at position 2016 of SEQ ID NO: 1886936
ugguuacacuuccuuuaag

SEQ ID NO: 2436697 - RNA, 19 nt, Artificial Sequence
  Description of Artificial Sequence: Synthetic oligonucleotide
  Antisense strand to SEQ ID NO: 2436696
cuuaaaggaaguguaacca

SEQ ID NO: 2436698 - RNA, 19 nt, Artificial Sequence
  Description of Artificial Sequence: Synthetic oligonucleotide
  Sense strand starting at position 2367 of SEQ ID NO: 1886936
cugaauuaguuguucugga

SEQ ID NO: 2436699 - RNA, 19 nt, Artificial Sequence
  Description of Artificial Sequence: Synthetic oligonucleotide
  Antisense strand to SEQ ID NO: 2436698
uccagaacaacuaauucag

SEQ ID NO: 2436700 - RNA, 19 nt, Artificial Sequence
  Description of Artificial Sequence: Synthetic oligonucleotide
  Sense strand starting at position 2368 of SEQ ID NO: 1886936
ugaauuaguuguucuggag

SEQ ID NO: 2436701 - RNA, 19 nt, Artificial Sequence
  Description of Artificial Sequence: Synthetic oligonucleotide
  Antisense strand to SEQ ID NO: 2436700
cuccagaacaacuaauuca

SEQ ID NO: 2436702 - RNA, 19 nt, Artificial Sequence
  Description of Artificial Sequence: Synthetic oligonucleotide
  Sense strand starting at position 2376 of SEQ ID NO: 1886936
uuguucuggagucagguaa

SEQ ID NO: 2436703 - RNA, 19 nt, Artificial Sequence
  Description of Artificial Sequence: Synthetic oligonucleotide
  Antisense strand to SEQ ID NO: 2436702
uuaccugacuccagaacaa

SEQ ID NO: 2436704 - RNA, 19 nt, Artificial Sequence
  Description of Artificial Sequence: Synthetic oligonucleotide
  Sense strand starting at position 2588 of SEQ ID NO: 1886936
ucaagugagccucacuacu

SEQ ID NO: 2436705 - RNA, 19 nt, Artificial Sequence
  Description of Artificial Sequence: Synthetic oligonucleotide
  Antisense strand to SEQ ID NO: 2436704
aguagugaggcucacuuga

SEQ ID NO: 2436706 - RNA, 19 nt, Artificial Sequence
  Description of Artificial Sequence: Synthetic oligonucleotide
  Sense strand starting at position 2649 of SEQ ID NO: 1886936
gcucacacuggcuauaaua

SEQ ID NO: 2436707 - RNA, 19 nt, Artificial Sequence
  Description of Artificial Sequence: Synthetic oligonucleotide
  Antisense strand to SEQ ID NO: 2436706
uauuauagccagugugagc

SEQ ID NO: 2436708 - RNA, 19 nt, Artificial Sequence
  Description of Artificial Sequence: Synthetic oligonucleotide
  Sense strand starting at position 2704 of SEQ ID NO: 1886936
cuaauccaguguuuaacau

SEQ ID NO: 2436709 - RNA, 19 nt, Artificial Sequence
  Description of Artificial Sequence: Synthetic oligonucleotide
  Antisense strand to SEQ ID NO: 2436708
auguuaaacacuggauuag

SEQ ID NO: 2436710 - RNA, 19 nt, Artificial Sequence
  Description of Artificial Sequence: Synthetic oligonucleotide
  Sense strand starting at position 2733 of SEQ ID NO: 1886936
gugguuuagucauuugagu

SEQ ID NO: 2436711 - RNA, 19 nt, Artificial Sequence
  Description of Artificial Sequence: Synthetic oligonucleotide
  Antisense strand to SEQ ID NO: 2436710
acucaaaugacuaaaccac

SEQ ID NO: 2436712 - RNA, 19 nt, Artificial Sequence
  Description of Artificial Sequence: Synthetic oligonucleotide
  Sense strand starting at position 2735 of SEQ ID NO: 1886936
gguuuagucauuugaguua

SEQ ID NO: 2436713 - RNA, 19 nt, Artificial Sequence
  Description of Artificial Sequence: Synthetic oligonucleotide
  Antisense strand to SEQ ID NO: 2436712
uaacucaaaugacuaaacc

SEQ ID NO: 2436714 - RNA, 19 nt, Artificial Sequence
  Description of Artificial Sequence: Synthetic oligonucleotide
  Sense strand starting at position 2812 of SEQ ID NO: 1886936
gcaacagcuaugcagagau

SEQ ID NO: 2436715 - RNA, 19 nt, Artificial Sequence
  Description of Artificial Sequence: Synthetic oligonucleotide
  Antisense strand to SEQ ID NO: 2436714
aucucugcauagcuguugc

SEQ ID NO: 2436716 - RNA, 19 nt, Artificial Sequence
  Description of Artificial Sequence: Synthetic oligonucleotide
  Sense strand starting at position 2822 of SEQ ID NO: 1886936
ugcagagauguuugaaaca

SEQ ID NO: 2436717 - RNA, 19 nt, Artificial Sequence
  Description of Artificial Sequence: Synthetic oligonucleotide
  Antisense strand to SEQ ID NO: 2436716
uguuucaaacaucucugca

SEQ ID NO: 2436718 - RNA, 19 nt, Artificial Sequence
  Description of Artificial Sequence: Synthetic oligonucleotide
  Sense strand starting at position 3229 of SEQ ID NO: 1886936
gaaggaagauccuugcuaa

SEQ ID NO: 2436719 - RNA, 19 nt, Artificial Sequence
  Description of Artificial Sequence: Synthetic oligonucleotide
  Antisense strand to SEQ ID NO: 2436718
uuagcaaggaucuuccuuc

SEQ ID NO: 2436720 - RNA, 19 nt, Artificial Sequence
  Description of Artificial Sequence: Synthetic oligonucleotide
  Sense strand starting at position 3230 of SEQ ID NO: 1886936
aaggaagauccuugcuaag

SEQ ID NO: 2436721 - RNA, 19 nt, Artificial Sequence
  Description of Artificial Sequence: Synthetic oligonucleotide
  Antisense strand to SEQ ID NO: 2436720
cuuagcaaggaucuuccuu

SEQ ID NO: 2436722 - RNA, 19 nt, Artificial Sequence
  Description of Artificial Sequence: Synthetic oligonucleotide
  Sense strand starting at position 3232 of SEQ ID NO: 1886936
ggaagauccuugcuaagaa

SEQ ID NO: 2436723 - RNA, 19 nt, Artificial Sequence
  Description of Artificial Sequence: Synthetic oligonucleotide
  Antisense strand to SEQ ID NO: 2436722
uucuuagcaaggaucuucc

SEQ ID NO: 2436724 - RNA, 19 nt, Artificial Sequence
  Description of Artificial Sequence: Synthetic oligonucleotide
  Sense strand starting at position 3710 of SEQ ID NO: 1886936
gggcaaccaccauaauagu

SEQ ID NO: 2436725 - RNA, 19 nt, Artificial Sequence
  Description of Artificial Sequence: Synthetic oligonucleotide
  Antisense strand to SEQ ID NO: 2436724
acuauuauggugguugccc

SEQ ID NO: 2436726 - RNA, 19 nt, Artificial Sequence
  Description of Artificial Sequence: Synthetic oligonucleotide
  Sense strand starting at position 3744 of SEQ ID NO: 1886936
gaacuaucaguggaugcua

SEQ ID NO: 2436727 - RNA, 19 nt, Artificial Sequence
  Description of Artificial Sequence: Synthetic oligonucleotide
  Antisense strand to SEQ ID NO: 2436726
uagcauccacugauaguuc

SEQ ID NO: 2436728 - RNA, 19 nt, Artificial Sequence
  Description of Artificial Sequence: Synthetic oligonucleotide
  Sense strand starting at position 3746 of SEQ ID NO: 1886936
acuaucaguggaugcuaaa

SEQ ID NO: 2436729 - RNA, 19 nt, Artificial Sequence
  Description of Artificial Sequence: Synthetic oligonucleotide
  Antisense strand to SEQ ID NO: 2436728
uuuagcauccacugauagu

SEQ ID NO: 2436730 - RNA, 19 nt, Artificial Sequence
  Description of Artificial Sequence: Synthetic oligonucleotide
  Sense strand starting at position 3821 of SEQ ID NO: 1886936
cccacaagauacguauuaa

SEQ ID NO: 2436731 - RNA, 19 nt, Artificial Sequence
  Description of Artificial Sequence: Synthetic oligonucleotide
  Antisense strand to SEQ ID NO: 2436730
uuaauacguaucuuguggg

SEQ ID NO: 2436732 - RNA, 19 nt, Artificial Sequence
  Description of Artificial Sequence: Synthetic oligonucleotide
  Sense strand starting at position 271 of SEQ ID NO: 1886937
uaaagcagaugagucuaua

SEQ ID NO: 2436733 - RNA, 19 nt, Artificial Sequence
  Description of Artificial Sequence: Synthetic oligonucleotide
  Antisense strand to SEQ ID NO: 2436732
uauagacucaucugcuuua

SEQ ID NO: 2436734 - RNA, 19 nt, Artificial Sequence
  Description of Artificial Sequence: Synthetic oligonucleotide
  Sense strand starting at position 367 of SEQ ID NO: 1886937
uuguucuuaugacugauau

SEQ ID NO: 2436735 - RNA, 19 nt, Artificial Sequence
  Description of Artificial Sequence: Synthetic oligonucleotide
  Antisense strand to SEQ ID NO: 2436734
auaucagucauaagaacaa

SEQ ID NO: 2436736 - RNA, 19 nt, Artificial Sequence
  Description of Artificial Sequence: Synthetic oligonucleotide
  Sense strand starting at position 368 of SEQ ID NO: 1886937
uguucuuaugacugauauc

SEQ ID NO: 2436737 - RNA, 19 nt, Artificial Sequence
  Description of Artificial Sequence: Synthetic oligonucleotide
  Antisense strand to SEQ ID NO: 2436736
gauaucagucauaagaaca

SEQ ID NO: 2436738 - RNA, 19 nt, Artificial Sequence
  Description of Artificial Sequence: Synthetic oligonucleotide
  Sense strand starting at position 403 of SEQ ID NO: 1886937
ugacaauaguggguaguga

SEQ ID NO: 2436739 - RNA, 19 nt, Artificial Sequence
  Description of Artificial Sequence: Synthetic oligonucleotide
  Antisense strand to SEQ ID NO: 2436738
ucacuacccacuauuguca

SEQ ID NO: 2436740 - RNA, 19 nt, Artificial Sequence
  Description of Artificial Sequence: Synthetic oligonucleotide
  Sense strand starting at position 463 of SEQ ID NO: 1886937
uugucaacugguuaggaga

SEQ ID NO: 2436741 - RNA, 19 nt, Artificial Sequence
  Description of Artificial Sequence: Synthetic oligonucleotide
  Antisense strand to SEQ ID NO: 2436740
ucuccuaaccaguugacaa

SEQ ID NO: 2436742 - RNA, 19 nt, Artificial Sequence
  Description of Artificial Sequence: Synthetic oligonucleotide
  Sense strand starting at position 486 of SEQ ID NO: 1886937
ggauaacuuucucuucuga

SEQ ID NO: 2436743 - RNA, 19 nt, Artificial Sequence
  Description of Artificial Sequence: Synthetic oligonucleotide
  Antisense strand to SEQ ID NO: 2436742
ucagaagagaaaguuaucc

SEQ ID NO: 2436744 - RNA, 19 nt, Artificial Sequence
  Description of Artificial Sequence: Synthetic oligonucleotide
  Sense strand starting at position 540 of SEQ ID NO: 1886937
guuuaaucagcagacauca

SEQ ID NO: 2436745 - RNA, 19 nt, Artificial Sequence
  Description of Artificial Sequence: Synthetic oligonucleotide
  Antisense strand to SEQ ID NO: 2436744
ugaugucugcugauuaaac

SEQ ID NO: 2436746 - RNA, 19 nt, Artificial Sequence
  Description of Artificial Sequence: Synthetic oligonucleotide
  Sense strand starting at position 553 of SEQ ID NO: 1886937
acaucagacuugguuggaa

SEQ ID NO: 2436747 - RNA, 19 nt, Artificial Sequence
  Description of Artificial Sequence: Synthetic oligonucleotide
  Antisense strand to SEQ ID NO: 2436746
uuccaaccaagucugaugu

SEQ ID NO: 2436748 - RNA, 19 nt, Artificial Sequence
  Description of Artificial Sequence: Synthetic oligonucleotide
  Sense strand starting at position 555 of SEQ ID NO: 1886937
aucagacuugguuggaauc

SEQ ID NO: 2436749 - RNA, 19 nt, Artificial Sequence
  Description of Artificial Sequence: Synthetic oligonucleotide
  Antisense strand to SEQ ID NO: 2436748
gauuccaaccaagucugau

SEQ ID NO: 2436750 - RNA, 19 nt, Artificial Sequence
  Description of Artificial Sequence: Synthetic oligonucleotide
  Sense strand starting at position 556 of SEQ ID NO: 1886937
ucagacuugguuggaauca

SEQ ID NO: 2436751 - RNA, 19 nt, Artificial Sequence
  Description of Artificial Sequence: Synthetic oligonucleotide
  Antisense strand to SEQ ID NO: 2436750
ugauuccaaccaagucuga

SEQ ID NO: 2436752 - RNA, 19 nt, Artificial Sequence
  Description of Artificial Sequence: Synthetic oligonucleotide
  Sense strand starting at position 582 of SEQ ID NO: 1886937
gguaguaacagucaagcaa

SEQ ID NO: 2436753 - RNA, 19 nt, Artificial Sequence
  Description of Artificial Sequence: Synthetic oligonucleotide
  Antisense strand to SEQ ID NO: 2436752
uugcuugacuguuacuacc

SEQ ID NO: 2436754 - RNA, 19 nt, Artificial Sequence
  Description of Artificial Sequence: Synthetic oligonucleotide
  Sense strand starting at position 828 of SEQ ID NO: 1886937
aggagaaauuggcuuggca

SEQ ID NO: 2436755 - RNA, 19 nt, Artificial Sequence
  Description of Artificial Sequence: Synthetic oligonucleotide
  Antisense strand to SEQ ID NO: 2436754
ugccaagccaauuucuccu

SEQ ID NO: 2436756 - RNA, 19 nt, Artificial Sequence
  Description of Artificial Sequence: Synthetic oligonucleotide
  Sense strand starting at position 905 of SEQ ID NO: 1886937
gcaaucugacaguggaaua

SEQ ID NO: 2436757 - RNA, 19 nt, Artificial Sequence
  Description of Artificial Sequence: Synthetic oligonucleotide
  Antisense strand to SEQ ID NO: 2436756
uauuccacugucagauugc

SEQ ID NO: 2436758 - RNA, 19 nt, Artificial Sequence
  Description of Artificial Sequence: Synthetic oligonucleotide
  Sense strand starting at position 1198 of SEQ ID NO: 1886937
aagggaaaucagugugagu

SEQ ID NO: 2436759 - RNA, 19 nt, Artificial Sequence
  Description of Artificial Sequence: Synthetic oligonucleotide
  Antisense strand to SEQ ID NO: 2436758
acucacacugauuucccuu

SEQ ID NO: 2436760 - RNA, 19 nt, Artificial Sequence
  Description of Artificial Sequence: Synthetic oligonucleotide
  Sense strand starting at position 1346 of SEQ ID NO: 1886937
uggacaguccuuuagcauu

SEQ ID NO: 2436761 - RNA, 19 nt, Artificial Sequence
  Description of Artificial Sequence: Synthetic oligonucleotide
  Antisense strand to SEQ ID NO: 2436760
aaugcuaaaggacugucca

SEQ ID NO: 2436762 - RNA, 19 nt, Artificial Sequence
  Description of Artificial Sequence: Synthetic oligonucleotide
  Sense strand starting at position 1410 of SEQ ID NO: 1886937
caccaagagccaugaguaa

SEQ ID NO: 2436763 - RNA, 19 nt, Artificial Sequence
  Description of Artificial Sequence: Synthetic oligonucleotide
  Antisense strand to SEQ ID NO: 2436762
uuacucauggcucuuggug

SEQ ID NO: 2436764 - RNA, 19 nt, Artificial Sequence
  Description of Artificial Sequence: Synthetic oligonucleotide
  Sense strand starting at position 1437 of SEQ ID NO: 1886937
uguagccuucuacaaggau

SEQ ID NO: 2436765 - RNA, 19 nt, Artificial Sequence
  Description of Artificial Sequence: Synthetic oligonucleotide
  Antisense strand to SEQ ID NO: 2436764
auccuuguagaaggcuaca

SEQ ID NO: 2436766 - RNA, 19 nt, Artificial Sequence
  Description of Artificial Sequence: Synthetic oligonucleotide
  Sense strand starting at position 1569 of SEQ ID NO: 1886937
guauuugauucugugcaaa

SEQ ID NO: 2436767 - RNA, 19 nt, Artificial Sequence
  Description of Artificial Sequence: Synthetic oligonucleotide
  Antisense strand to SEQ ID NO: 2436766
uuugcacagaaucaaauac

SEQ ID NO: 2436768 - RNA, 19 nt, Artificial Sequence
  Description of Artificial Sequence: Synthetic oligonucleotide
  Sense strand starting at position 1652 of SEQ ID NO: 1886937
augcuaauacauuggaaac

SEQ ID NO: 2436769 - RNA, 19 nt, Artificial Sequence
  Description of Artificial Sequence: Synthetic oligonucleotide
  Antisense strand to SEQ ID NO: 2436768
guuuccaauguauuagcau

SEQ ID NO: 2436770 - RNA, 19 nt, Artificial Sequence
  Description of Artificial Sequence: Synthetic oligonucleotide
  Sense strand starting at position 1760 of SEQ ID NO: 1886937
cucugaagauucccgggau

SEQ ID NO: 2436771 - RNA, 19 nt, Artificial Sequence
  Description of Artificial Sequence: Synthetic oligonucleotide
  Antisense strand to SEQ ID NO: 2436770
aucccgggaaucuucagag

SEQ ID NO: 2436772 - RNA, 19 nt, Artificial Sequence
  Description of Artificial Sequence: Synthetic oligonucleotide
  Sense strand starting at position 1763 of SEQ ID NO: 1886937
ugaagauucccgggaucca

SEQ ID NO: 2436773 - RNA, 19 nt, Artificial Sequence
  Description of Artificial Sequence: Synthetic oligonucleotide
  Antisense strand to SEQ ID NO: 2436772
uggaucccgggaaucuuca

SEQ ID NO: 2436774 - RNA, 19 nt, Artificial Sequence
  Description of Artificial Sequence: Synthetic oligonucleotide
  Sense strand starting at position 2043 of SEQ ID NO: 1886937
gugugcuaucugcugacuu

SEQ ID NO: 2436775 - RNA, 19 nt, Artificial Sequence
  Description of Artificial Sequence: Synthetic oligonucleotide
  Antisense strand to SEQ ID NO: 2436774
aagucagcagauagcacac

SEQ ID NO: 2436776 - RNA, 19 nt, Artificial Sequence
  Description of Artificial Sequence: Synthetic oligonucleotide
  Sense strand starting at position 2273 of SEQ ID NO: 1886937
gugauuccucugcagaauc

SEQ ID NO: 2436777 - RNA, 19 nt, Artificial Sequence
  Description of Artificial Sequence: Synthetic oligonucleotide
  Antisense strand to SEQ ID NO: 2436776
gauucugcagaggaaucac

SEQ ID NO: 2436778 - RNA, 19 nt, Artificial Sequence
  Description of Artificial Sequence: Synthetic oligonucleotide
  Sense strand starting at position 2364 of SEQ ID NO: 1886937
agcugaaguucucuuagaa

SEQ ID NO: 2436779 - RNA, 19 nt, Artificial Sequence
  Description of Artificial Sequence: Synthetic oligonucleotide
  Antisense strand to SEQ ID NO: 2436778
uucuaagagaacuucagcu

SEQ ID NO: 2436780 - RNA, 19 nt, Artificial Sequence
  Description of Artificial Sequence: Synthetic oligonucleotide
  Sense strand starting at position 2405 of SEQ ID NO: 1886937
ugaguaccacaucaguauu

SEQ ID NO: 2436781 - RNA, 19 nt, Artificial Sequence
  Description of Artificial Sequence: Synthetic oligonucleotide
  Antisense strand to SEQ ID NO: 2436780
aauacugaugugguacuca

SEQ ID NO: 2436782 - RNA, 19 nt, Artificial Sequence
  Description of Artificial Sequence: Synthetic oligonucleotide
  Sense strand starting at position 2586 of SEQ ID NO: 1886937
ugaauauaacuguggguau

SEQ ID NO: 2436783 - RNA, 19 nt, Artificial Sequence
  Description of Artificial Sequence: Synthetic oligonucleotide
  Antisense strand to SEQ ID NO: 2436782
auacccacaguuauauuca

SEQ ID NO: 2436784 - RNA, 19 nt, Artificial Sequence
  Description of Artificial Sequence: Synthetic oligonucleotide
  Sense strand starting at position 2588 of SEQ ID NO: 1886937
aauauaacuguggguauca

SEQ ID NO: 2436785 - RNA, 19 nt, Artificial Sequence
  Description of Artificial Sequence: Synthetic oligonucleotide
  Antisense strand to SEQ ID NO: 2436784
ugauacccacaguuauauu

SEQ ID NO: 2436786 - RNA, 19 nt, Artificial Sequence
  Description of Artificial Sequence: Synthetic oligonucleotide
  Sense strand starting at position 2589 of SEQ ID NO: 1886937
auauaacuguggguaucaa

SEQ ID NO: 2436787 - RNA, 19 nt, Artificial Sequence
  Description of Artificial Sequence: Synthetic oligonucleotide
  Antisense strand to SEQ ID NO: 2436786
uugauacccacaguuauau

SEQ ID NO: 2436788 - RNA, 19 nt, Artificial Sequence
  Description of Artificial Sequence: Synthetic oligonucleotide
  Sense strand starting at position 2590 of SEQ ID NO: 1886937
uauaacuguggguaucaau

SEQ ID NO: 2436789 - RNA, 19 nt, Artificial Sequence
  Description of Artificial Sequence: Synthetic oligonucleotide
  Antisense strand to SEQ ID NO: 2436788
auugauacccacaguuaua

SEQ ID NO: 2436790 - RNA, 19 nt, Artificial Sequence
  Description of Artificial Sequence: Synthetic oligonucleotide
  Sense strand starting at position 2616 of SEQ ID NO: 1886937
ccuuuaaacucagugaggu

SEQ ID NO: 2436791 - RNA, 19 nt, Artificial Sequence
  Description of Artificial Sequence: Synthetic oligonucleotide
  Antisense strand to SEQ ID NO: 2436790
accucacugaguuuaaagg

SEQ ID NO: 2436792 - RNA, 19 nt, Artificial Sequence
  Description of Artificial Sequence: Synthetic oligonucleotide
  Sense strand starting at position 2617 of SEQ ID NO: 1886937
cuuuaaacucagugaggua

SEQ ID NO: 2436793 - RNA, 19 nt, Artificial Sequence
  Description of Artificial Sequence: Synthetic oligonucleotide
  Antisense strand to SEQ ID NO: 2436792
uaccucacugaguuuaaag

SEQ ID NO: 2436794 - RNA, 19 nt, Artificial Sequence
  Description of Artificial Sequence: Synthetic oligonucleotide
  Sense strand starting at position 2952 of SEQ ID NO: 1886937
cuaugagauucccugaagc

SEQ ID NO: 2436795 - RNA, 19 nt, Artificial Sequence
  Description of Artificial Sequence: Synthetic oligonucleotide
  Antisense strand to SEQ ID NO: 2436794
gcuucagggaaucucauag

SEQ ID NO: 2436796 - RNA, 19 nt, Artificial Sequence
  Description of Artificial Sequence: Synthetic oligonucleotide
  Sense strand starting at position 3029 of SEQ ID NO: 1886937
uaacucgagagguguugaa

SEQ ID NO: 2436797 - RNA, 19 nt, Artificial Sequence
  Description of Artificial Sequence: Synthetic oligonucleotide
  Antisense strand to SEQ ID NO: 2436796
uucaacaccucucgaguua

SEQ ID NO: 2436798 - RNA, 19 nt, Artificial Sequence
  Description of Artificial Sequence: Synthetic oligonucleotide
  Sense strand starting at position 3033 of SEQ ID NO: 1886937
ucgagagguguugaaucca

SEQ ID NO: 2436799 - RNA, 19 nt, Artificial Sequence
  Description of Artificial Sequence: Synthetic oligonucleotide
  Antisense strand to SEQ ID NO: 2436798
uggauucaacaccucucga

SEQ ID NO: 2436800 - RNA, 19 nt, Artificial Sequence
  Description of Artificial Sequence: Synthetic oligonucleotide
  Sense strand starting at position 3157 of SEQ ID NO: 1886937
gggagucaugucugcauuu

SEQ ID NO: 2436801 - RNA, 19 nt, Artificial Sequence
  Description of Artificial Sequence: Synthetic oligonucleotide
  Antisense strand to SEQ ID NO: 2436800
aaaugcagacaugacuccc

SEQ ID NO: 2436802 - RNA, 19 nt, Artificial Sequence
  Description of Artificial Sequence: Synthetic oligonucleotide
  Sense strand starting at position 3158 of SEQ ID NO: 1886937
ggagucaugucugcauuug

SEQ ID NO: 2436803 - RNA, 19 nt, Artificial Sequence
  Description of Artificial Sequence: Synthetic oligonucleotide
  Antisense strand to SEQ ID NO: 2436802
caaaugcagacaugacucc

SEQ ID NO: 2436804 - RNA, 19 nt, Artificial Sequence
  Description of Artificial Sequence: Synthetic oligonucleotide
  Sense strand starting at position 3263 of SEQ ID NO: 1886937
acuucuaucuugguagaau

SEQ ID NO: 2436805 - RNA, 19 nt, Artificial Sequence
  Description of Artificial Sequence: Synthetic oligonucleotide
  Antisense strand to SEQ ID NO: 2436804
auucuaccaagauagaagu

SEQ ID NO: 2436806 - RNA, 19 nt, Artificial Sequence
  Description of Artificial Sequence: Synthetic oligonucleotide
  Sense strand starting at position 3292 of SEQ ID NO: 1886937
guuagagaguuagcauaaa

SEQ ID NO: 2436807 - RNA, 19 nt, Artificial Sequence
  Description of Artificial Sequence: Synthetic oligonucleotide
  Antisense strand to SEQ ID NO: 2436806
uuuaugcuaacucucuaac

SEQ ID NO: 2436808 - RNA, 19 nt, Artificial Sequence
  Description of Artificial Sequence: Synthetic oligonucleotide
  Sense strand starting at position 3344 of SEQ ID NO: 1886937
auaaguauccaaugguuac

SEQ ID NO: 2436809 - RNA, 19 nt, Artificial Sequence
  Description of Artificial Sequence: Synthetic oligonucleotide
  Antisense strand to SEQ ID NO: 2436808
guaaccauuggauacuuau

SEQ ID NO: 2436810 - RNA, 19 nt, Artificial Sequence
  Description of Artificial Sequence: Synthetic oligonucleotide
  Sense strand starting at position 3526 of SEQ ID NO: 1886937
auugauucugaguagccuu

SEQ ID NO: 2436811 - RNA, 19 nt, Artificial Sequence
  Description of Artificial Sequence: Synthetic oligonucleotide
  Antisense strand to SEQ ID NO: 2436810
aaggcuacucagaaucaau

SEQ ID NO: 2436812 - RNA, 19 nt, Artificial Sequence
  Description of Artificial Sequence: Synthetic oligonucleotide
  Sense strand starting at position 36 of SEQ ID NO: 1886938
accuguuugucaucaaauc

SEQ ID NO: 2436813 - RNA, 19 nt, Artificial Sequence
  Description of Artificial Sequence: Synthetic oligonucleotide
  Antisense strand to SEQ ID NO: 2436812
gauuugaugacaaacaggu

SEQ ID NO: 2436814 - RNA, 19 nt, Artificial Sequence
  Description of Artificial Sequence: Synthetic oligonucleotide
  Sense strand starting at position 37 of SEQ ID NO: 1886938
ccuguuugucaucaaaucu

SEQ ID NO: 2436815 - RNA, 19 nt, Artificial Sequence
  Description of Artificial Sequence: Synthetic oligonucleotide
  Antisense strand to SEQ ID NO: 2436814
agauuugaugacaaacagg

SEQ ID NO: 2436816 - RNA, 19 nt, Artificial Sequence
  Description of Artificial Sequence: Synthetic oligonucleotide
  Sense strand starting at position 222 of SEQ ID NO: 1886938
aucucuggaucuuugacau

SEQ ID NO: 2436817 - RNA, 19 nt, Artificial Sequence
  Description of Artificial Sequence: Synthetic oligonucleotide
  Antisense strand to SEQ ID NO: 2436816
augucaaagauccagagau

SEQ ID NO: 2436818 - RNA, 19 nt, Artificial Sequence
  Description of Artificial Sequence: Synthetic oligonucleotide
  Sense strand starting at position 844 of SEQ ID NO: 1886938
cacucucagguuugaugau

SEQ ID NO: 2436819 - RNA, 19 nt, Artificial Sequence
  Description of Artificial Sequence: Synthetic oligonucleotide
  Antisense strand to SEQ ID NO: 2436818
aucaucaaaccugagagug

SEQ ID NO: 2436820 - RNA, 19 nt, Artificial Sequence
  Description of Artificial Sequence: Synthetic oligonucleotide
  Sense strand starting at position 1030 of SEQ ID NO: 1886938
ggugaacuuccaggaguuc

SEQ ID NO: 2436821 - RNA, 19 nt, Artificial Sequence
  Description of Artificial Sequence: Synthetic oligonucleotide
  Antisense strand to SEQ ID NO: 2436820
gaacuccuggaaguucacc

SEQ ID NO: 2436822 - RNA, 19 nt, Artificial Sequence
  Description of Artificial Sequence: Synthetic oligonucleotide
  Sense strand starting at position 1031 of SEQ ID NO: 1886938
gugaacuuccaggaguucu

SEQ ID NO: 2436823 - RNA, 19 nt, Artificial Sequence
  Description of Artificial Sequence: Synthetic oligonucleotide
  Antisense strand to SEQ ID NO: 2436822
agaacuccuggaaguucac

SEQ ID NO: 2436824 - RNA, 19 nt, Artificial Sequence
  Description of Artificial Sequence: Synthetic oligonucleotide
  Sense strand starting at position 1051 of SEQ ID NO: 1886938
ugcggagucacauggacaa

SEQ ID NO: 2436825 - RNA, 19 nt, Artificial Sequence
  Description of Artificial Sequence: Synthetic oligonucleotide
  Antisense strand to SEQ ID NO: 2436824
uuguccaugugacuccgca

SEQ ID NO: 2436826 - RNA, 19 nt, Artificial Sequence
  Description of Artificial Sequence: Synthetic oligonucleotide
  Sense strand starting at position 1084 of SEQ ID NO: 1886938
agcaacaacgugugacaau

SEQ ID NO: 2436827 - RNA, 19 nt, Artificial Sequence
  Description of Artificial Sequence: Synthetic oligonucleotide
  Antisense strand to SEQ ID NO: 2436826
auugucacacguuguugcu

SEQ ID NO: 2436828 - RNA, 19 nt, Artificial Sequence
  Description of Artificial Sequence: Synthetic oligonucleotide
  Sense strand starting at position 1126 of SEQ ID NO: 1886938
gaggaaagcuuacccaagu

SEQ ID NO: 2436829 - RNA, 19 nt, Artificial Sequence
  Description of Artificial Sequence: Synthetic oligonucleotide
  Antisense strand to SEQ ID NO: 2436828
acuuggguaagcuuuccuc

SEQ ID NO: 2436830 - RNA, 19 nt, Artificial Sequence
  Description of Artificial Sequence: Synthetic oligonucleotide
  Sense strand starting at position 1160 of SEQ ID NO: 1886938
uuuauuggaggucagucau

SEQ ID NO: 2436831 - RNA, 19 nt, Artificial Sequence
  Description of Artificial Sequence: Synthetic oligonucleotide
  Antisense strand to SEQ ID NO: 2436830
augacugaccuccaauaaa

SEQ ID NO: 2436832 - RNA, 19 nt, Artificial Sequence
  Description of Artificial Sequence: Synthetic oligonucleotide
  Sense strand starting at position 1168 of SEQ ID NO: 1886938
aggucagucauauaggcau

SEQ ID NO: 2436833 - RNA, 19 nt, Artificial Sequence
  Description of Artificial Sequence: Synthetic oligonucleotide
  Antisense strand to SEQ ID NO: 2436832
augccuauaugacugaccu

SEQ ID NO: 2436834 - RNA, 19 nt, Artificial Sequence
  Description of Artificial Sequence: Synthetic oligonucleotide
  Sense strand starting at position 1174 of SEQ ID NO: 1886938
gucauauaggcauggagca

SEQ ID NO: 2436835 - RNA, 19 nt, Artificial Sequence
  Description of Artificial Sequence: Synthetic oligonucleotide
  Antisense strand to SEQ ID NO: 2436834
ugcuccaugccuauaugac

SEQ ID NO: 2436836 - RNA, 19 nt, Artificial Sequence
  Description of Artificial Sequence: Synthetic oligonucleotide
  Sense strand starting at position 1453 of SEQ ID NO: 1886938
ccuaguuccaccgagguaa

SEQ ID NO: 2436837 - RNA, 19 nt, Artificial Sequence
  Description of Artificial Sequence: Synthetic oligonucleotide
  Antisense strand to SEQ ID NO: 2436836
uuaccucgguggaacuagg

SEQ ID NO: 2436838 - RNA, 19 nt, Artificial Sequence
  Description of Artificial Sequence: Synthetic oligonucleotide
  Sense strand starting at position 1524 of SEQ ID NO: 1886938
gggaguuucuacuccacuc

SEQ ID NO: 2436839 - RNA, 19 nt, Artificial Sequence
  Description of Artificial Sequence: Synthetic oligonucleotide
  Antisense strand to SEQ ID NO: 2436838
gaguggaguagaaacuccc

SEQ ID NO: 2436840 - RNA, 19 nt, Artificial Sequence
  Description of Artificial Sequence: Synthetic oligonucleotide
  Sense strand starting at position 1587 of SEQ ID NO: 1886938
ccgacugacuuaccugauu

SEQ ID NO: 2436841 - RNA, 19 nt, Artificial Sequence
  Description of Artificial Sequence: Synthetic oligonucleotide
  Antisense strand to SEQ ID NO: 2436840
aaucagguaagucagucgg

SEQ ID NO: 2436842 - RNA, 19 nt, Artificial Sequence
  Description of Artificial Sequence: Synthetic oligonucleotide
  Sense strand starting at position 1592 of SEQ ID NO: 1886938
ugacuuaccugauugugga

SEQ ID NO: 2436843 - RNA, 19 nt, Artificial Sequence
  Description of Artificial Sequence: Synthetic oligonucleotide
  Antisense strand to SEQ ID NO: 2436842
uccacaaucagguaaguca

SEQ ID NO: 2436844 - RNA, 19 nt, Artificial Sequence
  Description of Artificial Sequence: Synthetic oligonucleotide
  Sense strand starting at position 2061 of SEQ ID NO: 1886938
ccacaugggccugaggauu

SEQ ID NO: 2436845 - RNA, 19 nt, Artificial Sequence
  Description of Artificial Sequence: Synthetic oligonucleotide
  Antisense strand to SEQ ID NO: 2436844
aauccucaggcccaugugg

SEQ ID NO: 2436846 - RNA, 19 nt, Artificial Sequence
  Description of Artificial Sequence: Synthetic oligonucleotide
  Sense strand starting at position 2115 of SEQ ID NO: 1886938
acuaacaugucugugacaa

SEQ ID NO: 2436847 - RNA, 19 nt, Artificial Sequence
  Description of Artificial Sequence: Synthetic oligonucleotide
  Antisense strand to SEQ ID NO: 2436846
uugucacagacauguuagu

SEQ ID NO: 2436848 - RNA, 19 nt, Artificial Sequence
  Description of Artificial Sequence: Synthetic oligonucleotide
  Sense strand starting at position 2116 of SEQ ID NO: 1886938
cuaacaugucugugacaag

SEQ ID NO: 2436849 - RNA, 19 nt, Artificial Sequence
  Description of Artificial Sequence: Synthetic oligonucleotide
  Antisense strand to SEQ ID NO: 2436848
cuugucacagacauguuag

SEQ ID NO: 2436850 - RNA, 19 nt, Artificial Sequence
  Description of Artificial Sequence: Synthetic oligonucleotide
  Sense strand starting at position 2123 of SEQ ID NO: 1886938
gucugugacaaguggaauu

SEQ ID NO: 2436851 - RNA, 19 nt, Artificial Sequence
  Description of Artificial Sequence: Synthetic oligonucleotide
  Antisense strand to SEQ ID NO: 2436850
aauuccacuugucacagac

SEQ ID NO: 2436852 - RNA, 19 nt, Artificial Sequence
  Description of Artificial Sequence: Synthetic oligonucleotide
  Sense strand starting at position 2157 of SEQ ID NO: 1886938
agcuguagcccauauccau

SEQ ID NO: 2436853 - RNA, 19 nt, Artificial Sequence
  Description of Artificial Sequence: Synthetic oligonucleotide
  Antisense strand to SEQ ID NO: 2436852
auggauaugggcuacagcu

SEQ ID NO: 2436854 - RNA, 19 nt, Artificial Sequence
  Description of Artificial Sequence: Synthetic oligonucleotide
  Sense strand starting at position 2230 of SEQ ID NO: 1886938
uuggcagaggcucaauguu

SEQ ID NO: 2436855 - RNA, 19 nt, Artificial Sequence
  Description of Artificial Sequence: Synthetic oligonucleotide
  Antisense strand to SEQ ID NO: 2436854
aacauugagccucugccaa

SEQ ID NO: 2436856 - RNA, 19 nt, Artificial Sequence
  Description of Artificial Sequence: Synthetic oligonucleotide
  Sense strand starting at position 2260 of SEQ ID NO: 1886938
aggcuacagacucguaauu

SEQ ID NO: 2436857 - RNA, 19 nt, Artificial Sequence
  Description of Artificial Sequence: Synthetic oligonucleotide
  Antisense strand to SEQ ID NO: 2436856
aauuacgagucuguagccu

SEQ ID NO: 2436858 - RNA, 19 nt, Artificial Sequence
  Description of Artificial Sequence: Synthetic oligonucleotide
  Sense strand starting at position 2287 of SEQ ID NO: 1886938
agacuuugcuguuuauaag

SEQ ID NO: 2436859 - RNA, 19 nt, Artificial Sequence
  Description of Artificial Sequence: Synthetic oligonucleotide
  Antisense strand to SEQ ID NO: 2436858
cuuauaaacagcaaagucu

SEQ ID NO: 2436860 - RNA, 19 nt, Artificial Sequence
  Description of Artificial Sequence: Synthetic oligonucleotide
  Sense strand starting at position 2288 of SEQ ID NO: 1886938
gacuuugcuguuuauaaga

SEQ ID NO: 2436861 - RNA, 19 nt, Artificial Sequence
  Description of Artificial Sequence: Synthetic oligonucleotide
  Antisense strand to SEQ ID NO: 2436860
ucuuauaaacagcaaaguc

SEQ ID NO: 2436862 - RNA, 19 nt, Artificial Sequence
  Description of Artificial Sequence: Synthetic oligonucleotide
  Sense strand starting at position 2741 of SEQ ID NO: 1886938
gaaagaaauuugggacuuu

SEQ ID NO: 2436863 - RNA, 19 nt, Artificial Sequence
  Description of Artificial Sequence: Synthetic oligonucleotide
  Antisense strand to SEQ ID NO: 2436862
aaagucccaaauuucuuuc

SEQ ID NO: 2436864 - RNA, 19 nt, Artificial Sequence
  Description of Artificial Sequence: Synthetic oligonucleotide
  Sense strand starting at position 2788 of SEQ ID NO: 1886938
uguaacuggaguugauaau

SEQ ID NO: 2436865 - RNA, 19 nt, Artificial Sequence
  Description of Artificial Sequence: Synthetic oligonucleotide
  Antisense strand to SEQ ID NO: 2436864
auuaucaacuccaguuaca

SEQ ID NO: 2436866 - RNA, 19 nt, Artificial Sequence
  Description of Artificial Sequence: Synthetic oligonucleotide
  Sense strand starting at position 2832 of SEQ ID NO: 1886938
guuggaauagggugacuau

SEQ ID NO: 2436867 - RNA, 19 nt, Artificial Sequence
  Description of Artificial Sequence: Synthetic oligonucleotide
  Antisense strand to SEQ ID NO: 2436866
auagucacccuauuccaac

SEQ ID NO: 2436868 - RNA, 19 nt, Artificial Sequence
  Description of Artificial Sequence: Synthetic oligonucleotide
  Sense strand starting at position 2843 of SEQ ID NO: 1886938
gugacuauacauugcaagu

SEQ ID NO: 2436869 - RNA, 19 nt, Artificial Sequence
  Description of Artificial Sequence: Synthetic oligonucleotide
  Antisense strand to SEQ ID NO: 2436868
acuugcaauguauagucac

SEQ ID NO: 2436870 - RNA, 19 nt, Artificial Sequence
  Description of Artificial Sequence: Synthetic oligonucleotide
  Sense strand starting at position 2894 of SEQ ID NO: 1886938
uagacuauuguggguagau

SEQ ID NO: 2436871 - RNA, 19 nt, Artificial Sequence
  Description of Artificial Sequence: Synthetic oligonucleotide
  Antisense strand to SEQ ID NO: 2436870
aucuacccacaauagucua

SEQ ID NO: 2436872 - RNA, 19 nt, Artificial Sequence
  Description of Artificial Sequence: Synthetic oligonucleotide
  Sense strand starting at position 2895 of SEQ ID NO: 1886938
agacuauuguggguagauu

SEQ ID NO: 2436873 - RNA, 19 nt, Artificial Sequence
  Description of Artificial Sequence: Synthetic oligonucleotide
  Antisense strand to SEQ ID NO: 2436872
aaucuacccacaauagucu

SEQ ID NO: 2436874 - RNA, 19 nt, Artificial Sequence
  Description of Artificial Sequence: Synthetic oligonucleotide
  Sense strand starting at position 2896 of SEQ ID NO: 1886938
gacuauuguggguagauuc

SEQ ID NO: 2436875 - RNA, 19 nt, Artificial Sequence
  Description of Artificial Sequence: Synthetic oligonucleotide
  Antisense strand to SEQ ID NO: 2436874
gaaucuacccacaauaguc

SEQ ID NO: 2436876 - RNA, 19 nt, Artificial Sequence
  Description of Artificial Sequence: Synthetic oligonucleotide
  Sense strand starting at position 2994 of SEQ ID NO: 1886938
aaacuacuccagcggucaa

SEQ ID NO: 2436877 - RNA, 19 nt, Artificial Sequence
  Description of Artificial Sequence: Synthetic oligonucleotide
  Antisense strand to SEQ ID NO: 2436876
uugaccgcuggaguaguuu

SEQ ID NO: 2436878 - RNA, 19 nt, Artificial Sequence
  Description of Artificial Sequence: Synthetic oligonucleotide
  Sense strand starting at position 3012 of SEQ ID NO: 1886938
augugaaaggguugucagu

SEQ ID NO: 2436879 - RNA, 19 nt, Artificial Sequence
  Description of Artificial Sequence: Synthetic oligonucleotide
  Antisense strand to SEQ ID NO: 2436878
acugacaacccuuucacau

SEQ ID NO: 2436880 - RNA, 19 nt, Artificial Sequence
  Description of Artificial Sequence: Synthetic oligonucleotide
  Sense strand starting at position 3155 of SEQ ID NO: 1886938
gucgguauagggugauuua

SEQ ID NO: 2436881 - RNA, 19 nt, Artificial Sequence
  Description of Artificial Sequence: Synthetic oligonucleotide
  Antisense strand to SEQ ID NO: 2436880
uaaaucacccuauaccgac

SEQ ID NO: 2436882 - RNA, 19 nt, Artificial Sequence
  Description of Artificial Sequence: Synthetic oligonucleotide
  Sense strand starting at position 3219 of SEQ ID NO: 1886938
acagguagauccucacguu

SEQ ID NO: 2436883 - RNA, 19 nt, Artificial Sequence
  Description of Artificial Sequence: Synthetic oligonucleotide
  Antisense strand to SEQ ID NO: 2436882
aacgugaggaucuaccugu

SEQ ID NO: 2436884 - RNA, 19 nt, Artificial Sequence
  Description of Artificial Sequence: Synthetic oligonucleotide
  Sense strand starting at position 3274 of SEQ ID NO: 1886938
gaagcauagugcucuggaa

SEQ ID NO: 2436885 - RNA, 19 nt, Artificial Sequence
  Description of Artificial Sequence: Synthetic oligonucleotide
  Antisense strand to SEQ ID NO: 2436884
uuccagagcacuaugcuuc

SEQ ID NO: 2436886 - RNA, 19 nt, Artificial Sequence
  Description of Artificial Sequence: Synthetic oligonucleotide
  Sense strand starting at position 3441 of SEQ ID NO: 1886938
acucaagaguuagucagaa

SEQ ID NO: 2436887 - RNA, 19 nt, Artificial Sequence
  Description of Artificial Sequence: Synthetic oligonucleotide
  Antisense strand to SEQ ID NO: 2436886
uucugacuaacucuugagu

SEQ ID NO: 2436888 - RNA, 19 nt, Artificial Sequence
  Description of Artificial Sequence: Synthetic oligonucleotide
  Sense strand starting at position 3443 of SEQ ID NO: 1886938
ucaagaguuagucagaagu

SEQ ID NO: 2436889 - RNA, 19 nt, Artificial Sequence
  Description of Artificial Sequence: Synthetic oligonucleotide
  Antisense strand to SEQ ID NO: 2436888
acuucugacuaacucuuga

SEQ ID NO: 2436890 - RNA, 19 nt, Artificial Sequence
  Description of Artificial Sequence: Synthetic oligonucleotide
  Sense strand starting at position 3900 of SEQ ID NO: 1886938
acugcuguggcucacagau

SEQ ID NO: 2436891 - RNA, 19 nt, Artificial Sequence
  Description of Artificial Sequence: Synthetic oligonucleotide
  Antisense strand to SEQ ID NO: 2436890
aucugugagccacagcagu

SEQ ID NO: 2436892 - RNA, 19 nt, Artificial Sequence
  Description of Artificial Sequence: Synthetic oligonucleotide
  Sense strand starting at position 24 of SEQ ID NO: 1886939
gguuauauaacagguaugu

SEQ ID NO: 2436893 - RNA, 19 nt, Artificial Sequence
  Description of Artificial Sequence: Synthetic oligonucleotide
  Antisense strand to SEQ ID NO: 2436892
acauaccuguuauauaacc

SEQ ID NO: 2436894 - RNA, 19 nt, Artificial Sequence
  Description of Artificial Sequence: Synthetic oligonucleotide
  Sense strand starting at position 30 of SEQ ID NO: 1886939
auaacagguauguggaauu

SEQ ID NO: 2436895 - RNA, 19 nt, Artificial Sequence
  Description of Artificial Sequence: Synthetic oligonucleotide
  Antisense strand to SEQ ID NO: 2436894
aauuccacauaccuguuau

SEQ ID NO: 2436896 - RNA, 19 nt, Artificial Sequence
  Description of Artificial Sequence: Synthetic oligonucleotide
  Sense strand starting at position 56 of SEQ ID NO: 1886939
aggaacuccuaucuguuua

SEQ ID NO: 2436897 - RNA, 19 nt, Artificial Sequence
  Description of Artificial Sequence: Synthetic oligonucleotide
  Antisense strand to SEQ ID NO: 2436896
uaaacagauaggaguuccu

SEQ ID NO: 2436898 - RNA, 19 nt, Artificial Sequence
  Description of Artificial Sequence: Synthetic oligonucleotide
  Sense strand starting at position 721 of SEQ ID NO: 1886939
auuggcuucugguuaccua

SEQ ID NO: 2436899 - RNA, 19 nt, Artificial Sequence
  Description of Artificial Sequence: Synthetic oligonucleotide
  Antisense strand to SEQ ID NO: 2436898
uagguaaccagaagccaau

SEQ ID NO: 2436900 - RNA, 19 nt, Artificial Sequence
  Description of Artificial Sequence: Synthetic oligonucleotide
  Sense strand starting at position 740 of SEQ ID NO: 1886939
auggguuugguuugguaaa

SEQ ID NO: 2436901 - RNA, 19 nt, Artificial Sequence
  Description of Artificial Sequence: Synthetic oligonucleotide
  Antisense strand to SEQ ID NO: 2436900
uuuaccaaaccaaacccau

SEQ ID NO: 2436902 - RNA, 19 nt, Artificial Sequence
  Description of Artificial Sequence: Synthetic oligonucleotide
  Sense strand starting at position 767 of SEQ ID NO: 1886939
aucagacuucugggaugca

SEQ ID NO: 2436903 - RNA, 19 nt, Artificial Sequence
  Description of Artificial Sequence: Synthetic oligonucleotide
  Antisense strand to SEQ ID NO: 2436902
ugcaucccagaagucugau

SEQ ID NO: 2436904 - RNA, 19 nt, Artificial Sequence
  Description of Artificial Sequence: Synthetic oligonucleotide
  Sense strand starting at position 957 of SEQ ID NO: 1886939
agagacagaugcucacuuu

SEQ ID NO: 2436905 - RNA, 19 nt, Artificial Sequence
  Description of Artificial Sequence: Synthetic oligonucleotide
  Antisense strand to SEQ ID NO: 2436904
aaagugagcaucugucucu

SEQ ID NO: 2436906 - RNA, 19 nt, Artificial Sequence
  Description of Artificial Sequence: Synthetic oligonucleotide
  Sense strand starting at position 986 of SEQ ID NO: 1886939
uguuguauucuugguccca

SEQ ID NO: 2436907 - RNA, 19 nt, Artificial Sequence
  Description of Artificial Sequence: Synthetic oligonucleotide
  Antisense strand to SEQ ID NO: 2436906
ugggaccaagaauacaaca

SEQ ID NO: 2436908 - RNA, 19 nt, Artificial Sequence
  Description of Artificial Sequence: Synthetic oligonucleotide
  Sense strand starting at position 988 of SEQ ID NO: 1886939
uuguauucuuggucccacu

SEQ ID NO: 2436909 - RNA, 19 nt, Artificial Sequence
  Description of Artificial Sequence: Synthetic oligonucleotide
  Antisense strand to SEQ ID NO: 2436908
agugggaccaagaauacaa

SEQ ID NO: 2436910 - RNA, 19 nt, Artificial Sequence
  Description of Artificial Sequence: Synthetic oligonucleotide
  Sense strand starting at position 1027 of SEQ ID NO: 1886939
aaacguuucccuuacucga

SEQ ID NO: 2436911 - RNA, 19 nt, Artificial Sequence
  Description of Artificial Sequence: Synthetic oligonucleotide
  Antisense strand to SEQ ID NO: 2436910
ucgaguaagggaaacguuu

SEQ ID NO: 2436912 - RNA, 19 nt, Artificial Sequence
  Description of Artificial Sequence: Synthetic oligonucleotide
  Sense strand starting at position 1035 of SEQ ID NO: 1886939
cccuuacucgaacgcuaaa

SEQ ID NO: 2436913 - RNA, 19 nt, Artificial Sequence
  Description of Artificial Sequence: Synthetic oligonucleotide
  Antisense strand to SEQ ID NO: 2436912
uuuagcguucgaguaaggg

SEQ ID NO: 2436914 - RNA, 19 nt, Artificial Sequence
  Description of Artificial Sequence: Synthetic oligonucleotide
  Sense strand starting at position 1926 of SEQ ID NO: 1886939
ccgccugucuuccuggaaa

SEQ ID NO: 2436915 - RNA, 19 nt, Artificial Sequence
  Description of Artificial Sequence: Synthetic oligonucleotide
  Antisense strand to SEQ ID NO: 2436914
uuuccaggaagacaggcgg

SEQ ID NO: 2436916 - RNA, 19 nt, Artificial Sequence
  Description of Artificial Sequence: Synthetic oligonucleotide
  Sense strand starting at position 1929 of SEQ ID NO: 1886939
ccugucuuccuggaaacag

SEQ ID NO: 2436917 - RNA, 19 nt, Artificial Sequence
  Description of Artificial Sequence: Synthetic oligonucleotide
  Antisense strand to SEQ ID NO: 2436916
cuguuuccaggaagacagg

SEQ ID NO: 2436918 - RNA, 19 nt, Artificial Sequence
  Description of Artificial Sequence: Synthetic oligonucleotide
  Sense strand starting at position 1944 of SEQ ID NO: 1886939
acagguguuugcucugauu

SEQ ID NO: 2436919 - RNA, 19 nt, Artificial Sequence
  Description of Artificial Sequence: Synthetic oligonucleotide
  Antisense strand to SEQ ID NO: 2436918
aaucagagcaaacaccugu

SEQ ID NO: 2436920 - RNA, 19 nt, Artificial Sequence
  Description of Artificial Sequence: Synthetic oligonucleotide
  Sense strand starting at position 1986 of SEQ ID NO: 1886939
gucggucuccggagaucuc

SEQ ID NO: 2436921 - RNA, 19 nt, Artificial Sequence
  Description of Artificial Sequence: Synthetic oligonucleotide
  Antisense strand to SEQ ID NO: 2436920
gagaucuccggagaccgac

SEQ ID NO: 2436922 - RNA, 19 nt, Artificial Sequence
  Description of Artificial Sequence: Synthetic oligonucleotide
  Sense strand starting at position 2276 of SEQ ID NO: 1886939
gcccaaguccucgggaaga

SEQ ID NO: 2436923 - RNA, 19 nt, Artificial Sequence
  Description of Artificial Sequence: Synthetic oligonucleotide
  Antisense strand to SEQ ID NO: 2436922
ucuucccgaggacuugggc

SEQ ID NO: 2436924 - RNA, 19 nt, Artificial Sequence
  Description of Artificial Sequence: Synthetic oligonucleotide
  Sense strand starting at position 2278 of SEQ ID NO: 1886939
ccaaguccucgggaagaug

SEQ ID NO: 2436925 - RNA, 19 nt, Artificial Sequence
  Description of Artificial Sequence: Synthetic oligonucleotide
  Antisense strand to SEQ ID NO: 2436924
caucuucccgaggacuugg

SEQ ID NO: 2436926 - RNA, 19 nt, Artificial Sequence
  Description of Artificial Sequence: Synthetic oligonucleotide
  Sense strand starting at position 2518 of SEQ ID NO: 1886939
agcguuagguagaagggau

SEQ ID NO: 2436927 - RNA, 19 nt, Artificial Sequence
  Description of Artificial Sequence: Synthetic oligonucleotide
  Antisense strand to SEQ ID NO: 2436926
aucccuucuaccuaacgcu

SEQ ID NO: 2436928 - RNA, 19 nt, Artificial Sequence
  Description of Artificial Sequence: Synthetic oligonucleotide
  Sense strand starting at position 2590 of SEQ ID NO: 1886939
ggaauucaggugugcuguu

SEQ ID NO: 2436929 - RNA, 19 nt, Artificial Sequence
  Description of Artificial Sequence: Synthetic oligonucleotide
  Antisense strand to SEQ ID NO: 2436928
aacagcacaccugaauucc

SEQ ID NO: 2436930 - RNA, 19 nt, Artificial Sequence
  Description of Artificial Sequence: Synthetic oligonucleotide
  Sense strand starting at position 2707 of SEQ ID NO: 1886939
uaccuuucuugggugggaa

SEQ ID NO: 2436931 - RNA, 19 nt, Artificial Sequence
  Description of Artificial Sequence: Synthetic oligonucleotide
  Antisense strand to SEQ ID NO: 2436930
uucccacccaagaaaggua

SEQ ID NO: 2436932 - RNA, 19 nt, Artificial Sequence
  Description of Artificial Sequence: Synthetic oligonucleotide
  Sense strand starting at position 2871 of SEQ ID NO: 1886939
gacuccagaugguuuccaa

SEQ ID NO: 2436933 - RNA, 19 nt, Artificial Sequence
  Description of Artificial Sequence: Synthetic oligonucleotide
  Antisense strand to SEQ ID NO: 2436932
uuggaaaccaucuggaguc

SEQ ID NO: 2436934 - RNA, 19 nt, Artificial Sequence
  Description of Artificial Sequence: Synthetic oligonucleotide
  Sense strand starting at position 2874 of SEQ ID NO: 1886939
uccagaugguuuccaagua

SEQ ID NO: 2436935 - RNA, 19 nt, Artificial Sequence
  Description of Artificial Sequence: Synthetic oligonucleotide
  Antisense strand to SEQ ID NO: 2436934
uacuuggaaaccaucugga

SEQ ID NO: 2436936 - RNA, 19 nt, Artificial Sequence
  Description of Artificial Sequence: Synthetic oligonucleotide
  Sense strand starting at position 2934 of SEQ ID NO: 1886939
acacaugugcuuuaacaug

SEQ ID NO: 2436937 - RNA, 19 nt, Artificial Sequence
  Description of Artificial Sequence: Synthetic oligonucleotide
  Antisense strand to SEQ ID NO: 2436936
cauguuaaagcacaugugu

SEQ ID NO: 2436938 - RNA, 19 nt, Artificial Sequence
  Description of Artificial Sequence: Synthetic oligonucleotide
  Sense strand starting at position 2974 of SEQ ID NO: 1886939
gagucagauuagcccagau

SEQ ID NO: 2436939 - RNA, 19 nt, Artificial Sequence
  Description of Artificial Sequence: Synthetic oligonucleotide
  Antisense strand to SEQ ID NO: 2436938
aucugggcuaaucugacuc

SEQ ID NO: 2436940 - RNA, 19 nt, Artificial Sequence
  Description of Artificial Sequence: Synthetic oligonucleotide
  Sense strand starting at position 2987 of SEQ ID NO: 1886939
ccagauuucuggcauggua

SEQ ID NO: 2436941 - RNA, 19 nt, Artificial Sequence
  Description of Artificial Sequence: Synthetic oligonucleotide
  Antisense strand to SEQ ID NO: 2436940
uaccaugccagaaaucugg

SEQ ID NO: 2436942 - RNA, 19 nt, Artificial Sequence
  Description of Artificial Sequence: Synthetic oligonucleotide
  Sense strand starting at position 3000 of SEQ ID NO: 1886939
augguauugccacagauau

SEQ ID NO: 2436943 - RNA, 19 nt, Artificial Sequence
  Description of Artificial Sequence: Synthetic oligonucleotide
  Antisense strand to SEQ ID NO: 2436942
auaucuguggcaauaccau

SEQ ID NO: 2436944 - RNA, 19 nt, Artificial Sequence
  Description of Artificial Sequence: Synthetic oligonucleotide
  Sense strand starting at position 3002 of SEQ ID NO: 1886939
gguauugccacagauauag

SEQ ID NO: 2436945 - RNA, 19 nt, Artificial Sequence
  Description of Artificial Sequence: Synthetic oligonucleotide
  Antisense strand to SEQ ID NO: 2436944
cuauaucuguggcaauacc

SEQ ID NO: 2436946 - RNA, 19 nt, Artificial Sequence
  Description of Artificial Sequence: Synthetic oligonucleotide
  Sense strand starting at position 3046 of SEQ ID NO: 1886939
guuggaugccgagauagug

SEQ ID NO: 2436947 - RNA, 19 nt, Artificial Sequence
  Description of Artificial Sequence: Synthetic oligonucleotide
  Antisense strand to SEQ ID NO: 2436946
cacuaucucggcauccaac

SEQ ID NO: 2436948 - RNA, 19 nt, Artificial Sequence
  Description of Artificial Sequence: Synthetic oligonucleotide
  Sense strand starting at position 3056 of SEQ ID NO: 1886939
gagauaguguuuccuggua

SEQ ID NO: 2436949 - RNA, 19 nt, Artificial Sequence
  Description of Artificial Sequence: Synthetic oligonucleotide
  Antisense strand to SEQ ID NO: 2436948
uaccaggaaacacuaucuc

SEQ ID NO: 2436950 - RNA, 19 nt, Artificial Sequence
  Description of Artificial Sequence: Synthetic oligonucleotide
  Sense strand starting at position 3072 of SEQ ID NO: 1886939
guauucguuguuuagcaga

SEQ ID NO: 2436951 - RNA, 19 nt, Artificial Sequence
  Description of Artificial Sequence: Synthetic oligonucleotide
  Antisense strand to SEQ ID NO: 2436950
ucugcuaaacaacgaauac

SEQ ID NO: 2436952 - RNA, 19 nt, Artificial Sequence
  Description of Artificial Sequence: Synthetic oligonucleotide
  Sense strand starting at position 3077 of SEQ ID NO: 1886939
cguuguuuagcagaugaca

SEQ ID NO: 2436953 - RNA, 19 nt, Artificial Sequence
  Description of Artificial Sequence: Synthetic oligonucleotide
  Antisense strand to SEQ ID NO: 2436952
ugucaucugcuaaacaacg

SEQ ID NO: 2436954 - RNA, 19 nt, Artificial Sequence
  Description of Artificial Sequence: Synthetic oligonucleotide
  Sense strand starting at position 3079 of SEQ ID NO: 1886939
uuguuuagcagaugacagu

SEQ ID NO: 2436955 - RNA, 19 nt, Artificial Sequence
  Description of Artificial Sequence: Synthetic oligonucleotide
  Antisense strand to SEQ ID NO: 2436954
acugucaucugcuaaacaa

SEQ ID NO: 2436956 - RNA, 19 nt, Artificial Sequence
  Description of Artificial Sequence: Synthetic oligonucleotide
  Sense strand starting at position 3234 of SEQ ID NO: 1886939
uucagugccgugcuagaau

SEQ ID NO: 2436957 - RNA, 19 nt, Artificial Sequence
  Description of Artificial Sequence: Synthetic oligonucleotide
  Antisense strand to SEQ ID NO: 2436956
auucuagcacggcacugaa

SEQ ID NO: 2436958 - RNA, 19 nt, Artificial Sequence
  Description of Artificial Sequence: Synthetic oligonucleotide
  Sense strand starting at position 3242 of SEQ ID NO: 1886939
cgugcuagaaucuaaaugu

SEQ ID NO: 2436959 - RNA, 19 nt, Artificial Sequence
  Description of Artificial Sequence: Synthetic oligonucleotide
  Antisense strand to SEQ ID NO: 2436958
acauuuagauucuagcacg

SEQ ID NO: 2436960 - RNA, 19 nt, Artificial Sequence
  Description of Artificial Sequence: Synthetic oligonucleotide
  Sense strand starting at position 3435 of SEQ ID NO: 1886939
gucuuagguauugagagca

SEQ ID NO: 2436961 - RNA, 19 nt, Artificial Sequence
  Description of Artificial Sequence: Synthetic oligonucleotide
  Antisense strand to SEQ ID NO: 2436960
ugcucucaauaccuaagac

SEQ ID NO: 2436962 - RNA, 19 nt, Artificial Sequence
  Description of Artificial Sequence: Synthetic oligonucleotide
  Sense strand starting at position 3521 of SEQ ID NO: 1886939
gauguuggccuauggauga

SEQ ID NO: 2436963 - RNA, 19 nt, Artificial Sequence
  Description of Artificial Sequence: Synthetic oligonucleotide
  Antisense strand to SEQ ID NO: 2436962
ucauccauaggccaacauc

SEQ ID NO: 2436964 - RNA, 19 nt, Artificial Sequence
  Description of Artificial Sequence: Synthetic oligonucleotide
  Sense strand starting at position 3686 of SEQ ID NO: 1886939
aucugauugugcuuagcau

SEQ ID NO: 2436965 - RNA, 19 nt, Artificial Sequence
  Description of Artificial Sequence: Synthetic oligonucleotide
  Antisense strand to SEQ ID NO: 2436964
augcuaagcacaaucagau

SEQ ID NO: 2436966 - RNA, 19 nt, Artificial Sequence
  Description of Artificial Sequence: Synthetic oligonucleotide
  Sense strand starting at position 3708 of SEQ ID NO: 1886939
auaucuugccaggguucua

SEQ ID NO: 2436967 - RNA, 19 nt, Artificial Sequence
  Description of Artificial Sequence: Synthetic oligonucleotide
  Antisense strand to SEQ ID NO: 2436966
uagaacccuggcaagauau

SEQ ID NO: 2436968 - RNA, 19 nt, Artificial Sequence
  Description of Artificial Sequence: Synthetic oligonucleotide
  Sense strand starting at position 3839 of SEQ ID NO: 1886939
ucauauccaccuugaggau

SEQ ID NO: 2436969 - RNA, 19 nt, Artificial Sequence
  Description of Artificial Sequence: Synthetic oligonucleotide
  Antisense strand to SEQ ID NO: 2436968
auccucaagguggauauga

SEQ ID NO: 2436970 - RNA, 19 nt, Artificial Sequence
  Description of Artificial Sequence: Synthetic oligonucleotide
  Sense strand starting at position 3898 of SEQ ID NO: 1886939
ggcugagaaugugcuccuu

SEQ ID NO: 2436971 - RNA, 19 nt, Artificial Sequence
  Description of Artificial Sequence: Synthetic oligonucleotide
  Antisense strand to SEQ ID NO: 2436970
aaggagcacauucucagcc

SEQ ID NO: 2436972 - RNA, 19 nt, Artificial Sequence
  Description of Artificial Sequence: Synthetic oligonucleotide
  Sense strand starting at position 257 of SEQ ID NO: 1886940
uaauaagucgccgacauaa

SEQ ID NO: 2436973 - RNA, 19 nt, Artificial Sequence
  Description of Artificial Sequence: Synthetic oligonucleotide
  Antisense strand to SEQ ID NO: 2436972
uuaugucggcgacuuauua

SEQ ID NO: 2436974 - RNA, 19 nt, Artificial Sequence
  Description of Artificial Sequence: Synthetic oligonucleotide
  Sense strand starting at position 259 of SEQ ID NO: 1886940
auaagucgccgacauaaug

SEQ ID NO: 2436975 - RNA, 19 nt, Artificial Sequence
  Description of Artificial Sequence: Synthetic oligonucleotide
  Antisense strand to SEQ ID NO: 2436974
cauuaugucggcgacuuau

SEQ ID NO: 2436976 - RNA, 19 nt, Artificial Sequence
  Description of Artificial Sequence: Synthetic oligonucleotide
  Sense strand starting at position 422 of SEQ ID NO: 1886940
cccaaugaugcucauugua

SEQ ID NO: 2436977 - RNA, 19 nt, Artificial Sequence
  Description of Artificial Sequence: Synthetic oligonucleotide
  Antisense strand to SEQ ID NO: 2436976
uacaaugagcaucauuggg

SEQ ID NO: 2436978 - RNA, 19 nt, Artificial Sequence
  Description of Artificial Sequence: Synthetic oligonucleotide
  Sense strand starting at position 490 of SEQ ID NO: 1886940
agccuacuuuaacuggaau

SEQ ID NO: 2436979 - RNA, 19 nt, Artificial Sequence
  Description of Artificial Sequence: Synthetic oligonucleotide
  Antisense strand to SEQ ID NO: 2436978
auuccaguuaaaguaggcu

SEQ ID NO: 2436980 - RNA, 19 nt, Artificial Sequence
  Description of Artificial Sequence: Synthetic oligonucleotide
  Sense strand starting at position 504 of SEQ ID NO: 1886940
ggaauagcuccucagucuu

SEQ ID NO: 2436981 - RNA, 19 nt, Artificial Sequence
  Description of Artificial Sequence: Synthetic oligonucleotide
  Antisense strand to SEQ ID NO: 2436980
aagacugaggagcuauucc

SEQ ID NO: 2436982 - RNA, 19 nt, Artificial Sequence
  Description of Artificial Sequence: Synthetic oligonucleotide
  Sense strand starting at position 552 of SEQ ID NO: 1886940
uaaagaguacagggcaauu

SEQ ID NO: 2436983 - RNA, 19 nt, Artificial Sequence
  Description of Artificial Sequence: Synthetic oligonucleotide
  Antisense strand to SEQ ID NO: 2436982
aauugcccuguacucuuua

SEQ ID NO: 2436984 - RNA, 19 nt, Artificial Sequence
  Description of Artificial Sequence: Synthetic oligonucleotide
  Sense strand starting at position 635 of SEQ ID NO: 1886940
gcaucugugguagaaauga

SEQ ID NO: 2436985 - RNA, 19 nt, Artificial Sequence
  Description of Artificial Sequence: Synthetic oligonucleotide
  Antisense strand to SEQ ID NO: 2436984
ucauuucuaccacagaugc

SEQ ID NO: 2436986 - RNA, 19 nt, Artificial Sequence
  Description of Artificial Sequence: Synthetic oligonucleotide
  Sense strand starting at position 710 of SEQ ID NO: 1886940
ggagguuaacuuugaucac

SEQ ID NO: 2436987 - RNA, 19 nt, Artificial Sequence
  Description of Artificial Sequence: Synthetic oligonucleotide
  Antisense strand to SEQ ID NO: 2436986
gugaucaaaguuaaccucc

SEQ ID NO: 2436988 - RNA, 19 nt, Artificial Sequence
  Description of Artificial Sequence: Synthetic oligonucleotide
  Sense strand starting at position 717 of SEQ ID NO: 1886940
aacuuugaucacuggguua

SEQ ID NO: 2436989 - RNA, 19 nt, Artificial Sequence
  Description of Artificial Sequence: Synthetic oligonucleotide
  Antisense strand to SEQ ID NO: 2436988
uaacccagugaucaaaguu

SEQ ID NO: 2436990 - RNA, 19 nt, Artificial Sequence
  Description of Artificial Sequence: Synthetic oligonucleotide
  Sense strand starting at position 719 of SEQ ID NO: 1886940
cuuugaucacuggguuaag

SEQ ID NO: 2436991 - RNA, 19 nt, Artificial Sequence
  Description of Artificial Sequence: Synthetic oligonucleotide
  Antisense strand to SEQ ID NO: 2436990
cuuaacccagugaucaaag

SEQ ID NO: 2436992 - RNA, 19 nt, Artificial Sequence
  Description of Artificial Sequence: Synthetic oligonucleotide
  Sense strand starting at position 764 of SEQ ID NO: 1886940
ggauccugcugauuauauu

SEQ ID NO: 2436993 - RNA, 19 nt, Artificial Sequence
  Description of Artificial Sequence: Synthetic oligonucleotide
  Antisense strand to SEQ ID NO: 2436992
aauauaaucagcaggaucc

SEQ ID NO: 2436994 - RNA, 19 nt, Artificial Sequence
  Description of Artificial Sequence: Synthetic oligonucleotide
  Sense strand starting at position 823 of SEQ ID NO: 1886940
ggagaauguucagcaguga

SEQ ID NO: 2436995 - RNA, 19 nt, Artificial Sequence
  Description of Artificial Sequence: Synthetic oligonucleotide
  Antisense strand to SEQ ID NO: 2436994
ucacugcugaacauucucc

SEQ ID NO: 2436996 - RNA, 19 nt, Artificial Sequence
  Description of Artificial Sequence: Synthetic oligonucleotide
  Sense strand starting at position 844 of SEQ ID NO: 1886940
ugcaaaugguccuuggaaa

SEQ ID NO: 2436997 - RNA, 19 nt, Artificial Sequence
  Description of Artificial Sequence: Synthetic oligonucleotide
  Antisense strand to SEQ ID NO: 2436996
uuuccaaggaccauuugca

SEQ ID NO: 2436998 - RNA, 19 nt, Artificial Sequence
  Description of Artificial Sequence: Synthetic oligonucleotide
  Sense strand starting at position 845 of SEQ ID NO: 1886940
gcaaaugguccuuggaaac

SEQ ID NO: 2436999 - RNA, 19 nt, Artificial Sequence
  Description of Artificial Sequence: Synthetic oligonucleotide
  Antisense strand to SEQ ID NO: 2436998
guuuccaaggaccauuugc

SEQ ID NO: 2437000 - RNA, 19 nt, Artificial Sequence
  Description of Artificial Sequence: Synthetic oligonucleotide
  Sense strand starting at position 885 of SEQ ID NO: 1886940
ugagcacuccuuuacagac

SEQ ID NO: 2437001 - RNA, 19 nt, Artificial Sequence
  Description of Artificial Sequence: Synthetic oligonucleotide
  Antisense strand to SEQ ID NO: 2437000
gucuguaaaggagugcuca

SEQ ID NO: 2437002 - RNA, 19 nt, Artificial Sequence
  Description of Artificial Sequence: Synthetic oligonucleotide
  Sense strand starting at position 939 of SEQ ID NO: 1886940
uuagcagucucuuuauuug

SEQ ID NO: 2437003 - RNA, 19 nt, Artificial Sequence
  Description of Artificial Sequence: Synthetic oligonucleotide
  Antisense strand to SEQ ID NO: 2437002
caaauaaagagacugcuaa

SEQ ID NO: 2437004 - RNA, 19 nt, Artificial Sequence
  Description of Artificial Sequence: Synthetic oligonucleotide
  Sense strand starting at position 945 of SEQ ID NO: 1886940
gucucuuuauuuguuggua

SEQ ID NO: 2437005 - RNA, 19 nt, Artificial Sequence
  Description of Artificial Sequence: Synthetic oligonucleotide
  Antisense strand to SEQ ID NO: 2437004
uaccaacaaauaaagagac

SEQ ID NO: 2437006 - RNA, 19 nt, Artificial Sequence
  Description of Artificial Sequence: Synthetic oligonucleotide
  Sense strand starting at position 948 of SEQ ID NO: 1886940
ucuuuauuuguugguacca

SEQ ID NO: 2437007 - RNA, 19 nt, Artificial Sequence
  Description of Artificial Sequence: Synthetic oligonucleotide
  Antisense strand to SEQ ID NO: 2437006
ugguaccaacaaauaaaga

SEQ ID NO: 2437008 - RNA, 19 nt, Artificial Sequence
  Description of Artificial Sequence: Synthetic oligonucleotide
  Sense strand starting at position 1002 of SEQ ID NO: 1886940
gcuuauaaauguccaauga

SEQ ID NO: 2437009 - RNA, 19 nt, Artificial Sequence
  Description of Artificial Sequence: Synthetic oligonucleotide
  Antisense strand to SEQ ID NO: 2437008
ucauuggacauuuauaagc

SEQ ID NO: 2437010 - RNA, 19 nt, Artificial Sequence
  Description of Artificial Sequence: Synthetic oligonucleotide
  Sense strand starting at position 1106 of SEQ ID NO: 1886940
ggcucucuuccugauacag

SEQ ID NO: 2437011 - RNA, 19 nt, Artificial Sequence
  Description of Artificial Sequence: Synthetic oligonucleotide
  Antisense strand to SEQ ID NO: 2437010
cuguaucaggaagagagcc

SEQ ID NO: 2437012 - RNA, 19 nt, Artificial Sequence
  Description of Artificial Sequence: Synthetic oligonucleotide
  Sense strand starting at position 1316 of SEQ ID NO: 1886940
uggccauugcaucaggaga

SEQ ID NO: 2437013 - RNA, 19 nt, Artificial Sequence
  Description of Artificial Sequence: Synthetic oligonucleotide
  Antisense strand to SEQ ID NO: 2437012
ucuccugaugcaauggcca

SEQ ID NO: 2437014 - RNA, 19 nt, Artificial Sequence
  Description of Artificial Sequence: Synthetic oligonucleotide
  Sense strand starting at position 1420 of SEQ ID NO: 1886940
acaucuggccacugaauga

SEQ ID NO: 2437015 - RNA, 19 nt, Artificial Sequence
  Description of Artificial Sequence: Synthetic oligonucleotide
  Antisense strand to SEQ ID NO: 2437014
ucauucaguggccagaugu

SEQ ID NO: 2437016 - RNA, 19 nt, Artificial Sequence
  Description of Artificial Sequence: Synthetic oligonucleotide
  Sense strand starting at position 1431 of SEQ ID NO: 1886940
cugaaugacucaccaaagu

SEQ ID NO: 2437017 - RNA, 19 nt, Artificial Sequence
  Description of Artificial Sequence: Synthetic oligonucleotide
  Antisense strand to SEQ ID NO: 2437016
acuuuggugagucauucag

SEQ ID NO: 2437018 - RNA, 19 nt, Artificial Sequence
  Description of Artificial Sequence: Synthetic oligonucleotide
  Sense strand starting at position 1552 of SEQ ID NO: 1886940
gaacuccuacgccaaaguu

SEQ ID NO: 2437019 - RNA, 19 nt, Artificial Sequence
  Description of Artificial Sequence: Synthetic oligonucleotide
  Antisense strand to SEQ ID NO: 2437018
aacuuuggcguaggaguuc

SEQ ID NO: 2437020 - RNA, 19 nt, Artificial Sequence
  Description of Artificial Sequence: Synthetic oligonucleotide
  Sense strand starting at position 1933 of SEQ ID NO: 1886940
augucagaaccuggguaaa

SEQ ID NO: 2437021 - RNA, 19 nt, Artificial Sequence
  Description of Artificial Sequence: Synthetic oligonucleotide
  Antisense strand to SEQ ID NO: 2437020
uuuacccagguucugacau

SEQ ID NO: 2437022 - RNA, 19 nt, Artificial Sequence
  Description of Artificial Sequence: Synthetic oligonucleotide
  Sense strand starting at position 1935 of SEQ ID NO: 1886940
gucagaaccuggguaaaca

SEQ ID NO: 2437023 - RNA, 19 nt, Artificial Sequence
  Description of Artificial Sequence: Synthetic oligonucleotide
  Antisense strand to SEQ ID NO: 2437022
uguuuacccagguucugac

SEQ ID NO: 2437024 - RNA, 19 nt, Artificial Sequence
  Description of Artificial Sequence: Synthetic oligonucleotide
  Sense strand starting at position 2282 of SEQ ID NO: 1886940
aggguaaaguaauugcaga

SEQ ID NO: 2437025 - RNA, 19 nt, Artificial Sequence
  Description of Artificial Sequence: Synthetic oligonucleotide
  Antisense strand to SEQ ID NO: 2437024
ucugcaauuacuuuacccu

SEQ ID NO: 2437026 - RNA, 19 nt, Artificial Sequence
  Description of Artificial Sequence: Synthetic oligonucleotide
  Sense strand starting at position 2308 of SEQ ID NO: 1886940
ggcucaugcacugauugaa

SEQ ID NO: 2437027 - RNA, 19 nt, Artificial Sequence
  Description of Artificial Sequence: Synthetic oligonucleotide
  Antisense strand to SEQ ID NO: 2437026
uucaaucagugcaugagcc

SEQ ID NO: 2437028 - RNA, 19 nt, Artificial Sequence
  Description of Artificial Sequence: Synthetic oligonucleotide
  Sense strand starting at position 2360 of SEQ ID NO: 1886940
uuguacuaauguccagaaa

SEQ ID NO: 2437029 - RNA, 19 nt, Artificial Sequence
  Description of Artificial Sequence: Synthetic oligonucleotide
  Antisense strand to SEQ ID NO: 2437028
uuucuggacauuaguacaa

SEQ ID NO: 2437030 - RNA, 19 nt, Artificial Sequence
  Description of Artificial Sequence: Synthetic oligonucleotide
  Sense strand starting at position 2460 of SEQ ID NO: 1886940
augacauuccaaugcuuag

SEQ ID NO: 2437031 - RNA, 19 nt, Artificial Sequence
  Description of Artificial Sequence: Synthetic oligonucleotide
  Antisense strand to SEQ ID NO: 2437030
cuaagcauuggaaugucau

SEQ ID NO: 2437032 - RNA, 19 nt, Artificial Sequence
  Description of Artificial Sequence: Synthetic oligonucleotide
  Sense strand starting at position 3020 of SEQ ID NO: 1886940
uuauccugugagugaggaa

SEQ ID NO: 2437033 - RNA, 19 nt, Artificial Sequence
  Description of Artificial Sequence: Synthetic oligonucleotide
  Antisense strand to SEQ ID NO: 2437032
uuccucacucacaggauaa

SEQ ID NO: 2437034 - RNA, 19 nt, Artificial Sequence
  Description of Artificial Sequence: Synthetic oligonucleotide
  Sense strand starting at position 3296 of SEQ ID NO: 1886940
ggagauucuugagcaggga

SEQ ID NO: 2437035 - RNA, 19 nt, Artificial Sequence
  Description of Artificial Sequence: Synthetic oligonucleotide
  Antisense strand to SEQ ID NO: 2437034
ucccugcucaagaaucucc

SEQ ID NO: 2437036 - RNA, 19 nt, Artificial Sequence
  Description of Artificial Sequence: Synthetic oligonucleotide
  Sense strand starting at position 3299 of SEQ ID NO: 1886940
gauucuugagcagggaaga

SEQ ID NO: 2437037 - RNA, 19 nt, Artificial Sequence
  Description of Artificial Sequence: Synthetic oligonucleotide
  Antisense strand to SEQ ID NO: 2437036
ucuucccugcucaagaauc

SEQ ID NO: 2437038 - RNA, 19 nt, Artificial Sequence
  Description of Artificial Sequence: Synthetic oligonucleotide
  Sense strand starting at position 3300 of SEQ ID NO: 1886940
auucuugagcagggaagau

SEQ ID NO: 2437039 - RNA, 19 nt, Artificial Sequence
  Description of Artificial Sequence: Synthetic oligonucleotide
  Antisense strand to SEQ ID NO: 2437038
aucuucccugcucaagaau

SEQ ID NO: 2437040 - RNA, 19 nt, Artificial Sequence
  Description of Artificial Sequence: Synthetic oligonucleotide
  Sense strand starting at position 3351 of SEQ ID NO: 1886940
agguuugaacccugggcua

SEQ ID NO: 2437041 - RNA, 19 nt, Artificial Sequence
  Description of Artificial Sequence: Synthetic oligonucleotide
  Antisense strand to SEQ ID NO: 2437040
uagcccaggguucaaaccu

SEQ ID NO: 2437042 - RNA, 19 nt, Artificial Sequence
  Description of Artificial Sequence: Synthetic oligonucleotide
  Sense strand starting at position 3455 of SEQ ID NO: 1886940
ucaacugacuuuguaggau

SEQ ID NO: 2437043 - RNA, 19 nt, Artificial Sequence
  Description of Artificial Sequence: Synthetic oligonucleotide
  Antisense strand to SEQ ID NO: 2437042
auccuacaaagucaguuga

SEQ ID NO: 2437044 - RNA, 19 nt, Artificial Sequence
  Description of Artificial Sequence: Synthetic oligonucleotide
  Sense strand starting at position 3823 of SEQ ID NO: 1886940
acuaauacuguagguaaau

SEQ ID NO: 2437045 - RNA, 19 nt, Artificial Sequence
  Description of Artificial Sequence: Synthetic oligonucleotide
  Antisense strand to SEQ ID NO: 2437044
auuuaccuacaguauuagu

SEQ ID NO: 2437046 - RNA, 19 nt, Artificial Sequence
  Description of Artificial Sequence: Synthetic oligonucleotide
  Sense strand starting at position 3824 of SEQ ID NO: 1886940
cuaauacuguagguaaauu

SEQ ID NO: 2437047 - RNA, 19 nt, Artificial Sequence
  Description of Artificial Sequence: Synthetic oligonucleotide
  Antisense strand to SEQ ID NO: 2437046
aauuuaccuacaguauuag

SEQ ID NO: 2437048 - RNA, 19 nt, Artificial Sequence
  Description of Artificial Sequence: Synthetic oligonucleotide
  Sense strand starting at position 3903 of SEQ ID NO: 1886940
guggguugucuccaaucaa

SEQ ID NO: 2437049 - RNA, 19 nt, Artificial Sequence
  Description of Artificial Sequence: Synthetic oligonucleotide
  Antisense strand to SEQ ID NO: 2437048
uugauuggagacaacccac

SEQ ID NO: 2437050 - RNA, 19 nt, Artificial Sequence
  Description of Artificial Sequence: Synthetic oligonucleotide
  Sense strand starting at position 3954 of SEQ ID NO: 1886940
gagagaugguaacagauuu

SEQ ID NO: 2437051 - RNA, 19 nt, Artificial Sequence
  Description of Artificial Sequence: Synthetic oligonucleotide
  Antisense strand to SEQ ID NO: 2437050
aaaucuguuaccaucucuc

SEQ ID NO: 2437052 - RNA, 19 nt, Artificial Sequence
  Description of Artificial Sequence: Synthetic oligonucleotide
  Sense strand starting at position 506 of SEQ ID NO: 1886941
agaggaucccggugucuua

SEQ ID NO: 2437053 - RNA, 19 nt, Artificial Sequence
  Description of Artificial Sequence: Synthetic oligonucleotide
  Antisense strand to SEQ ID NO: 2437052
uaagacaccgggauccucu

SEQ ID NO: 2437054 - RNA, 19 nt, Artificial Sequence
  Description of Artificial Sequence: Synthetic oligonucleotide
  Sense strand starting at position 947 of SEQ ID NO: 1886941
agugcacucuuauuaagag

SEQ ID NO: 2437055 - RNA, 19 nt, Artificial Sequence
  Description of Artificial Sequence: Synthetic oligonucleotide
  Antisense strand to SEQ ID NO: 2437054
cucuuaauaagagugcacu

SEQ ID NO: 2437056 - RNA, 19 nt, Artificial Sequence
  Description of Artificial Sequence: Synthetic oligonucleotide
  Sense strand starting at position 1002 of SEQ ID NO: 1886941
ugaagucuauuugagacau

SEQ ID NO: 2437057 - RNA, 19 nt, Artificial Sequence
  Description of Artificial Sequence: Synthetic oligonucleotide
  Antisense strand to SEQ ID NO: 2437056
augucucaaauagacuuca

SEQ ID NO: 2437058 - RNA, 19 nt, Artificial Sequence
  Description of Artificial Sequence: Synthetic oligonucleotide
  Sense strand starting at position 1013 of SEQ ID NO: 1886941
ugagacauggcucaguauu

SEQ ID NO: 2437059 - RNA, 19 nt, Artificial Sequence
  Description of Artificial Sequence: Synthetic oligonucleotide
  Antisense strand to SEQ ID NO: 2437058
aauacugagccaugucuca

SEQ ID NO: 2437060 - RNA, 19 nt, Artificial Sequence
  Description of Artificial Sequence: Synthetic oligonucleotide
  Sense strand starting at position 1070 of SEQ ID NO: 1886941
aaauguaguugugcaaauu

SEQ ID NO: 2437061 - RNA, 19 nt, Artificial Sequence
  Description of Artificial Sequence: Synthetic oligonucleotide
  Antisense strand to SEQ ID NO: 2437060
aauuugcacaacuacauuu

SEQ ID NO: 2437062 - RNA, 19 nt, Artificial Sequence
  Description of Artificial Sequence: Synthetic oligonucleotide
  Sense strand starting at position 1071 of SEQ ID NO: 1886941
aauguaguugugcaaauua

SEQ ID NO: 2437063 - RNA, 19 nt, Artificial Sequence
  Description of Artificial Sequence: Synthetic oligonucleotide
  Antisense strand to SEQ ID NO: 2437062
uaauuugcacaacuacauu

SEQ ID NO: 2437064 - RNA, 19 nt, Artificial Sequence
  Description of Artificial Sequence: Synthetic oligonucleotide
  Sense strand starting at position 1076 of SEQ ID NO: 1886941
aguugugcaaauuaaggaa

SEQ ID NO: 2437065 - RNA, 19 nt, Artificial Sequence
  Description of Artificial Sequence: Synthetic oligonucleotide
  Antisense strand to SEQ ID NO: 2437064
uuccuuaauuugcacaacu

SEQ ID NO: 2437066 - RNA, 19 nt, Artificial Sequence
  Description of Artificial Sequence: Synthetic oligonucleotide
  Sense strand starting at position 1080 of SEQ ID NO: 1886941
gugcaaauuaaggaauagu

SEQ ID NO: 2437067 - RNA, 19 nt, Artificial Sequence
  Description of Artificial Sequence: Synthetic oligonucleotide
  Antisense strand to SEQ ID NO: 2437066
acuauuccuuaauuugcac

SEQ ID NO: 2437068 - RNA, 19 nt, Artificial Sequence
  Description of Artificial Sequence: Synthetic oligonucleotide
  Sense strand starting at position 1088 of SEQ ID NO: 1886941
uaaggaauaguugguagua

SEQ ID NO: 2437069 - RNA, 19 nt, Artificial Sequence
  Description of Artificial Sequence: Synthetic oligonucleotide
  Antisense strand to SEQ ID NO: 2437068
uacuaccaacuauuccuua

SEQ ID NO: 2437070 - RNA, 19 nt, Artificial Sequence
  Description of Artificial Sequence: Synthetic oligonucleotide
  Sense strand starting at position 1122 of SEQ ID NO: 1886941
ucaagagugaaacgugcau

SEQ ID NO: 2437071 - RNA, 19 nt, Artificial Sequence
  Description of Artificial Sequence: Synthetic oligonucleotide
  Antisense strand to SEQ ID NO: 2437070
augcacguuucacucuuga

SEQ ID NO: 2437072 - RNA, 19 nt, Artificial Sequence
  Description of Artificial Sequence: Synthetic oligonucleotide
  Sense strand starting at position 1126 of SEQ ID NO: 1886941
gagugaaacgugcauaauu

SEQ ID NO: 2437073 - RNA, 19 nt, Artificial Sequence
  Description of Artificial Sequence: Synthetic oligonucleotide
  Antisense strand to SEQ ID NO: 2437072
aauuaugcacguuucacuc

SEQ ID NO: 2437074 - RNA, 19 nt, Artificial Sequence
  Description of Artificial Sequence: Synthetic oligonucleotide
  Sense strand starting at position 1137 of SEQ ID NO: 1886941
gcauaauucgugcaaccca

SEQ ID NO: 2437075 - RNA, 19 nt, Artificial Sequence
  Description of Artificial Sequence: Synthetic oligonucleotide
  Antisense strand to SEQ ID NO: 2437074
uggguugcacgaauuaugc

SEQ ID NO: 2437076 - RNA, 19 nt, Artificial Sequence
  Description of Artificial Sequence: Synthetic oligonucleotide
  Sense strand starting at position 1189 of SEQ ID NO: 1886941
ugacuagugcacugacagu

SEQ ID NO: 2437077 - RNA, 19 nt, Artificial Sequence
  Description of Artificial Sequence: Synthetic oligonucleotide
  Antisense strand to SEQ ID NO: 2437076
acugucagugcacuaguca

SEQ ID NO: 2437078 - RNA, 19 nt, Artificial Sequence
  Description of Artificial Sequence: Synthetic oligonucleotide
  Sense strand starting at position 1353 of SEQ ID NO: 1886941
auacauaugucagugaggu

SEQ ID NO: 2437079 - RNA, 19 nt, Artificial Sequence
  Description of Artificial Sequence: Synthetic oligonucleotide
  Antisense strand to SEQ ID NO: 2437078
accucacugacauauguau

SEQ ID NO: 2437080 - RNA, 19 nt, Artificial Sequence
  Description of Artificial Sequence: Synthetic oligonucleotide
  Sense strand starting at position 1354 of SEQ ID NO: 1886941
uacauaugucagugagguc

SEQ ID NO: 2437081 - RNA, 19 nt, Artificial Sequence
  Description of Artificial Sequence: Synthetic oligonucleotide
  Antisense strand to SEQ ID NO: 2437080
gaccucacugacauaugua

SEQ ID NO: 2437082 - RNA, 19 nt, Artificial Sequence
  Description of Artificial Sequence: Synthetic oligonucleotide
  Sense strand starting at position 1414 of SEQ ID NO: 1886941
gcgcgaagaagcuauuaau

SEQ ID NO: 2437083 - RNA, 19 nt, Artificial Sequence
  Description of Artificial Sequence: Synthetic oligonucleotide
  Antisense strand to SEQ ID NO: 2437082
auuaauagcuucuucgcgc

SEQ ID NO: 2437084 - RNA, 19 nt, Artificial Sequence
  Description of Artificial Sequence: Synthetic oligonucleotide
  Sense strand starting at position 1423 of SEQ ID NO: 1886941
agcuauuaauagguaacuu

SEQ ID NO: 2437085 - RNA, 19 nt, Artificial Sequence
  Description of Artificial Sequence: Synthetic oligonucleotide
  Antisense strand to SEQ ID NO: 2437084
aaguuaccuauuaauagcu

SEQ ID NO: 2437086 - RNA, 19 nt, Artificial Sequence
  Description of Artificial Sequence: Synthetic oligonucleotide
  Sense strand starting at position 1474 of SEQ ID NO: 1886941
caaggauucugagugucug

SEQ ID NO: 2437087 - RNA, 19 nt, Artificial Sequence
  Description of Artificial Sequence: Synthetic oligonucleotide
  Antisense strand to SEQ ID NO: 2437086
cagacacucagaauccuug

SEQ ID NO: 2437088 - RNA, 19 nt, Artificial Sequence
  Description of Artificial Sequence: Synthetic oligonucleotide
  Sense strand starting at position 1475 of SEQ ID NO: 1886941
aaggauucugagugucuga

SEQ ID NO: 2437089 - RNA, 19 nt, Artificial Sequence
  Description of Artificial Sequence: Synthetic oligonucleotide
  Antisense strand to SEQ ID NO: 2437088
ucagacacucagaauccuu

SEQ ID NO: 2437090 - RNA, 19 nt, Artificial Sequence
  Description of Artificial Sequence: Synthetic oligonucleotide
  Sense strand starting at position 1478 of SEQ ID NO: 1886941
gauucugagugucugacuu

SEQ ID NO: 2437091 - RNA, 19 nt, Artificial Sequence
  Description of Artificial Sequence: Synthetic oligonucleotide
  Antisense strand to SEQ ID NO: 2437090
aagucagacacucagaauc

SEQ ID NO: 2437092 - RNA, 19 nt, Artificial Sequence
  Description of Artificial Sequence: Synthetic oligonucleotide
  Sense strand starting at position 1490 of SEQ ID NO: 1886941
cugacuuucucacuucgga

SEQ ID NO: 2437093 - RNA, 19 nt, Artificial Sequence
  Description of Artificial Sequence: Synthetic oligonucleotide
  Antisense strand to SEQ ID NO: 2437092
uccgaagugagaaagucag

SEQ ID NO: 2437094 - RNA, 19 nt, Artificial Sequence
  Description of Artificial Sequence: Synthetic oligonucleotide
  Sense strand starting at position 1523 of SEQ ID NO: 1886941
acauuaagcuguccuuguu

SEQ ID NO: 2437095 - RNA, 19 nt, Artificial Sequence
  Description of Artificial Sequence: Synthetic oligonucleotide
  Antisense strand to SEQ ID NO: 2437094
aacaaggacagcuuaaugu

SEQ ID NO: 2437096 - RNA, 19 nt, Artificial Sequence
  Description of Artificial Sequence: Synthetic oligonucleotide
  Sense strand starting at position 1569 of SEQ ID NO: 1886941
gggcauugcaaauagaagu

SEQ ID NO: 2437097 - RNA, 19 nt, Artificial Sequence
  Description of Artificial Sequence: Synthetic oligonucleotide
  Antisense strand to SEQ ID NO: 2437096
acuucuauuugcaaugccc

SEQ ID NO: 2437098 - RNA, 19 nt, Artificial Sequence
  Description of Artificial Sequence: Synthetic oligonucleotide
  Sense strand starting at position 1991 of SEQ ID NO: 1886941
gcgguaaccuugguaacca

SEQ ID NO: 2437099 - RNA, 19 nt, Artificial Sequence
  Description of Artificial Sequence: Synthetic oligonucleotide
  Antisense strand to SEQ ID NO: 2437098
ugguuaccaagguuaccgc

SEQ ID NO: 2437100 - RNA, 19 nt, Artificial Sequence
  Description of Artificial Sequence: Synthetic oligonucleotide
  Sense strand starting at position 2623 of SEQ ID NO: 1886941
auugauuauuccucgccca

SEQ ID NO: 2437101 - RNA, 19 nt, Artificial Sequence
  Description of Artificial Sequence: Synthetic oligonucleotide
  Antisense strand to SEQ ID NO: 2437100
ugggcgaggaauaaucaau

SEQ ID NO: 2437102 - RNA, 19 nt, Artificial Sequence
  Description of Artificial Sequence: Synthetic oligonucleotide
  Sense strand starting at position 2641 of SEQ ID NO: 1886941
acaucugugccagguauau

SEQ ID NO: 2437103 - RNA, 19 nt, Artificial Sequence
  Description of Artificial Sequence: Synthetic oligonucleotide
  Antisense strand to SEQ ID NO: 2437102
auauaccuggcacagaugu

SEQ ID NO: 2437104 - RNA, 19 nt, Artificial Sequence
  Description of Artificial Sequence: Synthetic oligonucleotide
  Sense strand starting at position 2651 of SEQ ID NO: 1886941
cagguauauuuguauaugu

SEQ ID NO: 2437105 - RNA, 19 nt, Artificial Sequence
  Description of Artificial Sequence: Synthetic oligonucleotide
  Antisense strand to SEQ ID NO: 2437104
acauauacaaauauaccug

SEQ ID NO: 2437106 - RNA, 19 nt, Artificial Sequence
  Description of Artificial Sequence: Synthetic oligonucleotide
  Sense strand starting at position 2660 of SEQ ID NO: 1886941
uuguauauguaaccaaauc

SEQ ID NO: 2437107 - RNA, 19 nt, Artificial Sequence
  Description of Artificial Sequence: Synthetic oligonucleotide
  Antisense strand to SEQ ID NO: 2437106
gauuugguuacauauacaa

SEQ ID NO: 2437108 - RNA, 19 nt, Artificial Sequence
  Description of Artificial Sequence: Synthetic oligonucleotide
  Sense strand starting at position 2862 of SEQ ID NO: 1886941
uucuauugugaccaagcga

SEQ ID NO: 2437109 - RNA, 19 nt, Artificial Sequence
  Description of Artificial Sequence: Synthetic oligonucleotide
  Antisense strand to SEQ ID NO: 2437108
ucgcuuggucacaauagaa

SEQ ID NO: 2437110 - RNA, 19 nt, Artificial Sequence
  Description of Artificial Sequence: Synthetic oligonucleotide
  Sense strand starting at position 2911 of SEQ ID NO: 1886941
auuaaagaguccuuauuag

SEQ ID NO: 2437111 - RNA, 19 nt, Artificial Sequence
  Description of Artificial Sequence: Synthetic oligonucleotide
  Antisense strand to SEQ ID NO: 2437110
cuaauaaggacucuuuaau

SEQ ID NO: 2437112 - RNA, 19 nt, Artificial Sequence
  Description of Artificial Sequence: Synthetic oligonucleotide
  Sense strand starting at position 3267 of SEQ ID NO: 1886941
cuagcuaugccuuaaggga

SEQ ID NO: 2437113 - RNA, 19 nt, Artificial Sequence
  Description of Artificial Sequence: Synthetic oligonucleotide
  Antisense strand to SEQ ID NO: 2437112
ucccuuaaggcauagcuag

SEQ ID NO: 2437114 - RNA, 19 nt, Artificial Sequence
  Description of Artificial Sequence: Synthetic oligonucleotide
  Sense strand starting at position 3481 of SEQ ID NO: 1886941
augugugagucuuccucua

SEQ ID NO: 2437115 - RNA, 19 nt, Artificial Sequence
  Description of Artificial Sequence: Synthetic oligonucleotide
  Antisense strand to SEQ ID NO: 2437114
uagaggaagacucacacau

SEQ ID NO: 2437116 - RNA, 19 nt, Artificial Sequence
  Description of Artificial Sequence: Synthetic oligonucleotide
  Sense strand starting at position 3486 of SEQ ID NO: 1886941
ugagucuuccucuaggcau

SEQ ID NO: 2437117 - RNA, 19 nt, Artificial Sequence
  Description of Artificial Sequence: Synthetic oligonucleotide
  Antisense strand to SEQ ID NO: 2437116
augccuagaggaagacuca

SEQ ID NO: 2437118 - RNA, 19 nt, Artificial Sequence
  Description of Artificial Sequence: Synthetic oligonucleotide
  Sense strand starting at position 3489 of SEQ ID NO: 1886941
gucuuccucuaggcauaga

SEQ ID NO: 2437119 - RNA, 19 nt, Artificial Sequence
  Description of Artificial Sequence: Synthetic oligonucleotide
  Antisense strand to SEQ ID NO: 2437118
ucuaugccuagaggaagac

SEQ ID NO: 2437120 - RNA, 19 nt, Artificial Sequence
  Description of Artificial Sequence: Synthetic oligonucleotide
  Sense strand starting at position 3499 of SEQ ID NO: 1886941
aggcauagauucuuuguuu

SEQ ID NO: 2437121 - RNA, 19 nt, Artificial Sequence
  Description of Artificial Sequence: Synthetic oligonucleotide
  Antisense strand to SEQ ID NO: 2437120
aaacaaagaaucuaugccu

SEQ ID NO: 2437122 - RNA, 19 nt, Artificial Sequence
  Description of Artificial Sequence: Synthetic oligonucleotide
  Sense strand starting at position 3500 of SEQ ID NO: 1886941
ggcauagauucuuuguuua

SEQ ID NO: 2437123 - RNA, 19 nt, Artificial Sequence
  Description of Artificial Sequence: Synthetic oligonucleotide
  Antisense strand to SEQ ID NO: 2437122
uaaacaaagaaucuaugcc

SEQ ID NO: 2437124 - RNA, 19 nt, Artificial Sequence
  Description of Artificial Sequence: Synthetic oligonucleotide
  Sense strand starting at position 3503 of SEQ ID NO: 1886941
auagauucuuuguuuagcu

SEQ ID NO: 2437125 - RNA, 19 nt, Artificial Sequence
  Description of Artificial Sequence: Synthetic oligonucleotide
  Antisense strand to SEQ ID NO: 2437124
agcuaaacaaagaaucuau

SEQ ID NO: 2437126 - RNA, 19 nt, Artificial Sequence
  Description of Artificial Sequence: Synthetic oligonucleotide
  Sense strand starting at position 3592 of SEQ ID NO: 1886941
augaaauaguggcauuucu

SEQ ID NO: 2437127 - RNA, 19 nt, Artificial Sequence
  Description of Artificial Sequence: Synthetic oligonucleotide
  Antisense strand to SEQ ID NO: 2437126
agaaaugccacuauuucau

SEQ ID NO: 2437128 - RNA, 19 nt, Artificial Sequence
  Description of Artificial Sequence: Synthetic oligonucleotide
  Sense strand starting at position 3687 of SEQ ID NO: 1886941
uugaauuaauggccaacuu

SEQ ID NO: 2437129 - RNA, 19 nt, Artificial Sequence
  Description of Artificial Sequence: Synthetic oligonucleotide
  Antisense strand to SEQ ID NO: 2437128
aaguuggccauuaauucaa

SEQ ID NO: 2437130 - RNA, 19 nt, Artificial Sequence
  Description of Artificial Sequence: Synthetic oligonucleotide
  Sense strand starting at position 3730 of SEQ ID NO: 1886941
ucgcucugucaacagacua

SEQ ID NO: 2437131 - RNA, 19 nt, Artificial Sequence
  Description of Artificial Sequence: Synthetic oligonucleotide
  Antisense strand to SEQ ID NO: 2437130
uagucuguugacagagcga

SEQ ID NO: 2437132 - RNA, 19 nt, Artificial Sequence
  Description of Artificial Sequence: Synthetic oligonucleotide
  Sense strand starting at position 252 of SEQ ID NO: 1886942
ccucuuuagccgugaagaa

SEQ ID NO: 2437133 - RNA, 19 nt, Artificial Sequence
  Description of Artificial Sequence: Synthetic oligonucleotide
  Antisense strand to SEQ ID NO: 2437132
uucuucacggcuaaagagg

SEQ ID NO: 2437134 - RNA, 19 nt, Artificial Sequence
  Description of Artificial Sequence: Synthetic oligonucleotide
  Sense strand starting at position 253 of SEQ ID NO: 1886942
cucuuuagccgugaagaag

SEQ ID NO: 2437135 - RNA, 19 nt, Artificial Sequence
  Description of Artificial Sequence: Synthetic oligonucleotide
  Antisense strand to SEQ ID NO: 2437134
cuucuucacggcuaaagag

SEQ ID NO: 2437136 - RNA, 19 nt, Artificial Sequence
  Description of Artificial Sequence: Synthetic oligonucleotide
  Sense strand starting at position 393 of SEQ ID NO: 1886942
ggguguuuccuauguucca

SEQ ID NO: 2437137 - RNA, 19 nt, Artificial Sequence
  Description of Artificial Sequence: Synthetic oligonucleotide
  Antisense strand to SEQ ID NO: 2437136
uggaacauaggaaacaccc

SEQ ID NO: 2437138 - RNA, 19 nt, Artificial Sequence
  Description of Artificial Sequence: Synthetic oligonucleotide
  Sense strand starting at position 394 of SEQ ID NO: 1886942
gguguuuccuauguuccaa

SEQ ID NO: 2437139 - RNA, 19 nt, Artificial Sequence
  Description of Artificial Sequence: Synthetic oligonucleotide
  Antisense strand to SEQ ID NO: 2437138
uuggaacauaggaaacacc

SEQ ID NO: 2437140 - RNA, 19 nt, Artificial Sequence
  Description of Artificial Sequence: Synthetic oligonucleotide
  Sense strand starting at position 429 of SEQ ID NO: 1886942
uuacuuguaucgucaucua

SEQ ID NO: 2437141 - RNA, 19 nt, Artificial Sequence
  Description of Artificial Sequence: Synthetic oligonucleotide
  Antisense strand to SEQ ID NO: 2437140
uagaugacgauacaaguaa

SEQ ID NO: 2437142 - RNA, 19 nt, Artificial Sequence
  Description of Artificial Sequence: Synthetic oligonucleotide
  Sense strand starting at position 503 of SEQ ID NO: 1886942
gcaauagggaacuguaugu

SEQ ID NO: 2437143 - RNA, 19 nt, Artificial Sequence
  Description of Artificial Sequence: Synthetic oligonucleotide
  Antisense strand to SEQ ID NO: 2437142
acauacaguucccuauugc

SEQ ID NO: 2437144 - RNA, 19 nt, Artificial Sequence
  Description of Artificial Sequence: Synthetic oligonucleotide
  Sense strand starting at position 645 of SEQ ID NO: 1886942
ugcccagccugaucuuuaa

SEQ ID NO: 2437145 - RNA, 19 nt, Artificial Sequence
  Description of Artificial Sequence: Synthetic oligonucleotide
  Antisense strand to SEQ ID NO: 2437144
uuaaagaucaggcugggca

SEQ ID NO: 2437146 - RNA, 19 nt, Artificial Sequence
  Description of Artificial Sequence: Synthetic oligonucleotide
  Sense strand starting at position 743 of SEQ ID NO: 1886942
gguuuagcaucaguagguu

SEQ ID NO: 2437147 - RNA, 19 nt, Artificial Sequence
  Description of Artificial Sequence: Synthetic oligonucleotide
  Antisense strand to SEQ ID NO: 2437146
aaccuacugaugcuaaacc

SEQ ID NO: 2437148 - RNA, 19 nt, Artificial Sequence
  Description of Artificial Sequence: Synthetic oligonucleotide
  Sense strand starting at position 822 of SEQ ID NO: 1886942
cccugaguuugaguuucuu

SEQ ID NO: 2437149 - RNA, 19 nt, Artificial Sequence
  Description of Artificial Sequence: Synthetic oligonucleotide
  Antisense strand to SEQ ID NO: 2437148
aagaaacucaaacucaggg

SEQ ID NO: 2437150 - RNA, 19 nt, Artificial Sequence
  Description of Artificial Sequence: Synthetic oligonucleotide
  Sense strand starting at position 826 of SEQ ID NO: 1886942
gaguuugaguuucuuaauc

SEQ ID NO: 2437151 - RNA, 19 nt, Artificial Sequence
  Description of Artificial Sequence: Synthetic oligonucleotide
  Antisense strand to SEQ ID NO: 2437150
gauuaagaaacucaaacuc

SEQ ID NO: 2437152 - RNA, 19 nt, Artificial Sequence
  Description of Artificial Sequence: Synthetic oligonucleotide
  Sense strand starting at position 863 of SEQ ID NO: 1886942
ggaagauuaguguggcaau

SEQ ID NO: 2437153 - RNA, 19 nt, Artificial Sequence
  Description of Artificial Sequence: Synthetic oligonucleotide
  Antisense strand to SEQ ID NO: 2437152
auugccacacuaaucuucc

SEQ ID NO: 2437154 - RNA, 19 nt, Artificial Sequence
  Description of Artificial Sequence: Synthetic oligonucleotide
  Sense strand starting at position 1045 of SEQ ID NO: 1886942
acagccauugcugaauaaa

SEQ ID NO: 2437155 - RNA, 19 nt, Artificial Sequence
  Description of Artificial Sequence: Synthetic oligonucleotide
  Antisense strand to SEQ ID NO: 2437154
uuuauucagcaauggcugu

SEQ ID NO: 2437156 - RNA, 19 nt, Artificial Sequence
  Description of Artificial Sequence: Synthetic oligonucleotide
  Sense strand starting at position 1175 of SEQ ID NO: 1886942
gugguccuacgccaaauaa

SEQ ID NO: 2437157 - RNA, 19 nt, Artificial Sequence
  Description of Artificial Sequence: Synthetic oligonucleotide
  Antisense strand to SEQ ID NO: 2437156
uuauuuggcguaggaccac

SEQ ID NO: 2437158 - RNA, 19 nt, Artificial Sequence
  Description of Artificial Sequence: Synthetic oligonucleotide
  Sense strand starting at position 1185 of SEQ ID NO: 1886942
gccaaauaagcgcaugaaa

SEQ ID NO: 2437159 - RNA, 19 nt, Artificial Sequence
  Description of Artificial Sequence: Synthetic oligonucleotide
  Antisense strand to SEQ ID NO: 2437158
uuucaugcgcuuauuuggc

SEQ ID NO: 2437160 - RNA, 19 nt, Artificial Sequence
  Description of Artificial Sequence: Synthetic oligonucleotide
  Sense strand starting at position 1245 of SEQ ID NO: 1886942
cccaaacgcuucuucgaga

SEQ ID NO: 2437161 - RNA, 19 nt, Artificial Sequence
  Description of Artificial Sequence: Synthetic oligonucleotide
  Antisense strand to SEQ ID NO: 2437160
ucucgaagaagcguuuggg

SEQ ID NO: 2437162 - RNA, 19 nt, Artificial Sequence
  Description of Artificial Sequence: Synthetic oligonucleotide
  Sense strand starting at position 1246 of SEQ ID NO: 1886942
ccaaacgcuucuucgagaa

SEQ ID NO: 2437163 - RNA, 19 nt, Artificial Sequence
  Description of Artificial Sequence: Synthetic oligonucleotide
  Antisense strand to SEQ ID NO: 2437162
uucucgaagaagcguuugg

SEQ ID NO: 2437164 - RNA, 19 nt, Artificial Sequence
  Description of Artificial Sequence: Synthetic oligonucleotide
  Sense strand starting at position 1250 of SEQ ID NO: 1886942
acgcuucuucgagaaggau

SEQ ID NO: 2437165 - RNA, 19 nt, Artificial Sequence
  Description of Artificial Sequence: Synthetic oligonucleotide
  Antisense strand to SEQ ID NO: 2437164
auccuucucgaagaagcgu

SEQ ID NO: 2437166 - RNA, 19 nt, Artificial Sequence
  Description of Artificial Sequence: Synthetic oligonucleotide
  Sense strand starting at position 1256 of SEQ ID NO: 1886942
cuucgagaaggaugcaauu

SEQ ID NO: 2437167 - RNA, 19 nt, Artificial Sequence
  Description of Artificial Sequence: Synthetic oligonucleotide
  Antisense strand to SEQ ID NO: 2437166
aauugcauccuucucgaag

SEQ ID NO: 2437168 - RNA, 19 nt, Artificial Sequence
  Description of Artificial Sequence: Synthetic oligonucleotide
  Sense strand starting at position 2138 of SEQ ID NO: 1886942
cacgaucccugaguuuaga

SEQ ID NO: 2437169 - RNA, 19 nt, Artificial Sequence
  Description of Artificial Sequence: Synthetic oligonucleotide
  Antisense strand to SEQ ID NO: 2437168
ucuaaacucagggaucgug

SEQ ID NO: 2437170 - RNA, 19 nt, Artificial Sequence
  Description of Artificial Sequence: Synthetic oligonucleotide
  Sense strand starting at position 2249 of SEQ ID NO: 1886942
ucacuccugcuggagauua

SEQ ID NO: 2437171 - RNA, 19 nt, Artificial Sequence
  Description of Artificial Sequence: Synthetic oligonucleotide
  Antisense strand to SEQ ID NO: 2437170
uaaucuccagcaggaguga

SEQ ID NO: 2437172 - RNA, 19 nt, Artificial Sequence
  Description of Artificial Sequence: Synthetic oligonucleotide
  Sense strand starting at position 2297 of SEQ ID NO: 1886942
gcuugugggaaauaaccau

SEQ ID NO: 2437173 - RNA, 19 nt, Artificial Sequence
  Description of Artificial Sequence: Synthetic oligonucleotide
  Antisense strand to SEQ ID NO: 2437172
augguuauuucccacaagc

SEQ ID NO: 2437174 - RNA, 19 nt, Artificial Sequence
  Description of Artificial Sequence: Synthetic oligonucleotide
  Sense strand starting at position 2455 of SEQ ID NO: 1886942
gggaauuguguacgugaac

SEQ ID NO: 2437175 - RNA, 19 nt, Artificial Sequence
  Description of Artificial Sequence: Synthetic oligonucleotide
  Antisense strand to SEQ ID NO: 2437174
guucacguacacaauuccc

SEQ ID NO: 2437176 - RNA, 19 nt, Artificial Sequence
  Description of Artificial Sequence: Synthetic oligonucleotide
  Sense strand starting at position 2456 of SEQ ID NO: 1886942
ggaauuguguacgugaacu

SEQ ID NO: 2437177 - RNA, 19 nt, Artificial Sequence
  Description of Artificial Sequence: Synthetic oligonucleotide
  Antisense strand to SEQ ID NO: 2437176
aguucacguacacaauucc

SEQ ID NO: 2437178 - RNA, 19 nt, Artificial Sequence
  Description of Artificial Sequence: Synthetic oligonucleotide
  Sense strand starting at position 2469 of SEQ ID NO: 1886942
ugaacuuguggaggucaga

SEQ ID NO: 2437179 - RNA, 19 nt, Artificial Sequence
  Description of Artificial Sequence: Synthetic oligonucleotide
  Antisense strand to SEQ ID NO: 2437178
ucugaccuccacaaguuca

SEQ ID NO: 2437180 - RNA, 19 nt, Artificial Sequence
  Description of Artificial Sequence: Synthetic oligonucleotide
  Sense strand starting at position 2564 of SEQ ID NO: 1886942
ccaaauuggagcugauagu

SEQ ID NO: 2437181 - RNA, 19 nt, Artificial Sequence
  Description of Artificial Sequence: Synthetic oligonucleotide
  Antisense strand to SEQ ID NO: 2437180
acuaucagcuccaauuugg

SEQ ID NO: 2437182 - RNA, 19 nt, Artificial Sequence
  Description of Artificial Sequence: Synthetic oligonucleotide
  Sense strand starting at position 2604 of SEQ ID NO: 1886942
uaaucagcuacgugguaga

SEQ ID NO: 2437183 - RNA, 19 nt, Artificial Sequence
  Description of Artificial Sequence: Synthetic oligonucleotide
  Antisense strand to SEQ ID NO: 2437182
ucuaccacguagcugauua

SEQ ID NO: 2437184 - RNA, 19 nt, Artificial Sequence
  Description of Artificial Sequence: Synthetic oligonucleotide
  Sense strand starting at position 2626 of SEQ ID NO: 1886942
guguaaucaccugaugggu

SEQ ID NO: 2437185 - RNA, 19 nt, Artificial Sequence
  Description of Artificial Sequence: Synthetic oligonucleotide
  Antisense strand to SEQ ID NO: 2437184
acccaucaggugauuacac

SEQ ID NO: 2437186 - RNA, 19 nt, Artificial Sequence
  Description of Artificial Sequence: Synthetic oligonucleotide
  Sense strand starting at position 2670 of SEQ ID NO: 1886942
ccgauuuacugagacagca

SEQ ID NO: 2437187 - RNA, 19 nt, Artificial Sequence
  Description of Artificial Sequence: Synthetic oligonucleotide
  Antisense strand to SEQ ID NO: 2437186
ugcugucucaguaaaucgg

SEQ ID NO: 2437188 - RNA, 19 nt, Artificial Sequence
  Description of Artificial Sequence: Synthetic oligonucleotide
  Sense strand starting at position 2708 of SEQ ID NO: 1886942
guuuaauaagcacagaacu

SEQ ID NO: 2437189 - RNA, 19 nt, Artificial Sequence
  Description of Artificial Sequence: Synthetic oligonucleotide
  Antisense strand to SEQ ID NO: 2437188
aguucugugcuuauuaaac

SEQ ID NO: 2437190 - RNA, 19 nt, Artificial Sequence
  Description of Artificial Sequence: Synthetic oligonucleotide
  Sense strand starting at position 2831 of SEQ ID NO: 1886942
gugggaaaugcugauuggu

SEQ ID NO: 2437191 - RNA, 19 nt, Artificial Sequence
  Description of Artificial Sequence: Synthetic oligonucleotide
  Antisense strand to SEQ ID NO: 2437190
accaaucagcauuucccac

SEQ ID NO: 2437192 - RNA, 19 nt, Artificial Sequence
  Description of Artificial Sequence: Synthetic oligonucleotide
  Sense strand starting at position 2845 of SEQ ID NO: 1886942
uugguugggucaaggauga

SEQ ID NO: 2437193 - RNA, 19 nt, Artificial Sequence
  Description of Artificial Sequence: Synthetic oligonucleotide
  Antisense strand to SEQ ID NO: 2437192
ucauccuugacccaaccaa

SEQ ID NO: 2437194 - RNA, 19 nt, Artificial Sequence
  Description of Artificial Sequence: Synthetic oligonucleotide
  Sense strand starting at position 2859 of SEQ ID NO: 1886942
gaugaaaucauaggguguc

SEQ ID NO: 2437195 - RNA, 19 nt, Artificial Sequence
  Description of Artificial Sequence: Synthetic oligonucleotide
  Antisense strand to SEQ ID NO: 2437194
gacacccuaugauuucauc

SEQ ID NO: 2437196 - RNA, 19 nt, Artificial Sequence
  Description of Artificial Sequence: Synthetic oligonucleotide
  Sense strand starting at position 2886 of SEQ ID NO: 1886942
uguucuugugcugagugaa

SEQ ID NO: 2437197 - RNA, 19 nt, Artificial Sequence
  Description of Artificial Sequence: Synthetic oligonucleotide
  Antisense strand to SEQ ID NO: 2437196
uucacucagcacaagaaca

SEQ ID NO: 2437198 - RNA, 19 nt, Artificial Sequence
  Description of Artificial Sequence: Synthetic oligonucleotide
  Sense strand starting at position 2889 of SEQ ID NO: 1886942
ucuugugcugagugaauuc

SEQ ID NO: 2437199 - RNA, 19 nt, Artificial Sequence
  Description of Artificial Sequence: Synthetic oligonucleotide
  Antisense strand to SEQ ID NO: 2437198
gaauucacucagcacaaga

SEQ ID NO: 2437200 - RNA, 19 nt, Artificial Sequence
  Description of Artificial Sequence: Synthetic oligonucleotide
  Sense strand starting at position 3330 of SEQ ID NO: 1886942
guaauauugaaaggaguua

SEQ ID NO: 2437201 - RNA, 19 nt, Artificial Sequence
  Description of Artificial Sequence: Synthetic oligonucleotide
  Antisense strand to SEQ ID NO: 2437200
uaacuccuuucaauauuac

SEQ ID NO: 2437202 - RNA, 19 nt, Artificial Sequence
  Description of Artificial Sequence: Synthetic oligonucleotide
  Sense strand starting at position 3353 of SEQ ID NO: 1886942
gcuugccuuagguagauaa

SEQ ID NO: 2437203 - RNA, 19 nt, Artificial Sequence
  Description of Artificial Sequence: Synthetic oligonucleotide
  Antisense strand to SEQ ID NO: 2437202
uuaucuaccuaaggcaagc

SEQ ID NO: 2437204 - RNA, 19 nt, Artificial Sequence
  Description of Artificial Sequence: Synthetic oligonucleotide
  Sense strand starting at position 3355 of SEQ ID NO: 1886942
uugccuuagguagauaaca

SEQ ID NO: 2437205 - RNA, 19 nt, Artificial Sequence
  Description of Artificial Sequence: Synthetic oligonucleotide
  Antisense strand to SEQ ID NO: 2437204
uguuaucuaccuaaggcaa

SEQ ID NO: 2437206 - RNA, 19 nt, Artificial Sequence
  Description of Artificial Sequence: Synthetic oligonucleotide
  Sense strand starting at position 3538 of SEQ ID NO: 1886942
ucagguccauuuggauaaa

SEQ ID NO: 2437207 - RNA, 19 nt, Artificial Sequence
  Description of Artificial Sequence: Synthetic oligonucleotide
  Antisense strand to SEQ ID NO: 2437206
uuuauccaaauggaccuga

SEQ ID NO: 2437208 - RNA, 19 nt, Artificial Sequence
  Description of Artificial Sequence: Synthetic oligonucleotide
  Sense strand starting at position 3733 of SEQ ID NO: 1886942
aaguuuggccucugugaau

SEQ ID NO: 2437209 - RNA, 19 nt, Artificial Sequence
  Description of Artificial Sequence: Synthetic oligonucleotide
  Antisense strand to SEQ ID NO: 2437208
auucacagaggccaaacuu

SEQ ID NO: 2437210 - RNA, 19 nt, Artificial Sequence
  Description of Artificial Sequence: Synthetic oligonucleotide
  Sense strand starting at position 3854 of SEQ ID NO: 1886942
gugauugguccugggccaa

SEQ ID NO: 2437211 - RNA, 19 nt, Artificial Sequence
  Description of Artificial Sequence: Synthetic oligonucleotide
  Antisense strand to SEQ ID NO: 2437210
uuggcccaggaccaaucac

SEQ ID NO: 2437212 - RNA, 19 nt, Artificial Sequence
  Description of Artificial Sequence: Synthetic oligonucleotide
  Sense strand starting at position 328 of SEQ ID NO: 1886943
acaggagcuuuccucaaag

SEQ ID NO: 2437213 - RNA, 19 nt, Artificial Sequence
  Description of Artificial Sequence: Synthetic oligonucleotide
  Antisense strand to SEQ ID NO: 2437212
cuuugaggaaagcuccugu

SEQ ID NO: 2437214 - RNA, 19 nt, Artificial Sequence
  Description of Artificial Sequence: Synthetic oligonucleotide
  Sense strand starting at position 688 of SEQ ID NO: 1886943
ccaaauggccuauggauaa

SEQ ID NO: 2437215 - RNA, 19 nt, Artificial Sequence
  Description of Artificial Sequence: Synthetic oligonucleotide
  Antisense strand to SEQ ID NO: 2437214
uuauccauaggccauuugg

SEQ ID NO: 2437216 - RNA, 19 nt, Artificial Sequence
  Description of Artificial Sequence: Synthetic oligonucleotide
  Sense strand starting at position 1195 of SEQ ID NO: 1886943
uccaauguccugggaaaua

SEQ ID NO: 2437217 - RNA, 19 nt, Artificial Sequence
  Description of Artificial Sequence: Synthetic oligonucleotide
  Antisense strand to SEQ ID NO: 2437216
uauuucccaggacauugga

SEQ ID NO: 2437218 - RNA, 19 nt, Artificial Sequence
  Description of Artificial Sequence: Synthetic oligonucleotide
  Sense strand starting at position 1207 of SEQ ID NO: 1886943
ggaaauaagucucuaauug

SEQ ID NO: 2437219 - RNA, 19 nt, Artificial Sequence
  Description of Artificial Sequence: Synthetic oligonucleotide
  Antisense strand to SEQ ID NO: 2437218
caauuagagacuuauuucc

SEQ ID NO: 2437220 - RNA, 19 nt, Artificial Sequence
  Description of Artificial Sequence: Synthetic oligonucleotide
  Sense strand starting at position 1241 of SEQ ID NO: 1886943
cccugagcuguuuacaaca

SEQ ID NO: 2437221 - RNA, 19 nt, Artificial Sequence
  Description of Artificial Sequence: Synthetic oligonucleotide
  Antisense strand to SEQ ID NO: 2437220
uguuguaaacagcucaggg

SEQ ID NO: 2437222 - RNA, 19 nt, Artificial Sequence
  Description of Artificial Sequence: Synthetic oligonucleotide
  Sense strand starting at position 1386 of SEQ ID NO: 1886943
gagugucuuccacagugag

SEQ ID NO: 2437223 - RNA, 19 nt, Artificial Sequence
  Description of Artificial Sequence: Synthetic oligonucleotide
  Antisense strand to SEQ ID NO: 2437222
cucacuguggaagacacuc

SEQ ID NO: 2437224 - RNA, 19 nt, Artificial Sequence
  Description of Artificial Sequence: Synthetic oligonucleotide
  Sense strand starting at position 1405 of SEQ ID NO: 1886943
cuggaaaccuguucucaag

SEQ ID NO: 2437225 - RNA, 19 nt, Artificial Sequence
  Description of Artificial Sequence: Synthetic oligonucleotide
  Antisense strand to SEQ ID NO: 2437224
cuugagaacagguuuccag

SEQ ID NO: 2437226 - RNA, 19 nt, Artificial Sequence
  Description of Artificial Sequence: Synthetic oligonucleotide
  Sense strand starting at position 1414 of SEQ ID NO: 1886943
uguucucaagucuaaauau

SEQ ID NO: 2437227 - RNA, 19 nt, Artificial Sequence
  Description of Artificial Sequence: Synthetic oligonucleotide
  Antisense strand to SEQ ID NO: 2437226
auauuuagacuugagaaca

SEQ ID NO: 2437228 - RNA, 19 nt, Artificial Sequence
  Description of Artificial Sequence: Synthetic oligonucleotide
  Sense strand starting at position 1930 of SEQ ID NO: 1886943
agaagaccuggucagguuu

SEQ ID NO: 2437229 - RNA, 19 nt, Artificial Sequence
  Description of Artificial Sequence: Synthetic oligonucleotide
  Antisense strand to SEQ ID NO: 2437228
aaaccugaccaggucuucu

SEQ ID NO: 2437230 - RNA, 19 nt, Artificial Sequence
  Description of Artificial Sequence: Synthetic oligonucleotide
  Sense strand starting at position 1966 of SEQ ID NO: 1886943
gggccuacccaucaagagu

SEQ ID NO: 2437231 - RNA, 19 nt, Artificial Sequence
  Description of Artificial Sequence: Synthetic oligonucleotide
  Antisense strand to SEQ ID NO: 2437230
acucuugauggguaggccc

SEQ ID NO: 2437232 - RNA, 19 nt, Artificial Sequence
  Description of Artificial Sequence: Synthetic oligonucleotide
  Sense strand starting at position 2064 of SEQ ID NO: 1886943
uguaaauggcaucauugga

SEQ ID NO: 2437233 - RNA, 19 nt, Artificial Sequence
  Description of Artificial Sequence: Synthetic oligonucleotide
  Antisense strand to SEQ ID NO: 2437232
uccaaugaugccauuuaca

SEQ ID NO: 2437234 - RNA, 19 nt, Artificial Sequence
  Description of Artificial Sequence: Synthetic oligonucleotide
  Sense strand starting at position 2095 of SEQ ID NO: 1886943
ccauuuguuuguguacagu

SEQ ID NO: 2437235 - RNA, 19 nt, Artificial Sequence
  Description of Artificial Sequence: Synthetic oligonucleotide
  Antisense strand to SEQ ID NO: 2437234
acuguacacaaacaaaugg

SEQ ID NO: 2437236 - RNA, 19 nt, Artificial Sequence
  Description of Artificial Sequence: Synthetic oligonucleotide
  Sense strand starting at position 2266 of SEQ ID NO: 1886943
agagucauauggucaucca

SEQ ID NO: 2437237 - RNA, 19 nt, Artificial Sequence
  Description of Artificial Sequence: Synthetic oligonucleotide
  Antisense strand to SEQ ID NO: 2437236
uggaugaccauaugacucu

SEQ ID NO: 2437238 - RNA, 19 nt, Artificial Sequence
  Description of Artificial Sequence: Synthetic oligonucleotide
  Sense strand starting at position 2267 of SEQ ID NO: 1886943
gagucauauggucauccaa

SEQ ID NO: 2437239 - RNA, 19 nt, Artificial Sequence
  Description of Artificial Sequence: Synthetic oligonucleotide
  Antisense strand to SEQ ID NO: 2437238
uuggaugaccauaugacuc

SEQ ID NO: 2437240 - RNA, 19 nt, Artificial Sequence
  Description of Artificial Sequence: Synthetic oligonucleotide
  Sense strand starting at position 2292 of SEQ ID NO: 1886943
ucugucaaucacuauugua

SEQ ID NO: 2437241 - RNA, 19 nt, Artificial Sequence
  Description of Artificial Sequence: Synthetic oligonucleotide
  Antisense strand to SEQ ID NO: 2437240
uacaauagugauugacaga

SEQ ID NO: 2437242 - RNA, 19 nt, Artificial Sequence
  Description of Artificial Sequence: Synthetic oligonucleotide
  Sense strand starting at position 2317 of SEQ ID NO: 1886943
ccauuuauuuaaggacagu

SEQ ID NO: 2437243 - RNA, 19 nt, Artificial Sequence
  Description of Artificial Sequence: Synthetic oligonucleotide
  Antisense strand to SEQ ID NO: 2437242
acuguccuuaaauaaaugg

SEQ ID NO: 2437244 - RNA, 19 nt, Artificial Sequence
  Description of Artificial Sequence: Synthetic oligonucleotide
  Sense strand starting at position 2427 of SEQ ID NO: 1886943
aagugaugguagccaaaca
